United States Patent Application Publication US 2014/0004565 A1 - sequence listing, part 12

SEQ ID NO: 168979 - RNA, 19 nt, Artificial Sequence
  Description of Artificial Sequence: Synthetic oligonucleotide
uggaagaaucaacuucauu

SEQ ID NO: 168980 - RNA, 19 nt, Artificial Sequence
  Description of Artificial Sequence: Synthetic oligonucleotide
ccugaauccugcaaauggc

SEQ ID NO: 168981 - RNA, 19 nt, Artificial Sequence
  Description of Artificial Sequence: Synthetic oligonucleotide
gcuucgaaaauucucucca

SEQ ID NO: 168982 - RNA, 19 nt, Artificial Sequence
  Description of Artificial Sequence: Synthetic oligonucleotide
uuaucggugagguguugau

SEQ ID NO: 168983 - RNA, 19 nt, Artificial Sequence
  Description of Artificial Sequence: Synthetic oligonucleotide
uuuaggacuucaguaugua

SEQ ID NO: 168984 - RNA, 19 nt, Artificial Sequence
  Description of Artificial Sequence: Synthetic oligonucleotide
ucgagugucuauucccaaa

SEQ ID NO: 168985 - RNA, 19 nt, Artificial Sequence
  Description of Artificial Sequence: Synthetic oligonucleotide
agccuaaaccauagcaauc

SEQ ID NO: 168986 - RNA, 19 nt, Artificial Sequence
  Description of Artificial Sequence: Synthetic oligonucleotide
aguguggcugggaacauca

SEQ ID NO: 168987 - RNA, 19 nt, Artificial Sequence
  Description of Artificial Sequence: Synthetic oligonucleotide
uaaccuuguuagaggcucu

SEQ ID NO: 168988 - RNA, 19 nt, Artificial Sequence
  Description of Artificial Sequence: Synthetic oligonucleotide
cugaagugccugaauccug

SEQ ID NO: 168989 - RNA, 19 nt, Artificial Sequence
  Description of Artificial Sequence: Synthetic oligonucleotide
caaguacagaaggaaaaca

SEQ ID NO: 168990 - RNA, 19 nt, Artificial Sequence
  Description of Artificial Sequence: Synthetic oligonucleotide
guauaccuuucuagugugg

SEQ ID NO: 168991 - RNA, 19 nt, Artificial Sequence
  Description of Artificial Sequence: Synthetic oligonucleotide
accgguugaguaaagcugu

SEQ ID NO: 168992 - RNA, 19 nt, Artificial Sequence
  Description of Artificial Sequence: Synthetic oligonucleotide
guauacaccccagcaacac

SEQ ID NO: 168993 - RNA, 19 nt, Artificial Sequence
  Description of Artificial Sequence: Synthetic oligonucleotide
cuuggaaagcacuaccgcu

SEQ ID NO: 168994 - RNA, 19 nt, Artificial Sequence
  Description of Artificial Sequence: Synthetic oligonucleotide
uaccuuucuaguguggcuu

SEQ ID NO: 168995 - RNA, 19 nt, Artificial Sequence
  Description of Artificial Sequence: Synthetic oligonucleotide
uggucgaagugcuugucuu

SEQ ID NO: 168996 - RNA, 19 nt, Artificial Sequence
  Description of Artificial Sequence: Synthetic oligonucleotide
uggcaagaaacagcauuug

SEQ ID NO: 168997 - RNA, 19 nt, Artificial Sequence
  Description of Artificial Sequence: Synthetic oligonucleotide
ucacuuagguguuccucuc

SEQ ID NO: 168998 - RNA, 19 nt, Artificial Sequence
  Description of Artificial Sequence: Synthetic oligonucleotide
ggucacacagcaauaugcc

SEQ ID NO: 168999 - RNA, 19 nt, Artificial Sequence
  Description of Artificial Sequence: Synthetic oligonucleotide
acuuagguguuccucucuu

SEQ ID NO: 169000 - RNA, 19 nt, Artificial Sequence
  Description of Artificial Sequence: Synthetic oligonucleotide
uuccguccauacauccagc

SEQ ID NO: 169001 - RNA, 19 nt, Artificial Sequence
  Description of Artificial Sequence: Synthetic oligonucleotide
aggguuaguaaggccacug

SEQ ID NO: 169002 - RNA, 19 nt, Artificial Sequence
  Description of Artificial Sequence: Synthetic oligonucleotide
aaacuaucagaggucuguu

SEQ ID NO: 169003 - RNA, 19 nt, Artificial Sequence
  Description of Artificial Sequence: Synthetic oligonucleotide
uuuauccucaaagcuucua

SEQ ID NO: 169004 - RNA, 19 nt, Artificial Sequence
  Description of Artificial Sequence: Synthetic oligonucleotide
uuaagucaggaaggcuggc

SEQ ID NO: 169005 - RNA, 19 nt, Artificial Sequence
  Description of Artificial Sequence: Synthetic oligonucleotide
ugcagccgaaucauccaaa

SEQ ID NO: 169006 - RNA, 19 nt, Artificial Sequence
  Description of Artificial Sequence: Synthetic oligonucleotide
guuaguaaggccacugcua

SEQ ID NO: 169007 - RNA, 19 nt, Artificial Sequence
  Description of Artificial Sequence: Synthetic oligonucleotide
gguucacuaaaauguagaa

SEQ ID NO: 169008 - RNA, 19 nt, Artificial Sequence
  Description of Artificial Sequence: Synthetic oligonucleotide
ccugcaaauggccaccagc

SEQ ID NO: 169009 - RNA, 19 nt, Artificial Sequence
  Description of Artificial Sequence: Synthetic oligonucleotide
guaagcuaaaaggaaauuu

SEQ ID NO: 169010 - RNA, 19 nt, Artificial Sequence
  Description of Artificial Sequence: Synthetic oligonucleotide
accaucuaaaggguuagua

SEQ ID NO: 169011 - RNA, 19 nt, Artificial Sequence
  Description of Artificial Sequence: Synthetic oligonucleotide
cauugaaucuugaguacua

SEQ ID NO: 169012 - RNA, 19 nt, Artificial Sequence
  Description of Artificial Sequence: Synthetic oligonucleotide
ugacacaaaccaucacaua

SEQ ID NO: 169013 - RNA, 19 nt, Artificial Sequence
  Description of Artificial Sequence: Synthetic oligonucleotide
guaggcucuaacauaccca

SEQ ID NO: 169014 - RNA, 19 nt, Artificial Sequence
  Description of Artificial Sequence: Synthetic oligonucleotide
gaaagcacuaccgcugucu

SEQ ID NO: 169015 - RNA, 19 nt, Artificial Sequence
  Description of Artificial Sequence: Synthetic oligonucleotide
gacugaauucuugaauuua

SEQ ID NO: 169016 - RNA, 19 nt, Artificial Sequence
  Description of Artificial Sequence: Synthetic oligonucleotide
auugacccugcugauucug

SEQ ID NO: 169017 - RNA, 19 nt, Artificial Sequence
  Description of Artificial Sequence: Synthetic oligonucleotide
caggcuucgaaaauucucu

SEQ ID NO: 169018 - RNA, 19 nt, Artificial Sequence
  Description of Artificial Sequence: Synthetic oligonucleotide
augguaugauagaacagaa

SEQ ID NO: 169019 - RNA, 19 nt, Artificial Sequence
  Description of Artificial Sequence: Synthetic oligonucleotide
agcuuagcaguuguuaauu

SEQ ID NO: 169020 - RNA, 19 nt, Artificial Sequence
  Description of Artificial Sequence: Synthetic oligonucleotide
uucgagugucuauucccaa

SEQ ID NO: 169021 - RNA, 19 nt, Artificial Sequence
  Description of Artificial Sequence: Synthetic oligonucleotide
ugguaggcucuaacauacc

SEQ ID NO: 169022 - RNA, 19 nt, Artificial Sequence
  Description of Artificial Sequence: Synthetic oligonucleotide
caccgcuuucagcuaaggc

SEQ ID NO: 169023 - RNA, 19 nt, Artificial Sequence
  Description of Artificial Sequence: Synthetic oligonucleotide
agcuucgcaaaagcgucag

SEQ ID NO: 169024 - RNA, 19 nt, Artificial Sequence
  Description of Artificial Sequence: Synthetic oligonucleotide
gaaggacaccaccaguaua

SEQ ID NO: 169025 - RNA, 19 nt, Artificial Sequence
  Description of Artificial Sequence: Synthetic oligonucleotide
gguggaguggugccacugg

SEQ ID NO: 169026 - RNA, 19 nt, Artificial Sequence
  Description of Artificial Sequence: Synthetic oligonucleotide
gauucaguagccugcugau

SEQ ID NO: 169027 - RNA, 19 nt, Artificial Sequence
  Description of Artificial Sequence: Synthetic oligonucleotide
ccaaaucacacuaauuaaa

SEQ ID NO: 169028 - RNA, 19 nt, Artificial Sequence
  Description of Artificial Sequence: Synthetic oligonucleotide
ccgggacaaguacagaagg

SEQ ID NO: 169029 - RNA, 19 nt, Artificial Sequence
  Description of Artificial Sequence: Synthetic oligonucleotide
caucuuagggguucccaga

SEQ ID NO: 169030 - RNA, 19 nt, Artificial Sequence
  Description of Artificial Sequence: Synthetic oligonucleotide
cauuuuaagacaugucauu

SEQ ID NO: 169031 - RNA, 19 nt, Artificial Sequence
  Description of Artificial Sequence: Synthetic oligonucleotide
ucaccgcuuucagcuaagg

SEQ ID NO: 169032 - RNA, 19 nt, Artificial Sequence
  Description of Artificial Sequence: Synthetic oligonucleotide
acuaaacacagagcccaga

SEQ ID NO: 169033 - RNA, 19 nt, Artificial Sequence
  Description of Artificial Sequence: Synthetic oligonucleotide
cuaaaccauagcaaucuau

SEQ ID NO: 169034 - RNA, 19 nt, Artificial Sequence
  Description of Artificial Sequence: Synthetic oligonucleotide
agaauguuucgagugucua

SEQ ID NO: 169035 - RNA, 19 nt, Artificial Sequence
  Description of Artificial Sequence: Synthetic oligonucleotide
caaucucguucaagccucc

SEQ ID NO: 169036 - RNA, 19 nt, Artificial Sequence
  Description of Artificial Sequence: Synthetic oligonucleotide
cuaugugacugccagacuu

SEQ ID NO: 169037 - RNA, 19 nt, Artificial Sequence
  Description of Artificial Sequence: Synthetic oligonucleotide
guuagaggcucuucuacau

SEQ ID NO: 169038 - RNA, 19 nt, Artificial Sequence
  Description of Artificial Sequence: Synthetic oligonucleotide
gguuggauucaguaaauau

SEQ ID NO: 169039 - RNA, 19 nt, Artificial Sequence
  Description of Artificial Sequence: Synthetic oligonucleotide
accuuguuagaggcucuuc

SEQ ID NO: 169040 - RNA, 19 nt, Artificial Sequence
  Description of Artificial Sequence: Synthetic oligonucleotide
ugaguaggaccugcugaac

SEQ ID NO: 169041 - RNA, 19 nt, Artificial Sequence
  Description of Artificial Sequence: Synthetic oligonucleotide
ggguuaguaaggccacugc

SEQ ID NO: 169042 - RNA, 19 nt, Artificial Sequence
  Description of Artificial Sequence: Synthetic oligonucleotide
cauuacuauguauaccuuu

SEQ ID NO: 169043 - RNA, 19 nt, Artificial Sequence
  Description of Artificial Sequence: Synthetic oligonucleotide
caaccgguugaguaaagcu

SEQ ID NO: 169044 - RNA, 19 nt, Artificial Sequence
  Description of Artificial Sequence: Synthetic oligonucleotide
aaggguuaguaaggccacu

SEQ ID NO: 169045 - RNA, 19 nt, Artificial Sequence
  Description of Artificial Sequence: Synthetic oligonucleotide
uacacuggucccuccuaau

SEQ ID NO: 169046 - RNA, 19 nt, Artificial Sequence
  Description of Artificial Sequence: Synthetic oligonucleotide
gauaguggcuucaaugguu

SEQ ID NO: 169047 - RNA, 19 nt, Artificial Sequence
  Description of Artificial Sequence: Synthetic oligonucleotide
aaauuacagcagauauguu

SEQ ID NO: 169048 - RNA, 19 nt, Artificial Sequence
  Description of Artificial Sequence: Synthetic oligonucleotide
ggcuuaccgacaaaucagc

SEQ ID NO: 169049 - RNA, 19 nt, Artificial Sequence
  Description of Artificial Sequence: Synthetic oligonucleotide
cuaguguggcuuaccgaca

SEQ ID NO: 169050 - RNA, 19 nt, Artificial Sequence
  Description of Artificial Sequence: Synthetic oligonucleotide
ucggugagguguugauuuc

SEQ ID NO: 169051 - RNA, 19 nt, Artificial Sequence
  Description of Artificial Sequence: Synthetic oligonucleotide
agcauccgggacaaguaca

SEQ ID NO: 169052 - RNA, 19 nt, Artificial Sequence
  Description of Artificial Sequence: Synthetic oligonucleotide
uaccgacaaaucagcugaa

SEQ ID NO: 169053 - RNA, 19 nt, Artificial Sequence
  Description of Artificial Sequence: Synthetic oligonucleotide
gguuaguaaggccacugcu

SEQ ID NO: 169054 - RNA, 19 nt, Artificial Sequence
  Description of Artificial Sequence: Synthetic oligonucleotide
guucauccccaauuauuua

SEQ ID NO: 169055 - RNA, 19 nt, Artificial Sequence
  Description of Artificial Sequence: Synthetic oligonucleotide
gggacaaguacagaaggaa

SEQ ID NO: 169056 - RNA, 19 nt, Artificial Sequence
  Description of Artificial Sequence: Synthetic oligonucleotide
guugcuaaagagacacugu

SEQ ID NO: 169057 - RNA, 19 nt, Artificial Sequence
  Description of Artificial Sequence: Synthetic oligonucleotide
cuguagacaugagcuucgc

SEQ ID NO: 169058 - RNA, 19 nt, Artificial Sequence
  Description of Artificial Sequence: Synthetic oligonucleotide
ucgaagugcuugucuucuc

SEQ ID NO: 169059 - RNA, 19 nt, Artificial Sequence
  Description of Artificial Sequence: Synthetic oligonucleotide
ggugucaugaugguugucu

SEQ ID NO: 169060 - RNA, 19 nt, Artificial Sequence
  Description of Artificial Sequence: Synthetic oligonucleotide
guuaccacugucaccauuu

SEQ ID NO: 169061 - RNA, 19 nt, Artificial Sequence
  Description of Artificial Sequence: Synthetic oligonucleotide
ggauuugagcuuuugugau

SEQ ID NO: 169062 - RNA, 19 nt, Artificial Sequence
  Description of Artificial Sequence: Synthetic oligonucleotide
ggaaucaagguuuggguuu

SEQ ID NO: 169063 - RNA, 19 nt, Artificial Sequence
  Description of Artificial Sequence: Synthetic oligonucleotide
ugcuugcagccgaaucauc

SEQ ID NO: 169064 - RNA, 19 nt, Artificial Sequence
  Description of Artificial Sequence: Synthetic oligonucleotide
uaucggugagguguugauu

SEQ ID NO: 169065 - RNA, 19 nt, Artificial Sequence
  Description of Artificial Sequence: Synthetic oligonucleotide
ugugacugccagacuucuu

SEQ ID NO: 169066 - RNA, 19 nt, Artificial Sequence
  Description of Artificial Sequence: Synthetic oligonucleotide
accuuucuaguguggcuua

SEQ ID NO: 169067 - RNA, 19 nt, Artificial Sequence
  Description of Artificial Sequence: Synthetic oligonucleotide
caccaccaguauauuucac

SEQ ID NO: 169068 - RNA, 19 nt, Artificial Sequence
  Description of Artificial Sequence: Synthetic oligonucleotide
aaccuuguuagaggcucuu

SEQ ID NO: 169069 - RNA, 19 nt, Artificial Sequence
  Description of Artificial Sequence: Synthetic oligonucleotide
uccacgucucagacugaau

SEQ ID NO: 169070 - RNA, 19 nt, Artificial Sequence
  Description of Artificial Sequence: Synthetic oligonucleotide
gauggaggaaagggaaagu

SEQ ID NO: 169071 - RNA, 19 nt, Artificial Sequence
  Description of Artificial Sequence: Synthetic oligonucleotide
cagcaauaugccagauuga

SEQ ID NO: 169072 - RNA, 19 nt, Artificial Sequence
  Description of Artificial Sequence: Synthetic oligonucleotide
aguucaccgcuuucagcua

SEQ ID NO: 169073 - RNA, 19 nt, Artificial Sequence
  Description of Artificial Sequence: Synthetic oligonucleotide
gugcaucaccaucauuuaa

SEQ ID NO: 169074 - RNA, 19 nt, Artificial Sequence
  Description of Artificial Sequence: Synthetic oligonucleotide
ccacaaccagagagcaucg

SEQ ID NO: 169075 - RNA, 19 nt, Artificial Sequence
  Description of Artificial Sequence: Synthetic oligonucleotide
cgaagugcuugucuucucc

SEQ ID NO: 169076 - RNA, 19 nt, Artificial Sequence
  Description of Artificial Sequence: Synthetic oligonucleotide
gcaugaagguuaagucagg

SEQ ID NO: 169077 - RNA, 19 nt, Artificial Sequence
  Description of Artificial Sequence: Synthetic oligonucleotide
ugaugguugucuggccaau

SEQ ID NO: 169078 - RNA, 19 nt, Artificial Sequence
  Description of Artificial Sequence: Synthetic oligonucleotide
ggacgggugggagagacuc

SEQ ID NO: 169079 - RNA, 19 nt, Artificial Sequence
  Description of Artificial Sequence: Synthetic oligonucleotide
acauuacuauguauaccuu

SEQ ID NO: 169080 - RNA, 19 nt, Artificial Sequence
  Description of Artificial Sequence: Synthetic oligonucleotide
cuaaagagacacugugcau

SEQ ID NO: 169081 - RNA, 19 nt, Artificial Sequence
  Description of Artificial Sequence: Synthetic oligonucleotide
gcaugcaugaagguuaagu

SEQ ID NO: 169082 - RNA, 19 nt, Artificial Sequence
  Description of Artificial Sequence: Synthetic oligonucleotide
cugaaaucuuaaaacccuu

SEQ ID NO: 169083 - RNA, 19 nt, Artificial Sequence
  Description of Artificial Sequence: Synthetic oligonucleotide
agcuaaggccucucuuguu

SEQ ID NO: 169084 - RNA, 19 nt, Artificial Sequence
  Description of Artificial Sequence: Synthetic oligonucleotide
uggacgggugggagagacu

SEQ ID NO: 169085 - RNA, 19 nt, Artificial Sequence
  Description of Artificial Sequence: Synthetic oligonucleotide
agguuggauucaguaaaua

SEQ ID NO: 169086 - RNA, 19 nt, Artificial Sequence
  Description of Artificial Sequence: Synthetic oligonucleotide
agccaccccacugguaucu

SEQ ID NO: 169087 - RNA, 19 nt, Artificial Sequence
  Description of Artificial Sequence: Synthetic oligonucleotide
augcuccgaggacucuuca

SEQ ID NO: 169088 - RNA, 19 nt, Artificial Sequence
  Description of Artificial Sequence: Synthetic oligonucleotide
gcuccgaggacucuucaaa

SEQ ID NO: 169089 - RNA, 19 nt, Artificial Sequence
  Description of Artificial Sequence: Synthetic oligonucleotide
ggcacuauaacagguugcu

SEQ ID NO: 169090 - RNA, 19 nt, Artificial Sequence
  Description of Artificial Sequence: Synthetic oligonucleotide
ggaaguugcuaaagagaca

SEQ ID NO: 169091 - RNA, 19 nt, Artificial Sequence
  Description of Artificial Sequence: Synthetic oligonucleotide
cuguccuaugugacugcca

SEQ ID NO: 169092 - RNA, 19 nt, Artificial Sequence
  Description of Artificial Sequence: Synthetic oligonucleotide
ccagcuuagcaguuguuaa

SEQ ID NO: 169093 - RNA, 19 nt, Artificial Sequence
  Description of Artificial Sequence: Synthetic oligonucleotide
uaaaacccuugggcaugca

SEQ ID NO: 169094 - RNA, 19 nt, Artificial Sequence
  Description of Artificial Sequence: Synthetic oligonucleotide
gaaucaagguuuggguuuu

SEQ ID NO: 169095 - RNA, 19 nt, Artificial Sequence
  Description of Artificial Sequence: Synthetic oligonucleotide
ccagauugaaaagacuaaa

SEQ ID NO: 169096 - RNA, 19 nt, Artificial Sequence
  Description of Artificial Sequence: Synthetic oligonucleotide
agguugcuucuuauugcca

SEQ ID NO: 169097 - RNA, 19 nt, Artificial Sequence
  Description of Artificial Sequence: Synthetic oligonucleotide
ggugagguguugauuucca

SEQ ID NO: 169098 - RNA, 19 nt, Artificial Sequence
  Description of Artificial Sequence: Synthetic oligonucleotide
ggucccuccuaauggcuuc

SEQ ID NO: 169099 - RNA, 19 nt, Artificial Sequence
  Description of Artificial Sequence: Synthetic oligonucleotide
caccccacugguaucucaa

SEQ ID NO: 169100 - RNA, 19 nt, Artificial Sequence
  Description of Artificial Sequence: Synthetic oligonucleotide
ccguccauacauccagcag

SEQ ID NO: 169101 - RNA, 19 nt, Artificial Sequence
  Description of Artificial Sequence: Synthetic oligonucleotide
accgcugucuugaguauuu

SEQ ID NO: 169102 - RNA, 19 nt, Artificial Sequence
  Description of Artificial Sequence: Synthetic oligonucleotide
cagcagacuuuccugccaa

SEQ ID NO: 169103 - RNA, 19 nt, Artificial Sequence
  Description of Artificial Sequence: Synthetic oligonucleotide
ucucuccaaccgguugagu

SEQ ID NO: 169104 - RNA, 19 nt, Artificial Sequence
  Description of Artificial Sequence: Synthetic oligonucleotide
agccuccaaucaaauucug

SEQ ID NO: 169105 - RNA, 19 nt, Artificial Sequence
  Description of Artificial Sequence: Synthetic oligonucleotide
uaccgcugucuugaguauu

SEQ ID NO: 169106 - RNA, 19 nt, Artificial Sequence
  Description of Artificial Sequence: Synthetic oligonucleotide
gagccaccccacugguauc

SEQ ID NO: 169107 - RNA, 19 nt, Artificial Sequence
  Description of Artificial Sequence: Synthetic oligonucleotide
gaguggugccacuggcugu

SEQ ID NO: 169108 - RNA, 19 nt, Artificial Sequence
  Description of Artificial Sequence: Synthetic oligonucleotide
cuggucgaagugcuugucu

SEQ ID NO: 169109 - RNA, 19 nt, Artificial Sequence
  Description of Artificial Sequence: Synthetic oligonucleotide
cagcuuagcaguuguuaau

SEQ ID NO: 169110 - RNA, 19 nt, Artificial Sequence
  Description of Artificial Sequence: Synthetic oligonucleotide
guguggcuuaccgacaaau

SEQ ID NO: 169111 - RNA, 19 nt, Artificial Sequence
  Description of Artificial Sequence: Synthetic oligonucleotide
cuccaaccgguugaguaaa

SEQ ID NO: 169112 - RNA, 19 nt, Artificial Sequence
  Description of Artificial Sequence: Synthetic oligonucleotide
gccgaaucauccaaaacau

SEQ ID NO: 169113 - RNA, 19 nt, Artificial Sequence
  Description of Artificial Sequence: Synthetic oligonucleotide
ccgacaaaucagcugaacu

SEQ ID NO: 169114 - RNA, 19 nt, Artificial Sequence
  Description of Artificial Sequence: Synthetic oligonucleotide
ucguuaccacugucaccau

SEQ ID NO: 169115 - RNA, 19 nt, Artificial Sequence
  Description of Artificial Sequence: Synthetic oligonucleotide
cuugaguauuuggcacaga

SEQ ID NO: 169116 - RNA, 19 nt, Artificial Sequence
  Description of Artificial Sequence: Synthetic oligonucleotide
cagacagggauuugagcuu

SEQ ID NO: 169117 - RNA, 19 nt, Artificial Sequence
  Description of Artificial Sequence: Synthetic oligonucleotide
guuuuagguuggauucagu

SEQ ID NO: 169118 - RNA, 19 nt, Artificial Sequence
  Description of Artificial Sequence: Synthetic oligonucleotide
cuccacgucucagacugaa

SEQ ID NO: 169119 - RNA, 19 nt, Artificial Sequence
  Description of Artificial Sequence: Synthetic oligonucleotide
cacugcuacuccagucaaa

SEQ ID NO: 169120 - RNA, 19 nt, Artificial Sequence
  Description of Artificial Sequence: Synthetic oligonucleotide
ggaaagcacuaccgcuguc

SEQ ID NO: 169121 - RNA, 19 nt, Artificial Sequence
  Description of Artificial Sequence: Synthetic oligonucleotide
gccuccaaucaaauucuga

SEQ ID NO: 169122 - RNA, 19 nt, Artificial Sequence
  Description of Artificial Sequence: Synthetic oligonucleotide
gcugcauacaugggcacua

SEQ ID NO: 169123 - RNA, 19 nt, Artificial Sequence
  Description of Artificial Sequence: Synthetic oligonucleotide
cacaaccagagagcaucga

SEQ ID NO: 169124 - RNA, 19 nt, Artificial Sequence
  Description of Artificial Sequence: Synthetic oligonucleotide
cacuuagguguuccucucu

SEQ ID NO: 169125 - RNA, 19 nt, Artificial Sequence
  Description of Artificial Sequence: Synthetic oligonucleotide
gcaguuccguccauacauc

SEQ ID NO: 169126 - RNA, 19 nt, Artificial Sequence
  Description of Artificial Sequence: Synthetic oligonucleotide
ggcgaucaccuucacugcu

SEQ ID NO: 169127 - RNA, 19 nt, Artificial Sequence
  Description of Artificial Sequence: Synthetic oligonucleotide
cauugacccugcugauucu

SEQ ID NO: 169128 - RNA, 19 nt, Artificial Sequence
  Description of Artificial Sequence: Synthetic oligonucleotide
cauugguaucauggcaagu

SEQ ID NO: 169129 - RNA, 19 nt, Artificial Sequence
  Description of Artificial Sequence: Synthetic oligonucleotide
cacagcaauaugccagauu

SEQ ID NO: 169130 - RNA, 19 nt, Artificial Sequence
  Description of Artificial Sequence: Synthetic oligonucleotide
ccgaggacucuucaaaagu

SEQ ID NO: 169131 - RNA, 19 nt, Artificial Sequence
  Description of Artificial Sequence: Synthetic oligonucleotide
cugcuacuccagucaaacu

SEQ ID NO: 169132 - RNA, 19 nt, Artificial Sequence
  Description of Artificial Sequence: Synthetic oligonucleotide
caggccugacacaaaccau

SEQ ID NO: 169133 - RNA, 19 nt, Artificial Sequence
  Description of Artificial Sequence: Synthetic oligonucleotide
cggugagguguugauuucc

SEQ ID NO: 169134 - RNA, 19 nt, Artificial Sequence
  Description of Artificial Sequence: Synthetic oligonucleotide
ggacaccaccaguauauuu

SEQ ID NO: 169135 - RNA, 19 nt, Artificial Sequence
  Description of Artificial Sequence: Synthetic oligonucleotide
gcacuaccgcugucuugag

SEQ ID NO: 169136 - RNA, 19 nt, Artificial Sequence
  Description of Artificial Sequence: Synthetic oligonucleotide
ccacgucucagacugaauu

SEQ ID NO: 169137 - RNA, 19 nt, Artificial Sequence
  Description of Artificial Sequence: Synthetic oligonucleotide
ggcaugcaugaagguuaag

SEQ ID NO: 169138 - RNA, 19 nt, Artificial Sequence
  Description of Artificial Sequence: Synthetic oligonucleotide
gcuuaccgacaaaucagcu

SEQ ID NO: 169139 - RNA, 19 nt, Artificial Sequence
  Description of Artificial Sequence: Synthetic oligonucleotide
ccuaaaccauagcaaucua

SEQ ID NO: 169140 - RNA, 19 nt, Artificial Sequence
  Description of Artificial Sequence: Synthetic oligonucleotide
cuaccgcugucuugaguau

SEQ ID NO: 169141 - RNA, 19 nt, Artificial Sequence
  Description of Artificial Sequence: Synthetic oligonucleotide
cacuaccgcugucuugagu

SEQ ID NO: 169142 - RNA, 19 nt, Artificial Sequence
  Description of Artificial Sequence: Synthetic oligonucleotide
cccuccuaauggcuucuga

SEQ ID NO: 169143 - RNA, 19 nt, Artificial Sequence
  Description of Artificial Sequence: Synthetic oligonucleotide
gucccuccuaauggcuucu

SEQ ID NO: 169144 - RNA, 19 nt, Artificial Sequence
  Description of Artificial Sequence: Synthetic oligonucleotide
ccaccccacugguaucuca

SEQ ID NO: 169145 - RNA, 19 nt, Artificial Sequence
  Description of Artificial Sequence: Synthetic oligonucleotide
ccaacccugcugcauacau

SEQ ID NO: 169146 - RNA, 19 nt, Artificial Sequence
  Description of Artificial Sequence: Synthetic oligonucleotide
caugcacauuaaccuuguu

SEQ ID NO: 169147 - RNA, 19 nt, Artificial Sequence
  Description of Artificial Sequence: Synthetic oligonucleotide
caccaucuaaaggguuagu

SEQ ID NO: 169148 - RNA, 19 nt, Artificial Sequence
  Description of Artificial Sequence: Synthetic oligonucleotide
gacagggauuugagcuuuu

SEQ ID NO: 169149 - RNA, 19 nt, Artificial Sequence
  Description of Artificial Sequence: Synthetic oligonucleotide
gcuucgcaaaagcgucagu

SEQ ID NO: 169150 - RNA, 19 nt, Artificial Sequence
  Description of Artificial Sequence: Synthetic oligonucleotide
caaaagcgucagucacuuu

SEQ ID NO: 169151 - RNA, 19 nt, Artificial Sequence
  Description of Artificial Sequence: Synthetic oligonucleotide
ccuaugugacugccagacu

SEQ ID NO: 169152 - RNA, 19 nt, Artificial Sequence
  Description of Artificial Sequence: Synthetic oligonucleotide
gcacuauaacagguugcuu

SEQ ID NO: 169153 - RNA, 19 nt, Artificial Sequence
  Description of Artificial Sequence: Synthetic oligonucleotide
gcgaucaccuucacugcuu

SEQ ID NO: 169154 - RNA, 19 nt, Artificial Sequence
  Description of Artificial Sequence: Synthetic oligonucleotide
ggaaggcgucaguguggcu

SEQ ID NO: 169155 - RNA, 19 nt, Artificial Sequence
  Description of Artificial Sequence: Synthetic oligonucleotide
cucaagccaugugcaucau

SEQ ID NO: 169156 - RNA, 19 nt, Artificial Sequence
  Description of Artificial Sequence: Synthetic oligonucleotide
gggagccaccccacuggua

SEQ ID NO: 169157 - RNA, 19 nt, Artificial Sequence
  Description of Artificial Sequence: Synthetic oligonucleotide
aauaguauaaucauuaucc

SEQ ID NO: 169158 - RNA, 19 nt, Artificial Sequence
  Description of Artificial Sequence: Synthetic oligonucleotide
uuugcaaucaacaagagga

SEQ ID NO: 169159 - RNA, 19 nt, Artificial Sequence
  Description of Artificial Sequence: Synthetic oligonucleotide
uugaauuuagauaaucucg

SEQ ID NO: 169160 - RNA, 19 nt, Artificial Sequence
  Description of Artificial Sequence: Synthetic oligonucleotide
auuuagauaaucucgaucu

SEQ ID NO: 169161 - RNA, 19 nt, Artificial Sequence
  Description of Artificial Sequence: Synthetic oligonucleotide
aauuuagauaaucucgauc

SEQ ID NO: 169162 - RNA, 19 nt, Artificial Sequence
  Description of Artificial Sequence: Synthetic oligonucleotide
aaacgagugaaucacagug

SEQ ID NO: 169163 - RNA, 19 nt, Artificial Sequence
  Description of Artificial Sequence: Synthetic oligonucleotide
aaauacgagguuuucauca

SEQ ID NO: 169164 - RNA, 19 nt, Artificial Sequence
  Description of Artificial Sequence: Synthetic oligonucleotide
aauuuaguuacaaagugug

SEQ ID NO: 169165 - RNA, 19 nt, Artificial Sequence
  Description of Artificial Sequence: Synthetic oligonucleotide
auuuaagcuauguccaccc

SEQ ID NO: 169166 - RNA, 19 nt, Artificial Sequence
  Description of Artificial Sequence: Synthetic oligonucleotide
agguuaaauguucugaggg

SEQ ID NO: 169167 - RNA, 19 nt, Artificial Sequence
  Description of Artificial Sequence: Synthetic oligonucleotide
aauagguugaauuuagaua

SEQ ID NO: 169168 - RNA, 19 nt, Artificial Sequence
  Description of Artificial Sequence: Synthetic oligonucleotide
ugaauuuagauaaucucga

SEQ ID NO: 169169 - RNA, 19 nt, Artificial Sequence
  Description of Artificial Sequence: Synthetic oligonucleotide
uugaguagaacacugaaau

SEQ ID NO: 169170 - RNA, 19 nt, Artificial Sequence
  Description of Artificial Sequence: Synthetic oligonucleotide
uuugauuacguaaacgagu

SEQ ID NO: 169171 - RNA, 19 nt, Artificial Sequence
  Description of Artificial Sequence: Synthetic oligonucleotide
aucauuauccaaaaguuac

SEQ ID NO: 169172 - RNA, 19 nt, Artificial Sequence
  Description of Artificial Sequence: Synthetic oligonucleotide
uccuacauaauuauauagc

SEQ ID NO: 169173 - RNA, 19 nt, Artificial Sequence
  Description of Artificial Sequence: Synthetic oligonucleotide
gauuuaggcauuucaagcc

SEQ ID NO: 169174 - RNA, 19 nt, Artificial Sequence
  Description of Artificial Sequence: Synthetic oligonucleotide
ucauagagaguaaaugugc

SEQ ID NO: 169175 - RNA, 19 nt, Artificial Sequence
  Description of Artificial Sequence: Synthetic oligonucleotide
uguuucuacacuuuauccc

SEQ ID NO: 169176 - RNA, 19 nt, Artificial Sequence
  Description of Artificial Sequence: Synthetic oligonucleotide
uugauuacguaaacgagug

SEQ ID NO: 169177 - RNA, 19 nt, Artificial Sequence
  Description of Artificial Sequence: Synthetic oligonucleotide
ugacuuucaaaucauuuga

SEQ ID NO: 169178 - RNA, 19 nt, Artificial Sequence
  Description of Artificial Sequence: Synthetic oligonucleotide
auaaucucgaucuaugaga

SEQ ID NO: 169179 - RNA, 19 nt, Artificial Sequence
  Description of Artificial Sequence: Synthetic oligonucleotide
agaacguuagagaagaagg

SEQ ID NO: 169180 - RNA, 19 nt, Artificial Sequence
  Description of Artificial Sequence: Synthetic oligonucleotide
gauaaucucgaucuaugag

SEQ ID NO: 169181 - RNA, 19 nt, Artificial Sequence
  Description of Artificial Sequence: Synthetic oligonucleotide
auaugugauuacuucauag

SEQ ID NO: 169182 - RNA, 19 nt, Artificial Sequence
  Description of Artificial Sequence: Synthetic oligonucleotide
uuguaguucccuuauaaca

SEQ ID NO: 169183 - RNA, 19 nt, Artificial Sequence
  Description of Artificial Sequence: Synthetic oligonucleotide
uaauuuaguuacaaagugu

SEQ ID NO: 169184 - RNA, 19 nt, Artificial Sequence
  Description of Artificial Sequence: Synthetic oligonucleotide
uuaaacagcagugggacag

SEQ ID NO: 169185 - RNA, 19 nt, Artificial Sequence
  Description of Artificial Sequence: Synthetic oligonucleotide
aaaggcaaauaaaugugac

SEQ ID NO: 169186 - RNA, 19 nt, Artificial Sequence
  Description of Artificial Sequence: Synthetic oligonucleotide
cuuuauccccaacugaucg

SEQ ID NO: 169187 - RNA, 19 nt, Artificial Sequence
  Description of Artificial Sequence: Synthetic oligonucleotide
uguaguucccuuauaacaa

SEQ ID NO: 169188 - RNA, 19 nt, Artificial Sequence
  Description of Artificial Sequence: Synthetic oligonucleotide
aauacgagguuuucaucag

SEQ ID NO: 169189 - RNA, 19 nt, Artificial Sequence
  Description of Artificial Sequence: Synthetic oligonucleotide
aaauuuacagacaucccug

SEQ ID NO: 169190 - RNA, 19 nt, Artificial Sequence
  Description of Artificial Sequence: Synthetic oligonucleotide
uugagauuuaggcauuuca

SEQ ID NO: 169191 - RNA, 19 nt, Artificial Sequence
  Description of Artificial Sequence: Synthetic oligonucleotide
cacgaagucgcauagcugc

SEQ ID NO: 169192 - RNA, 19 nt, Artificial Sequence
  Description of Artificial Sequence: Synthetic oligonucleotide
ugugauaguuuauuuaaaa

SEQ ID NO: 169193 - RNA, 19 nt, Artificial Sequence
  Description of Artificial Sequence: Synthetic oligonucleotide
aagaacguuagagaagaag

SEQ ID NO: 169194 - RNA, 19 nt, Artificial Sequence
  Description of Artificial Sequence: Synthetic oligonucleotide
guugaauuuagauaaucuc

SEQ ID NO: 169195 - RNA, 19 nt, Artificial Sequence
  Description of Artificial Sequence: Synthetic oligonucleotide
ugcuauagaaauuagccuu

SEQ ID NO: 169196 - RNA, 19 nt, Artificial Sequence
  Description of Artificial Sequence: Synthetic oligonucleotide
uuauauagccagcuggggu

SEQ ID NO: 169197 - RNA, 19 nt, Artificial Sequence
  Description of Artificial Sequence: Synthetic oligonucleotide
uacuauugcacaaguuuag

SEQ ID NO: 169198 - RNA, 19 nt, Artificial Sequence
  Description of Artificial Sequence: Synthetic oligonucleotide
guggcauuaugcuaugugg

SEQ ID NO: 169199 - RNA, 19 nt, Artificial Sequence
  Description of Artificial Sequence: Synthetic oligonucleotide
auaauuuaagcuaugucca

SEQ ID NO: 169200 - RNA, 19 nt, Artificial Sequence
  Description of Artificial Sequence: Synthetic oligonucleotide
cuuauaacaauaaaaggcu

SEQ ID NO: 169201 - RNA, 19 nt, Artificial Sequence
  Description of Artificial Sequence: Synthetic oligonucleotide
uggagucucauucaguuaa

SEQ ID NO: 169202 - RNA, 19 nt, Artificial Sequence
  Description of Artificial Sequence: Synthetic oligonucleotide
uggguaguaacauugcagu

SEQ ID NO: 169203 - RNA, 19 nt, Artificial Sequence
  Description of Artificial Sequence: Synthetic oligonucleotide
uucccgugcaaagugaugg

SEQ ID NO: 169204 - RNA, 19 nt, Artificial Sequence
  Description of Artificial Sequence: Synthetic oligonucleotide
gaacguuagagaagaaggg

SEQ ID NO: 169205 - RNA, 19 nt, Artificial Sequence
  Description of Artificial Sequence: Synthetic oligonucleotide
uaaucucgaucuaugagaa

SEQ ID NO: 169206 - RNA, 19 nt, Artificial Sequence
  Description of Artificial Sequence: Synthetic oligonucleotide
uuaaagucccaugaaucag

SEQ ID NO: 169207 - RNA, 19 nt, Artificial Sequence
  Description of Artificial Sequence: Synthetic oligonucleotide
uuuaggcauuucaagccag

SEQ ID NO: 169208 - RNA, 19 nt, Artificial Sequence
  Description of Artificial Sequence: Synthetic oligonucleotide
uacguaaacgagugaauca

SEQ ID NO: 169209 - RNA, 19 nt, Artificial Sequence
  Description of Artificial Sequence: Synthetic oligonucleotide
acguaaacgagugaaucac

SEQ ID NO: 169210 - RNA, 19 nt, Artificial Sequence
  Description of Artificial Sequence: Synthetic oligonucleotide
ucaguuaacaguguagauc

SEQ ID NO: 169211 - RNA, 19 nt, Artificial Sequence
  Description of Artificial Sequence: Synthetic oligonucleotide
aguguaggcauacauagua

SEQ ID NO: 169212 - RNA, 19 nt, Artificial Sequence
  Description of Artificial Sequence: Synthetic oligonucleotide
ggcauuucaagccagaauc

SEQ ID NO: 169213 - RNA, 19 nt, Artificial Sequence
  Description of Artificial Sequence: Synthetic oligonucleotide
gagaauagguugaauuuag

SEQ ID NO: 169214 - RNA, 19 nt, Artificial Sequence
  Description of Artificial Sequence: Synthetic oligonucleotide
uaguauaaucauuauccaa

SEQ ID NO: 169215 - RNA, 19 nt, Artificial Sequence
  Description of Artificial Sequence: Synthetic oligonucleotide
accuauaguuggcaauagc

SEQ ID NO: 169216 - RNA, 19 nt, Artificial Sequence
  Description of Artificial Sequence: Synthetic oligonucleotide
augaccgggaacuucucgg

SEQ ID NO: 169217 - RNA, 19 nt, Artificial Sequence
  Description of Artificial Sequence: Synthetic oligonucleotide
aacguuagagaagaagggu

SEQ ID NO: 169218 - RNA, 19 nt, Artificial Sequence
  Description of Artificial Sequence: Synthetic oligonucleotide
gagcuuuaucaauauuuag

SEQ ID NO: 169219 - RNA, 19 nt, Artificial Sequence
  Description of Artificial Sequence: Synthetic oligonucleotide
uuccuugcuacuauugcac

SEQ ID NO: 169220 - RNA, 19 nt, Artificial Sequence
  Description of Artificial Sequence: Synthetic oligonucleotide
ucgaucuaugagaauaaaa

SEQ ID NO: 169221 - RNA, 19 nt, Artificial Sequence
  Description of Artificial Sequence: Synthetic oligonucleotide
gguuaaauguucugagggg

SEQ ID NO: 169222 - RNA, 19 nt, Artificial Sequence
  Description of Artificial Sequence: Synthetic oligonucleotide
uuaguuacaaaguguggua

SEQ ID NO: 169223 - RNA, 19 nt, Artificial Sequence
  Description of Artificial Sequence: Synthetic oligonucleotide
gauuacguaaacgagugaa

SEQ ID NO: 169224 - RNA, 19 nt, Artificial Sequence
  Description of Artificial Sequence: Synthetic oligonucleotide
auagagaguaaaugugcug

SEQ ID NO: 169225 - RNA, 19 nt, Artificial Sequence
  Description of Artificial Sequence: Synthetic oligonucleotide
aagugcgcaguccuauguc

SEQ ID NO: 169226 - RNA, 19 nt, Artificial Sequence
  Description of Artificial Sequence: Synthetic oligonucleotide
gacaccucagguaauuucc

SEQ ID NO: 169227 - RNA, 19 nt, Artificial Sequence
  Description of Artificial Sequence: Synthetic oligonucleotide
acaguguagauccauuuaa

SEQ ID NO: 169228 - RNA, 19 nt, Artificial Sequence
  Description of Artificial Sequence: Synthetic oligonucleotide
agacaccucagguaauuuc

SEQ ID NO: 169229 - RNA, 19 nt, Artificial Sequence
  Description of Artificial Sequence: Synthetic oligonucleotide
gacgcugucguauuuguga

SEQ ID NO: 169230 - RNA, 19 nt, Artificial Sequence
  Description of Artificial Sequence: Synthetic oligonucleotide
aagggaauauggugcaccu

SEQ ID NO: 169231 - RNA, 19 nt, Artificial Sequence
  Description of Artificial Sequence: Synthetic oligonucleotide
uuauaaccuccaaacuucu

SEQ ID NO: 169232 - RNA, 19 nt, Artificial Sequence
  Description of Artificial Sequence: Synthetic oligonucleotide
ugcuaucauuauaaccucc

SEQ ID NO: 169233 - RNA, 19 nt, Artificial Sequence
  Description of Artificial Sequence: Synthetic oligonucleotide
aauauggugcaccuaccuu

SEQ ID NO: 169234 - RNA, 19 nt, Artificial Sequence
  Description of Artificial Sequence: Synthetic oligonucleotide
uaaaugcuaucauuauaac

SEQ ID NO: 169235 - RNA, 19 nt, Artificial Sequence
  Description of Artificial Sequence: Synthetic oligonucleotide
agauaaucucgaucuauga

SEQ ID NO: 169236 - RNA, 19 nt, Artificial Sequence
  Description of Artificial Sequence: Synthetic oligonucleotide
uaaccauauuaacuguuuc

SEQ ID NO: 169237 - RNA, 19 nt, Artificial Sequence
  Description of Artificial Sequence: Synthetic oligonucleotide
augcuaucauuauaaccuc

SEQ ID NO: 169238 - RNA, 19 nt, Artificial Sequence
  Description of Artificial Sequence: Synthetic oligonucleotide
auuauauagccagcugggg

SEQ ID NO: 169239 - RNA, 19 nt, Artificial Sequence
  Description of Artificial Sequence: Synthetic oligonucleotide
uauuuagcucagcaacuac

SEQ ID NO: 169240 - RNA, 19 nt, Artificial Sequence
  Description of Artificial Sequence: Synthetic oligonucleotide
uuacguaaacgagugaauc

SEQ ID NO: 169241 - RNA, 19 nt, Artificial Sequence
  Description of Artificial Sequence: Synthetic oligonucleotide
aacaguguagauccauuua

SEQ ID NO: 169242 - RNA, 19 nt, Artificial Sequence
  Description of Artificial Sequence: Synthetic oligonucleotide
gaugaccgggaacuucucg

SEQ ID NO: 169243 - RNA, 19 nt, Artificial Sequence
  Description of Artificial Sequence: Synthetic oligonucleotide
aguugaacacaaaaccauc

SEQ ID NO: 169244 - RNA, 19 nt, Artificial Sequence
  Description of Artificial Sequence: Synthetic oligonucleotide
aagacaucacacugugcca

SEQ ID NO: 169245 - RNA, 19 nt, Artificial Sequence
  Description of Artificial Sequence: Synthetic oligonucleotide
gucuaaaggcacgaagucg

SEQ ID NO: 169246 - RNA, 19 nt, Artificial Sequence
  Description of Artificial Sequence: Synthetic oligonucleotide
auauggugcaccuaccuuu

SEQ ID NO: 169247 - RNA, 19 nt, Artificial Sequence
  Description of Artificial Sequence: Synthetic oligonucleotide
acguuagagaagaaggguc

SEQ ID NO: 169248 - RNA, 19 nt, Artificial Sequence
  Description of Artificial Sequence: Synthetic oligonucleotide
gcuacgaccggugugaagg

SEQ ID NO: 169249 - RNA, 19 nt, Artificial Sequence
  Description of Artificial Sequence: Synthetic oligonucleotide
ugaugcuucccgugcaaag

SEQ ID NO: 169250 - RNA, 19 nt, Artificial Sequence
  Description of Artificial Sequence: Synthetic oligonucleotide
ucauucaguuaacagugua

SEQ ID NO: 169251 - RNA, 19 nt, Artificial Sequence
  Description of Artificial Sequence: Synthetic oligonucleotide
agcuuguaagagauguagc

SEQ ID NO: 169252 - RNA, 19 nt, Artificial Sequence
  Description of Artificial Sequence: Synthetic oligonucleotide
ugggguagcguaaguguag

SEQ ID NO: 169253 - RNA, 19 nt, Artificial Sequence
  Description of Artificial Sequence: Synthetic oligonucleotide
agcuugcuuauuccauacc

SEQ ID NO: 169254 - RNA, 19 nt, Artificial Sequence
  Description of Artificial Sequence: Synthetic oligonucleotide
uuaacaguguagauccauu

SEQ ID NO: 169255 - RNA, 19 nt, Artificial Sequence
  Description of Artificial Sequence: Synthetic oligonucleotide
gaaauacgagguuuucauc

SEQ ID NO: 169256 - RNA, 19 nt, Artificial Sequence
  Description of Artificial Sequence: Synthetic oligonucleotide
uaguuacaaagugugguac

SEQ ID NO: 169257 - RNA, 19 nt, Artificial Sequence
  Description of Artificial Sequence: Synthetic oligonucleotide
aaaggguaagggguucguc

SEQ ID NO: 169258 - RNA, 19 nt, Artificial Sequence
  Description of Artificial Sequence: Synthetic oligonucleotide
ucucgaucuaugagaauaa

SEQ ID NO: 169259 - RNA, 19 nt, Artificial Sequence
  Description of Artificial Sequence: Synthetic oligonucleotide
guuacaaagugugguacug

SEQ ID NO: 169260 - RNA, 19 nt, Artificial Sequence
  Description of Artificial Sequence: Synthetic oligonucleotide
auagcgccugugcacgggc

SEQ ID NO: 169261 - RNA, 19 nt, Artificial Sequence
  Description of Artificial Sequence: Synthetic oligonucleotide
aucucgaucuaugagaaua

SEQ ID NO: 169262 - RNA, 19 nt, Artificial Sequence
  Description of Artificial Sequence: Synthetic oligonucleotide
auauacccauacuucaaaa

SEQ ID NO: 169263 - RNA, 19 nt, Artificial Sequence
  Description of Artificial Sequence: Synthetic oligonucleotide
uccccaacugaucggauuc

SEQ ID NO: 169264 - RNA, 19 nt, Artificial Sequence
  Description of Artificial Sequence: Synthetic oligonucleotide
ggccccacgaaauacgagg

SEQ ID NO: 169265 - RNA, 19 nt, Artificial Sequence
  Description of Artificial Sequence: Synthetic oligonucleotide
cacaugaugccaaguccgg

SEQ ID NO: 169266 - RNA, 19 nt, Artificial Sequence
  Description of Artificial Sequence: Synthetic oligonucleotide
uacgagguuuucaucaguu

SEQ ID NO: 169267 - RNA, 19 nt, Artificial Sequence
  Description of Artificial Sequence: Synthetic oligonucleotide
aacaaccagucuaaaggca

SEQ ID NO: 169268 - RNA, 19 nt, Artificial Sequence
  Description of Artificial Sequence: Synthetic oligonucleotide
uuuaagcuauguccacccu

SEQ ID NO: 169269 - RNA, 19 nt, Artificial Sequence
  Description of Artificial Sequence: Synthetic oligonucleotide
auacaagacaccucaggua

SEQ ID NO: 169270 - RNA, 19 nt, Artificial Sequence
  Description of Artificial Sequence: Synthetic oligonucleotide
gagaguaaaugugcuguug

SEQ ID NO: 169271 - RNA, 19 nt, Artificial Sequence
  Description of Artificial Sequence: Synthetic oligonucleotide
uugcuacuauugcacaagu

SEQ ID NO: 169272 - RNA, 19 nt, Artificial Sequence
  Description of Artificial Sequence: Synthetic oligonucleotide
ugauuacguaaacgaguga

SEQ ID NO: 169273 - RNA, 19 nt, Artificial Sequence
  Description of Artificial Sequence: Synthetic oligonucleotide
uggagggugugauaguuua

SEQ ID NO: 169274 - RNA, 19 nt, Artificial Sequence
  Description of Artificial Sequence: Synthetic oligonucleotide
aaagugcuuauagcgccug

SEQ ID NO: 169275 - RNA, 19 nt, Artificial Sequence
  Description of Artificial Sequence: Synthetic oligonucleotide
uuauagcgccugugcacgg

SEQ ID NO: 169276 - RNA, 19 nt, Artificial Sequence
  Description of Artificial Sequence: Synthetic oligonucleotide
aacaagugcgcaguccuau

SEQ ID NO: 169277 - RNA, 19 nt, Artificial Sequence
  Description of Artificial Sequence: Synthetic oligonucleotide
uagauacagguguuucaac

SEQ ID NO: 169278 - RNA, 19 nt, Artificial Sequence
  Description of Artificial Sequence: Synthetic oligonucleotide
ucuacacuuuauccccaac

SEQ ID NO: 169279 - RNA, 19 nt, Artificial Sequence
  Description of Artificial Sequence: Synthetic oligonucleotide
ugaccgggaacuucucggc

SEQ ID NO: 169280 - RNA, 19 nt, Artificial Sequence
  Description of Artificial Sequence: Synthetic oligonucleotide
uggcuaaagcacaaucaua

SEQ ID NO: 169281 - RNA, 19 nt, Artificial Sequence
  Description of Artificial Sequence: Synthetic oligonucleotide
caagcugacccuuucaugu

SEQ ID NO: 169282 - RNA, 19 nt, Artificial Sequence
  Description of Artificial Sequence: Synthetic oligonucleotide
gagaggccaugcuacgacc

SEQ ID NO: 169283 - RNA, 19 nt, Artificial Sequence
  Description of Artificial Sequence: Synthetic oligonucleotide
uagacgcugucguauuugu

SEQ ID NO: 169284 - RNA, 19 nt, Artificial Sequence
  Description of Artificial Sequence: Synthetic oligonucleotide
gaauauggugcaccuaccu

SEQ ID NO: 169285 - RNA, 19 nt, Artificial Sequence
  Description of Artificial Sequence: Synthetic oligonucleotide
uauagcgccugugcacggg

SEQ ID NO: 169286 - RNA, 19 nt, Artificial Sequence
  Description of Artificial Sequence: Synthetic oligonucleotide
agcaaguguguugucuguc

SEQ ID NO: 169287 - RNA, 19 nt, Artificial Sequence
  Description of Artificial Sequence: Synthetic oligonucleotide
acgaaauacgagguuuuca

SEQ ID NO: 169288 - RNA, 19 nt, Artificial Sequence
  Description of Artificial Sequence: Synthetic oligonucleotide
guaacuaucccaguagccu

SEQ ID NO: 169289 - RNA, 19 nt, Artificial Sequence
  Description of Artificial Sequence: Synthetic oligonucleotide
auacgagguuuucaucagu

SEQ ID NO: 169290 - RNA, 19 nt, Artificial Sequence
  Description of Artificial Sequence: Synthetic oligonucleotide
cucaguaccagagcuucug

SEQ ID NO: 169291 - RNA, 19 nt, Artificial Sequence
  Description of Artificial Sequence: Synthetic oligonucleotide
cauagagaguaaaugugcu

SEQ ID NO: 169292 - RNA, 19 nt, Artificial Sequence
  Description of Artificial Sequence: Synthetic oligonucleotide
cuuggguaguaacauugca

SEQ ID NO: 169293 - RNA, 19 nt, Artificial Sequence
  Description of Artificial Sequence: Synthetic oligonucleotide
aagugcuuauagcgccugu

SEQ ID NO: 169294 - RNA, 19 nt, Artificial Sequence
  Description of Artificial Sequence: Synthetic oligonucleotide
aggcauuucaagccagaau

SEQ ID NO: 169295 - RNA, 19 nt, Artificial Sequence
  Description of Artificial Sequence: Synthetic oligonucleotide
auuaugcuaugugguuagg

SEQ ID NO: 169296 - RNA, 19 nt, Artificial Sequence
  Description of Artificial Sequence: Synthetic oligonucleotide
cagucuaaaggcacgaagu

SEQ ID NO: 169297 - RNA, 19 nt, Artificial Sequence
  Description of Artificial Sequence: Synthetic oligonucleotide
gacuuucaaaucauuugaa

SEQ ID NO: 169298 - RNA, 19 nt, Artificial Sequence
  Description of Artificial Sequence: Synthetic oligonucleotide
auuacguaaacgagugaau

SEQ ID NO: 169299 - RNA, 19 nt, Artificial Sequence
  Description of Artificial Sequence: Synthetic oligonucleotide
caugcuacgaccgguguga

SEQ ID NO: 169300 - RNA, 19 nt, Artificial Sequence
  Description of Artificial Sequence: Synthetic oligonucleotide
gaauuuagauaaucucgau

SEQ ID NO: 169301 - RNA, 19 nt, Artificial Sequence
  Description of Artificial Sequence: Synthetic oligonucleotide
ugcuacuauugcacaaguu

SEQ ID NO: 169302 - RNA, 19 nt, Artificial Sequence
  Description of Artificial Sequence: Synthetic oligonucleotide
gaguugagaggccaugcua

SEQ ID NO: 169303 - RNA, 19 nt, Artificial Sequence
  Description of Artificial Sequence: Synthetic oligonucleotide
cuacgaccggugugaaggg

SEQ ID NO: 169304 - RNA, 19 nt, Artificial Sequence
  Description of Artificial Sequence: Synthetic oligonucleotide
agcgccugugcacgggcac

SEQ ID NO: 169305 - RNA, 19 nt, Artificial Sequence
  Description of Artificial Sequence: Synthetic oligonucleotide
gguucguccugccacucag

SEQ ID NO: 169306 - RNA, 19 nt, Artificial Sequence
  Description of Artificial Sequence: Synthetic oligonucleotide
ccagucuaaaggcacgaag

SEQ ID NO: 169307 - RNA, 19 nt, Artificial Sequence
  Description of Artificial Sequence: Synthetic oligonucleotide
agucugcggacccuugagu

SEQ ID NO: 169308 - RNA, 19 nt, Artificial Sequence
  Description of Artificial Sequence: Synthetic oligonucleotide
caguacuggaauagaagaa

SEQ ID NO: 169309 - RNA, 19 nt, Artificial Sequence
  Description of Artificial Sequence: Synthetic oligonucleotide
gcuacuauugcacaaguuu

SEQ ID NO: 169310 - RNA, 19 nt, Artificial Sequence
  Description of Artificial Sequence: Synthetic oligonucleotide
uggucccuccuuaaaucaa

SEQ ID NO: 169311 - RNA, 19 nt, Artificial Sequence
  Description of Artificial Sequence: Synthetic oligonucleotide
caaguccggcucuaaguuc

SEQ ID NO: 169312 - RNA, 19 nt, Artificial Sequence
  Description of Artificial Sequence: Synthetic oligonucleotide
ccuauaguuggcaauagcu

SEQ ID NO: 169313 - RNA, 19 nt, Artificial Sequence
  Description of Artificial Sequence: Synthetic oligonucleotide
cagugggacagaaaugaaa

SEQ ID NO: 169314 - RNA, 19 nt, Artificial Sequence
  Description of Artificial Sequence: Synthetic oligonucleotide
gaagucgcauagcugcucu

SEQ ID NO: 169315 - RNA, 19 nt, Artificial Sequence
  Description of Artificial Sequence: Synthetic oligonucleotide
ugugcacgggcaccugggu

SEQ ID NO: 169316 - RNA, 19 nt, Artificial Sequence
  Description of Artificial Sequence: Synthetic oligonucleotide
cagucugcggacccuugag

SEQ ID NO: 169317 - RNA, 19 nt, Artificial Sequence
  Description of Artificial Sequence: Synthetic oligonucleotide
caguguagauccauuuaaa

SEQ ID NO: 169318 - RNA, 19 nt, Artificial Sequence
  Description of Artificial Sequence: Synthetic oligonucleotide
cuaucauuauaaccuccaa

SEQ ID NO: 169319 - RNA, 19 nt, Artificial Sequence
  Description of Artificial Sequence: Synthetic oligonucleotide
ugcuacgaccggugugaag

SEQ ID NO: 169320 - RNA, 19 nt, Artificial Sequence
  Description of Artificial Sequence: Synthetic oligonucleotide
gguugaauuuagauaaucu

SEQ ID NO: 169321 - RNA, 19 nt, Artificial Sequence
  Description of Artificial Sequence: Synthetic oligonucleotide
uggugcuuucacccacaga

SEQ ID NO: 169322 - RNA, 19 nt, Artificial Sequence
  Description of Artificial Sequence: Synthetic oligonucleotide
ugaagggaauauggugcac

SEQ ID NO: 169323 - RNA, 19 nt, Artificial Sequence
  Description of Artificial Sequence: Synthetic oligonucleotide
ccuggcuaaagcacaauca

SEQ ID NO: 169324 - RNA, 19 nt, Artificial Sequence
  Description of Artificial Sequence: Synthetic oligonucleotide
ugugcgugggcaccagcuu

SEQ ID NO: 169325 - RNA, 19 nt, Artificial Sequence
  Description of Artificial Sequence: Synthetic oligonucleotide
gcgaugaugcuucccgugc

SEQ ID NO: 169326 - RNA, 19 nt, Artificial Sequence
  Description of Artificial Sequence: Synthetic oligonucleotide
aacuaucccaguagccuuu

SEQ ID NO: 169327 - RNA, 19 nt, Artificial Sequence
  Description of Artificial Sequence: Synthetic oligonucleotide
ucccacgugucuguaguaa

SEQ ID NO: 169328 - RNA, 19 nt, Artificial Sequence
  Description of Artificial Sequence: Synthetic oligonucleotide
guaagggguucguccugcc

SEQ ID NO: 169329 - RNA, 19 nt, Artificial Sequence
  Description of Artificial Sequence: Synthetic oligonucleotide
cuaaaggcacgaagucgca

SEQ ID NO: 169330 - RNA, 19 nt, Artificial Sequence
  Description of Artificial Sequence: Synthetic oligonucleotide
accggccccacgaaauacg

SEQ ID NO: 169331 - RNA, 19 nt, Artificial Sequence
  Description of Artificial Sequence: Synthetic oligonucleotide
cuggcuaaagcacaaucau

SEQ ID NO: 169332 - RNA, 19 nt, Artificial Sequence
  Description of Artificial Sequence: Synthetic oligonucleotide
agggguucguccugccacu

SEQ ID NO: 169333 - RNA, 19 nt, Artificial Sequence
  Description of Artificial Sequence: Synthetic oligonucleotide
ccacgugucuguaguaaag

SEQ ID NO: 169334 - RNA, 19 nt, Artificial Sequence
  Description of Artificial Sequence: Synthetic oligonucleotide
ggcgaugaugcuucccgug

SEQ ID NO: 169335 - RNA, 19 nt, Artificial Sequence
  Description of Artificial Sequence: Synthetic oligonucleotide
cacgaaauacgagguuuuc

SEQ ID NO: 169336 - RNA, 19 nt, Artificial Sequence
  Description of Artificial Sequence: Synthetic oligonucleotide
ggaauauggugcaccuacc

SEQ ID NO: 169337 - RNA, 19 nt, Artificial Sequence
  Description of Artificial Sequence: Synthetic oligonucleotide
gcugaaauccucacgccca

SEQ ID NO: 169338 - RNA, 19 nt, Artificial Sequence
  Description of Artificial Sequence: Synthetic oligonucleotide
gcaaucaacaagaggaagu

SEQ ID NO: 169339 - RNA, 19 nt, Artificial Sequence
  Description of Artificial Sequence: Synthetic oligonucleotide
gggugugauaguuuauuua

SEQ ID NO: 169340 - RNA, 19 nt, Artificial Sequence
  Description of Artificial Sequence: Synthetic oligonucleotide
gguaagggguucguccugc

SEQ ID NO: 169341 - RNA, 19 nt, Artificial Sequence
  Description of Artificial Sequence: Synthetic oligonucleotide
cugcgcuuggagaugaagu

SEQ ID NO: 169342 - RNA, 19 nt, Artificial Sequence
  Description of Artificial Sequence: Synthetic oligonucleotide
caggcgcgcguacagccag

SEQ ID NO: 169343 - RNA, 19 nt, Artificial Sequence
  Description of Artificial Sequence: Synthetic oligonucleotide
aaacaagugcgcaguccua

SEQ ID NO: 169344 - RNA, 19 nt, Artificial Sequence
  Description of Artificial Sequence: Synthetic oligonucleotide
ggcuuaaacagcaguggga

SEQ ID NO: 169345 - RNA, 19 nt, Artificial Sequence
  Description of Artificial Sequence: Synthetic oligonucleotide
guaguucccuuauaacaau

SEQ ID NO: 169346 - RNA, 19 nt, Artificial Sequence
  Description of Artificial Sequence: Synthetic oligonucleotide
ccggcucuaaguucugaag

SEQ ID NO: 169347 - RNA, 19 nt, Artificial Sequence
  Description of Artificial Sequence: Synthetic oligonucleotide
agaugaccgggaacuucuc

SEQ ID NO: 169348 - RNA, 19 nt, Artificial Sequence
  Description of Artificial Sequence: Synthetic oligonucleotide
uacgaccggugugaaggga

SEQ ID NO: 169349 - RNA, 19 nt, Artificial Sequence
  Description of Artificial Sequence: Synthetic oligonucleotide
gcaccuaccuuuuacccua

SEQ ID NO: 169350 - RNA, 19 nt, Artificial Sequence
  Description of Artificial Sequence: Synthetic oligonucleotide
ugcggacccuugaguugag

SEQ ID NO: 169351 - RNA, 19 nt, Artificial Sequence
  Description of Artificial Sequence: Synthetic oligonucleotide
agccuuggacugaaaacaa

SEQ ID NO: 169352 - RNA, 19 nt, Artificial Sequence
  Description of Artificial Sequence: Synthetic oligonucleotide
gagcaaguguguugucugu

SEQ ID NO: 169353 - RNA, 19 nt, Artificial Sequence
  Description of Artificial Sequence: Synthetic oligonucleotide
gaaaagcagagagcuugcu

SEQ ID NO: 169354 - RNA, 19 nt, Artificial Sequence
  Description of Artificial Sequence: Synthetic oligonucleotide
cugcggacccuugaguuga

SEQ ID NO: 169355 - RNA, 19 nt, Artificial Sequence
  Description of Artificial Sequence: Synthetic oligonucleotide
acgaccggugugaagggaa

SEQ ID NO: 169356 - RNA, 19 nt, Artificial Sequence
  Description of Artificial Sequence: Synthetic oligonucleotide
cccuccuuaaaucaaccaa

SEQ ID NO: 169357 - RNA, 19 nt, Artificial Sequence
  Description of Artificial Sequence: Synthetic oligonucleotide
acgaagucgcauagcugcu

SEQ ID NO: 169358 - RNA, 19 nt, Artificial Sequence
  Description of Artificial Sequence: Synthetic oligonucleotide
cccuggcuaaagcacaauc

SEQ ID NO: 169359 - RNA, 19 nt, Artificial Sequence
  Description of Artificial Sequence: Synthetic oligonucleotide
gccuuggacugaaaacaag

SEQ ID NO: 169360 - RNA, 19 nt, Artificial Sequence
  Description of Artificial Sequence: Synthetic oligonucleotide
gucugcggacccuugaguu

SEQ ID NO: 169361 - RNA, 19 nt, Artificial Sequence
  Description of Artificial Sequence: Synthetic oligonucleotide
caccuaccuuuuacccuac

SEQ ID NO: 169362 - RNA, 19 nt, Artificial Sequence
  Description of Artificial Sequence: Synthetic oligonucleotide
cacuaguaacucuggugcu

SEQ ID NO: 169363 - RNA, 19 nt, Artificial Sequence
  Description of Artificial Sequence: Synthetic oligonucleotide
ggguaguaacauugcagua

SEQ ID NO: 169364 - RNA, 19 nt, Artificial Sequence
  Description of Artificial Sequence: Synthetic oligonucleotide
cuucucggccaggcgcgcg

SEQ ID NO: 169365 - RNA, 19 nt, Artificial Sequence
  Description of Artificial Sequence: Synthetic oligonucleotide
caccggccccacgaaauac

SEQ ID NO: 169366 - RNA, 19 nt, Artificial Sequence
  Description of Artificial Sequence: Synthetic oligonucleotide
caccaccuauaguuggcaa

SEQ ID NO: 169367 - RNA, 19 nt, Artificial Sequence
  Description of Artificial Sequence: Synthetic oligonucleotide
agcccucccaagaacuaaa

SEQ ID NO: 169368 - RNA, 19 nt, Artificial Sequence
  Description of Artificial Sequence: Synthetic oligonucleotide
ccaacccauaugugauuac

SEQ ID NO: 169369 - RNA, 19 nt, Artificial Sequence
  Description of Artificial Sequence: Synthetic oligonucleotide
cgaaauacgagguuuucau

SEQ ID NO: 169370 - RNA, 19 nt, Artificial Sequence
  Description of Artificial Sequence: Synthetic oligonucleotide
gcacgaagucgcauagcug

SEQ ID NO: 169371 - RNA, 19 nt, Artificial Sequence
  Description of Artificial Sequence: Synthetic oligonucleotide
agggaauauggugcaccua

SEQ ID NO: 169372 - RNA, 19 nt, Artificial Sequence
  Description of Artificial Sequence: Synthetic oligonucleotide
cguaaacgagugaaucaca

SEQ ID NO: 169373 - RNA, 19 nt, Artificial Sequence
  Description of Artificial Sequence: Synthetic oligonucleotide
cguuagagaagaagggucu

SEQ ID NO: 169374 - RNA, 19 nt, Artificial Sequence
  Description of Artificial Sequence: Synthetic oligonucleotide
ccugcgcuuggagaugaag

SEQ ID NO: 169375 - RNA, 19 nt, Artificial Sequence
  Description of Artificial Sequence: Synthetic oligonucleotide
uccugcgcuuggagaugaa

SEQ ID NO: 169376 - RNA, 19 nt, Artificial Sequence
  Description of Artificial Sequence: Synthetic oligonucleotide
ccgggaacuucucggccag

SEQ ID NO: 169377 - RNA, 19 nt, Artificial Sequence
  Description of Artificial Sequence: Synthetic oligonucleotide
aguccggcucuaaguucug

SEQ ID NO: 169378 - RNA, 19 nt, Artificial Sequence
  Description of Artificial Sequence: Synthetic oligonucleotide
caugaaucaguggcauuau

SEQ ID NO: 169379 - RNA, 19 nt, Artificial Sequence
  Description of Artificial Sequence: Synthetic oligonucleotide
caagacaccucagguaauu

SEQ ID NO: 169380 - RNA, 19 nt, Artificial Sequence
  Description of Artificial Sequence: Synthetic oligonucleotide
gcaucucaccaggcgauga

SEQ ID NO: 169381 - RNA, 19 nt, Artificial Sequence
  Description of Artificial Sequence: Synthetic oligonucleotide
cucggccaggcgcgcguac

SEQ ID NO: 169382 - RNA, 19 nt, Artificial Sequence
  Description of Artificial Sequence: Synthetic oligonucleotide
ccaccuauaguuggcaaua

SEQ ID NO: 169383 - RNA, 19 nt, Artificial Sequence
  Description of Artificial Sequence: Synthetic oligonucleotide
ccggugugaagggaauaug

SEQ ID NO: 169384 - RNA, 19 nt, Artificial Sequence
  Description of Artificial Sequence: Synthetic oligonucleotide
gucccacgugucuguagua

SEQ ID NO: 169385 - RNA, 19 nt, Artificial Sequence
  Description of Artificial Sequence: Synthetic oligonucleotide
caucucaccaggcgaugau

SEQ ID NO: 169386 - RNA, 19 nt, Artificial Sequence
  Description of Artificial Sequence: Synthetic oligonucleotide
ccauaccaacucaaacuua

SEQ ID NO: 169387 - RNA, 19 nt, Artificial Sequence
  Description of Artificial Sequence: Synthetic oligonucleotide
ggguucguccugccacuca

SEQ ID NO: 169388 - RNA, 19 nt, Artificial Sequence
  Description of Artificial Sequence: Synthetic oligonucleotide
gccacuagacgcugucgua

SEQ ID NO: 169389 - RNA, 19 nt, Artificial Sequence
  Description of Artificial Sequence: Synthetic oligonucleotide
cacuagacgcugucguauu

SEQ ID NO: 169390 - RNA, 19 nt, Artificial Sequence
  Description of Artificial Sequence: Synthetic oligonucleotide
augcuacgaccggugugaa

SEQ ID NO: 169391 - RNA, 19 nt, Artificial Sequence
  Description of Artificial Sequence: Synthetic oligonucleotide
gcguacagccagucaaagu

SEQ ID NO: 169392 - RNA, 19 nt, Artificial Sequence
  Description of Artificial Sequence: Synthetic oligonucleotide
gcucuaguuggaguuugua

SEQ ID NO: 169393 - RNA, 19 nt, Artificial Sequence
  Description of Artificial Sequence: Synthetic oligonucleotide
ccccacgcaccacgcacag

SEQ ID NO: 169394 - RNA, 19 nt, Artificial Sequence
  Description of Artificial Sequence: Synthetic oligonucleotide
ccggccccacgaaauacga

SEQ ID NO: 169395 - RNA, 19 nt, Artificial Sequence
  Description of Artificial Sequence: Synthetic oligonucleotide
aagcgcccgguggccugcu

SEQ ID NO: 169396 - RNA, 19 nt, Artificial Sequence
  Description of Artificial Sequence: Synthetic oligonucleotide
gcgccugugcacgggcacc

SEQ ID NO: 169397 - RNA, 19 nt, Artificial Sequence
  Description of Artificial Sequence: Synthetic oligonucleotide
cccacgaaauacgagguuu

SEQ ID NO: 169398 - RNA, 19 nt, Artificial Sequence
  Description of Artificial Sequence: Synthetic oligonucleotide
caacaggaccaagaacguu

SEQ ID NO: 169399 - RNA, 19 nt, Artificial Sequence
  Description of Artificial Sequence: Synthetic oligonucleotide
gccccacgaaauacgaggu

SEQ ID NO: 169400 - RNA, 19 nt, Artificial Sequence
  Description of Artificial Sequence: Synthetic oligonucleotide
ccacgaaauacgagguuuu

SEQ ID NO: 169401 - RNA, 19 nt, Artificial Sequence
  Description of Artificial Sequence: Synthetic oligonucleotide
cucccaccggccccacgaa

SEQ ID NO: 169402 - RNA, 19 nt, Artificial Sequence
  Description of Artificial Sequence: Synthetic oligonucleotide
cggccccacgaaauacgag

SEQ ID NO: 169403 - RNA, 19 nt, Artificial Sequence
  Description of Artificial Sequence: Synthetic oligonucleotide
ggcgcgcguacagccaguc

SEQ ID NO: 169404 - RNA, 19 nt, Artificial Sequence
  Description of Artificial Sequence: Synthetic oligonucleotide
gggguucguccugccacuc

SEQ ID NO: 169405 - RNA, 19 nt, Artificial Sequence
  Description of Artificial Sequence: Synthetic oligonucleotide
aggcgcgcguacagccagu

SEQ ID NO: 169406 - RNA, 19 nt, Artificial Sequence
  Description of Artificial Sequence: Synthetic oligonucleotide
ccacuagacgcugucguau

SEQ ID NO: 169407 - RNA, 19 nt, Artificial Sequence
  Description of Artificial Sequence: Synthetic oligonucleotide
gcgcgcguacagccaguca

SEQ ID NO: 169408 - RNA, 19 nt, Artificial Sequence
  Description of Artificial Sequence: Synthetic oligonucleotide
cccaccggccccacgaaau

SEQ ID NO: 169409 - RNA, 19 nt, Artificial Sequence
  Description of Artificial Sequence: Synthetic oligonucleotide
cccacgcaccacgcacagc

SEQ ID NO: 169410 - RNA, 19 nt, Artificial Sequence
  Description of Artificial Sequence: Synthetic oligonucleotide
ccggguggcuggccaugug

SEQ ID NO: 169411 - RNA, 19 nt, Artificial Sequence
  Description of Artificial Sequence: Synthetic oligonucleotide
gcggacccuugaguugaga

SEQ ID NO: 169412 - RNA, 19 nt, Artificial Sequence
  Description of Artificial Sequence: Synthetic oligonucleotide
ccccacgaaauacgagguu

SEQ ID NO: 169413 - RNA, 19 nt, Artificial Sequence
  Description of Artificial Sequence: Synthetic oligonucleotide
cgaccggugugaagggaau

SEQ ID NO: 169414 - RNA, 19 nt, Artificial Sequence
  Description of Artificial Sequence: Synthetic oligonucleotide
ccgagaugaccgggaacuu

SEQ ID NO: 169415 - RNA, 19 nt, Artificial Sequence
  Description of Artificial Sequence: Synthetic oligonucleotide
aaauacacaauuuucuggc

SEQ ID NO: 169416 - RNA, 19 nt, Artificial Sequence
  Description of Artificial Sequence: Synthetic oligonucleotide
aaaauaagguuuuggggcc

SEQ ID NO: 169417 - RNA, 19 nt, Artificial Sequence
  Description of Artificial Sequence: Synthetic oligonucleotide
uucacgaaacccaagaugg

SEQ ID NO: 169418 - RNA, 19 nt, Artificial Sequence
  Description of Artificial Sequence: Synthetic oligonucleotide
cuuagaauauacuucaucc

SEQ ID NO: 169419 - RNA, 19 nt, Artificial Sequence
  Description of Artificial Sequence: Synthetic oligonucleotide
uauuguaacauaaaauaca

SEQ ID NO: 169420 - RNA, 19 nt, Artificial Sequence
  Description of Artificial Sequence: Synthetic oligonucleotide
uuaucaacaagcuugcuug

SEQ ID NO: 169421 - RNA, 19 nt, Artificial Sequence
  Description of Artificial Sequence: Synthetic oligonucleotide
caaauuagggugcaaaugg

SEQ ID NO: 169422 - RNA, 19 nt, Artificial Sequence
  Description of Artificial Sequence: Synthetic oligonucleotide
aauucaaguccccaagcgg

SEQ ID NO: 169423 - RNA, 19 nt, Artificial Sequence
  Description of Artificial Sequence: Synthetic oligonucleotide
acauauaugagguaauuca

SEQ ID NO: 169424 - RNA, 19 nt, Artificial Sequence
  Description of Artificial Sequence: Synthetic oligonucleotide
uguaguacuuagaauauac

SEQ ID NO: 169425 - RNA, 19 nt, Artificial Sequence
  Description of Artificial Sequence: Synthetic oligonucleotide
uaauucaaguccccaagcg

SEQ ID NO: 169426 - RNA, 19 nt, Artificial Sequence
  Description of Artificial Sequence: Synthetic oligonucleotide
uauauacuaaucugccucg

SEQ ID NO: 169427 - RNA, 19 nt, Artificial Sequence
  Description of Artificial Sequence: Synthetic oligonucleotide
caauaaaucgagaagugug

SEQ ID NO: 169428 - RNA, 19 nt, Artificial Sequence
  Description of Artificial Sequence: Synthetic oligonucleotide
aguacuuagaauauacuuc

SEQ ID NO: 169429 - RNA, 19 nt, Artificial Sequence
  Description of Artificial Sequence: Synthetic oligonucleotide
cuugauucguuuuagggac

SEQ ID NO: 169430 - RNA, 19 nt, Artificial Sequence
  Description of Artificial Sequence: Synthetic oligonucleotide
uuuucauuguaagagcuag

SEQ ID NO: 169431 - RNA, 19 nt, Artificial Sequence
  Description of Artificial Sequence: Synthetic oligonucleotide
uauguuucugaagugggcg

SEQ ID NO: 169432 - RNA, 19 nt, Artificial Sequence
  Description of Artificial Sequence: Synthetic oligonucleotide
guuacugggacaaacaggc

SEQ ID NO: 169433 - RNA, 19 nt, Artificial Sequence
  Description of Artificial Sequence: Synthetic oligonucleotide
aaggucuugacuugaaaga

SEQ ID NO: 169434 - RNA, 19 nt, Artificial Sequence
  Description of Artificial Sequence: Synthetic oligonucleotide
uuuaacaguaaaacacuga

SEQ ID NO: 169435 - RNA, 19 nt, Artificial Sequence
  Description of Artificial Sequence: Synthetic oligonucleotide
ucacguauccaucagcggc

SEQ ID NO: 169436 - RNA, 19 nt, Artificial Sequence
  Description of Artificial Sequence: Synthetic oligonucleotide
ucugcuauccccaugcccu

SEQ ID NO: 169437 - RNA, 19 nt, Artificial Sequence
  Description of Artificial Sequence: Synthetic oligonucleotide
ugcuucucgaugaugaaug

SEQ ID NO: 169438 - RNA, 19 nt, Artificial Sequence
  Description of Artificial Sequence: Synthetic oligonucleotide
aggaguauguuccuuuaac

SEQ ID NO: 169439 - RNA, 19 nt, Artificial Sequence
  Description of Artificial Sequence: Synthetic oligonucleotide
ugauaaauucagaaguuau

SEQ ID NO: 169440 - RNA, 19 nt, Artificial Sequence
  Description of Artificial Sequence: Synthetic oligonucleotide
uauguaucugaaauaacau

SEQ ID NO: 169441 - RNA, 19 nt, Artificial Sequence
  Description of Artificial Sequence: Synthetic oligonucleotide
uucauuguaagagcuagcc

SEQ ID NO: 169442 - RNA, 19 nt, Artificial Sequence
  Description of Artificial Sequence: Synthetic oligonucleotide
caaacaggccacaugacag

SEQ ID NO: 169443 - RNA, 19 nt, Artificial Sequence
  Description of Artificial Sequence: Synthetic oligonucleotide
agugugucaaguccacacc

SEQ ID NO: 169444 - RNA, 19 nt, Artificial Sequence
  Description of Artificial Sequence: Synthetic oligonucleotide
aguguaauuucguccuggc

SEQ ID NO: 169445 - RNA, 19 nt, Artificial Sequence
  Description of Artificial Sequence: Synthetic oligonucleotide
gaaugugccggaugcagcg

SEQ ID NO: 169446 - RNA, 19 nt, Artificial Sequence
  Description of Artificial Sequence: Synthetic oligonucleotide
gguaaaaggcaucagauuc

SEQ ID NO: 169447 - RNA, 19 nt, Artificial Sequence
  Description of Artificial Sequence: Synthetic oligonucleotide
gacuauguuucugaagugg

SEQ ID NO: 169448 - RNA, 19 nt, Artificial Sequence
  Description of Artificial Sequence: Synthetic oligonucleotide
ucugccucgacacuaaaau

SEQ ID NO: 169449 - RNA, 19 nt, Artificial Sequence
  Description of Artificial Sequence: Synthetic oligonucleotide
gacacuaaaauauguaucu

SEQ ID NO: 169450 - RNA, 19 nt, Artificial Sequence
  Description of Artificial Sequence: Synthetic oligonucleotide
uugagaggaagcuuggaac

SEQ ID NO: 169451 - RNA, 19 nt, Artificial Sequence
  Description of Artificial Sequence: Synthetic oligonucleotide
uguuccuuuaacaguaaaa

SEQ ID NO: 169452 - RNA, 19 nt, Artificial Sequence
  Description of Artificial Sequence: Synthetic oligonucleotide
uuggugauacuccaugaca

SEQ ID NO: 169453 - RNA, 19 nt, Artificial Sequence
  Description of Artificial Sequence: Synthetic oligonucleotide
uuugugacacugaagggaa

SEQ ID NO: 169454 - RNA, 19 nt, Artificial Sequence
  Description of Artificial Sequence: Synthetic oligonucleotide
gaucagaccucuugauucg

SEQ ID NO: 169455 - RNA, 19 nt, Artificial Sequence
  Description of Artificial Sequence: Synthetic oligonucleotide
uucguuuuagggacuaugu

SEQ ID NO: 169456 - RNA, 19 nt, Artificial Sequence
  Description of Artificial Sequence: Synthetic oligonucleotide
uuccuagcaaaccugcuga

SEQ ID NO: 169457 - RNA, 19 nt, Artificial Sequence
  Description of Artificial Sequence: Synthetic oligonucleotide
cuugacuugaaagaccagc

SEQ ID NO: 169458 - RNA, 19 nt, Artificial Sequence
  Description of Artificial Sequence: Synthetic oligonucleotide
uuagggacuauguuucuga

SEQ ID NO: 169459 - RNA, 19 nt, Artificial Sequence
  Description of Artificial Sequence: Synthetic oligonucleotide
ugcuuguucacgaaaccca

SEQ ID NO: 169460 - RNA, 19 nt, Artificial Sequence
  Description of Artificial Sequence: Synthetic oligonucleotide
uuuccacccacgcugaacu

SEQ ID NO: 169461 - RNA, 19 nt, Artificial Sequence
  Description of Artificial Sequence: Synthetic oligonucleotide
ucugcagucuaccaaaguu

SEQ ID NO: 169462 - RNA, 19 nt, Artificial Sequence
  Description of Artificial Sequence: Synthetic oligonucleotide
uccucaagcaguucuagcu

SEQ ID NO: 169463 - RNA, 19 nt, Artificial Sequence
  Description of Artificial Sequence: Synthetic oligonucleotide
aaguguaauuucguccugg

SEQ ID NO: 169464 - RNA, 19 nt, Artificial Sequence
  Description of Artificial Sequence: Synthetic oligonucleotide
ugccucgacacuaaaauau

SEQ ID NO: 169465 - RNA, 19 nt, Artificial Sequence
  Description of Artificial Sequence: Synthetic oligonucleotide
cuagcaaaccugcugacug

SEQ ID NO: 169466 - RNA, 19 nt, Artificial Sequence
  Description of Artificial Sequence: Synthetic oligonucleotide
gaaucgcugaaucucagca

SEQ ID NO: 169467 - RNA, 19 nt, Artificial Sequence
  Description of Artificial Sequence: Synthetic oligonucleotide
auacuucauccuuuggccg

SEQ ID NO: 169468 - RNA, 19 nt, Artificial Sequence
  Description of Artificial Sequence: Synthetic oligonucleotide
gccauuaucaacaagcuug

SEQ ID NO: 169469 - RNA, 19 nt, Artificial Sequence
  Description of Artificial Sequence: Synthetic oligonucleotide
ucgacacuaaaauauguau

SEQ ID NO: 169470 - RNA, 19 nt, Artificial Sequence
  Description of Artificial Sequence: Synthetic oligonucleotide
uaaaucgagaaguguguca

SEQ ID NO: 169471 - RNA, 19 nt, Artificial Sequence
  Description of Artificial Sequence: Synthetic oligonucleotide
ugcacguucagccuuccca

SEQ ID NO: 169472 - RNA, 19 nt, Artificial Sequence
  Description of Artificial Sequence: Synthetic oligonucleotide
auacacaauuuucuggcug

SEQ ID NO: 169473 - RNA, 19 nt, Artificial Sequence
  Description of Artificial Sequence: Synthetic oligonucleotide
ugguguguaguacuuagaa

SEQ ID NO: 169474 - RNA, 19 nt, Artificial Sequence
  Description of Artificial Sequence: Synthetic oligonucleotide
auuucguccuggcaaguuc

SEQ ID NO: 169475 - RNA, 19 nt, Artificial Sequence
  Description of Artificial Sequence: Synthetic oligonucleotide
aggcauagcgaauggcacc

SEQ ID NO: 169476 - RNA, 19 nt, Artificial Sequence
  Description of Artificial Sequence: Synthetic oligonucleotide
uguguaguacuuagaauau

SEQ ID NO: 169477 - RNA, 19 nt, Artificial Sequence
  Description of Artificial Sequence: Synthetic oligonucleotide
aaaucgagaagugugucaa

SEQ ID NO: 169478 - RNA, 19 nt, Artificial Sequence
  Description of Artificial Sequence: Synthetic oligonucleotide
aaucauugcggguguucuc

SEQ ID NO: 169479 - RNA, 19 nt, Artificial Sequence
  Description of Artificial Sequence: Synthetic oligonucleotide
agaaaauugcacugaggcu

SEQ ID NO: 169480 - RNA, 19 nt, Artificial Sequence
  Description of Artificial Sequence: Synthetic oligonucleotide
ugaaucuccuuccaccccu

SEQ ID NO: 169481 - RNA, 19 nt, Artificial Sequence
  Description of Artificial Sequence: Synthetic oligonucleotide
ucauuguaagagcuagcca

SEQ ID NO: 169482 - RNA, 19 nt, Artificial Sequence
  Description of Artificial Sequence: Synthetic oligonucleotide
cuagccacguugaaucucc

SEQ ID NO: 169483 - RNA, 19 nt, Artificial Sequence
  Description of Artificial Sequence: Synthetic oligonucleotide
auauaugagguaauucaag

SEQ ID NO: 169484 - RNA, 19 nt, Artificial Sequence
  Description of Artificial Sequence: Synthetic oligonucleotide
gagcuagccacguugaauc

SEQ ID NO: 169485 - RNA, 19 nt, Artificial Sequence
  Description of Artificial Sequence: Synthetic oligonucleotide
aaaugucugguugaucuga

SEQ ID NO: 169486 - RNA, 19 nt, Artificial Sequence
  Description of Artificial Sequence: Synthetic oligonucleotide
guaauucaaguccccaagc

SEQ ID NO: 169487 - RNA, 19 nt, Artificial Sequence
  Description of Artificial Sequence: Synthetic oligonucleotide
auaaaucgagaaguguguc

SEQ ID NO: 169488 - RNA, 19 nt, Artificial Sequence
  Description of Artificial Sequence: Synthetic oligonucleotide
uagugccccagcuugaucu

SEQ ID NO: 169489 - RNA, 19 nt, Artificial Sequence
  Description of Artificial Sequence: Synthetic oligonucleotide
agcgacaaggucuugacuu

SEQ ID NO: 169490 - RNA, 19 nt, Artificial Sequence
  Description of Artificial Sequence: Synthetic oligonucleotide
uuugguggcuauauacuaa

SEQ ID NO: 169491 - RNA, 19 nt, Artificial Sequence
  Description of Artificial Sequence: Synthetic oligonucleotide
aaaguguaauuucguccug

SEQ ID NO: 169492 - RNA, 19 nt, Artificial Sequence
  Description of Artificial Sequence: Synthetic oligonucleotide
gguaauucaaguccccaag

SEQ ID NO: 169493 - RNA, 19 nt, Artificial Sequence
  Description of Artificial Sequence: Synthetic oligonucleotide
guuuuagggacuauguuuc

SEQ ID NO: 169494 - RNA, 19 nt, Artificial Sequence
  Description of Artificial Sequence: Synthetic oligonucleotide
uaagagcuagccacguuga

SEQ ID NO: 169495 - RNA, 19 nt, Artificial Sequence
  Description of Artificial Sequence: Synthetic oligonucleotide
ucaacaagcuugcuugauc

SEQ ID NO: 169496 - RNA, 19 nt, Artificial Sequence
  Description of Artificial Sequence: Synthetic oligonucleotide
accgcucucugcuugcccc

SEQ ID NO: 169497 - RNA, 19 nt, Artificial Sequence
  Description of Artificial Sequence: Synthetic oligonucleotide
acgaaacccaagauggccc

SEQ ID NO: 169498 - RNA, 19 nt, Artificial Sequence
  Description of Artificial Sequence: Synthetic oligonucleotide
aaacaggauugugaacuuc

SEQ ID NO: 169499 - RNA, 19 nt, Artificial Sequence
  Description of Artificial Sequence: Synthetic oligonucleotide
uauacuaaucugccucgac

SEQ ID NO: 169500 - RNA, 19 nt, Artificial Sequence
  Description of Artificial Sequence: Synthetic oligonucleotide
cugguugaucugaaggugc

SEQ ID NO: 169501 - RNA, 19 nt, Artificial Sequence
  Description of Artificial Sequence: Synthetic oligonucleotide
uucacguauccaucagcgg

SEQ ID NO: 169502 - RNA, 19 nt, Artificial Sequence
  Description of Artificial Sequence: Synthetic oligonucleotide
ugagguaauucaagucccc

SEQ ID NO: 169503 - RNA, 19 nt, Artificial Sequence
  Description of Artificial Sequence: Synthetic oligonucleotide
ucuagugguaaaaggcauc

SEQ ID NO: 169504 - RNA, 19 nt, Artificial Sequence
  Description of Artificial Sequence: Synthetic oligonucleotide
agcaccccauaguaguggc

SEQ ID NO: 169505 - RNA, 19 nt, Artificial Sequence
  Description of Artificial Sequence: Synthetic oligonucleotide
uuucguccuggcaaguucu

SEQ ID NO: 169506 - RNA, 19 nt, Artificial Sequence
  Description of Artificial Sequence: Synthetic oligonucleotide
ucguucuugagcagggacu

SEQ ID NO: 169507 - RNA, 19 nt, Artificial Sequence
  Description of Artificial Sequence: Synthetic oligonucleotide
acgacacaggaguauguuc

SEQ ID NO: 169508 - RNA, 19 nt, Artificial Sequence
  Description of Artificial Sequence: Synthetic oligonucleotide
ugauacuccaugacacaac

SEQ ID NO: 169509 - RNA, 19 nt, Artificial Sequence
  Description of Artificial Sequence: Synthetic oligonucleotide
gaaaauugcacugaggcuu

SEQ ID NO: 169510 - RNA, 19 nt, Artificial Sequence
  Description of Artificial Sequence: Synthetic oligonucleotide
gucguauguguucuggagc

SEQ ID NO: 169511 - RNA, 19 nt, Artificial Sequence
  Description of Artificial Sequence: Synthetic oligonucleotide
auuugacaucaaauuaggg

SEQ ID NO: 169512 - RNA, 19 nt, Artificial Sequence
  Description of Artificial Sequence: Synthetic oligonucleotide
cacugauaaauucagaagu

SEQ ID NO: 169513 - RNA, 19 nt, Artificial Sequence
  Description of Artificial Sequence: Synthetic oligonucleotide
aacaagcuugcuugaucug

SEQ ID NO: 169514 - RNA, 19 nt, Artificial Sequence
  Description of Artificial Sequence: Synthetic oligonucleotide
aaccgcucucugcuugccc

SEQ ID NO: 169515 - RNA, 19 nt, Artificial Sequence
  Description of Artificial Sequence: Synthetic oligonucleotide
acugaugauggucgccuuc

SEQ ID NO: 169516 - RNA, 19 nt, Artificial Sequence
  Description of Artificial Sequence: Synthetic oligonucleotide
agucccuuaagccuggauu

SEQ ID NO: 169517 - RNA, 19 nt, Artificial Sequence
  Description of Artificial Sequence: Synthetic oligonucleotide
uucggaaucgcugaaucuc

SEQ ID NO: 169518 - RNA, 19 nt, Artificial Sequence
  Description of Artificial Sequence: Synthetic oligonucleotide
gugaccuggguacagagga

SEQ ID NO: 169519 - RNA, 19 nt, Artificial Sequence
  Description of Artificial Sequence: Synthetic oligonucleotide
ucggaaucgcugaaucuca

SEQ ID NO: 169520 - RNA, 19 nt, Artificial Sequence
  Description of Artificial Sequence: Synthetic oligonucleotide
ucaccgacucugcaccacg

SEQ ID NO: 169521 - RNA, 19 nt, Artificial Sequence
  Description of Artificial Sequence: Synthetic oligonucleotide
cugcagucuaccaaaguuc

SEQ ID NO: 169522 - RNA, 19 nt, Artificial Sequence
  Description of Artificial Sequence: Synthetic oligonucleotide
auagcgaauggcacccugc

SEQ ID NO: 169523 - RNA, 19 nt, Artificial Sequence
  Description of Artificial Sequence: Synthetic oligonucleotide
uugaaucuccuuccacccc

SEQ ID NO: 169524 - RNA, 19 nt, Artificial Sequence
  Description of Artificial Sequence: Synthetic oligonucleotide
cuuggugauacuccaugac

SEQ ID NO: 169525 - RNA, 19 nt, Artificial Sequence
  Description of Artificial Sequence: Synthetic oligonucleotide
acguugaaucuccuuccac

SEQ ID NO: 169526 - RNA, 19 nt, Artificial Sequence
  Description of Artificial Sequence: Synthetic oligonucleotide
uuuagggacuauguuucug

SEQ ID NO: 169527 - RNA, 19 nt, Artificial Sequence
  Description of Artificial Sequence: Synthetic oligonucleotide
uuucggaaucgcugaaucu

SEQ ID NO: 169528 - RNA, 19 nt, Artificial Sequence
  Description of Artificial Sequence: Synthetic oligonucleotide
gaucgggaaacacauauau

SEQ ID NO: 169529 - RNA, 19 nt, Artificial Sequence
  Description of Artificial Sequence: Synthetic oligonucleotide
cuuccaccccuacaaaagc

SEQ ID NO: 169530 - RNA, 19 nt, Artificial Sequence
  Description of Artificial Sequence: Synthetic oligonucleotide
auucaaguccccaagcggu

SEQ ID NO: 169531 - RNA, 19 nt, Artificial Sequence
  Description of Artificial Sequence: Synthetic oligonucleotide
auucguuuuagggacuaug

SEQ ID NO: 169532 - RNA, 19 nt, Artificial Sequence
  Description of Artificial Sequence: Synthetic oligonucleotide
cacgaaacccaagauggcc

SEQ ID NO: 169533 - RNA, 19 nt, Artificial Sequence
  Description of Artificial Sequence: Synthetic oligonucleotide
gucccuuaagccuggauuc

SEQ ID NO: 169534 - RNA, 19 nt, Artificial Sequence
  Description of Artificial Sequence: Synthetic oligonucleotide
uugguggcuauauacuaau

SEQ ID NO: 169535 - RNA, 19 nt, Artificial Sequence
  Description of Artificial Sequence: Synthetic oligonucleotide
cucgccgcuguaaucauug

SEQ ID NO: 169536 - RNA, 19 nt, Artificial Sequence
  Description of Artificial Sequence: Synthetic oligonucleotide
agggacuauguuucugaag

SEQ ID NO: 169537 - RNA, 19 nt, Artificial Sequence
  Description of Artificial Sequence: Synthetic oligonucleotide
ugagucaaacaggauugug

SEQ ID NO: 169538 - RNA, 19 nt, Artificial Sequence
  Description of Artificial Sequence: Synthetic oligonucleotide
cccaauuuauacacaauac

SEQ ID NO: 169539 - RNA, 19 nt, Artificial Sequence
  Description of Artificial Sequence: Synthetic oligonucleotide
gaucucgccgcuguaauca

SEQ ID NO: 169540 - RNA, 19 nt, Artificial Sequence
  Description of Artificial Sequence: Synthetic oligonucleotide
uaucaacaagcuugcuuga

SEQ ID NO: 169541 - RNA, 19 nt, Artificial Sequence
  Description of Artificial Sequence: Synthetic oligonucleotide
gcuguaaucauugcgggug

SEQ ID NO: 169542 - RNA, 19 nt, Artificial Sequence
  Description of Artificial Sequence: Synthetic oligonucleotide
cacauauaugagguaauuc

SEQ ID NO: 169543 - RNA, 19 nt, Artificial Sequence
  Description of Artificial Sequence: Synthetic oligonucleotide
aacuguguggaagccuuug

SEQ ID NO: 169544 - RNA, 19 nt, Artificial Sequence
  Description of Artificial Sequence: Synthetic oligonucleotide
uuguacagaaugugccgga

SEQ ID NO: 169545 - RNA, 19 nt, Artificial Sequence
  Description of Artificial Sequence: Synthetic oligonucleotide
cuuguucacgaaacccaag

SEQ ID NO: 169546 - RNA, 19 nt, Artificial Sequence
  Description of Artificial Sequence: Synthetic oligonucleotide
uggccgaucgggaaacaca

SEQ ID NO: 169547 - RNA, 19 nt, Artificial Sequence
  Description of Artificial Sequence: Synthetic oligonucleotide
ugguaaaaggcaucagauu

SEQ ID NO: 169548 - RNA, 19 nt, Artificial Sequence
  Description of Artificial Sequence: Synthetic oligonucleotide
ugcuccaauccaacuugag

SEQ ID NO: 169549 - RNA, 19 nt, Artificial Sequence
  Description of Artificial Sequence: Synthetic oligonucleotide
agacgcagcuccucaaaug

SEQ ID NO: 169550 - RNA, 19 nt, Artificial Sequence
  Description of Artificial Sequence: Synthetic oligonucleotide
uuuuagggacuauguuucu

SEQ ID NO: 169551 - RNA, 19 nt, Artificial Sequence
  Description of Artificial Sequence: Synthetic oligonucleotide
ugagugguaaccgcucucu

SEQ ID NO: 169552 - RNA, 19 nt, Artificial Sequence
  Description of Artificial Sequence: Synthetic oligonucleotide
auauguuuauuuacuugca

SEQ ID NO: 169553 - RNA, 19 nt, Artificial Sequence
  Description of Artificial Sequence: Synthetic oligonucleotide
uuccucaagcaguucuagc

SEQ ID NO: 169554 - RNA, 19 nt, Artificial Sequence
  Description of Artificial Sequence: Synthetic oligonucleotide
gggacuauguuucugaagu

SEQ ID NO: 169555 - RNA, 19 nt, Artificial Sequence
  Description of Artificial Sequence: Synthetic oligonucleotide
aucgagaagugugucaagu

SEQ ID NO: 169556 - RNA, 19 nt, Artificial Sequence
  Description of Artificial Sequence: Synthetic oligonucleotide
ggaguauguuccuuuaaca

SEQ ID NO: 169557 - RNA, 19 nt, Artificial Sequence
  Description of Artificial Sequence: Synthetic oligonucleotide
ucguuuuagggacuauguu

SEQ ID NO: 169558 - RNA, 19 nt, Artificial Sequence
  Description of Artificial Sequence: Synthetic oligonucleotide
agguaauucaaguccccaa

SEQ ID NO: 169559 - RNA, 19 nt, Artificial Sequence
  Description of Artificial Sequence: Synthetic oligonucleotide
uaaucugccucgacacuaa

SEQ ID NO: 169560 - RNA, 19 nt, Artificial Sequence
  Description of Artificial Sequence: Synthetic oligonucleotide
ggucguauguguucuggag

SEQ ID NO: 169561 - RNA, 19 nt, Artificial Sequence
  Description of Artificial Sequence: Synthetic oligonucleotide
aggugaccuggguacagag

SEQ ID NO: 169562 - RNA, 19 nt, Artificial Sequence
  Description of Artificial Sequence: Synthetic oligonucleotide
cucugcuauccccaugccc

SEQ ID NO: 169563 - RNA, 19 nt, Artificial Sequence
  Description of Artificial Sequence: Synthetic oligonucleotide
cagaaugugccggaugcag

SEQ ID NO: 169564 - RNA, 19 nt, Artificial Sequence
  Description of Artificial Sequence: Synthetic oligonucleotide
acuaaucugccucgacacu

SEQ ID NO: 169565 - RNA, 19 nt, Artificial Sequence
  Description of Artificial Sequence: Synthetic oligonucleotide
agaggacgguggcugucgc

SEQ ID NO: 169566 - RNA, 19 nt, Artificial Sequence
  Description of Artificial Sequence: Synthetic oligonucleotide
uugauucguuuuagggacu

SEQ ID NO: 169567 - RNA, 19 nt, Artificial Sequence
  Description of Artificial Sequence: Synthetic oligonucleotide
uaguccucgaggugacugc

SEQ ID NO: 169568 - RNA, 19 nt, Artificial Sequence
  Description of Artificial Sequence: Synthetic oligonucleotide
cauccagcgagcacccgag

SEQ ID NO: 169569 - RNA, 19 nt, Artificial Sequence
  Description of Artificial Sequence: Synthetic oligonucleotide
ucggucaccgacucugcac

SEQ ID NO: 169570 - RNA, 19 nt, Artificial Sequence
  Description of Artificial Sequence: Synthetic oligonucleotide
uucaaguccccaagcgguc

SEQ ID NO: 169571 - RNA, 19 nt, Artificial Sequence
  Description of Artificial Sequence: Synthetic oligonucleotide
acccuugugaggguuacug

SEQ ID NO: 169572 - RNA, 19 nt, Artificial Sequence
  Description of Artificial Sequence: Synthetic oligonucleotide
gacgcagcuccucaaaugu

SEQ ID NO: 169573 - RNA, 19 nt, Artificial Sequence
  Description of Artificial Sequence: Synthetic oligonucleotide
gaaacacauauaugaggua

SEQ ID NO: 169574 - RNA, 19 nt, Artificial Sequence
  Description of Artificial Sequence: Synthetic oligonucleotide
auagugccccagcuugauc

SEQ ID NO: 169575 - RNA, 19 nt, Artificial Sequence
  Description of Artificial Sequence: Synthetic oligonucleotide
uguucaggaucucgccgcu

SEQ ID NO: 169576 - RNA, 19 nt, Artificial Sequence
  Description of Artificial Sequence: Synthetic oligonucleotide
cguugaaucuccuuccacc

SEQ ID NO: 169577 - RNA, 19 nt, Artificial Sequence
  Description of Artificial Sequence: Synthetic oligonucleotide
ggagguugcuucucgauga

SEQ ID NO: 169578 - RNA, 19 nt, Artificial Sequence
  Description of Artificial Sequence: Synthetic oligonucleotide
aaaauugcacugaggcuuu

SEQ ID NO: 169579 - RNA, 19 nt, Artificial Sequence
  Description of Artificial Sequence: Synthetic oligonucleotide
aaguccccaagcggucagc

SEQ ID NO: 169580 - RNA, 19 nt, Artificial Sequence
  Description of Artificial Sequence: Synthetic oligonucleotide
aacucccaacggcacccag

SEQ ID NO: 169581 - RNA, 19 nt, Artificial Sequence
  Description of Artificial Sequence: Synthetic oligonucleotide
caacaagcuugcuugaucu

SEQ ID NO: 169582 - RNA, 19 nt, Artificial Sequence
  Description of Artificial Sequence: Synthetic oligonucleotide
cucgacacuaaaauaugua

SEQ ID NO: 169583 - RNA, 19 nt, Artificial Sequence
  Description of Artificial Sequence: Synthetic oligonucleotide
cucgcaugggacuggugug

SEQ ID NO: 169584 - RNA, 19 nt, Artificial Sequence
  Description of Artificial Sequence: Synthetic oligonucleotide
aauuucguccuggcaaguu

SEQ ID NO: 169585 - RNA, 19 nt, Artificial Sequence
  Description of Artificial Sequence: Synthetic oligonucleotide
uguaagagcuagccacguu

SEQ ID NO: 169586 - RNA, 19 nt, Artificial Sequence
  Description of Artificial Sequence: Synthetic oligonucleotide
ccagcuauuccucaggaca

SEQ ID NO: 169587 - RNA, 19 nt, Artificial Sequence
  Description of Artificial Sequence: Synthetic oligonucleotide
aagagcuagccacguugaa

SEQ ID NO: 169588 - RNA, 19 nt, Artificial Sequence
  Description of Artificial Sequence: Synthetic oligonucleotide
ucccguuguuggcuucccg

SEQ ID NO: 169589 - RNA, 19 nt, Artificial Sequence
  Description of Artificial Sequence: Synthetic oligonucleotide
uagggacuauguuucugaa

SEQ ID NO: 169590 - RNA, 19 nt, Artificial Sequence
  Description of Artificial Sequence: Synthetic oligonucleotide
uucggucaccgacucugca

SEQ ID NO: 169591 - RNA, 19 nt, Artificial Sequence
  Description of Artificial Sequence: Synthetic oligonucleotide
caggccugagugguaaccg

SEQ ID NO: 169592 - RNA, 19 nt, Artificial Sequence
  Description of Artificial Sequence: Synthetic oligonucleotide
gguucauaugcacguucag

SEQ ID NO: 169593 - RNA, 19 nt, Artificial Sequence
  Description of Artificial Sequence: Synthetic oligonucleotide
ggaaaagaggugaccuggg

SEQ ID NO: 169594 - RNA, 19 nt, Artificial Sequence
  Description of Artificial Sequence: Synthetic oligonucleotide
uggcugccccaauuuauac

SEQ ID NO: 169595 - RNA, 19 nt, Artificial Sequence
  Description of Artificial Sequence: Synthetic oligonucleotide
uccuagcaaaccugcugac

SEQ ID NO: 169596 - RNA, 19 nt, Artificial Sequence
  Description of Artificial Sequence: Synthetic oligonucleotide
ugguggcuauauacuaauc

SEQ ID NO: 169597 - RNA, 19 nt, Artificial Sequence
  Description of Artificial Sequence: Synthetic oligonucleotide
uugcggguguucucguucu

SEQ ID NO: 169598 - RNA, 19 nt, Artificial Sequence
  Description of Artificial Sequence: Synthetic oligonucleotide
agaagucucuagugguaaa

SEQ ID NO: 169599 - RNA, 19 nt, Artificial Sequence
  Description of Artificial Sequence: Synthetic oligonucleotide
agccauuaucaacaagcuu

SEQ ID NO: 169600 - RNA, 19 nt, Artificial Sequence
  Description of Artificial Sequence: Synthetic oligonucleotide
gagaagucucuagugguaa

SEQ ID NO: 169601 - RNA, 19 nt, Artificial Sequence
  Description of Artificial Sequence: Synthetic oligonucleotide
auauacuaaucugccucga

SEQ ID NO: 169602 - RNA, 19 nt, Artificial Sequence
  Description of Artificial Sequence: Synthetic oligonucleotide
guaaucauugcggguguuc

SEQ ID NO: 169603 - RNA, 19 nt, Artificial Sequence
  Description of Artificial Sequence: Synthetic oligonucleotide
uguacagaaugugccggau

SEQ ID NO: 169604 - RNA, 19 nt, Artificial Sequence
  Description of Artificial Sequence: Synthetic oligonucleotide
acacccuugugaggguuac

SEQ ID NO: 169605 - RNA, 19 nt, Artificial Sequence
  Description of Artificial Sequence: Synthetic oligonucleotide
cuuuggccgaucgggaaac

SEQ ID NO: 169606 - RNA, 19 nt, Artificial Sequence
  Description of Artificial Sequence: Synthetic oligonucleotide
agaccucuugauucguuuu

SEQ ID NO: 169607 - RNA, 19 nt, Artificial Sequence
  Description of Artificial Sequence: Synthetic oligonucleotide
gaggcuaccaccaggcaua

SEQ ID NO: 169608 - RNA, 19 nt, Artificial Sequence
  Description of Artificial Sequence: Synthetic oligonucleotide
ugauucguuuuagggacua

SEQ ID NO: 169609 - RNA, 19 nt, Artificial Sequence
  Description of Artificial Sequence: Synthetic oligonucleotide
ugucuccggcucaugcgcu

SEQ ID NO: 169610 - RNA, 19 nt, Artificial Sequence
  Description of Artificial Sequence: Synthetic oligonucleotide
agcuagccacguugaaucu

SEQ ID NO: 169611 - RNA, 19 nt, Artificial Sequence
  Description of Artificial Sequence: Synthetic oligonucleotide
aggguuacugggacaaaca

SEQ ID NO: 169612 - RNA, 19 nt, Artificial Sequence
  Description of Artificial Sequence: Synthetic oligonucleotide
gaccucuugauucguuuua

SEQ ID NO: 169613 - RNA, 19 nt, Artificial Sequence
  Description of Artificial Sequence: Synthetic oligonucleotide
aggacccagaccugaugca

SEQ ID NO: 169614 - RNA, 19 nt, Artificial Sequence
  Description of Artificial Sequence: Synthetic oligonucleotide
ggacuauguuucugaagug

SEQ ID NO: 169615 - RNA, 19 nt, Artificial Sequence
  Description of Artificial Sequence: Synthetic oligonucleotide
caccgacucugcaccacgg

SEQ ID NO: 169616 - RNA, 19 nt, Artificial Sequence
  Description of Artificial Sequence: Synthetic oligonucleotide
cuucggucaccgacucugc

SEQ ID NO: 169617 - RNA, 19 nt, Artificial Sequence
  Description of Artificial Sequence: Synthetic oligonucleotide
gcuccaauccaacuugaga

SEQ ID NO: 169618 - RNA, 19 nt, Artificial Sequence
  Description of Artificial Sequence: Synthetic oligonucleotide
cacguucagccuucccacc

SEQ ID NO: 169619 - RNA, 19 nt, Artificial Sequence
  Description of Artificial Sequence: Synthetic oligonucleotide
uguguggcauagugcccca

SEQ ID NO: 169620 - RNA, 19 nt, Artificial Sequence
  Description of Artificial Sequence: Synthetic oligonucleotide
acgguggcugcgaacuugg

SEQ ID NO: 169621 - RNA, 19 nt, Artificial Sequence
  Description of Artificial Sequence: Synthetic oligonucleotide
cucccaacggcacccagca

SEQ ID NO: 169622 - RNA, 19 nt, Artificial Sequence
  Description of Artificial Sequence: Synthetic oligonucleotide
cuaaucugccucgacacua

SEQ ID NO: 169623 - RNA, 19 nt, Artificial Sequence
  Description of Artificial Sequence: Synthetic oligonucleotide
uaauuucguccuggcaagu

SEQ ID NO: 169624 - RNA, 19 nt, Artificial Sequence
  Description of Artificial Sequence: Synthetic oligonucleotide
cccguuguuggcuucccgg

SEQ ID NO: 169625 - RNA, 19 nt, Artificial Sequence
  Description of Artificial Sequence: Synthetic oligonucleotide
ucguccuggcaaguucucc

SEQ ID NO: 169626 - RNA, 19 nt, Artificial Sequence
  Description of Artificial Sequence: Synthetic oligonucleotide
caugacagguggguaaaga

SEQ ID NO: 169627 - RNA, 19 nt, Artificial Sequence
  Description of Artificial Sequence: Synthetic oligonucleotide
gcggcuuuugcaguggcag

SEQ ID NO: 169628 - RNA, 19 nt, Artificial Sequence
  Description of Artificial Sequence: Synthetic oligonucleotide
gcacccgaggcagagaggc

SEQ ID NO: 169629 - RNA, 19 nt, Artificial Sequence
  Description of Artificial Sequence: Synthetic oligonucleotide
ucgcaugggacuggugugu

SEQ ID NO: 169630 - RNA, 19 nt, Artificial Sequence
  Description of Artificial Sequence: Synthetic oligonucleotide
uuggccgaucgggaaacac

SEQ ID NO: 169631 - RNA, 19 nt, Artificial Sequence
  Description of Artificial Sequence: Synthetic oligonucleotide
guaguacuuagaauauacu

SEQ ID NO: 169632 - RNA, 19 nt, Artificial Sequence
  Description of Artificial Sequence: Synthetic oligonucleotide
aucaacaagcuugcuugau

SEQ ID NO: 169633 - RNA, 19 nt, Artificial Sequence
  Description of Artificial Sequence: Synthetic oligonucleotide
auaagguuuuggggcccuc

SEQ ID NO: 169634 - RNA, 19 nt, Artificial Sequence
  Description of Artificial Sequence: Synthetic oligonucleotide
uucguccuggcaaguucuc

SEQ ID NO: 169635 - RNA, 19 nt, Artificial Sequence
  Description of Artificial Sequence: Synthetic oligonucleotide
uugcaggccugagugguaa

SEQ ID NO: 169636 - RNA, 19 nt, Artificial Sequence
  Description of Artificial Sequence: Synthetic oligonucleotide
cucaaaugucugguugauc

SEQ ID NO: 169637 - RNA, 19 nt, Artificial Sequence
  Description of Artificial Sequence: Synthetic oligonucleotide
auccagcgagcacccgagg

SEQ ID NO: 169638 - RNA, 19 nt, Artificial Sequence
  Description of Artificial Sequence: Synthetic oligonucleotide
ccgcuguaaucauugcggg

SEQ ID NO: 169639 - RNA, 19 nt, Artificial Sequence
  Description of Artificial Sequence: Synthetic oligonucleotide
gcgaaccagcuccaugggg

SEQ ID NO: 169640 - RNA, 19 nt, Artificial Sequence
  Description of Artificial Sequence: Synthetic oligonucleotide
uaugcacguucagccuucc

SEQ ID NO: 169641 - RNA, 19 nt, Artificial Sequence
  Description of Artificial Sequence: Synthetic oligonucleotide
ccggaugcagcgaaccagc

SEQ ID NO: 169642 - RNA, 19 nt, Artificial Sequence
  Description of Artificial Sequence: Synthetic oligonucleotide
ccaacggcacccagcaccc

SEQ ID NO: 169643 - RNA, 19 nt, Artificial Sequence
  Description of Artificial Sequence: Synthetic oligonucleotide
cagcgagcacccgaggcag

SEQ ID NO: 169644 - RNA, 19 nt, Artificial Sequence
  Description of Artificial Sequence: Synthetic oligonucleotide
ggcugucgcauuguugucc

SEQ ID NO: 169645 - RNA, 19 nt, Artificial Sequence
  Description of Artificial Sequence: Synthetic oligonucleotide
gggguucauaugcacguuc

SEQ ID NO: 169646 - RNA, 19 nt, Artificial Sequence
  Description of Artificial Sequence: Synthetic oligonucleotide
cugcgugaucagacgcagc

SEQ ID NO: 169647 - RNA, 19 nt, Artificial Sequence
  Description of Artificial Sequence: Synthetic oligonucleotide
cucuagugguaaaaggcau

SEQ ID NO: 169648 - RNA, 19 nt, Artificial Sequence
  Description of Artificial Sequence: Synthetic oligonucleotide
cacguugaaucuccuucca

SEQ ID NO: 169649 - RNA, 19 nt, Artificial Sequence
  Description of Artificial Sequence: Synthetic oligonucleotide
agcuauuccucaggacacu

SEQ ID NO: 169650 - RNA, 19 nt, Artificial Sequence
  Description of Artificial Sequence: Synthetic oligonucleotide
ucgccgcuguaaucauugc

SEQ ID NO: 169651 - RNA, 19 nt, Artificial Sequence
  Description of Artificial Sequence: Synthetic oligonucleotide
guuagggaggggccucaca

SEQ ID NO: 169652 - RNA, 19 nt, Artificial Sequence
  Description of Artificial Sequence: Synthetic oligonucleotide
ccccaauuuauacacaaua

SEQ ID NO: 169653 - RNA, 19 nt, Artificial Sequence
  Description of Artificial Sequence: Synthetic oligonucleotide
ccaacucccaacggcaccc

SEQ ID NO: 169654 - RNA, 19 nt, Artificial Sequence
  Description of Artificial Sequence: Synthetic oligonucleotide
uguaaucauugcggguguu

SEQ ID NO: 169655 - RNA, 19 nt, Artificial Sequence
  Description of Artificial Sequence: Synthetic oligonucleotide
cacgguggcugcgaacuug

SEQ ID NO: 169656 - RNA, 19 nt, Artificial Sequence
  Description of Artificial Sequence: Synthetic oligonucleotide
ccaccccuacaaaagcccc

SEQ ID NO: 169657 - RNA, 19 nt, Artificial Sequence
  Description of Artificial Sequence: Synthetic oligonucleotide
ccgauuucggaaucgcuga

SEQ ID NO: 169658 - RNA, 19 nt, Artificial Sequence
  Description of Artificial Sequence: Synthetic oligonucleotide
gccucgacacuaaaauaug

SEQ ID NO: 169659 - RNA, 19 nt, Artificial Sequence
  Description of Artificial Sequence: Synthetic oligonucleotide
gcagcggucguauguguuc

SEQ ID NO: 169660 - RNA, 19 nt, Artificial Sequence
  Description of Artificial Sequence: Synthetic oligonucleotide
acuucauccuuuggccgau

SEQ ID NO: 169661 - RNA, 19 nt, Artificial Sequence
  Description of Artificial Sequence: Synthetic oligonucleotide
gcggucguauguguucugg

SEQ ID NO: 169662 - RNA, 19 nt, Artificial Sequence
  Description of Artificial Sequence: Synthetic oligonucleotide
ucucgccgcuguaaucauu

SEQ ID NO: 169663 - RNA, 19 nt, Artificial Sequence
  Description of Artificial Sequence: Synthetic oligonucleotide
uuuggccgaucgggaaaca

SEQ ID NO: 169664 - RNA, 19 nt, Artificial Sequence
  Description of Artificial Sequence: Synthetic oligonucleotide
gguguguaguacuuagaau

SEQ ID NO: 169665 - RNA, 19 nt, Artificial Sequence
  Description of Artificial Sequence: Synthetic oligonucleotide
cugccucgacacuaaaaua

SEQ ID NO: 169666 - RNA, 19 nt, Artificial Sequence
  Description of Artificial Sequence: Synthetic oligonucleotide
gaggacgguggcugucgca

SEQ ID NO: 169667 - RNA, 19 nt, Artificial Sequence
  Description of Artificial Sequence: Synthetic oligonucleotide
cagcggcuuuugcaguggc

SEQ ID NO: 169668 - RNA, 19 nt, Artificial Sequence
  Description of Artificial Sequence: Synthetic oligonucleotide
gcucgcaugggacuggugu

SEQ ID NO: 169669 - RNA, 19 nt, Artificial Sequence
  Description of Artificial Sequence: Synthetic oligonucleotide
uggcugucgcauuguuguc

SEQ ID NO: 169670 - RNA, 19 nt, Artificial Sequence
  Description of Artificial Sequence: Synthetic oligonucleotide
aucucgccgcuguaaucau

SEQ ID NO: 169671 - RNA, 19 nt, Artificial Sequence
  Description of Artificial Sequence: Synthetic oligonucleotide
guguaguacuuagaauaua

SEQ ID NO: 169672 - RNA, 19 nt, Artificial Sequence
  Description of Artificial Sequence: Synthetic oligonucleotide
acugugagucaaacaggau

SEQ ID NO: 169673 - RNA, 19 nt, Artificial Sequence
  Description of Artificial Sequence: Synthetic oligonucleotide
caggaguauguuccuuuaa

SEQ ID NO: 169674 - RNA, 19 nt, Artificial Sequence
  Description of Artificial Sequence: Synthetic oligonucleotide
aaauugcacugaggcuuuu

SEQ ID NO: 169675 - RNA, 19 nt, Artificial Sequence
  Description of Artificial Sequence: Synthetic oligonucleotide
gagcgacaaggucuugacu

SEQ ID NO: 169676 - RNA, 19 nt, Artificial Sequence
  Description of Artificial Sequence: Synthetic oligonucleotide
cggucaccgacucugcacc

SEQ ID NO: 169677 - RNA, 19 nt, Artificial Sequence
  Description of Artificial Sequence: Synthetic oligonucleotide
agcacccgaggcagagagg

SEQ ID NO: 169678 - RNA, 19 nt, Artificial Sequence
  Description of Artificial Sequence: Synthetic oligonucleotide
ugaggguuacugggacaaa

SEQ ID NO: 169679 - RNA, 19 nt, Artificial Sequence
  Description of Artificial Sequence: Synthetic oligonucleotide
cuguaaucauugcgggugu

SEQ ID NO: 169680 - RNA, 19 nt, Artificial Sequence
  Description of Artificial Sequence: Synthetic oligonucleotide
cccaacucccaacggcacc

SEQ ID NO: 169681 - RNA, 19 nt, Artificial Sequence
  Description of Artificial Sequence: Synthetic oligonucleotide
ccugcgugaucagacgcag

SEQ ID NO: 169682 - RNA, 19 nt, Artificial Sequence
  Description of Artificial Sequence: Synthetic oligonucleotide
caggcucgcaugggacugg

SEQ ID NO: 169683 - RNA, 19 nt, Artificial Sequence
  Description of Artificial Sequence: Synthetic oligonucleotide
ucccaacggcacccagcac

SEQ ID NO: 169684 - RNA, 19 nt, Artificial Sequence
  Description of Artificial Sequence: Synthetic oligonucleotide
ccacccacgcugaacugug

SEQ ID NO: 169685 - RNA, 19 nt, Artificial Sequence
  Description of Artificial Sequence: Synthetic oligonucleotide
gcuuguucacgaaacccaa

SEQ ID NO: 169686 - RNA, 19 nt, Artificial Sequence
  Description of Artificial Sequence: Synthetic oligonucleotide
ucuccguguccugcgugau

SEQ ID NO: 169687 - RNA, 19 nt, Artificial Sequence
  Description of Artificial Sequence: Synthetic oligonucleotide
cguuuuagggacuauguuu

SEQ ID NO: 169688 - RNA, 19 nt, Artificial Sequence
  Description of Artificial Sequence: Synthetic oligonucleotide
cuccguguccugcgugauc

SEQ ID NO: 169689 - RNA, 19 nt, Artificial Sequence
  Description of Artificial Sequence: Synthetic oligonucleotide
gcgcugagggugccugugg

SEQ ID NO: 169690 - RNA, 19 nt, Artificial Sequence
  Description of Artificial Sequence: Synthetic oligonucleotide
uccugggguucagcugggc

SEQ ID NO: 169691 - RNA, 19 nt, Artificial Sequence
  Description of Artificial Sequence: Synthetic oligonucleotide
agcggcuuuugcaguggca

SEQ ID NO: 169692 - RNA, 19 nt, Artificial Sequence
  Description of Artificial Sequence: Synthetic oligonucleotide
gcuagccacguugaaucuc

SEQ ID NO: 169693 - RNA, 19 nt, Artificial Sequence
  Description of Artificial Sequence: Synthetic oligonucleotide
acucugcaccacggcgauc

SEQ ID NO: 169694 - RNA, 19 nt, Artificial Sequence
  Description of Artificial Sequence: Synthetic oligonucleotide
cagaccucuugauucguuu

SEQ ID NO: 169695 - RNA, 19 nt, Artificial Sequence
  Description of Artificial Sequence: Synthetic oligonucleotide
gagguugcuucucgaugau

SEQ ID NO: 169696 - RNA, 19 nt, Artificial Sequence
  Description of Artificial Sequence: Synthetic oligonucleotide
ugcggguguucucguucuu

SEQ ID NO: 169697 - RNA, 19 nt, Artificial Sequence
  Description of Artificial Sequence: Synthetic oligonucleotide
caucagcggcuuuugcagu

SEQ ID NO: 169698 - RNA, 19 nt, Artificial Sequence
  Description of Artificial Sequence: Synthetic oligonucleotide
gugagucaaacaggauugu

SEQ ID NO: 169699 - RNA, 19 nt, Artificial Sequence
  Description of Artificial Sequence: Synthetic oligonucleotide
ccgaucgggaaacacauau

SEQ ID NO: 169700 - RNA, 19 nt, Artificial Sequence
  Description of Artificial Sequence: Synthetic oligonucleotide
caggaccggauggagaagu

SEQ ID NO: 169701 - RNA, 19 nt, Artificial Sequence
  Description of Artificial Sequence: Synthetic oligonucleotide
gcggguguucucguucuug

SEQ ID NO: 169702 - RNA, 19 nt, Artificial Sequence
  Description of Artificial Sequence: Synthetic oligonucleotide
ccagcgagcacccgaggca

SEQ ID NO: 169703 - RNA, 19 nt, Artificial Sequence
  Description of Artificial Sequence: Synthetic oligonucleotide
gcgagcacccgaggcagag

SEQ ID NO: 169704 - RNA, 19 nt, Artificial Sequence
  Description of Artificial Sequence: Synthetic oligonucleotide
ccauccagcgagcacccga

SEQ ID NO: 169705 - RNA, 19 nt, Artificial Sequence
  Description of Artificial Sequence: Synthetic oligonucleotide
ccucgacacuaaaauaugu

SEQ ID NO: 169706 - RNA, 19 nt, Artificial Sequence
  Description of Artificial Sequence: Synthetic oligonucleotide
gauucguuuuagggacuau

SEQ ID NO: 169707 - RNA, 19 nt, Artificial Sequence
  Description of Artificial Sequence: Synthetic oligonucleotide
ggucaccgacucugcacca

SEQ ID NO: 169708 - RNA, 19 nt, Artificial Sequence
  Description of Artificial Sequence: Synthetic oligonucleotide
ccguuguuggcuucccgga

SEQ ID NO: 169709 - RNA, 19 nt, Artificial Sequence
  Description of Artificial Sequence: Synthetic oligonucleotide
cccgaggcagagaggcuac

SEQ ID NO: 169710 - RNA, 19 nt, Artificial Sequence
  Description of Artificial Sequence: Synthetic oligonucleotide
ggugcaggucacaauuccu

SEQ ID NO: 169711 - RNA, 19 nt, Artificial Sequence
  Description of Artificial Sequence: Synthetic oligonucleotide
aggcucgcaugggacuggu

SEQ ID NO: 169712 - RNA, 19 nt, Artificial Sequence
  Description of Artificial Sequence: Synthetic oligonucleotide
ccaggugcaggucacaauu

SEQ ID NO: 169713 - RNA, 19 nt, Artificial Sequence
  Description of Artificial Sequence: Synthetic oligonucleotide
cagacgcagcuccucaaau

SEQ ID NO: 169714 - RNA, 19 nt, Artificial Sequence
  Description of Artificial Sequence: Synthetic oligonucleotide
ggcgaucagaccucuugau

SEQ ID NO: 169715 - RNA, 19 nt, Artificial Sequence
  Description of Artificial Sequence: Synthetic oligonucleotide
cauuaucaacaagcuugcu

SEQ ID NO: 169716 - RNA, 19 nt, Artificial Sequence
  Description of Artificial Sequence: Synthetic oligonucleotide
ccccaacucccaacggcac

SEQ ID NO: 169717 - RNA, 19 nt, Artificial Sequence
  Description of Artificial Sequence: Synthetic oligonucleotide
ccuuuggccgaucgggaaa

SEQ ID NO: 169718 - RNA, 19 nt, Artificial Sequence
  Description of Artificial Sequence: Synthetic oligonucleotide
cacccacgcugaacuguga

SEQ ID NO: 169719 - RNA, 19 nt, Artificial Sequence
  Description of Artificial Sequence: Synthetic oligonucleotide
ggccgaucgggaaacacau

SEQ ID NO: 169720 - RNA, 19 nt, Artificial Sequence
  Description of Artificial Sequence: Synthetic oligonucleotide
gcgaucagaccucuugauu

SEQ ID NO: 169721 - RNA, 19 nt, Artificial Sequence
  Description of Artificial Sequence: Synthetic oligonucleotide
ccaggccgcucugcuaucc

SEQ ID NO: 169722 - RNA, 19 nt, Artificial Sequence
  Description of Artificial Sequence: Synthetic oligonucleotide
aggcgcacgguggcugcga

SEQ ID NO: 169723 - RNA, 19 nt, Artificial Sequence
  Description of Artificial Sequence: Synthetic oligonucleotide
cggguguucucguucuuga

SEQ ID NO: 169724 - RNA, 19 nt, Artificial Sequence
  Description of Artificial Sequence: Synthetic oligonucleotide
cagcggucguauguguucu

SEQ ID NO: 169725 - RNA, 19 nt, Artificial Sequence
  Description of Artificial Sequence: Synthetic oligonucleotide
gguuagggaggggccucac

SEQ ID NO: 169726 - RNA, 19 nt, Artificial Sequence
  Description of Artificial Sequence: Synthetic oligonucleotide
gccacaugacaggugggua

SEQ ID NO: 169727 - RNA, 19 nt, Artificial Sequence
  Description of Artificial Sequence: Synthetic oligonucleotide
caacucccaacggcaccca

SEQ ID NO: 169728 - RNA, 19 nt, Artificial Sequence
  Description of Artificial Sequence: Synthetic oligonucleotide
agcgagcacccgaggcaga

SEQ ID NO: 169729 - RNA, 19 nt, Artificial Sequence
  Description of Artificial Sequence: Synthetic oligonucleotide
ggccugagugguaaccgcu

SEQ ID NO: 169730 - RNA, 19 nt, Artificial Sequence
  Description of Artificial Sequence: Synthetic oligonucleotide
ccaagcggucagccaggac

SEQ ID NO: 169731 - RNA, 19 nt, Artificial Sequence
  Description of Artificial Sequence: Synthetic oligonucleotide
ccguguccugcgugaucag

SEQ ID NO: 169732 - RNA, 19 nt, Artificial Sequence
  Description of Artificial Sequence: Synthetic oligonucleotide
cggucguauguguucugga

SEQ ID NO: 169733 - RNA, 19 nt, Artificial Sequence
  Description of Artificial Sequence: Synthetic oligonucleotide
ccaagauggccccaucguu

SEQ ID NO: 169734 - RNA, 19 nt, Artificial Sequence
  Description of Artificial Sequence: Synthetic oligonucleotide
cucuucggucaccgacucu

SEQ ID NO: 169735 - RNA, 19 nt, Artificial Sequence
  Description of Artificial Sequence: Synthetic oligonucleotide
cgaucgggaaacacauaua

SEQ ID NO: 169736 - RNA, 19 nt, Artificial Sequence
  Description of Artificial Sequence: Synthetic oligonucleotide
cagcuggagagcucccguu

SEQ ID NO: 169737 - RNA, 19 nt, Artificial Sequence
  Description of Artificial Sequence: Synthetic oligonucleotide
gcgcacgguggcugcgaac

SEQ ID NO: 169738 - RNA, 19 nt, Artificial Sequence
  Description of Artificial Sequence: Synthetic oligonucleotide
gcagucuaccaaaguuccu

SEQ ID NO: 169739 - RNA, 19 nt, Artificial Sequence
  Description of Artificial Sequence: Synthetic oligonucleotide
ccgaggcagagaggcuacc

SEQ ID NO: 169740 - RNA, 19 nt, Artificial Sequence
  Description of Artificial Sequence: Synthetic oligonucleotide
ggacugguguguaguacuu

SEQ ID NO: 169741 - RNA, 19 nt, Artificial Sequence
  Description of Artificial Sequence: Synthetic oligonucleotide
cacccgaggcagagaggcu

SEQ ID NO: 169742 - RNA, 19 nt, Artificial Sequence
  Description of Artificial Sequence: Synthetic oligonucleotide
ggcucgcaugggacuggug

SEQ ID NO: 169743 - RNA, 19 nt, Artificial Sequence
  Description of Artificial Sequence: Synthetic oligonucleotide
gccaggccgcucugcuauc

SEQ ID NO: 169744 - RNA, 19 nt, Artificial Sequence
  Description of Artificial Sequence: Synthetic oligonucleotide
gccccaauuuauacacaau

SEQ ID NO: 169745 - RNA, 19 nt, Artificial Sequence
  Description of Artificial Sequence: Synthetic oligonucleotide
cgcuguaaucauugcgggu

SEQ ID NO: 169746 - RNA, 19 nt, Artificial Sequence
  Description of Artificial Sequence: Synthetic oligonucleotide
ccaugacacaacaguuguu

SEQ ID NO: 169747 - RNA, 19 nt, Artificial Sequence
  Description of Artificial Sequence: Synthetic oligonucleotide
cccuuaagccuggauuccu

SEQ ID NO: 169748 - RNA, 19 nt, Artificial Sequence
  Description of Artificial Sequence: Synthetic oligonucleotide
cacccuugugaggguuacu

SEQ ID NO: 169749 - RNA, 19 nt, Artificial Sequence
  Description of Artificial Sequence: Synthetic oligonucleotide
gccgaucgggaaacacaua

SEQ ID NO: 169750 - RNA, 19 nt, Artificial Sequence
  Description of Artificial Sequence: Synthetic oligonucleotide
gcaccccauaguaguggcu

SEQ ID NO: 169751 - RNA, 19 nt, Artificial Sequence
  Description of Artificial Sequence: Synthetic oligonucleotide
cacggcgaucagaccucuu

SEQ ID NO: 169752 - RNA, 19 nt, Artificial Sequence
  Description of Artificial Sequence: Synthetic oligonucleotide
cagcaggcgcacgguggcu

SEQ ID NO: 169753 - RNA, 19 nt, Artificial Sequence
  Description of Artificial Sequence: Synthetic oligonucleotide
ccacggcgaucagaccucu

SEQ ID NO: 169754 - RNA, 19 nt, Artificial Sequence
  Description of Artificial Sequence: Synthetic oligonucleotide
aucuuuaagcgauauaacc

SEQ ID NO: 169755 - RNA, 19 nt, Artificial Sequence
  Description of Artificial Sequence: Synthetic oligonucleotide
aauaucuaucaacaacccc

SEQ ID NO: 169756 - RNA, 19 nt, Artificial Sequence
  Description of Artificial Sequence: Synthetic oligonucleotide
uccaauaacguuuuaaucu

SEQ ID NO: 169757 - RNA, 19 nt, Artificial Sequence
  Description of Artificial Sequence: Synthetic oligonucleotide
uuaaugccaaggaaaaccg

SEQ ID NO: 169758 - RNA, 19 nt, Artificial Sequence
  Description of Artificial Sequence: Synthetic oligonucleotide
aaagaacuaacaaauagcu

SEQ ID NO: 169759 - RNA, 19 nt, Artificial Sequence
  Description of Artificial Sequence: Synthetic oligonucleotide
aacgcugacgugcucaugg

SEQ ID NO: 169760 - RNA, 19 nt, Artificial Sequence
  Description of Artificial Sequence: Synthetic oligonucleotide
cauuacacgacgacgaggg

SEQ ID NO: 169761 - RNA, 19 nt, Artificial Sequence
  Description of Artificial Sequence: Synthetic oligonucleotide
aaaaccgggaguaaagcac

SEQ ID NO: 169762 - RNA, 19 nt, Artificial Sequence
  Description of Artificial Sequence: Synthetic oligonucleotide
gaaaaucgaauguacacac

SEQ ID NO: 169763 - RNA, 19 nt, Artificial Sequence
  Description of Artificial Sequence: Synthetic oligonucleotide
uuacacaguaugcuaaugc

SEQ ID NO: 169764 - RNA, 19 nt, Artificial Sequence
  Description of Artificial Sequence: Synthetic oligonucleotide
uauaauggccacauggcca

SEQ ID NO: 169765 - RNA, 19 nt, Artificial Sequence
  Description of Artificial Sequence: Synthetic oligonucleotide
acagguguaagacacaacu

SEQ ID NO: 169766 - RNA, 19 nt, Artificial Sequence
  Description of Artificial Sequence: Synthetic oligonucleotide
gugacaacgccucaggugg

SEQ ID NO: 169767 - RNA, 19 nt, Artificial Sequence
  Description of Artificial Sequence: Synthetic oligonucleotide
aguauaauggccacauggc

SEQ ID NO: 169768 - RNA, 19 nt, Artificial Sequence
  Description of Artificial Sequence: Synthetic oligonucleotide
uuaccuauguuuuaccaga

SEQ ID NO: 169769 - RNA, 19 nt, Artificial Sequence
  Description of Artificial Sequence: Synthetic oligonucleotide
auaauggccacauggccac

SEQ ID NO: 169770 - RNA, 19 nt, Artificial Sequence
  Description of Artificial Sequence: Synthetic oligonucleotide
acaaggguuacccaaagga

SEQ ID NO: 169771 - RNA, 19 nt, Artificial Sequence
  Description of Artificial Sequence: Synthetic oligonucleotide
ucuaucaacaaccccugug

SEQ ID NO: 169772 - RNA, 19 nt, Artificial Sequence
  Description of Artificial Sequence: Synthetic oligonucleotide
aauaggcuucaccugagcu

SEQ ID NO: 169773 - RNA, 19 nt, Artificial Sequence
  Description of Artificial Sequence: Synthetic oligonucleotide
aaucuuaaaagguccguau

SEQ ID NO: 169774 - RNA, 19 nt, Artificial Sequence
  Description of Artificial Sequence: Synthetic oligonucleotide
gaggauguuuccuuaagug

SEQ ID NO: 169775 - RNA, 19 nt, Artificial Sequence
  Description of Artificial Sequence: Synthetic oligonucleotide
ugagaugaugcauuaugcc

SEQ ID NO: 169776 - RNA, 19 nt, Artificial Sequence
  Description of Artificial Sequence: Synthetic oligonucleotide
aucauaaucacccgaauuu

SEQ ID NO: 169777 - RNA, 19 nt, Artificial Sequence
  Description of Artificial Sequence: Synthetic oligonucleotide
ucaaucauaaucacccgaa

SEQ ID NO: 169778 - RNA, 19 nt, Artificial Sequence
  Description of Artificial Sequence: Synthetic oligonucleotide
agaacagagauaaugguug

SEQ ID NO: 169779 - RNA, 19 nt, Artificial Sequence
  Description of Artificial Sequence: Synthetic oligonucleotide
cuccauuaaacuuugauaa

SEQ ID NO: 169780 - RNA, 19 nt, Artificial Sequence
  Description of Artificial Sequence: Synthetic oligonucleotide
uaucucauccaacuagagc

SEQ ID NO: 169781 - RNA, 19 nt, Artificial Sequence
  Description of Artificial Sequence: Synthetic oligonucleotide
uccucuaucuuuaagcgau

SEQ ID NO: 169782 - RNA, 19 nt, Artificial Sequence
  Description of Artificial Sequence: Synthetic oligonucleotide
ugcuuauacucugagauga

SEQ ID NO: 169783 - RNA, 19 nt, Artificial Sequence
  Description of Artificial Sequence: Synthetic oligonucleotide
cacgcuaccacuaacugac

SEQ ID NO: 169784 - RNA, 19 nt, Artificial Sequence
  Description of Artificial Sequence: Synthetic oligonucleotide
aguaaagcacggcaguguc

SEQ ID NO: 169785 - RNA, 19 nt, Artificial Sequence
  Description of Artificial Sequence: Synthetic oligonucleotide
uuucuacauauacagccug

SEQ ID NO: 169786 - RNA, 19 nt, Artificial Sequence
  Description of Artificial Sequence: Synthetic oligonucleotide
gaugcauuaugccguagcc

SEQ ID NO: 169787 - RNA, 19 nt, Artificial Sequence
  Description of Artificial Sequence: Synthetic oligonucleotide
ugaccaacaugacuaaugu

SEQ ID NO: 169788 - RNA, 19 nt, Artificial Sequence
  Description of Artificial Sequence: Synthetic oligonucleotide
uguccuagugucauugccc

SEQ ID NO: 169789 - RNA, 19 nt, Artificial Sequence
  Description of Artificial Sequence: Synthetic oligonucleotide
ucuccauuaaacuuugaua

SEQ ID NO: 169790 - RNA, 19 nt, Artificial Sequence
  Description of Artificial Sequence: Synthetic oligonucleotide
uccagcgacaguaagugac

SEQ ID NO: 169791 - RNA, 19 nt, Artificial Sequence
  Description of Artificial Sequence: Synthetic oligonucleotide
aaggaaagaccugucgagg

SEQ ID NO: 169792 - RNA, 19 nt, Artificial Sequence
  Description of Artificial Sequence: Synthetic oligonucleotide
ugacuuacuaccaucuuua

SEQ ID NO: 169793 - RNA, 19 nt, Artificial Sequence
  Description of Artificial Sequence: Synthetic oligonucleotide
ugaugcauuaugccguagc

SEQ ID NO: 169794 - RNA, 19 nt, Artificial Sequence
  Description of Artificial Sequence: Synthetic oligonucleotide
gcgauuaccacucauuucc

SEQ ID NO: 169795 - RNA, 19 nt, Artificial Sequence
  Description of Artificial Sequence: Synthetic oligonucleotide
uuaaaagguccguauuuac

SEQ ID NO: 169796 - RNA, 19 nt, Artificial Sequence
  Description of Artificial Sequence: Synthetic oligonucleotide
acuagagcugacauauugc

SEQ ID NO: 169797 - RNA, 19 nt, Artificial Sequence
  Description of Artificial Sequence: Synthetic oligonucleotide
uucuaagacauccuaucuc

SEQ ID NO: 169798 - RNA, 19 nt, Artificial Sequence
  Description of Artificial Sequence: Synthetic oligonucleotide
ugaguaucagugaccacug

SEQ ID NO: 169799 - RNA, 19 nt, Artificial Sequence
  Description of Artificial Sequence: Synthetic oligonucleotide
acucaagugaguaucagug

SEQ ID NO: 169800 - RNA, 19 nt, Artificial Sequence
  Description of Artificial Sequence: Synthetic oligonucleotide
gacacacuuaucuuggaga

SEQ ID NO: 169801 - RNA, 19 nt, Artificial Sequence
  Description of Artificial Sequence: Synthetic oligonucleotide
uuuaaaggcccaacacuca

SEQ ID NO: 169802 - RNA, 19 nt, Artificial Sequence
  Description of Artificial Sequence: Synthetic oligonucleotide
uaagguauguaaguaagau

SEQ ID NO: 169803 - RNA, 19 nt, Artificial Sequence
  Description of Artificial Sequence: Synthetic oligonucleotide
guauaauggccacauggcc

SEQ ID NO: 169804 - RNA, 19 nt, Artificial Sequence
  Description of Artificial Sequence: Synthetic oligonucleotide
augucugcacaguauggac

SEQ ID NO: 169805 - RNA, 19 nt, Artificial Sequence
  Description of Artificial Sequence: Synthetic oligonucleotide
ugucucgugguuucuaagc

SEQ ID NO: 169806 - RNA, 19 nt, Artificial Sequence
  Description of Artificial Sequence: Synthetic oligonucleotide
aguaucagugaccacugca

SEQ ID NO: 169807 - RNA, 19 nt, Artificial Sequence
  Description of Artificial Sequence: Synthetic oligonucleotide
uguggaaaccauggaaggg

SEQ ID NO: 169808 - RNA, 19 nt, Artificial Sequence
  Description of Artificial Sequence: Synthetic oligonucleotide
ggcagaaacagugaggccg

SEQ ID NO: 169809 - RNA, 19 nt, Artificial Sequence
  Description of Artificial Sequence: Synthetic oligonucleotide
uacaaggguuacccaaagg

SEQ ID NO: 169810 - RNA, 19 nt, Artificial Sequence
  Description of Artificial Sequence: Synthetic oligonucleotide
auaggcuucaccugagcug

SEQ ID NO: 169811 - RNA, 19 nt, Artificial Sequence
  Description of Artificial Sequence: Synthetic oligonucleotide
aggaacagcgauuaccacu

SEQ ID NO: 169812 - RNA, 19 nt, Artificial Sequence
  Description of Artificial Sequence: Synthetic oligonucleotide
aguuaagccugguugagaa

SEQ ID NO: 169813 - RNA, 19 nt, Artificial Sequence
  Description of Artificial Sequence: Synthetic oligonucleotide
ucgaauguacacacaacaa

SEQ ID NO: 169814 - RNA, 19 nt, Artificial Sequence
  Description of Artificial Sequence: Synthetic oligonucleotide
aaagguccguauuuacaca

SEQ ID NO: 169815 - RNA, 19 nt, Artificial Sequence
  Description of Artificial Sequence: Synthetic oligonucleotide
ugaggauguuuccuuaagu

SEQ ID NO: 169816 - RNA, 19 nt, Artificial Sequence
  Description of Artificial Sequence: Synthetic oligonucleotide
uccaguuaagccugguuga

SEQ ID NO: 169817 - RNA, 19 nt, Artificial Sequence
  Description of Artificial Sequence: Synthetic oligonucleotide
aagagcacgugaccggcag

SEQ ID NO: 169818 - RNA, 19 nt, Artificial Sequence
  Description of Artificial Sequence: Synthetic oligonucleotide
aguauggacuuccauggga

SEQ ID NO: 169819 - RNA, 19 nt, Artificial Sequence
  Description of Artificial Sequence: Synthetic oligonucleotide
ugcuauggggagcucacgc

SEQ ID NO: 169820 - RNA, 19 nt, Artificial Sequence
  Description of Artificial Sequence: Synthetic oligonucleotide
uacacgacgacgagggcca

SEQ ID NO: 169821 - RNA, 19 nt, Artificial Sequence
  Description of Artificial Sequence: Synthetic oligonucleotide
gaaaaccgggaguaaagca

SEQ ID NO: 169822 - RNA, 19 nt, Artificial Sequence
  Description of Artificial Sequence: Synthetic oligonucleotide
cacacauuacacgacgacg

SEQ ID NO: 169823 - RNA, 19 nt, Artificial Sequence
  Description of Artificial Sequence: Synthetic oligonucleotide
uguuuugaguugaaagcau

SEQ ID NO: 169824 - RNA, 19 nt, Artificial Sequence
  Description of Artificial Sequence: Synthetic oligonucleotide
gacgacgagggccauauca

SEQ ID NO: 169825 - RNA, 19 nt, Artificial Sequence
  Description of Artificial Sequence: Synthetic oligonucleotide
caagugguuaaugccaagg

SEQ ID NO: 169826 - RNA, 19 nt, Artificial Sequence
  Description of Artificial Sequence: Synthetic oligonucleotide
cuucagagguauuuacaag

SEQ ID NO: 169827 - RNA, 19 nt, Artificial Sequence
  Description of Artificial Sequence: Synthetic oligonucleotide
augcauuaugccguagccc

SEQ ID NO: 169828 - RNA, 19 nt, Artificial Sequence
  Description of Artificial Sequence: Synthetic oligonucleotide
agcgauuaccacucauuuc

SEQ ID NO: 169829 - RNA, 19 nt, Artificial Sequence
  Description of Artificial Sequence: Synthetic oligonucleotide
ucuaccuaugucacuacua

SEQ ID NO: 169830 - RNA, 19 nt, Artificial Sequence
  Description of Artificial Sequence: Synthetic oligonucleotide
ugagccccagggcuaagcg

SEQ ID NO: 169831 - RNA, 19 nt, Artificial Sequence
  Description of Artificial Sequence: Synthetic oligonucleotide
ggaggagcaaaucccaagg

SEQ ID NO: 169832 - RNA, 19 nt, Artificial Sequence
  Description of Artificial Sequence: Synthetic oligonucleotide
aauccuauuaagguaugua

SEQ ID NO: 169833 - RNA, 19 nt, Artificial Sequence
  Description of Artificial Sequence: Synthetic oligonucleotide
uuaaucuuaaaagguccgu

SEQ ID NO: 169834 - RNA, 19 nt, Artificial Sequence
  Description of Artificial Sequence: Synthetic oligonucleotide
ucucgugguuucuaagcag

SEQ ID NO: 169835 - RNA, 19 nt, Artificial Sequence
  Description of Artificial Sequence: Synthetic oligonucleotide
agauaaugguugcagcaga

SEQ ID NO: 169836 - RNA, 19 nt, Artificial Sequence
  Description of Artificial Sequence: Synthetic oligonucleotide
cugacauauugccaaacuc

SEQ ID NO: 169837 - RNA, 19 nt, Artificial Sequence
  Description of Artificial Sequence: Synthetic oligonucleotide
uaccuauguuuuaccagag

SEQ ID NO: 169838 - RNA, 19 nt, Artificial Sequence
  Description of Artificial Sequence: Synthetic oligonucleotide
cuuagcuagcacucugccc

SEQ ID NO: 169839 - RNA, 19 nt, Artificial Sequence
  Description of Artificial Sequence: Synthetic oligonucleotide
augacuaaugugggcagac

SEQ ID NO: 169840 - RNA, 19 nt, Artificial Sequence
  Description of Artificial Sequence: Synthetic oligonucleotide
aaccccugugucuaagaga

SEQ ID NO: 169841 - RNA, 19 nt, Artificial Sequence
  Description of Artificial Sequence: Synthetic oligonucleotide
uagagugcgucccgaacgc

SEQ ID NO: 169842 - RNA, 19 nt, Artificial Sequence
  Description of Artificial Sequence: Synthetic oligonucleotide
auacaaggguuacccaaag

SEQ ID NO: 169843 - RNA, 19 nt, Artificial Sequence
  Description of Artificial Sequence: Synthetic oligonucleotide
agaugaugcauuaugccgu

SEQ ID NO: 169844 - RNA, 19 nt, Artificial Sequence
  Description of Artificial Sequence: Synthetic oligonucleotide
gagaccacuccaguuaagc

SEQ ID NO: 169845 - RNA, 19 nt, Artificial Sequence
  Description of Artificial Sequence: Synthetic oligonucleotide
agugaggccgaagaaagca

SEQ ID NO: 169846 - RNA, 19 nt, Artificial Sequence
  Description of Artificial Sequence: Synthetic oligonucleotide
ucaauccuauuaagguaug

SEQ ID NO: 169847 - RNA, 19 nt, Artificial Sequence
  Description of Artificial Sequence: Synthetic oligonucleotide
ucuagagugcgucccgaac

SEQ ID NO: 169848 - RNA, 19 nt, Artificial Sequence
  Description of Artificial Sequence: Synthetic oligonucleotide
auuacacgacgacgagggc

SEQ ID NO: 169849 - RNA, 19 nt, Artificial Sequence
  Description of Artificial Sequence: Synthetic oligonucleotide
agagcacgcuaccacuaac

SEQ ID NO: 169850 - RNA, 19 nt, Artificial Sequence
  Description of Artificial Sequence: Synthetic oligonucleotide
agcgguggguugcaucugc

SEQ ID NO: 169851 - RNA, 19 nt, Artificial Sequence
  Description of Artificial Sequence: Synthetic oligonucleotide
acauuacacgacgacgagg

SEQ ID NO: 169852 - RNA, 19 nt, Artificial Sequence
  Description of Artificial Sequence: Synthetic oligonucleotide
acacauuacacgacgacga

SEQ ID NO: 169853 - RNA, 19 nt, Artificial Sequence
  Description of Artificial Sequence: Synthetic oligonucleotide
caagcgaaugagagcacgc

SEQ ID NO: 169854 - RNA, 19 nt, Artificial Sequence
  Description of Artificial Sequence: Synthetic oligonucleotide
ucaacaaccccugugucua

SEQ ID NO: 169855 - RNA, 19 nt, Artificial Sequence
  Description of Artificial Sequence: Synthetic oligonucleotide
uaaucuuaaaagguccgua

SEQ ID NO: 169856 - RNA, 19 nt, Artificial Sequence
  Description of Artificial Sequence: Synthetic oligonucleotide
gugaccggcagaaacagug

SEQ ID NO: 169857 - RNA, 19 nt, Artificial Sequence
  Description of Artificial Sequence: Synthetic oligonucleotide
cuaucucauccaacuagag

SEQ ID NO: 169858 - RNA, 19 nt, Artificial Sequence
  Description of Artificial Sequence: Synthetic oligonucleotide
uucuaccuaugucacuacu

SEQ ID NO: 169859 - RNA, 19 nt, Artificial Sequence
  Description of Artificial Sequence: Synthetic oligonucleotide
gucaaucauaaucacccga

SEQ ID NO: 169860 - RNA, 19 nt, Artificial Sequence
  Description of Artificial Sequence: Synthetic oligonucleotide
ugacccacgcccugggucc

SEQ ID NO: 169861 - RNA, 19 nt, Artificial Sequence
  Description of Artificial Sequence: Synthetic oligonucleotide
aacagcgauuaccacucau

SEQ ID NO: 169862 - RNA, 19 nt, Artificial Sequence
  Description of Artificial Sequence: Synthetic oligonucleotide
aaaaucgaauguacacaca

SEQ ID NO: 169863 - RNA, 19 nt, Artificial Sequence
  Description of Artificial Sequence: Synthetic oligonucleotide
gaccaacaugacuaaugug

SEQ ID NO: 169864 - RNA, 19 nt, Artificial Sequence
  Description of Artificial Sequence: Synthetic oligonucleotide
accuaugucacuacuauuu

SEQ ID NO: 169865 - RNA, 19 nt, Artificial Sequence
  Description of Artificial Sequence: Synthetic oligonucleotide
augggucguuugcuuauac

SEQ ID NO: 169866 - RNA, 19 nt, Artificial Sequence
  Description of Artificial Sequence: Synthetic oligonucleotide
uccaugggaugcuuuguac

SEQ ID NO: 169867 - RNA, 19 nt, Artificial Sequence
  Description of Artificial Sequence: Synthetic oligonucleotide
ccaauucagguucuggagg

SEQ ID NO: 169868 - RNA, 19 nt, Artificial Sequence
  Description of Artificial Sequence: Synthetic oligonucleotide
acgugugaaggugcuaugg

SEQ ID NO: 169869 - RNA, 19 nt, Artificial Sequence
  Description of Artificial Sequence: Synthetic oligonucleotide
agugaguaucagugaccac

SEQ ID NO: 169870 - RNA, 19 nt, Artificial Sequence
  Description of Artificial Sequence: Synthetic oligonucleotide
gugucacucauacgggaag

SEQ ID NO: 169871 - RNA, 19 nt, Artificial Sequence
  Description of Artificial Sequence: Synthetic oligonucleotide
aacgccucaggugggaaca

SEQ ID NO: 169872 - RNA, 19 nt, Artificial Sequence
  Description of Artificial Sequence: Synthetic oligonucleotide
ugucgaggcaaaaggguua

SEQ ID NO: 169873 - RNA, 19 nt, Artificial Sequence
  Description of Artificial Sequence: Synthetic oligonucleotide
gccaaacucaccaauuuag

SEQ ID NO: 169874 - RNA, 19 nt, Artificial Sequence
  Description of Artificial Sequence: Synthetic oligonucleotide
ggccgaagaaagcaaggcg

SEQ ID NO: 169875 - RNA, 19 nt, Artificial Sequence
  Description of Artificial Sequence: Synthetic oligonucleotide
ucacucauacgggaagagc

SEQ ID NO: 169876 - RNA, 19 nt, Artificial Sequence
  Description of Artificial Sequence: Synthetic oligonucleotide
uguguccuagugucauugc

SEQ ID NO: 169877 - RNA, 19 nt, Artificial Sequence
  Description of Artificial Sequence: Synthetic oligonucleotide
gguggguugcaucugcugc

SEQ ID NO: 169878 - RNA, 19 nt, Artificial Sequence
  Description of Artificial Sequence: Synthetic oligonucleotide
ggggugguuaaugacaugc

SEQ ID NO: 169879 - RNA, 19 nt, Artificial Sequence
  Description of Artificial Sequence: Synthetic oligonucleotide
gguuucuaagcagccagcg

SEQ ID NO: 169880 - RNA, 19 nt, Artificial Sequence
  Description of Artificial Sequence: Synthetic oligonucleotide
auccaacuagagcugacau

SEQ ID NO: 169881 - RNA, 19 nt, Artificial Sequence
  Description of Artificial Sequence: Synthetic oligonucleotide
uaaaggcccaacacucaaa

SEQ ID NO: 169882 - RNA, 19 nt, Artificial Sequence
  Description of Artificial Sequence: Synthetic oligonucleotide
augccguagccccugacgu

SEQ ID NO: 169883 - RNA, 19 nt, Artificial Sequence
  Description of Artificial Sequence: Synthetic oligonucleotide
auacgggaagagcacguga

SEQ ID NO: 169884 - RNA, 19 nt, Artificial Sequence
  Description of Artificial Sequence: Synthetic oligonucleotide
ugacucaagugaguaucag

SEQ ID NO: 169885 - RNA, 19 nt, Artificial Sequence
  Description of Artificial Sequence: Synthetic oligonucleotide
ucguuugcuuauacucuga

SEQ ID NO: 169886 - RNA, 19 nt, Artificial Sequence
  Description of Artificial Sequence: Synthetic oligonucleotide
ggggaaacauaauaaggca

SEQ ID NO: 169887 - RNA, 19 nt, Artificial Sequence
  Description of Artificial Sequence: Synthetic oligonucleotide
aaacagagaggggugguua

SEQ ID NO: 169888 - RNA, 19 nt, Artificial Sequence
  Description of Artificial Sequence: Synthetic oligonucleotide
gauacaaggguuacccaaa

SEQ ID NO: 169889 - RNA, 19 nt, Artificial Sequence
  Description of Artificial Sequence: Synthetic oligonucleotide
uaccacuaacugacccacg

SEQ ID NO: 169890 - RNA, 19 nt, Artificial Sequence
  Description of Artificial Sequence: Synthetic oligonucleotide
cuaccacuaacugacccac

SEQ ID NO: 169891 - RNA, 19 nt, Artificial Sequence
  Description of Artificial Sequence: Synthetic oligonucleotide
cugugucuaagagaaauga

SEQ ID NO: 169892 - RNA, 19 nt, Artificial Sequence
  Description of Artificial Sequence: Synthetic oligonucleotide
ugucacucauacgggaaga

SEQ ID NO: 169893 - RNA, 19 nt, Artificial Sequence
  Description of Artificial Sequence: Synthetic oligonucleotide
ugacaacgccucagguggg

SEQ ID NO: 169894 - RNA, 19 nt, Artificial Sequence
  Description of Artificial Sequence: Synthetic oligonucleotide
cacauuacacgacgacgag

SEQ ID NO: 169895 - RNA, 19 nt, Artificial Sequence
  Description of Artificial Sequence: Synthetic oligonucleotide
aggauugacuuacuaccau

SEQ ID NO: 169896 - RNA, 19 nt, Artificial Sequence
  Description of Artificial Sequence: Synthetic oligonucleotide
uccaacuagagcugacaua

SEQ ID NO: 169897 - RNA, 19 nt, Artificial Sequence
  Description of Artificial Sequence: Synthetic oligonucleotide
aguaggucugaccacccuu

SEQ ID NO: 169898 - RNA, 19 nt, Artificial Sequence
  Description of Artificial Sequence: Synthetic oligonucleotide
acgcagauuacuguuucug

SEQ ID NO: 169899 - RNA, 19 nt, Artificial Sequence
  Description of Artificial Sequence: Synthetic oligonucleotide
caaccccugugucuaagag

SEQ ID NO: 169900 - RNA, 19 nt, Artificial Sequence
  Description of Artificial Sequence: Synthetic oligonucleotide
uuucuaccuaugucacuac

SEQ ID NO: 169901 - RNA, 19 nt, Artificial Sequence
  Description of Artificial Sequence: Synthetic oligonucleotide
ugggucguuugcuuauacu

SEQ ID NO: 169902 - RNA, 19 nt, Artificial Sequence
  Description of Artificial Sequence: Synthetic oligonucleotide
guccuagugucauugccca

SEQ ID NO: 169903 - RNA, 19 nt, Artificial Sequence
  Description of Artificial Sequence: Synthetic oligonucleotide
gauuaccacucauuuccaa

SEQ ID NO: 169904 - RNA, 19 nt, Artificial Sequence
  Description of Artificial Sequence: Synthetic oligonucleotide
gcgacaguaagugacaaca

SEQ ID NO: 169905 - RNA, 19 nt, Artificial Sequence
  Description of Artificial Sequence: Synthetic oligonucleotide
caguauggacuuccauggg

SEQ ID NO: 169906 - RNA, 19 nt, Artificial Sequence
  Description of Artificial Sequence: Synthetic oligonucleotide
aagugccugucaaucauaa

SEQ ID NO: 169907 - RNA, 19 nt, Artificial Sequence
  Description of Artificial Sequence: Synthetic oligonucleotide
acgacgagggccauaucag

SEQ ID NO: 169908 - RNA, 19 nt, Artificial Sequence
  Description of Artificial Sequence: Synthetic oligonucleotide
cacucuagagugcgucccg

SEQ ID NO: 169909 - RNA, 19 nt, Artificial Sequence
  Description of Artificial Sequence: Synthetic oligonucleotide
agcgguaaggcagaggcuu

SEQ ID NO: 169910 - RNA, 19 nt, Artificial Sequence
  Description of Artificial Sequence: Synthetic oligonucleotide
gguugagaauucuuuagua

SEQ ID NO: 169911 - RNA, 19 nt, Artificial Sequence
  Description of Artificial Sequence: Synthetic oligonucleotide
ggaggaacagcgauuacca

SEQ ID NO: 169912 - RNA, 19 nt, Artificial Sequence
  Description of Artificial Sequence: Synthetic oligonucleotide
acacgugugaaggugcuau

SEQ ID NO: 169913 - RNA, 19 nt, Artificial Sequence
  Description of Artificial Sequence: Synthetic oligonucleotide
ugcaugggucguuugcuua

SEQ ID NO: 169914 - RNA, 19 nt, Artificial Sequence
  Description of Artificial Sequence: Synthetic oligonucleotide
gaguaucagugaccacugc

SEQ ID NO: 169915 - RNA, 19 nt, Artificial Sequence
  Description of Artificial Sequence: Synthetic oligonucleotide
gucgaggcaaaaggguuag

SEQ ID NO: 169916 - RNA, 19 nt, Artificial Sequence
  Description of Artificial Sequence: Synthetic oligonucleotide
gugucucgugguuucuaag

SEQ ID NO: 169917 - RNA, 19 nt, Artificial Sequence
  Description of Artificial Sequence: Synthetic oligonucleotide
agcgaaugagagcacgcua

SEQ ID NO: 169918 - RNA, 19 nt, Artificial Sequence
  Description of Artificial Sequence: Synthetic oligonucleotide
ggaaacauaauaaggcacu

SEQ ID NO: 169919 - RNA, 19 nt, Artificial Sequence
  Description of Artificial Sequence: Synthetic oligonucleotide
ccaacacgugugaaggugc

SEQ ID NO: 169920 - RNA, 19 nt, Artificial Sequence
  Description of Artificial Sequence: Synthetic oligonucleotide
ugcguaacuccuucugcuu

SEQ ID NO: 169921 - RNA, 19 nt, Artificial Sequence
  Description of Artificial Sequence: Synthetic oligonucleotide
aacauaucccgcacuccaa

SEQ ID NO: 169922 - RNA, 19 nt, Artificial Sequence
  Description of Artificial Sequence: Synthetic oligonucleotide
cuaagcggcuugacuuuug

SEQ ID NO: 169923 - RNA, 19 nt, Artificial Sequence
  Description of Artificial Sequence: Synthetic oligonucleotide
cacacuuaucuuggagagc

SEQ ID NO: 169924 - RNA, 19 nt, Artificial Sequence
  Description of Artificial Sequence: Synthetic oligonucleotide
cauuaugccguagccccug

SEQ ID NO: 169925 - RNA, 19 nt, Artificial Sequence
  Description of Artificial Sequence: Synthetic oligonucleotide
aaagcacggcagugucacu

SEQ ID NO: 169926 - RNA, 19 nt, Artificial Sequence
  Description of Artificial Sequence: Synthetic oligonucleotide
acaguaugcuaaugcuuuu

SEQ ID NO: 169927 - RNA, 19 nt, Artificial Sequence
  Description of Artificial Sequence: Synthetic oligonucleotide
auaucagcaagggcaguau

SEQ ID NO: 169928 - RNA, 19 nt, Artificial Sequence
  Description of Artificial Sequence: Synthetic oligonucleotide
agcacggcagugucacuca

SEQ ID NO: 169929 - RNA, 19 nt, Artificial Sequence
  Description of Artificial Sequence: Synthetic oligonucleotide
agacauccuaucuccucau

SEQ ID NO: 169930 - RNA, 19 nt, Artificial Sequence
  Description of Artificial Sequence: Synthetic oligonucleotide
aaggcggugucucgugguu

SEQ ID NO: 169931 - RNA, 19 nt, Artificial Sequence
  Description of Artificial Sequence: Synthetic oligonucleotide
ugcgucccgaacgcugacg

SEQ ID NO: 169932 - RNA, 19 nt, Artificial Sequence
  Description of Artificial Sequence: Synthetic oligonucleotide
cuccucuaucuuuaagcga

SEQ ID NO: 169933 - RNA, 19 nt, Artificial Sequence
  Description of Artificial Sequence: Synthetic oligonucleotide
ccugacucaagugaguauc

SEQ ID NO: 169934 - RNA, 19 nt, Artificial Sequence
  Description of Artificial Sequence: Synthetic oligonucleotide
cauacgggaagagcacgug

SEQ ID NO: 169935 - RNA, 19 nt, Artificial Sequence
  Description of Artificial Sequence: Synthetic oligonucleotide
agugucacucauacgggaa

SEQ ID NO: 169936 - RNA, 19 nt, Artificial Sequence
  Description of Artificial Sequence: Synthetic oligonucleotide
acagcgauuaccacucauu

SEQ ID NO: 169937 - RNA, 19 nt, Artificial Sequence
  Description of Artificial Sequence: Synthetic oligonucleotide
cuaccuaugucacuacuau

SEQ ID NO: 169938 - RNA, 19 nt, Artificial Sequence
  Description of Artificial Sequence: Synthetic oligonucleotide
agcacuucagagguauuua

SEQ ID NO: 169939 - RNA, 19 nt, Artificial Sequence
  Description of Artificial Sequence: Synthetic oligonucleotide
gcagugucacucauacggg

SEQ ID NO: 169940 - RNA, 19 nt, Artificial Sequence
  Description of Artificial Sequence: Synthetic oligonucleotide
gcacgugaccggcagaaac

SEQ ID NO: 169941 - RNA, 19 nt, Artificial Sequence
  Description of Artificial Sequence: Synthetic oligonucleotide
gcgaaugagagcacgcuac

SEQ ID NO: 169942 - RNA, 19 nt, Artificial Sequence
  Description of Artificial Sequence: Synthetic oligonucleotide
acgacgacgagggccauau

SEQ ID NO: 169943 - RNA, 19 nt, Artificial Sequence
  Description of Artificial Sequence: Synthetic oligonucleotide
cagagcuagggcauuuaaa

SEQ ID NO: 169944 - RNA, 19 nt, Artificial Sequence
  Description of Artificial Sequence: Synthetic oligonucleotide
ccaagcgaaugagagcacg

SEQ ID NO: 169945 - RNA, 19 nt, Artificial Sequence
  Description of Artificial Sequence: Synthetic oligonucleotide
ggaagagcacgugaccggc

SEQ ID NO: 169946 - RNA, 19 nt, Artificial Sequence
  Description of Artificial Sequence: Synthetic oligonucleotide
ucucaccugcuggaauuga

SEQ ID NO: 169947 - RNA, 19 nt, Artificial Sequence
  Description of Artificial Sequence: Synthetic oligonucleotide
cauccuaucuccucauuau

SEQ ID NO: 169948 - RNA, 19 nt, Artificial Sequence
  Description of Artificial Sequence: Synthetic oligonucleotide
uagugucauugcccacucu

SEQ ID NO: 169949 - RNA, 19 nt, Artificial Sequence
  Description of Artificial Sequence: Synthetic oligonucleotide
agugggacgaccagcugau

SEQ ID NO: 169950 - RNA, 19 nt, Artificial Sequence
  Description of Artificial Sequence: Synthetic oligonucleotide
ucaaugcaucagugccuac

SEQ ID NO: 169951 - RNA, 19 nt, Artificial Sequence
  Description of Artificial Sequence: Synthetic oligonucleotide
auccagcgacaguaaguga

SEQ ID NO: 169952 - RNA, 19 nt, Artificial Sequence
  Description of Artificial Sequence: Synthetic oligonucleotide
cacuuccaagcgaaugaga

SEQ ID NO: 169953 - RNA, 19 nt, Artificial Sequence
  Description of Artificial Sequence: Synthetic oligonucleotide
guaaagcacggcaguguca

SEQ ID NO: 169954 - RNA, 19 nt, Artificial Sequence
  Description of Artificial Sequence: Synthetic oligonucleotide
gagcacgugaccggcagaa

SEQ ID NO: 169955 - RNA, 19 nt, Artificial Sequence
  Description of Artificial Sequence: Synthetic oligonucleotide
augaugcauuaugccguag

SEQ ID NO: 169956 - RNA, 19 nt, Artificial Sequence
  Description of Artificial Sequence: Synthetic oligonucleotide
agagcacgugaccggcaga

SEQ ID NO: 169957 - RNA, 19 nt, Artificial Sequence
  Description of Artificial Sequence: Synthetic oligonucleotide
ccucauuauccagcgacag

SEQ ID NO: 169958 - RNA, 19 nt, Artificial Sequence
  Description of Artificial Sequence: Synthetic oligonucleotide
cugcguaacuccuucugcu

SEQ ID NO: 169959 - RNA, 19 nt, Artificial Sequence
  Description of Artificial Sequence: Synthetic oligonucleotide
gcggcuugacuuuugcauc

SEQ ID NO: 169960 - RNA, 19 nt, Artificial Sequence
  Description of Artificial Sequence: Synthetic oligonucleotide
guauggacuuccaugggau

SEQ ID NO: 169961 - RNA, 19 nt, Artificial Sequence
  Description of Artificial Sequence: Synthetic oligonucleotide
ugggaacacgaggggaaaa

SEQ ID NO: 169962 - RNA, 19 nt, Artificial Sequence
  Description of Artificial Sequence: Synthetic oligonucleotide
acucuagagugcgucccga

SEQ ID NO: 169963 - RNA, 19 nt, Artificial Sequence
  Description of Artificial Sequence: Synthetic oligonucleotide
auggcaccauucccagcca

SEQ ID NO: 169964 - RNA, 19 nt, Artificial Sequence
  Description of Artificial Sequence: Synthetic oligonucleotide
ccgaguaggucugaccacc

SEQ ID NO: 169965 - RNA, 19 nt, Artificial Sequence
  Description of Artificial Sequence: Synthetic oligonucleotide
aacacgugugaaggugcua

SEQ ID NO: 169966 - RNA, 19 nt, Artificial Sequence
  Description of Artificial Sequence: Synthetic oligonucleotide
acgcuaccacuaacugacc

SEQ ID NO: 169967 - RNA, 19 nt, Artificial Sequence
  Description of Artificial Sequence: Synthetic oligonucleotide
gagcacgcuaccacuaacu

SEQ ID NO: 169968 - RNA, 19 nt, Artificial Sequence
  Description of Artificial Sequence: Synthetic oligonucleotide
cgggaguaaagcacggcag

SEQ ID NO: 169969 - RNA, 19 nt, Artificial Sequence
  Description of Artificial Sequence: Synthetic oligonucleotide
ggugcuauggggagcucac

SEQ ID NO: 169970 - RNA, 19 nt, Artificial Sequence
  Description of Artificial Sequence: Synthetic oligonucleotide
uggguugcaucugcugcau

SEQ ID NO: 169971 - RNA, 19 nt, Artificial Sequence
  Description of Artificial Sequence: Synthetic oligonucleotide
ggagcgguggguugcaucu

SEQ ID NO: 169972 - RNA, 19 nt, Artificial Sequence
  Description of Artificial Sequence: Synthetic oligonucleotide
gaagagcacgugaccggca

SEQ ID NO: 169973 - RNA, 19 nt, Artificial Sequence
  Description of Artificial Sequence: Synthetic oligonucleotide
gaacagcgauuaccacuca

SEQ ID NO: 169974 - RNA, 19 nt, Artificial Sequence
  Description of Artificial Sequence: Synthetic oligonucleotide
caaugcaucagugccuacu

SEQ ID NO: 169975 - RNA, 19 nt, Artificial Sequence
  Description of Artificial Sequence: Synthetic oligonucleotide
cccacucuagagugcgucc

SEQ ID NO: 169976 - RNA, 19 nt, Artificial Sequence
  Description of Artificial Sequence: Synthetic oligonucleotide
ccucaauccuauuaaggua

SEQ ID NO: 169977 - RNA, 19 nt, Artificial Sequence
  Description of Artificial Sequence: Synthetic oligonucleotide
gacuuacuaccaucuuuau

SEQ ID NO: 169978 - RNA, 19 nt, Artificial Sequence
  Description of Artificial Sequence: Synthetic oligonucleotide
guuuugaguugaaagcauu

SEQ ID NO: 169979 - RNA, 19 nt, Artificial Sequence
  Description of Artificial Sequence: Synthetic oligonucleotide
cucauuauccagcgacagu

SEQ ID NO: 169980 - RNA, 19 nt, Artificial Sequence
  Description of Artificial Sequence: Synthetic oligonucleotide
agguccguauuuacacagu

SEQ ID NO: 169981 - RNA, 19 nt, Artificial Sequence
  Description of Artificial Sequence: Synthetic oligonucleotide
gcgugcaagcaugacaauc

SEQ ID NO: 169982 - RNA, 19 nt, Artificial Sequence
  Description of Artificial Sequence: Synthetic oligonucleotide
ccaguuaagccugguugag

SEQ ID NO: 169983 - RNA, 19 nt, Artificial Sequence
  Description of Artificial Sequence: Synthetic oligonucleotide
cugucgaggcaaaaggguu

SEQ ID NO: 169984 - RNA, 19 nt, Artificial Sequence
  Description of Artificial Sequence: Synthetic oligonucleotide
gaacgcugacgugcucaug

SEQ ID NO: 169985 - RNA, 19 nt, Artificial Sequence
  Description of Artificial Sequence: Synthetic oligonucleotide
aggcccgaguaggucugac

SEQ ID NO: 169986 - RNA, 19 nt, Artificial Sequence
  Description of Artificial Sequence: Synthetic oligonucleotide
ggcaccauucccagccacc

SEQ ID NO: 169987 - RNA, 19 nt, Artificial Sequence
  Description of Artificial Sequence: Synthetic oligonucleotide
ccacucuagagugcguccc

SEQ ID NO: 169988 - RNA, 19 nt, Artificial Sequence
  Description of Artificial Sequence: Synthetic oligonucleotide
gugaggccgaagaaagcaa

SEQ ID NO: 169989 - RNA, 19 nt, Artificial Sequence
  Description of Artificial Sequence: Synthetic oligonucleotide
ggcggugucucgugguuuc

SEQ ID NO: 169990 - RNA, 19 nt, Artificial Sequence
  Description of Artificial Sequence: Synthetic oligonucleotide
agcgugcaagcaugacaau

SEQ ID NO: 169991 - RNA, 19 nt, Artificial Sequence
  Description of Artificial Sequence: Synthetic oligonucleotide
ccgggaguaaagcacggca

SEQ ID NO: 169992 - RNA, 19 nt, Artificial Sequence
  Description of Artificial Sequence: Synthetic oligonucleotide
cagcgauuaccacucauuu

SEQ ID NO: 169993 - RNA, 19 nt, Artificial Sequence
  Description of Artificial Sequence: Synthetic oligonucleotide
cucuagagugcgucccgaa

SEQ ID NO: 169994 - RNA, 19 nt, Artificial Sequence
  Description of Artificial Sequence: Synthetic oligonucleotide
ucgaggcaaaaggguuaga

SEQ ID NO: 169995 - RNA, 19 nt, Artificial Sequence
  Description of Artificial Sequence: Synthetic oligonucleotide
gcgguccuaaggccugagg

SEQ ID NO: 169996 - RNA, 19 nt, Artificial Sequence
  Description of Artificial Sequence: Synthetic oligonucleotide
gccaagcuugguaaaggca

SEQ ID NO: 169997 - RNA, 19 nt, Artificial Sequence
  Description of Artificial Sequence: Synthetic oligonucleotide
caacacgugugaaggugcu

SEQ ID NO: 169998 - RNA, 19 nt, Artificial Sequence
  Description of Artificial Sequence: Synthetic oligonucleotide
agcgguccuaaggccugag

SEQ ID NO: 169999 - RNA, 19 nt, Artificial Sequence
  Description of Artificial Sequence: Synthetic oligonucleotide
caauccuauuaagguaugu

SEQ ID NO: 170000 - RNA, 19 nt, Artificial Sequence
  Description of Artificial Sequence: Synthetic oligonucleotide
gcaagugccugucaaucau

SEQ ID NO: 170001 - RNA, 19 nt, Artificial Sequence
  Description of Artificial Sequence: Synthetic oligonucleotide
gcgauauaaccuugucucu

SEQ ID NO: 170002 - RNA, 19 nt, Artificial Sequence
  Description of Artificial Sequence: Synthetic oligonucleotide
ccaaacucaccaauuuagu

SEQ ID NO: 170003 - RNA, 19 nt, Artificial Sequence
  Description of Artificial Sequence: Synthetic oligonucleotide
cgacgagggccauaucagc

SEQ ID NO: 170004 - RNA, 19 nt, Artificial Sequence
  Description of Artificial Sequence: Synthetic oligonucleotide
gggugguuaaugacaugca

SEQ ID NO: 170005 - RNA, 19 nt, Artificial Sequence
  Description of Artificial Sequence: Synthetic oligonucleotide
cucuaucuuuaagcgauau

SEQ ID NO: 170006 - RNA, 19 nt, Artificial Sequence
  Description of Artificial Sequence: Synthetic oligonucleotide
cacuuaucuuggagagcaa

SEQ ID NO: 170007 - RNA, 19 nt, Artificial Sequence
  Description of Artificial Sequence: Synthetic oligonucleotide
cgaccagcugauagcacug

SEQ ID NO: 170008 - RNA, 19 nt, Artificial Sequence
  Description of Artificial Sequence: Synthetic oligonucleotide
cagggcuaagcggcuugac

SEQ ID NO: 170009 - RNA, 19 nt, Artificial Sequence
  Description of Artificial Sequence: Synthetic oligonucleotide
caaggcggugucucguggu

SEQ ID NO: 170010 - RNA, 19 nt, Artificial Sequence
  Description of Artificial Sequence: Synthetic oligonucleotide
caccauucccagccaccca

SEQ ID NO: 170011 - RNA, 19 nt, Artificial Sequence
  Description of Artificial Sequence: Synthetic oligonucleotide
ggaggcgcacacacauuac

SEQ ID NO: 170012 - RNA, 19 nt, Artificial Sequence
  Description of Artificial Sequence: Synthetic oligonucleotide
guugagccccagggcuaag

SEQ ID NO: 170013 - RNA, 19 nt, Artificial Sequence
  Description of Artificial Sequence: Synthetic oligonucleotide
gcccacucuagagugcguc

SEQ ID NO: 170014 - RNA, 19 nt, Artificial Sequence
  Description of Artificial Sequence: Synthetic oligonucleotide
agcacgugaccggcagaaa

SEQ ID NO: 170015 - RNA, 19 nt, Artificial Sequence
  Description of Artificial Sequence: Synthetic oligonucleotide
caacaaccccugugucuaa

SEQ ID NO: 170016 - RNA, 19 nt, Artificial Sequence
  Description of Artificial Sequence: Synthetic oligonucleotide
aggcggugucucgugguuu

SEQ ID NO: 170017 - RNA, 19 nt, Artificial Sequence
  Description of Artificial Sequence: Synthetic oligonucleotide
ccgaacgcugacgugcuca

SEQ ID NO: 170018 - RNA, 19 nt, Artificial Sequence
  Description of Artificial Sequence: Synthetic oligonucleotide
caugggucguuugcuuaua

SEQ ID NO: 170019 - RNA, 19 nt, Artificial Sequence
  Description of Artificial Sequence: Synthetic oligonucleotide
cccugugucuaagagaaau

SEQ ID NO: 170020 - RNA, 19 nt, Artificial Sequence
  Description of Artificial Sequence: Synthetic oligonucleotide
gcgucccgaacgcugacgu

SEQ ID NO: 170021 - RNA, 19 nt, Artificial Sequence
  Description of Artificial Sequence: Synthetic oligonucleotide
gaggcccgaguaggucuga

SEQ ID NO: 170022 - RNA, 19 nt, Artificial Sequence
  Description of Artificial Sequence: Synthetic oligonucleotide
accgcagggcuggcccuca

SEQ ID NO: 170023 - RNA, 19 nt, Artificial Sequence
  Description of Artificial Sequence: Synthetic oligonucleotide
cggcagugucacucauacg

SEQ ID NO: 170024 - RNA, 19 nt, Artificial Sequence
  Description of Artificial Sequence: Synthetic oligonucleotide
caacuagagcugacauauu

SEQ ID NO: 170025 - RNA, 19 nt, Artificial Sequence
  Description of Artificial Sequence: Synthetic oligonucleotide
gcuuauacucugagaugau

SEQ ID NO: 170026 - RNA, 19 nt, Artificial Sequence
  Description of Artificial Sequence: Synthetic oligonucleotide
gcauuaugccguagccccu

SEQ ID NO: 170027 - RNA, 19 nt, Artificial Sequence
  Description of Artificial Sequence: Synthetic oligonucleotide
cgucccgaacgcugacgug

SEQ ID NO: 170028 - RNA, 19 nt, Artificial Sequence
  Description of Artificial Sequence: Synthetic oligonucleotide
gcuaagcggcuugacuuuu

SEQ ID NO: 170029 - RNA, 19 nt, Artificial Sequence
  Description of Artificial Sequence: Synthetic oligonucleotide
cacgacgacgagggccaua

SEQ ID NO: 170030 - RNA, 19 nt, Artificial Sequence
  Description of Artificial Sequence: Synthetic oligonucleotide
gugggacgaccagcugaua

SEQ ID NO: 170031 - RNA, 19 nt, Artificial Sequence
  Description of Artificial Sequence: Synthetic oligonucleotide
cccgaacgcugacgugcuc

SEQ ID NO: 170032 - RNA, 19 nt, Artificial Sequence
  Description of Artificial Sequence: Synthetic oligonucleotide
gcgguggguugcaucugcu

SEQ ID NO: 170033 - RNA, 19 nt, Artificial Sequence
  Description of Artificial Sequence: Synthetic oligonucleotide
cgaacgcugacgugcucau

SEQ ID NO: 170034 - RNA, 19 nt, Artificial Sequence
  Description of Artificial Sequence: Synthetic oligonucleotide
cgacgacgagggccauauc

SEQ ID NO: 170035 - RNA, 19 nt, Artificial Sequence
  Description of Artificial Sequence: Synthetic oligonucleotide
aacuuaaagugcuugagca

SEQ ID NO: 170036 - RNA, 19 nt, Artificial Sequence
  Description of Artificial Sequence: Synthetic oligonucleotide
auccgaagaagauuaaugc

SEQ ID NO: 170037 - RNA, 19 nt, Artificial Sequence
  Description of Artificial Sequence: Synthetic oligonucleotide
gaugcuaggaaucaaccag

SEQ ID NO: 170038 - RNA, 19 nt, Artificial Sequence
  Description of Artificial Sequence: Synthetic oligonucleotide
auuaaugcaagaaaagagg

SEQ ID NO: 170039 - RNA, 19 nt, Artificial Sequence
  Description of Artificial Sequence: Synthetic oligonucleotide
agaacguuucuucauaggg

SEQ ID NO: 170040 - RNA, 19 nt, Artificial Sequence
  Description of Artificial Sequence: Synthetic oligonucleotide
aagaguagaucccagcuug

SEQ ID NO: 170041 - RNA, 19 nt, Artificial Sequence
  Description of Artificial Sequence: Synthetic oligonucleotide
agaucauugccguaugccc

SEQ ID NO: 170042 - RNA, 19 nt, Artificial Sequence
  Description of Artificial Sequence: Synthetic oligonucleotide
uuaaugcaagaaaagaggu

SEQ ID NO: 170043 - RNA, 19 nt, Artificial Sequence
  Description of Artificial Sequence: Synthetic oligonucleotide
aagcguucgauguuggcac

SEQ ID NO: 170044 - RNA, 19 nt, Artificial Sequence
  Description of Artificial Sequence: Synthetic oligonucleotide
uugauugaagaacuucagg

SEQ ID NO: 170045 - RNA, 19 nt, Artificial Sequence
  Description of Artificial Sequence: Synthetic oligonucleotide
aaauuguccugcuuuuauc

SEQ ID NO: 170046 - RNA, 19 nt, Artificial Sequence
  Description of Artificial Sequence: Synthetic oligonucleotide
auagcaugauggcaaaugg

SEQ ID NO: 170047 - RNA, 19 nt, Artificial Sequence
  Description of Artificial Sequence: Synthetic oligonucleotide
uaugaugagauaacagucu

SEQ ID NO: 170048 - RNA, 19 nt, Artificial Sequence
  Description of Artificial Sequence: Synthetic oligonucleotide
uggaagcucauuuaccacg

SEQ ID NO: 170049 - RNA, 19 nt, Artificial Sequence
  Description of Artificial Sequence: Synthetic oligonucleotide
aauagcaugauggcaaaug

SEQ ID NO: 170050 - RNA, 19 nt, Artificial Sequence
  Description of Artificial Sequence: Synthetic oligonucleotide
aaauggcucauuguuguac

SEQ ID NO: 170051 - RNA, 19 nt, Artificial Sequence
  Description of Artificial Sequence: Synthetic oligonucleotide
aauggagcugugcugccac

SEQ ID NO: 170052 - RNA, 19 nt, Artificial Sequence
  Description of Artificial Sequence: Synthetic oligonucleotide
gagaguacgcuucucagcc

SEQ ID NO: 170053 - RNA, 19 nt, Artificial Sequence
  Description of Artificial Sequence: Synthetic oligonucleotide
cuaacugugaaaugaguug

SEQ ID NO: 170054 - RNA, 19 nt, Artificial Sequence
  Description of Artificial Sequence: Synthetic oligonucleotide
uagaguguagccuaugaac

SEQ ID NO: 170055 - RNA, 19 nt, Artificial Sequence
  Description of Artificial Sequence: Synthetic oligonucleotide
ucaucagucuuauaggggu

SEQ ID NO: 170056 - RNA, 19 nt, Artificial Sequence
  Description of Artificial Sequence: Synthetic oligonucleotide
cuuguggcgguucacaucc

SEQ ID NO: 170057 - RNA, 19 nt, Artificial Sequence
  Description of Artificial Sequence: Synthetic oligonucleotide
uucauguugcucuugcgcc

SEQ ID NO: 170058 - RNA, 19 nt, Artificial Sequence
  Description of Artificial Sequence: Synthetic oligonucleotide
ccuagauuuacucacaggc

SEQ ID NO: 170059 - RNA, 19 nt, Artificial Sequence
  Description of Artificial Sequence: Synthetic oligonucleotide
cuuaaagugcuugagcagc

SEQ ID NO: 170060 - RNA, 19 nt, Artificial Sequence
  Description of Artificial Sequence: Synthetic oligonucleotide
gaaucugugguaucuaaca

SEQ ID NO: 170061 - RNA, 19 nt, Artificial Sequence
  Description of Artificial Sequence: Synthetic oligonucleotide
uagaucuacacgcuggccu

SEQ ID NO: 170062 - RNA, 19 nt, Artificial Sequence
  Description of Artificial Sequence: Synthetic oligonucleotide
cuagauuuacucacaggcc

SEQ ID NO: 170063 - RNA, 19 nt, Artificial Sequence
  Description of Artificial Sequence: Synthetic oligonucleotide
aagcucauuuaccacgcag

SEQ ID NO: 170064 - RNA, 19 nt, Artificial Sequence
  Description of Artificial Sequence: Synthetic oligonucleotide
ucaaucaggucugaggcag

SEQ ID NO: 170065 - RNA, 19 nt, Artificial Sequence
  Description of Artificial Sequence: Synthetic oligonucleotide
gucaauccuauccaagagg

SEQ ID NO: 170066 - RNA, 19 nt, Artificial Sequence
  Description of Artificial Sequence: Synthetic oligonucleotide
cauauugcggaucaccuug

SEQ ID NO: 170067 - RNA, 19 nt, Artificial Sequence
  Description of Artificial Sequence: Synthetic oligonucleotide
gauccgaagaagauuaaug

SEQ ID NO: 170068 - RNA, 19 nt, Artificial Sequence
  Description of Artificial Sequence: Synthetic oligonucleotide
ugcaguuaacucuggaagc

SEQ ID NO: 170069 - RNA, 19 nt, Artificial Sequence
  Description of Artificial Sequence: Synthetic oligonucleotide
agauuaaugcaagaaaaga

SEQ ID NO: 170070 - RNA, 19 nt, Artificial Sequence
  Description of Artificial Sequence: Synthetic oligonucleotide
aauggcucauuguuguaca

SEQ ID NO: 170071 - RNA, 19 nt, Artificial Sequence
  Description of Artificial Sequence: Synthetic oligonucleotide
uugauugagucuguuuugg

SEQ ID NO: 170072 - RNA, 19 nt, Artificial Sequence
  Description of Artificial Sequence: Synthetic oligonucleotide
ugaaaugaguugcagucaa

SEQ ID NO: 170073 - RNA, 19 nt, Artificial Sequence
  Description of Artificial Sequence: Synthetic oligonucleotide
ucaacuuaaagugcuugag

SEQ ID NO: 170074 - RNA, 19 nt, Artificial Sequence
  Description of Artificial Sequence: Synthetic oligonucleotide
gaaaagagguuccuccagc

SEQ ID NO: 170075 - RNA, 19 nt, Artificial Sequence
  Description of Artificial Sequence: Synthetic oligonucleotide
cugcaguuaacucuggaag

SEQ ID NO: 170076 - RNA, 19 nt, Artificial Sequence
  Description of Artificial Sequence: Synthetic oligonucleotide
uccgaagaagauuaaugca

SEQ ID NO: 170077 - RNA, 19 nt, Artificial Sequence
  Description of Artificial Sequence: Synthetic oligonucleotide
uuaguuuguucaagauccg

SEQ ID NO: 170078 - RNA, 19 nt, Artificial Sequence
  Description of Artificial Sequence: Synthetic oligonucleotide
uuuccgauucaucaggaau

SEQ ID NO: 170079 - RNA, 19 nt, Artificial Sequence
  Description of Artificial Sequence: Synthetic oligonucleotide
ucugugguaucuaacacuu

SEQ ID NO: 170080 - RNA, 19 nt, Artificial Sequence
  Description of Artificial Sequence: Synthetic oligonucleotide
ugguucaacuuaaagugcu

SEQ ID NO: 170081 - RNA, 19 nt, Artificial Sequence
  Description of Artificial Sequence: Synthetic oligonucleotide
cauauacugaggcaggcug

SEQ ID NO: 170082 - RNA, 19 nt, Artificial Sequence
  Description of Artificial Sequence: Synthetic oligonucleotide
auguauucaaacugguaga

SEQ ID NO: 170083 - RNA, 19 nt, Artificial Sequence
  Description of Artificial Sequence: Synthetic oligonucleotide
ggucauggcaaucaagagg

SEQ ID NO: 170084 - RNA, 19 nt, Artificial Sequence
  Description of Artificial Sequence: Synthetic oligonucleotide
uuguucaagauccgaagaa

SEQ ID NO: 170085 - RNA, 19 nt, Artificial Sequence
  Description of Artificial Sequence: Synthetic oligonucleotide
gaugcuuucguggauuggc

SEQ ID NO: 170086 - RNA, 19 nt, Artificial Sequence
  Description of Artificial Sequence: Synthetic oligonucleotide
caggagggcaaucauauac

SEQ ID NO: 170087 - RNA, 19 nt, Artificial Sequence
  Description of Artificial Sequence: Synthetic oligonucleotide
agcauuuccgauucaucag

SEQ ID NO: 170088 - RNA, 19 nt, Artificial Sequence
  Description of Artificial Sequence: Synthetic oligonucleotide
aaucaaccagaggccaacc

SEQ ID NO: 170089 - RNA, 19 nt, Artificial Sequence
  Description of Artificial Sequence: Synthetic oligonucleotide
cuuuagcacauagagcugc

SEQ ID NO: 170090 - RNA, 19 nt, Artificial Sequence
  Description of Artificial Sequence: Synthetic oligonucleotide
auugccguaugcccagucg

SEQ ID NO: 170091 - RNA, 19 nt, Artificial Sequence
  Description of Artificial Sequence: Synthetic oligonucleotide
uagcaugauggcaaauggc

SEQ ID NO: 170092 - RNA, 19 nt, Artificial Sequence
  Description of Artificial Sequence: Synthetic oligonucleotide
caggcaauuguccacuggc

SEQ ID NO: 170093 - RNA, 19 nt, Artificial Sequence
  Description of Artificial Sequence: Synthetic oligonucleotide
ugcuaggaaucaaccagag

SEQ ID NO: 170094 - RNA, 19 nt, Artificial Sequence
  Description of Artificial Sequence: Synthetic oligonucleotide
uuccgauucaucaggaauu

SEQ ID NO: 170095 - RNA, 19 nt, Artificial Sequence
  Description of Artificial Sequence: Synthetic oligonucleotide
guaugaugagauaacaguc

SEQ ID NO: 170096 - RNA, 19 nt, Artificial Sequence
  Description of Artificial Sequence: Synthetic oligonucleotide
ucacacuaaccccuccucc

SEQ ID NO: 170097 - RNA, 19 nt, Artificial Sequence
  Description of Artificial Sequence: Synthetic oligonucleotide
ugcggcuagauucaaggaa

SEQ ID NO: 170098 - RNA, 19 nt, Artificial Sequence
  Description of Artificial Sequence: Synthetic oligonucleotide
cuguauagcuguaaagcuc

SEQ ID NO: 170099 - RNA, 19 nt, Artificial Sequence
  Description of Artificial Sequence: Synthetic oligonucleotide
uuugaugugggagcugcag

SEQ ID NO: 170100 - RNA, 19 nt, Artificial Sequence
  Description of Artificial Sequence: Synthetic oligonucleotide
gagucaaugggaccuugag

SEQ ID NO: 170101 - RNA, 19 nt, Artificial Sequence
  Description of Artificial Sequence: Synthetic oligonucleotide
ugucgccccaaguauuugg

SEQ ID NO: 170102 - RNA, 19 nt, Artificial Sequence
  Description of Artificial Sequence: Synthetic oligonucleotide
ugaguaggaugcuaggaau

SEQ ID NO: 170103 - RNA, 19 nt, Artificial Sequence
  Description of Artificial Sequence: Synthetic oligonucleotide
auggccuuaacgaugaccu

SEQ ID NO: 170104 - RNA, 19 nt, Artificial Sequence
  Description of Artificial Sequence: Synthetic oligonucleotide
uggcgguucacauccaccc

SEQ ID NO: 170105 - RNA, 19 nt, Artificial Sequence
  Description of Artificial Sequence: Synthetic oligonucleotide
accuagauuuacucacagg

SEQ ID NO: 170106 - RNA, 19 nt, Artificial Sequence
  Description of Artificial Sequence: Synthetic oligonucleotide
cagaauagcccuccgaguc

SEQ ID NO: 170107 - RNA, 19 nt, Artificial Sequence
  Description of Artificial Sequence: Synthetic oligonucleotide
auugaagcguucgauguug

SEQ ID NO: 170108 - RNA, 19 nt, Artificial Sequence
  Description of Artificial Sequence: Synthetic oligonucleotide
caagauccgaagaagauua

SEQ ID NO: 170109 - RNA, 19 nt, Artificial Sequence
  Description of Artificial Sequence: Synthetic oligonucleotide
agcaugauggcaaauggcu

SEQ ID NO: 170110 - RNA, 19 nt, Artificial Sequence
  Description of Artificial Sequence: Synthetic oligonucleotide
uuaucaaggccuuguguuc

SEQ ID NO: 170111 - RNA, 19 nt, Artificial Sequence
  Description of Artificial Sequence: Synthetic oligonucleotide
agaguguagccuaugaacu

SEQ ID NO: 170112 - RNA, 19 nt, Artificial Sequence
  Description of Artificial Sequence: Synthetic oligonucleotide
agaaucugugguaucuaac

SEQ ID NO: 170113 - RNA, 19 nt, Artificial Sequence
  Description of Artificial Sequence: Synthetic oligonucleotide
guagaugugguucaacuua

SEQ ID NO: 170114 - RNA, 19 nt, Artificial Sequence
  Description of Artificial Sequence: Synthetic oligonucleotide
cacgcagugaggguaaucc

SEQ ID NO: 170115 - RNA, 19 nt, Artificial Sequence
  Description of Artificial Sequence: Synthetic oligonucleotide
uuuagcacauagagcugca

SEQ ID NO: 170116 - RNA, 19 nt, Artificial Sequence
  Description of Artificial Sequence: Synthetic oligonucleotide
caggucauggcaaucaaga

SEQ ID NO: 170117 - RNA, 19 nt, Artificial Sequence
  Description of Artificial Sequence: Synthetic oligonucleotide
ucguggauuggccuuggca

SEQ ID NO: 170118 - RNA, 19 nt, Artificial Sequence
  Description of Artificial Sequence: Synthetic oligonucleotide
gcugcggcuagauucaagg

SEQ ID NO: 170119 - RNA, 19 nt, Artificial Sequence
  Description of Artificial Sequence: Synthetic oligonucleotide
uauccaagaggggagggca

SEQ ID NO: 170120 - RNA, 19 nt, Artificial Sequence
  Description of Artificial Sequence: Synthetic oligonucleotide
ucggcuuuucccagccugg

SEQ ID NO: 170121 - RNA, 19 nt, Artificial Sequence
  Description of Artificial Sequence: Synthetic oligonucleotide
ugauugagucuguuuuggc

SEQ ID NO: 170122 - RNA, 19 nt, Artificial Sequence
  Description of Artificial Sequence: Synthetic oligonucleotide
ucugucacauggauccgga

SEQ ID NO: 170123 - RNA, 19 nt, Artificial Sequence
  Description of Artificial Sequence: Synthetic oligonucleotide
ucuauucuuggcccucaca

SEQ ID NO: 170124 - RNA, 19 nt, Artificial Sequence
  Description of Artificial Sequence: Synthetic oligonucleotide
aucauugccguaugcccag

SEQ ID NO: 170125 - RNA, 19 nt, Artificial Sequence
  Description of Artificial Sequence: Synthetic oligonucleotide
cuucuggacaaaacacagc

SEQ ID NO: 170126 - RNA, 19 nt, Artificial Sequence
  Description of Artificial Sequence: Synthetic oligonucleotide
gcauuuccgauucaucagg

SEQ ID NO: 170127 - RNA, 19 nt, Artificial Sequence
  Description of Artificial Sequence: Synthetic oligonucleotide
cauacucaaacuccagguc

SEQ ID NO: 170128 - RNA, 19 nt, Artificial Sequence
  Description of Artificial Sequence: Synthetic oligonucleotide
cucgguaugaugagauaac

SEQ ID NO: 170129 - RNA, 19 nt, Artificial Sequence
  Description of Artificial Sequence: Synthetic oligonucleotide
gguaugaugagauaacagu

SEQ ID NO: 170130 - RNA, 19 nt, Artificial Sequence
  Description of Artificial Sequence: Synthetic oligonucleotide
aggucauggcaaucaagag

SEQ ID NO: 170131 - RNA, 19 nt, Artificial Sequence
  Description of Artificial Sequence: Synthetic oligonucleotide
agguagaucuacacgcugg

SEQ ID NO: 170132 - RNA, 19 nt, Artificial Sequence
  Description of Artificial Sequence: Synthetic oligonucleotide
cagaucauugccguaugcc

SEQ ID NO: 170133 - RNA, 19 nt, Artificial Sequence
  Description of Artificial Sequence: Synthetic oligonucleotide
aaccaaggugccaacucuc

SEQ ID NO: 170134 - RNA, 19 nt, Artificial Sequence
  Description of Artificial Sequence: Synthetic oligonucleotide
gaagcguucgauguuggca

SEQ ID NO: 170135 - RNA, 19 nt, Artificial Sequence
  Description of Artificial Sequence: Synthetic oligonucleotide
ugaaggucugucucauugu

SEQ ID NO: 170136 - RNA, 19 nt, Artificial Sequence
  Description of Artificial Sequence: Synthetic oligonucleotide
agggaugcaaggcccaucu

SEQ ID NO: 170137 - RNA, 19 nt, Artificial Sequence
  Description of Artificial Sequence: Synthetic oligonucleotide
uuuaccacgcagugagggu

SEQ ID NO: 170138 - RNA, 19 nt, Artificial Sequence
  Description of Artificial Sequence: Synthetic oligonucleotide
ucgguaugaugagauaaca

SEQ ID NO: 170139 - RNA, 19 nt, Artificial Sequence
  Description of Artificial Sequence: Synthetic oligonucleotide
gaacagucugggcagugac

SEQ ID NO: 170140 - RNA, 19 nt, Artificial Sequence
  Description of Artificial Sequence: Synthetic oligonucleotide
ucauguugcucuugcgcca

SEQ ID NO: 170141 - RNA, 19 nt, Artificial Sequence
  Description of Artificial Sequence: Synthetic oligonucleotide
ucaagauccgaagaagauu

SEQ ID NO: 170142 - RNA, 19 nt, Artificial Sequence
  Description of Artificial Sequence: Synthetic oligonucleotide
aguaggaugcuaggaauca

SEQ ID NO: 170143 - RNA, 19 nt, Artificial Sequence
  Description of Artificial Sequence: Synthetic oligonucleotide
gcggaggaagaguagaucc

SEQ ID NO: 170144 - RNA, 19 nt, Artificial Sequence
  Description of Artificial Sequence: Synthetic oligonucleotide
uugccguaugcccagucgu

SEQ ID NO: 170145 - RNA, 19 nt, Artificial Sequence
  Description of Artificial Sequence: Synthetic oligonucleotide
agagaagacuucccuuucu

SEQ ID NO: 170146 - RNA, 19 nt, Artificial Sequence
  Description of Artificial Sequence: Synthetic oligonucleotide
auuuacaggucauggcaau

SEQ ID NO: 170147 - RNA, 19 nt, Artificial Sequence
  Description of Artificial Sequence: Synthetic oligonucleotide
agaauagcccuccgagucu

SEQ ID NO: 170148 - RNA, 19 nt, Artificial Sequence
  Description of Artificial Sequence: Synthetic oligonucleotide
gauuuacucacaggcccag

SEQ ID NO: 170149 - RNA, 19 nt, Artificial Sequence
  Description of Artificial Sequence: Synthetic oligonucleotide
gacucaauggagcugugcu

SEQ ID NO: 170150 - RNA, 19 nt, Artificial Sequence
  Description of Artificial Sequence: Synthetic oligonucleotide
caucccaaauagcaugaug

SEQ ID NO: 170151 - RNA, 19 nt, Artificial Sequence
  Description of Artificial Sequence: Synthetic oligonucleotide
augucgcaccuucugguag

SEQ ID NO: 170152 - RNA, 19 nt, Artificial Sequence
  Description of Artificial Sequence: Synthetic oligonucleotide
gaaucaaccagaggccaac

SEQ ID NO: 170153 - RNA, 19 nt, Artificial Sequence
  Description of Artificial Sequence: Synthetic oligonucleotide
uccuauccaagaggggagg

SEQ ID NO: 170154 - RNA, 19 nt, Artificial Sequence
  Description of Artificial Sequence: Synthetic oligonucleotide
ggugcucaggagucaaugg

SEQ ID NO: 170155 - RNA, 19 nt, Artificial Sequence
  Description of Artificial Sequence: Synthetic oligonucleotide
cauaguucaucuggaaguc

SEQ ID NO: 170156 - RNA, 19 nt, Artificial Sequence
  Description of Artificial Sequence: Synthetic oligonucleotide
gaucauugccguaugccca

SEQ ID NO: 170157 - RNA, 19 nt, Artificial Sequence
  Description of Artificial Sequence: Synthetic oligonucleotide
accucgucucgcucaaggg

SEQ ID NO: 170158 - RNA, 19 nt, Artificial Sequence
  Description of Artificial Sequence: Synthetic oligonucleotide
agagaacacauagaguuuu

SEQ ID NO: 170159 - RNA, 19 nt, Artificial Sequence
  Description of Artificial Sequence: Synthetic oligonucleotide
augcuuucguggauuggcc

SEQ ID NO: 170160 - RNA, 19 nt, Artificial Sequence
  Description of Artificial Sequence: Synthetic oligonucleotide
uaguuuguucaagauccga

SEQ ID NO: 170161 - RNA, 19 nt, Artificial Sequence
  Description of Artificial Sequence: Synthetic oligonucleotide
ugcagucaauccuauccaa

SEQ ID NO: 170162 - RNA, 19 nt, Artificial Sequence
  Description of Artificial Sequence: Synthetic oligonucleotide
ucccucgguaugaugagau

SEQ ID NO: 170163 - RNA, 19 nt, Artificial Sequence
  Description of Artificial Sequence: Synthetic oligonucleotide
ggcauugaagcguucgaug

SEQ ID NO: 170164 - RNA, 19 nt, Artificial Sequence
  Description of Artificial Sequence: Synthetic oligonucleotide
gagggcaacaagagcacug

SEQ ID NO: 170165 - RNA, 19 nt, Artificial Sequence
  Description of Artificial Sequence: Synthetic oligonucleotide
uggagaugacugcuccuga

SEQ ID NO: 170166 - RNA, 19 nt, Artificial Sequence
  Description of Artificial Sequence: Synthetic oligonucleotide
aguuaacucuggaagcuca

SEQ ID NO: 170167 - RNA, 19 nt, Artificial Sequence
  Description of Artificial Sequence: Synthetic oligonucleotide
gaugggugccgacuugaac

SEQ ID NO: 170168 - RNA, 19 nt, Artificial Sequence
  Description of Artificial Sequence: Synthetic oligonucleotide
ugaagcguucgauguuggc

SEQ ID NO: 170169 - RNA, 19 nt, Artificial Sequence
  Description of Artificial Sequence: Synthetic oligonucleotide
ugcuuucguggauuggccu

SEQ ID NO: 170170 - RNA, 19 nt, Artificial Sequence
  Description of Artificial Sequence: Synthetic oligonucleotide
caggcuguugucaucguca

SEQ ID NO: 170171 - RNA, 19 nt, Artificial Sequence
  Description of Artificial Sequence: Synthetic oligonucleotide
cuggaagcucauuuaccac

SEQ ID NO: 170172 - RNA, 19 nt, Artificial Sequence
  Description of Artificial Sequence: Synthetic oligonucleotide
ugucgcaccuucugguaga

SEQ ID NO: 170173 - RNA, 19 nt, Artificial Sequence
  Description of Artificial Sequence: Synthetic oligonucleotide
uacgguguugguugguauc

SEQ ID NO: 170174 - RNA, 19 nt, Artificial Sequence
  Description of Artificial Sequence: Synthetic oligonucleotide
cucggcuuuucccagccug

SEQ ID NO: 170175 - RNA, 19 nt, Artificial Sequence
  Description of Artificial Sequence: Synthetic oligonucleotide
ugaugcuuucguggauugg

SEQ ID NO: 170176 - RNA, 19 nt, Artificial Sequence
  Description of Artificial Sequence: Synthetic oligonucleotide
ugcuggaauggcaucgaua

SEQ ID NO: 170177 - RNA, 19 nt, Artificial Sequence
  Description of Artificial Sequence: Synthetic oligonucleotide
ucauauugcggaucaccuu

SEQ ID NO: 170178 - RNA, 19 nt, Artificial Sequence
  Description of Artificial Sequence: Synthetic oligonucleotide
agauaacagucuguuucag

SEQ ID NO: 170179 - RNA, 19 nt, Artificial Sequence
  Description of Artificial Sequence: Synthetic oligonucleotide
agucccucgguaugaugag

SEQ ID NO: 170180 - RNA, 19 nt, Artificial Sequence
  Description of Artificial Sequence: Synthetic oligonucleotide
agcucauuuaccacgcagu

SEQ ID NO: 170181 - RNA, 19 nt, Artificial Sequence
  Description of Artificial Sequence: Synthetic oligonucleotide
uguagccuaugaacuugcu

SEQ ID NO: 170182 - RNA, 19 nt, Artificial Sequence
  Description of Artificial Sequence: Synthetic oligonucleotide
ucuacacgcuggccuagga

SEQ ID NO: 170183 - RNA, 19 nt, Artificial Sequence
  Description of Artificial Sequence: Synthetic oligonucleotide
uguggcgguucacauccac

SEQ ID NO: 170184 - RNA, 19 nt, Artificial Sequence
  Description of Artificial Sequence: Synthetic oligonucleotide
cacccagugugcacaauac

SEQ ID NO: 170185 - RNA, 19 nt, Artificial Sequence
  Description of Artificial Sequence: Synthetic oligonucleotide
cuugcugcggcuagauuca

SEQ ID NO: 170186 - RNA, 19 nt, Artificial Sequence
  Description of Artificial Sequence: Synthetic oligonucleotide
agcggaggaagaguagauc

SEQ ID NO: 170187 - RNA, 19 nt, Artificial Sequence
  Description of Artificial Sequence: Synthetic oligonucleotide
gaguaggaugcuaggaauc

SEQ ID NO: 170188 - RNA, 19 nt, Artificial Sequence
  Description of Artificial Sequence: Synthetic oligonucleotide
aggugccaacucucuauuc

SEQ ID NO: 170189 - RNA, 19 nt, Artificial Sequence
  Description of Artificial Sequence: Synthetic oligonucleotide
uuuacaggucauggcaauc

SEQ ID NO: 170190 - RNA, 19 nt, Artificial Sequence
  Description of Artificial Sequence: Synthetic oligonucleotide
aagaggaaacuggcaccuc

SEQ ID NO: 170191 - RNA, 19 nt, Artificial Sequence
  Description of Artificial Sequence: Synthetic oligonucleotide
agaucuacacgcuggccua

SEQ ID NO: 170192 - RNA, 19 nt, Artificial Sequence
  Description of Artificial Sequence: Synthetic oligonucleotide
cagugcuccucacugcagc

SEQ ID NO: 170193 - RNA, 19 nt, Artificial Sequence
  Description of Artificial Sequence: Synthetic oligonucleotide
caaggccuuguguuccccg

SEQ ID NO: 170194 - RNA, 19 nt, Artificial Sequence
  Description of Artificial Sequence: Synthetic oligonucleotide
cugaguaggaugcuaggaa

SEQ ID NO: 170195 - RNA, 19 nt, Artificial Sequence
  Description of Artificial Sequence: Synthetic oligonucleotide
ucauggcauggguacggug

SEQ ID NO: 170196 - RNA, 19 nt, Artificial Sequence
  Description of Artificial Sequence: Synthetic oligonucleotide
uggauuggccuuggcagcc

SEQ ID NO: 170197 - RNA, 19 nt, Artificial Sequence
  Description of Artificial Sequence: Synthetic oligonucleotide
uccgauucaucaggaauuc

SEQ ID NO: 170198 - RNA, 19 nt, Artificial Sequence
  Description of Artificial Sequence: Synthetic oligonucleotide
ugggugccgacuugaacac

SEQ ID NO: 170199 - RNA, 19 nt, Artificial Sequence
  Description of Artificial Sequence: Synthetic oligonucleotide
uggguacgguguugguugg

SEQ ID NO: 170200 - RNA, 19 nt, Artificial Sequence
  Description of Artificial Sequence: Synthetic oligonucleotide
cuauccaagaggggagggc

SEQ ID NO: 170201 - RNA, 19 nt, Artificial Sequence
  Description of Artificial Sequence: Synthetic oligonucleotide
ucgucguucagccgauguc

SEQ ID NO: 170202 - RNA, 19 nt, Artificial Sequence
  Description of Artificial Sequence: Synthetic oligonucleotide
ucgcucaaggggaaauguc

SEQ ID NO: 170203 - RNA, 19 nt, Artificial Sequence
  Description of Artificial Sequence: Synthetic oligonucleotide
cucgucucgcucaagggga

SEQ ID NO: 170204 - RNA, 19 nt, Artificial Sequence
  Description of Artificial Sequence: Synthetic oligonucleotide
guucgauguuggcacggag

SEQ ID NO: 170205 - RNA, 19 nt, Artificial Sequence
  Description of Artificial Sequence: Synthetic oligonucleotide
agcguucgauguuggcacg

SEQ ID NO: 170206 - RNA, 19 nt, Artificial Sequence
  Description of Artificial Sequence: Synthetic oligonucleotide
ggcaacaagagcacugcag

SEQ ID NO: 170207 - RNA, 19 nt, Artificial Sequence
  Description of Artificial Sequence: Synthetic oligonucleotide
uaugcccagucgucguuca

SEQ ID NO: 170208 - RNA, 19 nt, Artificial Sequence
  Description of Artificial Sequence: Synthetic oligonucleotide
uuaccacgcagugagggua

SEQ ID NO: 170209 - RNA, 19 nt, Artificial Sequence
  Description of Artificial Sequence: Synthetic oligonucleotide
auccuauccaagaggggag

SEQ ID NO: 170210 - RNA, 19 nt, Artificial Sequence
  Description of Artificial Sequence: Synthetic oligonucleotide
auuuccgauucaucaggaa

SEQ ID NO: 170211 - RNA, 19 nt, Artificial Sequence
  Description of Artificial Sequence: Synthetic oligonucleotide
ucagucuuauagggguccc

SEQ ID NO: 170212 - RNA, 19 nt, Artificial Sequence
  Description of Artificial Sequence: Synthetic oligonucleotide
aaauagcaugauggcaaau

SEQ ID NO: 170213 - RNA, 19 nt, Artificial Sequence
  Description of Artificial Sequence: Synthetic oligonucleotide
guuggugucacugccuaga

SEQ ID NO: 170214 - RNA, 19 nt, Artificial Sequence
  Description of Artificial Sequence: Synthetic oligonucleotide
cucauauugcggaucaccu

SEQ ID NO: 170215 - RNA, 19 nt, Artificial Sequence
  Description of Artificial Sequence: Synthetic oligonucleotide
gcucauuuaccacgcagug

SEQ ID NO: 170216 - RNA, 19 nt, Artificial Sequence
  Description of Artificial Sequence: Synthetic oligonucleotide
ggagaugacugcuccugag

SEQ ID NO: 170217 - RNA, 19 nt, Artificial Sequence
  Description of Artificial Sequence: Synthetic oligonucleotide
uugggagcccaagggagcc

SEQ ID NO: 170218 - RNA, 19 nt, Artificial Sequence
  Description of Artificial Sequence: Synthetic oligonucleotide
cagguagaucuacacgcug

SEQ ID NO: 170219 - RNA, 19 nt, Artificial Sequence
  Description of Artificial Sequence: Synthetic oligonucleotide
agauuuacucacaggccca

SEQ ID NO: 170220 - RNA, 19 nt, Artificial Sequence
  Description of Artificial Sequence: Synthetic oligonucleotide
gagggcgcauuccucugcc

SEQ ID NO: 170221 - RNA, 19 nt, Artificial Sequence
  Description of Artificial Sequence: Synthetic oligonucleotide
auuuacucacaggcccagg

SEQ ID NO: 170222 - RNA, 19 nt, Artificial Sequence
  Description of Artificial Sequence: Synthetic oligonucleotide
cauuuccgauucaucagga

SEQ ID NO: 170223 - RNA, 19 nt, Artificial Sequence
  Description of Artificial Sequence: Synthetic oligonucleotide
aggagggcaaucauauacu

SEQ ID NO: 170224 - RNA, 19 nt, Artificial Sequence
  Description of Artificial Sequence: Synthetic oligonucleotide
uaugaacuugcugcggcua

SEQ ID NO: 170225 - RNA, 19 nt, Artificial Sequence
  Description of Artificial Sequence: Synthetic oligonucleotide
gcuagauucaaggaacauc

SEQ ID NO: 170226 - RNA, 19 nt, Artificial Sequence
  Description of Artificial Sequence: Synthetic oligonucleotide
ggaugcuaggaaucaacca

SEQ ID NO: 170227 - RNA, 19 nt, Artificial Sequence
  Description of Artificial Sequence: Synthetic oligonucleotide
agagcagcaagagaacguu

SEQ ID NO: 170228 - RNA, 19 nt, Artificial Sequence
  Description of Artificial Sequence: Synthetic oligonucleotide
augcuaggaaucaaccaga

SEQ ID NO: 170229 - RNA, 19 nt, Artificial Sequence
  Description of Artificial Sequence: Synthetic oligonucleotide
gguguugguugguauccag

SEQ ID NO: 170230 - RNA, 19 nt, Artificial Sequence
  Description of Artificial Sequence: Synthetic oligonucleotide
ucucgcucaaggggaaaug

SEQ ID NO: 170231 - RNA, 19 nt, Artificial Sequence
  Description of Artificial Sequence: Synthetic oligonucleotide
augacacaagagaacacau

SEQ ID NO: 170232 - RNA, 19 nt, Artificial Sequence
  Description of Artificial Sequence: Synthetic oligonucleotide
uuucguggauuggccuugg

SEQ ID NO: 170233 - RNA, 19 nt, Artificial Sequence
  Description of Artificial Sequence: Synthetic oligonucleotide
cuuucguggauuggccuug

SEQ ID NO: 170234 - RNA, 19 nt, Artificial Sequence
  Description of Artificial Sequence: Synthetic oligonucleotide
agauccgaagaagauuaau

SEQ ID NO: 170235 - RNA, 19 nt, Artificial Sequence
  Description of Artificial Sequence: Synthetic oligonucleotide
caggacagaaaugcuguuc

SEQ ID NO: 170236 - RNA, 19 nt, Artificial Sequence
  Description of Artificial Sequence: Synthetic oligonucleotide
acacgcuggccuaggacac

SEQ ID NO: 170237 - RNA, 19 nt, Artificial Sequence
  Description of Artificial Sequence: Synthetic oligonucleotide
caaccuagauuuacucaca

SEQ ID NO: 170238 - RNA, 19 nt, Artificial Sequence
  Description of Artificial Sequence: Synthetic oligonucleotide
gugaaaugaguugcaguca

SEQ ID NO: 170239 - RNA, 19 nt, Artificial Sequence
  Description of Artificial Sequence: Synthetic oligonucleotide
ucucuauucuuggcccuca

SEQ ID NO: 170240 - RNA, 19 nt, Artificial Sequence
  Description of Artificial Sequence: Synthetic oligonucleotide
guagaucuacacgcuggcc

SEQ ID NO: 170241 - RNA, 19 nt, Artificial Sequence
  Description of Artificial Sequence: Synthetic oligonucleotide
ggcgcauuccucugccugg

SEQ ID NO: 170242 - RNA, 19 nt, Artificial Sequence
  Description of Artificial Sequence: Synthetic oligonucleotide
gcagugaggguaauccagg

SEQ ID NO: 170243 - RNA, 19 nt, Artificial Sequence
  Description of Artificial Sequence: Synthetic oligonucleotide
ugaacuugcugcggcuaga

SEQ ID NO: 170244 - RNA, 19 nt, Artificial Sequence
  Description of Artificial Sequence: Synthetic oligonucleotide
guaagccugucagucugag

SEQ ID NO: 170245 - RNA, 19 nt, Artificial Sequence
  Description of Artificial Sequence: Synthetic oligonucleotide
ugccguaugcccagucguc

SEQ ID NO: 170246 - RNA, 19 nt, Artificial Sequence
  Description of Artificial Sequence: Synthetic oligonucleotide
ucuuugcgcugguugcggu

SEQ ID NO: 170247 - RNA, 19 nt, Artificial Sequence
  Description of Artificial Sequence: Synthetic oligonucleotide
ccucauauugcggaucacc

SEQ ID NO: 170248 - RNA, 19 nt, Artificial Sequence
  Description of Artificial Sequence: Synthetic oligonucleotide
ugacugcuccugaguagga

SEQ ID NO: 170249 - RNA, 19 nt, Artificial Sequence
  Description of Artificial Sequence: Synthetic oligonucleotide
ccucgucucgcucaagggg

SEQ ID NO: 170250 - RNA, 19 nt, Artificial Sequence
  Description of Artificial Sequence: Synthetic oligonucleotide
gaagaguagaucccagcuu

SEQ ID NO: 170251 - RNA, 19 nt, Artificial Sequence
  Description of Artificial Sequence: Synthetic oligonucleotide
uaccacgcagugaggguaa

SEQ ID NO: 170252 - RNA, 19 nt, Artificial Sequence
  Description of Artificial Sequence: Synthetic oligonucleotide
gaucuacacgcuggccuag

SEQ ID NO: 170253 - RNA, 19 nt, Artificial Sequence
  Description of Artificial Sequence: Synthetic oligonucleotide
auagcgccgggcauugaag

SEQ ID NO: 170254 - RNA, 19 nt, Artificial Sequence
  Description of Artificial Sequence: Synthetic oligonucleotide
agaguacgcuucucagccu

SEQ ID NO: 170255 - RNA, 19 nt, Artificial Sequence
  Description of Artificial Sequence: Synthetic oligonucleotide
cagaggccaaccuagauuu

SEQ ID NO: 170256 - RNA, 19 nt, Artificial Sequence
  Description of Artificial Sequence: Synthetic oligonucleotide
uuaacucuggaagcucauu

SEQ ID NO: 170257 - RNA, 19 nt, Artificial Sequence
  Description of Artificial Sequence: Synthetic oligonucleotide
uguuuccauuuuguuaguu

SEQ ID NO: 170258 - RNA, 19 nt, Artificial Sequence
  Description of Artificial Sequence: Synthetic oligonucleotide
ugcuuuuaucaaggccuug

SEQ ID NO: 170259 - RNA, 19 nt, Artificial Sequence
  Description of Artificial Sequence: Synthetic oligonucleotide
gaagccucauggcaugggu

SEQ ID NO: 170260 - RNA, 19 nt, Artificial Sequence
  Description of Artificial Sequence: Synthetic oligonucleotide
acgcagugaggguaaucca

SEQ ID NO: 170261 - RNA, 19 nt, Artificial Sequence
  Description of Artificial Sequence: Synthetic oligonucleotide
gaggagagcgaaggaacuc

SEQ ID NO: 170262 - RNA, 19 nt, Artificial Sequence
  Description of Artificial Sequence: Synthetic oligonucleotide
ucguucagccgaugucgca

SEQ ID NO: 170263 - RNA, 19 nt, Artificial Sequence
  Description of Artificial Sequence: Synthetic oligonucleotide
gcagcccucauauugcgga

SEQ ID NO: 170264 - RNA, 19 nt, Artificial Sequence
  Description of Artificial Sequence: Synthetic oligonucleotide
uucguggauuggccuuggc

SEQ ID NO: 170265 - RNA, 19 nt, Artificial Sequence
  Description of Artificial Sequence: Synthetic oligonucleotide
aucuacacgcuggccuagg

SEQ ID NO: 170266 - RNA, 19 nt, Artificial Sequence
  Description of Artificial Sequence: Synthetic oligonucleotide
gccaaccuagauuuacuca

SEQ ID NO: 170267 - RNA, 19 nt, Artificial Sequence
  Description of Artificial Sequence: Synthetic oligonucleotide
cuguggguccugucauagc

SEQ ID NO: 170268 - RNA, 19 nt, Artificial Sequence
  Description of Artificial Sequence: Synthetic oligonucleotide
ggaccucugcaauugaugu

SEQ ID NO: 170269 - RNA, 19 nt, Artificial Sequence
  Description of Artificial Sequence: Synthetic oligonucleotide
ggcaauuguccacuggcaa

SEQ ID NO: 170270 - RNA, 19 nt, Artificial Sequence
  Description of Artificial Sequence: Synthetic oligonucleotide
auguuggcacggagggcgc

SEQ ID NO: 170271 - RNA, 19 nt, Artificial Sequence
  Description of Artificial Sequence: Synthetic oligonucleotide
ggccaaccuagauuuacuc

SEQ ID NO: 170272 - RNA, 19 nt, Artificial Sequence
  Description of Artificial Sequence: Synthetic oligonucleotide
aagauccgaagaagauuaa

SEQ ID NO: 170273 - RNA, 19 nt, Artificial Sequence
  Description of Artificial Sequence: Synthetic oligonucleotide
cagaaauggccuuaacgau

SEQ ID NO: 170274 - RNA, 19 nt, Artificial Sequence
  Description of Artificial Sequence: Synthetic oligonucleotide
aguacgcuucucagccuuc

SEQ ID NO: 170275 - RNA, 19 nt, Artificial Sequence
  Description of Artificial Sequence: Synthetic oligonucleotide
agaccaggugcugagccau

SEQ ID NO: 170276 - RNA, 19 nt, Artificial Sequence
  Description of Artificial Sequence: Synthetic oligonucleotide
acguuucuucauagggaag

SEQ ID NO: 170277 - RNA, 19 nt, Artificial Sequence
  Description of Artificial Sequence: Synthetic oligonucleotide
guccccgcucauugaaggc

SEQ ID NO: 170278 - RNA, 19 nt, Artificial Sequence
  Description of Artificial Sequence: Synthetic oligonucleotide
aucaccucgucucgcucaa

SEQ ID NO: 170279 - RNA, 19 nt, Artificial Sequence
  Description of Artificial Sequence: Synthetic oligonucleotide
agcccacuugucuguguca

SEQ ID NO: 170280 - RNA, 19 nt, Artificial Sequence
  Description of Artificial Sequence: Synthetic oligonucleotide
aggcaauuguccacuggca

SEQ ID NO: 170281 - RNA, 19 nt, Artificial Sequence
  Description of Artificial Sequence: Synthetic oligonucleotide
guggcgguucacauccacc

SEQ ID NO: 170282 - RNA, 19 nt, Artificial Sequence
  Description of Artificial Sequence: Synthetic oligonucleotide
cgcagugaggguaauccag

SEQ ID NO: 170283 - RNA, 19 nt, Artificial Sequence
  Description of Artificial Sequence: Synthetic oligonucleotide
cauagcgccgggcauugaa

SEQ ID NO: 170284 - RNA, 19 nt, Artificial Sequence
  Description of Artificial Sequence: Synthetic oligonucleotide
ucgucucgcucaaggggaa

SEQ ID NO: 170285 - RNA, 19 nt, Artificial Sequence
  Description of Artificial Sequence: Synthetic oligonucleotide
gucguucagccgaugucgc

SEQ ID NO: 170286 - RNA, 19 nt, Artificial Sequence
  Description of Artificial Sequence: Synthetic oligonucleotide
ucgccccaaguauuugguc

SEQ ID NO: 170287 - RNA, 19 nt, Artificial Sequence
  Description of Artificial Sequence: Synthetic oligonucleotide
ccgaugucgcaccuucugg

SEQ ID NO: 170288 - RNA, 19 nt, Artificial Sequence
  Description of Artificial Sequence: Synthetic oligonucleotide
cagugaggguaauccagga

SEQ ID NO: 170289 - RNA, 19 nt, Artificial Sequence
  Description of Artificial Sequence: Synthetic oligonucleotide
cauugccguaugcccaguc

SEQ ID NO: 170290 - RNA, 19 nt, Artificial Sequence
  Description of Artificial Sequence: Synthetic oligonucleotide
gcucauuguuguacagagg

SEQ ID NO: 170291 - RNA, 19 nt, Artificial Sequence
  Description of Artificial Sequence: Synthetic oligonucleotide
gaguguagccuaugaacuu

SEQ ID NO: 170292 - RNA, 19 nt, Artificial Sequence
  Description of Artificial Sequence: Synthetic oligonucleotide
gccguaugcccagucgucg

SEQ ID NO: 170293 - RNA, 19 nt, Artificial Sequence
  Description of Artificial Sequence: Synthetic oligonucleotide
ccagucgucguucagccga

SEQ ID NO: 170294 - RNA, 19 nt, Artificial Sequence
  Description of Artificial Sequence: Synthetic oligonucleotide
agggcccgcuucaggaugg

SEQ ID NO: 170295 - RNA, 19 nt, Artificial Sequence
  Description of Artificial Sequence: Synthetic oligonucleotide
uggccuuaacgaugaccuc

SEQ ID NO: 170296 - RNA, 19 nt, Artificial Sequence
  Description of Artificial Sequence: Synthetic oligonucleotide
gggcgcauuccucugccug

SEQ ID NO: 170297 - RNA, 19 nt, Artificial Sequence
  Description of Artificial Sequence: Synthetic oligonucleotide
uccccgucggccccguuuu

SEQ ID NO: 170298 - RNA, 19 nt, Artificial Sequence
  Description of Artificial Sequence: Synthetic oligonucleotide
gagguuccuccagcaaaac

SEQ ID NO: 170299 - RNA, 19 nt, Artificial Sequence
  Description of Artificial Sequence: Synthetic oligonucleotide
cuaugaacuugcugcggcu

SEQ ID NO: 170300 - RNA, 19 nt, Artificial Sequence
  Description of Artificial Sequence: Synthetic oligonucleotide
ccagaucauugccguaugc

SEQ ID NO: 170301 - RNA, 19 nt, Artificial Sequence
  Description of Artificial Sequence: Synthetic oligonucleotide
gagagcgaaggaacuccuc

SEQ ID NO: 170302 - RNA, 19 nt, Artificial Sequence
  Description of Artificial Sequence: Synthetic oligonucleotide
cugcggcuagauucaagga

SEQ ID NO: 170303 - RNA, 19 nt, Artificial Sequence
  Description of Artificial Sequence: Synthetic oligonucleotide
augcccagucgucguucag

SEQ ID NO: 170304 - RNA, 19 nt, Artificial Sequence
  Description of Artificial Sequence: Synthetic oligonucleotide
guaugcccagucgucguuc

SEQ ID NO: 170305 - RNA, 19 nt, Artificial Sequence
  Description of Artificial Sequence: Synthetic oligonucleotide
uccgagucuuugcgcuggu

SEQ ID NO: 170306 - RNA, 19 nt, Artificial Sequence
  Description of Artificial Sequence: Synthetic oligonucleotide
cggaggaagaguagauccc

SEQ ID NO: 170307 - RNA, 19 nt, Artificial Sequence
  Description of Artificial Sequence: Synthetic oligonucleotide
acugucgccccaaguauuu

SEQ ID NO: 170308 - RNA, 19 nt, Artificial Sequence
  Description of Artificial Sequence: Synthetic oligonucleotide
uuguggcgguucacaucca

SEQ ID NO: 170309 - RNA, 19 nt, Artificial Sequence
  Description of Artificial Sequence: Synthetic oligonucleotide
gcacuuugagcagcuuuag

SEQ ID NO: 170310 - RNA, 19 nt, Artificial Sequence
  Description of Artificial Sequence: Synthetic oligonucleotide
gcccacuugucugugucag

SEQ ID NO: 170311 - RNA, 19 nt, Artificial Sequence
  Description of Artificial Sequence: Synthetic oligonucleotide
ggacucaauggagcugugc

SEQ ID NO: 170312 - RNA, 19 nt, Artificial Sequence
  Description of Artificial Sequence: Synthetic oligonucleotide
cgacuugaacaccaccagc

SEQ ID NO: 170313 - RNA, 19 nt, Artificial Sequence
  Description of Artificial Sequence: Synthetic oligonucleotide
gcccucauauugcggauca

SEQ ID NO: 170314 - RNA, 19 nt, Artificial Sequence
  Description of Artificial Sequence: Synthetic oligonucleotide
ggagggcgcauuccucugc

SEQ ID NO: 170315 - RNA, 19 nt, Artificial Sequence
  Description of Artificial Sequence: Synthetic oligonucleotide
caaauggcucauuguugua

SEQ ID NO: 170316 - RNA, 19 nt, Artificial Sequence
  Description of Artificial Sequence: Synthetic oligonucleotide
gucgucguucagccgaugu

SEQ ID NO: 170317 - RNA, 19 nt, Artificial Sequence
  Description of Artificial Sequence: Synthetic oligonucleotide
gcccgcuucaggaugggug

SEQ ID NO: 170318 - RNA, 19 nt, Artificial Sequence
  Description of Artificial Sequence: Synthetic oligonucleotide
guacgcuucucagccuuca

SEQ ID NO: 170319 - RNA, 19 nt, Artificial Sequence
  Description of Artificial Sequence: Synthetic oligonucleotide
cuggggcuaacugugaaau

SEQ ID NO: 170320 - RNA, 19 nt, Artificial Sequence
  Description of Artificial Sequence: Synthetic oligonucleotide
agaugugguucaacuuaaa

SEQ ID NO: 170321 - RNA, 19 nt, Artificial Sequence
  Description of Artificial Sequence: Synthetic oligonucleotide
ccuuguguuccccgucggc

SEQ ID NO: 170322 - RNA, 19 nt, Artificial Sequence
  Description of Artificial Sequence: Synthetic oligonucleotide
cuugaugcuuucguggauu

SEQ ID NO: 170323 - RNA, 19 nt, Artificial Sequence
  Description of Artificial Sequence: Synthetic oligonucleotide
ccucgguaugaugagauaa

SEQ ID NO: 170324 - RNA, 19 nt, Artificial Sequence
  Description of Artificial Sequence: Synthetic oligonucleotide
agggcgcauuccucugccu

SEQ ID NO: 170325 - RNA, 19 nt, Artificial Sequence
  Description of Artificial Sequence: Synthetic oligonucleotide
gcguucgauguuggcacgg

SEQ ID NO: 170326 - RNA, 19 nt, Artificial Sequence
  Description of Artificial Sequence: Synthetic oligonucleotide
ugcgccacugucgccccaa

SEQ ID NO: 170327 - RNA, 19 nt, Artificial Sequence
  Description of Artificial Sequence: Synthetic oligonucleotide
cagguaagccugucagucu

SEQ ID NO: 170328 - RNA, 19 nt, Artificial Sequence
  Description of Artificial Sequence: Synthetic oligonucleotide
cucgagagucaucagucuu

SEQ ID NO: 170329 - RNA, 19 nt, Artificial Sequence
  Description of Artificial Sequence: Synthetic oligonucleotide
cugucgccccaaguauuug

SEQ ID NO: 170330 - RNA, 19 nt, Artificial Sequence
  Description of Artificial Sequence: Synthetic oligonucleotide
gaacuugcugcggcuagau

SEQ ID NO: 170331 - RNA, 19 nt, Artificial Sequence
  Description of Artificial Sequence: Synthetic oligonucleotide
gaauagcccuccgagucuu

SEQ ID NO: 170332 - RNA, 19 nt, Artificial Sequence
  Description of Artificial Sequence: Synthetic oligonucleotide
ccugaguaggaugcuagga

SEQ ID NO: 170333 - RNA, 19 nt, Artificial Sequence
  Description of Artificial Sequence: Synthetic oligonucleotide
cucgcucaaggggaaaugu

SEQ ID NO: 170334 - RNA, 19 nt, Artificial Sequence
  Description of Artificial Sequence: Synthetic oligonucleotide
gcaggaugcuggaauggca

SEQ ID NO: 170335 - RNA, 19 nt, Artificial Sequence
  Description of Artificial Sequence: Synthetic oligonucleotide
guacgguguugguugguau

SEQ ID NO: 170336 - RNA, 19 nt, Artificial Sequence
  Description of Artificial Sequence: Synthetic oligonucleotide
ggaaucaaccagaggccaa

SEQ ID NO: 170337 - RNA, 19 nt, Artificial Sequence
  Description of Artificial Sequence: Synthetic oligonucleotide
ucgcaccuucugguagaug

SEQ ID NO: 170338 - RNA, 19 nt, Artificial Sequence
  Description of Artificial Sequence: Synthetic oligonucleotide
cauugaagcguucgauguu

SEQ ID NO: 170339 - RNA, 19 nt, Artificial Sequence
  Description of Artificial Sequence: Synthetic oligonucleotide
ccuugagaugcagcuguug

SEQ ID NO: 170340 - RNA, 19 nt, Artificial Sequence
  Description of Artificial Sequence: Synthetic oligonucleotide
guuaacucuggaagcucau

SEQ ID NO: 170341 - RNA, 19 nt, Artificial Sequence
  Description of Artificial Sequence: Synthetic oligonucleotide
cugucacauggauccggaa

SEQ ID NO: 170342 - RNA, 19 nt, Artificial Sequence
  Description of Artificial Sequence: Synthetic oligonucleotide
cauccagaucauugccgua

SEQ ID NO: 170343 - RNA, 19 nt, Artificial Sequence
  Description of Artificial Sequence: Synthetic oligonucleotide
gggcaacaagagcacugca

SEQ ID NO: 170344 - RNA, 19 nt, Artificial Sequence
  Description of Artificial Sequence: Synthetic oligonucleotide
gucccucgguaugaugaga

SEQ ID NO: 170345 - RNA, 19 nt, Artificial Sequence
  Description of Artificial Sequence: Synthetic oligonucleotide
cugcuuuuaucaaggccuu

SEQ ID NO: 170346 - RNA, 19 nt, Artificial Sequence
  Description of Artificial Sequence: Synthetic oligonucleotide
cacaauccuggugaacagu

SEQ ID NO: 170347 - RNA, 19 nt, Artificial Sequence
  Description of Artificial Sequence: Synthetic oligonucleotide
cuggaccucugcaauugau

SEQ ID NO: 170348 - RNA, 19 nt, Artificial Sequence
  Description of Artificial Sequence: Synthetic oligonucleotide
guguuccccgucggccccg

SEQ ID NO: 170349 - RNA, 19 nt, Artificial Sequence
  Description of Artificial Sequence: Synthetic oligonucleotide
gucgccccaaguauuuggu

SEQ ID NO: 170350 - RNA, 19 nt, Artificial Sequence
  Description of Artificial Sequence: Synthetic oligonucleotide
gguacgguguugguuggua

SEQ ID NO: 170351 - RNA, 19 nt, Artificial Sequence
  Description of Artificial Sequence: Synthetic oligonucleotide
uggggagggcagcccucau

SEQ ID NO: 170352 - RNA, 19 nt, Artificial Sequence
  Description of Artificial Sequence: Synthetic oligonucleotide
agucgucguucagccgaug

SEQ ID NO: 170353 - RNA, 19 nt, Artificial Sequence
  Description of Artificial Sequence: Synthetic oligonucleotide
ggggagcggaggaagagua

SEQ ID NO: 170354 - RNA, 19 nt, Artificial Sequence
  Description of Artificial Sequence: Synthetic oligonucleotide
ggcagguaagccugucagu

SEQ ID NO: 170355 - RNA, 19 nt, Artificial Sequence
  Description of Artificial Sequence: Synthetic oligonucleotide
ccuccgagucuuugcgcug

SEQ ID NO: 170356 - RNA, 19 nt, Artificial Sequence
  Description of Artificial Sequence: Synthetic oligonucleotide
ggaucaccuugaugcuauc

SEQ ID NO: 170357 - RNA, 19 nt, Artificial Sequence
  Description of Artificial Sequence: Synthetic oligonucleotide
gcuuucguggauuggccuu

SEQ ID NO: 170358 - RNA, 19 nt, Artificial Sequence
  Description of Artificial Sequence: Synthetic oligonucleotide
gccuagaguguagccuaug

SEQ ID NO: 170359 - RNA, 19 nt, Artificial Sequence
  Description of Artificial Sequence: Synthetic oligonucleotide
cccucacacuaaccccucc

SEQ ID NO: 170360 - RNA, 19 nt, Artificial Sequence
  Description of Artificial Sequence: Synthetic oligonucleotide
cacugucgccccaaguauu

SEQ ID NO: 170361 - RNA, 19 nt, Artificial Sequence
  Description of Artificial Sequence: Synthetic oligonucleotide
gucucgcucaaggggaaau

SEQ ID NO: 170362 - RNA, 19 nt, Artificial Sequence
  Description of Artificial Sequence: Synthetic oligonucleotide
uguuccccgucggccccgu

SEQ ID NO: 170363 - RNA, 19 nt, Artificial Sequence
  Description of Artificial Sequence: Synthetic oligonucleotide
cuuugcgcugguugcgguu

SEQ ID NO: 170364 - RNA, 19 nt, Artificial Sequence
  Description of Artificial Sequence: Synthetic oligonucleotide
agaggccaaccuagauuua

SEQ ID NO: 170365 - RNA, 19 nt, Artificial Sequence
  Description of Artificial Sequence: Synthetic oligonucleotide
ccgucggccccguuuucug

SEQ ID NO: 170366 - RNA, 19 nt, Artificial Sequence
  Description of Artificial Sequence: Synthetic oligonucleotide
gacagucccucgguaugau

SEQ ID NO: 170367 - RNA, 19 nt, Artificial Sequence
  Description of Artificial Sequence: Synthetic oligonucleotide
cacuugucugugucagcau

SEQ ID NO: 170368 - RNA, 19 nt, Artificial Sequence
  Description of Artificial Sequence: Synthetic oligonucleotide
cgccccaaguauuuggucu

SEQ ID NO: 170369 - RNA, 19 nt, Artificial Sequence
  Description of Artificial Sequence: Synthetic oligonucleotide
cggcuagauucaaggaaca

SEQ ID NO: 170370 - RNA, 19 nt, Artificial Sequence
  Description of Artificial Sequence: Synthetic oligonucleotide
ggcuagauucaaggaacau

SEQ ID NO: 170371 - RNA, 19 nt, Artificial Sequence
  Description of Artificial Sequence: Synthetic oligonucleotide
ccucacacuaaccccuccu

SEQ ID NO: 170372 - RNA, 19 nt, Artificial Sequence
  Description of Artificial Sequence: Synthetic oligonucleotide
ccaaggagaguacgcuucu

SEQ ID NO: 170373 - RNA, 19 nt, Artificial Sequence
  Description of Artificial Sequence: Synthetic oligonucleotide
ggggagggcagcccucaua

SEQ ID NO: 170374 - RNA, 19 nt, Artificial Sequence
  Description of Artificial Sequence: Synthetic oligonucleotide
ggaacuuguucaacuucuu

SEQ ID NO: 170375 - RNA, 19 nt, Artificial Sequence
  Description of Artificial Sequence: Synthetic oligonucleotide
ccuggaccucugcaauuga

SEQ ID NO: 170376 - RNA, 19 nt, Artificial Sequence
  Description of Artificial Sequence: Synthetic oligonucleotide
gccccguuuucugcugcug

SEQ ID NO: 170377 - RNA, 19 nt, Artificial Sequence
  Description of Artificial Sequence: Synthetic oligonucleotide
gggaggcaucaccucgucu

SEQ ID NO: 170378 - RNA, 19 nt, Artificial Sequence
  Description of Artificial Sequence: Synthetic oligonucleotide
guuggcacggagggcgcau

SEQ ID NO: 170379 - RNA, 19 nt, Artificial Sequence
  Description of Artificial Sequence: Synthetic oligonucleotide
ggaugggugccgacuugaa

SEQ ID NO: 170380 - RNA, 19 nt, Artificial Sequence
  Description of Artificial Sequence: Synthetic oligonucleotide
cagcccucauauugcggau

SEQ ID NO: 170381 - RNA, 19 nt, Artificial Sequence
  Description of Artificial Sequence: Synthetic oligonucleotide
gcggaucaccuugaugcua

SEQ ID NO: 170382 - RNA, 19 nt, Artificial Sequence
  Description of Artificial Sequence: Synthetic oligonucleotide
gcgcauuccucugccugga

SEQ ID NO: 170383 - RNA, 19 nt, Artificial Sequence
  Description of Artificial Sequence: Synthetic oligonucleotide
cccgcucauugaaggcauc

SEQ ID NO: 170384 - RNA, 19 nt, Artificial Sequence
  Description of Artificial Sequence: Synthetic oligonucleotide
ccacugucgccccaaguau

SEQ ID NO: 170385 - RNA, 19 nt, Artificial Sequence
  Description of Artificial Sequence: Synthetic oligonucleotide
cggaucaccuugaugcuau

SEQ ID NO: 170386 - RNA, 19 nt, Artificial Sequence
  Description of Artificial Sequence: Synthetic oligonucleotide
gcgccacugucgccccaag

SEQ ID NO: 170387 - RNA, 19 nt, Artificial Sequence
  Description of Artificial Sequence: Synthetic oligonucleotide
cccucauauugcggaucac

SEQ ID NO: 170388 - RNA, 19 nt, Artificial Sequence
  Description of Artificial Sequence: Synthetic oligonucleotide
ccacgcagugaggguaauc

SEQ ID NO: 170389 - RNA, 19 nt, Artificial Sequence
  Description of Artificial Sequence: Synthetic oligonucleotide
gucgcaccuucugguagau

SEQ ID NO: 170390 - RNA, 19 nt, Artificial Sequence
  Description of Artificial Sequence: Synthetic oligonucleotide
gcauggguacgguguuggu

SEQ ID NO: 170391 - RNA, 19 nt, Artificial Sequence
  Description of Artificial Sequence: Synthetic oligonucleotide
gcccucacacuaaccccuc

SEQ ID NO: 170392 - RNA, 19 nt, Artificial Sequence
  Description of Artificial Sequence: Synthetic oligonucleotide
gcgccgggcauugaagcgu

SEQ ID NO: 170393 - RNA, 19 nt, Artificial Sequence
  Description of Artificial Sequence: Synthetic oligonucleotide
ccguaugcccagucgucgu

SEQ ID NO: 170394 - RNA, 19 nt, Artificial Sequence
  Description of Artificial Sequence: Synthetic oligonucleotide
cguucgauguuggcacgga

SEQ ID NO: 170395 - RNA, 19 nt, Artificial Sequence
  Description of Artificial Sequence: Synthetic oligonucleotide
ccgcucauugaaggcaucu

SEQ ID NO: 170396 - RNA, 19 nt, Artificial Sequence
  Description of Artificial Sequence: Synthetic oligonucleotide
cacgcuggccuaggacacu

SEQ ID NO: 170397 - RNA, 19 nt, Artificial Sequence
  Description of Artificial Sequence: Synthetic oligonucleotide
ccccgcucauugaaggcau

SEQ ID NO: 170398 - RNA, 19 nt, Artificial Sequence
  Description of Artificial Sequence: Synthetic oligonucleotide
ccgauucaucaggaauucu

SEQ ID NO: 170399 - RNA, 19 nt, Artificial Sequence
  Description of Artificial Sequence: Synthetic oligonucleotide
ggguacgguguugguuggu

SEQ ID NO: 170400 - RNA, 19 nt, Artificial Sequence
  Description of Artificial Sequence: Synthetic oligonucleotide
ccccgucggccccguuuuc

SEQ ID NO: 170401 - RNA, 19 nt, Artificial Sequence
  Description of Artificial Sequence: Synthetic oligonucleotide
ggcccgcuucaggaugggu

SEQ ID NO: 170402 - RNA, 19 nt, Artificial Sequence
  Description of Artificial Sequence: Synthetic oligonucleotide
cccgucggccccguuuucu

SEQ ID NO: 170403 - RNA, 19 nt, Artificial Sequence
  Description of Artificial Sequence: Synthetic oligonucleotide
cguaugcccagucgucguu

SEQ ID NO: 170404 - RNA, 19 nt, Artificial Sequence
  Description of Artificial Sequence: Synthetic oligonucleotide
ccuuaacgaugaccuccuu

SEQ ID NO: 170405 - RNA, 19 nt, Artificial Sequence
  Description of Artificial Sequence: Synthetic oligonucleotide
guuccccgucggccccguu

SEQ ID NO: 170406 - RNA, 19 nt, Artificial Sequence
  Description of Artificial Sequence: Synthetic oligonucleotide
cgccgggcauugaagcguu

SEQ ID NO: 170407 - RNA, 19 nt, Artificial Sequence
  Description of Artificial Sequence: Synthetic oligonucleotide
ccgagucuuugcgcugguu

SEQ ID NO: 170408 - RNA, 19 nt, Artificial Sequence
  Description of Artificial Sequence: Synthetic oligonucleotide
aauuauuuauggcuuaugc

SEQ ID NO: 170409 - RNA, 19 nt, Artificial Sequence
  Description of Artificial Sequence: Synthetic oligonucleotide
uacauuacaaauuuucugg

SEQ ID NO: 170410 - RNA, 19 nt, Artificial Sequence
  Description of Artificial Sequence: Synthetic oligonucleotide
aaugcauucaggugguacc

SEQ ID NO: 170411 - RNA, 19 nt, Artificial Sequence
  Description of Artificial Sequence: Synthetic oligonucleotide
ugauauggaacuauaagcc

SEQ ID NO: 170412 - RNA, 19 nt, Artificial Sequence
  Description of Artificial Sequence: Synthetic oligonucleotide
uauaaugacagguuuuagg

SEQ ID NO: 170413 - RNA, 19 nt, Artificial Sequence
  Description of Artificial Sequence: Synthetic oligonucleotide
aucauugccaaucauucgc

SEQ ID NO: 170414 - RNA, 19 nt, Artificial Sequence
  Description of Artificial Sequence: Synthetic oligonucleotide
ugugcuaugucuuuguaag

SEQ ID NO: 170415 - RNA, 19 nt, Artificial Sequence
  Description of Artificial Sequence: Synthetic oligonucleotide
aaucauucgcauaaauucc

SEQ ID NO: 170416 - RNA, 19 nt, Artificial Sequence
  Description of Artificial Sequence: Synthetic oligonucleotide
agaauaugggacuuucacc

SEQ ID NO: 170417 - RNA, 19 nt, Artificial Sequence
  Description of Artificial Sequence: Synthetic oligonucleotide
ucauguaaaucucauccgg

SEQ ID NO: 170418 - RNA, 19 nt, Artificial Sequence
  Description of Artificial Sequence: Synthetic oligonucleotide
auuaauaaacaccagcccu

SEQ ID NO: 170419 - RNA, 19 nt, Artificial Sequence
  Description of Artificial Sequence: Synthetic oligonucleotide
aauccuagggcaccuauuc

SEQ ID NO: 170420 - RNA, 19 nt, Artificial Sequence
  Description of Artificial Sequence: Synthetic oligonucleotide
aaauagauugugcuauguc

SEQ ID NO: 170421 - RNA, 19 nt, Artificial Sequence
  Description of Artificial Sequence: Synthetic oligonucleotide
agaacuacgccaaagcucc

SEQ ID NO: 170422 - RNA, 19 nt, Artificial Sequence
  Description of Artificial Sequence: Synthetic oligonucleotide
aauucuuuaggguuaggga

SEQ ID NO: 170423 - RNA, 19 nt, Artificial Sequence
  Description of Artificial Sequence: Synthetic oligonucleotide
gugauauggaacuauaagc

SEQ ID NO: 170424 - RNA, 19 nt, Artificial Sequence
  Description of Artificial Sequence: Synthetic oligonucleotide
ucuggcuagcauuauaagg

SEQ ID NO: 170425 - RNA, 19 nt, Artificial Sequence
  Description of Artificial Sequence: Synthetic oligonucleotide
uuacuauagaucaacuaug

SEQ ID NO: 170426 - RNA, 19 nt, Artificial Sequence
  Description of Artificial Sequence: Synthetic oligonucleotide
aagaaaagguauuuauuca

SEQ ID NO: 170427 - RNA, 19 nt, Artificial Sequence
  Description of Artificial Sequence: Synthetic oligonucleotide
uguacaaguacauucugug

SEQ ID NO: 170428 - RNA, 19 nt, Artificial Sequence
  Description of Artificial Sequence: Synthetic oligonucleotide
uuugacaugacauugucua

SEQ ID NO: 170429 - RNA, 19 nt, Artificial Sequence
  Description of Artificial Sequence: Synthetic oligonucleotide
aaugacagguuuuaggaau

SEQ ID NO: 170430 - RNA, 19 nt, Artificial Sequence
  Description of Artificial Sequence: Synthetic oligonucleotide
uuuaccauaaacagacaca

SEQ ID NO: 170431 - RNA, 19 nt, Artificial Sequence
  Description of Artificial Sequence: Synthetic oligonucleotide
uuaucauugccaaucauuc

SEQ ID NO: 170432 - RNA, 19 nt, Artificial Sequence
  Description of Artificial Sequence: Synthetic oligonucleotide
cucguaaacuuccauaugg

SEQ ID NO: 170433 - RNA, 19 nt, Artificial Sequence
  Description of Artificial Sequence: Synthetic oligonucleotide
uguaccaagauacuccaug

SEQ ID NO: 170434 - RNA, 19 nt, Artificial Sequence
  Description of Artificial Sequence: Synthetic oligonucleotide
uggacuuuuacucuucuca

SEQ ID NO: 170435 - RNA, 19 nt, Artificial Sequence
  Description of Artificial Sequence: Synthetic oligonucleotide
uguuaauaagguuugcuaa

SEQ ID NO: 170436 - RNA, 19 nt, Artificial Sequence
  Description of Artificial Sequence: Synthetic oligonucleotide
uguaaagauguacauuaca

SEQ ID NO: 170437 - RNA, 19 nt, Artificial Sequence
  Description of Artificial Sequence: Synthetic oligonucleotide
auuacaaauuuucuggcgu

SEQ ID NO: 170438 - RNA, 19 nt, Artificial Sequence
  Description of Artificial Sequence: Synthetic oligonucleotide
uucgcauaaauuccacugg

SEQ ID NO: 170439 - RNA, 19 nt, Artificial Sequence
  Description of Artificial Sequence: Synthetic oligonucleotide
gaacuauaagcccugacac

SEQ ID NO: 170440 - RNA, 19 nt, Artificial Sequence
  Description of Artificial Sequence: Synthetic oligonucleotide
agauaacaauuacucauac

SEQ ID NO: 170441 - RNA, 19 nt, Artificial Sequence
  Description of Artificial Sequence: Synthetic oligonucleotide
gauauggaacuauaagccc

SEQ ID NO: 170442 - RNA, 19 nt, Artificial Sequence
  Description of Artificial Sequence: Synthetic oligonucleotide
auaauuaaucuuagguugc

SEQ ID NO: 170443 - RNA, 19 nt, Artificial Sequence
  Description of Artificial Sequence: Synthetic oligonucleotide
auucgcauaaauuccacug

SEQ ID NO: 170444 - RNA, 19 nt, Artificial Sequence
  Description of Artificial Sequence: Synthetic oligonucleotide
uguaucaugaaguuacuau

SEQ ID NO: 170445 - RNA, 19 nt, Artificial Sequence
  Description of Artificial Sequence: Synthetic oligonucleotide
ugucuuuuacagauggugc

SEQ ID NO: 170446 - RNA, 19 nt, Artificial Sequence
  Description of Artificial Sequence: Synthetic oligonucleotide
uccacuuaggugcaggaag

SEQ ID NO: 170447 - RNA, 19 nt, Artificial Sequence
  Description of Artificial Sequence: Synthetic oligonucleotide
aacaguuuaagagaggaaa

SEQ ID NO: 170448 - RNA, 19 nt, Artificial Sequence
  Description of Artificial Sequence: Synthetic oligonucleotide
auaaauuccacugguggac

SEQ ID NO: 170449 - RNA, 19 nt, Artificial Sequence
  Description of Artificial Sequence: Synthetic oligonucleotide
cacauucccaugaauaagg

SEQ ID NO: 170450 - RNA, 19 nt, Artificial Sequence
  Description of Artificial Sequence: Synthetic oligonucleotide
auauguauggucucuccuc

SEQ ID NO: 170451 - RNA, 19 nt, Artificial Sequence
  Description of Artificial Sequence: Synthetic oligonucleotide
uguuguuccagcauucugu

SEQ ID NO: 170452 - RNA, 19 nt, Artificial Sequence
  Description of Artificial Sequence: Synthetic oligonucleotide
aagguuugcuaauucuguc

SEQ ID NO: 170453 - RNA, 19 nt, Artificial Sequence
  Description of Artificial Sequence: Synthetic oligonucleotide
aauuguuaauaagguuugc

SEQ ID NO: 170454 - RNA, 19 nt, Artificial Sequence
  Description of Artificial Sequence: Synthetic oligonucleotide
aauuacucauacuuugaaa

SEQ ID NO: 170455 - RNA, 19 nt, Artificial Sequence
  Description of Artificial Sequence: Synthetic oligonucleotide
uuuaggauuuucaaugcau

SEQ ID NO: 170456 - RNA, 19 nt, Artificial Sequence
  Description of Artificial Sequence: Synthetic oligonucleotide
cuauagaucaacuauggaa

SEQ ID NO: 170457 - RNA, 19 nt, Artificial Sequence
  Description of Artificial Sequence: Synthetic oligonucleotide
uacagaacuacgccaaagc

SEQ ID NO: 170458 - RNA, 19 nt, Artificial Sequence
  Description of Artificial Sequence: Synthetic oligonucleotide
auaguauauuuauagaauu

SEQ ID NO: 170459 - RNA, 19 nt, Artificial Sequence
  Description of Artificial Sequence: Synthetic oligonucleotide
cauuaauaaacaccagccc

SEQ ID NO: 170460 - RNA, 19 nt, Artificial Sequence
  Description of Artificial Sequence: Synthetic oligonucleotide
ugauugacauuguuguucc

SEQ ID NO: 170461 - RNA, 19 nt, Artificial Sequence
  Description of Artificial Sequence: Synthetic oligonucleotide
aaaacccucacacagucuu

SEQ ID NO: 170462 - RNA, 19 nt, Artificial Sequence
  Description of Artificial Sequence: Synthetic oligonucleotide
guacauuacaaauuuucug

SEQ ID NO: 170463 - RNA, 19 nt, Artificial Sequence
  Description of Artificial Sequence: Synthetic oligonucleotide
cauauucucacccauuaug

SEQ ID NO: 170464 - RNA, 19 nt, Artificial Sequence
  Description of Artificial Sequence: Synthetic oligonucleotide
ugguucauaauccaugcaa

SEQ ID NO: 170465 - RNA, 19 nt, Artificial Sequence
  Description of Artificial Sequence: Synthetic oligonucleotide
uugaaccagaauauucucc

SEQ ID NO: 170466 - RNA, 19 nt, Artificial Sequence
  Description of Artificial Sequence: Synthetic oligonucleotide
aaagaguuuguacauuuua

SEQ ID NO: 170467 - RNA, 19 nt, Artificial Sequence
  Description of Artificial Sequence: Synthetic oligonucleotide
gaauaugggacuuucaccu

SEQ ID NO: 170468 - RNA, 19 nt, Artificial Sequence
  Description of Artificial Sequence: Synthetic oligonucleotide
uucauaauccaugcaauug

SEQ ID NO: 170469 - RNA, 19 nt, Artificial Sequence
  Description of Artificial Sequence: Synthetic oligonucleotide
aaggauguguggauaaggg

SEQ ID NO: 170470 - RNA, 19 nt, Artificial Sequence
  Description of Artificial Sequence: Synthetic oligonucleotide
uguuaguaguucauagucu

SEQ ID NO: 170471 - RNA, 19 nt, Artificial Sequence
  Description of Artificial Sequence: Synthetic oligonucleotide
cuaggucccugaaagaggg

SEQ ID NO: 170472 - RNA, 19 nt, Artificial Sequence
  Description of Artificial Sequence: Synthetic oligonucleotide
aagagggucgcugauugac

SEQ ID NO: 170473 - RNA, 19 nt, Artificial Sequence
  Description of Artificial Sequence: Synthetic oligonucleotide
uauuuauggcuuaugcuuc

SEQ ID NO: 170474 - RNA, 19 nt, Artificial Sequence
  Description of Artificial Sequence: Synthetic oligonucleotide
uguaaaucucauccgggca

SEQ ID NO: 170475 - RNA, 19 nt, Artificial Sequence
  Description of Artificial Sequence: Synthetic oligonucleotide
acuaaguuuugaugaaaag

SEQ ID NO: 170476 - RNA, 19 nt, Artificial Sequence
  Description of Artificial Sequence: Synthetic oligonucleotide
aaguuggagacaguucuac

SEQ ID NO: 170477 - RNA, 19 nt, Artificial Sequence
  Description of Artificial Sequence: Synthetic oligonucleotide
agaaaagguauuuauucaa

SEQ ID NO: 170478 - RNA, 19 nt, Artificial Sequence
  Description of Artificial Sequence: Synthetic oligonucleotide
aaaguauuguacacuccac

SEQ ID NO: 170479 - RNA, 19 nt, Artificial Sequence
  Description of Artificial Sequence: Synthetic oligonucleotide
uauaagcccugacacagca

SEQ ID NO: 170480 - RNA, 19 nt, Artificial Sequence
  Description of Artificial Sequence: Synthetic oligonucleotide
agauguacauuacaaauuu

SEQ ID NO: 170481 - RNA, 19 nt, Artificial Sequence
  Description of Artificial Sequence: Synthetic oligonucleotide
uaguaguucauagucuggg

SEQ ID NO: 170482 - RNA, 19 nt, Artificial Sequence
  Description of Artificial Sequence: Synthetic oligonucleotide
aguagauaacaauuacuca

SEQ ID NO: 170483 - RNA, 19 nt, Artificial Sequence
  Description of Artificial Sequence: Synthetic oligonucleotide
gagcauaccagaauauggg

SEQ ID NO: 170484 - RNA, 19 nt, Artificial Sequence
  Description of Artificial Sequence: Synthetic oligonucleotide
gaaguuacuauagaucaac

SEQ ID NO: 170485 - RNA, 19 nt, Artificial Sequence
  Description of Artificial Sequence: Synthetic oligonucleotide
uuuuggcacacacauuccc

SEQ ID NO: 170486 - RNA, 19 nt, Artificial Sequence
  Description of Artificial Sequence: Synthetic oligonucleotide
auaugggacuuucaccugg

SEQ ID NO: 170487 - RNA, 19 nt, Artificial Sequence
  Description of Artificial Sequence: Synthetic oligonucleotide
agcacuaaaguagauaaca

SEQ ID NO: 170488 - RNA, 19 nt, Artificial Sequence
  Description of Artificial Sequence: Synthetic oligonucleotide
gaaaaugcauggcccaugc

SEQ ID NO: 170489 - RNA, 19 nt, Artificial Sequence
  Description of Artificial Sequence: Synthetic oligonucleotide
guauguuucuuguugccag

SEQ ID NO: 170490 - RNA, 19 nt, Artificial Sequence
  Description of Artificial Sequence: Synthetic oligonucleotide
aaucuccuauuuuaacucu

SEQ ID NO: 170491 - RNA, 19 nt, Artificial Sequence
  Description of Artificial Sequence: Synthetic oligonucleotide
uacauuauaaguguuucau

SEQ ID NO: 170492 - RNA, 19 nt, Artificial Sequence
  Description of Artificial Sequence: Synthetic oligonucleotide
uaaguucacggauaauggc

SEQ ID NO: 170493 - RNA, 19 nt, Artificial Sequence
  Description of Artificial Sequence: Synthetic oligonucleotide
gaugcuaaugccaggauca

SEQ ID NO: 170494 - RNA, 19 nt, Artificial Sequence
  Description of Artificial Sequence: Synthetic oligonucleotide
uaauuaaucuuagguugcg

SEQ ID NO: 170495 - RNA, 19 nt, Artificial Sequence
  Description of Artificial Sequence: Synthetic oligonucleotide
aagcauggaaaacccucac

SEQ ID NO: 170496 - RNA, 19 nt, Artificial Sequence
  Description of Artificial Sequence: Synthetic oligonucleotide
aguaguucauagucugggg

SEQ ID NO: 170497 - RNA, 19 nt, Artificial Sequence
  Description of Artificial Sequence: Synthetic oligonucleotide
acggauaauggcucuaaag

SEQ ID NO: 170498 - RNA, 19 nt, Artificial Sequence
  Description of Artificial Sequence: Synthetic oligonucleotide
uuuagcugugucuuuuaca

SEQ ID NO: 170499 - RNA, 19 nt, Artificial Sequence
  Description of Artificial Sequence: Synthetic oligonucleotide
agcaccagaaaauccuagg

SEQ ID NO: 170500 - RNA, 19 nt, Artificial Sequence
  Description of Artificial Sequence: Synthetic oligonucleotide
ugcugaguugaaaaugucu

SEQ ID NO: 170501 - RNA, 19 nt, Artificial Sequence
  Description of Artificial Sequence: Synthetic oligonucleotide
ucguaaacuuccauauggc

SEQ ID NO: 170502 - RNA, 19 nt, Artificial Sequence
  Description of Artificial Sequence: Synthetic oligonucleotide
aauuacccuugccaaguug

SEQ ID NO: 170503 - RNA, 19 nt, Artificial Sequence
  Description of Artificial Sequence: Synthetic oligonucleotide
ucuuagguugcgucgacca

SEQ ID NO: 170504 - RNA, 19 nt, Artificial Sequence
  Description of Artificial Sequence: Synthetic oligonucleotide
uuagggagauuuccuauac

SEQ ID NO: 170505 - RNA, 19 nt, Artificial Sequence
  Description of Artificial Sequence: Synthetic oligonucleotide
aaucuuagguugcgucgac

SEQ ID NO: 170506 - RNA, 19 nt, Artificial Sequence
  Description of Artificial Sequence: Synthetic oligonucleotide
cuguccuuguuuaucauug

SEQ ID NO: 170507 - RNA, 19 nt, Artificial Sequence
  Description of Artificial Sequence: Synthetic oligonucleotide
uuacauuauaaguguuuca

SEQ ID NO: 170508 - RNA, 19 nt, Artificial Sequence
  Description of Artificial Sequence: Synthetic oligonucleotide
ggauaauggcucuaaaggc

SEQ ID NO: 170509 - RNA, 19 nt, Artificial Sequence
  Description of Artificial Sequence: Synthetic oligonucleotide
guagauaacaauuacucau

SEQ ID NO: 170510 - RNA, 19 nt, Artificial Sequence
  Description of Artificial Sequence: Synthetic oligonucleotide
aauaugggacuuucaccug

SEQ ID NO: 170511 - RNA, 19 nt, Artificial Sequence
  Description of Artificial Sequence: Synthetic oligonucleotide
caccuauucucauaguuug

SEQ ID NO: 170512 - RNA, 19 nt, Artificial Sequence
  Description of Artificial Sequence: Synthetic oligonucleotide
auuauaaggauguguggau

SEQ ID NO: 170513 - RNA, 19 nt, Artificial Sequence
  Description of Artificial Sequence: Synthetic oligonucleotide
caaaguauuguacacucca

SEQ ID NO: 170514 - RNA, 19 nt, Artificial Sequence
  Description of Artificial Sequence: Synthetic oligonucleotide
agggagauuuccuauacaa

SEQ ID NO: 170515 - RNA, 19 nt, Artificial Sequence
  Description of Artificial Sequence: Synthetic oligonucleotide
uucuccuaccacugaauag

SEQ ID NO: 170516 - RNA, 19 nt, Artificial Sequence
  Description of Artificial Sequence: Synthetic oligonucleotide
ucgcugauugacauuguug

SEQ ID NO: 170517 - RNA, 19 nt, Artificial Sequence
  Description of Artificial Sequence: Synthetic oligonucleotide
gauguguggauaagggucc

SEQ ID NO: 170518 - RNA, 19 nt, Artificial Sequence
  Description of Artificial Sequence: Synthetic oligonucleotide
ugcuaggucccugaaagag

SEQ ID NO: 170519 - RNA, 19 nt, Artificial Sequence
  Description of Artificial Sequence: Synthetic oligonucleotide
uaauuuguaucaugaaguu

SEQ ID NO: 170520 - RNA, 19 nt, Artificial Sequence
  Description of Artificial Sequence: Synthetic oligonucleotide
uguugccagaucccugugg

SEQ ID NO: 170521 - RNA, 19 nt, Artificial Sequence
  Description of Artificial Sequence: Synthetic oligonucleotide
uuacaaacucuugaaccag

SEQ ID NO: 170522 - RNA, 19 nt, Artificial Sequence
  Description of Artificial Sequence: Synthetic oligonucleotide
acagaacuacgccaaagcu

SEQ ID NO: 170523 - RNA, 19 nt, Artificial Sequence
  Description of Artificial Sequence: Synthetic oligonucleotide
guaccaagauacuccaugc

SEQ ID NO: 170524 - RNA, 19 nt, Artificial Sequence
  Description of Artificial Sequence: Synthetic oligonucleotide
cugcagauuucccacagag

SEQ ID NO: 170525 - RNA, 19 nt, Artificial Sequence
  Description of Artificial Sequence: Synthetic oligonucleotide
auaguuuggcagcauguca

SEQ ID NO: 170526 - RNA, 19 nt, Artificial Sequence
  Description of Artificial Sequence: Synthetic oligonucleotide
cuuccuauccacgugggag

SEQ ID NO: 170527 - RNA, 19 nt, Artificial Sequence
  Description of Artificial Sequence: Synthetic oligonucleotide
ugaucuauccguucuuuau

SEQ ID NO: 170528 - RNA, 19 nt, Artificial Sequence
  Description of Artificial Sequence: Synthetic oligonucleotide
ucugauaagcaggauauuu

SEQ ID NO: 170529 - RNA, 19 nt, Artificial Sequence
  Description of Artificial Sequence: Synthetic oligonucleotide
aucuauccguucuuuaugu

SEQ ID NO: 170530 - RNA, 19 nt, Artificial Sequence
  Description of Artificial Sequence: Synthetic oligonucleotide
auuauaaguguuucauuuu

SEQ ID NO: 170531 - RNA, 19 nt, Artificial Sequence
  Description of Artificial Sequence: Synthetic oligonucleotide
uauucucacccauuaugca

SEQ ID NO: 170532 - RNA, 19 nt, Artificial Sequence
  Description of Artificial Sequence: Synthetic oligonucleotide
ucgcauaaauuccacuggu

SEQ ID NO: 170533 - RNA, 19 nt, Artificial Sequence
  Description of Artificial Sequence: Synthetic oligonucleotide
caguuaacaguuuaagaga

SEQ ID NO: 170534 - RNA, 19 nt, Artificial Sequence
  Description of Artificial Sequence: Synthetic oligonucleotide
gugucuuuuacagauggug

SEQ ID NO: 170535 - RNA, 19 nt, Artificial Sequence
  Description of Artificial Sequence: Synthetic oligonucleotide
cagaacuacgccaaagcuc

SEQ ID NO: 170536 - RNA, 19 nt, Artificial Sequence
  Description of Artificial Sequence: Synthetic oligonucleotide
uuugauccacccgaagugc

SEQ ID NO: 170537 - RNA, 19 nt, Artificial Sequence
  Description of Artificial Sequence: Synthetic oligonucleotide
uucaaugcauucagguggu

SEQ ID NO: 170538 - RNA, 19 nt, Artificial Sequence
  Description of Artificial Sequence: Synthetic oligonucleotide
aagcucuaucaaauggaac

SEQ ID NO: 170539 - RNA, 19 nt, Artificial Sequence
  Description of Artificial Sequence: Synthetic oligonucleotide
uaccaagauacuccaugcc

SEQ ID NO: 170540 - RNA, 19 nt, Artificial Sequence
  Description of Artificial Sequence: Synthetic oligonucleotide
cauuauaaggaugugugga

SEQ ID NO: 170541 - RNA, 19 nt, Artificial Sequence
  Description of Artificial Sequence: Synthetic oligonucleotide
uuagguugcgucgaccagc

SEQ ID NO: 170542 - RNA, 19 nt, Artificial Sequence
  Description of Artificial Sequence: Synthetic oligonucleotide
ucugauucuggaagucuac

SEQ ID NO: 170543 - RNA, 19 nt, Artificial Sequence
  Description of Artificial Sequence: Synthetic oligonucleotide
gauuugauccacccgaagu

SEQ ID NO: 170544 - RNA, 19 nt, Artificial Sequence
  Description of Artificial Sequence: Synthetic oligonucleotide
aauuaaucuuagguugcgu

SEQ ID NO: 170545 - RNA, 19 nt, Artificial Sequence
  Description of Artificial Sequence: Synthetic oligonucleotide
auauggaacuauaagcccu

SEQ ID NO: 170546 - RNA, 19 nt, Artificial Sequence
  Description of Artificial Sequence: Synthetic oligonucleotide
ugaaguuacuauagaucaa

SEQ ID NO: 170547 - RNA, 19 nt, Artificial Sequence
  Description of Artificial Sequence: Synthetic oligonucleotide
uaaucuuagguugcgucga

SEQ ID NO: 170548 - RNA, 19 nt, Artificial Sequence
  Description of Artificial Sequence: Synthetic oligonucleotide
acuauagaucaacuaugga

SEQ ID NO: 170549 - RNA, 19 nt, Artificial Sequence
  Description of Artificial Sequence: Synthetic oligonucleotide
ucgguaaucuuccauuauu

SEQ ID NO: 170550 - RNA, 19 nt, Artificial Sequence
  Description of Artificial Sequence: Synthetic oligonucleotide
guaucaugaaguuacuaua

SEQ ID NO: 170551 - RNA, 19 nt, Artificial Sequence
  Description of Artificial Sequence: Synthetic oligonucleotide
uuucccacagaguggugcc

SEQ ID NO: 170552 - RNA, 19 nt, Artificial Sequence
  Description of Artificial Sequence: Synthetic oligonucleotide
uaggguuagggagauuucc

SEQ ID NO: 170553 - RNA, 19 nt, Artificial Sequence
  Description of Artificial Sequence: Synthetic oligonucleotide
agcauaccagaauauggga

SEQ ID NO: 170554 - RNA, 19 nt, Artificial Sequence
  Description of Artificial Sequence: Synthetic oligonucleotide
ugcaauuguuaauaagguu

SEQ ID NO: 170555 - RNA, 19 nt, Artificial Sequence
  Description of Artificial Sequence: Synthetic oligonucleotide
aguucacggauaauggcuc

SEQ ID NO: 170556 - RNA, 19 nt, Artificial Sequence
  Description of Artificial Sequence: Synthetic oligonucleotide
aaaucucauccgggcaccc

SEQ ID NO: 170557 - RNA, 19 nt, Artificial Sequence
  Description of Artificial Sequence: Synthetic oligonucleotide
ucauucacgcagccaaacu

SEQ ID NO: 170558 - RNA, 19 nt, Artificial Sequence
  Description of Artificial Sequence: Synthetic oligonucleotide
ucauucgcauaaauuccac

SEQ ID NO: 170559 - RNA, 19 nt, Artificial Sequence
  Description of Artificial Sequence: Synthetic oligonucleotide
cugaauagcaagcauggaa

SEQ ID NO: 170560 - RNA, 19 nt, Artificial Sequence
  Description of Artificial Sequence: Synthetic oligonucleotide
ccuaccacugaauagcaag

SEQ ID NO: 170561 - RNA, 19 nt, Artificial Sequence
  Description of Artificial Sequence: Synthetic oligonucleotide
gaggagaugcaaugacugc

SEQ ID NO: 170562 - RNA, 19 nt, Artificial Sequence
  Description of Artificial Sequence: Synthetic oligonucleotide
ugcuaugucuuuguaagau

SEQ ID NO: 170563 - RNA, 19 nt, Artificial Sequence
  Description of Artificial Sequence: Synthetic oligonucleotide
cucguguaaaucacacaag

SEQ ID NO: 170564 - RNA, 19 nt, Artificial Sequence
  Description of Artificial Sequence: Synthetic oligonucleotide
ucuuguugccagaucccug

SEQ ID NO: 170565 - RNA, 19 nt, Artificial Sequence
  Description of Artificial Sequence: Synthetic oligonucleotide
uuccuauccacgugggaga

SEQ ID NO: 170566 - RNA, 19 nt, Artificial Sequence
  Description of Artificial Sequence: Synthetic oligonucleotide
agaagcucuaucaaaugga

SEQ ID NO: 170567 - RNA, 19 nt, Artificial Sequence
  Description of Artificial Sequence: Synthetic oligonucleotide
agauagucucguaaacuuc

SEQ ID NO: 170568 - RNA, 19 nt, Artificial Sequence
  Description of Artificial Sequence: Synthetic oligonucleotide
cuagaaaaugcauggccca

SEQ ID NO: 170569 - RNA, 19 nt, Artificial Sequence
  Description of Artificial Sequence: Synthetic oligonucleotide
cacgcagcucuucacaagc

SEQ ID NO: 170570 - RNA, 19 nt, Artificial Sequence
  Description of Artificial Sequence: Synthetic oligonucleotide
ugacaugacauugucuaaa

SEQ ID NO: 170571 - RNA, 19 nt, Artificial Sequence
  Description of Artificial Sequence: Synthetic oligonucleotide
gcaccagaaaauccuaggg

SEQ ID NO: 170572 - RNA, 19 nt, Artificial Sequence
  Description of Artificial Sequence: Synthetic oligonucleotide
gaggaggagaugcaaugac

SEQ ID NO: 170573 - RNA, 19 nt, Artificial Sequence
  Description of Artificial Sequence: Synthetic oligonucleotide
agggacauuucuccuacca

SEQ ID NO: 170574 - RNA, 19 nt, Artificial Sequence
  Description of Artificial Sequence: Synthetic oligonucleotide
aaaucacacaagaugccaa

SEQ ID NO: 170575 - RNA, 19 nt, Artificial Sequence
  Description of Artificial Sequence: Synthetic oligonucleotide
auauaaugacagguuuuag

SEQ ID NO: 170576 - RNA, 19 nt, Artificial Sequence
  Description of Artificial Sequence: Synthetic oligonucleotide
ucgaccagcacuguagcac

SEQ ID NO: 170577 - RNA, 19 nt, Artificial Sequence
  Description of Artificial Sequence: Synthetic oligonucleotide
aaguuacuauagaucaacu

SEQ ID NO: 170578 - RNA, 19 nt, Artificial Sequence
  Description of Artificial Sequence: Synthetic oligonucleotide
agucucguaaacuuccaua

SEQ ID NO: 170579 - RNA, 19 nt, Artificial Sequence
  Description of Artificial Sequence: Synthetic oligonucleotide
uaaaucucauccgggcacc

SEQ ID NO: 170580 - RNA, 19 nt, Artificial Sequence
  Description of Artificial Sequence: Synthetic oligonucleotide
uugagaguccagagcauuc

SEQ ID NO: 170581 - RNA, 19 nt, Artificial Sequence
  Description of Artificial Sequence: Synthetic oligonucleotide
aauaaacaccagcccucgu

SEQ ID NO: 170582 - RNA, 19 nt, Artificial Sequence
  Description of Artificial Sequence: Synthetic oligonucleotide
cauuguuguuccagcauuc

SEQ ID NO: 170583 - RNA, 19 nt, Artificial Sequence
  Description of Artificial Sequence: Synthetic oligonucleotide
uaugcaucauaaagaguuu

SEQ ID NO: 170584 - RNA, 19 nt, Artificial Sequence
  Description of Artificial Sequence: Synthetic oligonucleotide
acauuauaaguguuucauu

SEQ ID NO: 170585 - RNA, 19 nt, Artificial Sequence
  Description of Artificial Sequence: Synthetic oligonucleotide
ugauucuggaagucuacuu

SEQ ID NO: 170586 - RNA, 19 nt, Artificial Sequence
  Description of Artificial Sequence: Synthetic oligonucleotide
augcaauuguuaauaaggu

SEQ ID NO: 170587 - RNA, 19 nt, Artificial Sequence
  Description of Artificial Sequence: Synthetic oligonucleotide
ugaagggacauuucuccua

SEQ ID NO: 170588 - RNA, 19 nt, Artificial Sequence
  Description of Artificial Sequence: Synthetic oligonucleotide
ucaaaaugcugaguugaaa

SEQ ID NO: 170589 - RNA, 19 nt, Artificial Sequence
  Description of Artificial Sequence: Synthetic oligonucleotide
aggagaugcaaugacugca

SEQ ID NO: 170590 - RNA, 19 nt, Artificial Sequence
  Description of Artificial Sequence: Synthetic oligonucleotide
aggucccugaaagaggguc

SEQ ID NO: 170591 - RNA, 19 nt, Artificial Sequence
  Description of Artificial Sequence: Synthetic oligonucleotide
uugauccacccgaagugcu

SEQ ID NO: 170592 - RNA, 19 nt, Artificial Sequence
  Description of Artificial Sequence: Synthetic oligonucleotide
uggaacuauaagcccugac

SEQ ID NO: 170593 - RNA, 19 nt, Artificial Sequence
  Description of Artificial Sequence: Synthetic oligonucleotide
guugcgucgaccagcacug

SEQ ID NO: 170594 - RNA, 19 nt, Artificial Sequence
  Description of Artificial Sequence: Synthetic oligonucleotide
aaagguggauucccuguuu

SEQ ID NO: 170595 - RNA, 19 nt, Artificial Sequence
  Description of Artificial Sequence: Synthetic oligonucleotide
gacaugacauugucuaaaa

SEQ ID NO: 170596 - RNA, 19 nt, Artificial Sequence
  Description of Artificial Sequence: Synthetic oligonucleotide
aguugcuguagaaauuuca

SEQ ID NO: 170597 - RNA, 19 nt, Artificial Sequence
  Description of Artificial Sequence: Synthetic oligonucleotide
uguggcuacagagcuuugc

SEQ ID NO: 170598 - RNA, 19 nt, Artificial Sequence
  Description of Artificial Sequence: Synthetic oligonucleotide
uagggagauuuccuauaca

SEQ ID NO: 170599 - RNA, 19 nt, Artificial Sequence
  Description of Artificial Sequence: Synthetic oligonucleotide
cagggauccaaauuuuaca

SEQ ID NO: 170600 - RNA, 19 nt, Artificial Sequence
  Description of Artificial Sequence: Synthetic oligonucleotide
uacagugauauggaacuau

SEQ ID NO: 170601 - RNA, 19 nt, Artificial Sequence
  Description of Artificial Sequence: Synthetic oligonucleotide
agguauguauccagggauc

SEQ ID NO: 170602 - RNA, 19 nt, Artificial Sequence
  Description of Artificial Sequence: Synthetic oligonucleotide
aucuuagguugcgucgacc

SEQ ID NO: 170603 - RNA, 19 nt, Artificial Sequence
  Description of Artificial Sequence: Synthetic oligonucleotide
aguuggagacaguucuaca

SEQ ID NO: 170604 - RNA, 19 nt, Artificial Sequence
  Description of Artificial Sequence: Synthetic oligonucleotide
aaaggccaucucauucacg

SEQ ID NO: 170605 - RNA, 19 nt, Artificial Sequence
  Description of Artificial Sequence: Synthetic oligonucleotide
guuaauaagguuugcuaau

SEQ ID NO: 170606 - RNA, 19 nt, Artificial Sequence
  Description of Artificial Sequence: Synthetic oligonucleotide
ucaccugguucuuuuacuu

SEQ ID NO: 170607 - RNA, 19 nt, Artificial Sequence
  Description of Artificial Sequence: Synthetic oligonucleotide
aucauucgcauaaauucca

SEQ ID NO: 170608 - RNA, 19 nt, Artificial Sequence
  Description of Artificial Sequence: Synthetic oligonucleotide
gagauagucucguaaacuu

SEQ ID NO: 170609 - RNA, 19 nt, Artificial Sequence
  Description of Artificial Sequence: Synthetic oligonucleotide
uuaggguuagggagauuuc

SEQ ID NO: 170610 - RNA, 19 nt, Artificial Sequence
  Description of Artificial Sequence: Synthetic oligonucleotide
guggauaaggguccaugac

SEQ ID NO: 170611 - RNA, 19 nt, Artificial Sequence
  Description of Artificial Sequence: Synthetic oligonucleotide
cuauucucauaguuuggca

SEQ ID NO: 170612 - RNA, 19 nt, Artificial Sequence
  Description of Artificial Sequence: Synthetic oligonucleotide
cacagaguggugccaaaac

SEQ ID NO: 170613 - RNA, 19 nt, Artificial Sequence
  Description of Artificial Sequence: Synthetic oligonucleotide
gaucccuguggauauaccu

SEQ ID NO: 170614 - RNA, 19 nt, Artificial Sequence
  Description of Artificial Sequence: Synthetic oligonucleotide
ucccggauuugauccaccc

SEQ ID NO: 170615 - RNA, 19 nt, Artificial Sequence
  Description of Artificial Sequence: Synthetic oligonucleotide
cacacauucccaugaauaa

SEQ ID NO: 170616 - RNA, 19 nt, Artificial Sequence
  Description of Artificial Sequence: Synthetic oligonucleotide
uuauggcuuaugcuucaau

SEQ ID NO: 170617 - RNA, 19 nt, Artificial Sequence
  Description of Artificial Sequence: Synthetic oligonucleotide
caaugcauucaggugguac

SEQ ID NO: 170618 - RNA, 19 nt, Artificial Sequence
  Description of Artificial Sequence: Synthetic oligonucleotide
ggaaaacccucacacaguc

SEQ ID NO: 170619 - RNA, 19 nt, Artificial Sequence
  Description of Artificial Sequence: Synthetic oligonucleotide
uuacccuugccaaguugcu

SEQ ID NO: 170620 - RNA, 19 nt, Artificial Sequence
  Description of Artificial Sequence: Synthetic oligonucleotide
agggauucuggagcauacc

SEQ ID NO: 170621 - RNA, 19 nt, Artificial Sequence
  Description of Artificial Sequence: Synthetic oligonucleotide
cauaguuuggcagcauguc

SEQ ID NO: 170622 - RNA, 19 nt, Artificial Sequence
  Description of Artificial Sequence: Synthetic oligonucleotide
acacacauucccaugaaua

SEQ ID NO: 170623 - RNA, 19 nt, Artificial Sequence
  Description of Artificial Sequence: Synthetic oligonucleotide
aagugcuaggucccugaaa

SEQ ID NO: 170624 - RNA, 19 nt, Artificial Sequence
  Description of Artificial Sequence: Synthetic oligonucleotide
uguagcacacucccuugua

SEQ ID NO: 170625 - RNA, 19 nt, Artificial Sequence
  Description of Artificial Sequence: Synthetic oligonucleotide
uccuucgguagcacuguga

SEQ ID NO: 170626 - RNA, 19 nt, Artificial Sequence
  Description of Artificial Sequence: Synthetic oligonucleotide
cuuagguugcgucgaccag

SEQ ID NO: 170627 - RNA, 19 nt, Artificial Sequence
  Description of Artificial Sequence: Synthetic oligonucleotide
aggcuguuaaguucacgga

SEQ ID NO: 170628 - RNA, 19 nt, Artificial Sequence
  Description of Artificial Sequence: Synthetic oligonucleotide
caauuacucauacuuugaa

SEQ ID NO: 170629 - RNA, 19 nt, Artificial Sequence
  Description of Artificial Sequence: Synthetic oligonucleotide
uuuugccggaggaggagau

SEQ ID NO: 170630 - RNA, 19 nt, Artificial Sequence
  Description of Artificial Sequence: Synthetic oligonucleotide
cacccauuaugcaucauaa

SEQ ID NO: 170631 - RNA, 19 nt, Artificial Sequence
  Description of Artificial Sequence: Synthetic oligonucleotide
uggcuagcauuauaaggau

SEQ ID NO: 170632 - RNA, 19 nt, Artificial Sequence
  Description of Artificial Sequence: Synthetic oligonucleotide
guaguucauagucuggggu

SEQ ID NO: 170633 - RNA, 19 nt, Artificial Sequence
  Description of Artificial Sequence: Synthetic oligonucleotide
uucacgcagccaaacuguc

SEQ ID NO: 170634 - RNA, 19 nt, Artificial Sequence
  Description of Artificial Sequence: Synthetic oligonucleotide
gguauguauccagggaucc

SEQ ID NO: 170635 - RNA, 19 nt, Artificial Sequence
  Description of Artificial Sequence: Synthetic oligonucleotide
accuauucucauaguuugg

SEQ ID NO: 170636 - RNA, 19 nt, Artificial Sequence
  Description of Artificial Sequence: Synthetic oligonucleotide
uuguaucaugaaguuacua

SEQ ID NO: 170637 - RNA, 19 nt, Artificial Sequence
  Description of Artificial Sequence: Synthetic oligonucleotide
guuagggagauuuccuaua

SEQ ID NO: 170638 - RNA, 19 nt, Artificial Sequence
  Description of Artificial Sequence: Synthetic oligonucleotide
ccuauucucauaguuuggc

SEQ ID NO: 170639 - RNA, 19 nt, Artificial Sequence
  Description of Artificial Sequence: Synthetic oligonucleotide
ucggcacaucuccacacuc

SEQ ID NO: 170640 - RNA, 19 nt, Artificial Sequence
  Description of Artificial Sequence: Synthetic oligonucleotide
cauucccaugaauaaggga

SEQ ID NO: 170641 - RNA, 19 nt, Artificial Sequence
  Description of Artificial Sequence: Synthetic oligonucleotide
aacaggcuguuaaguucac

SEQ ID NO: 170642 - RNA, 19 nt, Artificial Sequence
  Description of Artificial Sequence: Synthetic oligonucleotide
acugcaaaauuuacauuau

SEQ ID NO: 170643 - RNA, 19 nt, Artificial Sequence
  Description of Artificial Sequence: Synthetic oligonucleotide
cuagcauuauaaggaugug

SEQ ID NO: 170644 - RNA, 19 nt, Artificial Sequence
  Description of Artificial Sequence: Synthetic oligonucleotide
guaaacaggcuguuaaguu

SEQ ID NO: 170645 - RNA, 19 nt, Artificial Sequence
  Description of Artificial Sequence: Synthetic oligonucleotide
ccaguguuguccuguagag

SEQ ID NO: 170646 - RNA, 19 nt, Artificial Sequence
  Description of Artificial Sequence: Synthetic oligonucleotide
cucauucacgcagccaaac

SEQ ID NO: 170647 - RNA, 19 nt, Artificial Sequence
  Description of Artificial Sequence: Synthetic oligonucleotide
acccgaagugcuagguccc

SEQ ID NO: 170648 - RNA, 19 nt, Artificial Sequence
  Description of Artificial Sequence: Synthetic oligonucleotide
agccacuccaaguuuccau

SEQ ID NO: 170649 - RNA, 19 nt, Artificial Sequence
  Description of Artificial Sequence: Synthetic oligonucleotide
auccuagggcaccuauucu

SEQ ID NO: 170650 - RNA, 19 nt, Artificial Sequence
  Description of Artificial Sequence: Synthetic oligonucleotide
cuguuaaguucacggauaa

SEQ ID NO: 170651 - RNA, 19 nt, Artificial Sequence
  Description of Artificial Sequence: Synthetic oligonucleotide
cacaucuccacacucccaa

SEQ ID NO: 170652 - RNA, 19 nt, Artificial Sequence
  Description of Artificial Sequence: Synthetic oligonucleotide
ucuauccguucuuuauguu

SEQ ID NO: 170653 - RNA, 19 nt, Artificial Sequence
  Description of Artificial Sequence: Synthetic oligonucleotide
ccaaaguauuguacacucc

SEQ ID NO: 170654 - RNA, 19 nt, Artificial Sequence
  Description of Artificial Sequence: Synthetic oligonucleotide
ccucguguaaaucacacaa

SEQ ID NO: 170655 - RNA, 19 nt, Artificial Sequence
  Description of Artificial Sequence: Synthetic oligonucleotide
agccucacacuuucuucug

SEQ ID NO: 170656 - RNA, 19 nt, Artificial Sequence
  Description of Artificial Sequence: Synthetic oligonucleotide
uguccuucgguagcacugu

SEQ ID NO: 170657 - RNA, 19 nt, Artificial Sequence
  Description of Artificial Sequence: Synthetic oligonucleotide
ggauuugauccacccgaag

SEQ ID NO: 170658 - RNA, 19 nt, Artificial Sequence
  Description of Artificial Sequence: Synthetic oligonucleotide
ggagacuuugaugaaggga

SEQ ID NO: 170659 - RNA, 19 nt, Artificial Sequence
  Description of Artificial Sequence: Synthetic oligonucleotide
gcauaccagaauaugggac

SEQ ID NO: 170660 - RNA, 19 nt, Artificial Sequence
  Description of Artificial Sequence: Synthetic oligonucleotide
aaauccuagggcaccuauu

SEQ ID NO: 170661 - RNA, 19 nt, Artificial Sequence
  Description of Artificial Sequence: Synthetic oligonucleotide
agcacacucccuuguacuu

SEQ ID NO: 170662 - RNA, 19 nt, Artificial Sequence
  Description of Artificial Sequence: Synthetic oligonucleotide
uccuaccacugaauagcaa

SEQ ID NO: 170663 - RNA, 19 nt, Artificial Sequence
  Description of Artificial Sequence: Synthetic oligonucleotide
cagugauauggaacuauaa

SEQ ID NO: 170664 - RNA, 19 nt, Artificial Sequence
  Description of Artificial Sequence: Synthetic oligonucleotide
acccauuaugcaucauaaa

SEQ ID NO: 170665 - RNA, 19 nt, Artificial Sequence
  Description of Artificial Sequence: Synthetic oligonucleotide
cuucgguagcacugugaug

SEQ ID NO: 170666 - RNA, 19 nt, Artificial Sequence
  Description of Artificial Sequence: Synthetic oligonucleotide
uuuauggcuuaugcuucaa

SEQ ID NO: 170667 - RNA, 19 nt, Artificial Sequence
  Description of Artificial Sequence: Synthetic oligonucleotide
gggagacuuugaugaaggg

SEQ ID NO: 170668 - RNA, 19 nt, Artificial Sequence
  Description of Artificial Sequence: Synthetic oligonucleotide
agccaaacugucccggauu

SEQ ID NO: 170669 - RNA, 19 nt, Artificial Sequence
  Description of Artificial Sequence: Synthetic oligonucleotide
acgcagccaaacugucccg

SEQ ID NO: 170670 - RNA, 19 nt, Artificial Sequence
  Description of Artificial Sequence: Synthetic oligonucleotide
ggacuuuuacucuucucaa

SEQ ID NO: 170671 - RNA, 19 nt, Artificial Sequence
  Description of Artificial Sequence: Synthetic oligonucleotide
cuguacaaguacauucugu

SEQ ID NO: 170672 - RNA, 19 nt, Artificial Sequence
  Description of Artificial Sequence: Synthetic oligonucleotide
ccucacacuuucuucuggc

SEQ ID NO: 170673 - RNA, 19 nt, Artificial Sequence
  Description of Artificial Sequence: Synthetic oligonucleotide
acagugauauggaacuaua

SEQ ID NO: 170674 - RNA, 19 nt, Artificial Sequence
  Description of Artificial Sequence: Synthetic oligonucleotide
uguuaaguucacggauaau

SEQ ID NO: 170675 - RNA, 19 nt, Artificial Sequence
  Description of Artificial Sequence: Synthetic oligonucleotide
cugauaagcaggauauuuu

SEQ ID NO: 170676 - RNA, 19 nt, Artificial Sequence
  Description of Artificial Sequence: Synthetic oligonucleotide
uccuauccacgugggagac

SEQ ID NO: 170677 - RNA, 19 nt, Artificial Sequence
  Description of Artificial Sequence: Synthetic oligonucleotide
gcucuaucaaauggaacac

SEQ ID NO: 170678 - RNA, 19 nt, Artificial Sequence
  Description of Artificial Sequence: Synthetic oligonucleotide
guucauaauccaugcaauu

SEQ ID NO: 170679 - RNA, 19 nt, Artificial Sequence
  Description of Artificial Sequence: Synthetic oligonucleotide
uaccaguauguuucuuguu

SEQ ID NO: 170680 - RNA, 19 nt, Artificial Sequence
  Description of Artificial Sequence: Synthetic oligonucleotide
auagucucguaaacuucca

SEQ ID NO: 170681 - RNA, 19 nt, Artificial Sequence
  Description of Artificial Sequence: Synthetic oligonucleotide
ugucccggauuugauccac

SEQ ID NO: 170682 - RNA, 19 nt, Artificial Sequence
  Description of Artificial Sequence: Synthetic oligonucleotide
auaagcccugacacagcag

SEQ ID NO: 170683 - RNA, 19 nt, Artificial Sequence
  Description of Artificial Sequence: Synthetic oligonucleotide
gcuacagagcuuugcucug

SEQ ID NO: 170684 - RNA, 19 nt, Artificial Sequence
  Description of Artificial Sequence: Synthetic oligonucleotide
ggugguacccaugguauuc

SEQ ID NO: 170685 - RNA, 19 nt, Artificial Sequence
  Description of Artificial Sequence: Synthetic oligonucleotide
auguuucuuguugccagau

SEQ ID NO: 170686 - RNA, 19 nt, Artificial Sequence
  Description of Artificial Sequence: Synthetic oligonucleotide
ugcgucgaccagcacugua

SEQ ID NO: 170687 - RNA, 19 nt, Artificial Sequence
  Description of Artificial Sequence: Synthetic oligonucleotide
ccggauuugauccacccga

SEQ ID NO: 170688 - RNA, 19 nt, Artificial Sequence
  Description of Artificial Sequence: Synthetic oligonucleotide
gugcuaugucuuuguaaga

SEQ ID NO: 170689 - RNA, 19 nt, Artificial Sequence
  Description of Artificial Sequence: Synthetic oligonucleotide
ugccggaggaggagaugca

SEQ ID NO: 170690 - RNA, 19 nt, Artificial Sequence
  Description of Artificial Sequence: Synthetic oligonucleotide
acucuugaaccagaauauu

SEQ ID NO: 170691 - RNA, 19 nt, Artificial Sequence
  Description of Artificial Sequence: Synthetic oligonucleotide
cgguaaucuuccauuauuc

SEQ ID NO: 170692 - RNA, 19 nt, Artificial Sequence
  Description of Artificial Sequence: Synthetic oligonucleotide
gguugcgucgaccagcacu

SEQ ID NO: 170693 - RNA, 19 nt, Artificial Sequence
  Description of Artificial Sequence: Synthetic oligonucleotide
ccauaauuaaucuuagguu

SEQ ID NO: 170694 - RNA, 19 nt, Artificial Sequence
  Description of Artificial Sequence: Synthetic oligonucleotide
gaguggugccaaaacucca

SEQ ID NO: 170695 - RNA, 19 nt, Artificial Sequence
  Description of Artificial Sequence: Synthetic oligonucleotide
gcguucuugaacagaauga

SEQ ID NO: 170696 - RNA, 19 nt, Artificial Sequence
  Description of Artificial Sequence: Synthetic oligonucleotide
gaauguccuucgguagcac

SEQ ID NO: 170697 - RNA, 19 nt, Artificial Sequence
  Description of Artificial Sequence: Synthetic oligonucleotide
cauucgcauaaauuccacu

SEQ ID NO: 170698 - RNA, 19 nt, Artificial Sequence
  Description of Artificial Sequence: Synthetic oligonucleotide
guauguauccagggaucca

SEQ ID NO: 170699 - RNA, 19 nt, Artificial Sequence
  Description of Artificial Sequence: Synthetic oligonucleotide
ucgguagcacugugaugcu

SEQ ID NO: 170700 - RNA, 19 nt, Artificial Sequence
  Description of Artificial Sequence: Synthetic oligonucleotide
cugaguugaaaaugucuau

SEQ ID NO: 170701 - RNA, 19 nt, Artificial Sequence
  Description of Artificial Sequence: Synthetic oligonucleotide
agagggucgcugauugaca

SEQ ID NO: 170702 - RNA, 19 nt, Artificial Sequence
  Description of Artificial Sequence: Synthetic oligonucleotide
caaguugcuguagaaauuu

SEQ ID NO: 170703 - RNA, 19 nt, Artificial Sequence
  Description of Artificial Sequence: Synthetic oligonucleotide
ccuugcauaucugagaugu

SEQ ID NO: 170704 - RNA, 19 nt, Artificial Sequence
  Description of Artificial Sequence: Synthetic oligonucleotide
uaggucccugaaagagggu

SEQ ID NO: 170705 - RNA, 19 nt, Artificial Sequence
  Description of Artificial Sequence: Synthetic oligonucleotide
gcgucgaccagcacuguag

SEQ ID NO: 170706 - RNA, 19 nt, Artificial Sequence
  Description of Artificial Sequence: Synthetic oligonucleotide
ucccacagaguggugccaa

SEQ ID NO: 170707 - RNA, 19 nt, Artificial Sequence
  Description of Artificial Sequence: Synthetic oligonucleotide
gagggucgcugauugacau

SEQ ID NO: 170708 - RNA, 19 nt, Artificial Sequence
  Description of Artificial Sequence: Synthetic oligonucleotide
ggagauagucucguaaacu

SEQ ID NO: 170709 - RNA, 19 nt, Artificial Sequence
  Description of Artificial Sequence: Synthetic oligonucleotide
cauacagaacuacgccaaa

SEQ ID NO: 170710 - RNA, 19 nt, Artificial Sequence
  Description of Artificial Sequence: Synthetic oligonucleotide
ggcaagacuuugguuaauc

SEQ ID NO: 170711 - RNA, 19 nt, Artificial Sequence
  Description of Artificial Sequence: Synthetic oligonucleotide
ucucauaguuuggcagcau

SEQ ID NO: 170712 - RNA, 19 nt, Artificial Sequence
  Description of Artificial Sequence: Synthetic oligonucleotide
gucgaccagcacuguagca

SEQ ID NO: 170713 - RNA, 19 nt, Artificial Sequence
  Description of Artificial Sequence: Synthetic oligonucleotide
cacaagcaucuugcaagac

SEQ ID NO: 170714 - RNA, 19 nt, Artificial Sequence
  Description of Artificial Sequence: Synthetic oligonucleotide
uucccacagaguggugcca

SEQ ID NO: 170715 - RNA, 19 nt, Artificial Sequence
  Description of Artificial Sequence: Synthetic oligonucleotide
aggugguacccaugguauu

SEQ ID NO: 170716 - RNA, 19 nt, Artificial Sequence
  Description of Artificial Sequence: Synthetic oligonucleotide
cccggauuugauccacccg

SEQ ID NO: 170717 - RNA, 19 nt, Artificial Sequence
  Description of Artificial Sequence: Synthetic oligonucleotide
uguguggauaaggguccau

SEQ ID NO: 170718 - RNA, 19 nt, Artificial Sequence
  Description of Artificial Sequence: Synthetic oligonucleotide
auggaacuauaagcccuga

SEQ ID NO: 170719 - RNA, 19 nt, Artificial Sequence
  Description of Artificial Sequence: Synthetic oligonucleotide
gguuagggagauuuccuau

SEQ ID NO: 170720 - RNA, 19 nt, Artificial Sequence
  Description of Artificial Sequence: Synthetic oligonucleotide
gauaaggguccaugacaau

SEQ ID NO: 170721 - RNA, 19 nt, Artificial Sequence
  Description of Artificial Sequence: Synthetic oligonucleotide
gcaagcaccugcucccuga

SEQ ID NO: 170722 - RNA, 19 nt, Artificial Sequence
  Description of Artificial Sequence: Synthetic oligonucleotide
cuacuuggucucugaguaa

SEQ ID NO: 170723 - RNA, 19 nt, Artificial Sequence
  Description of Artificial Sequence: Synthetic oligonucleotide
gguucauaauccaugcaau

SEQ ID NO: 170724 - RNA, 19 nt, Artificial Sequence
  Description of Artificial Sequence: Synthetic oligonucleotide
cacucccuuguacuuuaca

SEQ ID NO: 170725 - RNA, 19 nt, Artificial Sequence
  Description of Artificial Sequence: Synthetic oligonucleotide
uaccagaauaugggacuuu

SEQ ID NO: 170726 - RNA, 19 nt, Artificial Sequence
  Description of Artificial Sequence: Synthetic oligonucleotide
agguugcgucgaccagcac

SEQ ID NO: 170727 - RNA, 19 nt, Artificial Sequence
  Description of Artificial Sequence: Synthetic oligonucleotide
gaaaacccucacacagucu

SEQ ID NO: 170728 - RNA, 19 nt, Artificial Sequence
  Description of Artificial Sequence: Synthetic oligonucleotide
auggugcauggaaaagaau

SEQ ID NO: 170729 - RNA, 19 nt, Artificial Sequence
  Description of Artificial Sequence: Synthetic oligonucleotide
agggucgcugauugacauu

SEQ ID NO: 170730 - RNA, 19 nt, Artificial Sequence
  Description of Artificial Sequence: Synthetic oligonucleotide
cacggauaauggcucuaaa

SEQ ID NO: 170731 - RNA, 19 nt, Artificial Sequence
  Description of Artificial Sequence: Synthetic oligonucleotide
gcccucguguaaaucacac

SEQ ID NO: 170732 - RNA, 19 nt, Artificial Sequence
  Description of Artificial Sequence: Synthetic oligonucleotide
agcccucguguaaaucaca

SEQ ID NO: 170733 - RNA, 19 nt, Artificial Sequence
  Description of Artificial Sequence: Synthetic oligonucleotide
ccauuugucuguugccaga

SEQ ID NO: 170734 - RNA, 19 nt, Artificial Sequence
  Description of Artificial Sequence: Synthetic oligonucleotide
uggcaagacuuugguuaau

SEQ ID NO: 170735 - RNA, 19 nt, Artificial Sequence
  Description of Artificial Sequence: Synthetic oligonucleotide
gucgcugauugacauuguu

SEQ ID NO: 170736 - RNA, 19 nt, Artificial Sequence
  Description of Artificial Sequence: Synthetic oligonucleotide
cauugccaaucauucgcau

SEQ ID NO: 170737 - RNA, 19 nt, Artificial Sequence
  Description of Artificial Sequence: Synthetic oligonucleotide
cgucgaccagcacuguagc

SEQ ID NO: 170738 - RNA, 19 nt, Artificial Sequence
  Description of Artificial Sequence: Synthetic oligonucleotide
cucgguaaucuuccauuau

SEQ ID NO: 170739 - RNA, 19 nt, Artificial Sequence
  Description of Artificial Sequence: Synthetic oligonucleotide
gcagccaaacugucccgga

SEQ ID NO: 170740 - RNA, 19 nt, Artificial Sequence
  Description of Artificial Sequence: Synthetic oligonucleotide
gaacuacgccaaagcucca

SEQ ID NO: 170741 - RNA, 19 nt, Artificial Sequence
  Description of Artificial Sequence: Synthetic oligonucleotide
ggcccaugccaacuguuua

SEQ ID NO: 170742 - RNA, 19 nt, Artificial Sequence
  Description of Artificial Sequence: Synthetic oligonucleotide
guagcacugugaugcuaau

SEQ ID NO: 170743 - RNA, 19 nt, Artificial Sequence
  Description of Artificial Sequence: Synthetic oligonucleotide
gccagaucccuguggauau

SEQ ID NO: 170744 - RNA, 19 nt, Artificial Sequence
  Description of Artificial Sequence: Synthetic oligonucleotide
cacaaucaucuguccuugu

SEQ ID NO: 170745 - RNA, 19 nt, Artificial Sequence
  Description of Artificial Sequence: Synthetic oligonucleotide
auguggcuacagagcuuug

SEQ ID NO: 170746 - RNA, 19 nt, Artificial Sequence
  Description of Artificial Sequence: Synthetic oligonucleotide
gcuuaugcuucaauuuaau

SEQ ID NO: 170747 - RNA, 19 nt, Artificial Sequence
  Description of Artificial Sequence: Synthetic oligonucleotide
uugcgucgaccagcacugu

SEQ ID NO: 170748 - RNA, 19 nt, Artificial Sequence
  Description of Artificial Sequence: Synthetic oligonucleotide
cuagggcaccuauucucau

SEQ ID NO: 170749 - RNA, 19 nt, Artificial Sequence
  Description of Artificial Sequence: Synthetic oligonucleotide
cccucguguaaaucacaca

SEQ ID NO: 170750 - RNA, 19 nt, Artificial Sequence
  Description of Artificial Sequence: Synthetic oligonucleotide
cucuaaaggcaggccugaa

SEQ ID NO: 170751 - RNA, 19 nt, Artificial Sequence
  Description of Artificial Sequence: Synthetic oligonucleotide
cguguaaaucacacaagau

SEQ ID NO: 170752 - RNA, 19 nt, Artificial Sequence
  Description of Artificial Sequence: Synthetic oligonucleotide
guguuguccuguagagggu

SEQ ID NO: 170753 - RNA, 19 nt, Artificial Sequence
  Description of Artificial Sequence: Synthetic oligonucleotide
cagccaaacugucccggau

SEQ ID NO: 170754 - RNA, 19 nt, Artificial Sequence
  Description of Artificial Sequence: Synthetic oligonucleotide
ggaagucuacuuggucucu

SEQ ID NO: 170755 - RNA, 19 nt, Artificial Sequence
  Description of Artificial Sequence: Synthetic oligonucleotide
ggcaccccucuggucucgg

SEQ ID NO: 170756 - RNA, 19 nt, Artificial Sequence
  Description of Artificial Sequence: Synthetic oligonucleotide
ccgaagugcuaggucccug

SEQ ID NO: 170757 - RNA, 19 nt, Artificial Sequence
  Description of Artificial Sequence: Synthetic oligonucleotide
gccggaggaggagaugcaa

SEQ ID NO: 170758 - RNA, 19 nt, Artificial Sequence
  Description of Artificial Sequence: Synthetic oligonucleotide
gggcaccccucuggucucg

SEQ ID NO: 170759 - RNA, 19 nt, Artificial Sequence
  Description of Artificial Sequence: Synthetic oligonucleotide
cggauuugauccacccgaa

SEQ ID NO: 170760 - RNA, 19 nt, Artificial Sequence
  Description of Artificial Sequence: Synthetic oligonucleotide
cccucuggucucgguaauc

SEQ ID NO: 170761 - RNA, 19 nt, Artificial Sequence
  Description of Artificial Sequence: Synthetic oligonucleotide
gggcaccuauucucauagu

SEQ ID NO: 170762 - RNA, 19 nt, Artificial Sequence
  Description of Artificial Sequence: Synthetic oligonucleotide
gcacacucccuuguacuuu

SEQ ID NO: 170763 - RNA, 19 nt, Artificial Sequence
  Description of Artificial Sequence: Synthetic oligonucleotide
ccgaggcaacagaaaacuu

SEQ ID NO: 170764 - RNA, 19 nt, Artificial Sequence
  Description of Artificial Sequence: Synthetic oligonucleotide
cgggcaccccucuggucuc

SEQ ID NO: 170765 - RNA, 19 nt, Artificial Sequence
  Description of Artificial Sequence: Synthetic oligonucleotide
ccuauccacgugggagacu

SEQ ID NO: 170766 - RNA, 19 nt, Artificial Sequence
  Description of Artificial Sequence: Synthetic oligonucleotide
gugcugugcuggagcuuuu

SEQ ID NO: 170767 - RNA, 19 nt, Artificial Sequence
  Description of Artificial Sequence: Synthetic oligonucleotide
cccgaagugcuaggucccu

SEQ ID NO: 170768 - RNA, 19 nt, Artificial Sequence
  Description of Artificial Sequence: Synthetic oligonucleotide
cgguagcacugugaugcua

SEQ ID NO: 170769 - RNA, 19 nt, Artificial Sequence
  Description of Artificial Sequence: Synthetic oligonucleotide
aaacuaauuacacucaggg

SEQ ID NO: 170770 - RNA, 19 nt, Artificial Sequence
  Description of Artificial Sequence: Synthetic oligonucleotide
aggagaguaaauuauaagc

SEQ ID NO: 170771 - RNA, 19 nt, Artificial Sequence
  Description of Artificial Sequence: Synthetic oligonucleotide
aauuauaagccauucagcu

SEQ ID NO: 170772 - RNA, 19 nt, Artificial Sequence
  Description of Artificial Sequence: Synthetic oligonucleotide
aacgccaucaaucuuggac

SEQ ID NO: 170773 - RNA, 19 nt, Artificial Sequence
  Description of Artificial Sequence: Synthetic oligonucleotide
uuuaacagcaucuaccaag

SEQ ID NO: 170774 - RNA, 19 nt, Artificial Sequence
  Description of Artificial Sequence: Synthetic oligonucleotide
uuauaagccauucagcuga

SEQ ID NO: 170775 - RNA, 19 nt, Artificial Sequence
  Description of Artificial Sequence: Synthetic oligonucleotide
aaaguuuacgaauguucgc

SEQ ID NO: 170776 - RNA, 19 nt, Artificial Sequence
  Description of Artificial Sequence: Synthetic oligonucleotide
uuuacaacccaucugcucc

SEQ ID NO: 170777 - RNA, 19 nt, Artificial Sequence
  Description of Artificial Sequence: Synthetic oligonucleotide
aaaaguuuacgaauguucg

SEQ ID NO: 170778 - RNA, 19 nt, Artificial Sequence
  Description of Artificial Sequence: Synthetic oligonucleotide
aaguuuacgaauguucgcc

SEQ ID NO: 170779 - RNA, 19 nt, Artificial Sequence
  Description of Artificial Sequence: Synthetic oligonucleotide
uauauuuacucuuuauugc

SEQ ID NO: 170780 - RNA, 19 nt, Artificial Sequence
  Description of Artificial Sequence: Synthetic oligonucleotide
aacuaauuacacucagggc

SEQ ID NO: 170781 - RNA, 19 nt, Artificial Sequence
  Description of Artificial Sequence: Synthetic oligonucleotide
aacugauguccucucaucc

SEQ ID NO: 170782 - RNA, 19 nt, Artificial Sequence
  Description of Artificial Sequence: Synthetic oligonucleotide
acuaauaagccucugacgu

SEQ ID NO: 170783 - RNA, 19 nt, Artificial Sequence
  Description of Artificial Sequence: Synthetic oligonucleotide
acugauuagacaaaucacc

SEQ ID NO: 170784 - RNA, 19 nt, Artificial Sequence
  Description of Artificial Sequence: Synthetic oligonucleotide
aauuccgggaaacacuagg

SEQ ID NO: 170785 - RNA, 19 nt, Artificial Sequence
  Description of Artificial Sequence: Synthetic oligonucleotide
aagacauuaacuucauuga

SEQ ID NO: 170786 - RNA, 19 nt, Artificial Sequence
  Description of Artificial Sequence: Synthetic oligonucleotide
acuaauuagagcugagagg

SEQ ID NO: 170787 - RNA, 19 nt, Artificial Sequence
  Description of Artificial Sequence: Synthetic oligonucleotide
aauuaggagaugauuugcc

SEQ ID NO: 170788 - RNA, 19 nt, Artificial Sequence
  Description of Artificial Sequence: Synthetic oligonucleotide
uuacuuaugugcuuuagac

SEQ ID NO: 170789 - RNA, 19 nt, Artificial Sequence
  Description of Artificial Sequence: Synthetic oligonucleotide
uaaugauuagcauaucucu

SEQ ID NO: 170790 - RNA, 19 nt, Artificial Sequence
  Description of Artificial Sequence: Synthetic oligonucleotide
aaaguuggauuccucugcg

SEQ ID NO: 170791 - RNA, 19 nt, Artificial Sequence
  Description of Artificial Sequence: Synthetic oligonucleotide
ugaguugagauuuguaagc

SEQ ID NO: 170792 - RNA, 19 nt, Artificial Sequence
  Description of Artificial Sequence: Synthetic oligonucleotide
agaaugacgaacuaauuaa

SEQ ID NO: 170793 - RNA, 19 nt, Artificial Sequence
  Description of Artificial Sequence: Synthetic oligonucleotide
cuugguuugugccaaaagc

SEQ ID NO: 170794 - RNA, 19 nt, Artificial Sequence
  Description of Artificial Sequence: Synthetic oligonucleotide
cugauuagacaaaucaccc

SEQ ID NO: 170795 - RNA, 19 nt, Artificial Sequence
  Description of Artificial Sequence: Synthetic oligonucleotide
ucaaguagccuuucgaugu

SEQ ID NO: 170796 - RNA, 19 nt, Artificial Sequence
  Description of Artificial Sequence: Synthetic oligonucleotide
augagugacgaucccaggc

SEQ ID NO: 170797 - RNA, 19 nt, Artificial Sequence
  Description of Artificial Sequence: Synthetic oligonucleotide
auugagaacagcaucuugg

SEQ ID NO: 170798 - RNA, 19 nt, Artificial Sequence
  Description of Artificial Sequence: Synthetic oligonucleotide
ugacgaacuaauuaaauuu

SEQ ID NO: 170799 - RNA, 19 nt, Artificial Sequence
  Description of Artificial Sequence: Synthetic oligonucleotide
uguuaaggauuucuggccc

SEQ ID NO: 170800 - RNA, 19 nt, Artificial Sequence
  Description of Artificial Sequence: Synthetic oligonucleotide
agauuuguaagcaucauca

SEQ ID NO: 170801 - RNA, 19 nt, Artificial Sequence
  Description of Artificial Sequence: Synthetic oligonucleotide
aguaaauuauaagccauuc

SEQ ID NO: 170802 - RNA, 19 nt, Artificial Sequence
  Description of Artificial Sequence: Synthetic oligonucleotide
ucucaaucaacauuaguaa

SEQ ID NO: 170803 - RNA, 19 nt, Artificial Sequence
  Description of Artificial Sequence: Synthetic oligonucleotide
uaaucaaguagccuuucga

SEQ ID NO: 170804 - RNA, 19 nt, Artificial Sequence
  Description of Artificial Sequence: Synthetic oligonucleotide
uccauauacggcuuuguug

SEQ ID NO: 170805 - RNA, 19 nt, Artificial Sequence
  Description of Artificial Sequence: Synthetic oligonucleotide
uuguuaaggauuucuggcc

SEQ ID NO: 170806 - RNA, 19 nt, Artificial Sequence
  Description of Artificial Sequence: Synthetic oligonucleotide
auuaggaaagcucuccuga

SEQ ID NO: 170807 - RNA, 19 nt, Artificial Sequence
  Description of Artificial Sequence: Synthetic oligonucleotide
ucaaaucuggucuauuggu

SEQ ID NO: 170808 - RNA, 19 nt, Artificial Sequence
  Description of Artificial Sequence: Synthetic oligonucleotide
cauucauaauguaacuggc

SEQ ID NO: 170809 - RNA, 19 nt, Artificial Sequence
  Description of Artificial Sequence: Synthetic oligonucleotide
uuuacgaauguucgccucc

SEQ ID NO: 170810 - RNA, 19 nt, Artificial Sequence
  Description of Artificial Sequence: Synthetic oligonucleotide
agauaauuccgggaaacac

SEQ ID NO: 170811 - RNA, 19 nt, Artificial Sequence
  Description of Artificial Sequence: Synthetic oligonucleotide
ccauauacggcuuuguugg

SEQ ID NO: 170812 - RNA, 19 nt, Artificial Sequence
  Description of Artificial Sequence: Synthetic oligonucleotide
uggauaauaguguuuuacu

SEQ ID NO: 170813 - RNA, 19 nt, Artificial Sequence
  Description of Artificial Sequence: Synthetic oligonucleotide
uaccaagugguaaugauua

SEQ ID NO: 170814 - RNA, 19 nt, Artificial Sequence
  Description of Artificial Sequence: Synthetic oligonucleotide
cucccuaagacucaucacc

SEQ ID NO: 170815 - RNA, 19 nt, Artificial Sequence
  Description of Artificial Sequence: Synthetic oligonucleotide
uguggugcguuccuuaucu

SEQ ID NO: 170816 - RNA, 19 nt, Artificial Sequence
  Description of Artificial Sequence: Synthetic oligonucleotide
ugaauaugauugagaacag

SEQ ID NO: 170817 - RNA, 19 nt, Artificial Sequence
  Description of Artificial Sequence: Synthetic oligonucleotide
ugagugacgaucccaggcc

SEQ ID NO: 170818 - RNA, 19 nt, Artificial Sequence
  Description of Artificial Sequence: Synthetic oligonucleotide
auuggucaucccaauaacc

SEQ ID NO: 170819 - RNA, 19 nt, Artificial Sequence
  Description of Artificial Sequence: Synthetic oligonucleotide
uugaggacgaugagugacg

SEQ ID NO: 170820 - RNA, 19 nt, Artificial Sequence
  Description of Artificial Sequence: Synthetic oligonucleotide
aaucuccggaggaacaccc

SEQ ID NO: 170821 - RNA, 19 nt, Artificial Sequence
  Description of Artificial Sequence: Synthetic oligonucleotide
uucguacuggccuuuaugu

SEQ ID NO: 170822 - RNA, 19 nt, Artificial Sequence
  Description of Artificial Sequence: Synthetic oligonucleotide
uguguggauaugaaggauc

SEQ ID NO: 170823 - RNA, 19 nt, Artificial Sequence
  Description of Artificial Sequence: Synthetic oligonucleotide
uuucguacuggccuuuaug

SEQ ID NO: 170824 - RNA, 19 nt, Artificial Sequence
  Description of Artificial Sequence: Synthetic oligonucleotide
ggagaguaaauuauaagcc

SEQ ID NO: 170825 - RNA, 19 nt, Artificial Sequence
  Description of Artificial Sequence: Synthetic oligonucleotide
agagcaaacuaauuacacu

SEQ ID NO: 170826 - RNA, 19 nt, Artificial Sequence
  Description of Artificial Sequence: Synthetic oligonucleotide
agagucuuaccacaaccag

SEQ ID NO: 170827 - RNA, 19 nt, Artificial Sequence
  Description of Artificial Sequence: Synthetic oligonucleotide
auaguguuuuacuuaugug

SEQ ID NO: 170828 - RNA, 19 nt, Artificial Sequence
  Description of Artificial Sequence: Synthetic oligonucleotide
uggggacauaaucaaguag

SEQ ID NO: 170829 - RNA, 19 nt, Artificial Sequence
  Description of Artificial Sequence: Synthetic oligonucleotide
auaucucuuaccacagagc

SEQ ID NO: 170830 - RNA, 19 nt, Artificial Sequence
  Description of Artificial Sequence: Synthetic oligonucleotide
aacggugucgugaacuccg

SEQ ID NO: 170831 - RNA, 19 nt, Artificial Sequence
  Description of Artificial Sequence: Synthetic oligonucleotide
guggauaugaaggaucugc

SEQ ID NO: 170832 - RNA, 19 nt, Artificial Sequence
  Description of Artificial Sequence: Synthetic oligonucleotide
ugauuagacaaaucacccu

SEQ ID NO: 170833 - RNA, 19 nt, Artificial Sequence
  Description of Artificial Sequence: Synthetic oligonucleotide
aucucaaucaacauuagua

SEQ ID NO: 170834 - RNA, 19 nt, Artificial Sequence
  Description of Artificial Sequence: Synthetic oligonucleotide
ucaccgagaaugacgaacu

SEQ ID NO: 170835 - RNA, 19 nt, Artificial Sequence
  Description of Artificial Sequence: Synthetic oligonucleotide
aguacacuggaauggauau

SEQ ID NO: 170836 - RNA, 19 nt, Artificial Sequence
  Description of Artificial Sequence: Synthetic oligonucleotide
ucugaauaugauugagaac

SEQ ID NO: 170837 - RNA, 19 nt, Artificial Sequence
  Description of Artificial Sequence: Synthetic oligonucleotide
cagagcaaacuaauuacac

SEQ ID NO: 170838 - RNA, 19 nt, Artificial Sequence
  Description of Artificial Sequence: Synthetic oligonucleotide
ucucccacauauuuguuaa

SEQ ID NO: 170839 - RNA, 19 nt, Artificial Sequence
  Description of Artificial Sequence: Synthetic oligonucleotide
uucacugcgcuagucaugc

SEQ ID NO: 170840 - RNA, 19 nt, Artificial Sequence
  Description of Artificial Sequence: Synthetic oligonucleotide
acacgagggaguucacugc

SEQ ID NO: 170841 - RNA, 19 nt, Artificial Sequence
  Description of Artificial Sequence: Synthetic oligonucleotide
ugaacuccggugcugccag

SEQ ID NO: 170842 - RNA, 19 nt, Artificial Sequence
  Description of Artificial Sequence: Synthetic oligonucleotide
aaugacgaacuaauuaaau

SEQ ID NO: 170843 - RNA, 19 nt, Artificial Sequence
  Description of Artificial Sequence: Synthetic oligonucleotide
acgccaucaaucuuggaca

SEQ ID NO: 170844 - RNA, 19 nt, Artificial Sequence
  Description of Artificial Sequence: Synthetic oligonucleotide
ugaugagaagcuugcggcc

SEQ ID NO: 170845 - RNA, 19 nt, Artificial Sequence
  Description of Artificial Sequence: Synthetic oligonucleotide
uaggagaugauuugccuuc

SEQ ID NO: 170846 - RNA, 19 nt, Artificial Sequence
  Description of Artificial Sequence: Synthetic oligonucleotide
cuuccgauuaggaaagcuc

SEQ ID NO: 170847 - RNA, 19 nt, Artificial Sequence
  Description of Artificial Sequence: Synthetic oligonucleotide
cuggauaauaguguuuuac

SEQ ID NO: 170848 - RNA, 19 nt, Artificial Sequence
  Description of Artificial Sequence: Synthetic oligonucleotide
acaacggugucgugaacuc

SEQ ID NO: 170849 - RNA, 19 nt, Artificial Sequence
  Description of Artificial Sequence: Synthetic oligonucleotide
uggacacuaauuagagcug

SEQ ID NO: 170850 - RNA, 19 nt, Artificial Sequence
  Description of Artificial Sequence: Synthetic oligonucleotide
augauuagcauaucucuua

SEQ ID NO: 170851 - RNA, 19 nt, Artificial Sequence
  Description of Artificial Sequence: Synthetic oligonucleotide
ggggacauaaucaaguagc

SEQ ID NO: 170852 - RNA, 19 nt, Artificial Sequence
  Description of Artificial Sequence: Synthetic oligonucleotide
ucuaccaagugguaaugau

SEQ ID NO: 170853 - RNA, 19 nt, Artificial Sequence
  Description of Artificial Sequence: Synthetic oligonucleotide
aacuccggugcugccagcc

SEQ ID NO: 170854 - RNA, 19 nt, Artificial Sequence
  Description of Artificial Sequence: Synthetic oligonucleotide
gaucauaccuaggugcccc

SEQ ID NO: 170855 - RNA, 19 nt, Artificial Sequence
  Description of Artificial Sequence: Synthetic oligonucleotide
uuaggagaugauuugccuu

SEQ ID NO: 170856 - RNA, 19 nt, Artificial Sequence
  Description of Artificial Sequence: Synthetic oligonucleotide
cuugaggacgaugagugac

SEQ ID NO: 170857 - RNA, 19 nt, Artificial Sequence
  Description of Artificial Sequence: Synthetic oligonucleotide
guaacacaagaagagcuug

SEQ ID NO: 170858 - RNA, 19 nt, Artificial Sequence
  Description of Artificial Sequence: Synthetic oligonucleotide
gaugagaagcuugcggccc

SEQ ID NO: 170859 - RNA, 19 nt, Artificial Sequence
  Description of Artificial Sequence: Synthetic oligonucleotide
uuacgaauguucgccuccg

SEQ ID NO: 170860 - RNA, 19 nt, Artificial Sequence
  Description of Artificial Sequence: Synthetic oligonucleotide
aguuuacgaauguucgccu

SEQ ID NO: 170861 - RNA, 19 nt, Artificial Sequence
  Description of Artificial Sequence: Synthetic oligonucleotide
acaaucuccggaggaacac

SEQ ID NO: 170862 - RNA, 19 nt, Artificial Sequence
  Description of Artificial Sequence: Synthetic oligonucleotide
uuagggauguacagcuuuc

SEQ ID NO: 170863 - RNA, 19 nt, Artificial Sequence
  Description of Artificial Sequence: Synthetic oligonucleotide
auagaggagaguaaauuau

SEQ ID NO: 170864 - RNA, 19 nt, Artificial Sequence
  Description of Artificial Sequence: Synthetic oligonucleotide
ugagaggcuuguaaauuau

SEQ ID NO: 170865 - RNA, 19 nt, Artificial Sequence
  Description of Artificial Sequence: Synthetic oligonucleotide
auaccuaggugccccugcg

SEQ ID NO: 170866 - RNA, 19 nt, Artificial Sequence
  Description of Artificial Sequence: Synthetic oligonucleotide
cuauuggucaucccaauaa

SEQ ID NO: 170867 - RNA, 19 nt, Artificial Sequence
  Description of Artificial Sequence: Synthetic oligonucleotide
cuugagauagaggagagua

SEQ ID NO: 170868 - RNA, 19 nt, Artificial Sequence
  Description of Artificial Sequence: Synthetic oligonucleotide
guuggacacuaauuagagc

SEQ ID NO: 170869 - RNA, 19 nt, Artificial Sequence
  Description of Artificial Sequence: Synthetic oligonucleotide
agggaguucacugcgcuag

SEQ ID NO: 170870 - RNA, 19 nt, Artificial Sequence
  Description of Artificial Sequence: Synthetic oligonucleotide
acccacuuagaguuggaca

SEQ ID NO: 170871 - RNA, 19 nt, Artificial Sequence
  Description of Artificial Sequence: Synthetic oligonucleotide
cuuagucuggugucuugag

SEQ ID NO: 170872 - RNA, 19 nt, Artificial Sequence
  Description of Artificial Sequence: Synthetic oligonucleotide
agauagaggagaguaaauu

SEQ ID NO: 170873 - RNA, 19 nt, Artificial Sequence
  Description of Artificial Sequence: Synthetic oligonucleotide
cacgagggaguucacugcg

SEQ ID NO: 170874 - RNA, 19 nt, Artificial Sequence
  Description of Artificial Sequence: Synthetic oligonucleotide
ugaucacugucuuuguauu

SEQ ID NO: 170875 - RNA, 19 nt, Artificial Sequence
  Description of Artificial Sequence: Synthetic oligonucleotide
cuguuuagggauguacagc

SEQ ID NO: 170876 - RNA, 19 nt, Artificial Sequence
  Description of Artificial Sequence: Synthetic oligonucleotide
agggcggugaauguuucac

SEQ ID NO: 170877 - RNA, 19 nt, Artificial Sequence
  Description of Artificial Sequence: Synthetic oligonucleotide
gguucucucgcauucagca

SEQ ID NO: 170878 - RNA, 19 nt, Artificial Sequence
  Description of Artificial Sequence: Synthetic oligonucleotide
auauggcacuaauaagccu

SEQ ID NO: 170879 - RNA, 19 nt, Artificial Sequence
  Description of Artificial Sequence: Synthetic oligonucleotide
uaauuccgggaaacacuag

SEQ ID NO: 170880 - RNA, 19 nt, Artificial Sequence
  Description of Artificial Sequence: Synthetic oligonucleotide
ucguacuggccuuuaugug

SEQ ID NO: 170881 - RNA, 19 nt, Artificial Sequence
  Description of Artificial Sequence: Synthetic oligonucleotide
agaaagucaggaccacaga

SEQ ID NO: 170882 - RNA, 19 nt, Artificial Sequence
  Description of Artificial Sequence: Synthetic oligonucleotide
uaacugauguccucucauc

SEQ ID NO: 170883 - RNA, 19 nt, Artificial Sequence
  Description of Artificial Sequence: Synthetic oligonucleotide
uuccccuuaauguccacau

SEQ ID NO: 170884 - RNA, 19 nt, Artificial Sequence
  Description of Artificial Sequence: Synthetic oligonucleotide
aaacacuaggaugucucaa

SEQ ID NO: 170885 - RNA, 19 nt, Artificial Sequence
  Description of Artificial Sequence: Synthetic oligonucleotide
gaguugagauuuguaagca

SEQ ID NO: 170886 - RNA, 19 nt, Artificial Sequence
  Description of Artificial Sequence: Synthetic oligonucleotide
agcaaauuaggagaugauu

SEQ ID NO: 170887 - RNA, 19 nt, Artificial Sequence
  Description of Artificial Sequence: Synthetic oligonucleotide
ucggacuuccgauuaggaa

SEQ ID NO: 170888 - RNA, 19 nt, Artificial Sequence
  Description of Artificial Sequence: Synthetic oligonucleotide
cauauacggcuuuguuggg

SEQ ID NO: 170889 - RNA, 19 nt, Artificial Sequence
  Description of Artificial Sequence: Synthetic oligonucleotide
cacccgauacucagggucc

SEQ ID NO: 170890 - RNA, 19 nt, Artificial Sequence
  Description of Artificial Sequence: Synthetic oligonucleotide
ugguugacaacggugucgu

SEQ ID NO: 170891 - RNA, 19 nt, Artificial Sequence
  Description of Artificial Sequence: Synthetic oligonucleotide
agaucacuugagauagagg

SEQ ID NO: 170892 - RNA, 19 nt, Artificial Sequence
  Description of Artificial Sequence: Synthetic oligonucleotide
cauaccuaggugccccugc

SEQ ID NO: 170893 - RNA, 19 nt, Artificial Sequence
  Description of Artificial Sequence: Synthetic oligonucleotide
auaauuccgggaaacacua

SEQ ID NO: 170894 - RNA, 19 nt, Artificial Sequence
  Description of Artificial Sequence: Synthetic oligonucleotide
uuccgggaaacacuaggau

SEQ ID NO: 170895 - RNA, 19 nt, Artificial Sequence
  Description of Artificial Sequence: Synthetic oligonucleotide
agaauuuccucacccgaua

SEQ ID NO: 170896 - RNA, 19 nt, Artificial Sequence
  Description of Artificial Sequence: Synthetic oligonucleotide
agcauaucucuuaccacag

SEQ ID NO: 170897 - RNA, 19 nt, Artificial Sequence
  Description of Artificial Sequence: Synthetic oligonucleotide
uagacaaaucacccuccaa

SEQ ID NO: 170898 - RNA, 19 nt, Artificial Sequence
  Description of Artificial Sequence: Synthetic oligonucleotide
uuuagacauuacagaucac

SEQ ID NO: 170899 - RNA, 19 nt, Artificial Sequence
  Description of Artificial Sequence: Synthetic oligonucleotide
uaccuaggugccccugcgg

SEQ ID NO: 170900 - RNA, 19 nt, Artificial Sequence
  Description of Artificial Sequence: Synthetic oligonucleotide
gaaugacgaacuaauuaaa

SEQ ID NO: 170901 - RNA, 19 nt, Artificial Sequence
  Description of Artificial Sequence: Synthetic oligonucleotide
ugaguacacuggaauggau

SEQ ID NO: 170902 - RNA, 19 nt, Artificial Sequence
  Description of Artificial Sequence: Synthetic oligonucleotide
cagucuucccgcugugagg

SEQ ID NO: 170903 - RNA, 19 nt, Artificial Sequence
  Description of Artificial Sequence: Synthetic oligonucleotide
acacuaauuagagcugaga

SEQ ID NO: 170904 - RNA, 19 nt, Artificial Sequence
  Description of Artificial Sequence: Synthetic oligonucleotide
uaacagcaucuaccaagug

SEQ ID NO: 170905 - RNA, 19 nt, Artificial Sequence
  Description of Artificial Sequence: Synthetic oligonucleotide
gucgacccuucucaucugg

SEQ ID NO: 170906 - RNA, 19 nt, Artificial Sequence
  Description of Artificial Sequence: Synthetic oligonucleotide
gauuccuauccagaccuuc

SEQ ID NO: 170907 - RNA, 19 nt, Artificial Sequence
  Description of Artificial Sequence: Synthetic oligonucleotide
aucuugccaaucugucgag

SEQ ID NO: 170908 - RNA, 19 nt, Artificial Sequence
  Description of Artificial Sequence: Synthetic oligonucleotide
cacugcgcuagucaugcug

SEQ ID NO: 170909 - RNA, 19 nt, Artificial Sequence
  Description of Artificial Sequence: Synthetic oligonucleotide
acgcuaaccagaggcguac

SEQ ID NO: 170910 - RNA, 19 nt, Artificial Sequence
  Description of Artificial Sequence: Synthetic oligonucleotide
auacggcuuuguugggagg

SEQ ID NO: 170911 - RNA, 19 nt, Artificial Sequence
  Description of Artificial Sequence: Synthetic oligonucleotide
augaucggacuuccgauua

SEQ ID NO: 170912 - RNA, 19 nt, Artificial Sequence
  Description of Artificial Sequence: Synthetic oligonucleotide
uuugcagcuagggcagucu

SEQ ID NO: 170913 - RNA, 19 nt, Artificial Sequence
  Description of Artificial Sequence: Synthetic oligonucleotide
uguucgccuccgauucucc

SEQ ID NO: 170914 - RNA, 19 nt, Artificial Sequence
  Description of Artificial Sequence: Synthetic oligonucleotide
ugaggacgaugagugacga

SEQ ID NO: 170915 - RNA, 19 nt, Artificial Sequence
  Description of Artificial Sequence: Synthetic oligonucleotide
cauuuuaacuuccagucuu

SEQ ID NO: 170916 - RNA, 19 nt, Artificial Sequence
  Description of Artificial Sequence: Synthetic oligonucleotide
acuuccgauuaggaaagcu

SEQ ID NO: 170917 - RNA, 19 nt, Artificial Sequence
  Description of Artificial Sequence: Synthetic oligonucleotide
acgaauguucgccuccgau

SEQ ID NO: 170918 - RNA, 19 nt, Artificial Sequence
  Description of Artificial Sequence: Synthetic oligonucleotide
aggacgcuaaccagaggcg

SEQ ID NO: 170919 - RNA, 19 nt, Artificial Sequence
  Description of Artificial Sequence: Synthetic oligonucleotide
ggacuuccgauuaggaaag

SEQ ID NO: 170920 - RNA, 19 nt, Artificial Sequence
  Description of Artificial Sequence: Synthetic oligonucleotide
auguucgccuccgauucuc

SEQ ID NO: 170921 - RNA, 19 nt, Artificial Sequence
  Description of Artificial Sequence: Synthetic oligonucleotide
acuaggagguggcuuguuu

SEQ ID NO: 170922 - RNA, 19 nt, Artificial Sequence
  Description of Artificial Sequence: Synthetic oligonucleotide
gaguacacuggaauggaua

SEQ ID NO: 170923 - RNA, 19 nt, Artificial Sequence
  Description of Artificial Sequence: Synthetic oligonucleotide
gagugacgaucccaggcca

SEQ ID NO: 170924 - RNA, 19 nt, Artificial Sequence
  Description of Artificial Sequence: Synthetic oligonucleotide
cucgcaccagaccuucccc

SEQ ID NO: 170925 - RNA, 19 nt, Artificial Sequence
  Description of Artificial Sequence: Synthetic oligonucleotide
caaucuccggaggaacacc

SEQ ID NO: 170926 - RNA, 19 nt, Artificial Sequence
  Description of Artificial Sequence: Synthetic oligonucleotide
uuucuggcccauugaccac

SEQ ID NO: 170927 - RNA, 19 nt, Artificial Sequence
  Description of Artificial Sequence: Synthetic oligonucleotide
gcuagggcagucuucccgc

SEQ ID NO: 170928 - RNA, 19 nt, Artificial Sequence
  Description of Artificial Sequence: Synthetic oligonucleotide
aucuaccaagugguaauga

SEQ ID NO: 170929 - RNA, 19 nt, Artificial Sequence
  Description of Artificial Sequence: Synthetic oligonucleotide
acgaugagugacgauccca

SEQ ID NO: 170930 - RNA, 19 nt, Artificial Sequence
  Description of Artificial Sequence: Synthetic oligonucleotide
gcguuccuuaucuuugaag

SEQ ID NO: 170931 - RNA, 19 nt, Artificial Sequence
  Description of Artificial Sequence: Synthetic oligonucleotide
ggaaagcucuccugauugc

SEQ ID NO: 170932 - RNA, 19 nt, Artificial Sequence
  Description of Artificial Sequence: Synthetic oligonucleotide
ccucacccgauacucaggg

SEQ ID NO: 170933 - RNA, 19 nt, Artificial Sequence
  Description of Artificial Sequence: Synthetic oligonucleotide
caucuaccaagugguaaug

SEQ ID NO: 170934 - RNA, 19 nt, Artificial Sequence
  Description of Artificial Sequence: Synthetic oligonucleotide
uuguggugcguuccuuauc

SEQ ID NO: 170935 - RNA, 19 nt, Artificial Sequence
  Description of Artificial Sequence: Synthetic oligonucleotide
aucuggucuauuggucauc

SEQ ID NO: 170936 - RNA, 19 nt, Artificial Sequence
  Description of Artificial Sequence: Synthetic oligonucleotide
uacgaauguucgccuccga

SEQ ID NO: 170937 - RNA, 19 nt, Artificial Sequence
  Description of Artificial Sequence: Synthetic oligonucleotide
ggcacuaauaagccucuga

SEQ ID NO: 170938 - RNA, 19 nt, Artificial Sequence
  Description of Artificial Sequence: Synthetic oligonucleotide
ggggccguacaacaggaug

SEQ ID NO: 170939 - RNA, 19 nt, Artificial Sequence
  Description of Artificial Sequence: Synthetic oligonucleotide
agaacugaguacacuggaa

SEQ ID NO: 170940 - RNA, 19 nt, Artificial Sequence
  Description of Artificial Sequence: Synthetic oligonucleotide
cacuuagucuggugucuug

SEQ ID NO: 170941 - RNA, 19 nt, Artificial Sequence
  Description of Artificial Sequence: Synthetic oligonucleotide
guaacugauguccucucau

SEQ ID NO: 170942 - RNA, 19 nt, Artificial Sequence
  Description of Artificial Sequence: Synthetic oligonucleotide
acgagggaguucacugcgc

SEQ ID NO: 170943 - RNA, 19 nt, Artificial Sequence
  Description of Artificial Sequence: Synthetic oligonucleotide
caaguagccuuucgauguc

SEQ ID NO: 170944 - RNA, 19 nt, Artificial Sequence
  Description of Artificial Sequence: Synthetic oligonucleotide
ugacccacuuagaguugga

SEQ ID NO: 170945 - RNA, 19 nt, Artificial Sequence
  Description of Artificial Sequence: Synthetic oligonucleotide
aguccauauacggcuuugu

SEQ ID NO: 170946 - RNA, 19 nt, Artificial Sequence
  Description of Artificial Sequence: Synthetic oligonucleotide
ucauggccgucgacugugc

SEQ ID NO: 170947 - RNA, 19 nt, Artificial Sequence
  Description of Artificial Sequence: Synthetic oligonucleotide
uccccuuaauguccacauc

SEQ ID NO: 170948 - RNA, 19 nt, Artificial Sequence
  Description of Artificial Sequence: Synthetic oligonucleotide
cucugacgucaucccaagg

SEQ ID NO: 170949 - RNA, 19 nt, Artificial Sequence
  Description of Artificial Sequence: Synthetic oligonucleotide
ccacuugaugauuccauuc

SEQ ID NO: 170950 - RNA, 19 nt, Artificial Sequence
  Description of Artificial Sequence: Synthetic oligonucleotide
caagagggccaagaauuuc

SEQ ID NO: 170951 - RNA, 19 nt, Artificial Sequence
  Description of Artificial Sequence: Synthetic oligonucleotide
gggaccauggugauggaca

SEQ ID NO: 170952 - RNA, 19 nt, Artificial Sequence
  Description of Artificial Sequence: Synthetic oligonucleotide
cucuucggcaucagcaaaa

SEQ ID NO: 170953 - RNA, 19 nt, Artificial Sequence
  Description of Artificial Sequence: Synthetic oligonucleotide
aucauaccuaggugccccu

SEQ ID NO: 170954 - RNA, 19 nt, Artificial Sequence
  Description of Artificial Sequence: Synthetic oligonucleotide
cggugaauguuucacuuag

SEQ ID NO: 170955 - RNA, 19 nt, Artificial Sequence
  Description of Artificial Sequence: Synthetic oligonucleotide
ucauaccuaggugccccug

SEQ ID NO: 170956 - RNA, 19 nt, Artificial Sequence
  Description of Artificial Sequence: Synthetic oligonucleotide
agaggcguacggucacugu

SEQ ID NO: 170957 - RNA, 19 nt, Artificial Sequence
  Description of Artificial Sequence: Synthetic oligonucleotide
caacggugucgugaacucc

SEQ ID NO: 170958 - RNA, 19 nt, Artificial Sequence
  Description of Artificial Sequence: Synthetic oligonucleotide
agucgacccuucucaucug

SEQ ID NO: 170959 - RNA, 19 nt, Artificial Sequence
  Description of Artificial Sequence: Synthetic oligonucleotide
uggccuuuaugugucgguu

SEQ ID NO: 170960 - RNA, 19 nt, Artificial Sequence
  Description of Artificial Sequence: Synthetic oligonucleotide
ugauuccuauccagaccuu

SEQ ID NO: 170961 - RNA, 19 nt, Artificial Sequence
  Description of Artificial Sequence: Synthetic oligonucleotide
ugccuucuacuguggggac

SEQ ID NO: 170962 - RNA, 19 nt, Artificial Sequence
  Description of Artificial Sequence: Synthetic oligonucleotide
aauaagccucugacgucau

SEQ ID NO: 170963 - RNA, 19 nt, Artificial Sequence
  Description of Artificial Sequence: Synthetic oligonucleotide
gaguaaauuauaagccauu

SEQ ID NO: 170964 - RNA, 19 nt, Artificial Sequence
  Description of Artificial Sequence: Synthetic oligonucleotide
ggacacuaauuagagcuga

SEQ ID NO: 170965 - RNA, 19 nt, Artificial Sequence
  Description of Artificial Sequence: Synthetic oligonucleotide
caggucgaaggagagccuc

SEQ ID NO: 170966 - RNA, 19 nt, Artificial Sequence
  Description of Artificial Sequence: Synthetic oligonucleotide
ccgucgacugugcugcucg

SEQ ID NO: 170967 - RNA, 19 nt, Artificial Sequence
  Description of Artificial Sequence: Synthetic oligonucleotide
aucuccggaggaacacccg

SEQ ID NO: 170968 - RNA, 19 nt, Artificial Sequence
  Description of Artificial Sequence: Synthetic oligonucleotide
guggucccgaugaugagaa

SEQ ID NO: 170969 - RNA, 19 nt, Artificial Sequence
  Description of Artificial Sequence: Synthetic oligonucleotide
gccccugcggcaucaagcc

SEQ ID NO: 170970 - RNA, 19 nt, Artificial Sequence
  Description of Artificial Sequence: Synthetic oligonucleotide
cggacuuccgauuaggaaa

SEQ ID NO: 170971 - RNA, 19 nt, Artificial Sequence
  Description of Artificial Sequence: Synthetic oligonucleotide
ucgguucauggccgucgac

SEQ ID NO: 170972 - RNA, 19 nt, Artificial Sequence
  Description of Artificial Sequence: Synthetic oligonucleotide
gagggcggugaauguuuca

SEQ ID NO: 170973 - RNA, 19 nt, Artificial Sequence
  Description of Artificial Sequence: Synthetic oligonucleotide
gacuuccgauuaggaaagc

SEQ ID NO: 170974 - RNA, 19 nt, Artificial Sequence
  Description of Artificial Sequence: Synthetic oligonucleotide
gacacgggucacaggguca

SEQ ID NO: 170975 - RNA, 19 nt, Artificial Sequence
  Description of Artificial Sequence: Synthetic oligonucleotide
ccgggaaacacuaggaugu

SEQ ID NO: 170976 - RNA, 19 nt, Artificial Sequence
  Description of Artificial Sequence: Synthetic oligonucleotide
gaggcguacggucacuguu

SEQ ID NO: 170977 - RNA, 19 nt, Artificial Sequence
  Description of Artificial Sequence: Synthetic oligonucleotide
uggcacuaauaagccucug

SEQ ID NO: 170978 - RNA, 19 nt, Artificial Sequence
  Description of Artificial Sequence: Synthetic oligonucleotide
accccacuugaugauucca

SEQ ID NO: 170979 - RNA, 19 nt, Artificial Sequence
  Description of Artificial Sequence: Synthetic oligonucleotide
gcaucuaccaagugguaau

SEQ ID NO: 170980 - RNA, 19 nt, Artificial Sequence
  Description of Artificial Sequence: Synthetic oligonucleotide
cccugcggcaucaagccuc

SEQ ID NO: 170981 - RNA, 19 nt, Artificial Sequence
  Description of Artificial Sequence: Synthetic oligonucleotide
acggugucgugaacuccgg

SEQ ID NO: 170982 - RNA, 19 nt, Artificial Sequence
  Description of Artificial Sequence: Synthetic oligonucleotide
gucgaaggagagccucauc

SEQ ID NO: 170983 - RNA, 19 nt, Artificial Sequence
  Description of Artificial Sequence: Synthetic oligonucleotide
ggccguacaacaggaugcc

SEQ ID NO: 170984 - RNA, 19 nt, Artificial Sequence
  Description of Artificial Sequence: Synthetic oligonucleotide
gacgcuaaccagaggcgua

SEQ ID NO: 170985 - RNA, 19 nt, Artificial Sequence
  Description of Artificial Sequence: Synthetic oligonucleotide
gagggaguucacugcgcua

SEQ ID NO: 170986 - RNA, 19 nt, Artificial Sequence
  Description of Artificial Sequence: Synthetic oligonucleotide
cacuuagaguuggacacua

SEQ ID NO: 170987 - RNA, 19 nt, Artificial Sequence
  Description of Artificial Sequence: Synthetic oligonucleotide
aggucgaaggagagccuca

SEQ ID NO: 170988 - RNA, 19 nt, Artificial Sequence
  Description of Artificial Sequence: Synthetic oligonucleotide
gugacgaucccaggccauc

SEQ ID NO: 170989 - RNA, 19 nt, Artificial Sequence
  Description of Artificial Sequence: Synthetic oligonucleotide
ccgagaaugacgaacuaau

SEQ ID NO: 170990 - RNA, 19 nt, Artificial Sequence
  Description of Artificial Sequence: Synthetic oligonucleotide
agugacgaucccaggccau

SEQ ID NO: 170991 - RNA, 19 nt, Artificial Sequence
  Description of Artificial Sequence: Synthetic oligonucleotide
aggcguacggucacuguuu

SEQ ID NO: 170992 - RNA, 19 nt, Artificial Sequence
  Description of Artificial Sequence: Synthetic oligonucleotide
caaggagcugacccacuua

SEQ ID NO: 170993 - RNA, 19 nt, Artificial Sequence
  Description of Artificial Sequence: Synthetic oligonucleotide
cauucagcaucuugccaau

SEQ ID NO: 170994 - RNA, 19 nt, Artificial Sequence
  Description of Artificial Sequence: Synthetic oligonucleotide
ggguucucucgcauucagc

SEQ ID NO: 170995 - RNA, 19 nt, Artificial Sequence
  Description of Artificial Sequence: Synthetic oligonucleotide
gccuuucgaugucauccac

SEQ ID NO: 170996 - RNA, 19 nt, Artificial Sequence
  Description of Artificial Sequence: Synthetic oligonucleotide
acccgauacucagggucca

SEQ ID NO: 170997 - RNA, 19 nt, Artificial Sequence
  Description of Artificial Sequence: Synthetic oligonucleotide
acuuucguacuggccuuua

SEQ ID NO: 170998 - RNA, 19 nt, Artificial Sequence
  Description of Artificial Sequence: Synthetic oligonucleotide
cucuugguuugugccaaaa

SEQ ID NO: 170999 - RNA, 19 nt, Artificial Sequence
  Description of Artificial Sequence: Synthetic oligonucleotide
augcucccuaagacucauc

SEQ ID NO: 171000 - RNA, 19 nt, Artificial Sequence
  Description of Artificial Sequence: Synthetic oligonucleotide
gcggugaauguuucacuua

SEQ ID NO: 171001 - RNA, 19 nt, Artificial Sequence
  Description of Artificial Sequence: Synthetic oligonucleotide
gaggacgaugagugacgau

SEQ ID NO: 171002 - RNA, 19 nt, Artificial Sequence
  Description of Artificial Sequence: Synthetic oligonucleotide
cuuucguacuggccuuuau

SEQ ID NO: 171003 - RNA, 19 nt, Artificial Sequence
  Description of Artificial Sequence: Synthetic oligonucleotide
cagcaucuaccaaguggua

SEQ ID NO: 171004 - RNA, 19 nt, Artificial Sequence
  Description of Artificial Sequence: Synthetic oligonucleotide
cacgggucacagggucacc

SEQ ID NO: 171005 - RNA, 19 nt, Artificial Sequence
  Description of Artificial Sequence: Synthetic oligonucleotide
cuaucaaaucuggucuauu

SEQ ID NO: 171006 - RNA, 19 nt, Artificial Sequence
  Description of Artificial Sequence: Synthetic oligonucleotide
gacgaucccaggccaucuu

SEQ ID NO: 171007 - RNA, 19 nt, Artificial Sequence
  Description of Artificial Sequence: Synthetic oligonucleotide
ggugaauguuucacuuagu

SEQ ID NO: 171008 - RNA, 19 nt, Artificial Sequence
  Description of Artificial Sequence: Synthetic oligonucleotide
ccgauacucaggguccauc

SEQ ID NO: 171009 - RNA, 19 nt, Artificial Sequence
  Description of Artificial Sequence: Synthetic oligonucleotide
ccuaggugccccugcggca

SEQ ID NO: 171010 - RNA, 19 nt, Artificial Sequence
  Description of Artificial Sequence: Synthetic oligonucleotide
ccgauucucccacauauuu

SEQ ID NO: 171011 - RNA, 19 nt, Artificial Sequence
  Description of Artificial Sequence: Synthetic oligonucleotide
cuagggcagucuucccgcu

SEQ ID NO: 171012 - RNA, 19 nt, Artificial Sequence
  Description of Artificial Sequence: Synthetic oligonucleotide
gugucgguucauggccguc

SEQ ID NO: 171013 - RNA, 19 nt, Artificial Sequence
  Description of Artificial Sequence: Synthetic oligonucleotide
cucacccgauacucagggu

SEQ ID NO: 171014 - RNA, 19 nt, Artificial Sequence
  Description of Artificial Sequence: Synthetic oligonucleotide
cgacccuucucaucuggca

SEQ ID NO: 171015 - RNA, 19 nt, Artificial Sequence
  Description of Artificial Sequence: Synthetic oligonucleotide
ccguacaacaggaugccuu

SEQ ID NO: 171016 - RNA, 19 nt, Artificial Sequence
  Description of Artificial Sequence: Synthetic oligonucleotide
ccaaucugucgagccaaga

SEQ ID NO: 171017 - RNA, 19 nt, Artificial Sequence
  Description of Artificial Sequence: Synthetic oligonucleotide
cuccggugcugccagccau

SEQ ID NO: 171018 - RNA, 19 nt, Artificial Sequence
  Description of Artificial Sequence: Synthetic oligonucleotide
cgcuaaccagaggcguacg

SEQ ID NO: 171019 - RNA, 19 nt, Artificial Sequence
  Description of Artificial Sequence: Synthetic oligonucleotide
gacuaggagguggcuuguu

SEQ ID NO: 171020 - RNA, 19 nt, Artificial Sequence
  Description of Artificial Sequence: Synthetic oligonucleotide
gggaguucacugcgcuagu

SEQ ID NO: 171021 - RNA, 19 nt, Artificial Sequence
  Description of Artificial Sequence: Synthetic oligonucleotide
ggcguacggucacuguuuu

SEQ ID NO: 171022 - RNA, 19 nt, Artificial Sequence
  Description of Artificial Sequence: Synthetic oligonucleotide
guggugcguuccuuaucuu

SEQ ID NO: 171023 - RNA, 19 nt, Artificial Sequence
  Description of Artificial Sequence: Synthetic oligonucleotide
cgagaaugacgaacuaauu

SEQ ID NO: 171024 - RNA, 19 nt, Artificial Sequence
  Description of Artificial Sequence: Synthetic oligonucleotide
gccgucgacugugcugcuc

SEQ ID NO: 171025 - RNA, 19 nt, Artificial Sequence
  Description of Artificial Sequence: Synthetic oligonucleotide
cgguucauggccgucgacu

SEQ ID NO: 171026 - RNA, 19 nt, Artificial Sequence
  Description of Artificial Sequence: Synthetic oligonucleotide
ccacuuagaguuggacacu

SEQ ID NO: 171027 - RNA, 19 nt, Artificial Sequence
  Description of Artificial Sequence: Synthetic oligonucleotide
ccacuuucguacuggccuu

SEQ ID NO: 171028 - RNA, 19 nt, Artificial Sequence
  Description of Artificial Sequence: Synthetic oligonucleotide
cacuuucguacuggccuuu

SEQ ID NO: 171029 - RNA, 19 nt, Artificial Sequence
  Description of Artificial Sequence: Synthetic oligonucleotide
cgcuagucaugcugagcaa

SEQ ID NO: 171030 - RNA, 19 nt, Artificial Sequence
  Description of Artificial Sequence: Synthetic oligonucleotide
gccguacaacaggaugccu

SEQ ID NO: 171031 - RNA, 19 nt, Artificial Sequence
  Description of Artificial Sequence: Synthetic oligonucleotide
ccggaggaacacccgcugu

SEQ ID NO: 171032 - RNA, 19 nt, Artificial Sequence
  Description of Artificial Sequence: Synthetic oligonucleotide
ggccgucgacugugcugcu

SEQ ID NO: 171033 - RNA, 19 nt, Artificial Sequence
  Description of Artificial Sequence: Synthetic oligonucleotide
ccccugcggcaucaagccu

SEQ ID NO: 171034 - RNA, 19 nt, Artificial Sequence
  Description of Artificial Sequence: Synthetic oligonucleotide
cgccuccgauucucccaca

SEQ ID NO: 171035 - RNA, 19 nt, Artificial Sequence
  Description of Artificial Sequence: Synthetic oligonucleotide
cccgauacucaggguccau

SEQ ID NO: 171036 - RNA, 19 nt, Artificial Sequence
  Description of Artificial Sequence: Synthetic oligonucleotide
auaacguucaauuagagac

SEQ ID NO: 171037 - RNA, 19 nt, Artificial Sequence
  Description of Artificial Sequence: Synthetic oligonucleotide
aauaccagcaaucuaauuc

SEQ ID NO: 171038 - RNA, 19 nt, Artificial Sequence
  Description of Artificial Sequence: Synthetic oligonucleotide
aaagagauccgauuugucc

SEQ ID NO: 171039 - RNA, 19 nt, Artificial Sequence
  Description of Artificial Sequence: Synthetic oligonucleotide
ucucucaucaaauaguacg

SEQ ID NO: 171040 - RNA, 19 nt, Artificial Sequence
  Description of Artificial Sequence: Synthetic oligonucleotide
ucuuaaaugcaauagacaa

SEQ ID NO: 171041 - RNA, 19 nt, Artificial Sequence
  Description of Artificial Sequence: Synthetic oligonucleotide
ucuucuaacggucaucagg

SEQ ID NO: 171042 - RNA, 19 nt, Artificial Sequence
  Description of Artificial Sequence: Synthetic oligonucleotide
agcaaucuaauucaguugg

SEQ ID NO: 171043 - RNA, 19 nt, Artificial Sequence
  Description of Artificial Sequence: Synthetic oligonucleotide
ugaacuuaagcuacaaaag

SEQ ID NO: 171044 - RNA, 19 nt, Artificial Sequence
  Description of Artificial Sequence: Synthetic oligonucleotide
uguauaaaagccuuugaug

SEQ ID NO: 171045 - RNA, 19 nt, Artificial Sequence
  Description of Artificial Sequence: Synthetic oligonucleotide
uauaaugggaccaccaggc

SEQ ID NO: 171046 - RNA, 19 nt, Artificial Sequence
  Description of Artificial Sequence: Synthetic oligonucleotide
gagcuaaccaccuaaaggc

SEQ ID NO: 171047 - RNA, 19 nt, Artificial Sequence
  Description of Artificial Sequence: Synthetic oligonucleotide
aacaagcacaguucuagac

SEQ ID NO: 171048 - RNA, 19 nt, Artificial Sequence
  Description of Artificial Sequence: Synthetic oligonucleotide
uuauuauaagcucuuguga

SEQ ID NO: 171049 - RNA, 19 nt, Artificial Sequence
  Description of Artificial Sequence: Synthetic oligonucleotide
cauaagugugacaacaugc

SEQ ID NO: 171050 - RNA, 19 nt, Artificial Sequence
  Description of Artificial Sequence: Synthetic oligonucleotide
uguaccguccuuuauaaug

SEQ ID NO: 171051 - RNA, 19 nt, Artificial Sequence
  Description of Artificial Sequence: Synthetic oligonucleotide
aauaaugaaggaguugcuc

SEQ ID NO: 171052 - RNA, 19 nt, Artificial Sequence
  Description of Artificial Sequence: Synthetic oligonucleotide
cuugaaacuggaaccaucg

SEQ ID NO: 171053 - RNA, 19 nt, Artificial Sequence
  Description of Artificial Sequence: Synthetic oligonucleotide
uuaaguagcuucgauaagc

SEQ ID NO: 171054 - RNA, 19 nt, Artificial Sequence
  Description of Artificial Sequence: Synthetic oligonucleotide
uauuauaagcucuugugaa

SEQ ID NO: 171055 - RNA, 19 nt, Artificial Sequence
  Description of Artificial Sequence: Synthetic oligonucleotide
uuauguaaaaccugucuga

SEQ ID NO: 171056 - RNA, 19 nt, Artificial Sequence
  Description of Artificial Sequence: Synthetic oligonucleotide
uugauaauuaguacgcuuc

SEQ ID NO: 171057 - RNA, 19 nt, Artificial Sequence
  Description of Artificial Sequence: Synthetic oligonucleotide
uaucgaauagucauggaaa

SEQ ID NO: 171058 - RNA, 19 nt, Artificial Sequence
  Description of Artificial Sequence: Synthetic oligonucleotide
cugagaaucugacucaucc

SEQ ID NO: 171059 - RNA, 19 nt, Artificial Sequence
  Description of Artificial Sequence: Synthetic oligonucleotide
gacucuacuggucucaacc

SEQ ID NO: 171060 - RNA, 19 nt, Artificial Sequence
  Description of Artificial Sequence: Synthetic oligonucleotide
auuauaagcucuugugaag

SEQ ID NO: 171061 - RNA, 19 nt, Artificial Sequence
  Description of Artificial Sequence: Synthetic oligonucleotide
ucaauuagagacuuggcuu

SEQ ID NO: 171062 - RNA, 19 nt, Artificial Sequence
  Description of Artificial Sequence: Synthetic oligonucleotide
auuaguacgcuucuuuuca

SEQ ID NO: 171063 - RNA, 19 nt, Artificial Sequence
  Description of Artificial Sequence: Synthetic oligonucleotide
ggucauauaccucacagag

SEQ ID NO: 171064 - RNA, 19 nt, Artificial Sequence
  Description of Artificial Sequence: Synthetic oligonucleotide
uaaagagcuaaccaccuaa

SEQ ID NO: 171065 - RNA, 19 nt, Artificial Sequence
  Description of Artificial Sequence: Synthetic oligonucleotide
cacgauuuaaguagcuucg

SEQ ID NO: 171066 - RNA, 19 nt, Artificial Sequence
  Description of Artificial Sequence: Synthetic oligonucleotide
uugauuagcucccaaaauu

SEQ ID NO: 171067 - RNA, 19 nt, Artificial Sequence
  Description of Artificial Sequence: Synthetic oligonucleotide
uaauccauguucaccgucc

SEQ ID NO: 171068 - RNA, 19 nt, Artificial Sequence
  Description of Artificial Sequence: Synthetic oligonucleotide
ucuaacggucaucaggaug

SEQ ID NO: 171069 - RNA, 19 nt, Artificial Sequence
  Description of Artificial Sequence: Synthetic oligonucleotide
uuaugccaguuucugagcc

SEQ ID NO: 171070 - RNA, 19 nt, Artificial Sequence
  Description of Artificial Sequence: Synthetic oligonucleotide
cuuaaaugcaauagacaac

SEQ ID NO: 171071 - RNA, 19 nt, Artificial Sequence
  Description of Artificial Sequence: Synthetic oligonucleotide
aagagcuaaccaccuaaag

SEQ ID NO: 171072 - RNA, 19 nt, Artificial Sequence
  Description of Artificial Sequence: Synthetic oligonucleotide
aguagcuucgauaagcuug

SEQ ID NO: 171073 - RNA, 19 nt, Artificial Sequence
  Description of Artificial Sequence: Synthetic oligonucleotide
gcaacaauuguuuucaaac

SEQ ID NO: 171074 - RNA, 19 nt, Artificial Sequence
  Description of Artificial Sequence: Synthetic oligonucleotide
cuacccaccucuauaagag

SEQ ID NO: 171075 - RNA, 19 nt, Artificial Sequence
  Description of Artificial Sequence: Synthetic oligonucleotide
ucacgauuuaaguagcuuc

SEQ ID NO: 171076 - RNA, 19 nt, Artificial Sequence
  Description of Artificial Sequence: Synthetic oligonucleotide
cuaacggucaucaggauga

SEQ ID NO: 171077 - RNA, 19 nt, Artificial Sequence
  Description of Artificial Sequence: Synthetic oligonucleotide
ugauuagcucccaaaauua

SEQ ID NO: 171078 - RNA, 19 nt, Artificial Sequence
  Description of Artificial Sequence: Synthetic oligonucleotide
uuccugacacacaagagaa

SEQ ID NO: 171079 - RNA, 19 nt, Artificial Sequence
  Description of Artificial Sequence: Synthetic oligonucleotide
ugauaauuaguacgcuucu

SEQ ID NO: 171080 - RNA, 19 nt, Artificial Sequence
  Description of Artificial Sequence: Synthetic oligonucleotide
uaaguagcuucgauaagcu

SEQ ID NO: 171081 - RNA, 19 nt, Artificial Sequence
  Description of Artificial Sequence: Synthetic oligonucleotide
uguccgauuauguucuuga

SEQ ID NO: 171082 - RNA, 19 nt, Artificial Sequence
  Description of Artificial Sequence: Synthetic oligonucleotide
cugaauaccagcaaucuaa

SEQ ID NO: 171083 - RNA, 19 nt, Artificial Sequence
  Description of Artificial Sequence: Synthetic oligonucleotide
auaagaacuacuauguuua

SEQ ID NO: 171084 - RNA, 19 nt, Artificial Sequence
  Description of Artificial Sequence: Synthetic oligonucleotide
cugccuugaaacuggaacc

SEQ ID NO: 171085 - RNA, 19 nt, Artificial Sequence
  Description of Artificial Sequence: Synthetic oligonucleotide
caugguauucagaauccag

SEQ ID NO: 171086 - RNA, 19 nt, Artificial Sequence
  Description of Artificial Sequence: Synthetic oligonucleotide
uccuucaacaagcacaguu

SEQ ID NO: 171087 - RNA, 19 nt, Artificial Sequence
  Description of Artificial Sequence: Synthetic oligonucleotide
cauaaauggccuguguggg

SEQ ID NO: 171088 - RNA, 19 nt, Artificial Sequence
  Description of Artificial Sequence: Synthetic oligonucleotide
gauuuaaguagcuucgaua

SEQ ID NO: 171089 - RNA, 19 nt, Artificial Sequence
  Description of Artificial Sequence: Synthetic oligonucleotide
gcuucgauaagcuugauaa

SEQ ID NO: 171090 - RNA, 19 nt, Artificial Sequence
  Description of Artificial Sequence: Synthetic oligonucleotide
uaacguucaauuagagacu

SEQ ID NO: 171091 - RNA, 19 nt, Artificial Sequence
  Description of Artificial Sequence: Synthetic oligonucleotide
ucccaaaauuaucucauuc

SEQ ID NO: 171092 - RNA, 19 nt, Artificial Sequence
  Description of Artificial Sequence: Synthetic oligonucleotide
aacgagauaguugguuuuc

SEQ ID NO: 171093 - RNA, 19 nt, Artificial Sequence
  Description of Artificial Sequence: Synthetic oligonucleotide
uguuugccaaaucucgcug

SEQ ID NO: 171094 - RNA, 19 nt, Artificial Sequence
  Description of Artificial Sequence: Synthetic oligonucleotide
acauacucauauuauguaa

SEQ ID NO: 171095 - RNA, 19 nt, Artificial Sequence
  Description of Artificial Sequence: Synthetic oligonucleotide
uccgauuauguucuugagu

SEQ ID NO: 171096 - RNA, 19 nt, Artificial Sequence
  Description of Artificial Sequence: Synthetic oligonucleotide
gcauaaauggccugugugg

SEQ ID NO: 171097 - RNA, 19 nt, Artificial Sequence
  Description of Artificial Sequence: Synthetic oligonucleotide
ucuacuggucucaaccugu

SEQ ID NO: 171098 - RNA, 19 nt, Artificial Sequence
  Description of Artificial Sequence: Synthetic oligonucleotide
auaagcuugauaauuagua

SEQ ID NO: 171099 - RNA, 19 nt, Artificial Sequence
  Description of Artificial Sequence: Synthetic oligonucleotide
cuucuaacggucaucagga

SEQ ID NO: 171100 - RNA, 19 nt, Artificial Sequence
  Description of Artificial Sequence: Synthetic oligonucleotide
cuuuacugccugaagugag

SEQ ID NO: 171101 - RNA, 19 nt, Artificial Sequence
  Description of Artificial Sequence: Synthetic oligonucleotide
ucucccagccaaaaugagc

SEQ ID NO: 171102 - RNA, 19 nt, Artificial Sequence
  Description of Artificial Sequence: Synthetic oligonucleotide
aaaagagauccgauuuguc

SEQ ID NO: 171103 - RNA, 19 nt, Artificial Sequence
  Description of Artificial Sequence: Synthetic oligonucleotide
aguacguguccauaagugu

SEQ ID NO: 171104 - RNA, 19 nt, Artificial Sequence
  Description of Artificial Sequence: Synthetic oligonucleotide
auucugaauaccagcaauc

SEQ ID NO: 171105 - RNA, 19 nt, Artificial Sequence
  Description of Artificial Sequence: Synthetic oligonucleotide
cauauagccccucaucaac

SEQ ID NO: 171106 - RNA, 19 nt, Artificial Sequence
  Description of Artificial Sequence: Synthetic oligonucleotide
ugccaaaucucgcugcaug

SEQ ID NO: 171107 - RNA, 19 nt, Artificial Sequence
  Description of Artificial Sequence: Synthetic oligonucleotide
uauaagcucuugugaaggc

SEQ ID NO: 171108 - RNA, 19 nt, Artificial Sequence
  Description of Artificial Sequence: Synthetic oligonucleotide
uccuagacucuacuggucu

SEQ ID NO: 171109 - RNA, 19 nt, Artificial Sequence
  Description of Artificial Sequence: Synthetic oligonucleotide
uacuccgaguaucacuugc

SEQ ID NO: 171110 - RNA, 19 nt, Artificial Sequence
  Description of Artificial Sequence: Synthetic oligonucleotide
auaacgagauaguugguuu

SEQ ID NO: 171111 - RNA, 19 nt, Artificial Sequence
  Description of Artificial Sequence: Synthetic oligonucleotide
aagacucaugugcaaggcu

SEQ ID NO: 171112 - RNA, 19 nt, Artificial Sequence
  Description of Artificial Sequence: Synthetic oligonucleotide
gacacaaucugaaauucca

SEQ ID NO: 171113 - RNA, 19 nt, Artificial Sequence
  Description of Artificial Sequence: Synthetic oligonucleotide
auaguacguguccauaagu

SEQ ID NO: 171114 - RNA, 19 nt, Artificial Sequence
  Description of Artificial Sequence: Synthetic oligonucleotide
ugaucauggcgucagucuc

SEQ ID NO: 171115 - RNA, 19 nt, Artificial Sequence
  Description of Artificial Sequence: Synthetic oligonucleotide
aauucaguuggcagggaca

SEQ ID NO: 171116 - RNA, 19 nt, Artificial Sequence
  Description of Artificial Sequence: Synthetic oligonucleotide
uaaauggccugugugggca

SEQ ID NO: 171117 - RNA, 19 nt, Artificial Sequence
  Description of Artificial Sequence: Synthetic oligonucleotide
gaugugugacagguaaucc

SEQ ID NO: 171118 - RNA, 19 nt, Artificial Sequence
  Description of Artificial Sequence: Synthetic oligonucleotide
auagacaacauugcacucu

SEQ ID NO: 171119 - RNA, 19 nt, Artificial Sequence
  Description of Artificial Sequence: Synthetic oligonucleotide
caauuccugacacacaaga

SEQ ID NO: 171120 - RNA, 19 nt, Artificial Sequence
  Description of Artificial Sequence: Synthetic oligonucleotide
guacuuauccacccagagc

SEQ ID NO: 171121 - RNA, 19 nt, Artificial Sequence
  Description of Artificial Sequence: Synthetic oligonucleotide
caguucuagacacaaucug

SEQ ID NO: 171122 - RNA, 19 nt, Artificial Sequence
  Description of Artificial Sequence: Synthetic oligonucleotide
cauacucauauuauguaaa

SEQ ID NO: 171123 - RNA, 19 nt, Artificial Sequence
  Description of Artificial Sequence: Synthetic oligonucleotide
ugaugugugacagguaauc

SEQ ID NO: 171124 - RNA, 19 nt, Artificial Sequence
  Description of Artificial Sequence: Synthetic oligonucleotide
cuuaaucuguucaacccga

SEQ ID NO: 171125 - RNA, 19 nt, Artificial Sequence
  Description of Artificial Sequence: Synthetic oligonucleotide
uucaacccgaggucuuugg

SEQ ID NO: 171126 - RNA, 19 nt, Artificial Sequence
  Description of Artificial Sequence: Synthetic oligonucleotide
agcuacaaaagaugccuca

SEQ ID NO: 171127 - RNA, 19 nt, Artificial Sequence
  Description of Artificial Sequence: Synthetic oligonucleotide
cagcacuagucuucuaacg

SEQ ID NO: 171128 - RNA, 19 nt, Artificial Sequence
  Description of Artificial Sequence: Synthetic oligonucleotide
uuuggucauauaccucaca

SEQ ID NO: 171129 - RNA, 19 nt, Artificial Sequence
  Description of Artificial Sequence: Synthetic oligonucleotide
ucugaauaccagcaaucua

SEQ ID NO: 171130 - RNA, 19 nt, Artificial Sequence
  Description of Artificial Sequence: Synthetic oligonucleotide
cuaucgaauagucauggaa

SEQ ID NO: 171131 - RNA, 19 nt, Artificial Sequence
  Description of Artificial Sequence: Synthetic oligonucleotide
aguucuagacacaaucuga

SEQ ID NO: 171132 - RNA, 19 nt, Artificial Sequence
  Description of Artificial Sequence: Synthetic oligonucleotide
uggucauauaccucacaga

SEQ ID NO: 171133 - RNA, 19 nt, Artificial Sequence
  Description of Artificial Sequence: Synthetic oligonucleotide
cacaagugcaucucugaug

SEQ ID NO: 171134 - RNA, 19 nt, Artificial Sequence
  Description of Artificial Sequence: Synthetic oligonucleotide
cuaucccggccccauaacg

SEQ ID NO: 171135 - RNA, 19 nt, Artificial Sequence
  Description of Artificial Sequence: Synthetic oligonucleotide
agcuauuaguacucaacaa

SEQ ID NO: 171136 - RNA, 19 nt, Artificial Sequence
  Description of Artificial Sequence: Synthetic oligonucleotide
cauaacguucaauuagaga

SEQ ID NO: 171137 - RNA, 19 nt, Artificial Sequence
  Description of Artificial Sequence: Synthetic oligonucleotide
guguccauaagugugacaa

SEQ ID NO: 171138 - RNA, 19 nt, Artificial Sequence
  Description of Artificial Sequence: Synthetic oligonucleotide
guacguguccauaagugug

SEQ ID NO: 171139 - RNA, 19 nt, Artificial Sequence
  Description of Artificial Sequence: Synthetic oligonucleotide
uuccacugugcccagacuu

SEQ ID NO: 171140 - RNA, 19 nt, Artificial Sequence
  Description of Artificial Sequence: Synthetic oligonucleotide
aggccaugaggccucaaag

SEQ ID NO: 171141 - RNA, 19 nt, Artificial Sequence
  Description of Artificial Sequence: Synthetic oligonucleotide
uacauggagguaguucucc

SEQ ID NO: 171142 - RNA, 19 nt, Artificial Sequence
  Description of Artificial Sequence: Synthetic oligonucleotide
uccauaagugugacaacau

SEQ ID NO: 171143 - RNA, 19 nt, Artificial Sequence
  Description of Artificial Sequence: Synthetic oligonucleotide
guguuguccaaugauucag

SEQ ID NO: 171144 - RNA, 19 nt, Artificial Sequence
  Description of Artificial Sequence: Synthetic oligonucleotide
ugggcaaaagacuccaguu

SEQ ID NO: 171145 - RNA, 19 nt, Artificial Sequence
  Description of Artificial Sequence: Synthetic oligonucleotide
uucucucaucaaauaguac

SEQ ID NO: 171146 - RNA, 19 nt, Artificial Sequence
  Description of Artificial Sequence: Synthetic oligonucleotide
ggcauaaauggccugugug

SEQ ID NO: 171147 - RNA, 19 nt, Artificial Sequence
  Description of Artificial Sequence: Synthetic oligonucleotide
gucauauaccucacagagg

SEQ ID NO: 171148 - RNA, 19 nt, Artificial Sequence
  Description of Artificial Sequence: Synthetic oligonucleotide
augguauucagaauccagu

SEQ ID NO: 171149 - RNA, 19 nt, Artificial Sequence
  Description of Artificial Sequence: Synthetic oligonucleotide
aagaacuacuauguuuaaa

SEQ ID NO: 171150 - RNA, 19 nt, Artificial Sequence
  Description of Artificial Sequence: Synthetic oligonucleotide
gaacucuaucacaggacag

SEQ ID NO: 171151 - RNA, 19 nt, Artificial Sequence
  Description of Artificial Sequence: Synthetic oligonucleotide
agaaucugacucauccuag

SEQ ID NO: 171152 - RNA, 19 nt, Artificial Sequence
  Description of Artificial Sequence: Synthetic oligonucleotide
acgaagauacaaaacaaua

SEQ ID NO: 171153 - RNA, 19 nt, Artificial Sequence
  Description of Artificial Sequence: Synthetic oligonucleotide
uguucaccguccuuuugcu

SEQ ID NO: 171154 - RNA, 19 nt, Artificial Sequence
  Description of Artificial Sequence: Synthetic oligonucleotide
aguaaguucuaagacucau

SEQ ID NO: 171155 - RNA, 19 nt, Artificial Sequence
  Description of Artificial Sequence: Synthetic oligonucleotide
uacccaccucuauaagagg

SEQ ID NO: 171156 - RNA, 19 nt, Artificial Sequence
  Description of Artificial Sequence: Synthetic oligonucleotide
gcugaauuccuucuacccc

SEQ ID NO: 171157 - RNA, 19 nt, Artificial Sequence
  Description of Artificial Sequence: Synthetic oligonucleotide
ugagccugagaaucugacu

SEQ ID NO: 171158 - RNA, 19 nt, Artificial Sequence
  Description of Artificial Sequence: Synthetic oligonucleotide
gacuagucaagaggguaag

SEQ ID NO: 171159 - RNA, 19 nt, Artificial Sequence
  Description of Artificial Sequence: Synthetic oligonucleotide
cacuagucuucuaacgguc

SEQ ID NO: 171160 - RNA, 19 nt, Artificial Sequence
  Description of Artificial Sequence: Synthetic oligonucleotide
ugccuugaaacuggaacca

SEQ ID NO: 171161 - RNA, 19 nt, Artificial Sequence
  Description of Artificial Sequence: Synthetic oligonucleotide
ucaacccgaggucuuugga

SEQ ID NO: 171162 - RNA, 19 nt, Artificial Sequence
  Description of Artificial Sequence: Synthetic oligonucleotide
gcaauagacaacauugcac

SEQ ID NO: 171163 - RNA, 19 nt, Artificial Sequence
  Description of Artificial Sequence: Synthetic oligonucleotide
ccaaggguagcacaagugc

SEQ ID NO: 171164 - RNA, 19 nt, Artificial Sequence
  Description of Artificial Sequence: Synthetic oligonucleotide
caaggguagcacaagugca

SEQ ID NO: 171165 - RNA, 19 nt, Artificial Sequence
  Description of Artificial Sequence: Synthetic oligonucleotide
ugugaucccugcacuacau

SEQ ID NO: 171166 - RNA, 19 nt, Artificial Sequence
  Description of Artificial Sequence: Synthetic oligonucleotide
ggcuaguuagacugucugg

SEQ ID NO: 171167 - RNA, 19 nt, Artificial Sequence
  Description of Artificial Sequence: Synthetic oligonucleotide
ugugcccagacuugcuaug

SEQ ID NO: 171168 - RNA, 19 nt, Artificial Sequence
  Description of Artificial Sequence: Synthetic oligonucleotide
uaacgagauaguugguuuu

SEQ ID NO: 171169 - RNA, 19 nt, Artificial Sequence
  Description of Artificial Sequence: Synthetic oligonucleotide
agaccagcuggacuaguca

SEQ ID NO: 171170 - RNA, 19 nt, Artificial Sequence
  Description of Artificial Sequence: Synthetic oligonucleotide
ugcucacauuuccuguuac

SEQ ID NO: 171171 - RNA, 19 nt, Artificial Sequence
  Description of Artificial Sequence: Synthetic oligonucleotide
gaagugaguauggggucag

SEQ ID NO: 171172 - RNA, 19 nt, Artificial Sequence
  Description of Artificial Sequence: Synthetic oligonucleotide
ugugggcaaaagacuccag

SEQ ID NO: 171173 - RNA, 19 nt, Artificial Sequence
  Description of Artificial Sequence: Synthetic oligonucleotide
aaagagcuaaccaccuaaa

SEQ ID NO: 171174 - RNA, 19 nt, Artificial Sequence
  Description of Artificial Sequence: Synthetic oligonucleotide
ggacuaugaacucuaucac

SEQ ID NO: 171175 - RNA, 19 nt, Artificial Sequence
  Description of Artificial Sequence: Synthetic oligonucleotide
ggaccuccuuauuauaagc

SEQ ID NO: 171176 - RNA, 19 nt, Artificial Sequence
  Description of Artificial Sequence: Synthetic oligonucleotide
uccuuauuauaagcucuug

SEQ ID NO: 171177 - RNA, 19 nt, Artificial Sequence
  Description of Artificial Sequence: Synthetic oligonucleotide
uggacuagucaagagggua

SEQ ID NO: 171178 - RNA, 19 nt, Artificial Sequence
  Description of Artificial Sequence: Synthetic oligonucleotide
ccuuuugaguucaauggug

SEQ ID NO: 171179 - RNA, 19 nt, Artificial Sequence
  Description of Artificial Sequence: Synthetic oligonucleotide
aaggguagcacaagugcau

SEQ ID NO: 171180 - RNA, 19 nt, Artificial Sequence
  Description of Artificial Sequence: Synthetic oligonucleotide
aaguagcuucgauaagcuu

SEQ ID NO: 171181 - RNA, 19 nt, Artificial Sequence
  Description of Artificial Sequence: Synthetic oligonucleotide
guaauccauguucaccguc

SEQ ID NO: 171182 - RNA, 19 nt, Artificial Sequence
  Description of Artificial Sequence: Synthetic oligonucleotide
ccccauaacguucaauuag

SEQ ID NO: 171183 - RNA, 19 nt, Artificial Sequence
  Description of Artificial Sequence: Synthetic oligonucleotide
uguccauaagugugacaac

SEQ ID NO: 171184 - RNA, 19 nt, Artificial Sequence
  Description of Artificial Sequence: Synthetic oligonucleotide
uggcauaaauggccugugu

SEQ ID NO: 171185 - RNA, 19 nt, Artificial Sequence
  Description of Artificial Sequence: Synthetic oligonucleotide
caaucuaauucaguuggca

SEQ ID NO: 171186 - RNA, 19 nt, Artificial Sequence
  Description of Artificial Sequence: Synthetic oligonucleotide
guccgauuauguucuugag

SEQ ID NO: 171187 - RNA, 19 nt, Artificial Sequence
  Description of Artificial Sequence: Synthetic oligonucleotide
ucccuagaccagcuggacu

SEQ ID NO: 171188 - RNA, 19 nt, Artificial Sequence
  Description of Artificial Sequence: Synthetic oligonucleotide
guagcuucgauaagcuuga

SEQ ID NO: 171189 - RNA, 19 nt, Artificial Sequence
  Description of Artificial Sequence: Synthetic oligonucleotide
aguccuacccaccucuaua

SEQ ID NO: 171190 - RNA, 19 nt, Artificial Sequence
  Description of Artificial Sequence: Synthetic oligonucleotide
agguuauguucauggcuca

SEQ ID NO: 171191 - RNA, 19 nt, Artificial Sequence
  Description of Artificial Sequence: Synthetic oligonucleotide
aguaggacuaugaacucua

SEQ ID NO: 171192 - RNA, 19 nt, Artificial Sequence
  Description of Artificial Sequence: Synthetic oligonucleotide
gguuuucauucccuagacc

SEQ ID NO: 171193 - RNA, 19 nt, Artificial Sequence
  Description of Artificial Sequence: Synthetic oligonucleotide
ccguccuuuauaaugggac

SEQ ID NO: 171194 - RNA, 19 nt, Artificial Sequence
  Description of Artificial Sequence: Synthetic oligonucleotide
auauagccccucaucaacu

SEQ ID NO: 171195 - RNA, 19 nt, Artificial Sequence
  Description of Artificial Sequence: Synthetic oligonucleotide
gagagcuggcuaguuagac

SEQ ID NO: 171196 - RNA, 19 nt, Artificial Sequence
  Description of Artificial Sequence: Synthetic oligonucleotide
caaaugucaguccuuccaa

SEQ ID NO: 171197 - RNA, 19 nt, Artificial Sequence
  Description of Artificial Sequence: Synthetic oligonucleotide
aguuuugcuugcuccggau

SEQ ID NO: 171198 - RNA, 19 nt, Artificial Sequence
  Description of Artificial Sequence: Synthetic oligonucleotide
acaugguuacucuggcaaa

SEQ ID NO: 171199 - RNA, 19 nt, Artificial Sequence
  Description of Artificial Sequence: Synthetic oligonucleotide
uccgaguaucacuugcauu

SEQ ID NO: 171200 - RNA, 19 nt, Artificial Sequence
  Description of Artificial Sequence: Synthetic oligonucleotide
ggcuuguacuuauccaccc

SEQ ID NO: 171201 - RNA, 19 nt, Artificial Sequence
  Description of Artificial Sequence: Synthetic oligonucleotide
uugcucacauuuccuguua

SEQ ID NO: 171202 - RNA, 19 nt, Artificial Sequence
  Description of Artificial Sequence: Synthetic oligonucleotide
ugacucauccuagacucua

SEQ ID NO: 171203 - RNA, 19 nt, Artificial Sequence
  Description of Artificial Sequence: Synthetic oligonucleotide
cuugauaauuaguacgcuu

SEQ ID NO: 171204 - RNA, 19 nt, Artificial Sequence
  Description of Artificial Sequence: Synthetic oligonucleotide
cugccgcccggcuuaaaag

SEQ ID NO: 171205 - RNA, 19 nt, Artificial Sequence
  Description of Artificial Sequence: Synthetic oligonucleotide
agcagcuauuaguacucaa

SEQ ID NO: 171206 - RNA, 19 nt, Artificial Sequence
  Description of Artificial Sequence: Synthetic oligonucleotide
gcagcuauuaguacucaac

SEQ ID NO: 171207 - RNA, 19 nt, Artificial Sequence
  Description of Artificial Sequence: Synthetic oligonucleotide
gccucuuaaaugcaauaga

SEQ ID NO: 171208 - RNA, 19 nt, Artificial Sequence
  Description of Artificial Sequence: Synthetic oligonucleotide
agcuucgauaagcuugaua

SEQ ID NO: 171209 - RNA, 19 nt, Artificial Sequence
  Description of Artificial Sequence: Synthetic oligonucleotide
ccauaagugugacaacaug

SEQ ID NO: 171210 - RNA, 19 nt, Artificial Sequence
  Description of Artificial Sequence: Synthetic oligonucleotide
acgauuuaaguagcuucga

SEQ ID NO: 171211 - RNA, 19 nt, Artificial Sequence
  Description of Artificial Sequence: Synthetic oligonucleotide
uguccgcuaucccggcccc

SEQ ID NO: 171212 - RNA, 19 nt, Artificial Sequence
  Description of Artificial Sequence: Synthetic oligonucleotide
ggacuguccgcuaucccgg

SEQ ID NO: 171213 - RNA, 19 nt, Artificial Sequence
  Description of Artificial Sequence: Synthetic oligonucleotide
aacuaaaaucugacuccaa

SEQ ID NO: 171214 - RNA, 19 nt, Artificial Sequence
  Description of Artificial Sequence: Synthetic oligonucleotide
acaguggaccaagaacacu

SEQ ID NO: 171215 - RNA, 19 nt, Artificial Sequence
  Description of Artificial Sequence: Synthetic oligonucleotide
cuugauuagcucccaaaau

SEQ ID NO: 171216 - RNA, 19 nt, Artificial Sequence
  Description of Artificial Sequence: Synthetic oligonucleotide
ugaugugggcuuguacuua

SEQ ID NO: 171217 - RNA, 19 nt, Artificial Sequence
  Description of Artificial Sequence: Synthetic oligonucleotide
gaccuccuuauuauaagcu

SEQ ID NO: 171218 - RNA, 19 nt, Artificial Sequence
  Description of Artificial Sequence: Synthetic oligonucleotide
uucuuacuccgaguaucac

SEQ ID NO: 171219 - RNA, 19 nt, Artificial Sequence
  Description of Artificial Sequence: Synthetic oligonucleotide
gugaucccugcacuacaug

SEQ ID NO: 171220 - RNA, 19 nt, Artificial Sequence
  Description of Artificial Sequence: Synthetic oligonucleotide
acuagucaagaggguaagu

SEQ ID NO: 171221 - RNA, 19 nt, Artificial Sequence
  Description of Artificial Sequence: Synthetic oligonucleotide
accaccuaaaggccagguu

SEQ ID NO: 171222 - RNA, 19 nt, Artificial Sequence
  Description of Artificial Sequence: Synthetic oligonucleotide
uucuaacggucaucaggau

SEQ ID NO: 171223 - RNA, 19 nt, Artificial Sequence
  Description of Artificial Sequence: Synthetic oligonucleotide
agugagugccuuacuuugu

SEQ ID NO: 171224 - RNA, 19 nt, Artificial Sequence
  Description of Artificial Sequence: Synthetic oligonucleotide
caacccgaggucuuuggaa

SEQ ID NO: 171225 - RNA, 19 nt, Artificial Sequence
  Description of Artificial Sequence: Synthetic oligonucleotide
ccuugaaacuggaaccauc

SEQ ID NO: 171226 - RNA, 19 nt, Artificial Sequence
  Description of Artificial Sequence: Synthetic oligonucleotide
gcuguaccguccuuuauaa

SEQ ID NO: 171227 - RNA, 19 nt, Artificial Sequence
  Description of Artificial Sequence: Synthetic oligonucleotide
uuagacugucuggcuguac

SEQ ID NO: 171228 - RNA, 19 nt, Artificial Sequence
  Description of Artificial Sequence: Synthetic oligonucleotide
acuccgaguaucacuugca

SEQ ID NO: 171229 - RNA, 19 nt, Artificial Sequence
  Description of Artificial Sequence: Synthetic oligonucleotide
cauauaccucacagaggca

SEQ ID NO: 171230 - RNA, 19 nt, Artificial Sequence
  Description of Artificial Sequence: Synthetic oligonucleotide
gggccuaucgaauagucau

SEQ ID NO: 171231 - RNA, 19 nt, Artificial Sequence
  Description of Artificial Sequence: Synthetic oligonucleotide
ggcugcuuuguauuaaggu

SEQ ID NO: 171232 - RNA, 19 nt, Artificial Sequence
  Description of Artificial Sequence: Synthetic oligonucleotide
cuaguuagacugucuggcu

SEQ ID NO: 171233 - RNA, 19 nt, Artificial Sequence
  Description of Artificial Sequence: Synthetic oligonucleotide
ucccggccccauaacgaga

SEQ ID NO: 171234 - RNA, 19 nt, Artificial Sequence
  Description of Artificial Sequence: Synthetic oligonucleotide
guucaacccgaggucuuug

SEQ ID NO: 171235 - RNA, 19 nt, Artificial Sequence
  Description of Artificial Sequence: Synthetic oligonucleotide
cuguccgauuauguucuug

SEQ ID NO: 171236 - RNA, 19 nt, Artificial Sequence
  Description of Artificial Sequence: Synthetic oligonucleotide
gacucaugugcaaggcuaa

SEQ ID NO: 171237 - RNA, 19 nt, Artificial Sequence
  Description of Artificial Sequence: Synthetic oligonucleotide
gauaauuaguacgcuucuu

SEQ ID NO: 171238 - RNA, 19 nt, Artificial Sequence
  Description of Artificial Sequence: Synthetic oligonucleotide
cugugaucccugcacuaca

SEQ ID NO: 171239 - RNA, 19 nt, Artificial Sequence
  Description of Artificial Sequence: Synthetic oligonucleotide
uagacucuacuggucucaa

SEQ ID NO: 171240 - RNA, 19 nt, Artificial Sequence
  Description of Artificial Sequence: Synthetic oligonucleotide
ugccuguagaugagugcuu

SEQ ID NO: 171241 - RNA, 19 nt, Artificial Sequence
  Description of Artificial Sequence: Synthetic oligonucleotide
ccaccucuauaagaggugc

SEQ ID NO: 171242 - RNA, 19 nt, Artificial Sequence
  Description of Artificial Sequence: Synthetic oligonucleotide
ccuguagaugagugcuucc

SEQ ID NO: 171243 - RNA, 19 nt, Artificial Sequence
  Description of Artificial Sequence: Synthetic oligonucleotide
ccaccuaaaggccagguua

SEQ ID NO: 171244 - RNA, 19 nt, Artificial Sequence
  Description of Artificial Sequence: Synthetic oligonucleotide
gcaaucuaauucaguuggc

SEQ ID NO: 171245 - RNA, 19 nt, Artificial Sequence
  Description of Artificial Sequence: Synthetic oligonucleotide
accuaaaggccagguuaug

SEQ ID NO: 171246 - RNA, 19 nt, Artificial Sequence
  Description of Artificial Sequence: Synthetic oligonucleotide
gucucuauugcauccuguu

SEQ ID NO: 171247 - RNA, 19 nt, Artificial Sequence
  Description of Artificial Sequence: Synthetic oligonucleotide
ccaauuccugacacacaag

SEQ ID NO: 171248 - RNA, 19 nt, Artificial Sequence
  Description of Artificial Sequence: Synthetic oligonucleotide
cauaacgagauaguugguu

SEQ ID NO: 171249 - RNA, 19 nt, Artificial Sequence
  Description of Artificial Sequence: Synthetic oligonucleotide
caccucuauaagaggugca

SEQ ID NO: 171250 - RNA, 19 nt, Artificial Sequence
  Description of Artificial Sequence: Synthetic oligonucleotide
accguccuuuauaauggga

SEQ ID NO: 171251 - RNA, 19 nt, Artificial Sequence
  Description of Artificial Sequence: Synthetic oligonucleotide
ugggaccuucacgauuuaa

SEQ ID NO: 171252 - RNA, 19 nt, Artificial Sequence
  Description of Artificial Sequence: Synthetic oligonucleotide
ggcuguaccguccuuuaua

SEQ ID NO: 171253 - RNA, 19 nt, Artificial Sequence
  Description of Artificial Sequence: Synthetic oligonucleotide
ccaugggcuuuacauggag

SEQ ID NO: 171254 - RNA, 19 nt, Artificial Sequence
  Description of Artificial Sequence: Synthetic oligonucleotide
auggugcuacacaugguua

SEQ ID NO: 171255 - RNA, 19 nt, Artificial Sequence
  Description of Artificial Sequence: Synthetic oligonucleotide
ccgaguaucacuugcauuu

SEQ ID NO: 171256 - RNA, 19 nt, Artificial Sequence
  Description of Artificial Sequence: Synthetic oligonucleotide
ccguucaauggacuccagc

SEQ ID NO: 171257 - RNA, 19 nt, Artificial Sequence
  Description of Artificial Sequence: Synthetic oligonucleotide
aggcuaaguccugaacaau

SEQ ID NO: 171258 - RNA, 19 nt, Artificial Sequence
  Description of Artificial Sequence: Synthetic oligonucleotide
cauggcgucagucucuauu

SEQ ID NO: 171259 - RNA, 19 nt, Artificial Sequence
  Description of Artificial Sequence: Synthetic oligonucleotide
ccuuauuauaagcucuugu

SEQ ID NO: 171260 - RNA, 19 nt, Artificial Sequence
  Description of Artificial Sequence: Synthetic oligonucleotide
caaaucucgcugcauguuu

SEQ ID NO: 171261 - RNA, 19 nt, Artificial Sequence
  Description of Artificial Sequence: Synthetic oligonucleotide
gcacuagucuucuaacggu

SEQ ID NO: 171262 - RNA, 19 nt, Artificial Sequence
  Description of Artificial Sequence: Synthetic oligonucleotide
cacgccugugaucacaaau

SEQ ID NO: 171263 - RNA, 19 nt, Artificial Sequence
  Description of Artificial Sequence: Synthetic oligonucleotide
gguaagugaaaagcagcua

SEQ ID NO: 171264 - RNA, 19 nt, Artificial Sequence
  Description of Artificial Sequence: Synthetic oligonucleotide
ccuagacucuacuggucuc

SEQ ID NO: 171265 - RNA, 19 nt, Artificial Sequence
  Description of Artificial Sequence: Synthetic oligonucleotide
caccuaaaggccagguuau

SEQ ID NO: 171266 - RNA, 19 nt, Artificial Sequence
  Description of Artificial Sequence: Synthetic oligonucleotide
uccgcuaucccggccccau

SEQ ID NO: 171267 - RNA, 19 nt, Artificial Sequence
  Description of Artificial Sequence: Synthetic oligonucleotide
cuccuuauuauaagcucuu

SEQ ID NO: 171268 - RNA, 19 nt, Artificial Sequence
  Description of Artificial Sequence: Synthetic oligonucleotide
cccuagaccagcuggacua

SEQ ID NO: 171269 - RNA, 19 nt, Artificial Sequence
  Description of Artificial Sequence: Synthetic oligonucleotide
gaaauuccaguaggacuau

SEQ ID NO: 171270 - RNA, 19 nt, Artificial Sequence
  Description of Artificial Sequence: Synthetic oligonucleotide
gccaaaucucgcugcaugu

SEQ ID NO: 171271 - RNA, 19 nt, Artificial Sequence
  Description of Artificial Sequence: Synthetic oligonucleotide
gcuaucccggccccauaac

SEQ ID NO: 171272 - RNA, 19 nt, Artificial Sequence
  Description of Artificial Sequence: Synthetic oligonucleotide
gcgcucacuguuguaaaga

SEQ ID NO: 171273 - RNA, 19 nt, Artificial Sequence
  Description of Artificial Sequence: Synthetic oligonucleotide
ccucaucaacucuccagga

SEQ ID NO: 171274 - RNA, 19 nt, Artificial Sequence
  Description of Artificial Sequence: Synthetic oligonucleotide
cucuaucacaggacagcau

SEQ ID NO: 171275 - RNA, 19 nt, Artificial Sequence
  Description of Artificial Sequence: Synthetic oligonucleotide
ggggccuaucgaauaguca

SEQ ID NO: 171276 - RNA, 19 nt, Artificial Sequence
  Description of Artificial Sequence: Synthetic oligonucleotide
ggguagcacaagugcaucu

SEQ ID NO: 171277 - RNA, 19 nt, Artificial Sequence
  Description of Artificial Sequence: Synthetic oligonucleotide
cggccccauaacgagauag

SEQ ID NO: 171278 - RNA, 19 nt, Artificial Sequence
  Description of Artificial Sequence: Synthetic oligonucleotide
cuccgaguaucacuugcau

SEQ ID NO: 171279 - RNA, 19 nt, Artificial Sequence
  Description of Artificial Sequence: Synthetic oligonucleotide
gcuugauaauuaguacgcu

SEQ ID NO: 171280 - RNA, 19 nt, Artificial Sequence
  Description of Artificial Sequence: Synthetic oligonucleotide
cagcacgccugugaucaca

SEQ ID NO: 171281 - RNA, 19 nt, Artificial Sequence
  Description of Artificial Sequence: Synthetic oligonucleotide
gcacaagugcaucucugau

SEQ ID NO: 171282 - RNA, 19 nt, Artificial Sequence
  Description of Artificial Sequence: Synthetic oligonucleotide
uagcuucgauaagcuugau

SEQ ID NO: 171283 - RNA, 19 nt, Artificial Sequence
  Description of Artificial Sequence: Synthetic oligonucleotide
agacaacauugcacucuua

SEQ ID NO: 171284 - RNA, 19 nt, Artificial Sequence
  Description of Artificial Sequence: Synthetic oligonucleotide
guaggacuaugaacucuau

SEQ ID NO: 171285 - RNA, 19 nt, Artificial Sequence
  Description of Artificial Sequence: Synthetic oligonucleotide
ugucugccgcccggcuuaa

SEQ ID NO: 171286 - RNA, 19 nt, Artificial Sequence
  Description of Artificial Sequence: Synthetic oligonucleotide
cuggacuuacagacuucuu

SEQ ID NO: 171287 - RNA, 19 nt, Artificial Sequence
  Description of Artificial Sequence: Synthetic oligonucleotide
cuguaccguccuuuauaau

SEQ ID NO: 171288 - RNA, 19 nt, Artificial Sequence
  Description of Artificial Sequence: Synthetic oligonucleotide
gcccggcuuaaaagcauca

SEQ ID NO: 171289 - RNA, 19 nt, Artificial Sequence
  Description of Artificial Sequence: Synthetic oligonucleotide
ccgaggucuuuggaaacga

SEQ ID NO: 171290 - RNA, 19 nt, Artificial Sequence
  Description of Artificial Sequence: Synthetic oligonucleotide
gccaugggcuuuacaugga

SEQ ID NO: 171291 - RNA, 19 nt, Artificial Sequence
  Description of Artificial Sequence: Synthetic oligonucleotide
cgcccggcuuaaaagcauc

SEQ ID NO: 171292 - RNA, 19 nt, Artificial Sequence
  Description of Artificial Sequence: Synthetic oligonucleotide
gcguagcaguuuguuggca

SEQ ID NO: 171293 - RNA, 19 nt, Artificial Sequence
  Description of Artificial Sequence: Synthetic oligonucleotide
ggccccauaacgagauagu

SEQ ID NO: 171294 - RNA, 19 nt, Artificial Sequence
  Description of Artificial Sequence: Synthetic oligonucleotide
ccucugagcgcucacuguu

SEQ ID NO: 171295 - RNA, 19 nt, Artificial Sequence
  Description of Artificial Sequence: Synthetic oligonucleotide
ccagcacgccugugaucac

SEQ ID NO: 171296 - RNA, 19 nt, Artificial Sequence
  Description of Artificial Sequence: Synthetic oligonucleotide
ccauaacgagauaguuggu

SEQ ID NO: 171297 - RNA, 19 nt, Artificial Sequence
  Description of Artificial Sequence: Synthetic oligonucleotide
gccccauaacgagauaguu

SEQ ID NO: 171298 - RNA, 19 nt, Artificial Sequence
  Description of Artificial Sequence: Synthetic oligonucleotide
cccggcuuaaaagcaucaa

SEQ ID NO: 171299 - RNA, 19 nt, Artificial Sequence
  Description of Artificial Sequence: Synthetic oligonucleotide
cccggccccauaacgagau

SEQ ID NO: 171300 - RNA, 19 nt, Artificial Sequence
  Description of Artificial Sequence: Synthetic oligonucleotide
cgaguaucacuugcauuua

SEQ ID NO: 171301 - RNA, 19 nt, Artificial Sequence
  Description of Artificial Sequence: Synthetic oligonucleotide
gucugccgcccggcuuaaa

SEQ ID NO: 171302 - RNA, 19 nt, Artificial Sequence
  Description of Artificial Sequence: Synthetic oligonucleotide
ccgcuaucccggccccaua

SEQ ID NO: 171303 - RNA, 19 nt, Artificial Sequence
  Description of Artificial Sequence: Synthetic oligonucleotide
ccggccccauaacgagaua

SEQ ID NO: 171304 - RNA, 19 nt, Artificial Sequence
  Description of Artificial Sequence: Synthetic oligonucleotide
aacuaugauacugauaagc

SEQ ID NO: 171305 - RNA, 19 nt, Artificial Sequence
  Description of Artificial Sequence: Synthetic oligonucleotide
aaagcauccgaucaucacc

SEQ ID NO: 171306 - RNA, 19 nt, Artificial Sequence
  Description of Artificial Sequence: Synthetic oligonucleotide
uacaguaugaggcuaacag

SEQ ID NO: 171307 - RNA, 19 nt, Artificial Sequence
  Description of Artificial Sequence: Synthetic oligonucleotide
aauccgaagcaauccaucc

SEQ ID NO: 171308 - RNA, 19 nt, Artificial Sequence
  Description of Artificial Sequence: Synthetic oligonucleotide
agaauaagcaucccuauuc

SEQ ID NO: 171309 - RNA, 19 nt, Artificial Sequence
  Description of Artificial Sequence: Synthetic oligonucleotide
aggauuaacaacaacaagg

SEQ ID NO: 171310 - RNA, 19 nt, Artificial Sequence
  Description of Artificial Sequence: Synthetic oligonucleotide
ucuccuuuagaacaaaaug

SEQ ID NO: 171311 - RNA, 19 nt, Artificial Sequence
  Description of Artificial Sequence: Synthetic oligonucleotide
uuuauuugacuuuugggga

SEQ ID NO: 171312 - RNA, 19 nt, Artificial Sequence
  Description of Artificial Sequence: Synthetic oligonucleotide
aaagaaugauacuguuggc

SEQ ID NO: 171313 - RNA, 19 nt, Artificial Sequence
  Description of Artificial Sequence: Synthetic oligonucleotide
uauacuaguauagaguaug

SEQ ID NO: 171314 - RNA, 19 nt, Artificial Sequence
  Description of Artificial Sequence: Synthetic oligonucleotide
auagcgguaaaauuuaaca

SEQ ID NO: 171315 - RNA, 19 nt, Artificial Sequence
  Description of Artificial Sequence: Synthetic oligonucleotide
uguuauacauguugcagag

SEQ ID NO: 171316 - RNA, 19 nt, Artificial Sequence
  Description of Artificial Sequence: Synthetic oligonucleotide
ugaggcguuaaaucuaugg

SEQ ID NO: 171317 - RNA, 19 nt, Artificial Sequence
  Description of Artificial Sequence: Synthetic oligonucleotide
acaauugacaaaugggaag

SEQ ID NO: 171318 - RNA, 19 nt, Artificial Sequence
  Description of Artificial Sequence: Synthetic oligonucleotide
uggcauuaagaccugacag

SEQ ID NO: 171319 - RNA, 19 nt, Artificial Sequence
  Description of Artificial Sequence: Synthetic oligonucleotide
gauccucuaauauauuugc

SEQ ID NO: 171320 - RNA, 19 nt, Artificial Sequence
  Description of Artificial Sequence: Synthetic oligonucleotide
agaaugauacuguuggcag

SEQ ID NO: 171321 - RNA, 19 nt, Artificial Sequence
  Description of Artificial Sequence: Synthetic oligonucleotide
uucaauaucaucagagcuc

SEQ ID NO: 171322 - RNA, 19 nt, Artificial Sequence
  Description of Artificial Sequence: Synthetic oligonucleotide
caaaccucuguauauauac

SEQ ID NO: 171323 - RNA, 19 nt, Artificial Sequence
  Description of Artificial Sequence: Synthetic oligonucleotide
agaacaaaaugugaucagc

SEQ ID NO: 171324 - RNA, 19 nt, Artificial Sequence
  Description of Artificial Sequence: Synthetic oligonucleotide
ucauacucauguauacugg

SEQ ID NO: 171325 - RNA, 19 nt, Artificial Sequence
  Description of Artificial Sequence: Synthetic oligonucleotide
aggcguuaaaucuauggac

SEQ ID NO: 171326 - RNA, 19 nt, Artificial Sequence
  Description of Artificial Sequence: Synthetic oligonucleotide
cuaauauauuugcugaaag

SEQ ID NO: 171327 - RNA, 19 nt, Artificial Sequence
  Description of Artificial Sequence: Synthetic oligonucleotide
uccucuaauauauuugcug

SEQ ID NO: 171328 - RNA, 19 nt, Artificial Sequence
  Description of Artificial Sequence: Synthetic oligonucleotide
guaaaauuuaacacuuggg

SEQ ID NO: 171329 - RNA, 19 nt, Artificial Sequence
  Description of Artificial Sequence: Synthetic oligonucleotide
acuaguauagaguaugaaa

SEQ ID NO: 171330 - RNA, 19 nt, Artificial Sequence
  Description of Artificial Sequence: Synthetic oligonucleotide
aaagugguggguguaagag

SEQ ID NO: 171331 - RNA, 19 nt, Artificial Sequence
  Description of Artificial Sequence: Synthetic oligonucleotide
aagcaucccuauuccagcc

SEQ ID NO: 171332 - RNA, 19 nt, Artificial Sequence
  Description of Artificial Sequence: Synthetic oligonucleotide
aagcaaguauaucguauag

SEQ ID NO: 171333 - RNA, 19 nt, Artificial Sequence
  Description of Artificial Sequence: Synthetic oligonucleotide
aagaaugauacuguuggca

SEQ ID NO: 171334 - RNA, 19 nt, Artificial Sequence
  Description of Artificial Sequence: Synthetic oligonucleotide
cacuaugagagaaucaaac

SEQ ID NO: 171335 - RNA, 19 nt, Artificial Sequence
  Description of Artificial Sequence: Synthetic oligonucleotide
uaagcuugaauguuauaca

SEQ ID NO: 171336 - RNA, 19 nt, Artificial Sequence
  Description of Artificial Sequence: Synthetic oligonucleotide
aagccaucgaugaugugcc

SEQ ID NO: 171337 - RNA, 19 nt, Artificial Sequence
  Description of Artificial Sequence: Synthetic oligonucleotide
aaauauauggucagaggca

SEQ ID NO: 171338 - RNA, 19 nt, Artificial Sequence
  Description of Artificial Sequence: Synthetic oligonucleotide
uguuauggcaauacuuuac

SEQ ID NO: 171339 - RNA, 19 nt, Artificial Sequence
  Description of Artificial Sequence: Synthetic oligonucleotide
cugguagucagcaaacuag

SEQ ID NO: 171340 - RNA, 19 nt, Artificial Sequence
  Description of Artificial Sequence: Synthetic oligonucleotide
auuaagaccugacagggau

SEQ ID NO: 171341 - RNA, 19 nt, Artificial Sequence
  Description of Artificial Sequence: Synthetic oligonucleotide
uugaccaucucacacacua

SEQ ID NO: 171342 - RNA, 19 nt, Artificial Sequence
  Description of Artificial Sequence: Synthetic oligonucleotide
ugaauaccacuguuguugg

SEQ ID NO: 171343 - RNA, 19 nt, Artificial Sequence
  Description of Artificial Sequence: Synthetic oligonucleotide
cauccgaucaucaccacag

SEQ ID NO: 171344 - RNA, 19 nt, Artificial Sequence
  Description of Artificial Sequence: Synthetic oligonucleotide
cuaacagacccacauguag

SEQ ID NO: 171345 - RNA, 19 nt, Artificial Sequence
  Description of Artificial Sequence: Synthetic oligonucleotide
aaauccacuuuguacagua

SEQ ID NO: 171346 - RNA, 19 nt, Artificial Sequence
  Description of Artificial Sequence: Synthetic oligonucleotide
acuaugagagaaucaaacu

SEQ ID NO: 171347 - RNA, 19 nt, Artificial Sequence
  Description of Artificial Sequence: Synthetic oligonucleotide
uacucauguauacuggacu

SEQ ID NO: 171348 - RNA, 19 nt, Artificial Sequence
  Description of Artificial Sequence: Synthetic oligonucleotide
uauaucguauagaaucuuc

SEQ ID NO: 171349 - RNA, 19 nt, Artificial Sequence
  Description of Artificial Sequence: Synthetic oligonucleotide
aauaagcaucccuauucca

SEQ ID NO: 171350 - RNA, 19 nt, Artificial Sequence
  Description of Artificial Sequence: Synthetic oligonucleotide
cauuguaacuaugauacug

SEQ ID NO: 171351 - RNA, 19 nt, Artificial Sequence
  Description of Artificial Sequence: Synthetic oligonucleotide
ugaucgaucuccauuguau

SEQ ID NO: 171352 - RNA, 19 nt, Artificial Sequence
  Description of Artificial Sequence: Synthetic oligonucleotide
uuaucuccggauaucuuug

SEQ ID NO: 171353 - RNA, 19 nt, Artificial Sequence
  Description of Artificial Sequence: Synthetic oligonucleotide
uggccauagagcaacguug

SEQ ID NO: 171354 - RNA, 19 nt, Artificial Sequence
  Description of Artificial Sequence: Synthetic oligonucleotide
aaauaagcaguggaacuug

SEQ ID NO: 171355 - RNA, 19 nt, Artificial Sequence
  Description of Artificial Sequence: Synthetic oligonucleotide
uugaguccaaacaauugac

SEQ ID NO: 171356 - RNA, 19 nt, Artificial Sequence
  Description of Artificial Sequence: Synthetic oligonucleotide
aaacgauccucuaauauau

SEQ ID NO: 171357 - RNA, 19 nt, Artificial Sequence
  Description of Artificial Sequence: Synthetic oligonucleotide
uuugccgggaaguuuugag

SEQ ID NO: 171358 - RNA, 19 nt, Artificial Sequence
  Description of Artificial Sequence: Synthetic oligonucleotide
ugucguugaaagucugagg

SEQ ID NO: 171359 - RNA, 19 nt, Artificial Sequence
  Description of Artificial Sequence: Synthetic oligonucleotide
aaaagcaaguauaucguau

SEQ ID NO: 171360 - RNA, 19 nt, Artificial Sequence
  Description of Artificial Sequence: Synthetic oligonucleotide
aaaugugaucagccagccg

SEQ ID NO: 171361 - RNA, 19 nt, Artificial Sequence
  Description of Artificial Sequence: Synthetic oligonucleotide
gagucuucccuucuaaaac

SEQ ID NO: 171362 - RNA, 19 nt, Artificial Sequence
  Description of Artificial Sequence: Synthetic oligonucleotide
uuauggcaauacuuuacug

SEQ ID NO: 171363 - RNA, 19 nt, Artificial Sequence
  Description of Artificial Sequence: Synthetic oligonucleotide
aacaugggaauuaacacuu

SEQ ID NO: 171364 - RNA, 19 nt, Artificial Sequence
  Description of Artificial Sequence: Synthetic oligonucleotide
agccauuccagaccuaaag

SEQ ID NO: 171365 - RNA, 19 nt, Artificial Sequence
  Description of Artificial Sequence: Synthetic oligonucleotide
aauacaagccaucgaugau

SEQ ID NO: 171366 - RNA, 19 nt, Artificial Sequence
  Description of Artificial Sequence: Synthetic oligonucleotide
aaaauccgagaccccagcu

SEQ ID NO: 171367 - RNA, 19 nt, Artificial Sequence
  Description of Artificial Sequence: Synthetic oligonucleotide
uggcguuaacaaaauuucc

SEQ ID NO: 171368 - RNA, 19 nt, Artificial Sequence
  Description of Artificial Sequence: Synthetic oligonucleotide
acauccaaacucuugcaga

SEQ ID NO: 171369 - RNA, 19 nt, Artificial Sequence
  Description of Artificial Sequence: Synthetic oligonucleotide
ugagucuucccuucuaaaa

SEQ ID NO: 171370 - RNA, 19 nt, Artificial Sequence
  Description of Artificial Sequence: Synthetic oligonucleotide
gaaaacggaucuucugaug

SEQ ID NO: 171371 - RNA, 19 nt, Artificial Sequence
  Description of Artificial Sequence: Synthetic oligonucleotide
guccggaagauuaugaaug

SEQ ID NO: 171372 - RNA, 19 nt, Artificial Sequence
  Description of Artificial Sequence: Synthetic oligonucleotide
uugucguugaaagucugag

SEQ ID NO: 171373 - RNA, 19 nt, Artificial Sequence
  Description of Artificial Sequence: Synthetic oligonucleotide
acaguaugaggcuaacaga

SEQ ID NO: 171374 - RNA, 19 nt, Artificial Sequence
  Description of Artificial Sequence: Synthetic oligonucleotide
ucauugaaaguggugggug

SEQ ID NO: 171375 - RNA, 19 nt, Artificial Sequence
  Description of Artificial Sequence: Synthetic oligonucleotide
uuauuugacuuuuggggau

SEQ ID NO: 171376 - RNA, 19 nt, Artificial Sequence
  Description of Artificial Sequence: Synthetic oligonucleotide
uccaauccgaagcaaucca

SEQ ID NO: 171377 - RNA, 19 nt, Artificial Sequence
  Description of Artificial Sequence: Synthetic oligonucleotide
aauugacaaaugggaagag

SEQ ID NO: 171378 - RNA, 19 nt, Artificial Sequence
  Description of Artificial Sequence: Synthetic oligonucleotide
cucugcuacucaaaguggc

SEQ ID NO: 171379 - RNA, 19 nt, Artificial Sequence
  Description of Artificial Sequence: Synthetic oligonucleotide
ggcguuaaaucuauggacg

SEQ ID NO: 171380 - RNA, 19 nt, Artificial Sequence
  Description of Artificial Sequence: Synthetic oligonucleotide
auuguaacuaugauacuga

SEQ ID NO: 171381 - RNA, 19 nt, Artificial Sequence
  Description of Artificial Sequence: Synthetic oligonucleotide
uggagaguuuccaauuuuc

SEQ ID NO: 171382 - RNA, 19 nt, Artificial Sequence
  Description of Artificial Sequence: Synthetic oligonucleotide
ugaucagccagccgauacc

SEQ ID NO: 171383 - RNA, 19 nt, Artificial Sequence
  Description of Artificial Sequence: Synthetic oligonucleotide
uaagaccugacagggauga

SEQ ID NO: 171384 - RNA, 19 nt, Artificial Sequence
  Description of Artificial Sequence: Synthetic oligonucleotide
cauagcgguaaaauuuaac

SEQ ID NO: 171385 - RNA, 19 nt, Artificial Sequence
  Description of Artificial Sequence: Synthetic oligonucleotide
aucguauagaaucuucuuu

SEQ ID NO: 171386 - RNA, 19 nt, Artificial Sequence
  Description of Artificial Sequence: Synthetic oligonucleotide
uuugucguugaaagucuga

SEQ ID NO: 171387 - RNA, 19 nt, Artificial Sequence
  Description of Artificial Sequence: Synthetic oligonucleotide
aguugacagcuccaauccg

SEQ ID NO: 171388 - RNA, 19 nt, Artificial Sequence
  Description of Artificial Sequence: Synthetic oligonucleotide
ugccacuaagccugagucg

SEQ ID NO: 171389 - RNA, 19 nt, Artificial Sequence
  Description of Artificial Sequence: Synthetic oligonucleotide
uuaagaccugacagggaug

SEQ ID NO: 171390 - RNA, 19 nt, Artificial Sequence
  Description of Artificial Sequence: Synthetic oligonucleotide
uaugaggcuaacagaccca

SEQ ID NO: 171391 - RNA, 19 nt, Artificial Sequence
  Description of Artificial Sequence: Synthetic oligonucleotide
aaaguccggaagauuauga

SEQ ID NO: 171392 - RNA, 19 nt, Artificial Sequence
  Description of Artificial Sequence: Synthetic oligonucleotide
cuuuccguaacucuggcaa

SEQ ID NO: 171393 - RNA, 19 nt, Artificial Sequence
  Description of Artificial Sequence: Synthetic oligonucleotide
cuccggauaucuuugaaca

SEQ ID NO: 171394 - RNA, 19 nt, Artificial Sequence
  Description of Artificial Sequence: Synthetic oligonucleotide
ugccaaacgauccucuaau

SEQ ID NO: 171395 - RNA, 19 nt, Artificial Sequence
  Description of Artificial Sequence: Synthetic oligonucleotide
cauguauauuuccuuagca

SEQ ID NO: 171396 - RNA, 19 nt, Artificial Sequence
  Description of Artificial Sequence: Synthetic oligonucleotide
gcaacguugaugcuuuccg

SEQ ID NO: 171397 - RNA, 19 nt, Artificial Sequence
  Description of Artificial Sequence: Synthetic oligonucleotide
gcaaguauaucguauagaa

SEQ ID NO: 171398 - RNA, 19 nt, Artificial Sequence
  Description of Artificial Sequence: Synthetic oligonucleotide
agucaacaagccaugguuc

SEQ ID NO: 171399 - RNA, 19 nt, Artificial Sequence
  Description of Artificial Sequence: Synthetic oligonucleotide
aucuauggacgcuuggggu

SEQ ID NO: 171400 - RNA, 19 nt, Artificial Sequence
  Description of Artificial Sequence: Synthetic oligonucleotide
ucuauggcguuaacaaaau

SEQ ID NO: 171401 - RNA, 19 nt, Artificial Sequence
  Description of Artificial Sequence: Synthetic oligonucleotide
ugaugugccaaacgauccu

SEQ ID NO: 171402 - RNA, 19 nt, Artificial Sequence
  Description of Artificial Sequence: Synthetic oligonucleotide
ucugaggcguuaaaucuau

SEQ ID NO: 171403 - RNA, 19 nt, Artificial Sequence
  Description of Artificial Sequence: Synthetic oligonucleotide
agcaacguugaugcuuucc

SEQ ID NO: 171404 - RNA, 19 nt, Artificial Sequence
  Description of Artificial Sequence: Synthetic oligonucleotide
aguccaaacaauugacaaa

SEQ ID NO: 171405 - RNA, 19 nt, Artificial Sequence
  Description of Artificial Sequence: Synthetic oligonucleotide
uccggaagauuaugaauga

SEQ ID NO: 171406 - RNA, 19 nt, Artificial Sequence
  Description of Artificial Sequence: Synthetic oligonucleotide
ucagguguuauggcaauac

SEQ ID NO: 171407 - RNA, 19 nt, Artificial Sequence
  Description of Artificial Sequence: Synthetic oligonucleotide
uuugaucauccuagccaag

SEQ ID NO: 171408 - RNA, 19 nt, Artificial Sequence
  Description of Artificial Sequence: Synthetic oligonucleotide
uaacuaugauacugauaag

SEQ ID NO: 171409 - RNA, 19 nt, Artificial Sequence
  Description of Artificial Sequence: Synthetic oligonucleotide
ucuauggacgcuuggggua

SEQ ID NO: 171410 - RNA, 19 nt, Artificial Sequence
  Description of Artificial Sequence: Synthetic oligonucleotide
ugugguaacaugggaauua

SEQ ID NO: 171411 - RNA, 19 nt, Artificial Sequence
  Description of Artificial Sequence: Synthetic oligonucleotide
cauugaucaguccaguuaa

SEQ ID NO: 171412 - RNA, 19 nt, Artificial Sequence
  Description of Artificial Sequence: Synthetic oligonucleotide
cuuugaucauccuagccaa

SEQ ID NO: 171413 - RNA, 19 nt, Artificial Sequence
  Description of Artificial Sequence: Synthetic oligonucleotide
uuuaacacuuggguaggcu

SEQ ID NO: 171414 - RNA, 19 nt, Artificial Sequence
  Description of Artificial Sequence: Synthetic oligonucleotide
auaucguauagaaucuucu

SEQ ID NO: 171415 - RNA, 19 nt, Artificial Sequence
  Description of Artificial Sequence: Synthetic oligonucleotide
uaauguccgggccauucgu

SEQ ID NO: 171416 - RNA, 19 nt, Artificial Sequence
  Description of Artificial Sequence: Synthetic oligonucleotide
ggagcaaaauuuuggcaag

SEQ ID NO: 171417 - RNA, 19 nt, Artificial Sequence
  Description of Artificial Sequence: Synthetic oligonucleotide
uucauugaaaguggugggu

SEQ ID NO: 171418 - RNA, 19 nt, Artificial Sequence
  Description of Artificial Sequence: Synthetic oligonucleotide
caauugacaaaugggaaga

SEQ ID NO: 171419 - RNA, 19 nt, Artificial Sequence
  Description of Artificial Sequence: Synthetic oligonucleotide
caaagcauccgaucaucac

SEQ ID NO: 171420 - RNA, 19 nt, Artificial Sequence
  Description of Artificial Sequence: Synthetic oligonucleotide
agaagucaacaagccaugg

SEQ ID NO: 171421 - RNA, 19 nt, Artificial Sequence
  Description of Artificial Sequence: Synthetic oligonucleotide
accacggagaauagaaauc

SEQ ID NO: 171422 - RNA, 19 nt, Artificial Sequence
  Description of Artificial Sequence: Synthetic oligonucleotide
uuguacaguaugaggcuaa

SEQ ID NO: 171423 - RNA, 19 nt, Artificial Sequence
  Description of Artificial Sequence: Synthetic oligonucleotide
uuugaucgaucuccauugu

SEQ ID NO: 171424 - RNA, 19 nt, Artificial Sequence
  Description of Artificial Sequence: Synthetic oligonucleotide
uuagagacacgugggaauc

SEQ ID NO: 171425 - RNA, 19 nt, Artificial Sequence
  Description of Artificial Sequence: Synthetic oligonucleotide
uccauaaauuaaggcagca

SEQ ID NO: 171426 - RNA, 19 nt, Artificial Sequence
  Description of Artificial Sequence: Synthetic oligonucleotide
acguuaacaagaccaucca

SEQ ID NO: 171427 - RNA, 19 nt, Artificial Sequence
  Description of Artificial Sequence: Synthetic oligonucleotide
acgauccucuaauauauuu

SEQ ID NO: 171428 - RNA, 19 nt, Artificial Sequence
  Description of Artificial Sequence: Synthetic oligonucleotide
cauacucauguauacugga

SEQ ID NO: 171429 - RNA, 19 nt, Artificial Sequence
  Description of Artificial Sequence: Synthetic oligonucleotide
aucccacguuaacaagacc

SEQ ID NO: 171430 - RNA, 19 nt, Artificial Sequence
  Description of Artificial Sequence: Synthetic oligonucleotide
ugacccuuugaguccaaac

SEQ ID NO: 171431 - RNA, 19 nt, Artificial Sequence
  Description of Artificial Sequence: Synthetic oligonucleotide
uuguaacuaugauacugau

SEQ ID NO: 171432 - RNA, 19 nt, Artificial Sequence
  Description of Artificial Sequence: Synthetic oligonucleotide
uuguuggauaagcuugaau

SEQ ID NO: 171433 - RNA, 19 nt, Artificial Sequence
  Description of Artificial Sequence: Synthetic oligonucleotide
gaaagugguggguguaaga

SEQ ID NO: 171434 - RNA, 19 nt, Artificial Sequence
  Description of Artificial Sequence: Synthetic oligonucleotide
ccuacauugaucaguccag

SEQ ID NO: 171435 - RNA, 19 nt, Artificial Sequence
  Description of Artificial Sequence: Synthetic oligonucleotide
uccgacaaagcauccgauc

SEQ ID NO: 171436 - RNA, 19 nt, Artificial Sequence
  Description of Artificial Sequence: Synthetic oligonucleotide
aucauccuagccaagaguu

SEQ ID NO: 171437 - RNA, 19 nt, Artificial Sequence
  Description of Artificial Sequence: Synthetic oligonucleotide
ucauagcgguaaaauuuaa

SEQ ID NO: 171438 - RNA, 19 nt, Artificial Sequence
  Description of Artificial Sequence: Synthetic oligonucleotide
cacacuaugagagaaucaa

SEQ ID NO: 171439 - RNA, 19 nt, Artificial Sequence
  Description of Artificial Sequence: Synthetic oligonucleotide
guguaaauauuaggaagac

SEQ ID NO: 171440 - RNA, 19 nt, Artificial Sequence
  Description of Artificial Sequence: Synthetic oligonucleotide
auacuggacugguugaaua

SEQ ID NO: 171441 - RNA, 19 nt, Artificial Sequence
  Description of Artificial Sequence: Synthetic oligonucleotide
agucgugucugugaaguca

SEQ ID NO: 171442 - RNA, 19 nt, Artificial Sequence
  Description of Artificial Sequence: Synthetic oligonucleotide
gauuaugaaugauuuccau

SEQ ID NO: 171443 - RNA, 19 nt, Artificial Sequence
  Description of Artificial Sequence: Synthetic oligonucleotide
uugaucgaucuccauugua

SEQ ID NO: 171444 - RNA, 19 nt, Artificial Sequence
  Description of Artificial Sequence: Synthetic oligonucleotide
gacaaagcauccgaucauc

SEQ ID NO: 171445 - RNA, 19 nt, Artificial Sequence
  Description of Artificial Sequence: Synthetic oligonucleotide
agcaaaauuuuggcaaggu

SEQ ID NO: 171446 - RNA, 19 nt, Artificial Sequence
  Description of Artificial Sequence: Synthetic oligonucleotide
uacuaguauagaguaugaa

SEQ ID NO: 171447 - RNA, 19 nt, Artificial Sequence
  Description of Artificial Sequence: Synthetic oligonucleotide
uggacugguugaauaccac

SEQ ID NO: 171448 - RNA, 19 nt, Artificial Sequence
  Description of Artificial Sequence: Synthetic oligonucleotide
ggugacugaaaaccaaguc

SEQ ID NO: 171449 - RNA, 19 nt, Artificial Sequence
  Description of Artificial Sequence: Synthetic oligonucleotide
uccgaucaucaccacaguu

SEQ ID NO: 171450 - RNA, 19 nt, Artificial Sequence
  Description of Artificial Sequence: Synthetic oligonucleotide
uccucaagagcaucuuaau

SEQ ID NO: 171451 - RNA, 19 nt, Artificial Sequence
  Description of Artificial Sequence: Synthetic oligonucleotide
aucccuauuccagccauug

SEQ ID NO: 171452 - RNA, 19 nt, Artificial Sequence
  Description of Artificial Sequence: Synthetic oligonucleotide
uccuuucauccgacaaagc

SEQ ID NO: 171453 - RNA, 19 nt, Artificial Sequence
  Description of Artificial Sequence: Synthetic oligonucleotide
gaggcuaacagacccacau

SEQ ID NO: 171454 - RNA, 19 nt, Artificial Sequence
  Description of Artificial Sequence: Synthetic oligonucleotide
agaccugacagggaugaca

SEQ ID NO: 171455 - RNA, 19 nt, Artificial Sequence
  Description of Artificial Sequence: Synthetic oligonucleotide
acccaucccacguuaacaa

SEQ ID NO: 171456 - RNA, 19 nt, Artificial Sequence
  Description of Artificial Sequence: Synthetic oligonucleotide
ccuucauacucauguauac

SEQ ID NO: 171457 - RNA, 19 nt, Artificial Sequence
  Description of Artificial Sequence: Synthetic oligonucleotide
gaucauccuagccaagagu

SEQ ID NO: 171458 - RNA, 19 nt, Artificial Sequence
  Description of Artificial Sequence: Synthetic oligonucleotide
cuggcauuaagaccugaca

SEQ ID NO: 171459 - RNA, 19 nt, Artificial Sequence
  Description of Artificial Sequence: Synthetic oligonucleotide
gccuacauugaucagucca

SEQ ID NO: 171460 - RNA, 19 nt, Artificial Sequence
  Description of Artificial Sequence: Synthetic oligonucleotide
caaaguccggaagauuaug

SEQ ID NO: 171461 - RNA, 19 nt, Artificial Sequence
  Description of Artificial Sequence: Synthetic oligonucleotide
aggcuaacagacccacaug

SEQ ID NO: 171462 - RNA, 19 nt, Artificial Sequence
  Description of Artificial Sequence: Synthetic oligonucleotide
gcguuaaaucuauggacgc

SEQ ID NO: 171463 - RNA, 19 nt, Artificial Sequence
  Description of Artificial Sequence: Synthetic oligonucleotide
gaaccgugcaguccaaugu

SEQ ID NO: 171464 - RNA, 19 nt, Artificial Sequence
  Description of Artificial Sequence: Synthetic oligonucleotide
aacuagucccuggacugga

SEQ ID NO: 171465 - RNA, 19 nt, Artificial Sequence
  Description of Artificial Sequence: Synthetic oligonucleotide
cuggacugguugaauacca

SEQ ID NO: 171466 - RNA, 19 nt, Artificial Sequence
  Description of Artificial Sequence: Synthetic oligonucleotide
cauccuagccaagaguuca

SEQ ID NO: 171467 - RNA, 19 nt, Artificial Sequence
  Description of Artificial Sequence: Synthetic oligonucleotide
auacuaguauagaguauga

SEQ ID NO: 171468 - RNA, 19 nt, Artificial Sequence
  Description of Artificial Sequence: Synthetic oligonucleotide
uugccauauugugaaagua

SEQ ID NO: 171469 - RNA, 19 nt, Artificial Sequence
  Description of Artificial Sequence: Synthetic oligonucleotide
gaaugauacuguuggcagu

SEQ ID NO: 171470 - RNA, 19 nt, Artificial Sequence
  Description of Artificial Sequence: Synthetic oligonucleotide
ccauguauauuuccuuagc

SEQ ID NO: 171471 - RNA, 19 nt, Artificial Sequence
  Description of Artificial Sequence: Synthetic oligonucleotide
uccggauaucuuugaacau

SEQ ID NO: 171472 - RNA, 19 nt, Artificial Sequence
  Description of Artificial Sequence: Synthetic oligonucleotide
uuugaccaucucacacacu

SEQ ID NO: 171473 - RNA, 19 nt, Artificial Sequence
  Description of Artificial Sequence: Synthetic oligonucleotide
uugaaagugguggguguaa

SEQ ID NO: 171474 - RNA, 19 nt, Artificial Sequence
  Description of Artificial Sequence: Synthetic oligonucleotide
cguauagaaucuucuuucc

SEQ ID NO: 171475 - RNA, 19 nt, Artificial Sequence
  Description of Artificial Sequence: Synthetic oligonucleotide
agguguuauggcaauacuu

SEQ ID NO: 171476 - RNA, 19 nt, Artificial Sequence
  Description of Artificial Sequence: Synthetic oligonucleotide
auauacuaguauagaguau

SEQ ID NO: 171477 - RNA, 19 nt, Artificial Sequence
  Description of Artificial Sequence: Synthetic oligonucleotide
agagcaacguugaugcuuu

SEQ ID NO: 171478 - RNA, 19 nt, Artificial Sequence
  Description of Artificial Sequence: Synthetic oligonucleotide
uccagacuucgucaugcuu

SEQ ID NO: 171479 - RNA, 19 nt, Artificial Sequence
  Description of Artificial Sequence: Synthetic oligonucleotide
aaggccgaggucacgugca

SEQ ID NO: 171480 - RNA, 19 nt, Artificial Sequence
  Description of Artificial Sequence: Synthetic oligonucleotide
cuuucauagcgguaaaauu

SEQ ID NO: 171481 - RNA, 19 nt, Artificial Sequence
  Description of Artificial Sequence: Synthetic oligonucleotide
guguuauggcaauacuuua

SEQ ID NO: 171482 - RNA, 19 nt, Artificial Sequence
  Description of Artificial Sequence: Synthetic oligonucleotide
cauuaagaccugacaggga

SEQ ID NO: 171483 - RNA, 19 nt, Artificial Sequence
  Description of Artificial Sequence: Synthetic oligonucleotide
cgauccucuaauauauuug

SEQ ID NO: 171484 - RNA, 19 nt, Artificial Sequence
  Description of Artificial Sequence: Synthetic oligonucleotide
ccauauugugaaaguaguc

SEQ ID NO: 171485 - RNA, 19 nt, Artificial Sequence
  Description of Artificial Sequence: Synthetic oligonucleotide
gaauaccacuguuguugga

SEQ ID NO: 171486 - RNA, 19 nt, Artificial Sequence
  Description of Artificial Sequence: Synthetic oligonucleotide
cucagagaauaagcauccc

SEQ ID NO: 171487 - RNA, 19 nt, Artificial Sequence
  Description of Artificial Sequence: Synthetic oligonucleotide
aucuccggauaucuuugaa

SEQ ID NO: 171488 - RNA, 19 nt, Artificial Sequence
  Description of Artificial Sequence: Synthetic oligonucleotide
cugagucgugucugugaag

SEQ ID NO: 171489 - RNA, 19 nt, Artificial Sequence
  Description of Artificial Sequence: Synthetic oligonucleotide
guuaaaucuauggacgcuu

SEQ ID NO: 171490 - RNA, 19 nt, Artificial Sequence
  Description of Artificial Sequence: Synthetic oligonucleotide
ggaaccauauguggccucc

SEQ ID NO: 171491 - RNA, 19 nt, Artificial Sequence
  Description of Artificial Sequence: Synthetic oligonucleotide
ugccuacauugaucagucc

SEQ ID NO: 171492 - RNA, 19 nt, Artificial Sequence
  Description of Artificial Sequence: Synthetic oligonucleotide
cuaugauacugauaagcuu

SEQ ID NO: 171493 - RNA, 19 nt, Artificial Sequence
  Description of Artificial Sequence: Synthetic oligonucleotide
gcuacucaaaguggcuccg

SEQ ID NO: 171494 - RNA, 19 nt, Artificial Sequence
  Description of Artificial Sequence: Synthetic oligonucleotide
aauguccgggccauucguu

SEQ ID NO: 171495 - RNA, 19 nt, Artificial Sequence
  Description of Artificial Sequence: Synthetic oligonucleotide
ccgacaaagcauccgauca

SEQ ID NO: 171496 - RNA, 19 nt, Artificial Sequence
  Description of Artificial Sequence: Synthetic oligonucleotide
ggcguuaacaaaauuuccu

SEQ ID NO: 171497 - RNA, 19 nt, Artificial Sequence
  Description of Artificial Sequence: Synthetic oligonucleotide
cauugaaaguggugggugu

SEQ ID NO: 171498 - RNA, 19 nt, Artificial Sequence
  Description of Artificial Sequence: Synthetic oligonucleotide
caaguauaucguauagaau

SEQ ID NO: 171499 - RNA, 19 nt, Artificial Sequence
  Description of Artificial Sequence: Synthetic oligonucleotide
auccgaucaucaccacagu

SEQ ID NO: 171500 - RNA, 19 nt, Artificial Sequence
  Description of Artificial Sequence: Synthetic oligonucleotide
gguguuauggcaauacuuu

SEQ ID NO: 171501 - RNA, 19 nt, Artificial Sequence
  Description of Artificial Sequence: Synthetic oligonucleotide
cuccuuugaucgaucucca

SEQ ID NO: 171502 - RNA, 19 nt, Artificial Sequence
  Description of Artificial Sequence: Synthetic oligonucleotide
cugucaccaugcucuggac

SEQ ID NO: 171503 - RNA, 19 nt, Artificial Sequence
  Description of Artificial Sequence: Synthetic oligonucleotide
caagcucuccuuugaucga

SEQ ID NO: 171504 - RNA, 19 nt, Artificial Sequence
  Description of Artificial Sequence: Synthetic oligonucleotide
guacaguaugaggcuaaca

SEQ ID NO: 171505 - RNA, 19 nt, Artificial Sequence
  Description of Artificial Sequence: Synthetic oligonucleotide
ccaucccacguuaacaaga

SEQ ID NO: 171506 - RNA, 19 nt, Artificial Sequence
  Description of Artificial Sequence: Synthetic oligonucleotide
cugaggcguuaaaucuaug

SEQ ID NO: 171507 - RNA, 19 nt, Artificial Sequence
  Description of Artificial Sequence: Synthetic oligonucleotide
cacggagaauagaaaucaa

SEQ ID NO: 171508 - RNA, 19 nt, Artificial Sequence
  Description of Artificial Sequence: Synthetic oligonucleotide
cuaagccugagucgugucu

SEQ ID NO: 171509 - RNA, 19 nt, Artificial Sequence
  Description of Artificial Sequence: Synthetic oligonucleotide
ccgugcaguccaaugugcc

SEQ ID NO: 171510 - RNA, 19 nt, Artificial Sequence
  Description of Artificial Sequence: Synthetic oligonucleotide
auugaucaguccaguuaau

SEQ ID NO: 171511 - RNA, 19 nt, Artificial Sequence
  Description of Artificial Sequence: Synthetic oligonucleotide
gguagucagcaaacuaguc

SEQ ID NO: 171512 - RNA, 19 nt, Artificial Sequence
  Description of Artificial Sequence: Synthetic oligonucleotide
gaccauccaacaugccacu

SEQ ID NO: 171513 - RNA, 19 nt, Artificial Sequence
  Description of Artificial Sequence: Synthetic oligonucleotide
gcuccaauccgaagcaauc

SEQ ID NO: 171514 - RNA, 19 nt, Artificial Sequence
  Description of Artificial Sequence: Synthetic oligonucleotide
gcuuuggagaguuuccaau

SEQ ID NO: 171515 - RNA, 19 nt, Artificial Sequence
  Description of Artificial Sequence: Synthetic oligonucleotide
cccuauuccagccauugua

SEQ ID NO: 171516 - RNA, 19 nt, Artificial Sequence
  Description of Artificial Sequence: Synthetic oligonucleotide
augugaucagccagccgau

SEQ ID NO: 171517 - RNA, 19 nt, Artificial Sequence
  Description of Artificial Sequence: Synthetic oligonucleotide
auccgacaaagcauccgau

SEQ ID NO: 171518 - RNA, 19 nt, Artificial Sequence
  Description of Artificial Sequence: Synthetic oligonucleotide
aggucacgugcaucuguuu

SEQ ID NO: 171519 - RNA, 19 nt, Artificial Sequence
  Description of Artificial Sequence: Synthetic oligonucleotide
guuauacauguugcagagu

SEQ ID NO: 171520 - RNA, 19 nt, Artificial Sequence
  Description of Artificial Sequence: Synthetic oligonucleotide
gccgaggucacgugcaucu

SEQ ID NO: 171521 - RNA, 19 nt, Artificial Sequence
  Description of Artificial Sequence: Synthetic oligonucleotide
cuacauugaucaguccagu

SEQ ID NO: 171522 - RNA, 19 nt, Artificial Sequence
  Description of Artificial Sequence: Synthetic oligonucleotide
gcgguaaaauuuaacacuu

SEQ ID NO: 171523 - RNA, 19 nt, Artificial Sequence
  Description of Artificial Sequence: Synthetic oligonucleotide
cuucagguguuauggcaau

SEQ ID NO: 171524 - RNA, 19 nt, Artificial Sequence
  Description of Artificial Sequence: Synthetic oligonucleotide
gcagccauuccagaccuaa

SEQ ID NO: 171525 - RNA, 19 nt, Artificial Sequence
  Description of Artificial Sequence: Synthetic oligonucleotide
ggauaagcuugaauguuau

SEQ ID NO: 171526 - RNA, 19 nt, Artificial Sequence
  Description of Artificial Sequence: Synthetic oligonucleotide
gagcaacguugaugcuuuc

SEQ ID NO: 171527 - RNA, 19 nt, Artificial Sequence
  Description of Artificial Sequence: Synthetic oligonucleotide
ccaaacgauccucuaauau

SEQ ID NO: 171528 - RNA, 19 nt, Artificial Sequence
  Description of Artificial Sequence: Synthetic oligonucleotide
uauggacgcuugggguaaa

SEQ ID NO: 171529 - RNA, 19 nt, Artificial Sequence
  Description of Artificial Sequence: Synthetic oligonucleotide
gcaaggccgaggucacgug

SEQ ID NO: 171530 - RNA, 19 nt, Artificial Sequence
  Description of Artificial Sequence: Synthetic oligonucleotide
aggccgaggucacgugcau

SEQ ID NO: 171531 - RNA, 19 nt, Artificial Sequence
  Description of Artificial Sequence: Synthetic oligonucleotide
guauggcccugagcuaaga

SEQ ID NO: 171532 - RNA, 19 nt, Artificial Sequence
  Description of Artificial Sequence: Synthetic oligonucleotide
gccgggaaguuuugagguc

SEQ ID NO: 171533 - RNA, 19 nt, Artificial Sequence
  Description of Artificial Sequence: Synthetic oligonucleotide
ccguaacucuggcaaaaga

SEQ ID NO: 171534 - RNA, 19 nt, Artificial Sequence
  Description of Artificial Sequence: Synthetic oligonucleotide
uggcuccgggaggaaaaua

SEQ ID NO: 171535 - RNA, 19 nt, Artificial Sequence
  Description of Artificial Sequence: Synthetic oligonucleotide
cacuaagccugagucgugu

SEQ ID NO: 171536 - RNA, 19 nt, Artificial Sequence
  Description of Artificial Sequence: Synthetic oligonucleotide
gccuagggaguauuucugu

SEQ ID NO: 171537 - RNA, 19 nt, Artificial Sequence
  Description of Artificial Sequence: Synthetic oligonucleotide
gcuaacagacccacaugua

SEQ ID NO: 171538 - RNA, 19 nt, Artificial Sequence
  Description of Artificial Sequence: Synthetic oligonucleotide
cuauggcguuaacaaaauu

SEQ ID NO: 171539 - RNA, 19 nt, Artificial Sequence
  Description of Artificial Sequence: Synthetic oligonucleotide
aguuaauguccgggccauu

SEQ ID NO: 171540 - RNA, 19 nt, Artificial Sequence
  Description of Artificial Sequence: Synthetic oligonucleotide
ccuuugaucgaucuccauu

SEQ ID NO: 171541 - RNA, 19 nt, Artificial Sequence
  Description of Artificial Sequence: Synthetic oligonucleotide
gggugacugaaaaccaagu

SEQ ID NO: 171542 - RNA, 19 nt, Artificial Sequence
  Description of Artificial Sequence: Synthetic oligonucleotide
ccacuaagccugagucgug

SEQ ID NO: 171543 - RNA, 19 nt, Artificial Sequence
  Description of Artificial Sequence: Synthetic oligonucleotide
ggccauucguuuccauucu

SEQ ID NO: 171544 - RNA, 19 nt, Artificial Sequence
  Description of Artificial Sequence: Synthetic oligonucleotide
guugaaagucugaggcguu

SEQ ID NO: 171545 - RNA, 19 nt, Artificial Sequence
  Description of Artificial Sequence: Synthetic oligonucleotide
gguccaagugugguaacau

SEQ ID NO: 171546 - RNA, 19 nt, Artificial Sequence
  Description of Artificial Sequence: Synthetic oligonucleotide
ggacuuggccuagggagua

SEQ ID NO: 171547 - RNA, 19 nt, Artificial Sequence
  Description of Artificial Sequence: Synthetic oligonucleotide
ccaauccgaagcaauccau

SEQ ID NO: 171548 - RNA, 19 nt, Artificial Sequence
  Description of Artificial Sequence: Synthetic oligonucleotide
cguuaaaucuauggacgcu

SEQ ID NO: 171549 - RNA, 19 nt, Artificial Sequence
  Description of Artificial Sequence: Synthetic oligonucleotide
guggcuccgggaggaaaau

SEQ ID NO: 171550 - RNA, 19 nt, Artificial Sequence
  Description of Artificial Sequence: Synthetic oligonucleotide
cgaagcaauccauccacuu

SEQ ID NO: 171551 - RNA, 19 nt, Artificial Sequence
  Description of Artificial Sequence: Synthetic oligonucleotide
ccgaagcaauccauccacu

SEQ ID NO: 171552 - RNA, 19 nt, Artificial Sequence
  Description of Artificial Sequence: Synthetic oligonucleotide
cgacaaagcauccgaucau

SEQ ID NO: 171553 - RNA, 19 nt, Artificial Sequence
  Description of Artificial Sequence: Synthetic oligonucleotide
ccggaagauuaugaaugau

SEQ ID NO: 171554 - RNA, 19 nt, Artificial Sequence
  Description of Artificial Sequence: Synthetic oligonucleotide
cgggccauucguuuccauu

SEQ ID NO: 171555 - RNA, 19 nt, Artificial Sequence
  Description of Artificial Sequence: Synthetic oligonucleotide
ccgggccauucguuuccau

SEQ ID NO: 171556 - RNA, 19 nt, Artificial Sequence
  Description of Artificial Sequence: Synthetic oligonucleotide
aaagauacggcuuagcagu

SEQ ID NO: 171557 - RNA, 19 nt, Artificial Sequence
  Description of Artificial Sequence: Synthetic oligonucleotide
aucagauuugguuugaugg

SEQ ID NO: 171558 - RNA, 19 nt, Artificial Sequence
  Description of Artificial Sequence: Synthetic oligonucleotide
aacgguguaaacucuauag

SEQ ID NO: 171559 - RNA, 19 nt, Artificial Sequence
  Description of Artificial Sequence: Synthetic oligonucleotide
aaaucggucauugguaucc

SEQ ID NO: 171560 - RNA, 19 nt, Artificial Sequence
  Description of Artificial Sequence: Synthetic oligonucleotide
aaaacguuagcuuuuaguu

SEQ ID NO: 171561 - RNA, 19 nt, Artificial Sequence
  Description of Artificial Sequence: Synthetic oligonucleotide
auaucguaaaagcagggac

SEQ ID NO: 171562 - RNA, 19 nt, Artificial Sequence
  Description of Artificial Sequence: Synthetic oligonucleotide
uucagugcaacuuuauccg

SEQ ID NO: 171563 - RNA, 19 nt, Artificial Sequence
  Description of Artificial Sequence: Synthetic oligonucleotide
ucugaaaugaguccguuca

SEQ ID NO: 171564 - RNA, 19 nt, Artificial Sequence
  Description of Artificial Sequence: Synthetic oligonucleotide
uaucguaaaagcagggacg

SEQ ID NO: 171565 - RNA, 19 nt, Artificial Sequence
  Description of Artificial Sequence: Synthetic oligonucleotide
ugugucaaggucgauaucg

SEQ ID NO: 171566 - RNA, 19 nt, Artificial Sequence
  Description of Artificial Sequence: Synthetic oligonucleotide
aacguuagcuuuuaguuca

SEQ ID NO: 171567 - RNA, 19 nt, Artificial Sequence
  Description of Artificial Sequence: Synthetic oligonucleotide
aaacguuagcuuuuaguuc

SEQ ID NO: 171568 - RNA, 19 nt, Artificial Sequence
  Description of Artificial Sequence: Synthetic oligonucleotide
uguuugaguacucucaugu

SEQ ID NO: 171569 - RNA, 19 nt, Artificial Sequence
  Description of Artificial Sequence: Synthetic oligonucleotide
aauccuaucuccuuggcaa

SEQ ID NO: 171570 - RNA, 19 nt, Artificial Sequence
  Description of Artificial Sequence: Synthetic oligonucleotide
ucgauaucguaaaagcagg

SEQ ID NO: 171571 - RNA, 19 nt, Artificial Sequence
  Description of Artificial Sequence: Synthetic oligonucleotide
ucagaaaucggucauuggu

SEQ ID NO: 171572 - RNA, 19 nt, Artificial Sequence
  Description of Artificial Sequence: Synthetic oligonucleotide
aauaaagauacggcuuagc

SEQ ID NO: 171573 - RNA, 19 nt, Artificial Sequence
  Description of Artificial Sequence: Synthetic oligonucleotide
aacguguuuauuuucaguu

SEQ ID NO: 171574 - RNA, 19 nt, Artificial Sequence
  Description of Artificial Sequence: Synthetic oligonucleotide
uuuggauugugccucagga

SEQ ID NO: 171575 - RNA, 19 nt, Artificial Sequence
  Description of Artificial Sequence: Synthetic oligonucleotide
auaaagauacggcuuagca

SEQ ID NO: 171576 - RNA, 19 nt, Artificial Sequence
  Description of Artificial Sequence: Synthetic oligonucleotide
ugggcaaauuuccaaaacc

SEQ ID NO: 171577 - RNA, 19 nt, Artificial Sequence
  Description of Artificial Sequence: Synthetic oligonucleotide
agcaguagaaugcugaccu

SEQ ID NO: 171578 - RNA, 19 nt, Artificial Sequence
  Description of Artificial Sequence: Synthetic oligonucleotide
ucuagaaacguguuuauuu

SEQ ID NO: 171579 - RNA, 19 nt, Artificial Sequence
  Description of Artificial Sequence: Synthetic oligonucleotide
ugcaguuucaagcagugaa

SEQ ID NO: 171580 - RNA, 19 nt, Artificial Sequence
  Description of Artificial Sequence: Synthetic oligonucleotide
uguuccguuagaacaagcc

SEQ ID NO: 171581 - RNA, 19 nt, Artificial Sequence
  Description of Artificial Sequence: Synthetic oligonucleotide
uuauccgccaacaccgacg

SEQ ID NO: 171582 - RNA, 19 nt, Artificial Sequence
  Description of Artificial Sequence: Synthetic oligonucleotide
ucuauaggaaccgagagua

SEQ ID NO: 171583 - RNA, 19 nt, Artificial Sequence
  Description of Artificial Sequence: Synthetic oligonucleotide
uuucaagcagugaagucgc

SEQ ID NO: 171584 - RNA, 19 nt, Artificial Sequence
  Description of Artificial Sequence: Synthetic oligonucleotide
guuagaacaagccuuuaac

SEQ ID NO: 171585 - RNA, 19 nt, Artificial Sequence
  Description of Artificial Sequence: Synthetic oligonucleotide
uguaaaauucuugugucga

SEQ ID NO: 171586 - RNA, 19 nt, Artificial Sequence
  Description of Artificial Sequence: Synthetic oligonucleotide
ggaguugacguucaggugg

SEQ ID NO: 171587 - RNA, 19 nt, Artificial Sequence
  Description of Artificial Sequence: Synthetic oligonucleotide
aguacucucauguaaaauu

SEQ ID NO: 171588 - RNA, 19 nt, Artificial Sequence
  Description of Artificial Sequence: Synthetic oligonucleotide
ugaaaugaguccguucacg

SEQ ID NO: 171589 - RNA, 19 nt, Artificial Sequence
  Description of Artificial Sequence: Synthetic oligonucleotide
gucgauaucguaaaagcag

SEQ ID NO: 171590 - RNA, 19 nt, Artificial Sequence
  Description of Artificial Sequence: Synthetic oligonucleotide
aaggucgauaucguaaaag

SEQ ID NO: 171591 - RNA, 19 nt, Artificial Sequence
  Description of Artificial Sequence: Synthetic oligonucleotide
cuuucacuccgaaaguggg

SEQ ID NO: 171592 - RNA, 19 nt, Artificial Sequence
  Description of Artificial Sequence: Synthetic oligonucleotide
ggaagguugccucagacag

SEQ ID NO: 171593 - RNA, 19 nt, Artificial Sequence
  Description of Artificial Sequence: Synthetic oligonucleotide
uauagaggaaaacguuagc

SEQ ID NO: 171594 - RNA, 19 nt, Artificial Sequence
  Description of Artificial Sequence: Synthetic oligonucleotide
uuuuggauugugccucagg

SEQ ID NO: 171595 - RNA, 19 nt, Artificial Sequence
  Description of Artificial Sequence: Synthetic oligonucleotide
ugccaugugauuguagagg

SEQ ID NO: 171596 - RNA, 19 nt, Artificial Sequence
  Description of Artificial Sequence: Synthetic oligonucleotide
cuggacaucguacaggaac

SEQ ID NO: 171597 - RNA, 19 nt, Artificial Sequence
  Description of Artificial Sequence: Synthetic oligonucleotide
agcauugcauaacaagcag

SEQ ID NO: 171598 - RNA, 19 nt, Artificial Sequence
  Description of Artificial Sequence: Synthetic oligonucleotide
ucguacaggaacuggaaac

SEQ ID NO: 171599 - RNA, 19 nt, Artificial Sequence
  Description of Artificial Sequence: Synthetic oligonucleotide
aaaacccuguugcguauag

SEQ ID NO: 171600 - RNA, 19 nt, Artificial Sequence
  Description of Artificial Sequence: Synthetic oligonucleotide
guaaacucuauaggaaccg

SEQ ID NO: 171601 - RNA, 19 nt, Artificial Sequence
  Description of Artificial Sequence: Synthetic oligonucleotide
acggcuuagcaguagaaug

SEQ ID NO: 171602 - RNA, 19 nt, Artificial Sequence
  Description of Artificial Sequence: Synthetic oligonucleotide
uaaaauucuugugucgaug

SEQ ID NO: 171603 - RNA, 19 nt, Artificial Sequence
  Description of Artificial Sequence: Synthetic oligonucleotide
aaccaagacguauuuucca

SEQ ID NO: 171604 - RNA, 19 nt, Artificial Sequence
  Description of Artificial Sequence: Synthetic oligonucleotide
uguuguuccguuagaacaa

SEQ ID NO: 171605 - RNA, 19 nt, Artificial Sequence
  Description of Artificial Sequence: Synthetic oligonucleotide
ucugugucaaggucgauau

SEQ ID NO: 171606 - RNA, 19 nt, Artificial Sequence
  Description of Artificial Sequence: Synthetic oligonucleotide
guguuguuccguuagaaca

SEQ ID NO: 171607 - RNA, 19 nt, Artificial Sequence
  Description of Artificial Sequence: Synthetic oligonucleotide
aaauaaagauacggcuuag

SEQ ID NO: 171608 - RNA, 19 nt, Artificial Sequence
  Description of Artificial Sequence: Synthetic oligonucleotide
aauucaucucacacgagga

SEQ ID NO: 171609 - RNA, 19 nt, Artificial Sequence
  Description of Artificial Sequence: Synthetic oligonucleotide
aguccguucacggggaccc

SEQ ID NO: 171610 - RNA, 19 nt, Artificial Sequence
  Description of Artificial Sequence: Synthetic oligonucleotide
uggacaucguacaggaacu

SEQ ID NO: 171611 - RNA, 19 nt, Artificial Sequence
  Description of Artificial Sequence: Synthetic oligonucleotide
ccuaacacaacaaugucug

SEQ ID NO: 171612 - RNA, 19 nt, Artificial Sequence
  Description of Artificial Sequence: Synthetic oligonucleotide
cuuagcgagcucacaaacc

SEQ ID NO: 171613 - RNA, 19 nt, Artificial Sequence
  Description of Artificial Sequence: Synthetic oligonucleotide
aaacucuauaggaaccgag

SEQ ID NO: 171614 - RNA, 19 nt, Artificial Sequence
  Description of Artificial Sequence: Synthetic oligonucleotide
gaaaacguuagcuuuuagu

SEQ ID NO: 171615 - RNA, 19 nt, Artificial Sequence
  Description of Artificial Sequence: Synthetic oligonucleotide
ucaaacugugccugccggg

SEQ ID NO: 171616 - RNA, 19 nt, Artificial Sequence
  Description of Artificial Sequence: Synthetic oligonucleotide
ucguacagugccuugucug

SEQ ID NO: 171617 - RNA, 19 nt, Artificial Sequence
  Description of Artificial Sequence: Synthetic oligonucleotide
gauagcaggggacugcauc

SEQ ID NO: 171618 - RNA, 19 nt, Artificial Sequence
  Description of Artificial Sequence: Synthetic oligonucleotide
uauagcgaucaauuuugga

SEQ ID NO: 171619 - RNA, 19 nt, Artificial Sequence
  Description of Artificial Sequence: Synthetic oligonucleotide
agccccuaccaccaagacc

SEQ ID NO: 171620 - RNA, 19 nt, Artificial Sequence
  Description of Artificial Sequence: Synthetic oligonucleotide
auucguacagugccuuguc

SEQ ID NO: 171621 - RNA, 19 nt, Artificial Sequence
  Description of Artificial Sequence: Synthetic oligonucleotide
gacaucguacaggaacugg

SEQ ID NO: 171622 - RNA, 19 nt, Artificial Sequence
  Description of Artificial Sequence: Synthetic oligonucleotide
aaauuuccaaaacccuguu

SEQ ID NO: 171623 - RNA, 19 nt, Artificial Sequence
  Description of Artificial Sequence: Synthetic oligonucleotide
uagaaacguguuuauuuuc

SEQ ID NO: 171624 - RNA, 19 nt, Artificial Sequence
  Description of Artificial Sequence: Synthetic oligonucleotide
agccgagagaguuugaauu

SEQ ID NO: 171625 - RNA, 19 nt, Artificial Sequence
  Description of Artificial Sequence: Synthetic oligonucleotide
ucuccaaguggggugggcg

SEQ ID NO: 171626 - RNA, 19 nt, Artificial Sequence
  Description of Artificial Sequence: Synthetic oligonucleotide
ggacaaacggacuuuuggc

SEQ ID NO: 171627 - RNA, 19 nt, Artificial Sequence
  Description of Artificial Sequence: Synthetic oligonucleotide
aagucgaucuccgcacggg

SEQ ID NO: 171628 - RNA, 19 nt, Artificial Sequence
  Description of Artificial Sequence: Synthetic oligonucleotide
caauugaggacaguggcuc

SEQ ID NO: 171629 - RNA, 19 nt, Artificial Sequence
  Description of Artificial Sequence: Synthetic oligonucleotide
cagugcaacuuuauccgcc

SEQ ID NO: 171630 - RNA, 19 nt, Artificial Sequence
  Description of Artificial Sequence: Synthetic oligonucleotide
gcagaaacgguguaaacuc

SEQ ID NO: 171631 - RNA, 19 nt, Artificial Sequence
  Description of Artificial Sequence: Synthetic oligonucleotide
uuggaucagucuuauuuau

SEQ ID NO: 171632 - RNA, 19 nt, Artificial Sequence
  Description of Artificial Sequence: Synthetic oligonucleotide
aaaggcaccggcccgcuua

SEQ ID NO: 171633 - RNA, 19 nt, Artificial Sequence
  Description of Artificial Sequence: Synthetic oligonucleotide
uuuauccgccaacaccgac

SEQ ID NO: 171634 - RNA, 19 nt, Artificial Sequence
  Description of Artificial Sequence: Synthetic oligonucleotide
agacucuauagaggaaaac

SEQ ID NO: 171635 - RNA, 19 nt, Artificial Sequence
  Description of Artificial Sequence: Synthetic oligonucleotide
aggcaaggagacuuuguug

SEQ ID NO: 171636 - RNA, 19 nt, Artificial Sequence
  Description of Artificial Sequence: Synthetic oligonucleotide
uccgaaagugggucccugg

SEQ ID NO: 171637 - RNA, 19 nt, Artificial Sequence
  Description of Artificial Sequence: Synthetic oligonucleotide
uccgccaacaccgacgagu

SEQ ID NO: 171638 - RNA, 19 nt, Artificial Sequence
  Description of Artificial Sequence: Synthetic oligonucleotide
agacguauuuuccaucuuu

SEQ ID NO: 171639 - RNA, 19 nt, Artificial Sequence
  Description of Artificial Sequence: Synthetic oligonucleotide
gauacggcuuagcaguaga

SEQ ID NO: 171640 - RNA, 19 nt, Artificial Sequence
  Description of Artificial Sequence: Synthetic oligonucleotide
aucguaaaagcagggacga

SEQ ID NO: 171641 - RNA, 19 nt, Artificial Sequence
  Description of Artificial Sequence: Synthetic oligonucleotide
ucgaucuccgcacgggugu

SEQ ID NO: 171642 - RNA, 19 nt, Artificial Sequence
  Description of Artificial Sequence: Synthetic oligonucleotide
ccggacaucacugauaggc

SEQ ID NO: 171643 - RNA, 19 nt, Artificial Sequence
  Description of Artificial Sequence: Synthetic oligonucleotide
acaaacggacuuuuggcuu

SEQ ID NO: 171644 - RNA, 19 nt, Artificial Sequence
  Description of Artificial Sequence: Synthetic oligonucleotide
aaacgguguaaacucuaua

SEQ ID NO: 171645 - RNA, 19 nt, Artificial Sequence
  Description of Artificial Sequence: Synthetic oligonucleotide
uucacuccgaaaguggguc

SEQ ID NO: 171646 - RNA, 19 nt, Artificial Sequence
  Description of Artificial Sequence: Synthetic oligonucleotide
cuaacacaacaaugucugc

SEQ ID NO: 171647 - RNA, 19 nt, Artificial Sequence
  Description of Artificial Sequence: Synthetic oligonucleotide
ggaauugcagggcagguuc

SEQ ID NO: 171648 - RNA, 19 nt, Artificial Sequence
  Description of Artificial Sequence: Synthetic oligonucleotide
uaaacucuauaggaaccga

SEQ ID NO: 171649 - RNA, 19 nt, Artificial Sequence
  Description of Artificial Sequence: Synthetic oligonucleotide
guacucucauguaaaauuc

SEQ ID NO: 171650 - RNA, 19 nt, Artificial Sequence
  Description of Artificial Sequence: Synthetic oligonucleotide
cguauagcgaucaauuuug

SEQ ID NO: 171651 - RNA, 19 nt, Artificial Sequence
  Description of Artificial Sequence: Synthetic oligonucleotide
caccugauuucucaacaag

SEQ ID NO: 171652 - RNA, 19 nt, Artificial Sequence
  Description of Artificial Sequence: Synthetic oligonucleotide
ugggaagguugccucagac

SEQ ID NO: 171653 - RNA, 19 nt, Artificial Sequence
  Description of Artificial Sequence: Synthetic oligonucleotide
gcuuaggagagccuaacac

SEQ ID NO: 171654 - RNA, 19 nt, Artificial Sequence
  Description of Artificial Sequence: Synthetic oligonucleotide
gacaaacggacuuuuggcu

SEQ ID NO: 171655 - RNA, 19 nt, Artificial Sequence
  Description of Artificial Sequence: Synthetic oligonucleotide
uccguuagaacaagccuuu

SEQ ID NO: 171656 - RNA, 19 nt, Artificial Sequence
  Description of Artificial Sequence: Synthetic oligonucleotide
agcucgaacaguggccacc

SEQ ID NO: 171657 - RNA, 19 nt, Artificial Sequence
  Description of Artificial Sequence: Synthetic oligonucleotide
guauccgcagagcugcagc

SEQ ID NO: 171658 - RNA, 19 nt, Artificial Sequence
  Description of Artificial Sequence: Synthetic oligonucleotide
ccgagaguaacuuugcuuc

SEQ ID NO: 171659 - RNA, 19 nt, Artificial Sequence
  Description of Artificial Sequence: Synthetic oligonucleotide
uuguuccguuagaacaagc

SEQ ID NO: 171660 - RNA, 19 nt, Artificial Sequence
  Description of Artificial Sequence: Synthetic oligonucleotide
gaguugacguucagguggg

SEQ ID NO: 171661 - RNA, 19 nt, Artificial Sequence
  Description of Artificial Sequence: Synthetic oligonucleotide
ugaagucgccaccuccucu

SEQ ID NO: 171662 - RNA, 19 nt, Artificial Sequence
  Description of Artificial Sequence: Synthetic oligonucleotide
uucccugcccgauaguuau

SEQ ID NO: 171663 - RNA, 19 nt, Artificial Sequence
  Description of Artificial Sequence: Synthetic oligonucleotide
ccccguaaaauaaacacuc

SEQ ID NO: 171664 - RNA, 19 nt, Artificial Sequence
  Description of Artificial Sequence: Synthetic oligonucleotide
accgagaguaacuuugcuu

SEQ ID NO: 171665 - RNA, 19 nt, Artificial Sequence
  Description of Artificial Sequence: Synthetic oligonucleotide
aauuccccaguccccguaa

SEQ ID NO: 171666 - RNA, 19 nt, Artificial Sequence
  Description of Artificial Sequence: Synthetic oligonucleotide
cuugcacuuggcugggaac

SEQ ID NO: 171667 - RNA, 19 nt, Artificial Sequence
  Description of Artificial Sequence: Synthetic oligonucleotide
ccuuucacuccgaaagugg

SEQ ID NO: 171668 - RNA, 19 nt, Artificial Sequence
  Description of Artificial Sequence: Synthetic oligonucleotide
augucggcgaggcuaucag

SEQ ID NO: 171669 - RNA, 19 nt, Artificial Sequence
  Description of Artificial Sequence: Synthetic oligonucleotide
uggaaacggcuucuuuugu

SEQ ID NO: 171670 - RNA, 19 nt, Artificial Sequence
  Description of Artificial Sequence: Synthetic oligonucleotide
acaccgacgaguugccgug

SEQ ID NO: 171671 - RNA, 19 nt, Artificial Sequence
  Description of Artificial Sequence: Synthetic oligonucleotide
ugcguauagcgaucaauuu

SEQ ID NO: 171672 - RNA, 19 nt, Artificial Sequence
  Description of Artificial Sequence: Synthetic oligonucleotide
accagcccgauucguacag

SEQ ID NO: 171673 - RNA, 19 nt, Artificial Sequence
  Description of Artificial Sequence: Synthetic oligonucleotide
caagucgaucuccgcacgg

SEQ ID NO: 171674 - RNA, 19 nt, Artificial Sequence
  Description of Artificial Sequence: Synthetic oligonucleotide
aaggcaccggcccgcuuag

SEQ ID NO: 171675 - RNA, 19 nt, Artificial Sequence
  Description of Artificial Sequence: Synthetic oligonucleotide
uuaucagguucgugagaca

SEQ ID NO: 171676 - RNA, 19 nt, Artificial Sequence
  Description of Artificial Sequence: Synthetic oligonucleotide
ucacuccgaaagugggucc

SEQ ID NO: 171677 - RNA, 19 nt, Artificial Sequence
  Description of Artificial Sequence: Synthetic oligonucleotide
uggaucagucuuauuuauu

SEQ ID NO: 171678 - RNA, 19 nt, Artificial Sequence
  Description of Artificial Sequence: Synthetic oligonucleotide
caguccccguaaaauaaac

SEQ ID NO: 171679 - RNA, 19 nt, Artificial Sequence
  Description of Artificial Sequence: Synthetic oligonucleotide
auguuagcaaaggggccgg

SEQ ID NO: 171680 - RNA, 19 nt, Artificial Sequence
  Description of Artificial Sequence: Synthetic oligonucleotide
agcaaguuauuagcagcag

SEQ ID NO: 171681 - RNA, 19 nt, Artificial Sequence
  Description of Artificial Sequence: Synthetic oligonucleotide
cagaaaucggucauuggua

SEQ ID NO: 171682 - RNA, 19 nt, Artificial Sequence
  Description of Artificial Sequence: Synthetic oligonucleotide
ugcugaucauguucuguau

SEQ ID NO: 171683 - RNA, 19 nt, Artificial Sequence
  Description of Artificial Sequence: Synthetic oligonucleotide
uguauccgcagagcugcag

SEQ ID NO: 171684 - RNA, 19 nt, Artificial Sequence
  Description of Artificial Sequence: Synthetic oligonucleotide
uugccucagacaggcaaag

SEQ ID NO: 171685 - RNA, 19 nt, Artificial Sequence
  Description of Artificial Sequence: Synthetic oligonucleotide
agcccgauucguacagugc

SEQ ID NO: 171686 - RNA, 19 nt, Artificial Sequence
  Description of Artificial Sequence: Synthetic oligonucleotide
ugucaaggucgauaucgua

SEQ ID NO: 171687 - RNA, 19 nt, Artificial Sequence
  Description of Artificial Sequence: Synthetic oligonucleotide
uacggcuuagcaguagaau

SEQ ID NO: 171688 - RNA, 19 nt, Artificial Sequence
  Description of Artificial Sequence: Synthetic oligonucleotide
agucgaucuccgcacgggu

SEQ ID NO: 171689 - RNA, 19 nt, Artificial Sequence
  Description of Artificial Sequence: Synthetic oligonucleotide
ucggcgaggcuaucaguca

SEQ ID NO: 171690 - RNA, 19 nt, Artificial Sequence
  Description of Artificial Sequence: Synthetic oligonucleotide
agcucggcauuugauguug

SEQ ID NO: 171691 - RNA, 19 nt, Artificial Sequence
  Description of Artificial Sequence: Synthetic oligonucleotide
gcuuggaucagucuuauuu

SEQ ID NO: 171692 - RNA, 19 nt, Artificial Sequence
  Description of Artificial Sequence: Synthetic oligonucleotide
uccaagggcccacgagccc

SEQ ID NO: 171693 - RNA, 19 nt, Artificial Sequence
  Description of Artificial Sequence: Synthetic oligonucleotide
uaggaaccgagaguaacuu

SEQ ID NO: 171694 - RNA, 19 nt, Artificial Sequence
  Description of Artificial Sequence: Synthetic oligonucleotide
cuagaaacguguuuauuuu

SEQ ID NO: 171695 - RNA, 19 nt, Artificial Sequence
  Description of Artificial Sequence: Synthetic oligonucleotide
uucuagaaacguguuuauu

SEQ ID NO: 171696 - RNA, 19 nt, Artificial Sequence
  Description of Artificial Sequence: Synthetic oligonucleotide
caauaucacuggguaccgg

SEQ ID NO: 171697 - RNA, 19 nt, Artificial Sequence
  Description of Artificial Sequence: Synthetic oligonucleotide
agauacggcuuagcaguag

SEQ ID NO: 171698 - RNA, 19 nt, Artificial Sequence
  Description of Artificial Sequence: Synthetic oligonucleotide
ggaaaacguuagcuuuuag

SEQ ID NO: 171699 - RNA, 19 nt, Artificial Sequence
  Description of Artificial Sequence: Synthetic oligonucleotide
ggcaccggcccgcuuagcg

SEQ ID NO: 171700 - RNA, 19 nt, Artificial Sequence
  Description of Artificial Sequence: Synthetic oligonucleotide
ggagacucuauagaggaaa

SEQ ID NO: 171701 - RNA, 19 nt, Artificial Sequence
  Description of Artificial Sequence: Synthetic oligonucleotide
gucggcgaggcuaucaguc

SEQ ID NO: 171702 - RNA, 19 nt, Artificial Sequence
  Description of Artificial Sequence: Synthetic oligonucleotide
caucguacaggaacuggaa

SEQ ID NO: 171703 - RNA, 19 nt, Artificial Sequence
  Description of Artificial Sequence: Synthetic oligonucleotide
cccguaaaauaaacacucc

SEQ ID NO: 171704 - RNA, 19 nt, Artificial Sequence
  Description of Artificial Sequence: Synthetic oligonucleotide
caccggcccgcuuagcgag

SEQ ID NO: 171705 - RNA, 19 nt, Artificial Sequence
  Description of Artificial Sequence: Synthetic oligonucleotide
ucguaaaagcagggacgag

SEQ ID NO: 171706 - RNA, 19 nt, Artificial Sequence
  Description of Artificial Sequence: Synthetic oligonucleotide
ggucgauaucguaaaagca

SEQ ID NO: 171707 - RNA, 19 nt, Artificial Sequence
  Description of Artificial Sequence: Synthetic oligonucleotide
ugaagacguucagugccac

SEQ ID NO: 171708 - RNA, 19 nt, Artificial Sequence
  Description of Artificial Sequence: Synthetic oligonucleotide
cacuccgaaaguggguccc

SEQ ID NO: 171709 - RNA, 19 nt, Artificial Sequence
  Description of Artificial Sequence: Synthetic oligonucleotide
uguugcguauagcgaucaa

SEQ ID NO: 171710 - RNA, 19 nt, Artificial Sequence
  Description of Artificial Sequence: Synthetic oligonucleotide
ugucggcgaggcuaucagu

SEQ ID NO: 171711 - RNA, 19 nt, Artificial Sequence
  Description of Artificial Sequence: Synthetic oligonucleotide
cgauaucguaaaagcaggg

SEQ ID NO: 171712 - RNA, 19 nt, Artificial Sequence
  Description of Artificial Sequence: Synthetic oligonucleotide
gcugaucauguucuguauc

SEQ ID NO: 171713 - RNA, 19 nt, Artificial Sequence
  Description of Artificial Sequence: Synthetic oligonucleotide
accgacgaguugccgugag

SEQ ID NO: 171714 - RNA, 19 nt, Artificial Sequence
  Description of Artificial Sequence: Synthetic oligonucleotide
gauugugccucaggagaca

SEQ ID NO: 171715 - RNA, 19 nt, Artificial Sequence
  Description of Artificial Sequence: Synthetic oligonucleotide
cucuauaggaaccgagagu

SEQ ID NO: 171716 - RNA, 19 nt, Artificial Sequence
  Description of Artificial Sequence: Synthetic oligonucleotide
acgaguugccgugagcaau

SEQ ID NO: 171717 - RNA, 19 nt, Artificial Sequence
  Description of Artificial Sequence: Synthetic oligonucleotide
cugccgggaauuuccuuuc

SEQ ID NO: 171718 - RNA, 19 nt, Artificial Sequence
  Description of Artificial Sequence: Synthetic oligonucleotide
aggaaccgagaguaacuuu

SEQ ID NO: 171719 - RNA, 19 nt, Artificial Sequence
  Description of Artificial Sequence: Synthetic oligonucleotide
gccgugagcaauguuagca

SEQ ID NO: 171720 - RNA, 19 nt, Artificial Sequence
  Description of Artificial Sequence: Synthetic oligonucleotide
caaacugugccugccggga

SEQ ID NO: 171721 - RNA, 19 nt, Artificial Sequence
  Description of Artificial Sequence: Synthetic oligonucleotide
cacaacgggcaccccgaag

SEQ ID NO: 171722 - RNA, 19 nt, Artificial Sequence
  Description of Artificial Sequence: Synthetic oligonucleotide
cuccgcacgggugucaguc

SEQ ID NO: 171723 - RNA, 19 nt, Artificial Sequence
  Description of Artificial Sequence: Synthetic oligonucleotide
guuagcaaaggggccggca

SEQ ID NO: 171724 - RNA, 19 nt, Artificial Sequence
  Description of Artificial Sequence: Synthetic oligonucleotide
ccgaaagugggucccuggg

SEQ ID NO: 171725 - RNA, 19 nt, Artificial Sequence
  Description of Artificial Sequence: Synthetic oligonucleotide
ugauuguagaggggucaau

SEQ ID NO: 171726 - RNA, 19 nt, Artificial Sequence
  Description of Artificial Sequence: Synthetic oligonucleotide
aggaaaacguuagcuuuua

SEQ ID NO: 171727 - RNA, 19 nt, Artificial Sequence
  Description of Artificial Sequence: Synthetic oligonucleotide
ggucuuugccaugcaaaug

SEQ ID NO: 171728 - RNA, 19 nt, Artificial Sequence
  Description of Artificial Sequence: Synthetic oligonucleotide
gacgaguugccgugagcaa

SEQ ID NO: 171729 - RNA, 19 nt, Artificial Sequence
  Description of Artificial Sequence: Synthetic oligonucleotide
aagauacggcuuagcagua

SEQ ID NO: 171730 - RNA, 19 nt, Artificial Sequence
  Description of Artificial Sequence: Synthetic oligonucleotide
ggauccacgaagcugggau

SEQ ID NO: 171731 - RNA, 19 nt, Artificial Sequence
  Description of Artificial Sequence: Synthetic oligonucleotide
accacaacgggcaccccga

SEQ ID NO: 171732 - RNA, 19 nt, Artificial Sequence
  Description of Artificial Sequence: Synthetic oligonucleotide
cucacacgaggaagagguc

SEQ ID NO: 171733 - RNA, 19 nt, Artificial Sequence
  Description of Artificial Sequence: Synthetic oligonucleotide
cacuggguaccggggagag

SEQ ID NO: 171734 - RNA, 19 nt, Artificial Sequence
  Description of Artificial Sequence: Synthetic oligonucleotide
gcaaaugggcaaauuucca

SEQ ID NO: 171735 - RNA, 19 nt, Artificial Sequence
  Description of Artificial Sequence: Synthetic oligonucleotide
gcaaguuauuagcagcagu

SEQ ID NO: 171736 - RNA, 19 nt, Artificial Sequence
  Description of Artificial Sequence: Synthetic oligonucleotide
gaguacucucauguaaaau

SEQ ID NO: 171737 - RNA, 19 nt, Artificial Sequence
  Description of Artificial Sequence: Synthetic oligonucleotide
cagaaacgguguaaacucu

SEQ ID NO: 171738 - RNA, 19 nt, Artificial Sequence
  Description of Artificial Sequence: Synthetic oligonucleotide
agcaaccaagacguauuuu

SEQ ID NO: 171739 - RNA, 19 nt, Artificial Sequence
  Description of Artificial Sequence: Synthetic oligonucleotide
caugucggcgaggcuauca

SEQ ID NO: 171740 - RNA, 19 nt, Artificial Sequence
  Description of Artificial Sequence: Synthetic oligonucleotide
cuguugcguauagcgauca

SEQ ID NO: 171741 - RNA, 19 nt, Artificial Sequence
  Description of Artificial Sequence: Synthetic oligonucleotide
gcgaggcuaucagucaaag

SEQ ID NO: 171742 - RNA, 19 nt, Artificial Sequence
  Description of Artificial Sequence: Synthetic oligonucleotide
ccuguugcguauagcgauc

SEQ ID NO: 171743 - RNA, 19 nt, Artificial Sequence
  Description of Artificial Sequence: Synthetic oligonucleotide
gcuggcccggacaucacug

SEQ ID NO: 171744 - RNA, 19 nt, Artificial Sequence
  Description of Artificial Sequence: Synthetic oligonucleotide
gcuuagcaguagaaugcug

SEQ ID NO: 171745 - RNA, 19 nt, Artificial Sequence
  Description of Artificial Sequence: Synthetic oligonucleotide
acuccgaaagugggucccu

SEQ ID NO: 171746 - RNA, 19 nt, Artificial Sequence
  Description of Artificial Sequence: Synthetic oligonucleotide
ucuccgcacgggugucagu

SEQ ID NO: 171747 - RNA, 19 nt, Artificial Sequence
  Description of Artificial Sequence: Synthetic oligonucleotide
gaucuccgcacggguguca

SEQ ID NO: 171748 - RNA, 19 nt, Artificial Sequence
  Description of Artificial Sequence: Synthetic oligonucleotide
ccgagagaguuugaauuuc

SEQ ID NO: 171749 - RNA, 19 nt, Artificial Sequence
  Description of Artificial Sequence: Synthetic oligonucleotide
ggguguuguuccguuagaa

SEQ ID NO: 171750 - RNA, 19 nt, Artificial Sequence
  Description of Artificial Sequence: Synthetic oligonucleotide
gcaauugaggacaguggcu

SEQ ID NO: 171751 - RNA, 19 nt, Artificial Sequence
  Description of Artificial Sequence: Synthetic oligonucleotide
accggcccgcuuagcgagc

SEQ ID NO: 171752 - RNA, 19 nt, Artificial Sequence
  Description of Artificial Sequence: Synthetic oligonucleotide
cuuggcccaccuccaugca

SEQ ID NO: 171753 - RNA, 19 nt, Artificial Sequence
  Description of Artificial Sequence: Synthetic oligonucleotide
gcacaaccacguugggcac

SEQ ID NO: 171754 - RNA, 19 nt, Artificial Sequence
  Description of Artificial Sequence: Synthetic oligonucleotide
cagcccgagccaaguccac

SEQ ID NO: 171755 - RNA, 19 nt, Artificial Sequence
  Description of Artificial Sequence: Synthetic oligonucleotide
cguuagaacaagccuuuaa

SEQ ID NO: 171756 - RNA, 19 nt, Artificial Sequence
  Description of Artificial Sequence: Synthetic oligonucleotide
ggugggcgugaucccagca

SEQ ID NO: 171757 - RNA, 19 nt, Artificial Sequence
  Description of Artificial Sequence: Synthetic oligonucleotide
cgaagcuugccuuggagcu

SEQ ID NO: 171758 - RNA, 19 nt, Artificial Sequence
  Description of Artificial Sequence: Synthetic oligonucleotide
ucccugcccgauaguuauu

SEQ ID NO: 171759 - RNA, 19 nt, Artificial Sequence
  Description of Artificial Sequence: Synthetic oligonucleotide
gcuugccuuggagcugagg

SEQ ID NO: 171760 - RNA, 19 nt, Artificial Sequence
  Description of Artificial Sequence: Synthetic oligonucleotide
ggaaccagcccgauucgua

SEQ ID NO: 171761 - RNA, 19 nt, Artificial Sequence
  Description of Artificial Sequence: Synthetic oligonucleotide
caaaacccuguugcguaua

SEQ ID NO: 171762 - RNA, 19 nt, Artificial Sequence
  Description of Artificial Sequence: Synthetic oligonucleotide
gccgagagaguuugaauuu

SEQ ID NO: 171763 - RNA, 19 nt, Artificial Sequence
  Description of Artificial Sequence: Synthetic oligonucleotide
gacguucaggugggcuguc

SEQ ID NO: 171764 - RNA, 19 nt, Artificial Sequence
  Description of Artificial Sequence: Synthetic oligonucleotide
cagccgagagaguuugaau

SEQ ID NO: 171765 - RNA, 19 nt, Artificial Sequence
  Description of Artificial Sequence: Synthetic oligonucleotide
ggcccgcuuagcgagcuca

SEQ ID NO: 171766 - RNA, 19 nt, Artificial Sequence
  Description of Artificial Sequence: Synthetic oligonucleotide
gggugggcgugaucccagc

SEQ ID NO: 171767 - RNA, 19 nt, Artificial Sequence
  Description of Artificial Sequence: Synthetic oligonucleotide
ccaguccccguaaaauaaa

SEQ ID NO: 171768 - RNA, 19 nt, Artificial Sequence
  Description of Artificial Sequence: Synthetic oligonucleotide
ccgcuuagcgagcucacaa

SEQ ID NO: 171769 - RNA, 19 nt, Artificial Sequence
  Description of Artificial Sequence: Synthetic oligonucleotide
ucaugucggcgaggcuauc

SEQ ID NO: 171770 - RNA, 19 nt, Artificial Sequence
  Description of Artificial Sequence: Synthetic oligonucleotide
ccccaguccccguaaaaua

SEQ ID NO: 171771 - RNA, 19 nt, Artificial Sequence
  Description of Artificial Sequence: Synthetic oligonucleotide
cgagccccuaccaccaaga

SEQ ID NO: 171772 - RNA, 19 nt, Artificial Sequence
  Description of Artificial Sequence: Synthetic oligonucleotide
gugcuuggaucagucuuau

SEQ ID NO: 171773 - RNA, 19 nt, Artificial Sequence
  Description of Artificial Sequence: Synthetic oligonucleotide
cguucacggggaccccagg

SEQ ID NO: 171774 - RNA, 19 nt, Artificial Sequence
  Description of Artificial Sequence: Synthetic oligonucleotide
ggcgaggcuaucagucaaa

SEQ ID NO: 171775 - RNA, 19 nt, Artificial Sequence
  Description of Artificial Sequence: Synthetic oligonucleotide
gggcaaugguucuuaucuu

SEQ ID NO: 171776 - RNA, 19 nt, Artificial Sequence
  Description of Artificial Sequence: Synthetic oligonucleotide
ccggaagcucggcauuuga

SEQ ID NO: 171777 - RNA, 19 nt, Artificial Sequence
  Description of Artificial Sequence: Synthetic oligonucleotide
gggauccacgaagcuggga

SEQ ID NO: 171778 - RNA, 19 nt, Artificial Sequence
  Description of Artificial Sequence: Synthetic oligonucleotide
cgcacgggugucagucuug

SEQ ID NO: 171779 - RNA, 19 nt, Artificial Sequence
  Description of Artificial Sequence: Synthetic oligonucleotide
cgcuuagcgagcucacaaa

SEQ ID NO: 171780 - RNA, 19 nt, Artificial Sequence
  Description of Artificial Sequence: Synthetic oligonucleotide
ccaggccggaagcucggca

SEQ ID NO: 171781 - RNA, 19 nt, Artificial Sequence
  Description of Artificial Sequence: Synthetic oligonucleotide
cagagaaaggugggucuuu

SEQ ID NO: 171782 - RNA, 19 nt, Artificial Sequence
  Description of Artificial Sequence: Synthetic oligonucleotide
gcucggcauuugauguuga

SEQ ID NO: 171783 - RNA, 19 nt, Artificial Sequence
  Description of Artificial Sequence: Synthetic oligonucleotide
caccgacgaguugccguga

SEQ ID NO: 171784 - RNA, 19 nt, Artificial Sequence
  Description of Artificial Sequence: Synthetic oligonucleotide
ccccaacugaccagugaua

SEQ ID NO: 171785 - RNA, 19 nt, Artificial Sequence
  Description of Artificial Sequence: Synthetic oligonucleotide
cacgagccccuaccaccaa

SEQ ID NO: 171786 - RNA, 19 nt, Artificial Sequence
  Description of Artificial Sequence: Synthetic oligonucleotide
gcuggacaucguacaggaa

SEQ ID NO: 171787 - RNA, 19 nt, Artificial Sequence
  Description of Artificial Sequence: Synthetic oligonucleotide
gcccgcuuagcgagcucac

SEQ ID NO: 171788 - RNA, 19 nt, Artificial Sequence
  Description of Artificial Sequence: Synthetic oligonucleotide
ccgccaacaccgacgaguu

SEQ ID NO: 171789 - RNA, 19 nt, Artificial Sequence
  Description of Artificial Sequence: Synthetic oligonucleotide
cccgcuuagcgagcucaca

SEQ ID NO: 171790 - RNA, 19 nt, Artificial Sequence
  Description of Artificial Sequence: Synthetic oligonucleotide
aggggccggcaugcacaaa

SEQ ID NO: 171791 - RNA, 19 nt, Artificial Sequence
  Description of Artificial Sequence: Synthetic oligonucleotide
gccaugcaaaugggcaaau

SEQ ID NO: 171792 - RNA, 19 nt, Artificial Sequence
  Description of Artificial Sequence: Synthetic oligonucleotide
ccguuagaacaagccuuua

SEQ ID NO: 171793 - RNA, 19 nt, Artificial Sequence
  Description of Artificial Sequence: Synthetic oligonucleotide
cggcugaacuuccucacuu

SEQ ID NO: 171794 - RNA, 19 nt, Artificial Sequence
  Description of Artificial Sequence: Synthetic oligonucleotide
ggccggaagcucggcauuu

SEQ ID NO: 171795 - RNA, 19 nt, Artificial Sequence
  Description of Artificial Sequence: Synthetic oligonucleotide
ccgcacgggugucagucuu

SEQ ID NO: 171796 - RNA, 19 nt, Artificial Sequence
  Description of Artificial Sequence: Synthetic oligonucleotide
ccagcccgauucguacagu

SEQ ID NO: 171797 - RNA, 19 nt, Artificial Sequence
  Description of Artificial Sequence: Synthetic oligonucleotide
ccggcccgcuuagcgagcu

SEQ ID NO: 171798 - RNA, 19 nt, Artificial Sequence
  Description of Artificial Sequence: Synthetic oligonucleotide
guuuuaaacgaucucaugg

SEQ ID NO: 171799 - RNA, 19 nt, Artificial Sequence
  Description of Artificial Sequence: Synthetic oligonucleotide
aauagcaugauggagcaac

SEQ ID NO: 171800 - RNA, 19 nt, Artificial Sequence
  Description of Artificial Sequence: Synthetic oligonucleotide
aacuaguuuuaauagccac

SEQ ID NO: 171801 - RNA, 19 nt, Artificial Sequence
  Description of Artificial Sequence: Synthetic oligonucleotide
ucuggcaauaaguacaugc

SEQ ID NO: 171802 - RNA, 19 nt, Artificial Sequence
  Description of Artificial Sequence: Synthetic oligonucleotide
uuuaaacgaucucauggcg

SEQ ID NO: 171803 - RNA, 19 nt, Artificial Sequence
  Description of Artificial Sequence: Synthetic oligonucleotide
gauagugucagauaagcca

SEQ ID NO: 171804 - RNA, 19 nt, Artificial Sequence
  Description of Artificial Sequence: Synthetic oligonucleotide
uuuuaaacgaucucauggc

SEQ ID NO: 171805 - RNA, 19 nt, Artificial Sequence
  Description of Artificial Sequence: Synthetic oligonucleotide
uuaaacgaucucauggcgg

SEQ ID NO: 171806 - RNA, 19 nt, Artificial Sequence
  Description of Artificial Sequence: Synthetic oligonucleotide
uuugguaugggaaaccgca

SEQ ID NO: 171807 - RNA, 19 nt, Artificial Sequence
  Description of Artificial Sequence: Synthetic oligonucleotide
agaccaaagccucauacac

SEQ ID NO: 171808 - RNA, 19 nt, Artificial Sequence
  Description of Artificial Sequence: Synthetic oligonucleotide
gaugaaauggauccguagc

SEQ ID NO: 171809 - RNA, 19 nt, Artificial Sequence
  Description of Artificial Sequence: Synthetic oligonucleotide
agcaacuaguuuuaauagc

SEQ ID NO: 171810 - RNA, 19 nt, Artificial Sequence
  Description of Artificial Sequence: Synthetic oligonucleotide
aauaaguacaugcggacau

SEQ ID NO: 171811 - RNA, 19 nt, Artificial Sequence
  Description of Artificial Sequence: Synthetic oligonucleotide
aaaagugguuuaccuaagg

SEQ ID NO: 171812 - RNA, 19 nt, Artificial Sequence
  Description of Artificial Sequence: Synthetic oligonucleotide
uuaaagugcuguuuggacc

SEQ ID NO: 171813 - RNA, 19 nt, Artificial Sequence
  Description of Artificial Sequence: Synthetic oligonucleotide
caguuaaucucuaaaagug

SEQ ID NO: 171814 - RNA, 19 nt, Artificial Sequence
  Description of Artificial Sequence: Synthetic oligonucleotide
ucaaacacgggguuuagug

SEQ ID NO: 171815 - RNA, 19 nt, Artificial Sequence
  Description of Artificial Sequence: Synthetic oligonucleotide
ucagauaagccauucaguc

SEQ ID NO: 171816 - RNA, 19 nt, Artificial Sequence
  Description of Artificial Sequence: Synthetic oligonucleotide
cauaagacuuccuaagaag

SEQ ID NO: 171817 - RNA, 19 nt, Artificial Sequence
  Description of Artificial Sequence: Synthetic oligonucleotide
ugagcagugcggaugaaag

SEQ ID NO: 171818 - RNA, 19 nt, Artificial Sequence
  Description of Artificial Sequence: Synthetic oligonucleotide
uugauaaucuuacucugga

SEQ ID NO: 171819 - RNA, 19 nt, Artificial Sequence
  Description of Artificial Sequence: Synthetic oligonucleotide
ggacauacggaucagagcc

SEQ ID NO: 171820 - RNA, 19 nt, Artificial Sequence
  Description of Artificial Sequence: Synthetic oligonucleotide
ugagcuucgaugaaaugga

SEQ ID NO: 171821 - RNA, 19 nt, Artificial Sequence
  Description of Artificial Sequence: Synthetic oligonucleotide
auaaucuuacucuggaaga

SEQ ID NO: 171822 - RNA, 19 nt, Artificial Sequence
  Description of Artificial Sequence: Synthetic oligonucleotide
acaaaugcacccaugguac

SEQ ID NO: 171823 - RNA, 19 nt, Artificial Sequence
  Description of Artificial Sequence: Synthetic oligonucleotide
uggcaauaaguacaugcgg

SEQ ID NO: 171824 - RNA, 19 nt, Artificial Sequence
  Description of Artificial Sequence: Synthetic oligonucleotide
uacaaaugcacccauggua

SEQ ID NO: 171825 - RNA, 19 nt, Artificial Sequence
  Description of Artificial Sequence: Synthetic oligonucleotide
ucauaagacuuccuaagaa

SEQ ID NO: 171826 - RNA, 19 nt, Artificial Sequence
  Description of Artificial Sequence: Synthetic oligonucleotide
agugguuuaccuaaggaag

SEQ ID NO: 171827 - RNA, 19 nt, Artificial Sequence
  Description of Artificial Sequence: Synthetic oligonucleotide
agguuugggaacucaacgg

SEQ ID NO: 171828 - RNA, 19 nt, Artificial Sequence
  Description of Artificial Sequence: Synthetic oligonucleotide
aucuaaaaggcgcuccuuc

SEQ ID NO: 171829 - RNA, 19 nt, Artificial Sequence
  Description of Artificial Sequence: Synthetic oligonucleotide
uuuaucagcucugaugucu

SEQ ID NO: 171830 - RNA, 19 nt, Artificial Sequence
  Description of Artificial Sequence: Synthetic oligonucleotide
uaagguaggugucuuuccc

SEQ ID NO: 171831 - RNA, 19 nt, Artificial Sequence
  Description of Artificial Sequence: Synthetic oligonucleotide
uaaacgaucucauggcgga

SEQ ID NO: 171832 - RNA, 19 nt, Artificial Sequence
  Description of Artificial Sequence: Synthetic oligonucleotide
uggcgaguucuucagaugc

SEQ ID NO: 171833 - RNA, 19 nt, Artificial Sequence
  Description of Artificial Sequence: Synthetic oligonucleotide
aagagcuccugccuagguc

SEQ ID NO: 171834 - RNA, 19 nt, Artificial Sequence
  Description of Artificial Sequence: Synthetic oligonucleotide
aaucuuacucuggaagauc

SEQ ID NO: 171835 - RNA, 19 nt, Artificial Sequence
  Description of Artificial Sequence: Synthetic oligonucleotide
agaucaaucauaagacuuc

SEQ ID NO: 171836 - RNA, 19 nt, Artificial Sequence
  Description of Artificial Sequence: Synthetic oligonucleotide
agauccugagcuucgauga

SEQ ID NO: 171837 - RNA, 19 nt, Artificial Sequence
  Description of Artificial Sequence: Synthetic oligonucleotide
ugguuuaguuccaggaagc

SEQ ID NO: 171838 - RNA, 19 nt, Artificial Sequence
  Description of Artificial Sequence: Synthetic oligonucleotide
uaaaagugguuuaccuaag

SEQ ID NO: 171839 - RNA, 19 nt, Artificial Sequence
  Description of Artificial Sequence: Synthetic oligonucleotide
accucguuccauuuuggac

SEQ ID NO: 171840 - RNA, 19 nt, Artificial Sequence
  Description of Artificial Sequence: Synthetic oligonucleotide
aagaucaaucauaagacuu

SEQ ID NO: 171841 - RNA, 19 nt, Artificial Sequence
  Description of Artificial Sequence: Synthetic oligonucleotide
agugauaugucugaggcaa

SEQ ID NO: 171842 - RNA, 19 nt, Artificial Sequence
  Description of Artificial Sequence: Synthetic oligonucleotide
uaauguuggccaaauuuuc

SEQ ID NO: 171843 - RNA, 19 nt, Artificial Sequence
  Description of Artificial Sequence: Synthetic oligonucleotide
cuuacucuggaagaucugg

SEQ ID NO: 171844 - RNA, 19 nt, Artificial Sequence
  Description of Artificial Sequence: Synthetic oligonucleotide
uugaccggcauuuuccgcc

SEQ ID NO: 171845 - RNA, 19 nt, Artificial Sequence
  Description of Artificial Sequence: Synthetic oligonucleotide
ugggaaaccgcaacugugc

SEQ ID NO: 171846 - RNA, 19 nt, Artificial Sequence
  Description of Artificial Sequence: Synthetic oligonucleotide
uacaccucguuccauuuug

SEQ ID NO: 171847 - RNA, 19 nt, Artificial Sequence
  Description of Artificial Sequence: Synthetic oligonucleotide
uauccaagaugauaguguc

SEQ ID NO: 171848 - RNA, 19 nt, Artificial Sequence
  Description of Artificial Sequence: Synthetic oligonucleotide
ucaagauggaggaccccgg

SEQ ID NO: 171849 - RNA, 19 nt, Artificial Sequence
  Description of Artificial Sequence: Synthetic oligonucleotide
gagugaaccauucaucuaa

SEQ ID NO: 171850 - RNA, 19 nt, Artificial Sequence
  Description of Artificial Sequence: Synthetic oligonucleotide
guucgauacacguugagaa

SEQ ID NO: 171851 - RNA, 19 nt, Artificial Sequence
  Description of Artificial Sequence: Synthetic oligonucleotide
uuaagguaggugucuuucc

SEQ ID NO: 171852 - RNA, 19 nt, Artificial Sequence
  Description of Artificial Sequence: Synthetic oligonucleotide
agucagauaagcuucccau

SEQ ID NO: 171853 - RNA, 19 nt, Artificial Sequence
  Description of Artificial Sequence: Synthetic oligonucleotide
acugcgauauagccucacc

SEQ ID NO: 171854 - RNA, 19 nt, Artificial Sequence
  Description of Artificial Sequence: Synthetic oligonucleotide
auaggccuuauguccagcg

SEQ ID NO: 171855 - RNA, 19 nt, Artificial Sequence
  Description of Artificial Sequence: Synthetic oligonucleotide
aaacacgggguuuaguguu

SEQ ID NO: 171856 - RNA, 19 nt, Artificial Sequence
  Description of Artificial Sequence: Synthetic oligonucleotide
cuccguuacaaaugcaccc

SEQ ID NO: 171857 - RNA, 19 nt, Artificial Sequence
  Description of Artificial Sequence: Synthetic oligonucleotide
agagcuccugccuagguca

SEQ ID NO: 171858 - RNA, 19 nt, Artificial Sequence
  Description of Artificial Sequence: Synthetic oligonucleotide
ggugguucgauacacguug

SEQ ID NO: 171859 - RNA, 19 nt, Artificial Sequence
  Description of Artificial Sequence: Synthetic oligonucleotide
gcagugauaugucugaggc

SEQ ID NO: 171860 - RNA, 19 nt, Artificial Sequence
  Description of Artificial Sequence: Synthetic oligonucleotide
uuaucagcucugaugucug

SEQ ID NO: 171861 - RNA, 19 nt, Artificial Sequence
  Description of Artificial Sequence: Synthetic oligonucleotide
ugcggaugaaagaccauca

SEQ ID NO: 171862 - RNA, 19 nt, Artificial Sequence
  Description of Artificial Sequence: Synthetic oligonucleotide
gauacacguugagaaauag

SEQ ID NO: 171863 - RNA, 19 nt, Artificial Sequence
  Description of Artificial Sequence: Synthetic oligonucleotide
cugguuuauggucauguug

SEQ ID NO: 171864 - RNA, 19 nt, Artificial Sequence
  Description of Artificial Sequence: Synthetic oligonucleotide
gguuugggaacucaacggg

SEQ ID NO: 171865 - RNA, 19 nt, Artificial Sequence
  Description of Artificial Sequence: Synthetic oligonucleotide
gaagguuuagucagauaag

SEQ ID NO: 171866 - RNA, 19 nt, Artificial Sequence
  Description of Artificial Sequence: Synthetic oligonucleotide
cucaagauggaggaccccg

SEQ ID NO: 171867 - RNA, 19 nt, Artificial Sequence
  Description of Artificial Sequence: Synthetic oligonucleotide
ugcgauauagccucaccuc

SEQ ID NO: 171868 - RNA, 19 nt, Artificial Sequence
  Description of Artificial Sequence: Synthetic oligonucleotide
gauaugucugaggcaaugc

SEQ ID NO: 171869 - RNA, 19 nt, Artificial Sequence
  Description of Artificial Sequence: Synthetic oligonucleotide
auguuggccaaauuuuccu

SEQ ID NO: 171870 - RNA, 19 nt, Artificial Sequence
  Description of Artificial Sequence: Synthetic oligonucleotide
uuacucuggaagaucuggu

SEQ ID NO: 171871 - RNA, 19 nt, Artificial Sequence
  Description of Artificial Sequence: Synthetic oligonucleotide
uuuggacccgaguugcuga

SEQ ID NO: 171872 - RNA, 19 nt, Artificial Sequence
  Description of Artificial Sequence: Synthetic oligonucleotide
ucacaagagguuugggaac

SEQ ID NO: 171873 - RNA, 19 nt, Artificial Sequence
  Description of Artificial Sequence: Synthetic oligonucleotide
cuuugguaugggaaaccgc

SEQ ID NO: 171874 - RNA, 19 nt, Artificial Sequence
  Description of Artificial Sequence: Synthetic oligonucleotide
aaaucgaagcucugaucaa

SEQ ID NO: 171875 - RNA, 19 nt, Artificial Sequence
  Description of Artificial Sequence: Synthetic oligonucleotide
ugaaauggauccguagcac

SEQ ID NO: 171876 - RNA, 19 nt, Artificial Sequence
  Description of Artificial Sequence: Synthetic oligonucleotide
uuuucgaguuggcgcagcc

SEQ ID NO: 171877 - RNA, 19 nt, Artificial Sequence
  Description of Artificial Sequence: Synthetic oligonucleotide
uucuccuguagguuaaaau

SEQ ID NO: 171878 - RNA, 19 nt, Artificial Sequence
  Description of Artificial Sequence: Synthetic oligonucleotide
ucgauacacguugagaaau

SEQ ID NO: 171879 - RNA, 19 nt, Artificial Sequence
  Description of Artificial Sequence: Synthetic oligonucleotide
aaggaacuacuccaauuuu

SEQ ID NO: 171880 - RNA, 19 nt, Artificial Sequence
  Description of Artificial Sequence: Synthetic oligonucleotide
acuaguuuuaauagccaca

SEQ ID NO: 171881 - RNA, 19 nt, Artificial Sequence
  Description of Artificial Sequence: Synthetic oligonucleotide
uucgauacacguugagaaa

SEQ ID NO: 171882 - RNA, 19 nt, Artificial Sequence
  Description of Artificial Sequence: Synthetic oligonucleotide
caugcggacauacggauca

SEQ ID NO: 171883 - RNA, 19 nt, Artificial Sequence
  Description of Artificial Sequence: Synthetic oligonucleotide
aaucgaagcucugaucaaa

SEQ ID NO: 171884 - RNA, 19 nt, Artificial Sequence
  Description of Artificial Sequence: Synthetic oligonucleotide
uccguuacaaaugcaccca

SEQ ID NO: 171885 - RNA, 19 nt, Artificial Sequence
  Description of Artificial Sequence: Synthetic oligonucleotide
cacucucaucugcagacgg

SEQ ID NO: 171886 - RNA, 19 nt, Artificial Sequence
  Description of Artificial Sequence: Synthetic oligonucleotide
uaaucuuacucuggaagau

SEQ ID NO: 171887 - RNA, 19 nt, Artificial Sequence
  Description of Artificial Sequence: Synthetic oligonucleotide
auggcggaaagcccuuuuc

SEQ ID NO: 171888 - RNA, 19 nt, Artificial Sequence
  Description of Artificial Sequence: Synthetic oligonucleotide
gagugcacgaccacaauga

SEQ ID NO: 171889 - RNA, 19 nt, Artificial Sequence
  Description of Artificial Sequence: Synthetic oligonucleotide
aggaacuacuccaauuuug

SEQ ID NO: 171890 - RNA, 19 nt, Artificial Sequence
  Description of Artificial Sequence: Synthetic oligonucleotide
gcucacuaguuuuguaucg

SEQ ID NO: 171891 - RNA, 19 nt, Artificial Sequence
  Description of Artificial Sequence: Synthetic oligonucleotide
ugguucgauacacguugag

SEQ ID NO: 171892 - RNA, 19 nt, Artificial Sequence
  Description of Artificial Sequence: Synthetic oligonucleotide
uccggcgacaccaggcgag

SEQ ID NO: 171893 - RNA, 19 nt, Artificial Sequence
  Description of Artificial Sequence: Synthetic oligonucleotide
ugacaaggccuuuaaggua

SEQ ID NO: 171894 - RNA, 19 nt, Artificial Sequence
  Description of Artificial Sequence: Synthetic oligonucleotide
uugaggugguucgauacac

SEQ ID NO: 171895 - RNA, 19 nt, Artificial Sequence
  Description of Artificial Sequence: Synthetic oligonucleotide
ucgaagcucugaucaaaca

SEQ ID NO: 171896 - RNA, 19 nt, Artificial Sequence
  Description of Artificial Sequence: Synthetic oligonucleotide
cagcguucuccuuugcacc

SEQ ID NO: 171897 - RNA, 19 nt, Artificial Sequence
  Description of Artificial Sequence: Synthetic oligonucleotide
acugugcuauuugaacuuc

SEQ ID NO: 171898 - RNA, 19 nt, Artificial Sequence
  Description of Artificial Sequence: Synthetic oligonucleotide
cuguuuggacccgaguugc

SEQ ID NO: 171899 - RNA, 19 nt, Artificial Sequence
  Description of Artificial Sequence: Synthetic oligonucleotide
cuaaaaggcgcuccuucuc

SEQ ID NO: 171900 - RNA, 19 nt, Artificial Sequence
  Description of Artificial Sequence: Synthetic oligonucleotide
agcuucgaugaaauggauc

SEQ ID NO: 171901 - RNA, 19 nt, Artificial Sequence
  Description of Artificial Sequence: Synthetic oligonucleotide
guaugggaaaccgcaacug

SEQ ID NO: 171902 - RNA, 19 nt, Artificial Sequence
  Description of Artificial Sequence: Synthetic oligonucleotide
acaauaauguuggccaaau

SEQ ID NO: 171903 - RNA, 19 nt, Artificial Sequence
  Description of Artificial Sequence: Synthetic oligonucleotide
ggcagugauaugucugagg

SEQ ID NO: 171904 - RNA, 19 nt, Artificial Sequence
  Description of Artificial Sequence: Synthetic oligonucleotide
auguccuagagggcuggcc

SEQ ID NO: 171905 - RNA, 19 nt, Artificial Sequence
  Description of Artificial Sequence: Synthetic oligonucleotide
uuggcgaguucuucagaug

SEQ ID NO: 171906 - RNA, 19 nt, Artificial Sequence
  Description of Artificial Sequence: Synthetic oligonucleotide
agaucugguugcccacccg

SEQ ID NO: 171907 - RNA, 19 nt, Artificial Sequence
  Description of Artificial Sequence: Synthetic oligonucleotide
aagcaagugaaaggaacua

SEQ ID NO: 171908 - RNA, 19 nt, Artificial Sequence
  Description of Artificial Sequence: Synthetic oligonucleotide
ugcgauuaggaagcaccag

SEQ ID NO: 171909 - RNA, 19 nt, Artificial Sequence
  Description of Artificial Sequence: Synthetic oligonucleotide
uuugccgcgucuggcauca

SEQ ID NO: 171910 - RNA, 19 nt, Artificial Sequence
  Description of Artificial Sequence: Synthetic oligonucleotide
uccgcccuuucuuuggaga

SEQ ID NO: 171911 - RNA, 19 nt, Artificial Sequence
  Description of Artificial Sequence: Synthetic oligonucleotide
cuugaccggcauuuuccgc

SEQ ID NO: 171912 - RNA, 19 nt, Artificial Sequence
  Description of Artificial Sequence: Synthetic oligonucleotide
caaugcuugggguggguuc

SEQ ID NO: 171913 - RNA, 19 nt, Artificial Sequence
  Description of Artificial Sequence: Synthetic oligonucleotide
cuucccugacggaagguuc

SEQ ID NO: 171914 - RNA, 19 nt, Artificial Sequence
  Description of Artificial Sequence: Synthetic oligonucleotide
auguauaacucaauacuua

SEQ ID NO: 171915 - RNA, 19 nt, Artificial Sequence
  Description of Artificial Sequence: Synthetic oligonucleotide
caacuaguuuuaauagcca

SEQ ID NO: 171916 - RNA, 19 nt, Artificial Sequence
  Description of Artificial Sequence: Synthetic oligonucleotide
ucgaugaaauggauccgua

SEQ ID NO: 171917 - RNA, 19 nt, Artificial Sequence
  Description of Artificial Sequence: Synthetic oligonucleotide
agacagacggccguuuuca

SEQ ID NO: 171918 - RNA, 19 nt, Artificial Sequence
  Description of Artificial Sequence: Synthetic oligonucleotide
uaggccuuauguccagcgu

SEQ ID NO: 171919 - RNA, 19 nt, Artificial Sequence
  Description of Artificial Sequence: Synthetic oligonucleotide
ugguuuaccuaaggaagaa

SEQ ID NO: 171920 - RNA, 19 nt, Artificial Sequence
  Description of Artificial Sequence: Synthetic oligonucleotide
agcguucuccuuugcaccu

SEQ ID NO: 171921 - RNA, 19 nt, Artificial Sequence
  Description of Artificial Sequence: Synthetic oligonucleotide
ggcaauaaguacaugcgga

SEQ ID NO: 171922 - RNA, 19 nt, Artificial Sequence
  Description of Artificial Sequence: Synthetic oligonucleotide
guuuauggucauguuguca

SEQ ID NO: 171923 - RNA, 19 nt, Artificial Sequence
  Description of Artificial Sequence: Synthetic oligonucleotide
cuuauguccagcguggcua

SEQ ID NO: 171924 - RNA, 19 nt, Artificial Sequence
  Description of Artificial Sequence: Synthetic oligonucleotide
gcuguuuggacccgaguug

SEQ ID NO: 171925 - RNA, 19 nt, Artificial Sequence
  Description of Artificial Sequence: Synthetic oligonucleotide
ugaccggcauuuuccgccc

SEQ ID NO: 171926 - RNA, 19 nt, Artificial Sequence
  Description of Artificial Sequence: Synthetic oligonucleotide
gagauuagucaguccuguc

SEQ ID NO: 171927 - RNA, 19 nt, Artificial Sequence
  Description of Artificial Sequence: Synthetic oligonucleotide
ugcaugagugcacgaccac

SEQ ID NO: 171928 - RNA, 19 nt, Artificial Sequence
  Description of Artificial Sequence: Synthetic oligonucleotide
guugaggugguucgauaca

SEQ ID NO: 171929 - RNA, 19 nt, Artificial Sequence
  Description of Artificial Sequence: Synthetic oligonucleotide
gauuccguaggggucugac

SEQ ID NO: 171930 - RNA, 19 nt, Artificial Sequence
  Description of Artificial Sequence: Synthetic oligonucleotide
gaucaaacacgggguuuag

SEQ ID NO: 171931 - RNA, 19 nt, Artificial Sequence
  Description of Artificial Sequence: Synthetic oligonucleotide
gcuacgugaucaccugugg

SEQ ID NO: 171932 - RNA, 19 nt, Artificial Sequence
  Description of Artificial Sequence: Synthetic oligonucleotide
gcuuauaacacugcgauau

SEQ ID NO: 171933 - RNA, 19 nt, Artificial Sequence
  Description of Artificial Sequence: Synthetic oligonucleotide
ggaacuacuccaauuuuga

SEQ ID NO: 171934 - RNA, 19 nt, Artificial Sequence
  Description of Artificial Sequence: Synthetic oligonucleotide
cagugcggaugaaagacca

SEQ ID NO: 171935 - RNA, 19 nt, Artificial Sequence
  Description of Artificial Sequence: Synthetic oligonucleotide
auuccguaggggucugacu

SEQ ID NO: 171936 - RNA, 19 nt, Artificial Sequence
  Description of Artificial Sequence: Synthetic oligonucleotide
caauaaguacaugcggaca

SEQ ID NO: 171937 - RNA, 19 nt, Artificial Sequence
  Description of Artificial Sequence: Synthetic oligonucleotide
aaugcacccaugguacauu

SEQ ID NO: 171938 - RNA, 19 nt, Artificial Sequence
  Description of Artificial Sequence: Synthetic oligonucleotide
uguuuggacccgaguugcu

SEQ ID NO: 171939 - RNA, 19 nt, Artificial Sequence
  Description of Artificial Sequence: Synthetic oligonucleotide
gugguuuaccuaaggaaga

SEQ ID NO: 171940 - RNA, 19 nt, Artificial Sequence
  Description of Artificial Sequence: Synthetic oligonucleotide
guuuggacccgaguugcug

SEQ ID NO: 171941 - RNA, 19 nt, Artificial Sequence
  Description of Artificial Sequence: Synthetic oligonucleotide
cugcaugagugcacgacca

SEQ ID NO: 171942 - RNA, 19 nt, Artificial Sequence
  Description of Artificial Sequence: Synthetic oligonucleotide
cacaaugagcuuguuccuc

SEQ ID NO: 171943 - RNA, 19 nt, Artificial Sequence
  Description of Artificial Sequence: Synthetic oligonucleotide
gguuuaccuaaggaagaag

SEQ ID NO: 171944 - RNA, 19 nt, Artificial Sequence
  Description of Artificial Sequence: Synthetic oligonucleotide
uguccaaguuugccgcguc

SEQ ID NO: 171945 - RNA, 19 nt, Artificial Sequence
  Description of Artificial Sequence: Synthetic oligonucleotide
ccuuugguaugggaaaccg

SEQ ID NO: 171946 - RNA, 19 nt, Artificial Sequence
  Description of Artificial Sequence: Synthetic oligonucleotide
ggcucacuaguuuuguauc

SEQ ID NO: 171947 - RNA, 19 nt, Artificial Sequence
  Description of Artificial Sequence: Synthetic oligonucleotide
uccugcuguaaguguacau

SEQ ID NO: 171948 - RNA, 19 nt, Artificial Sequence
  Description of Artificial Sequence: Synthetic oligonucleotide
uggcgcuugggguugugaa

SEQ ID NO: 171949 - RNA, 19 nt, Artificial Sequence
  Description of Artificial Sequence: Synthetic oligonucleotide
acgugaucaccuguggccu

SEQ ID NO: 171950 - RNA, 19 nt, Artificial Sequence
  Description of Artificial Sequence: Synthetic oligonucleotide
uggcuacgugaucaccugu

SEQ ID NO: 171951 - RNA, 19 nt, Artificial Sequence
  Description of Artificial Sequence: Synthetic oligonucleotide
gcgauauagccucaccuca

SEQ ID NO: 171952 - RNA, 19 nt, Artificial Sequence
  Description of Artificial Sequence: Synthetic oligonucleotide
aguuugccgcgucuggcau

SEQ ID NO: 171953 - RNA, 19 nt, Artificial Sequence
  Description of Artificial Sequence: Synthetic oligonucleotide
ggccuuauguccagcgugg

SEQ ID NO: 171954 - RNA, 19 nt, Artificial Sequence
  Description of Artificial Sequence: Synthetic oligonucleotide
ggcuccguuacaaaugcac

SEQ ID NO: 171955 - RNA, 19 nt, Artificial Sequence
  Description of Artificial Sequence: Synthetic oligonucleotide
ugaugcgauuaggaagcac

SEQ ID NO: 171956 - RNA, 19 nt, Artificial Sequence
  Description of Artificial Sequence: Synthetic oligonucleotide
cucauagaccaaagccuca

SEQ ID NO: 171957 - RNA, 19 nt, Artificial Sequence
  Description of Artificial Sequence: Synthetic oligonucleotide
acaagagguuugggaacuc

SEQ ID NO: 171958 - RNA, 19 nt, Artificial Sequence
  Description of Artificial Sequence: Synthetic oligonucleotide
gugcggaugaaagaccauc

SEQ ID NO: 171959 - RNA, 19 nt, Artificial Sequence
  Description of Artificial Sequence: Synthetic oligonucleotide
gugcacgaccacaaugagc

SEQ ID NO: 171960 - RNA, 19 nt, Artificial Sequence
  Description of Artificial Sequence: Synthetic oligonucleotide
aaccgcaacugugcuauuu

SEQ ID NO: 171961 - RNA, 19 nt, Artificial Sequence
  Description of Artificial Sequence: Synthetic oligonucleotide
acauacggaucagagccau

SEQ ID NO: 171962 - RNA, 19 nt, Artificial Sequence
  Description of Artificial Sequence: Synthetic oligonucleotide
uuguccaaguuugccgcgu

SEQ ID NO: 171963 - RNA, 19 nt, Artificial Sequence
  Description of Artificial Sequence: Synthetic oligonucleotide
augcgauuaggaagcacca

SEQ ID NO: 171964 - RNA, 19 nt, Artificial Sequence
  Description of Artificial Sequence: Synthetic oligonucleotide
gcggacauacggaucagag

SEQ ID NO: 171965 - RNA, 19 nt, Artificial Sequence
  Description of Artificial Sequence: Synthetic oligonucleotide
cucacuaguuuuguaucga

SEQ ID NO: 171966 - RNA, 19 nt, Artificial Sequence
  Description of Artificial Sequence: Synthetic oligonucleotide
cugugcuauuugaacuuca

SEQ ID NO: 171967 - RNA, 19 nt, Artificial Sequence
  Description of Artificial Sequence: Synthetic oligonucleotide
cucgcagcgggacccggcc

SEQ ID NO: 171968 - RNA, 19 nt, Artificial Sequence
  Description of Artificial Sequence: Synthetic oligonucleotide
aagcaccagauaguuugau

SEQ ID NO: 171969 - RNA, 19 nt, Artificial Sequence
  Description of Artificial Sequence: Synthetic oligonucleotide
gacauacggaucagagcca

SEQ ID NO: 171970 - RNA, 19 nt, Artificial Sequence
  Description of Artificial Sequence: Synthetic oligonucleotide
cacccaugguacauuacaa

SEQ ID NO: 171971 - RNA, 19 nt, Artificial Sequence
  Description of Artificial Sequence: Synthetic oligonucleotide
gcucauagaccaaagccuc

SEQ ID NO: 171972 - RNA, 19 nt, Artificial Sequence
  Description of Artificial Sequence: Synthetic oligonucleotide
gguucgauacacguugaga

SEQ ID NO: 171973 - RNA, 19 nt, Artificial Sequence
  Description of Artificial Sequence: Synthetic oligonucleotide
gcuccguuacaaaugcacc

SEQ ID NO: 171974 - RNA, 19 nt, Artificial Sequence
  Description of Artificial Sequence: Synthetic oligonucleotide
ucaguccuguccaguuaau

SEQ ID NO: 171975 - RNA, 19 nt, Artificial Sequence
  Description of Artificial Sequence: Synthetic oligonucleotide
acgaccacaaugagcuugu

SEQ ID NO: 171976 - RNA, 19 nt, Artificial Sequence
  Description of Artificial Sequence: Synthetic oligonucleotide
agugcuguuuggacccgag

SEQ ID NO: 171977 - RNA, 19 nt, Artificial Sequence
  Description of Artificial Sequence: Synthetic oligonucleotide
cgaugaaauggauccguag

SEQ ID NO: 171978 - RNA, 19 nt, Artificial Sequence
  Description of Artificial Sequence: Synthetic oligonucleotide
ccugacggaagguuccuug

SEQ ID NO: 171979 - RNA, 19 nt, Artificial Sequence
  Description of Artificial Sequence: Synthetic oligonucleotide
ggcggaaagcccuuuucuc

SEQ ID NO: 171980 - RNA, 19 nt, Artificial Sequence
  Description of Artificial Sequence: Synthetic oligonucleotide
gccgcgucuggcaucagcg

SEQ ID NO: 171981 - RNA, 19 nt, Artificial Sequence
  Description of Artificial Sequence: Synthetic oligonucleotide
cgaaucuuacucucuugag

SEQ ID NO: 171982 - RNA, 19 nt, Artificial Sequence
  Description of Artificial Sequence: Synthetic oligonucleotide
cacucagcgcgcugcccgg

SEQ ID NO: 171983 - RNA, 19 nt, Artificial Sequence
  Description of Artificial Sequence: Synthetic oligonucleotide
gguaugggaaaccgcaacu

SEQ ID NO: 171984 - RNA, 19 nt, Artificial Sequence
  Description of Artificial Sequence: Synthetic oligonucleotide
cugcgauauagccucaccu

SEQ ID NO: 171985 - RNA, 19 nt, Artificial Sequence
  Description of Artificial Sequence: Synthetic oligonucleotide
uacggaucagagccaucuu

SEQ ID NO: 171986 - RNA, 19 nt, Artificial Sequence
  Description of Artificial Sequence: Synthetic oligonucleotide
agugaaccauucaucuaaa

SEQ ID NO: 171987 - RNA, 19 nt, Artificial Sequence
  Description of Artificial Sequence: Synthetic oligonucleotide
gugaaccauucaucuaaaa

SEQ ID NO: 171988 - RNA, 19 nt, Artificial Sequence
  Description of Artificial Sequence: Synthetic oligonucleotide
ccgacugacaucuggacaa

SEQ ID NO: 171989 - RNA, 19 nt, Artificial Sequence
  Description of Artificial Sequence: Synthetic oligonucleotide
gauguccuagagggcuggc

SEQ ID NO: 171990 - RNA, 19 nt, Artificial Sequence
  Description of Artificial Sequence: Synthetic oligonucleotide
ggcuacgugaucaccugug

SEQ ID NO: 171991 - RNA, 19 nt, Artificial Sequence
  Description of Artificial Sequence: Synthetic oligonucleotide
ggaugauuccguagggguc

SEQ ID NO: 171992 - RNA, 19 nt, Artificial Sequence
  Description of Artificial Sequence: Synthetic oligonucleotide
agacggccguuuucacuug

SEQ ID NO: 171993 - RNA, 19 nt, Artificial Sequence
  Description of Artificial Sequence: Synthetic oligonucleotide
cacacccuuugguauggga

SEQ ID NO: 171994 - RNA, 19 nt, Artificial Sequence
  Description of Artificial Sequence: Synthetic oligonucleotide
gaagagcuccugccuaggu

SEQ ID NO: 171995 - RNA, 19 nt, Artificial Sequence
  Description of Artificial Sequence: Synthetic oligonucleotide
acguugagaaauaggccuu

SEQ ID NO: 171996 - RNA, 19 nt, Artificial Sequence
  Description of Artificial Sequence: Synthetic oligonucleotide
caccucguuccauuuugga

SEQ ID NO: 171997 - RNA, 19 nt, Artificial Sequence
  Description of Artificial Sequence: Synthetic oligonucleotide
gcgcuugggguugugaaug

SEQ ID NO: 171998 - RNA, 19 nt, Artificial Sequence
  Description of Artificial Sequence: Synthetic oligonucleotide
cagacggccguuuucacuu

SEQ ID NO: 171999 - RNA, 19 nt, Artificial Sequence
  Description of Artificial Sequence: Synthetic oligonucleotide
cggacauacggaucagagc

SEQ ID NO: 172000 - RNA, 19 nt, Artificial Sequence
  Description of Artificial Sequence: Synthetic oligonucleotide
ggguuccuuggcugagacg

SEQ ID NO: 172001 - RNA, 19 nt, Artificial Sequence
  Description of Artificial Sequence: Synthetic oligonucleotide
acgauguccuagagggcug

SEQ ID NO: 172002 - RNA, 19 nt, Artificial Sequence
  Description of Artificial Sequence: Synthetic oligonucleotide
guuugccgcgucuggcauc

SEQ ID NO: 172003 - RNA, 19 nt, Artificial Sequence
  Description of Artificial Sequence: Synthetic oligonucleotide
aggcacacucucaucugca

SEQ ID NO: 172004 - RNA, 19 nt, Artificial Sequence
  Description of Artificial Sequence: Synthetic oligonucleotide
cugccuaggucacgauguc

SEQ ID NO: 172005 - RNA, 19 nt, Artificial Sequence
  Description of Artificial Sequence: Synthetic oligonucleotide
ucccuugacaaggccuuua

SEQ ID NO: 172006 - RNA, 19 nt, Artificial Sequence
  Description of Artificial Sequence: Synthetic oligonucleotide
ggaaccgcugguuuauggu

SEQ ID NO: 172007 - RNA, 19 nt, Artificial Sequence
  Description of Artificial Sequence: Synthetic oligonucleotide
cgauauagccucaccucac

SEQ ID NO: 172008 - RNA, 19 nt, Artificial Sequence
  Description of Artificial Sequence: Synthetic oligonucleotide
ggcgaguucuucagaugcc

SEQ ID NO: 172009 - RNA, 19 nt, Artificial Sequence
  Description of Artificial Sequence: Synthetic oligonucleotide
ccggaugauuccguagggg

SEQ ID NO: 172010 - RNA, 19 nt, Artificial Sequence
  Description of Artificial Sequence: Synthetic oligonucleotide
cacugcgauauagccucac

SEQ ID NO: 172011 - RNA, 19 nt, Artificial Sequence
  Description of Artificial Sequence: Synthetic oligonucleotide
ggagauuagucaguccugu

SEQ ID NO: 172012 - RNA, 19 nt, Artificial Sequence
  Description of Artificial Sequence: Synthetic oligonucleotide
aaaccgcaacugugcuauu

SEQ ID NO: 172013 - RNA, 19 nt, Artificial Sequence
  Description of Artificial Sequence: Synthetic oligonucleotide
ggccuuguuccauccucug

SEQ ID NO: 172014 - RNA, 19 nt, Artificial Sequence
  Description of Artificial Sequence: Synthetic oligonucleotide
augauuccguaggggucug

SEQ ID NO: 172015 - RNA, 19 nt, Artificial Sequence
  Description of Artificial Sequence: Synthetic oligonucleotide
ugauuccguaggggucuga

SEQ ID NO: 172016 - RNA, 19 nt, Artificial Sequence
  Description of Artificial Sequence: Synthetic oligonucleotide
gugguucgauacacguuga

SEQ ID NO: 172017 - RNA, 19 nt, Artificial Sequence
  Description of Artificial Sequence: Synthetic oligonucleotide
ggaaaccgcaacugugcua

SEQ ID NO: 172018 - RNA, 19 nt, Artificial Sequence
  Description of Artificial Sequence: Synthetic oligonucleotide
aggugguucgauacacguu

SEQ ID NO: 172019 - RNA, 19 nt, Artificial Sequence
  Description of Artificial Sequence: Synthetic oligonucleotide
agugcggaugaaagaccau

SEQ ID NO: 172020 - RNA, 19 nt, Artificial Sequence
  Description of Artificial Sequence: Synthetic oligonucleotide
gcggaugaaagaccaucaa

SEQ ID NO: 172021 - RNA, 19 nt, Artificial Sequence
  Description of Artificial Sequence: Synthetic oligonucleotide
accggcauuuuccgcccuu

SEQ ID NO: 172022 - RNA, 19 nt, Artificial Sequence
  Description of Artificial Sequence: Synthetic oligonucleotide
ucguuccauuuuggacuca

SEQ ID NO: 172023 - RNA, 19 nt, Artificial Sequence
  Description of Artificial Sequence: Synthetic oligonucleotide
guccuggcgcuugggguug

SEQ ID NO: 172024 - RNA, 19 nt, Artificial Sequence
  Description of Artificial Sequence: Synthetic oligonucleotide
gcagcgcgaagcugcgcgc

SEQ ID NO: 172025 - RNA, 19 nt, Artificial Sequence
  Description of Artificial Sequence: Synthetic oligonucleotide
gugaugcgauuaggaagca

SEQ ID NO: 172026 - RNA, 19 nt, Artificial Sequence
  Description of Artificial Sequence: Synthetic oligonucleotide
uucccuugacaaggccuuu

SEQ ID NO: 172027 - RNA, 19 nt, Artificial Sequence
  Description of Artificial Sequence: Synthetic oligonucleotide
gccuuauguccagcguggc

SEQ ID NO: 172028 - RNA, 19 nt, Artificial Sequence
  Description of Artificial Sequence: Synthetic oligonucleotide
cuccggcgacaccaggcga

SEQ ID NO: 172029 - RNA, 19 nt, Artificial Sequence
  Description of Artificial Sequence: Synthetic oligonucleotide
ccgcaacugugcuauuuga

SEQ ID NO: 172030 - RNA, 19 nt, Artificial Sequence
  Description of Artificial Sequence: Synthetic oligonucleotide
aggcuccguuacaaaugca

SEQ ID NO: 172031 - RNA, 19 nt, Artificial Sequence
  Description of Artificial Sequence: Synthetic oligonucleotide
gauccguagcacacccuuu

SEQ ID NO: 172032 - RNA, 19 nt, Artificial Sequence
  Description of Artificial Sequence: Synthetic oligonucleotide
gcgcggcacaagcggcugg

SEQ ID NO: 172033 - RNA, 19 nt, Artificial Sequence
  Description of Artificial Sequence: Synthetic oligonucleotide
gcguggcuacgugaucacc

SEQ ID NO: 172034 - RNA, 19 nt, Artificial Sequence
  Description of Artificial Sequence: Synthetic oligonucleotide
gccucaccucacaagaggu

SEQ ID NO: 172035 - RNA, 19 nt, Artificial Sequence
  Description of Artificial Sequence: Synthetic oligonucleotide
ccagcagacccgccagguc

SEQ ID NO: 172036 - RNA, 19 nt, Artificial Sequence
  Description of Artificial Sequence: Synthetic oligonucleotide
caucuaaaaggcgcuccuu

SEQ ID NO: 172037 - RNA, 19 nt, Artificial Sequence
  Description of Artificial Sequence: Synthetic oligonucleotide
cggagggcaaucuucauuu

SEQ ID NO: 172038 - RNA, 19 nt, Artificial Sequence
  Description of Artificial Sequence: Synthetic oligonucleotide
cgauacacguugagaaaua

SEQ ID NO: 172039 - RNA, 19 nt, Artificial Sequence
  Description of Artificial Sequence: Synthetic oligonucleotide
ggcgcuugggguugugaau

SEQ ID NO: 172040 - RNA, 19 nt, Artificial Sequence
  Description of Artificial Sequence: Synthetic oligonucleotide
gcugguuuauggucauguu

SEQ ID NO: 172041 - RNA, 19 nt, Artificial Sequence
  Description of Artificial Sequence: Synthetic oligonucleotide
ccacaaugagcuuguuccu

SEQ ID NO: 172042 - RNA, 19 nt, Artificial Sequence
  Description of Artificial Sequence: Synthetic oligonucleotide
ccuuggcgaguucuucaga

SEQ ID NO: 172043 - RNA, 19 nt, Artificial Sequence
  Description of Artificial Sequence: Synthetic oligonucleotide
gugauaugucugaggcaau

SEQ ID NO: 172044 - RNA, 19 nt, Artificial Sequence
  Description of Artificial Sequence: Synthetic oligonucleotide
gcugugccggauggucagc

SEQ ID NO: 172045 - RNA, 19 nt, Artificial Sequence
  Description of Artificial Sequence: Synthetic oligonucleotide
ccggcgacaccaggcgagg

SEQ ID NO: 172046 - RNA, 19 nt, Artificial Sequence
  Description of Artificial Sequence: Synthetic oligonucleotide
ggagacagacggccguuuu

SEQ ID NO: 172047 - RNA, 19 nt, Artificial Sequence
  Description of Artificial Sequence: Synthetic oligonucleotide
gacccgccagguccacacu

SEQ ID NO: 172048 - RNA, 19 nt, Artificial Sequence
  Description of Artificial Sequence: Synthetic oligonucleotide
gaccggcauuuuccgcccu

SEQ ID NO: 172049 - RNA, 19 nt, Artificial Sequence
  Description of Artificial Sequence: Synthetic oligonucleotide
ccguuuucacuugggcuga

SEQ ID NO: 172050 - RNA, 19 nt, Artificial Sequence
  Description of Artificial Sequence: Synthetic oligonucleotide
ccuuauguccagcguggcu

SEQ ID NO: 172051 - RNA, 19 nt, Artificial Sequence
  Description of Artificial Sequence: Synthetic oligonucleotide
uugccgcgucuggcaucag

SEQ ID NO: 172052 - RNA, 19 nt, Artificial Sequence
  Description of Artificial Sequence: Synthetic oligonucleotide
ccguagcacacccuuuggu

SEQ ID NO: 172053 - RNA, 19 nt, Artificial Sequence
  Description of Artificial Sequence: Synthetic oligonucleotide
caucagcgugagccacucu

SEQ ID NO: 172054 - RNA, 19 nt, Artificial Sequence
  Description of Artificial Sequence: Synthetic oligonucleotide
gaggaccccggagggcaau

SEQ ID NO: 172055 - RNA, 19 nt, Artificial Sequence
  Description of Artificial Sequence: Synthetic oligonucleotide
ccguuacaaaugcacccau

SEQ ID NO: 172056 - RNA, 19 nt, Artificial Sequence
  Description of Artificial Sequence: Synthetic oligonucleotide
ccggagggcaaucuucauu

SEQ ID NO: 172057 - RNA, 19 nt, Artificial Sequence
  Description of Artificial Sequence: Synthetic oligonucleotide
cuccugccuaggucacgau

SEQ ID NO: 172058 - RNA, 19 nt, Artificial Sequence
  Description of Artificial Sequence: Synthetic oligonucleotide
ccgcugguuuauggucaug

SEQ ID NO: 172059 - RNA, 19 nt, Artificial Sequence
  Description of Artificial Sequence: Synthetic oligonucleotide
ccuggcgcuugggguugug

SEQ ID NO: 172060 - RNA, 19 nt, Artificial Sequence
  Description of Artificial Sequence: Synthetic oligonucleotide
gcgcgcggcacaagcggcu

SEQ ID NO: 172061 - RNA, 19 nt, Artificial Sequence
  Description of Artificial Sequence: Synthetic oligonucleotide
cgcgcaccccgaggcgcac

SEQ ID NO: 172062 - RNA, 19 nt, Artificial Sequence
  Description of Artificial Sequence: Synthetic oligonucleotide
cccugacggaagguuccuu

SEQ ID NO: 172063 - RNA, 19 nt, Artificial Sequence
  Description of Artificial Sequence: Synthetic oligonucleotide
aaaauuacucuuuugaggu

SEQ ID NO: 172064 - RNA, 19 nt, Artificial Sequence
  Description of Artificial Sequence: Synthetic oligonucleotide
aauguuaggacuuugcuca

SEQ ID NO: 172065 - RNA, 19 nt, Artificial Sequence
  Description of Artificial Sequence: Synthetic oligonucleotide
aacgguacauguuaaaauc

SEQ ID NO: 172066 - RNA, 19 nt, Artificial Sequence
  Description of Artificial Sequence: Synthetic oligonucleotide
uguacugauguuuagaucu

SEQ ID NO: 172067 - RNA, 19 nt, Artificial Sequence
  Description of Artificial Sequence: Synthetic oligonucleotide
uuaaaauggguacugucag

SEQ ID NO: 172068 - RNA, 19 nt, Artificial Sequence
  Description of Artificial Sequence: Synthetic oligonucleotide
auuuagucgaagcugcagc

SEQ ID NO: 172069 - RNA, 19 nt, Artificial Sequence
  Description of Artificial Sequence: Synthetic oligonucleotide
aacguaugaaguuuuauaa

SEQ ID NO: 172070 - RNA, 19 nt, Artificial Sequence
  Description of Artificial Sequence: Synthetic oligonucleotide
uuuaagaggccguugcugg

SEQ ID NO: 172071 - RNA, 19 nt, Artificial Sequence
  Description of Artificial Sequence: Synthetic oligonucleotide
uucacacaaauacugauga

SEQ ID NO: 172072 - RNA, 19 nt, Artificial Sequence
  Description of Artificial Sequence: Synthetic oligonucleotide
ucuucggacacucaaaacu

SEQ ID NO: 172073 - RNA, 19 nt, Artificial Sequence
  Description of Artificial Sequence: Synthetic oligonucleotide
aaacgccugaacuagaaga

SEQ ID NO: 172074 - RNA, 19 nt, Artificial Sequence
  Description of Artificial Sequence: Synthetic oligonucleotide
agaugauaaaucugauacc

SEQ ID NO: 172075 - RNA, 19 nt, Artificial Sequence
  Description of Artificial Sequence: Synthetic oligonucleotide
uauaaaacgccugaacuag

SEQ ID NO: 172076 - RNA, 19 nt, Artificial Sequence
  Description of Artificial Sequence: Synthetic oligonucleotide
gauuucuagugguuuaggg

SEQ ID NO: 172077 - RNA, 19 nt, Artificial Sequence
  Description of Artificial Sequence: Synthetic oligonucleotide
acuuuguuaacuuggagga

SEQ ID NO: 172078 - RNA, 19 nt, Artificial Sequence
  Description of Artificial Sequence: Synthetic oligonucleotide
aauuacucuuuugagguag

SEQ ID NO: 172079 - RNA, 19 nt, Artificial Sequence
  Description of Artificial Sequence: Synthetic oligonucleotide
ugugcuacuuguaccaagg

SEQ ID NO: 172080 - RNA, 19 nt, Artificial Sequence
  Description of Artificial Sequence: Synthetic oligonucleotide
uaaaaucacgacuaagaca

SEQ ID NO: 172081 - RNA, 19 nt, Artificial Sequence
  Description of Artificial Sequence: Synthetic oligonucleotide
uuaaccaaagcaguacugg

SEQ ID NO: 172082 - RNA, 19 nt, Artificial Sequence
  Description of Artificial Sequence: Synthetic oligonucleotide
uuagaggucaucacuuuag

SEQ ID NO: 172083 - RNA, 19 nt, Artificial Sequence
  Description of Artificial Sequence: Synthetic oligonucleotide
gauaauuagucucugaacu

SEQ ID NO: 172084 - RNA, 19 nt, Artificial Sequence
  Description of Artificial Sequence: Synthetic oligonucleotide
aauuuugagggguuagcug

SEQ ID NO: 172085 - RNA, 19 nt, Artificial Sequence
  Description of Artificial Sequence: Synthetic oligonucleotide
uacuaaauuauguuuagua

SEQ ID NO: 172086 - RNA, 19 nt, Artificial Sequence
  Description of Artificial Sequence: Synthetic oligonucleotide
gaugauaaaucugauacca

SEQ ID NO: 172087 - RNA, 19 nt, Artificial Sequence
  Description of Artificial Sequence: Synthetic oligonucleotide
guaucaauuauuaaggguc

SEQ ID NO: 172088 - RNA, 19 nt, Artificial Sequence
  Description of Artificial Sequence: Synthetic oligonucleotide
ugucuaguagcauauaaaa

SEQ ID NO: 172089 - RNA, 19 nt, Artificial Sequence
  Description of Artificial Sequence: Synthetic oligonucleotide
uuucuagugguuuaggguc

SEQ ID NO: 172090 - RNA, 19 nt, Artificial Sequence
  Description of Artificial Sequence: Synthetic oligonucleotide
aaugucuaguagcauauaa

SEQ ID NO: 172091 - RNA, 19 nt, Artificial Sequence
  Description of Artificial Sequence: Synthetic oligonucleotide
aauaaguuuaauauuucau

SEQ ID NO: 172092 - RNA, 19 nt, Artificial Sequence
  Description of Artificial Sequence: Synthetic oligonucleotide
agaguacucacauuucuag

SEQ ID NO: 172093 - RNA, 19 nt, Artificial Sequence
  Description of Artificial Sequence: Synthetic oligonucleotide
cuaaccuggauaauuaguc

SEQ ID NO: 172094 - RNA, 19 nt, Artificial Sequence
  Description of Artificial Sequence: Synthetic oligonucleotide
aauuaccugccauaaauua

SEQ ID NO: 172095 - RNA, 19 nt, Artificial Sequence
  Description of Artificial Sequence: Synthetic oligonucleotide
auuauuaaggguccauuca

SEQ ID NO: 172096 - RNA, 19 nt, Artificial Sequence
  Description of Artificial Sequence: Synthetic oligonucleotide
aaacguaugaaguuuuaua

SEQ ID NO: 172097 - RNA, 19 nt, Artificial Sequence
  Description of Artificial Sequence: Synthetic oligonucleotide
uuuagaucucuuacaaugu

SEQ ID NO: 172098 - RNA, 19 nt, Artificial Sequence
  Description of Artificial Sequence: Synthetic oligonucleotide
ucucuuacaauguuaggac

SEQ ID NO: 172099 - RNA, 19 nt, Artificial Sequence
  Description of Artificial Sequence: Synthetic oligonucleotide
ugaaaaguccgucaacaac

SEQ ID NO: 172100 - RNA, 19 nt, Artificial Sequence
  Description of Artificial Sequence: Synthetic oligonucleotide
acugcuacacuucacacga

SEQ ID NO: 172101 - RNA, 19 nt, Artificial Sequence
  Description of Artificial Sequence: Synthetic oligonucleotide
acacgaaaacauccaaagc

SEQ ID NO: 172102 - RNA, 19 nt, Artificial Sequence
  Description of Artificial Sequence: Synthetic oligonucleotide
uggauaauuagucucugaa

SEQ ID NO: 172103 - RNA, 19 nt, Artificial Sequence
  Description of Artificial Sequence: Synthetic oligonucleotide
aggucaucacuuuagcaac

SEQ ID NO: 172104 - RNA, 19 nt, Artificial Sequence
  Description of Artificial Sequence: Synthetic oligonucleotide
aaacgguacauguuaaaau

SEQ ID NO: 172105 - RNA, 19 nt, Artificial Sequence
  Description of Artificial Sequence: Synthetic oligonucleotide
uucuuauaccuucuaggag

SEQ ID NO: 172106 - RNA, 19 nt, Artificial Sequence
  Description of Artificial Sequence: Synthetic oligonucleotide
uuguuaacuuggaggaacg

SEQ ID NO: 172107 - RNA, 19 nt, Artificial Sequence
  Description of Artificial Sequence: Synthetic oligonucleotide
uuuccugcguaaaauuugc

SEQ ID NO: 172108 - RNA, 19 nt, Artificial Sequence
  Description of Artificial Sequence: Synthetic oligonucleotide
auuucuagugguuuagggu

SEQ ID NO: 172109 - RNA, 19 nt, Artificial Sequence
  Description of Artificial Sequence: Synthetic oligonucleotide
ucugaaaaguccgucaaca

SEQ ID NO: 172110 - RNA, 19 nt, Artificial Sequence
  Description of Artificial Sequence: Synthetic oligonucleotide
augacaagcagcuuaaaua

SEQ ID NO: 172111 - RNA, 19 nt, Artificial Sequence
  Description of Artificial Sequence: Synthetic oligonucleotide
uuauuaaggguccauucau

SEQ ID NO: 172112 - RNA, 19 nt, Artificial Sequence
  Description of Artificial Sequence: Synthetic oligonucleotide
aaccaugucaucaccgugg

SEQ ID NO: 172113 - RNA, 19 nt, Artificial Sequence
  Description of Artificial Sequence: Synthetic oligonucleotide
aaaggcucaguuuuggguu

SEQ ID NO: 172114 - RNA, 19 nt, Artificial Sequence
  Description of Artificial Sequence: Synthetic oligonucleotide
ucuaaccuggauaauuagu

SEQ ID NO: 172115 - RNA, 19 nt, Artificial Sequence
  Description of Artificial Sequence: Synthetic oligonucleotide
uuuuauuagaggucaucac

SEQ ID NO: 172116 - RNA, 19 nt, Artificial Sequence
  Description of Artificial Sequence: Synthetic oligonucleotide
aaaacgccugaacuagaag

SEQ ID NO: 172117 - RNA, 19 nt, Artificial Sequence
  Description of Artificial Sequence: Synthetic oligonucleotide
aacagaugagagcuugucu

SEQ ID NO: 172118 - RNA, 19 nt, Artificial Sequence
  Description of Artificial Sequence: Synthetic oligonucleotide
uucgaguagaucuucggac

SEQ ID NO: 172119 - RNA, 19 nt, Artificial Sequence
  Description of Artificial Sequence: Synthetic oligonucleotide
aauuauuugacaacacuua

SEQ ID NO: 172120 - RNA, 19 nt, Artificial Sequence
  Description of Artificial Sequence: Synthetic oligonucleotide
aaccggucaaucuaaccug

SEQ ID NO: 172121 - RNA, 19 nt, Artificial Sequence
  Description of Artificial Sequence: Synthetic oligonucleotide
ggaaaauuacucuuuugag

SEQ ID NO: 172122 - RNA, 19 nt, Artificial Sequence
  Description of Artificial Sequence: Synthetic oligonucleotide
ucagaugcuaugcuuauuu

SEQ ID NO: 172123 - RNA, 19 nt, Artificial Sequence
  Description of Artificial Sequence: Synthetic oligonucleotide
ucguuuaagaggccguugc

SEQ ID NO: 172124 - RNA, 19 nt, Artificial Sequence
  Description of Artificial Sequence: Synthetic oligonucleotide
uuucgaguagaucuucgga

SEQ ID NO: 172125 - RNA, 19 nt, Artificial Sequence
  Description of Artificial Sequence: Synthetic oligonucleotide
cuucuaugauuucuagugg

SEQ ID NO: 172126 - RNA, 19 nt, Artificial Sequence
  Description of Artificial Sequence: Synthetic oligonucleotide
uguaagacugacucuagua

SEQ ID NO: 172127 - RNA, 19 nt, Artificial Sequence
  Description of Artificial Sequence: Synthetic oligonucleotide
ugacucuaguaucaaugag

SEQ ID NO: 172128 - RNA, 19 nt, Artificial Sequence
  Description of Artificial Sequence: Synthetic oligonucleotide
uauaaacguaugaaguuuu

SEQ ID NO: 172129 - RNA, 19 nt, Artificial Sequence
  Description of Artificial Sequence: Synthetic oligonucleotide
uccauauggaguuacuuua

SEQ ID NO: 172130 - RNA, 19 nt, Artificial Sequence
  Description of Artificial Sequence: Synthetic oligonucleotide
ucuucuaaugacacuacuu

SEQ ID NO: 172131 - RNA, 19 nt, Artificial Sequence
  Description of Artificial Sequence: Synthetic oligonucleotide
ucuuacaauguuaggacuu

SEQ ID NO: 172132 - RNA, 19 nt, Artificial Sequence
  Description of Artificial Sequence: Synthetic oligonucleotide
aguuaaccaaagcaguacu

SEQ ID NO: 172133 - RNA, 19 nt, Artificial Sequence
  Description of Artificial Sequence: Synthetic oligonucleotide
uugagaaucuucugaauua

SEQ ID NO: 172134 - RNA, 19 nt, Artificial Sequence
  Description of Artificial Sequence: Synthetic oligonucleotide
aauugcugaggacuccugu

SEQ ID NO: 172135 - RNA, 19 nt, Artificial Sequence
  Description of Artificial Sequence: Synthetic oligonucleotide
cacaauccaaauucaacac

SEQ ID NO: 172136 - RNA, 19 nt, Artificial Sequence
  Description of Artificial Sequence: Synthetic oligonucleotide
ucuaguagcuuggaggcgc

SEQ ID NO: 172137 - RNA, 19 nt, Artificial Sequence
  Description of Artificial Sequence: Synthetic oligonucleotide
auguuuaguaucuuuguua

SEQ ID NO: 172138 - RNA, 19 nt, Artificial Sequence
  Description of Artificial Sequence: Synthetic oligonucleotide
uucuucguuuaagaggccg

SEQ ID NO: 172139 - RNA, 19 nt, Artificial Sequence
  Description of Artificial Sequence: Synthetic oligonucleotide
auguuuagaucucuuacaa

SEQ ID NO: 172140 - RNA, 19 nt, Artificial Sequence
  Description of Artificial Sequence: Synthetic oligonucleotide
acuccuguuguucuggugu

SEQ ID NO: 172141 - RNA, 19 nt, Artificial Sequence
  Description of Artificial Sequence: Synthetic oligonucleotide
caauguuaggacuuugcuc

SEQ ID NO: 172142 - RNA, 19 nt, Artificial Sequence
  Description of Artificial Sequence: Synthetic oligonucleotide
gucaaucuaaccuggauaa

SEQ ID NO: 172143 - RNA, 19 nt, Artificial Sequence
  Description of Artificial Sequence: Synthetic oligonucleotide
aaaggccguacccgcaccg

SEQ ID NO: 172144 - RNA, 19 nt, Artificial Sequence
  Description of Artificial Sequence: Synthetic oligonucleotide
guuucgaguagaucuucgg

SEQ ID NO: 172145 - RNA, 19 nt, Artificial Sequence
  Description of Artificial Sequence: Synthetic oligonucleotide
acauccuaauaauaagcca

SEQ ID NO: 172146 - RNA, 19 nt, Artificial Sequence
  Description of Artificial Sequence: Synthetic oligonucleotide
ugcuaugcuuauuuuaaaa

SEQ ID NO: 172147 - RNA, 19 nt, Artificial Sequence
  Description of Artificial Sequence: Synthetic oligonucleotide
cuucuaucacacucgacac

SEQ ID NO: 172148 - RNA, 19 nt, Artificial Sequence
  Description of Artificial Sequence: Synthetic oligonucleotide
ucaguuuuggguucugaaa

SEQ ID NO: 172149 - RNA, 19 nt, Artificial Sequence
  Description of Artificial Sequence: Synthetic oligonucleotide
ucgaguagaucuucggaca

SEQ ID NO: 172150 - RNA, 19 nt, Artificial Sequence
  Description of Artificial Sequence: Synthetic oligonucleotide
aguagaucuucggacacuc

SEQ ID NO: 172151 - RNA, 19 nt, Artificial Sequence
  Description of Artificial Sequence: Synthetic oligonucleotide
uaaaacgccugaacuagaa

SEQ ID NO: 172152 - RNA, 19 nt, Artificial Sequence
  Description of Artificial Sequence: Synthetic oligonucleotide
cauaaugcuauuugguaga

SEQ ID NO: 172153 - RNA, 19 nt, Artificial Sequence
  Description of Artificial Sequence: Synthetic oligonucleotide
gaugcuaugcuuauuuuaa

SEQ ID NO: 172154 - RNA, 19 nt, Artificial Sequence
  Description of Artificial Sequence: Synthetic oligonucleotide
ugguuuguugaccuuuacu

SEQ ID NO: 172155 - RNA, 19 nt, Artificial Sequence
  Description of Artificial Sequence: Synthetic oligonucleotide
aacaaacugagaugauaaa

SEQ ID NO: 172156 - RNA, 19 nt, Artificial Sequence
  Description of Artificial Sequence: Synthetic oligonucleotide
cuagaccuaguccuugugc

SEQ ID NO: 172157 - RNA, 19 nt, Artificial Sequence
  Description of Artificial Sequence: Synthetic oligonucleotide
ugcuacuuguaccaaggaa

SEQ ID NO: 172158 - RNA, 19 nt, Artificial Sequence
  Description of Artificial Sequence: Synthetic oligonucleotide
ugagaugauaaaucugaua

SEQ ID NO: 172159 - RNA, 19 nt, Artificial Sequence
  Description of Artificial Sequence: Synthetic oligonucleotide
gauuuagucgaagcugcag

SEQ ID NO: 172160 - RNA, 19 nt, Artificial Sequence
  Description of Artificial Sequence: Synthetic oligonucleotide
augacacuacuuuccuugg

SEQ ID NO: 172161 - RNA, 19 nt, Artificial Sequence
  Description of Artificial Sequence: Synthetic oligonucleotide
uucguuugcagacuucuuu

SEQ ID NO: 172162 - RNA, 19 nt, Artificial Sequence
  Description of Artificial Sequence: Synthetic oligonucleotide
ucuagguaucaauuauuaa

SEQ ID NO: 172163 - RNA, 19 nt, Artificial Sequence
  Description of Artificial Sequence: Synthetic oligonucleotide
uagaucucuuacaauguua

SEQ ID NO: 172164 - RNA, 19 nt, Artificial Sequence
  Description of Artificial Sequence: Synthetic oligonucleotide
uuagaucucuuacaauguu

SEQ ID NO: 172165 - RNA, 19 nt, Artificial Sequence
  Description of Artificial Sequence: Synthetic oligonucleotide
aaucacgacuaagacagaa

SEQ ID NO: 172166 - RNA, 19 nt, Artificial Sequence
  Description of Artificial Sequence: Synthetic oligonucleotide
uaucaauuaccugccauaa

SEQ ID NO: 172167 - RNA, 19 nt, Artificial Sequence
  Description of Artificial Sequence: Synthetic oligonucleotide
ucuucguuuaagaggccgu

SEQ ID NO: 172168 - RNA, 19 nt, Artificial Sequence
  Description of Artificial Sequence: Synthetic oligonucleotide
uucacacgaaaacauccaa

SEQ ID NO: 172169 - RNA, 19 nt, Artificial Sequence
  Description of Artificial Sequence: Synthetic oligonucleotide
gaaccggucaaucuaaccu

SEQ ID NO: 172170 - RNA, 19 nt, Artificial Sequence
  Description of Artificial Sequence: Synthetic oligonucleotide
auauaaacguaugaaguuu

SEQ ID NO: 172171 - RNA, 19 nt, Artificial Sequence
  Description of Artificial Sequence: Synthetic oligonucleotide
uguggguuguuucagccuu

SEQ ID NO: 172172 - RNA, 19 nt, Artificial Sequence
  Description of Artificial Sequence: Synthetic oligonucleotide
agucugauauugcugguaa

SEQ ID NO: 172173 - RNA, 19 nt, Artificial Sequence
  Description of Artificial Sequence: Synthetic oligonucleotide
cuuuggaaaggaagacagc

SEQ ID NO: 172174 - RNA, 19 nt, Artificial Sequence
  Description of Artificial Sequence: Synthetic oligonucleotide
uacaaacgguacauguuaa

SEQ ID NO: 172175 - RNA, 19 nt, Artificial Sequence
  Description of Artificial Sequence: Synthetic oligonucleotide
cugcguaaaauuugcuuug

SEQ ID NO: 172176 - RNA, 19 nt, Artificial Sequence
  Description of Artificial Sequence: Synthetic oligonucleotide
auauggaguuacuuuacuu

SEQ ID NO: 172177 - RNA, 19 nt, Artificial Sequence
  Description of Artificial Sequence: Synthetic oligonucleotide
gugagagaauuuugagggg

SEQ ID NO: 172178 - RNA, 19 nt, Artificial Sequence
  Description of Artificial Sequence: Synthetic oligonucleotide
uuuuguuggucccgcuaug

SEQ ID NO: 172179 - RNA, 19 nt, Artificial Sequence
  Description of Artificial Sequence: Synthetic oligonucleotide
uauuaaggguccauucauu

SEQ ID NO: 172180 - RNA, 19 nt, Artificial Sequence
  Description of Artificial Sequence: Synthetic oligonucleotide
uuguaagacugacucuagu

SEQ ID NO: 172181 - RNA, 19 nt, Artificial Sequence
  Description of Artificial Sequence: Synthetic oligonucleotide
uucugaaaaguccgucaac

SEQ ID NO: 172182 - RNA, 19 nt, Artificial Sequence
  Description of Artificial Sequence: Synthetic oligonucleotide
gcuaagaagcagugaaccg

SEQ ID NO: 172183 - RNA, 19 nt, Artificial Sequence
  Description of Artificial Sequence: Synthetic oligonucleotide
aucaaguguaggcucuucu

SEQ ID NO: 172184 - RNA, 19 nt, Artificial Sequence
  Description of Artificial Sequence: Synthetic oligonucleotide
guuuaagaggccguugcug

SEQ ID NO: 172185 - RNA, 19 nt, Artificial Sequence
  Description of Artificial Sequence: Synthetic oligonucleotide
agguguggccggcacauuc

SEQ ID NO: 172186 - RNA, 19 nt, Artificial Sequence
  Description of Artificial Sequence: Synthetic oligonucleotide
ugaaaggccguacccgcac

SEQ ID NO: 172187 - RNA, 19 nt, Artificial Sequence
  Description of Artificial Sequence: Synthetic oligonucleotide
guuagugugucuuggcuaa

SEQ ID NO: 172188 - RNA, 19 nt, Artificial Sequence
  Description of Artificial Sequence: Synthetic oligonucleotide
uuagucgaagcugcagcag

SEQ ID NO: 172189 - RNA, 19 nt, Artificial Sequence
  Description of Artificial Sequence: Synthetic oligonucleotide
uggcugaaaggccguaccc

SEQ ID NO: 172190 - RNA, 19 nt, Artificial Sequence
  Description of Artificial Sequence: Synthetic oligonucleotide
cauccuaauaauaagccau

SEQ ID NO: 172191 - RNA, 19 nt, Artificial Sequence
  Description of Artificial Sequence: Synthetic oligonucleotide
aagcacacugcuacacuuc

SEQ ID NO: 172192 - RNA, 19 nt, Artificial Sequence
  Description of Artificial Sequence: Synthetic oligonucleotide
auguuaaaaucuugggcua

SEQ ID NO: 172193 - RNA, 19 nt, Artificial Sequence
  Description of Artificial Sequence: Synthetic oligonucleotide
uccugcguaaaauuugcuu

SEQ ID NO: 172194 - RNA, 19 nt, Artificial Sequence
  Description of Artificial Sequence: Synthetic oligonucleotide
aauugucaacaaggcaaug

SEQ ID NO: 172195 - RNA, 19 nt, Artificial Sequence
  Description of Artificial Sequence: Synthetic oligonucleotide
agcagugaaccggucaauc

SEQ ID NO: 172196 - RNA, 19 nt, Artificial Sequence
  Description of Artificial Sequence: Synthetic oligonucleotide
ucacacaaauacugaugac

SEQ ID NO: 172197 - RNA, 19 nt, Artificial Sequence
  Description of Artificial Sequence: Synthetic oligonucleotide
aacgccugaacuagaagaa

SEQ ID NO: 172198 - RNA, 19 nt, Artificial Sequence
  Description of Artificial Sequence: Synthetic oligonucleotide
caucuucuaaugacacuac

SEQ ID NO: 172199 - RNA, 19 nt, Artificial Sequence
  Description of Artificial Sequence: Synthetic oligonucleotide
ucgacacacuaacuucucu

SEQ ID NO: 172200 - RNA, 19 nt, Artificial Sequence
  Description of Artificial Sequence: Synthetic oligonucleotide
ugcccacaauccaaauuca

SEQ ID NO: 172201 - RNA, 19 nt, Artificial Sequence
  Description of Artificial Sequence: Synthetic oligonucleotide
uaacagaugagagcuuguc

SEQ ID NO: 172202 - RNA, 19 nt, Artificial Sequence
  Description of Artificial Sequence: Synthetic oligonucleotide
ggguguuucgaguagaucu

SEQ ID NO: 172203 - RNA, 19 nt, Artificial Sequence
  Description of Artificial Sequence: Synthetic oligonucleotide
aaaaguccgucaacaacau

SEQ ID NO: 172204 - RNA, 19 nt, Artificial Sequence
  Description of Artificial Sequence: Synthetic oligonucleotide
uucguuuaagaggccguug

SEQ ID NO: 172205 - RNA, 19 nt, Artificial Sequence
  Description of Artificial Sequence: Synthetic oligonucleotide
cuguacugauguuuagauc

SEQ ID NO: 172206 - RNA, 19 nt, Artificial Sequence
  Description of Artificial Sequence: Synthetic oligonucleotide
aaggccguacccgcaccgc

SEQ ID NO: 172207 - RNA, 19 nt, Artificial Sequence
  Description of Artificial Sequence: Synthetic oligonucleotide
ugacacuacuuuccuuggu

SEQ ID NO: 172208 - RNA, 19 nt, Artificial Sequence
  Description of Artificial Sequence: Synthetic oligonucleotide
uaacuuggaggaacgugua

SEQ ID NO: 172209 - RNA, 19 nt, Artificial Sequence
  Description of Artificial Sequence: Synthetic oligonucleotide
cagcauuauaguuaaccaa

SEQ ID NO: 172210 - RNA, 19 nt, Artificial Sequence
  Description of Artificial Sequence: Synthetic oligonucleotide
uuguggguuguuucagccu

SEQ ID NO: 172211 - RNA, 19 nt, Artificial Sequence
  Description of Artificial Sequence: Synthetic oligonucleotide
gguaucaauuauuaagggu

SEQ ID NO: 172212 - RNA, 19 nt, Artificial Sequence
  Description of Artificial Sequence: Synthetic oligonucleotide
uccuaauaauaagccauau

SEQ ID NO: 172213 - RNA, 19 nt, Artificial Sequence
  Description of Artificial Sequence: Synthetic oligonucleotide
uguugaccuuuacugcauc

SEQ ID NO: 172214 - RNA, 19 nt, Artificial Sequence
  Description of Artificial Sequence: Synthetic oligonucleotide
auaguuaaccaaagcagua

SEQ ID NO: 172215 - RNA, 19 nt, Artificial Sequence
  Description of Artificial Sequence: Synthetic oligonucleotide
aggccguacccgcaccgcc

SEQ ID NO: 172216 - RNA, 19 nt, Artificial Sequence
  Description of Artificial Sequence: Synthetic oligonucleotide
uagugguuuagggucacuc

SEQ ID NO: 172217 - RNA, 19 nt, Artificial Sequence
  Description of Artificial Sequence: Synthetic oligonucleotide
uuccucauuuggcacuaaa

SEQ ID NO: 172218 - RNA, 19 nt, Artificial Sequence
  Description of Artificial Sequence: Synthetic oligonucleotide
acucgacacacuaacuucu

SEQ ID NO: 172219 - RNA, 19 nt, Artificial Sequence
  Description of Artificial Sequence: Synthetic oligonucleotide
aacacucaaagugcauaaa

SEQ ID NO: 172220 - RNA, 19 nt, Artificial Sequence
  Description of Artificial Sequence: Synthetic oligonucleotide
agaaucagucucccacccu

SEQ ID NO: 172221 - RNA, 19 nt, Artificial Sequence
  Description of Artificial Sequence: Synthetic oligonucleotide
gaaaggccguacccgcacc

SEQ ID NO: 172222 - RNA, 19 nt, Artificial Sequence
  Description of Artificial Sequence: Synthetic oligonucleotide
accggucaaucuaaccugg

SEQ ID NO: 172223 - RNA, 19 nt, Artificial Sequence
  Description of Artificial Sequence: Synthetic oligonucleotide
aucaauuaccugccauaaa

SEQ ID NO: 172224 - RNA, 19 nt, Artificial Sequence
  Description of Artificial Sequence: Synthetic oligonucleotide
ggucuuucuagaccuaguc

SEQ ID NO: 172225 - RNA, 19 nt, Artificial Sequence
  Description of Artificial Sequence: Synthetic oligonucleotide
caaacgguacauguuaaaa

SEQ ID NO: 172226 - RNA, 19 nt, Artificial Sequence
  Description of Artificial Sequence: Synthetic oligonucleotide
gcugaaaggccguacccgc

SEQ ID NO: 172227 - RNA, 19 nt, Artificial Sequence
  Description of Artificial Sequence: Synthetic oligonucleotide
uuccugcguaaaauuugcu

SEQ ID NO: 172228 - RNA, 19 nt, Artificial Sequence
  Description of Artificial Sequence: Synthetic oligonucleotide
auaacaaagcacacugcua

SEQ ID NO: 172229 - RNA, 19 nt, Artificial Sequence
  Description of Artificial Sequence: Synthetic oligonucleotide
uuauaccuucuaggagucc

SEQ ID NO: 172230 - RNA, 19 nt, Artificial Sequence
  Description of Artificial Sequence: Synthetic oligonucleotide
ggcugaaaggccguacccg

SEQ ID NO: 172231 - RNA, 19 nt, Artificial Sequence
  Description of Artificial Sequence: Synthetic oligonucleotide
caauugcugaggacuccug

SEQ ID NO: 172232 - RNA, 19 nt, Artificial Sequence
  Description of Artificial Sequence: Synthetic oligonucleotide
cugaaaaguccgucaacaa

SEQ ID NO: 172233 - RNA, 19 nt, Artificial Sequence
  Description of Artificial Sequence: Synthetic oligonucleotide
cucgacacacuaacuucuc

SEQ ID NO: 172234 - RNA, 19 nt, Artificial Sequence
  Description of Artificial Sequence: Synthetic oligonucleotide
aaaugucuaguagcauaua

SEQ ID NO: 172235 - RNA, 19 nt, Artificial Sequence
  Description of Artificial Sequence: Synthetic oligonucleotide
uugagggguuagcuguguc

SEQ ID NO: 172236 - RNA, 19 nt, Artificial Sequence
  Description of Artificial Sequence: Synthetic oligonucleotide
cuggauaauuagucucuga

SEQ ID NO: 172237 - RNA, 19 nt, Artificial Sequence
  Description of Artificial Sequence: Synthetic oligonucleotide
auaaaacgccugaacuaga

SEQ ID NO: 172238 - RNA, 19 nt, Artificial Sequence
  Description of Artificial Sequence: Synthetic oligonucleotide
caccgccacugucacacgg

SEQ ID NO: 172239 - RNA, 19 nt, Artificial Sequence
  Description of Artificial Sequence: Synthetic oligonucleotide
cuucuucguuuaagaggcc

SEQ ID NO: 172240 - RNA, 19 nt, Artificial Sequence
  Description of Artificial Sequence: Synthetic oligonucleotide
acuccauauggaguuacuu

SEQ ID NO: 172241 - RNA, 19 nt, Artificial Sequence
  Description of Artificial Sequence: Synthetic oligonucleotide
ccgugguugguguuuacag

SEQ ID NO: 172242 - RNA, 19 nt, Artificial Sequence
  Description of Artificial Sequence: Synthetic oligonucleotide
acacgguccgugcucggca

SEQ ID NO: 172243 - RNA, 19 nt, Artificial Sequence
  Description of Artificial Sequence: Synthetic oligonucleotide
uuacucuuuugagguagau

SEQ ID NO: 172244 - RNA, 19 nt, Artificial Sequence
  Description of Artificial Sequence: Synthetic oligonucleotide
caacucuuucagcugggca

SEQ ID NO: 172245 - RNA, 19 nt, Artificial Sequence
  Description of Artificial Sequence: Synthetic oligonucleotide
agaucuucggacacucaaa

SEQ ID NO: 172246 - RNA, 19 nt, Artificial Sequence
  Description of Artificial Sequence: Synthetic oligonucleotide
auuacucuuuugagguaga

SEQ ID NO: 172247 - RNA, 19 nt, Artificial Sequence
  Description of Artificial Sequence: Synthetic oligonucleotide
auuuggcacuaaaauggau

SEQ ID NO: 172248 - RNA, 19 nt, Artificial Sequence
  Description of Artificial Sequence: Synthetic oligonucleotide
agcuuagcugacaaaggua

SEQ ID NO: 172249 - RNA, 19 nt, Artificial Sequence
  Description of Artificial Sequence: Synthetic oligonucleotide
ccugaacuagaagaacccc

SEQ ID NO: 172250 - RNA, 19 nt, Artificial Sequence
  Description of Artificial Sequence: Synthetic oligonucleotide
cuucggacacucaaaacuu

SEQ ID NO: 172251 - RNA, 19 nt, Artificial Sequence
  Description of Artificial Sequence: Synthetic oligonucleotide
aggguccauucauuacaca

SEQ ID NO: 172252 - RNA, 19 nt, Artificial Sequence
  Description of Artificial Sequence: Synthetic oligonucleotide
guacugauguuuagaucuc

SEQ ID NO: 172253 - RNA, 19 nt, Artificial Sequence
  Description of Artificial Sequence: Synthetic oligonucleotide
aaaucacgacuaagacaga

SEQ ID NO: 172254 - RNA, 19 nt, Artificial Sequence
  Description of Artificial Sequence: Synthetic oligonucleotide
auguuaggacuuugcucau

SEQ ID NO: 172255 - RNA, 19 nt, Artificial Sequence
  Description of Artificial Sequence: Synthetic oligonucleotide
gguagucuguuucuaggua

SEQ ID NO: 172256 - RNA, 19 nt, Artificial Sequence
  Description of Artificial Sequence: Synthetic oligonucleotide
accgugguugguguuuaca

SEQ ID NO: 172257 - RNA, 19 nt, Artificial Sequence
  Description of Artificial Sequence: Synthetic oligonucleotide
gucuaguagcauauaaaau

SEQ ID NO: 172258 - RNA, 19 nt, Artificial Sequence
  Description of Artificial Sequence: Synthetic oligonucleotide
guuggucccgcuaugacuu

SEQ ID NO: 172259 - RNA, 19 nt, Artificial Sequence
  Description of Artificial Sequence: Synthetic oligonucleotide
gcggguucuagcagaaacc

SEQ ID NO: 172260 - RNA, 19 nt, Artificial Sequence
  Description of Artificial Sequence: Synthetic oligonucleotide
gugcuacuuguaccaagga

SEQ ID NO: 172261 - RNA, 19 nt, Artificial Sequence
  Description of Artificial Sequence: Synthetic oligonucleotide
guguuucgaguagaucuuc

SEQ ID NO: 172262 - RNA, 19 nt, Artificial Sequence
  Description of Artificial Sequence: Synthetic oligonucleotide
uguuaggacuuugcucauu

SEQ ID NO: 172263 - RNA, 19 nt, Artificial Sequence
  Description of Artificial Sequence: Synthetic oligonucleotide
cuaggagugagagaauuuu

SEQ ID NO: 172264 - RNA, 19 nt, Artificial Sequence
  Description of Artificial Sequence: Synthetic oligonucleotide
accuucuaggagucccuuu

SEQ ID NO: 172265 - RNA, 19 nt, Artificial Sequence
  Description of Artificial Sequence: Synthetic oligonucleotide
cacgguccgugcucggcac

SEQ ID NO: 172266 - RNA, 19 nt, Artificial Sequence
  Description of Artificial Sequence: Synthetic oligonucleotide
agacugacucuaguaucaa

SEQ ID NO: 172267 - RNA, 19 nt, Artificial Sequence
  Description of Artificial Sequence: Synthetic oligonucleotide
ggacuuugcucauuuucua

SEQ ID NO: 172268 - RNA, 19 nt, Artificial Sequence
  Description of Artificial Sequence: Synthetic oligonucleotide
gacugacucuaguaucaau

SEQ ID NO: 172269 - RNA, 19 nt, Artificial Sequence
  Description of Artificial Sequence: Synthetic oligonucleotide
cucuaguaucaaugagaaa

SEQ ID NO: 172270 - RNA, 19 nt, Artificial Sequence
  Description of Artificial Sequence: Synthetic oligonucleotide
ccugcguaaaauuugcuuu

SEQ ID NO: 172271 - RNA, 19 nt, Artificial Sequence
  Description of Artificial Sequence: Synthetic oligonucleotide
gcuacacuucacacgaaaa

SEQ ID NO: 172272 - RNA, 19 nt, Artificial Sequence
  Description of Artificial Sequence: Synthetic oligonucleotide
guagaucuucggacacuca

SEQ ID NO: 172273 - RNA, 19 nt, Artificial Sequence
  Description of Artificial Sequence: Synthetic oligonucleotide
cucuuuugagguagauuau

SEQ ID NO: 172274 - RNA, 19 nt, Artificial Sequence
  Description of Artificial Sequence: Synthetic oligonucleotide
ccuggauaauuagucucug

SEQ ID NO: 172275 - RNA, 19 nt, Artificial Sequence
  Description of Artificial Sequence: Synthetic oligonucleotide
gucugauauugcugguaau

SEQ ID NO: 172276 - RNA, 19 nt, Artificial Sequence
  Description of Artificial Sequence: Synthetic oligonucleotide
acgguccgugcucggcaca

SEQ ID NO: 172277 - RNA, 19 nt, Artificial Sequence
  Description of Artificial Sequence: Synthetic oligonucleotide
cacuccauauggaguuacu

SEQ ID NO: 172278 - RNA, 19 nt, Artificial Sequence
  Description of Artificial Sequence: Synthetic oligonucleotide
ccacuccauauggaguuac

SEQ ID NO: 172279 - RNA, 19 nt, Artificial Sequence
  Description of Artificial Sequence: Synthetic oligonucleotide
ccuaauaauaagccauauu

SEQ ID NO: 172280 - RNA, 19 nt, Artificial Sequence
  Description of Artificial Sequence: Synthetic oligonucleotide
gguguuucgaguagaucuu

SEQ ID NO: 172281 - RNA, 19 nt, Artificial Sequence
  Description of Artificial Sequence: Synthetic oligonucleotide
ggccggcacauucaauucu

SEQ ID NO: 172282 - RNA, 19 nt, Artificial Sequence
  Description of Artificial Sequence: Synthetic oligonucleotide
ggucaucacuuuagcaacu

SEQ ID NO: 172283 - RNA, 19 nt, Artificial Sequence
  Description of Artificial Sequence: Synthetic oligonucleotide
cugcuacacuucacacgaa

SEQ ID NO: 172284 - RNA, 19 nt, Artificial Sequence
  Description of Artificial Sequence: Synthetic oligonucleotide
gguccgugcucggcacagg

SEQ ID NO: 172285 - RNA, 19 nt, Artificial Sequence
  Description of Artificial Sequence: Synthetic oligonucleotide
gccguacccgcaccgccac

SEQ ID NO: 172286 - RNA, 19 nt, Artificial Sequence
  Description of Artificial Sequence: Synthetic oligonucleotide
ugcucggcacaggcauuuu

SEQ ID NO: 172287 - RNA, 19 nt, Artificial Sequence
  Description of Artificial Sequence: Synthetic oligonucleotide
gggcuuguuagugugucuu

SEQ ID NO: 172288 - RNA, 19 nt, Artificial Sequence
  Description of Artificial Sequence: Synthetic oligonucleotide
ccacccucauuguaagacu

SEQ ID NO: 172289 - RNA, 19 nt, Artificial Sequence
  Description of Artificial Sequence: Synthetic oligonucleotide
ccggucaaucuaaccugga

SEQ ID NO: 172290 - RNA, 19 nt, Artificial Sequence
  Description of Artificial Sequence: Synthetic oligonucleotide
ggccguacccgcaccgcca

SEQ ID NO: 172291 - RNA, 19 nt, Artificial Sequence
  Description of Artificial Sequence: Synthetic oligonucleotide
gugcucggcacaggcauuu

SEQ ID NO: 172292 - RNA, 19 nt, Artificial Sequence
  Description of Artificial Sequence: Synthetic oligonucleotide
cuagugguuuagggucacu

SEQ ID NO: 172293 - RNA, 19 nt, Artificial Sequence
  Description of Artificial Sequence: Synthetic oligonucleotide
cgcuaugacuugcugcugu

SEQ ID NO: 172294 - RNA, 19 nt, Artificial Sequence
  Description of Artificial Sequence: Synthetic oligonucleotide
caucaccgugguugguguu

SEQ ID NO: 172295 - RNA, 19 nt, Artificial Sequence
  Description of Artificial Sequence: Synthetic oligonucleotide
ggucccgcuaugacuugcu

SEQ ID NO: 172296 - RNA, 19 nt, Artificial Sequence
  Description of Artificial Sequence: Synthetic oligonucleotide
ccgcuaugacuugcugcug

SEQ ID NO: 172297 - RNA, 19 nt, Artificial Sequence
  Description of Artificial Sequence: Synthetic oligonucleotide
aaugaauacaaauaggcac

SEQ ID NO: 172298 - RNA, 19 nt, Artificial Sequence
  Description of Artificial Sequence: Synthetic oligonucleotide
uaaucuauggcacaaauag

SEQ ID NO: 172299 - RNA, 19 nt, Artificial Sequence
  Description of Artificial Sequence: Synthetic oligonucleotide
aauaacaggucaaauaccc

SEQ ID NO: 172300 - RNA, 19 nt, Artificial Sequence
  Description of Artificial Sequence: Synthetic oligonucleotide
uuaauaacaggucaaauac

SEQ ID NO: 172301 - RNA, 19 nt, Artificial Sequence
  Description of Artificial Sequence: Synthetic oligonucleotide
aggacgaacaauuagacag

SEQ ID NO: 172302 - RNA, 19 nt, Artificial Sequence
  Description of Artificial Sequence: Synthetic oligonucleotide
aaggcaauaauacuugaag

SEQ ID NO: 172303 - RNA, 19 nt, Artificial Sequence
  Description of Artificial Sequence: Synthetic oligonucleotide
uagaaucaaaugaugaagg

SEQ ID NO: 172304 - RNA, 19 nt, Artificial Sequence
  Description of Artificial Sequence: Synthetic oligonucleotide
aauguuauaggaucuucuc

SEQ ID NO: 172305 - RNA, 19 nt, Artificial Sequence
  Description of Artificial Sequence: Synthetic oligonucleotide
uucaauauuguuccaaggc

SEQ ID NO: 172306 - RNA, 19 nt, Artificial Sequence
  Description of Artificial Sequence: Synthetic oligonucleotide
ucuuauuaagguaacaauc

SEQ ID NO: 172307 - RNA, 19 nt, Artificial Sequence
  Description of Artificial Sequence: Synthetic oligonucleotide
aaguaaaaguguucgaaug

SEQ ID NO: 172308 - RNA, 19 nt, Artificial Sequence
  Description of Artificial Sequence: Synthetic oligonucleotide
cuuaucauguccaggauag

SEQ ID NO: 172309 - RNA, 19 nt, Artificial Sequence
  Description of Artificial Sequence: Synthetic oligonucleotide
uaaguguaguauaaggcag

SEQ ID NO: 172310 - RNA, 19 nt, Artificial Sequence
  Description of Artificial Sequence: Synthetic oligonucleotide
ucaauauuguuccaaggca

SEQ ID NO: 172311 - RNA, 19 nt, Artificial Sequence
  Description of Artificial Sequence: Synthetic oligonucleotide
uuuaauaacaggucaaaua

SEQ ID NO: 172312 - RNA, 19 nt, Artificial Sequence
  Description of Artificial Sequence: Synthetic oligonucleotide
uuuaguaaguuccauguau

SEQ ID NO: 172313 - RNA, 19 nt, Artificial Sequence
  Description of Artificial Sequence: Synthetic oligonucleotide
aauaacuucuugcuuacaa

SEQ ID NO: 172314 - RNA, 19 nt, Artificial Sequence
  Description of Artificial Sequence: Synthetic oligonucleotide
uccuaaguguaguauaagg

SEQ ID NO: 172315 - RNA, 19 nt, Artificial Sequence
  Description of Artificial Sequence: Synthetic oligonucleotide
cuuaucaagaggcaagcgg

SEQ ID NO: 172316 - RNA, 19 nt, Artificial Sequence
  Description of Artificial Sequence: Synthetic oligonucleotide
cuaagagaauucaauauug

SEQ ID NO: 172317 - RNA, 19 nt, Artificial Sequence
  Description of Artificial Sequence: Synthetic oligonucleotide
auacgaaagauucaggagu

SEQ ID NO: 172318 - RNA, 19 nt, Artificial Sequence
  Description of Artificial Sequence: Synthetic oligonucleotide
guaaguuccauguauaauc

SEQ ID NO: 172319 - RNA, 19 nt, Artificial Sequence
  Description of Artificial Sequence: Synthetic oligonucleotide
uugcuaauacgaaagauuc

SEQ ID NO: 172320 - RNA, 19 nt, Artificial Sequence
  Description of Artificial Sequence: Synthetic oligonucleotide
aauaguugggcaauagcuc

SEQ ID NO: 172321 - RNA, 19 nt, Artificial Sequence
  Description of Artificial Sequence: Synthetic oligonucleotide
uuaacagaucuacaagcag

SEQ ID NO: 172322 - RNA, 19 nt, Artificial Sequence
  Description of Artificial Sequence: Synthetic oligonucleotide
acuuagaccaugcagaaau

SEQ ID NO: 172323 - RNA, 19 nt, Artificial Sequence
  Description of Artificial Sequence: Synthetic oligonucleotide
uuuucacuaucaauggagc

SEQ ID NO: 172324 - RNA, 19 nt, Artificial Sequence
  Description of Artificial Sequence: Synthetic oligonucleotide
aaagugucuuuuaacuccc

SEQ ID NO: 172325 - RNA, 19 nt, Artificial Sequence
  Description of Artificial Sequence: Synthetic oligonucleotide
guucgaaugaaguagucug

SEQ ID NO: 172326 - RNA, 19 nt, Artificial Sequence
  Description of Artificial Sequence: Synthetic oligonucleotide
acuuacugaaucucugugg

SEQ ID NO: 172327 - RNA, 19 nt, Artificial Sequence
  Description of Artificial Sequence: Synthetic oligonucleotide
acucaaguaaaaguguucg

SEQ ID NO: 172328 - RNA, 19 nt, Artificial Sequence
  Description of Artificial Sequence: Synthetic oligonucleotide
ucugauaaccugcagugcu

SEQ ID NO: 172329 - RNA, 19 nt, Artificial Sequence
  Description of Artificial Sequence: Synthetic oligonucleotide
aggguuaagagacauuaag

SEQ ID NO: 172330 - RNA, 19 nt, Artificial Sequence
  Description of Artificial Sequence: Synthetic oligonucleotide
augaauacaaauaggcacg

SEQ ID NO: 172331 - RNA, 19 nt, Artificial Sequence
  Description of Artificial Sequence: Synthetic oligonucleotide
aaucuauggcacaaauagc

SEQ ID NO: 172332 - RNA, 19 nt, Artificial Sequence
  Description of Artificial Sequence: Synthetic oligonucleotide
uaauaacaggucaaauacc

SEQ ID NO: 172333 - RNA, 19 nt, Artificial Sequence
  Description of Artificial Sequence: Synthetic oligonucleotide
aguccuauaaaucuggcuu

SEQ ID NO: 172334 - RNA, 19 nt, Artificial Sequence
  Description of Artificial Sequence: Synthetic oligonucleotide
guuggaaagggcugaaggg

SEQ ID NO: 172335 - RNA, 19 nt, Artificial Sequence
  Description of Artificial Sequence: Synthetic oligonucleotide
uuucauuacuaucagcgau

SEQ ID NO: 172336 - RNA, 19 nt, Artificial Sequence
  Description of Artificial Sequence: Synthetic oligonucleotide
uuuaacucccugaaucaug

SEQ ID NO: 172337 - RNA, 19 nt, Artificial Sequence
  Description of Artificial Sequence: Synthetic oligonucleotide
aagacggaguccuauaaau

SEQ ID NO: 172338 - RNA, 19 nt, Artificial Sequence
  Description of Artificial Sequence: Synthetic oligonucleotide
uagcguuccucccaaaucc

SEQ ID NO: 172339 - RNA, 19 nt, Artificial Sequence
  Description of Artificial Sequence: Synthetic oligonucleotide
cauuaagcuuaucaugucc

SEQ ID NO: 172340 - RNA, 19 nt, Artificial Sequence
  Description of Artificial Sequence: Synthetic oligonucleotide
aauaggcacgucuucgugu

SEQ ID NO: 172341 - RNA, 19 nt, Artificial Sequence
  Description of Artificial Sequence: Synthetic oligonucleotide
aagagaauucaauauuguu

SEQ ID NO: 172342 - RNA, 19 nt, Artificial Sequence
  Description of Artificial Sequence: Synthetic oligonucleotide
guacacaaagacuuagacc

SEQ ID NO: 172343 - RNA, 19 nt, Artificial Sequence
  Description of Artificial Sequence: Synthetic oligonucleotide
ugcaaauguuauaggaucu

SEQ ID NO: 172344 - RNA, 19 nt, Artificial Sequence
  Description of Artificial Sequence: Synthetic oligonucleotide
cuaauacgaaagauucagg

SEQ ID NO: 172345 - RNA, 19 nt, Artificial Sequence
  Description of Artificial Sequence: Synthetic oligonucleotide
ucaggacgaacaauuagac

SEQ ID NO: 172346 - RNA, 19 nt, Artificial Sequence
  Description of Artificial Sequence: Synthetic oligonucleotide
ugaaguucauacaauugua

SEQ ID NO: 172347 - RNA, 19 nt, Artificial Sequence
  Description of Artificial Sequence: Synthetic oligonucleotide
aaauguuauaggaucuucu

SEQ ID NO: 172348 - RNA, 19 nt, Artificial Sequence
  Description of Artificial Sequence: Synthetic oligonucleotide
ugcucacuugcuaauacga

SEQ ID NO: 172349 - RNA, 19 nt, Artificial Sequence
  Description of Artificial Sequence: Synthetic oligonucleotide
ugaaaugaccaugucacgu

SEQ ID NO: 172350 - RNA, 19 nt, Artificial Sequence
  Description of Artificial Sequence: Synthetic oligonucleotide
uuacuaucagcgauuuucu

SEQ ID NO: 172351 - RNA, 19 nt, Artificial Sequence
  Description of Artificial Sequence: Synthetic oligonucleotide
aacucaaguaaaaguguuc

SEQ ID NO: 172352 - RNA, 19 nt, Artificial Sequence
  Description of Artificial Sequence: Synthetic oligonucleotide
uuaagcuuaucauguccag

SEQ ID NO: 172353 - RNA, 19 nt, Artificial Sequence
  Description of Artificial Sequence: Synthetic oligonucleotide
aacugauagagccgacgag

SEQ ID NO: 172354 - RNA, 19 nt, Artificial Sequence
  Description of Artificial Sequence: Synthetic oligonucleotide
agcuaagagaauucaauau

SEQ ID NO: 172355 - RNA, 19 nt, Artificial Sequence
  Description of Artificial Sequence: Synthetic oligonucleotide
acaaagacuuagaccaugc

SEQ ID NO: 172356 - RNA, 19 nt, Artificial Sequence
  Description of Artificial Sequence: Synthetic oligonucleotide
auuacgaugaucacaacau

SEQ ID NO: 172357 - RNA, 19 nt, Artificial Sequence
  Description of Artificial Sequence: Synthetic oligonucleotide
ucuaaucccaauugaguuc

SEQ ID NO: 172358 - RNA, 19 nt, Artificial Sequence
  Description of Artificial Sequence: Synthetic oligonucleotide
ucucaaacucucgacaggc

SEQ ID NO: 172359 - RNA, 19 nt, Artificial Sequence
  Description of Artificial Sequence: Synthetic oligonucleotide
gguuggaaagggcugaagg

SEQ ID NO: 172360 - RNA, 19 nt, Artificial Sequence
  Description of Artificial Sequence: Synthetic oligonucleotide
uguguucaacaguugauuc

SEQ ID NO: 172361 - RNA, 19 nt, Artificial Sequence
  Description of Artificial Sequence: Synthetic oligonucleotide
caggccauuacgaugauca

SEQ ID NO: 172362 - RNA, 19 nt, Artificial Sequence
  Description of Artificial Sequence: Synthetic oligonucleotide
guaguaacgguuggaaagg

SEQ ID NO: 172363 - RNA, 19 nt, Artificial Sequence
  Description of Artificial Sequence: Synthetic oligonucleotide
gcuaauacgaaagauucag

SEQ ID NO: 172364 - RNA, 19 nt, Artificial Sequence
  Description of Artificial Sequence: Synthetic oligonucleotide
aaguaacacacacaagcua

SEQ ID NO: 172365 - RNA, 19 nt, Artificial Sequence
  Description of Artificial Sequence: Synthetic oligonucleotide
ucaaauaguugggcaauag

SEQ ID NO: 172366 - RNA, 19 nt, Artificial Sequence
  Description of Artificial Sequence: Synthetic oligonucleotide
ucacuaucaauggagcuga

SEQ ID NO: 172367 - RNA, 19 nt, Artificial Sequence
  Description of Artificial Sequence: Synthetic oligonucleotide
uuucacuaucaauggagcu

SEQ ID NO: 172368 - RNA, 19 nt, Artificial Sequence
  Description of Artificial Sequence: Synthetic oligonucleotide
uauauaccuacuugcccug

SEQ ID NO: 172369 - RNA, 19 nt, Artificial Sequence
  Description of Artificial Sequence: Synthetic oligonucleotide
cucucgacaggccauuacg

SEQ ID NO: 172370 - RNA, 19 nt, Artificial Sequence
  Description of Artificial Sequence: Synthetic oligonucleotide
aaagacggaguccuauaaa

SEQ ID NO: 172371 - RNA, 19 nt, Artificial Sequence
  Description of Artificial Sequence: Synthetic oligonucleotide
uucauacaauuguagcugu

SEQ ID NO: 172372 - RNA, 19 nt, Artificial Sequence
  Description of Artificial Sequence: Synthetic oligonucleotide
ugcuaauacgaaagauuca

SEQ ID NO: 172373 - RNA, 19 nt, Artificial Sequence
  Description of Artificial Sequence: Synthetic oligonucleotide
ucuuaucaagaggcaagcg

SEQ ID NO: 172374 - RNA, 19 nt, Artificial Sequence
  Description of Artificial Sequence: Synthetic oligonucleotide
uggagcugaccauauuucc

SEQ ID NO: 172375 - RNA, 19 nt, Artificial Sequence
  Description of Artificial Sequence: Synthetic oligonucleotide
aaaccaauauccguggcuu

SEQ ID NO: 172376 - RNA, 19 nt, Artificial Sequence
  Description of Artificial Sequence: Synthetic oligonucleotide
aguaacacacacaagcuaa

SEQ ID NO: 172377 - RNA, 19 nt, Artificial Sequence
  Description of Artificial Sequence: Synthetic oligonucleotide
uguuuguacugcugagugc

SEQ ID NO: 172378 - RNA, 19 nt, Artificial Sequence
  Description of Artificial Sequence: Synthetic oligonucleotide
acugauagagccgacgaga

SEQ ID NO: 172379 - RNA, 19 nt, Artificial Sequence
  Description of Artificial Sequence: Synthetic oligonucleotide
ucucgacaggccauuacga

SEQ ID NO: 172380 - RNA, 19 nt, Artificial Sequence
  Description of Artificial Sequence: Synthetic oligonucleotide
uuugggugguaccugucac

SEQ ID NO: 172381 - RNA, 19 nt, Artificial Sequence
  Description of Artificial Sequence: Synthetic oligonucleotide
uaacgguuggaaagggcug

SEQ ID NO: 172382 - RNA, 19 nt, Artificial Sequence
  Description of Artificial Sequence: Synthetic oligonucleotide
ucccaauugaguucaaauu

SEQ ID NO: 172383 - RNA, 19 nt, Artificial Sequence
  Description of Artificial Sequence: Synthetic oligonucleotide
uacgaaagauucaggaguu

SEQ ID NO: 172384 - RNA, 19 nt, Artificial Sequence
  Description of Artificial Sequence: Synthetic oligonucleotide
ucuguuagacuuucuguua

SEQ ID NO: 172385 - RNA, 19 nt, Artificial Sequence
  Description of Artificial Sequence: Synthetic oligonucleotide
gacggcgucaagaugggag

SEQ ID NO: 172386 - RNA, 19 nt, Artificial Sequence
  Description of Artificial Sequence: Synthetic oligonucleotide
gcuagaugaaaacaagaac

SEQ ID NO: 172387 - RNA, 19 nt, Artificial Sequence
  Description of Artificial Sequence: Synthetic oligonucleotide
ucccaaauccugucuagca

SEQ ID NO: 172388 - RNA, 19 nt, Artificial Sequence
  Description of Artificial Sequence: Synthetic oligonucleotide
aguauaauuuaaagugucu

SEQ ID NO: 172389 - RNA, 19 nt, Artificial Sequence
  Description of Artificial Sequence: Synthetic oligonucleotide
acggcgucaagaugggagg

SEQ ID NO: 172390 - RNA, 19 nt, Artificial Sequence
  Description of Artificial Sequence: Synthetic oligonucleotide
ucaacaguugauucauuuu

SEQ ID NO: 172391 - RNA, 19 nt, Artificial Sequence
  Description of Artificial Sequence: Synthetic oligonucleotide
aguaacgguuggaaagggc

SEQ ID NO: 172392 - RNA, 19 nt, Artificial Sequence
  Description of Artificial Sequence: Synthetic oligonucleotide
cacagcgauugccaaaacc

SEQ ID NO: 172393 - RNA, 19 nt, Artificial Sequence
  Description of Artificial Sequence: Synthetic oligonucleotide
acacaguaguaacgguugg

SEQ ID NO: 172394 - RNA, 19 nt, Artificial Sequence
  Description of Artificial Sequence: Synthetic oligonucleotide
gauccacgagcucacgagc

SEQ ID NO: 172395 - RNA, 19 nt, Artificial Sequence
  Description of Artificial Sequence: Synthetic oligonucleotide
ggcaacacuuuccuagugg

SEQ ID NO: 172396 - RNA, 19 nt, Artificial Sequence
  Description of Artificial Sequence: Synthetic oligonucleotide
cuuucggcacuccuggcag

SEQ ID NO: 172397 - RNA, 19 nt, Artificial Sequence
  Description of Artificial Sequence: Synthetic oligonucleotide
acaaguucauauugcuccu

SEQ ID NO: 172398 - RNA, 19 nt, Artificial Sequence
  Description of Artificial Sequence: Synthetic oligonucleotide
uguagcguuccucccaaau

SEQ ID NO: 172399 - RNA, 19 nt, Artificial Sequence
  Description of Artificial Sequence: Synthetic oligonucleotide
aguuccauguauaaucuau

SEQ ID NO: 172400 - RNA, 19 nt, Artificial Sequence
  Description of Artificial Sequence: Synthetic oligonucleotide
gaaagacggaguccuauaa

SEQ ID NO: 172401 - RNA, 19 nt, Artificial Sequence
  Description of Artificial Sequence: Synthetic oligonucleotide
ugugccgcaccgcagucca

SEQ ID NO: 172402 - RNA, 19 nt, Artificial Sequence
  Description of Artificial Sequence: Synthetic oligonucleotide
aggauagaaucaaaugaug

SEQ ID NO: 172403 - RNA, 19 nt, Artificial Sequence
  Description of Artificial Sequence: Synthetic oligonucleotide
uaguaacgguuggaaaggg

SEQ ID NO: 172404 - RNA, 19 nt, Artificial Sequence
  Description of Artificial Sequence: Synthetic oligonucleotide
agauggccccagcaaaauc

SEQ ID NO: 172405 - RNA, 19 nt, Artificial Sequence
  Description of Artificial Sequence: Synthetic oligonucleotide
gaggugacucuucacuaac

SEQ ID NO: 172406 - RNA, 19 nt, Artificial Sequence
  Description of Artificial Sequence: Synthetic oligonucleotide
guacaugucucuaugugga

SEQ ID NO: 172407 - RNA, 19 nt, Artificial Sequence
  Description of Artificial Sequence: Synthetic oligonucleotide
uuauaggaucuucuccaua

SEQ ID NO: 172408 - RNA, 19 nt, Artificial Sequence
  Description of Artificial Sequence: Synthetic oligonucleotide
agacuuagaccaugcagaa

SEQ ID NO: 172409 - RNA, 19 nt, Artificial Sequence
  Description of Artificial Sequence: Synthetic oligonucleotide
aacgguuggaaagggcuga

SEQ ID NO: 172410 - RNA, 19 nt, Artificial Sequence
  Description of Artificial Sequence: Synthetic oligonucleotide
uuccuaaguguaguauaag

SEQ ID NO: 172411 - RNA, 19 nt, Artificial Sequence
  Description of Artificial Sequence: Synthetic oligonucleotide
ugaugagaccaugugcaac

SEQ ID NO: 172412 - RNA, 19 nt, Artificial Sequence
  Description of Artificial Sequence: Synthetic oligonucleotide
ugaaagacggaguccuaua

SEQ ID NO: 172413 - RNA, 19 nt, Artificial Sequence
  Description of Artificial Sequence: Synthetic oligonucleotide
agacggaguccuauaaauc

SEQ ID NO: 172414 - RNA, 19 nt, Artificial Sequence
  Description of Artificial Sequence: Synthetic oligonucleotide
uucaagaguguguucccau

SEQ ID NO: 172415 - RNA, 19 nt, Artificial Sequence
  Description of Artificial Sequence: Synthetic oligonucleotide
guaacacacacaagcuaag

SEQ ID NO: 172416 - RNA, 19 nt, Artificial Sequence
  Description of Artificial Sequence: Synthetic oligonucleotide
agcggucuggccgugacag

SEQ ID NO: 172417 - RNA, 19 nt, Artificial Sequence
  Description of Artificial Sequence: Synthetic oligonucleotide
ugauagagccgacgagacu

SEQ ID NO: 172418 - RNA, 19 nt, Artificial Sequence
  Description of Artificial Sequence: Synthetic oligonucleotide
ucagcgauuuucugugcuc

SEQ ID NO: 172419 - RNA, 19 nt, Artificial Sequence
  Description of Artificial Sequence: Synthetic oligonucleotide
uugaaagacggaguccuau

SEQ ID NO: 172420 - RNA, 19 nt, Artificial Sequence
  Description of Artificial Sequence: Synthetic oligonucleotide
guucguucagguaggggag

SEQ ID NO: 172421 - RNA, 19 nt, Artificial Sequence
  Description of Artificial Sequence: Synthetic oligonucleotide
guagcguuccucccaaauc

SEQ ID NO: 172422 - RNA, 19 nt, Artificial Sequence
  Description of Artificial Sequence: Synthetic oligonucleotide
uuuucagcacccgaaugua

SEQ ID NO: 172423 - RNA, 19 nt, Artificial Sequence
  Description of Artificial Sequence: Synthetic oligonucleotide
cuucuaaucccaauugagu

SEQ ID NO: 172424 - RNA, 19 nt, Artificial Sequence
  Description of Artificial Sequence: Synthetic oligonucleotide
aggccauuacgaugaucac

SEQ ID NO: 172425 - RNA, 19 nt, Artificial Sequence
  Description of Artificial Sequence: Synthetic oligonucleotide
auaaccugcagugcugggu

SEQ ID NO: 172426 - RNA, 19 nt, Artificial Sequence
  Description of Artificial Sequence: Synthetic oligonucleotide
uugggugguaccugucacu

SEQ ID NO: 172427 - RNA, 19 nt, Artificial Sequence
  Description of Artificial Sequence: Synthetic oligonucleotide
gccgacgagacucauuuug

SEQ ID NO: 172428 - RNA, 19 nt, Artificial Sequence
  Description of Artificial Sequence: Synthetic oligonucleotide
ccuaucucaaacucucgac

SEQ ID NO: 172429 - RNA, 19 nt, Artificial Sequence
  Description of Artificial Sequence: Synthetic oligonucleotide
auaaucuauggcacaaaua

SEQ ID NO: 172430 - RNA, 19 nt, Artificial Sequence
  Description of Artificial Sequence: Synthetic oligonucleotide
agagguuaucaagucuuca

SEQ ID NO: 172431 - RNA, 19 nt, Artificial Sequence
  Description of Artificial Sequence: Synthetic oligonucleotide
gcuuguaacaggguuaaga

SEQ ID NO: 172432 - RNA, 19 nt, Artificial Sequence
  Description of Artificial Sequence: Synthetic oligonucleotide
guaacgguuggaaagggcu

SEQ ID NO: 172433 - RNA, 19 nt, Artificial Sequence
  Description of Artificial Sequence: Synthetic oligonucleotide
aggaggugacucuucacua

SEQ ID NO: 172434 - RNA, 19 nt, Artificial Sequence
  Description of Artificial Sequence: Synthetic oligonucleotide
auaacaggucaaauacccu

SEQ ID NO: 172435 - RNA, 19 nt, Artificial Sequence
  Description of Artificial Sequence: Synthetic oligonucleotide
cuuaaauuucgcucuaauu

SEQ ID NO: 172436 - RNA, 19 nt, Artificial Sequence
  Description of Artificial Sequence: Synthetic oligonucleotide
augucucuauguggauacc

SEQ ID NO: 172437 - RNA, 19 nt, Artificial Sequence
  Description of Artificial Sequence: Synthetic oligonucleotide
guggaagcgcuuucggcac

SEQ ID NO: 172438 - RNA, 19 nt, Artificial Sequence
  Description of Artificial Sequence: Synthetic oligonucleotide
gguccaugaaaugaccaug

SEQ ID NO: 172439 - RNA, 19 nt, Artificial Sequence
  Description of Artificial Sequence: Synthetic oligonucleotide
cugaggaacaucaacuuuu

SEQ ID NO: 172440 - RNA, 19 nt, Artificial Sequence
  Description of Artificial Sequence: Synthetic oligonucleotide
caaguaaaaguguucgaau

SEQ ID NO: 172441 - RNA, 19 nt, Artificial Sequence
  Description of Artificial Sequence: Synthetic oligonucleotide
gcaacacuuuccuagugga

SEQ ID NO: 172442 - RNA, 19 nt, Artificial Sequence
  Description of Artificial Sequence: Synthetic oligonucleotide
acgaaagauucaggaguuc

SEQ ID NO: 172443 - RNA, 19 nt, Artificial Sequence
  Description of Artificial Sequence: Synthetic oligonucleotide
cuuugggugguaccuguca

SEQ ID NO: 172444 - RNA, 19 nt, Artificial Sequence
  Description of Artificial Sequence: Synthetic oligonucleotide
ggccaguucacauaaugaa

SEQ ID NO: 172445 - RNA, 19 nt, Artificial Sequence
  Description of Artificial Sequence: Synthetic oligonucleotide
gccauuacgaugaucacaa

SEQ ID NO: 172446 - RNA, 19 nt, Artificial Sequence
  Description of Artificial Sequence: Synthetic oligonucleotide
gagacggcgucaagauggg

SEQ ID NO: 172447 - RNA, 19 nt, Artificial Sequence
  Description of Artificial Sequence: Synthetic oligonucleotide
ggcuagaugaaaacaagaa

SEQ ID NO: 172448 - RNA, 19 nt, Artificial Sequence
  Description of Artificial Sequence: Synthetic oligonucleotide
uccuaguggaagcgcuuuc

SEQ ID NO: 172449 - RNA, 19 nt, Artificial Sequence
  Description of Artificial Sequence: Synthetic oligonucleotide
augugccgcaccgcagucc

SEQ ID NO: 172450 - RNA, 19 nt, Artificial Sequence
  Description of Artificial Sequence: Synthetic oligonucleotide
agcacccgaauguagcguu

SEQ ID NO: 172451 - RNA, 19 nt, Artificial Sequence
  Description of Artificial Sequence: Synthetic oligonucleotide
acgucuucguguuccuggu

SEQ ID NO: 172452 - RNA, 19 nt, Artificial Sequence
  Description of Artificial Sequence: Synthetic oligonucleotide
caggacgaacaauuagaca

SEQ ID NO: 172453 - RNA, 19 nt, Artificial Sequence
  Description of Artificial Sequence: Synthetic oligonucleotide
gaaccgggugagguucugg

SEQ ID NO: 172454 - RNA, 19 nt, Artificial Sequence
  Description of Artificial Sequence: Synthetic oligonucleotide
gucagauacagggguagca

SEQ ID NO: 172455 - RNA, 19 nt, Artificial Sequence
  Description of Artificial Sequence: Synthetic oligonucleotide
gagccgacgagacucauuu

SEQ ID NO: 172456 - RNA, 19 nt, Artificial Sequence
  Description of Artificial Sequence: Synthetic oligonucleotide
gcuaagagaauucaauauu

SEQ ID NO: 172457 - RNA, 19 nt, Artificial Sequence
  Description of Artificial Sequence: Synthetic oligonucleotide
gacgaacaauuagacagua

SEQ ID NO: 172458 - RNA, 19 nt, Artificial Sequence
  Description of Artificial Sequence: Synthetic oligonucleotide
aagcggucuggccgugaca

SEQ ID NO: 172459 - RNA, 19 nt, Artificial Sequence
  Description of Artificial Sequence: Synthetic oligonucleotide
ugguccggccaguucacau

SEQ ID NO: 172460 - RNA, 19 nt, Artificial Sequence
  Description of Artificial Sequence: Synthetic oligonucleotide
cacccgaauguagcguucc

SEQ ID NO: 172461 - RNA, 19 nt, Artificial Sequence
  Description of Artificial Sequence: Synthetic oligonucleotide
gccaauagcguucacacuu

SEQ ID NO: 172462 - RNA, 19 nt, Artificial Sequence
  Description of Artificial Sequence: Synthetic oligonucleotide
caagcggucuggccgugac

SEQ ID NO: 172463 - RNA, 19 nt, Artificial Sequence
  Description of Artificial Sequence: Synthetic oligonucleotide
guaacaggguuaagagaca

SEQ ID NO: 172464 - RNA, 19 nt, Artificial Sequence
  Description of Artificial Sequence: Synthetic oligonucleotide
auauaccuacuugcccugu

SEQ ID NO: 172465 - RNA, 19 nt, Artificial Sequence
  Description of Artificial Sequence: Synthetic oligonucleotide
cagcgauugccaaaaccaa

SEQ ID NO: 172466 - RNA, 19 nt, Artificial Sequence
  Description of Artificial Sequence: Synthetic oligonucleotide
uaacucccugaaucauguc

SEQ ID NO: 172467 - RNA, 19 nt, Artificial Sequence
  Description of Artificial Sequence: Synthetic oligonucleotide
ggacaaguucauauugcuc

SEQ ID NO: 172468 - RNA, 19 nt, Artificial Sequence
  Description of Artificial Sequence: Synthetic oligonucleotide
caaaggccaauagcguuca

SEQ ID NO: 172469 - RNA, 19 nt, Artificial Sequence
  Description of Artificial Sequence: Synthetic oligonucleotide
guccggccaguucacauaa

SEQ ID NO: 172470 - RNA, 19 nt, Artificial Sequence
  Description of Artificial Sequence: Synthetic oligonucleotide
ggccauuacgaugaucaca

SEQ ID NO: 172471 - RNA, 19 nt, Artificial Sequence
  Description of Artificial Sequence: Synthetic oligonucleotide
caggguuaagagacauuaa

SEQ ID NO: 172472 - RNA, 19 nt, Artificial Sequence
  Description of Artificial Sequence: Synthetic oligonucleotide
ccggccaguucacauaaug

SEQ ID NO: 172473 - RNA, 19 nt, Artificial Sequence
  Description of Artificial Sequence: Synthetic oligonucleotide
ggaggugacucuucacuaa

SEQ ID NO: 172474 - RNA, 19 nt, Artificial Sequence
  Description of Artificial Sequence: Synthetic oligonucleotide
acgaacaauuagacaguaa

SEQ ID NO: 172475 - RNA, 19 nt, Artificial Sequence
  Description of Artificial Sequence: Synthetic oligonucleotide
cacuaucaauggagcugac

SEQ ID NO: 172476 - RNA, 19 nt, Artificial Sequence
  Description of Artificial Sequence: Synthetic oligonucleotide
agcguuccucccaaauccu

SEQ ID NO: 172477 - RNA, 19 nt, Artificial Sequence
  Description of Artificial Sequence: Synthetic oligonucleotide
gucacguguccuuucuuau

SEQ ID NO: 172478 - RNA, 19 nt, Artificial Sequence
  Description of Artificial Sequence: Synthetic oligonucleotide
uacuugcccuguacauaua

SEQ ID NO: 172479 - RNA, 19 nt, Artificial Sequence
  Description of Artificial Sequence: Synthetic oligonucleotide
cccaauugaguucaaauuu

SEQ ID NO: 172480 - RNA, 19 nt, Artificial Sequence
  Description of Artificial Sequence: Synthetic oligonucleotide
accaugucacguguccuuu

SEQ ID NO: 172481 - RNA, 19 nt, Artificial Sequence
  Description of Artificial Sequence: Synthetic oligonucleotide
gcuccgugaaguucauaca

SEQ ID NO: 172482 - RNA, 19 nt, Artificial Sequence
  Description of Artificial Sequence: Synthetic oligonucleotide
gcgauugccaaaaccaaua

SEQ ID NO: 172483 - RNA, 19 nt, Artificial Sequence
  Description of Artificial Sequence: Synthetic oligonucleotide
gaccaugucacguguccuu

SEQ ID NO: 172484 - RNA, 19 nt, Artificial Sequence
  Description of Artificial Sequence: Synthetic oligonucleotide
agcuuguaacaggguuaag

SEQ ID NO: 172485 - RNA, 19 nt, Artificial Sequence
  Description of Artificial Sequence: Synthetic oligonucleotide
ucccagcuuuuaguaaguu

SEQ ID NO: 172486 - RNA, 19 nt, Artificial Sequence
  Description of Artificial Sequence: Synthetic oligonucleotide
gcgucaagaugggaggaac

SEQ ID NO: 172487 - RNA, 19 nt, Artificial Sequence
  Description of Artificial Sequence: Synthetic oligonucleotide
cucgacaggccauuacgau

SEQ ID NO: 172488 - RNA, 19 nt, Artificial Sequence
  Description of Artificial Sequence: Synthetic oligonucleotide
ccgacgagacucauuuuga

SEQ ID NO: 172489 - RNA, 19 nt, Artificial Sequence
  Description of Artificial Sequence: Synthetic oligonucleotide
gaaugguuaucuggugauu

SEQ ID NO: 172490 - RNA, 19 nt, Artificial Sequence
  Description of Artificial Sequence: Synthetic oligonucleotide
auguagcguuccucccaaa

SEQ ID NO: 172491 - RNA, 19 nt, Artificial Sequence
  Description of Artificial Sequence: Synthetic oligonucleotide
guguaguauaaggcaggua

SEQ ID NO: 172492 - RNA, 19 nt, Artificial Sequence
  Description of Artificial Sequence: Synthetic oligonucleotide
ggacgaacaauuagacagu

SEQ ID NO: 172493 - RNA, 19 nt, Artificial Sequence
  Description of Artificial Sequence: Synthetic oligonucleotide
uagagccgacgagacucau

SEQ ID NO: 172494 - RNA, 19 nt, Artificial Sequence
  Description of Artificial Sequence: Synthetic oligonucleotide
acgguuggaaagggcugaa

SEQ ID NO: 172495 - RNA, 19 nt, Artificial Sequence
  Description of Artificial Sequence: Synthetic oligonucleotide
agccgacgagacucauuuu

SEQ ID NO: 172496 - RNA, 19 nt, Artificial Sequence
  Description of Artificial Sequence: Synthetic oligonucleotide
acccugaaacauacauaua

SEQ ID NO: 172497 - RNA, 19 nt, Artificial Sequence
  Description of Artificial Sequence: Synthetic oligonucleotide
agagccgacgagacucauu

SEQ ID NO: 172498 - RNA, 19 nt, Artificial Sequence
  Description of Artificial Sequence: Synthetic oligonucleotide
ggggagacggcgucaagau

SEQ ID NO: 172499 - RNA, 19 nt, Artificial Sequence
  Description of Artificial Sequence: Synthetic oligonucleotide
augguccggccaguucaca

SEQ ID NO: 172500 - RNA, 19 nt, Artificial Sequence
  Description of Artificial Sequence: Synthetic oligonucleotide
cuucguguuccugguauuu

SEQ ID NO: 172501 - RNA, 19 nt, Artificial Sequence
  Description of Artificial Sequence: Synthetic oligonucleotide
ccugucuagcaauggacau

SEQ ID NO: 172502 - RNA, 19 nt, Artificial Sequence
  Description of Artificial Sequence: Synthetic oligonucleotide
caauagcguucacacuuuu

SEQ ID NO: 172503 - RNA, 19 nt, Artificial Sequence
  Description of Artificial Sequence: Synthetic oligonucleotide
ggccaauagcguucacacu

SEQ ID NO: 172504 - RNA, 19 nt, Artificial Sequence
  Description of Artificial Sequence: Synthetic oligonucleotide
ccacagcgauugccaaaac

SEQ ID NO: 172505 - RNA, 19 nt, Artificial Sequence
  Description of Artificial Sequence: Synthetic oligonucleotide
cagcacccgaauguagcgu

SEQ ID NO: 172506 - RNA, 19 nt, Artificial Sequence
  Description of Artificial Sequence: Synthetic oligonucleotide
ccgcaguccacacaagaau

SEQ ID NO: 172507 - RNA, 19 nt, Artificial Sequence
  Description of Artificial Sequence: Synthetic oligonucleotide
cucccgacacaggggagcu

SEQ ID NO: 172508 - RNA, 19 nt, Artificial Sequence
  Description of Artificial Sequence: Synthetic oligonucleotide
cacuucuguuguagagcuu

SEQ ID NO: 172509 - RNA, 19 nt, Artificial Sequence
  Description of Artificial Sequence: Synthetic oligonucleotide
ggucuggccgugacagugu

SEQ ID NO: 172510 - RNA, 19 nt, Artificial Sequence
  Description of Artificial Sequence: Synthetic oligonucleotide
ggcaagcggucuggccgug

SEQ ID NO: 172511 - RNA, 19 nt, Artificial Sequence
  Description of Artificial Sequence: Synthetic oligonucleotide
gugcuccgugaaguucaua

SEQ ID NO: 172512 - RNA, 19 nt, Artificial Sequence
  Description of Artificial Sequence: Synthetic oligonucleotide
cggcgucaagaugggagga

SEQ ID NO: 172513 - RNA, 19 nt, Artificial Sequence
  Description of Artificial Sequence: Synthetic oligonucleotide
cgucuucguguuccuggua

SEQ ID NO: 172514 - RNA, 19 nt, Artificial Sequence
  Description of Artificial Sequence: Synthetic oligonucleotide
ugaaauuaucccaaggucg

SEQ ID NO: 172515 - RNA, 19 nt, Artificial Sequence
  Description of Artificial Sequence: Synthetic oligonucleotide
aauaaccaugcuuucagac

SEQ ID NO: 172516 - RNA, 19 nt, Artificial Sequence
  Description of Artificial Sequence: Synthetic oligonucleotide
  modified_base (6)..(6): a, c, u, g, unknown or other
uaaacngaaaggaugcugg

SEQ ID NO: 172517 - RNA, 19 nt, Artificial Sequence
  Description of Artificial Sequence: Synthetic oligonucleotide
uguucaaauuaacagacgc

SEQ ID NO: 172518 - RNA, 19 nt, Artificial Sequence
  Description of Artificial Sequence: Synthetic oligonucleotide
ucaauuaccaacagaaaug

SEQ ID NO: 172519 - RNA, 19 nt, Artificial Sequence
  Description of Artificial Sequence: Synthetic oligonucleotide
gacacuaacaagcaacugg

SEQ ID NO: 172520 - RNA, 19 nt, Artificial Sequence
  Description of Artificial Sequence: Synthetic oligonucleotide
  modified_base (10)..(10): a, c, u, g, unknown or other
ucacuaaacngaaaggaug

SEQ ID NO: 172521 - RNA, 19 nt, Artificial Sequence
  Description of Artificial Sequence: Synthetic oligonucleotide
aagauaguuccuuugucgg

SEQ ID NO: 172522 - RNA, 19 nt, Artificial Sequence
  Description of Artificial Sequence: Synthetic oligonucleotide
uuaguuaacaugauuuagc

SEQ ID NO: 172523 - RNA, 19 nt, Artificial Sequence
  Description of Artificial Sequence: Synthetic oligonucleotide
gauagcacugguaacaucg

SEQ ID NO: 172524 - RNA, 19 nt, Artificial Sequence
  Description of Artificial Sequence: Synthetic oligonucleotide
ugcuauauggaguugaggc

SEQ ID NO: 172525 - RNA, 19 nt, Artificial Sequence
  Description of Artificial Sequence: Synthetic oligonucleotide
acuugaguaaacuacuggg

SEQ ID NO: 172526 - RNA, 19 nt, Artificial Sequence
  Description of Artificial Sequence: Synthetic oligonucleotide
auuaacagacgccaaacuc

SEQ ID NO: 172527 - RNA, 19 nt, Artificial Sequence
  Description of Artificial Sequence: Synthetic oligonucleotide
agggcuaucacuaccaucc

SEQ ID NO: 172528 - RNA, 19 nt, Artificial Sequence
  Description of Artificial Sequence: Synthetic oligonucleotide
aguaagaacccuuuccggg

SEQ ID NO: 172529 - RNA, 19 nt, Artificial Sequence
  Description of Artificial Sequence: Synthetic oligonucleotide
aaugaauauggagacagug

SEQ ID NO: 172530 - RNA, 19 nt, Artificial Sequence
  Description of Artificial Sequence: Synthetic oligonucleotide
ucaauuaguccacacauuc

SEQ ID NO: 172531 - RNA, 19 nt, Artificial Sequence
  Description of Artificial Sequence: Synthetic oligonucleotide
auuuagauagcacugguaa

SEQ ID NO: 172532 - RNA, 19 nt, Artificial Sequence
  Description of Artificial Sequence: Synthetic oligonucleotide
uguaacuauggacacuucc

SEQ ID NO: 172533 - RNA, 19 nt, Artificial Sequence
  Description of Artificial Sequence: Synthetic oligonucleotide
caagauaguuccuuugucg

SEQ ID NO: 172534 - RNA, 19 nt, Artificial Sequence
  Description of Artificial Sequence: Synthetic oligonucleotide
ucuuugaccgaguaggcag

SEQ ID NO: 172535 - RNA, 19 nt, Artificial Sequence
  Description of Artificial Sequence: Synthetic oligonucleotide
cuuccacccauaaagaacc

SEQ ID NO: 172536 - RNA, 19 nt, Artificial Sequence
  Description of Artificial Sequence: Synthetic oligonucleotide
ugauagacuguuguuaagg

SEQ ID NO: 172537 - RNA, 19 nt, Artificial Sequence
  Description of Artificial Sequence: Synthetic oligonucleotide
  modified_base (12)..(12): a, c, u, g, unknown or other
uuucacuaaacngaaagga

SEQ ID NO: 172538 - RNA, 19 nt, Artificial Sequence
  Description of Artificial Sequence: Synthetic oligonucleotide
ucaaaaugaaauuuagaua

SEQ ID NO: 172539 - RNA, 19 nt, Artificial Sequence
  Description of Artificial Sequence: Synthetic oligonucleotide
  modified_base (9)..(9): a, c, u, g, unknown or other
cacuaaacngaaaggaugc

SEQ ID NO: 172540 - RNA, 19 nt, Artificial Sequence
  Description of Artificial Sequence: Synthetic oligonucleotide
aucaauuaccaacagaaau

SEQ ID NO: 172541 - RNA, 19 nt, Artificial Sequence
  Description of Artificial Sequence: Synthetic oligonucleotide
cuguauaucaucuggauga

SEQ ID NO: 172542 - RNA, 19 nt, Artificial Sequence
  Description of Artificial Sequence: Synthetic oligonucleotide
auuuaaacccaagagaacu

SEQ ID NO: 172543 - RNA, 19 nt, Artificial Sequence
  Description of Artificial Sequence: Synthetic oligonucleotide
uccucugacacacacacac

SEQ ID NO: 172544 - RNA, 19 nt, Artificial Sequence
  Description of Artificial Sequence: Synthetic oligonucleotide
agaccaguuccuuuuagcg

SEQ ID NO: 172545 - RNA, 19 nt, Artificial Sequence
  Description of Artificial Sequence: Synthetic oligonucleotide
ugaucaguguuguacaaug

SEQ ID NO: 172546 - RNA, 19 nt, Artificial Sequence
  Description of Artificial Sequence: Synthetic oligonucleotide
aaaucacaacaauuaggag

SEQ ID NO: 172547 - RNA, 19 nt, Artificial Sequence
  Description of Artificial Sequence: Synthetic oligonucleotide
uagauagcuauuaagucuc

SEQ ID NO: 172548 - RNA, 19 nt, Artificial Sequence
  Description of Artificial Sequence: Synthetic oligonucleotide
agaauccucugacacacac

SEQ ID NO: 172549 - RNA, 19 nt, Artificial Sequence
  Description of Artificial Sequence: Synthetic oligonucleotide
aguuaacaugauuuagcac

SEQ ID NO: 172550 - RNA, 19 nt, Artificial Sequence
  Description of Artificial Sequence: Synthetic oligonucleotide
ucaagugccauucuugguc

SEQ ID NO: 172551 - RNA, 19 nt, Artificial Sequence
  Description of Artificial Sequence: Synthetic oligonucleotide
aaucgugcaauaggaaaac

SEQ ID NO: 172552 - RNA, 19 nt, Artificial Sequence
  Description of Artificial Sequence: Synthetic oligonucleotide
aauaggcucugucugaaaa

SEQ ID NO: 172553 - RNA, 19 nt, Artificial Sequence
  Description of Artificial Sequence: Synthetic oligonucleotide
uacaggaacacacaagaau

SEQ ID NO: 172554 - RNA, 19 nt, Artificial Sequence
  Description of Artificial Sequence: Synthetic oligonucleotide
agcccagacacuaacaagc

SEQ ID NO: 172555 - RNA, 19 nt, Artificial Sequence
  Description of Artificial Sequence: Synthetic oligonucleotide
uugaguaaacuacugggaa

SEQ ID NO: 172556 - RNA, 19 nt, Artificial Sequence
  Description of Artificial Sequence: Synthetic oligonucleotide
gacacacacacacacacac

SEQ ID NO: 172557 - RNA, 19 nt, Artificial Sequence
  Description of Artificial Sequence: Synthetic oligonucleotide
cacacacacacacagaaac

SEQ ID NO: 172558 - RNA, 19 nt, Artificial Sequence
  Description of Artificial Sequence: Synthetic oligonucleotide
uucuugucaagacacaaua

SEQ ID NO: 172559 - RNA, 19 nt, Artificial Sequence
  Description of Artificial Sequence: Synthetic oligonucleotide
  modified_base (11)..(11): a, c, u, g, unknown or other
uucacuaaacngaaaggau

SEQ ID NO: 172560 - RNA, 19 nt, Artificial Sequence
  Description of Artificial Sequence: Synthetic oligonucleotide
agcuauuaagucuccauca

SEQ ID NO: 172561 - RNA, 19 nt, Artificial Sequence
  Description of Artificial Sequence: Synthetic oligonucleotide
uuaguuaccgguguguaac

SEQ ID NO: 172562 - RNA, 19 nt, Artificial Sequence
  Description of Artificial Sequence: Synthetic oligonucleotide
uauguauguuuauuagucu

SEQ ID NO: 172563 - RNA, 19 nt, Artificial Sequence
  Description of Artificial Sequence: Synthetic oligonucleotide
gaaaucgugcaauaggaaa

SEQ ID NO: 172564 - RNA, 19 nt, Artificial Sequence
  Description of Artificial Sequence: Synthetic oligonucleotide
aauaaacccugccuccgug

SEQ ID NO: 172565 - RNA, 19 nt, Artificial Sequence
  Description of Artificial Sequence: Synthetic oligonucleotide
ucuauugcccaguaagaac

SEQ ID NO: 172566 - RNA, 19 nt, Artificial Sequence
  Description of Artificial Sequence: Synthetic oligonucleotide
acugggaacccaauguucc

SEQ ID NO: 172567 - RNA, 19 nt, Artificial Sequence
  Description of Artificial Sequence: Synthetic oligonucleotide
aucggcagaauaugaaauc

SEQ ID NO: 172568 - RNA, 19 nt, Artificial Sequence
  Description of Artificial Sequence: Synthetic oligonucleotide
auaaacccugccuccgugc

SEQ ID NO: 172569 - RNA, 19 nt, Artificial Sequence
  Description of Artificial Sequence: Synthetic oligonucleotide
  modified_base (4)..(4): a, c, u, g, unknown or other
aacngaaaggaugcuggag

SEQ ID NO: 172570 - RNA, 19 nt, Artificial Sequence
  Description of Artificial Sequence: Synthetic oligonucleotide
agcaauccuagucauggag

SEQ ID NO: 172571 - RNA, 19 nt, Artificial Sequence
  Description of Artificial Sequence: Synthetic oligonucleotide
cacacacacacacacacag

SEQ ID NO: 172572 - RNA, 19 nt, Artificial Sequence
  Description of Artificial Sequence: Synthetic oligonucleotide
aaagagccuacacuauuga

SEQ ID NO: 172573 - RNA, 19 nt, Artificial Sequence
  Description of Artificial Sequence: Synthetic oligonucleotide
acauauguaucuauaaacu

SEQ ID NO: 172574 - RNA, 19 nt, Artificial Sequence
  Description of Artificial Sequence: Synthetic oligonucleotide
ucuggaugguuaguuaccg

SEQ ID NO: 172575 - RNA, 19 nt, Artificial Sequence
  Description of Artificial Sequence: Synthetic oligonucleotide
auccuagucauggagcagc

SEQ ID NO: 172576 - RNA, 19 nt, Artificial Sequence
  Description of Artificial Sequence: Synthetic oligonucleotide
gagccuacacuauugaauc

SEQ ID NO: 172577 - RNA, 19 nt, Artificial Sequence
  Description of Artificial Sequence: Synthetic oligonucleotide
aggcccguucaacagaucg

SEQ ID NO: 172578 - RNA, 19 nt, Artificial Sequence
  Description of Artificial Sequence: Synthetic oligonucleotide
uuuagauagcacugguaac

SEQ ID NO: 172579 - RNA, 19 nt, Artificial Sequence
  Description of Artificial Sequence: Synthetic oligonucleotide
  modified_base (7)..(7): a, c, u, g, unknown or other
cuaaacngaaaggaugcug

SEQ ID NO: 172580 - RNA, 19 nt, Artificial Sequence
  Description of Artificial Sequence: Synthetic oligonucleotide
caucaagccauucuguuuc

SEQ ID NO: 172581 - RNA, 19 nt, Artificial Sequence
  Description of Artificial Sequence: Synthetic oligonucleotide
auccuaaugacacuuggaa

SEQ ID NO: 172582 - RNA, 19 nt, Artificial Sequence
  Description of Artificial Sequence: Synthetic oligonucleotide
cugacacacacacacacac

SEQ ID NO: 172583 - RNA, 19 nt, Artificial Sequence
  Description of Artificial Sequence: Synthetic oligonucleotide
aaaucgugcaauaggaaaa

SEQ ID NO: 172584 - RNA, 19 nt, Artificial Sequence
  Description of Artificial Sequence: Synthetic oligonucleotide
uccuuugucggcauacaca

SEQ ID NO: 172585 - RNA, 19 nt, Artificial Sequence
  Description of Artificial Sequence: Synthetic oligonucleotide
  modified_base (5)..(5): a, c, u, g, unknown or other
aaacngaaaggaugcugga

SEQ ID NO: 172586 - RNA, 19 nt, Artificial Sequence
  Description of Artificial Sequence: Synthetic oligonucleotide
aaucuaugcuauauggagu

SEQ ID NO: 172587 - RNA, 19 nt, Artificial Sequence
  Description of Artificial Sequence: Synthetic oligonucleotide
ucucgaugaacauaucaaa

SEQ ID NO: 172588 - RNA, 19 nt, Artificial Sequence
  Description of Artificial Sequence: Synthetic oligonucleotide
acaauaguccaauuagaaa

SEQ ID NO: 172589 - RNA, 19 nt, Artificial Sequence
  Description of Artificial Sequence: Synthetic oligonucleotide
cacacacacacacacacac

SEQ ID NO: 172590 - RNA, 19 nt, Artificial Sequence
  Description of Artificial Sequence: Synthetic oligonucleotide
cuauaaacugcuugcagca

SEQ ID NO: 172591 - RNA, 19 nt, Artificial Sequence
  Description of Artificial Sequence: Synthetic oligonucleotide
aaugcuaguagcaauccua

SEQ ID NO: 172592 - RNA, 19 nt, Artificial Sequence
  Description of Artificial Sequence: Synthetic oligonucleotide
uacagcacuaaacgguuac

SEQ ID NO: 172593 - RNA, 19 nt, Artificial Sequence
  Description of Artificial Sequence: Synthetic oligonucleotide
uaacuauggacacuuccaa

SEQ ID NO: 172594 - RNA, 19 nt, Artificial Sequence
  Description of Artificial Sequence: Synthetic oligonucleotide
ucccgaaauaauacacucc

SEQ ID NO: 172595 - RNA, 19 nt, Artificial Sequence
  Description of Artificial Sequence: Synthetic oligonucleotide
caauuaguccacacauucc

SEQ ID NO: 172596 - RNA, 19 nt, Artificial Sequence
  Description of Artificial Sequence: Synthetic oligonucleotide
uucccgaaauaauacacuc

SEQ ID NO: 172597 - RNA, 19 nt, Artificial Sequence
  Description of Artificial Sequence: Synthetic oligonucleotide
auagacuguuguuaaggcu

SEQ ID NO: 172598 - RNA, 19 nt, Artificial Sequence
  Description of Artificial Sequence: Synthetic oligonucleotide
uuaccgguguguaacuaug

SEQ ID NO: 172599 - RNA, 19 nt, Artificial Sequence
  Description of Artificial Sequence: Synthetic oligonucleotide
aagccaaugcaugucacca

SEQ ID NO: 172600 - RNA, 19 nt, Artificial Sequence
  Description of Artificial Sequence: Synthetic oligonucleotide
uugauugccaggguuggag

SEQ ID NO: 172601 - RNA, 19 nt, Artificial Sequence
  Description of Artificial Sequence: Synthetic oligonucleotide
auagguauguacacaucac

SEQ ID NO: 172602 - RNA, 19 nt, Artificial Sequence
  Description of Artificial Sequence: Synthetic oligonucleotide
gugguuaacaucaaacuga

SEQ ID NO: 172603 - RNA, 19 nt, Artificial Sequence
  Description of Artificial Sequence: Synthetic oligonucleotide
uccgggaucauccuuggau

SEQ ID NO: 172604 - RNA, 19 nt, Artificial Sequence
  Description of Artificial Sequence: Synthetic oligonucleotide
ucggauuggugucuauugc

SEQ ID NO: 172605 - RNA, 19 nt, Artificial Sequence
  Description of Artificial Sequence: Synthetic oligonucleotide
cuuuccgggaucauccuug

SEQ ID NO: 172606 - RNA, 19 nt, Artificial Sequence
  Description of Artificial Sequence: Synthetic oligonucleotide
auguauguuuauuagucuu

SEQ ID NO: 172607 - RNA, 19 nt, Artificial Sequence
  Description of Artificial Sequence: Synthetic oligonucleotide
augaaaucgugcaauagga

SEQ ID NO: 172608 - RNA, 19 nt, Artificial Sequence
  Description of Artificial Sequence: Synthetic oligonucleotide
aaggucgauccccucccac

SEQ ID NO: 172609 - RNA, 19 nt, Artificial Sequence
  Description of Artificial Sequence: Synthetic oligonucleotide
ugaaaucgugcaauaggaa

SEQ ID NO: 172610 - RNA, 19 nt, Artificial Sequence
  Description of Artificial Sequence: Synthetic oligonucleotide
caguaagaacccuuuccgg

SEQ ID NO: 172611 - RNA, 19 nt, Artificial Sequence
  Description of Artificial Sequence: Synthetic oligonucleotide
uuauuagucuuuaccccaa

SEQ ID NO: 172612 - RNA, 19 nt, Artificial Sequence
  Description of Artificial Sequence: Synthetic oligonucleotide
cagcuagaaucucugauug

SEQ ID NO: 172613 - RNA, 19 nt, Artificial Sequence
  Description of Artificial Sequence: Synthetic oligonucleotide
cucugacacacacacacac

SEQ ID NO: 172614 - RNA, 19 nt, Artificial Sequence
  Description of Artificial Sequence: Synthetic oligonucleotide
ucugacacacacacacaca

SEQ ID NO: 172615 - RNA, 19 nt, Artificial Sequence
  Description of Artificial Sequence: Synthetic oligonucleotide
gaucgugcccucuucuuug

SEQ ID NO: 172616 - RNA, 19 nt, Artificial Sequence
  Description of Artificial Sequence: Synthetic oligonucleotide
uuacccagcuagaaucucu

SEQ ID NO: 172617 - RNA, 19 nt, Artificial Sequence
  Description of Artificial Sequence: Synthetic oligonucleotide
uuaaguuacccagcuagaa

SEQ ID NO: 172618 - RNA, 19 nt, Artificial Sequence
  Description of Artificial Sequence: Synthetic oligonucleotide
acacacacacacagaaacc

SEQ ID NO: 172619 - RNA, 19 nt, Artificial Sequence
  Description of Artificial Sequence: Synthetic oligonucleotide
uaucccaaggucgaucccc

SEQ ID NO: 172620 - RNA, 19 nt, Artificial Sequence
  Description of Artificial Sequence: Synthetic oligonucleotide
uuuagcgcccuacacuguc

SEQ ID NO: 172621 - RNA, 19 nt, Artificial Sequence
  Description of Artificial Sequence: Synthetic oligonucleotide
uccuaaugacacuuggaau

SEQ ID NO: 172622 - RNA, 19 nt, Artificial Sequence
  Description of Artificial Sequence: Synthetic oligonucleotide
guaacuauggacacuucca

SEQ ID NO: 172623 - RNA, 19 nt, Artificial Sequence
  Description of Artificial Sequence: Synthetic oligonucleotide
cuguuguuaaggcugcuuc

SEQ ID NO: 172624 - RNA, 19 nt, Artificial Sequence
  Description of Artificial Sequence: Synthetic oligonucleotide
acacuaacaagcaacuggu

SEQ ID NO: 172625 - RNA, 19 nt, Artificial Sequence
  Description of Artificial Sequence: Synthetic oligonucleotide
gcuaguagcaauccuaguc

SEQ ID NO: 172626 - RNA, 19 nt, Artificial Sequence
  Description of Artificial Sequence: Synthetic oligonucleotide
aagagaacuugcucugcau

SEQ ID NO: 172627 - RNA, 19 nt, Artificial Sequence
  Description of Artificial Sequence: Synthetic oligonucleotide
ccuuugucggcauacacag

SEQ ID NO: 172628 - RNA, 19 nt, Artificial Sequence
  Description of Artificial Sequence: Synthetic oligonucleotide
gaaaauggccuaacaagga

SEQ ID NO: 172629 - RNA, 19 nt, Artificial Sequence
  Description of Artificial Sequence: Synthetic oligonucleotide
aucugagagacauguauua

SEQ ID NO: 172630 - RNA, 19 nt, Artificial Sequence
  Description of Artificial Sequence: Synthetic oligonucleotide
uccuuuuagcgcccuacac

SEQ ID NO: 172631 - RNA, 19 nt, Artificial Sequence
  Description of Artificial Sequence: Synthetic oligonucleotide
gcagcgacaauccuaauga

SEQ ID NO: 172632 - RNA, 19 nt, Artificial Sequence
  Description of Artificial Sequence: Synthetic oligonucleotide
uuuccgggaucauccuugg

SEQ ID NO: 172633 - RNA, 19 nt, Artificial Sequence
  Description of Artificial Sequence: Synthetic oligonucleotide
aucaguguuguacaauguu

SEQ ID NO: 172634 - RNA, 19 nt, Artificial Sequence
  Description of Artificial Sequence: Synthetic oligonucleotide
guaagaacccuuuccggga

SEQ ID NO: 172635 - RNA, 19 nt, Artificial Sequence
  Description of Artificial Sequence: Synthetic oligonucleotide
agccaaugcaugucaccac

SEQ ID NO: 172636 - RNA, 19 nt, Artificial Sequence
  Description of Artificial Sequence: Synthetic oligonucleotide
aauggccuaacaaggaaua

SEQ ID NO: 172637 - RNA, 19 nt, Artificial Sequence
  Description of Artificial Sequence: Synthetic oligonucleotide
ucaccaucggcagaauaug

SEQ ID NO: 172638 - RNA, 19 nt, Artificial Sequence
  Description of Artificial Sequence: Synthetic oligonucleotide
uuccuuuuagcgcccuaca

SEQ ID NO: 172639 - RNA, 19 nt, Artificial Sequence
  Description of Artificial Sequence: Synthetic oligonucleotide
  modified_base (2)..(2): a, c, u, g, unknown or other
cngaaaggaugcuggaguc

SEQ ID NO: 172640 - RNA, 19 nt, Artificial Sequence
  Description of Artificial Sequence: Synthetic oligonucleotide
gaugagucuggacucaagu

SEQ ID NO: 172641 - RNA, 19 nt, Artificial Sequence
  Description of Artificial Sequence: Synthetic oligonucleotide
cuuccuucggauugguguc

SEQ ID NO: 172642 - RNA, 19 nt, Artificial Sequence
  Description of Artificial Sequence: Synthetic oligonucleotide
cucgaugaacauaucaaaa

SEQ ID NO: 172643 - RNA, 19 nt, Artificial Sequence
  Description of Artificial Sequence: Synthetic oligonucleotide
auagcacugguaacaucgc

SEQ ID NO: 172644 - RNA, 19 nt, Artificial Sequence
  Description of Artificial Sequence: Synthetic oligonucleotide
ugacacacacacacacaca

SEQ ID NO: 172645 - RNA, 19 nt, Artificial Sequence
  Description of Artificial Sequence: Synthetic oligonucleotide
auggccacuagagggacuc

SEQ ID NO: 172646 - RNA, 19 nt, Artificial Sequence
  Description of Artificial Sequence: Synthetic oligonucleotide
gaauucaugauuacuccua

SEQ ID NO: 172647 - RNA, 19 nt, Artificial Sequence
  Description of Artificial Sequence: Synthetic oligonucleotide
agcacuaaacgguuacaaa

SEQ ID NO: 172648 - RNA, 19 nt, Artificial Sequence
  Description of Artificial Sequence: Synthetic oligonucleotide
ugaccgaguaggcagugua

SEQ ID NO: 172649 - RNA, 19 nt, Artificial Sequence
  Description of Artificial Sequence: Synthetic oligonucleotide
cugauagacuguuguuaag

SEQ ID NO: 172650 - RNA, 19 nt, Artificial Sequence
  Description of Artificial Sequence: Synthetic oligonucleotide
cauacucaccugguaaaag

SEQ ID NO: 172651 - RNA, 19 nt, Artificial Sequence
  Description of Artificial Sequence: Synthetic oligonucleotide
uaucacuaccauccugauc

SEQ ID NO: 172652 - RNA, 19 nt, Artificial Sequence
  Description of Artificial Sequence: Synthetic oligonucleotide
augcuaguagcaauccuag

SEQ ID NO: 172653 - RNA, 19 nt, Artificial Sequence
  Description of Artificial Sequence: Synthetic oligonucleotide
cacacacacacacacagaa

SEQ ID NO: 172654 - RNA, 19 nt, Artificial Sequence
  Description of Artificial Sequence: Synthetic oligonucleotide
accauacucaccugguaaa

SEQ ID NO: 172655 - RNA, 19 nt, Artificial Sequence
  Description of Artificial Sequence: Synthetic oligonucleotide
gcgacaauccuaaugacac

SEQ ID NO: 172656 - RNA, 19 nt, Artificial Sequence
  Description of Artificial Sequence: Synthetic oligonucleotide
cacaacaauuaggagcuac

SEQ ID NO: 172657 - RNA, 19 nt, Artificial Sequence
  Description of Artificial Sequence: Synthetic oligonucleotide
accgaguaggcaguguauc

SEQ ID NO: 172658 - RNA, 19 nt, Artificial Sequence
  Description of Artificial Sequence: Synthetic oligonucleotide
auauccagcuucaauuagu

SEQ ID NO: 172659 - RNA, 19 nt, Artificial Sequence
  Description of Artificial Sequence: Synthetic oligonucleotide
augguuaguuaccggugug

SEQ ID NO: 172660 - RNA, 19 nt, Artificial Sequence
  Description of Artificial Sequence: Synthetic oligonucleotide
acaacaauuaggagcuaca

SEQ ID NO: 172661 - RNA, 19 nt, Artificial Sequence
  Description of Artificial Sequence: Synthetic oligonucleotide
ugaggcccguucaacagau

SEQ ID NO: 172662 - RNA, 19 nt, Artificial Sequence
  Description of Artificial Sequence: Synthetic oligonucleotide
gaugguuaguuaccggugu

SEQ ID NO: 172663 - RNA, 19 nt, Artificial Sequence
  Description of Artificial Sequence: Synthetic oligonucleotide
acagaucgugcccucuucu

SEQ ID NO: 172664 - RNA, 19 nt, Artificial Sequence
  Description of Artificial Sequence: Synthetic oligonucleotide
gcagaauaugaaaucgugc

SEQ ID NO: 172665 - RNA, 19 nt, Artificial Sequence
  Description of Artificial Sequence: Synthetic oligonucleotide
aguuaucauaauauauuua

SEQ ID NO: 172666 - RNA, 19 nt, Artificial Sequence
  Description of Artificial Sequence: Synthetic oligonucleotide
auauggagacagugauuug

SEQ ID NO: 172667 - RNA, 19 nt, Artificial Sequence
  Description of Artificial Sequence: Synthetic oligonucleotide
cacacacacacagaaacca

SEQ ID NO: 172668 - RNA, 19 nt, Artificial Sequence
  Description of Artificial Sequence: Synthetic oligonucleotide
uggcuacuauuugagaauc

SEQ ID NO: 172669 - RNA, 19 nt, Artificial Sequence
  Description of Artificial Sequence: Synthetic oligonucleotide
auaauacacuccauuccca

SEQ ID NO: 172670 - RNA, 19 nt, Artificial Sequence
  Description of Artificial Sequence: Synthetic oligonucleotide
aaucagucuggcacuugug

SEQ ID NO: 172671 - RNA, 19 nt, Artificial Sequence
  Description of Artificial Sequence: Synthetic oligonucleotide
ggcagcgacaauccuaaug

SEQ ID NO: 172672 - RNA, 19 nt, Artificial Sequence
  Description of Artificial Sequence: Synthetic oligonucleotide
ugguuaguuaccggugugu

SEQ ID NO: 172673 - RNA, 19 nt, Artificial Sequence
  Description of Artificial Sequence: Synthetic oligonucleotide
uuuuagcgcccuacacugu

SEQ ID NO: 172674 - RNA, 19 nt, Artificial Sequence
  Description of Artificial Sequence: Synthetic oligonucleotide
uagauagcacugguaacau

SEQ ID NO: 172675 - RNA, 19 nt, Artificial Sequence
  Description of Artificial Sequence: Synthetic oligonucleotide
  modified_base (8)..(8): a, c, u, g, unknown or other
acuaaacngaaaggaugcu

SEQ ID NO: 172676 - RNA, 19 nt, Artificial Sequence
  Description of Artificial Sequence: Synthetic oligonucleotide
uagggcuaucacuaccauc

SEQ ID NO: 172677 - RNA, 19 nt, Artificial Sequence
  Description of Artificial Sequence: Synthetic oligonucleotide
aaauuaucccaaggucgau

SEQ ID NO: 172678 - RNA, 19 nt, Artificial Sequence
  Description of Artificial Sequence: Synthetic oligonucleotide
guuccuuuuagcgcccuac

SEQ ID NO: 172679 - RNA, 19 nt, Artificial Sequence
  Description of Artificial Sequence: Synthetic oligonucleotide
ggugccacucaccaucggc

SEQ ID NO: 172680 - RNA, 19 nt, Artificial Sequence
  Description of Artificial Sequence: Synthetic oligonucleotide
ccguucaacagaucgugcc

SEQ ID NO: 172681 - RNA, 19 nt, Artificial Sequence
  Description of Artificial Sequence: Synthetic oligonucleotide
gcaauccuagucauggagc

SEQ ID NO: 172682 - RNA, 19 nt, Artificial Sequence
  Description of Artificial Sequence: Synthetic oligonucleotide
guuaaguuacccagcuaga

SEQ ID NO: 172683 - RNA, 19 nt, Artificial Sequence
  Description of Artificial Sequence: Synthetic oligonucleotide
caucaauuaccaacagaaa

SEQ ID NO: 172684 - RNA, 19 nt, Artificial Sequence
  Description of Artificial Sequence: Synthetic oligonucleotide
ucggacucuucuccuggac

SEQ ID NO: 172685 - RNA, 19 nt, Artificial Sequence
  Description of Artificial Sequence: Synthetic oligonucleotide
agagcaccccaucuguuua

SEQ ID NO: 172686 - RNA, 19 nt, Artificial Sequence
  Description of Artificial Sequence: Synthetic oligonucleotide
uaacaucgcuuuguucucu

SEQ ID NO: 172687 - RNA, 19 nt, Artificial Sequence
  Description of Artificial Sequence: Synthetic oligonucleotide
gucugauagacuguuguua

SEQ ID NO: 172688 - RNA, 19 nt, Artificial Sequence
  Description of Artificial Sequence: Synthetic oligonucleotide
gccuacacuauugaauccc

SEQ ID NO: 172689 - RNA, 19 nt, Artificial Sequence
  Description of Artificial Sequence: Synthetic oligonucleotide
uuccacccauaaagaacca

SEQ ID NO: 172690 - RNA, 19 nt, Artificial Sequence
  Description of Artificial Sequence: Synthetic oligonucleotide
guaaacuacugggaaccca

SEQ ID NO: 172691 - RNA, 19 nt, Artificial Sequence
  Description of Artificial Sequence: Synthetic oligonucleotide
ccaugcauaucaguucugg

SEQ ID NO: 172692 - RNA, 19 nt, Artificial Sequence
  Description of Artificial Sequence: Synthetic oligonucleotide
accugguaaaaggagugau

SEQ ID NO: 172693 - RNA, 19 nt, Artificial Sequence
  Description of Artificial Sequence: Synthetic oligonucleotide
cuucccgaaauaauacacu

SEQ ID NO: 172694 - RNA, 19 nt, Artificial Sequence
  Description of Artificial Sequence: Synthetic oligonucleotide
cucaccaucggcagaauau

SEQ ID NO: 172695 - RNA, 19 nt, Artificial Sequence
  Description of Artificial Sequence: Synthetic oligonucleotide
cagacacuaacaagcaacu

SEQ ID NO: 172696 - RNA, 19 nt, Artificial Sequence
  Description of Artificial Sequence: Synthetic oligonucleotide
acaucgcuuuguucucuca

SEQ ID NO: 172697 - RNA, 19 nt, Artificial Sequence
  Description of Artificial Sequence: Synthetic oligonucleotide
gaaccauacucaccuggua

SEQ ID NO: 172698 - RNA, 19 nt, Artificial Sequence
  Description of Artificial Sequence: Synthetic oligonucleotide
gcuucuagggcuaucacua

SEQ ID NO: 172699 - RNA, 19 nt, Artificial Sequence
  Description of Artificial Sequence: Synthetic oligonucleotide
uccacccauaaagaaccaa

SEQ ID NO: 172700 - RNA, 19 nt, Artificial Sequence
  Description of Artificial Sequence: Synthetic oligonucleotide
ggaucauccuuggaucgag

SEQ ID NO: 172701 - RNA, 19 nt, Artificial Sequence
  Description of Artificial Sequence: Synthetic oligonucleotide
gggaaauuagcuucacaua

SEQ ID NO: 172702 - RNA, 19 nt, Artificial Sequence
  Description of Artificial Sequence: Synthetic oligonucleotide
caucggcagaauaugaaau

SEQ ID NO: 172703 - RNA, 19 nt, Artificial Sequence
  Description of Artificial Sequence: Synthetic oligonucleotide
cgguguguaacuauggaca

SEQ ID NO: 172704 - RNA, 19 nt, Artificial Sequence
  Description of Artificial Sequence: Synthetic oligonucleotide
aucgugcaauaggaaaacu

SEQ ID NO: 172705 - RNA, 19 nt, Artificial Sequence
  Description of Artificial Sequence: Synthetic oligonucleotide
accaugcuuucagacaaau

SEQ ID NO: 172706 - RNA, 19 nt, Artificial Sequence
  Description of Artificial Sequence: Synthetic oligonucleotide
gccaaugcaugucaccaca

SEQ ID NO: 172707 - RNA, 19 nt, Artificial Sequence
  Description of Artificial Sequence: Synthetic oligonucleotide
caguacuccaacacccaaa

SEQ ID NO: 172708 - RNA, 19 nt, Artificial Sequence
  Description of Artificial Sequence: Synthetic oligonucleotide
acucaccaucggcagaaua

SEQ ID NO: 172709 - RNA, 19 nt, Artificial Sequence
  Description of Artificial Sequence: Synthetic oligonucleotide
caccaucggcagaauauga

SEQ ID NO: 172710 - RNA, 19 nt, Artificial Sequence
  Description of Artificial Sequence: Synthetic oligonucleotide
aucgugcccucuucuuuga

SEQ ID NO: 172711 - RNA, 19 nt, Artificial Sequence
  Description of Artificial Sequence: Synthetic oligonucleotide
ccaaggucgauccccuccc

SEQ ID NO: 172712 - RNA, 19 nt, Artificial Sequence
  Description of Artificial Sequence: Synthetic oligonucleotide
gugcccugcugccuaaaca

SEQ ID NO: 172713 - RNA, 19 nt, Artificial Sequence
  Description of Artificial Sequence: Synthetic oligonucleotide
caucgcuuuguucucucaa

SEQ ID NO: 172714 - RNA, 19 nt, Artificial Sequence
  Description of Artificial Sequence: Synthetic oligonucleotide
uuccuucggauuggugucu

SEQ ID NO: 172715 - RNA, 19 nt, Artificial Sequence
  Description of Artificial Sequence: Synthetic oligonucleotide
acccagcuagaaucucuga

SEQ ID NO: 172716 - RNA, 19 nt, Artificial Sequence
  Description of Artificial Sequence: Synthetic oligonucleotide
uuccgggaucauccuugga

SEQ ID NO: 172717 - RNA, 19 nt, Artificial Sequence
  Description of Artificial Sequence: Synthetic oligonucleotide
cagcacuaaacgguuacaa

SEQ ID NO: 172718 - RNA, 19 nt, Artificial Sequence
  Description of Artificial Sequence: Synthetic oligonucleotide
guuacccagcuagaaucuc

SEQ ID NO: 172719 - RNA, 19 nt, Artificial Sequence
  Description of Artificial Sequence: Synthetic oligonucleotide
acacacacacacacacaca

SEQ ID NO: 172720 - RNA, 19 nt, Artificial Sequence
  Description of Artificial Sequence: Synthetic oligonucleotide
ccgggaucauccuuggauc

SEQ ID NO: 172721 - RNA, 19 nt, Artificial Sequence
  Description of Artificial Sequence: Synthetic oligonucleotide
acacacacacacacacaga

SEQ ID NO: 172722 - RNA, 19 nt, Artificial Sequence
  Description of Artificial Sequence: Synthetic oligonucleotide
caaugcaugucaccacaua

SEQ ID NO: 172723 - RNA, 19 nt, Artificial Sequence
  Description of Artificial Sequence: Synthetic oligonucleotide
acacacacacacacagaaa

SEQ ID NO: 172724 - RNA, 19 nt, Artificial Sequence
  Description of Artificial Sequence: Synthetic oligonucleotide
ccccaucuguuuauguaug

SEQ ID NO: 172725 - RNA, 19 nt, Artificial Sequence
  Description of Artificial Sequence: Synthetic oligonucleotide
agcgcccuacacugucuga

SEQ ID NO: 172726 - RNA, 19 nt, Artificial Sequence
  Description of Artificial Sequence: Synthetic oligonucleotide
aucccaaggucgauccccu

SEQ ID NO: 172727 - RNA, 19 nt, Artificial Sequence
  Description of Artificial Sequence: Synthetic oligonucleotide
ccaucggcagaauaugaaa

SEQ ID NO: 172728 - RNA, 19 nt, Artificial Sequence
  Description of Artificial Sequence: Synthetic oligonucleotide
cccguucaacagaucgugc

SEQ ID NO: 172729 - RNA, 19 nt, Artificial Sequence
  Description of Artificial Sequence: Synthetic oligonucleotide
cucaagugccauucuuggu

SEQ ID NO: 172730 - RNA, 19 nt, Artificial Sequence
  Description of Artificial Sequence: Synthetic oligonucleotide
guugauugccaggguugga

SEQ ID NO: 172731 - RNA, 19 nt, Artificial Sequence
  Description of Artificial Sequence: Synthetic oligonucleotide
gucgauccccucccacuuc

SEQ ID NO: 172732 - RNA, 19 nt, Artificial Sequence
  Description of Artificial Sequence: Synthetic oligonucleotide
gguuaguuaccggugugua

SEQ ID NO: 172733 - RNA, 19 nt, Artificial Sequence
  Description of Artificial Sequence: Synthetic oligonucleotide
ggccacuagagggacucug

SEQ ID NO: 172734 - RNA, 19 nt, Artificial Sequence
  Description of Artificial Sequence: Synthetic oligonucleotide
caguuaaguuacccagcua

SEQ ID NO: 172735 - RNA, 19 nt, Artificial Sequence
  Description of Artificial Sequence: Synthetic oligonucleotide
ucccaaggucgauccccuc

SEQ ID NO: 172736 - RNA, 19 nt, Artificial Sequence
  Description of Artificial Sequence: Synthetic oligonucleotide
ggaaccauacucaccuggu

SEQ ID NO: 172737 - RNA, 19 nt, Artificial Sequence
  Description of Artificial Sequence: Synthetic oligonucleotide
guguaacuauggacacuuc

SEQ ID NO: 172738 - RNA, 19 nt, Artificial Sequence
  Description of Artificial Sequence: Synthetic oligonucleotide
ucacaacaauuaggagcua

SEQ ID NO: 172739 - RNA, 19 nt, Artificial Sequence
  Description of Artificial Sequence: Synthetic oligonucleotide
gguuaacaucaaacugaca

SEQ ID NO: 172740 - RNA, 19 nt, Artificial Sequence
  Description of Artificial Sequence: Synthetic oligonucleotide
ggagaggcacuucccgaaa

SEQ ID NO: 172741 - RNA, 19 nt, Artificial Sequence
  Description of Artificial Sequence: Synthetic oligonucleotide
caaggucgauccccuccca

SEQ ID NO: 172742 - RNA, 19 nt, Artificial Sequence
  Description of Artificial Sequence: Synthetic oligonucleotide
gggaucauccuuggaucga

SEQ ID NO: 172743 - RNA, 19 nt, Artificial Sequence
  Description of Artificial Sequence: Synthetic oligonucleotide
gagcaccccaucuguuuau

SEQ ID NO: 172744 - RNA, 19 nt, Artificial Sequence
  Description of Artificial Sequence: Synthetic oligonucleotide
uggccacuagagggacucu

SEQ ID NO: 172745 - RNA, 19 nt, Artificial Sequence
  Description of Artificial Sequence: Synthetic oligonucleotide
gaccgaguaggcaguguau

SEQ ID NO: 172746 - RNA, 19 nt, Artificial Sequence
  Description of Artificial Sequence: Synthetic oligonucleotide
ccucugacacacacacaca

SEQ ID NO: 172747 - RNA, 19 nt, Artificial Sequence
  Description of Artificial Sequence: Synthetic oligonucleotide
cuagggcuaucacuaccau

SEQ ID NO: 172748 - RNA, 19 nt, Artificial Sequence
  Description of Artificial Sequence: Synthetic oligonucleotide
caacagaucgugcccucuu

SEQ ID NO: 172749 - RNA, 19 nt, Artificial Sequence
  Description of Artificial Sequence: Synthetic oligonucleotide
cagaucgugcccucuucuu

SEQ ID NO: 172750 - RNA, 19 nt, Artificial Sequence
  Description of Artificial Sequence: Synthetic oligonucleotide
gaggcccguucaacagauc

SEQ ID NO: 172751 - RNA, 19 nt, Artificial Sequence
  Description of Artificial Sequence: Synthetic oligonucleotide
ccgaguaggcaguguaucu

SEQ ID NO: 172752 - RNA, 19 nt, Artificial Sequence
  Description of Artificial Sequence: Synthetic oligonucleotide
ccauacucaccugguaaaa

SEQ ID NO: 172753 - RNA, 19 nt, Artificial Sequence
  Description of Artificial Sequence: Synthetic oligonucleotide
caaaugccagucggacucu

SEQ ID NO: 172754 - RNA, 19 nt, Artificial Sequence
  Description of Artificial Sequence: Synthetic oligonucleotide
cccaucuguuuauguaugu

SEQ ID NO: 172755 - RNA, 19 nt, Artificial Sequence
  Description of Artificial Sequence: Synthetic oligonucleotide
cgugcccugcugccuaaac

SEQ ID NO: 172756 - RNA, 19 nt, Artificial Sequence
  Description of Artificial Sequence: Synthetic oligonucleotide
cacuaccauccugaucagu

SEQ ID NO: 172757 - RNA, 19 nt, Artificial Sequence
  Description of Artificial Sequence: Synthetic oligonucleotide
ggcccguucaacagaucgu

SEQ ID NO: 172758 - RNA, 19 nt, Artificial Sequence
  Description of Artificial Sequence: Synthetic oligonucleotide
gccuuucaguaauguuugu

SEQ ID NO: 172759 - RNA, 19 nt, Artificial Sequence
  Description of Artificial Sequence: Synthetic oligonucleotide
ccaucuguuuauguauguu

SEQ ID NO: 172760 - RNA, 19 nt, Artificial Sequence
  Description of Artificial Sequence: Synthetic oligonucleotide
cgacaauccuaaugacacu

SEQ ID NO: 172761 - RNA, 19 nt, Artificial Sequence
  Description of Artificial Sequence: Synthetic oligonucleotide
caguuccuuuuagcgcccu

SEQ ID NO: 172762 - RNA, 19 nt, Artificial Sequence
  Description of Artificial Sequence: Synthetic oligonucleotide
ccuucggauuggugucuau

SEQ ID NO: 172763 - RNA, 19 nt, Artificial Sequence
  Description of Artificial Sequence: Synthetic oligonucleotide
ugaaaagugacauggaugc

SEQ ID NO: 172764 - RNA, 19 nt, Artificial Sequence
  Description of Artificial Sequence: Synthetic oligonucleotide
uuaucuacuacaaagcaca

SEQ ID NO: 172765 - RNA, 19 nt, Artificial Sequence
  Description of Artificial Sequence: Synthetic oligonucleotide
aauucguuucacuuaagag

SEQ ID NO: 172766 - RNA, 19 nt, Artificial Sequence
  Description of Artificial Sequence: Synthetic oligonucleotide
ucaccuguguaacagaugg

SEQ ID NO: 172767 - RNA, 19 nt, Artificial Sequence
  Description of Artificial Sequence: Synthetic oligonucleotide
aucacuauauucuauugac

SEQ ID NO: 172768 - RNA, 19 nt, Artificial Sequence
  Description of Artificial Sequence: Synthetic oligonucleotide
uuuuacuauaugaauacug

SEQ ID NO: 172769 - RNA, 19 nt, Artificial Sequence
  Description of Artificial Sequence: Synthetic oligonucleotide
aaucuugauagaaacaagg

SEQ ID NO: 172770 - RNA, 19 nt, Artificial Sequence
  Description of Artificial Sequence: Synthetic oligonucleotide
acuaguaagacuuucaaaa

SEQ ID NO: 172771 - RNA, 19 nt, Artificial Sequence
  Description of Artificial Sequence: Synthetic oligonucleotide
ucuugaagcaucaacacaa

SEQ ID NO: 172772 - RNA, 19 nt, Artificial Sequence
  Description of Artificial Sequence: Synthetic oligonucleotide
aaaauucucucucucucuc

SEQ ID NO: 172773 - RNA, 19 nt, Artificial Sequence
  Description of Artificial Sequence: Synthetic oligonucleotide
ucacaaaucaccaagcaau

SEQ ID NO: 172774 - RNA, 19 nt, Artificial Sequence
  Description of Artificial Sequence: Synthetic oligonucleotide
augugaauaggaaauaccc

SEQ ID NO: 172775 - RNA, 19 nt, Artificial Sequence
  Description of Artificial Sequence: Synthetic oligonucleotide
acagauggguccuugaacg

SEQ ID NO: 172776 - RNA, 19 nt, Artificial Sequence
  Description of Artificial Sequence: Synthetic oligonucleotide
uucguuucacuuaagagac

SEQ ID NO: 172777 - RNA, 19 nt, Artificial Sequence
  Description of Artificial Sequence: Synthetic oligonucleotide
aauucucucucucucucac

SEQ ID NO: 172778 - RNA, 19 nt, Artificial Sequence
  Description of Artificial Sequence: Synthetic oligonucleotide
ugacaaauauacacgaaga

SEQ ID NO: 172779 - RNA, 19 nt, Artificial Sequence
  Description of Artificial Sequence: Synthetic oligonucleotide
aacccagaauacuaauucg

SEQ ID NO: 172780 - RNA, 19 nt, Artificial Sequence
  Description of Artificial Sequence: Synthetic oligonucleotide
uguugugcgauacagucca

SEQ ID NO: 172781 - RNA, 19 nt, Artificial Sequence
  Description of Artificial Sequence: Synthetic oligonucleotide
aauagccacuauuugauau

SEQ ID NO: 172782 - RNA, 19 nt, Artificial Sequence
  Description of Artificial Sequence: Synthetic oligonucleotide
uaucgaaaacugaaaagug

SEQ ID NO: 172783 - RNA, 19 nt, Artificial Sequence
  Description of Artificial Sequence: Synthetic oligonucleotide
auauacacgaagaagaaca

SEQ ID NO: 172784 - RNA, 19 nt, Artificial Sequence
  Description of Artificial Sequence: Synthetic oligonucleotide
auaucgaaaacugaaaagu

SEQ ID NO: 172785 - RNA, 19 nt, Artificial Sequence
  Description of Artificial Sequence: Synthetic oligonucleotide
ugcgauacaguccauguac

SEQ ID NO: 172786 - RNA, 19 nt, Artificial Sequence
  Description of Artificial Sequence: Synthetic oligonucleotide
aaaucacaaccuaucauuc

SEQ ID NO: 172787 - RNA, 19 nt, Artificial Sequence
  Description of Artificial Sequence: Synthetic oligonucleotide
uuaggcuagccuuuaauac

SEQ ID NO: 172788 - RNA, 19 nt, Artificial Sequence
  Description of Artificial Sequence: Synthetic oligonucleotide
ugacgagugagauaacugc

SEQ ID NO: 172789 - RNA, 19 nt, Artificial Sequence
  Description of Artificial Sequence: Synthetic oligonucleotide
guacuuucuugcuuggucg

SEQ ID NO: 172790 - RNA, 19 nt, Artificial Sequence
  Description of Artificial Sequence: Synthetic oligonucleotide
acuauauucuauugacauc

SEQ ID NO: 172791 - RNA, 19 nt, Artificial Sequence
  Description of Artificial Sequence: Synthetic oligonucleotide
uaaguaguacauaagcuuu

SEQ ID NO: 172792 - RNA, 19 nt, Artificial Sequence
  Description of Artificial Sequence: Synthetic oligonucleotide
aaagauuagucagaggaau

SEQ ID NO: 172793 - RNA, 19 nt, Artificial Sequence
  Description of Artificial Sequence: Synthetic oligonucleotide
aauauaccaaaguuuccau

SEQ ID NO: 172794 - RNA, 19 nt, Artificial Sequence
  Description of Artificial Sequence: Synthetic oligonucleotide
agaguuacagcguggaaca

SEQ ID NO: 172795 - RNA, 19 nt, Artificial Sequence
  Description of Artificial Sequence: Synthetic oligonucleotide
aacccuuaucuguacugac

SEQ ID NO: 172796 - RNA, 19 nt, Artificial Sequence
  Description of Artificial Sequence: Synthetic oligonucleotide
acggauugcugucaaaauc

SEQ ID NO: 172797 - RNA, 19 nt, Artificial Sequence
  Description of Artificial Sequence: Synthetic oligonucleotide
aaauauccguagaauacag

SEQ ID NO: 172798 - RNA, 19 nt, Artificial Sequence
  Description of Artificial Sequence: Synthetic oligonucleotide
uagccuuuaauaccugugc

SEQ ID NO: 172799 - RNA, 19 nt, Artificial Sequence
  Description of Artificial Sequence: Synthetic oligonucleotide
auagccacuauuugauauc

SEQ ID NO: 172800 - RNA, 19 nt, Artificial Sequence
  Description of Artificial Sequence: Synthetic oligonucleotide
acuaauucguuucacuuaa

SEQ ID NO: 172801 - RNA, 19 nt, Artificial Sequence
  Description of Artificial Sequence: Synthetic oligonucleotide
uaggcuagccuuuaauacc

SEQ ID NO: 172802 - RNA, 19 nt, Artificial Sequence
  Description of Artificial Sequence: Synthetic oligonucleotide
gguacauuaagaaaucaag

SEQ ID NO: 172803 - RNA, 19 nt, Artificial Sequence
  Description of Artificial Sequence: Synthetic oligonucleotide
ugaguguuggguacauuag

SEQ ID NO: 172804 - RNA, 19 nt, Artificial Sequence
  Description of Artificial Sequence: Synthetic oligonucleotide
agauuuuagaccaugcaca

SEQ ID NO: 172805 - RNA, 19 nt, Artificial Sequence
  Description of Artificial Sequence: Synthetic oligonucleotide
aaucacaaccuaucauucu

SEQ ID NO: 172806 - RNA, 19 nt, Artificial Sequence
  Description of Artificial Sequence: Synthetic oligonucleotide
accacuauaagcaguacag

SEQ ID NO: 172807 - RNA, 19 nt, Artificial Sequence
  Description of Artificial Sequence: Synthetic oligonucleotide
agugcugcgaucauuauca

SEQ ID NO: 172808 - RNA, 19 nt, Artificial Sequence
  Description of Artificial Sequence: Synthetic oligonucleotide
aaggucagagauuguuauc

SEQ ID NO: 172809 - RNA, 19 nt, Artificial Sequence
  Description of Artificial Sequence: Synthetic oligonucleotide
aaccgcugugguuaguauc

SEQ ID NO: 172810 - RNA, 19 nt, Artificial Sequence
  Description of Artificial Sequence: Synthetic oligonucleotide
uuuaauaccugugccaaaa

SEQ ID NO: 172811 - RNA, 19 nt, Artificial Sequence
  Description of Artificial Sequence: Synthetic oligonucleotide
aacuaguaagacuuucaaa

SEQ ID NO: 172812 - RNA, 19 nt, Artificial Sequence
  Description of Artificial Sequence: Synthetic oligonucleotide
aaaguaaacgacagguaca

SEQ ID NO: 172813 - RNA, 19 nt, Artificial Sequence
  Description of Artificial Sequence: Synthetic oligonucleotide
aaagaagguaaaauauaca

SEQ ID NO: 172814 - RNA, 19 nt, Artificial Sequence
  Description of Artificial Sequence: Synthetic oligonucleotide
uacauaagcuuuacugucu

SEQ ID NO: 172815 - RNA, 19 nt, Artificial Sequence
  Description of Artificial Sequence: Synthetic oligonucleotide
aaacgacagguacauuaag

SEQ ID NO: 172816 - RNA, 19 nt, Artificial Sequence
  Description of Artificial Sequence: Synthetic oligonucleotide
agaaccaugacaguugcca

SEQ ID NO: 172817 - RNA, 19 nt, Artificial Sequence
  Description of Artificial Sequence: Synthetic oligonucleotide
guaaacgacagguacauua

SEQ ID NO: 172818 - RNA, 19 nt, Artificial Sequence
  Description of Artificial Sequence: Synthetic oligonucleotide
cucacacacacacacacac

SEQ ID NO: 172819 - RNA, 19 nt, Artificial Sequence
  Description of Artificial Sequence: Synthetic oligonucleotide
uccgcaaacggauugcugu

SEQ ID NO: 172820 - RNA, 19 nt, Artificial Sequence
  Description of Artificial Sequence: Synthetic oligonucleotide
uuaggcauuuucacacugc

SEQ ID NO: 172821 - RNA, 19 nt, Artificial Sequence
  Description of Artificial Sequence: Synthetic oligonucleotide
uguucuugagacauuuaau

SEQ ID NO: 172822 - RNA, 19 nt, Artificial Sequence
  Description of Artificial Sequence: Synthetic oligonucleotide
uaccacuauaagcaguaca

SEQ ID NO: 172823 - RNA, 19 nt, Artificial Sequence
  Description of Artificial Sequence: Synthetic oligonucleotide
ugugguuaguaucgagugc

SEQ ID NO: 172824 - RNA, 19 nt, Artificial Sequence
  Description of Artificial Sequence: Synthetic oligonucleotide
uucucucucucucucacac

SEQ ID NO: 172825 - RNA, 19 nt, Artificial Sequence
  Description of Artificial Sequence: Synthetic oligonucleotide
gaacggauuauugagaucu

SEQ ID NO: 172826 - RNA, 19 nt, Artificial Sequence
  Description of Artificial Sequence: Synthetic oligonucleotide
aguaguacauaagcuuuac

SEQ ID NO: 172827 - RNA, 19 nt, Artificial Sequence
  Description of Artificial Sequence: Synthetic oligonucleotide
cacacacacacacacacac

SEQ ID NO: 172828 - RNA, 19 nt, Artificial Sequence
  Description of Artificial Sequence: Synthetic oligonucleotide
agaauacuaauucguuuca

SEQ ID NO: 172829 - RNA, 19 nt, Artificial Sequence
  Description of Artificial Sequence: Synthetic oligonucleotide
auuaggcauuuucacacug

SEQ ID NO: 172830 - RNA, 19 nt, Artificial Sequence
  Description of Artificial Sequence: Synthetic oligonucleotide
uagccacuauuugauaucg

SEQ ID NO: 172831 - RNA, 19 nt, Artificial Sequence
  Description of Artificial Sequence: Synthetic oligonucleotide
ugugcgauacaguccaugu

SEQ ID NO: 172832 - RNA, 19 nt, Artificial Sequence
  Description of Artificial Sequence: Synthetic oligonucleotide
acacacacacacacgaagc

SEQ ID NO: 172833 - RNA, 19 nt, Artificial Sequence
  Description of Artificial Sequence: Synthetic oligonucleotide
cucucucacacacacacac

SEQ ID NO: 172834 - RNA, 19 nt, Artificial Sequence
  Description of Artificial Sequence: Synthetic oligonucleotide
aagugagaggcuaaaagaa

SEQ ID NO: 172835 - RNA, 19 nt, Artificial Sequence
  Description of Artificial Sequence: Synthetic oligonucleotide
aaauucucucucucucuca

SEQ ID NO: 172836 - RNA, 19 nt, Artificial Sequence
  Description of Artificial Sequence: Synthetic oligonucleotide
augcacugcacauuuauau

SEQ ID NO: 172837 - RNA, 19 nt, Artificial Sequence
  Description of Artificial Sequence: Synthetic oligonucleotide
aaguaaacgacagguacau

SEQ ID NO: 172838 - RNA, 19 nt, Artificial Sequence
  Description of Artificial Sequence: Synthetic oligonucleotide
ugcgaggcccucuauaucu

SEQ ID NO: 172839 - RNA, 19 nt, Artificial Sequence
  Description of Artificial Sequence: Synthetic oligonucleotide
ucaaggguuaggcuagccu

SEQ ID NO: 172840 - RNA, 19 nt, Artificial Sequence
  Description of Artificial Sequence: Synthetic oligonucleotide
aucaauucacuaccuucuc

SEQ ID NO: 172841 - RNA, 19 nt, Artificial Sequence
  Description of Artificial Sequence: Synthetic oligonucleotide
cagcgcaauauuaugcacc

SEQ ID NO: 172842 - RNA, 19 nt, Artificial Sequence
  Description of Artificial Sequence: Synthetic oligonucleotide
acgacagguacauuaagaa

SEQ ID NO: 172843 - RNA, 19 nt, Artificial Sequence
  Description of Artificial Sequence: Synthetic oligonucleotide
uugagccaaggcauguucc

SEQ ID NO: 172844 - RNA, 19 nt, Artificial Sequence
  Description of Artificial Sequence: Synthetic oligonucleotide
aacgacagguacauuaaga

SEQ ID NO: 172845 - RNA, 19 nt, Artificial Sequence
  Description of Artificial Sequence: Synthetic oligonucleotide
cucucacacacacacacac

SEQ ID NO: 172846 - RNA, 19 nt, Artificial Sequence
  Description of Artificial Sequence: Synthetic oligonucleotide
cacacacacacacacgaag

SEQ ID NO: 172847 - RNA, 19 nt, Artificial Sequence
  Description of Artificial Sequence: Synthetic oligonucleotide
aucacaaaucaccaagcaa

SEQ ID NO: 172848 - RNA, 19 nt, Artificial Sequence
  Description of Artificial Sequence: Synthetic oligonucleotide
agcgcaauauuaugcacca

SEQ ID NO: 172849 - RNA, 19 nt, Artificial Sequence
  Description of Artificial Sequence: Synthetic oligonucleotide
aggucagagauuguuauca

SEQ ID NO: 172850 - RNA, 19 nt, Artificial Sequence
  Description of Artificial Sequence: Synthetic oligonucleotide
auauaguuucauuuccaau

SEQ ID NO: 172851 - RNA, 19 nt, Artificial Sequence
  Description of Artificial Sequence: Synthetic oligonucleotide
aaaugcuaggggcuuuuau

SEQ ID NO: 172852 - RNA, 19 nt, Artificial Sequence
  Description of Artificial Sequence: Synthetic oligonucleotide
uugaaggcauucugcgccg

SEQ ID NO: 172853 - RNA, 19 nt, Artificial Sequence
  Description of Artificial Sequence: Synthetic oligonucleotide
aggauacucaguccaaagu

SEQ ID NO: 172854 - RNA, 19 nt, Artificial Sequence
  Description of Artificial Sequence: Synthetic oligonucleotide
uguauuuagucugucucaa

SEQ ID NO: 172855 - RNA, 19 nt, Artificial Sequence
  Description of Artificial Sequence: Synthetic oligonucleotide
aacggauugcugucaaaau

SEQ ID NO: 172856 - RNA, 19 nt, Artificial Sequence
  Description of Artificial Sequence: Synthetic oligonucleotide
cucucucucucucacacac

SEQ ID NO: 172857 - RNA, 19 nt, Artificial Sequence
  Description of Artificial Sequence: Synthetic oligonucleotide
accgcugugguuaguaucg

SEQ ID NO: 172858 - RNA, 19 nt, Artificial Sequence
  Description of Artificial Sequence: Synthetic oligonucleotide
uuauugagaucuggauccg

SEQ ID NO: 172859 - RNA, 19 nt, Artificial Sequence
  Description of Artificial Sequence: Synthetic oligonucleotide
agacaugguacccaugcaa

SEQ ID NO: 172860 - RNA, 19 nt, Artificial Sequence
  Description of Artificial Sequence: Synthetic oligonucleotide
cauaaguaguacauaagcu

SEQ ID NO: 172861 - RNA, 19 nt, Artificial Sequence
  Description of Artificial Sequence: Synthetic oligonucleotide
cacuauaagcaguacagaa

SEQ ID NO: 172862 - RNA, 19 nt, Artificial Sequence
  Description of Artificial Sequence: Synthetic oligonucleotide
aguuacagcguggaacauc

SEQ ID NO: 172863 - RNA, 19 nt, Artificial Sequence
  Description of Artificial Sequence: Synthetic oligonucleotide
gauaaugcacugcacauuu

SEQ ID NO: 172864 - RNA, 19 nt, Artificial Sequence
  Description of Artificial Sequence: Synthetic oligonucleotide
accaugcacaugugaauag

SEQ ID NO: 172865 - RNA, 19 nt, Artificial Sequence
  Description of Artificial Sequence: Synthetic oligonucleotide
uccguagaauacaguaacu

SEQ ID NO: 172866 - RNA, 19 nt, Artificial Sequence
  Description of Artificial Sequence: Synthetic oligonucleotide
guggaggcguucuagaauc

SEQ ID NO: 172867 - RNA, 19 nt, Artificial Sequence
  Description of Artificial Sequence: Synthetic oligonucleotide
ucgauguuuuacauguauu

SEQ ID NO: 172868 - RNA, 19 nt, Artificial Sequence
  Description of Artificial Sequence: Synthetic oligonucleotide
acggcgaacugacaaauau

SEQ ID NO: 172869 - RNA, 19 nt, Artificial Sequence
  Description of Artificial Sequence: Synthetic oligonucleotide
agauuagucagaggaauau

SEQ ID NO: 172870 - RNA, 19 nt, Artificial Sequence
  Description of Artificial Sequence: Synthetic oligonucleotide
cuguugugcgauacagucc

SEQ ID NO: 172871 - RNA, 19 nt, Artificial Sequence
  Description of Artificial Sequence: Synthetic oligonucleotide
cacacacacacacacacga

SEQ ID NO: 172872 - RNA, 19 nt, Artificial Sequence
  Description of Artificial Sequence: Synthetic oligonucleotide
aauauccguagaauacagu

SEQ ID NO: 172873 - RNA, 19 nt, Artificial Sequence
  Description of Artificial Sequence: Synthetic oligonucleotide
acggauuauugagaucugg

SEQ ID NO: 172874 - RNA, 19 nt, Artificial Sequence
  Description of Artificial Sequence: Synthetic oligonucleotide
uccaauguacaacccuuau

SEQ ID NO: 172875 - RNA, 19 nt, Artificial Sequence
  Description of Artificial Sequence: Synthetic oligonucleotide
auauaccaaaguuuccaua

SEQ ID NO: 172876 - RNA, 19 nt, Artificial Sequence
  Description of Artificial Sequence: Synthetic oligonucleotide
ucucacacacacacacaca

SEQ ID NO: 172877 - RNA, 19 nt, Artificial Sequence
  Description of Artificial Sequence: Synthetic oligonucleotide
uacaacccuuaucuguacu

SEQ ID NO: 172878 - RNA, 19 nt, Artificial Sequence
  Description of Artificial Sequence: Synthetic oligonucleotide
guuaggcuagccuuuaaua

SEQ ID NO: 172879 - RNA, 19 nt, Artificial Sequence
  Description of Artificial Sequence: Synthetic oligonucleotide
uaagggcagcgcaauauua

SEQ ID NO: 172880 - RNA, 19 nt, Artificial Sequence
  Description of Artificial Sequence: Synthetic oligonucleotide
ggcgaacugacaaauauac

SEQ ID NO: 172881 - RNA, 19 nt, Artificial Sequence
  Description of Artificial Sequence: Synthetic oligonucleotide
aguguucagacccuauauu

SEQ ID NO: 172882 - RNA, 19 nt, Artificial Sequence
  Description of Artificial Sequence: Synthetic oligonucleotide
acaaccuaucauucugcca

SEQ ID NO: 172883 - RNA, 19 nt, Artificial Sequence
  Description of Artificial Sequence: Synthetic oligonucleotide
ucacacacacacacacaca

SEQ ID NO: 172884 - RNA, 19 nt, Artificial Sequence
  Description of Artificial Sequence: Synthetic oligonucleotide
auuugauaucgaaaacuga

SEQ ID NO: 172885 - RNA, 19 nt, Artificial Sequence
  Description of Artificial Sequence: Synthetic oligonucleotide
uacucauuucaguguguca

SEQ ID NO: 172886 - RNA, 19 nt, Artificial Sequence
  Description of Artificial Sequence: Synthetic oligonucleotide
ucucucacacacacacaca

SEQ ID NO: 172887 - RNA, 19 nt, Artificial Sequence
  Description of Artificial Sequence: Synthetic oligonucleotide
ugugaucuguggguaagcu

SEQ ID NO: 172888 - RNA, 19 nt, Artificial Sequence
  Description of Artificial Sequence: Synthetic oligonucleotide
gaagaaccgcugugguuag

SEQ ID NO: 172889 - RNA, 19 nt, Artificial Sequence
  Description of Artificial Sequence: Synthetic oligonucleotide
agggcagcgcaauauuaug

SEQ ID NO: 172890 - RNA, 19 nt, Artificial Sequence
  Description of Artificial Sequence: Synthetic oligonucleotide
auaacugcugaugcuguga

SEQ ID NO: 172891 - RNA, 19 nt, Artificial Sequence
  Description of Artificial Sequence: Synthetic oligonucleotide
agcacaugcacggcgaacu

SEQ ID NO: 172892 - RNA, 19 nt, Artificial Sequence
  Description of Artificial Sequence: Synthetic oligonucleotide
augacgagugagauaacug

SEQ ID NO: 172893 - RNA, 19 nt, Artificial Sequence
  Description of Artificial Sequence: Synthetic oligonucleotide
aaagcuccguauagcgguc

SEQ ID NO: 172894 - RNA, 19 nt, Artificial Sequence
  Description of Artificial Sequence: Synthetic oligonucleotide
uuagaaaugcuaggggcuu

SEQ ID NO: 172895 - RNA, 19 nt, Artificial Sequence
  Description of Artificial Sequence: Synthetic oligonucleotide
uauuuagcagaugguaguu

SEQ ID NO: 172896 - RNA, 19 nt, Artificial Sequence
  Description of Artificial Sequence: Synthetic oligonucleotide
aggcauguuccuuugugau

SEQ ID NO: 172897 - RNA, 19 nt, Artificial Sequence
  Description of Artificial Sequence: Synthetic oligonucleotide
ccuguugugcgauacaguc

SEQ ID NO: 172898 - RNA, 19 nt, Artificial Sequence
  Description of Artificial Sequence: Synthetic oligonucleotide
ugcuuggucgauguuuuac

SEQ ID NO: 172899 - RNA, 19 nt, Artificial Sequence
  Description of Artificial Sequence: Synthetic oligonucleotide
gaaaagugacauggaugcc

SEQ ID NO: 172900 - RNA, 19 nt, Artificial Sequence
  Description of Artificial Sequence: Synthetic oligonucleotide
uuccaauguacaacccuua

SEQ ID NO: 172901 - RNA, 19 nt, Artificial Sequence
  Description of Artificial Sequence: Synthetic oligonucleotide
aagauuagucagaggaaua

SEQ ID NO: 172902 - RNA, 19 nt, Artificial Sequence
  Description of Artificial Sequence: Synthetic oligonucleotide
ucggcggucuaacucugca

SEQ ID NO: 172903 - RNA, 19 nt, Artificial Sequence
  Description of Artificial Sequence: Synthetic oligonucleotide
ugaacggauuauugagauc

SEQ ID NO: 172904 - RNA, 19 nt, Artificial Sequence
  Description of Artificial Sequence: Synthetic oligonucleotide
acccagaauacuaauucgu

SEQ ID NO: 172905 - RNA, 19 nt, Artificial Sequence
  Description of Artificial Sequence: Synthetic oligonucleotide
ucucucucacacacacaca

SEQ ID NO: 172906 - RNA, 19 nt, Artificial Sequence
  Description of Artificial Sequence: Synthetic oligonucleotide
guguuggguacauuaggca

SEQ ID NO: 172907 - RNA, 19 nt, Artificial Sequence
  Description of Artificial Sequence: Synthetic oligonucleotide
caaaucaccaagcaauuau

SEQ ID NO: 172908 - RNA, 19 nt, Artificial Sequence
  Description of Artificial Sequence: Synthetic oligonucleotide
acacacacacacgaagcug

SEQ ID NO: 172909 - RNA, 19 nt, Artificial Sequence
  Description of Artificial Sequence: Synthetic oligonucleotide
ucuaacucugcagcuuuuc

SEQ ID NO: 172910 - RNA, 19 nt, Artificial Sequence
  Description of Artificial Sequence: Synthetic oligonucleotide
uugugcgauacaguccaug

SEQ ID NO: 172911 - RNA, 19 nt, Artificial Sequence
  Description of Artificial Sequence: Synthetic oligonucleotide
caccuguugugcgauacag

SEQ ID NO: 172912 - RNA, 19 nt, Artificial Sequence
  Description of Artificial Sequence: Synthetic oligonucleotide
ccaaaauucucucucucuc

SEQ ID NO: 172913 - RNA, 19 nt, Artificial Sequence
  Description of Artificial Sequence: Synthetic oligonucleotide
aaguaguacauaagcuuua

SEQ ID NO: 172914 - RNA, 19 nt, Artificial Sequence
  Description of Artificial Sequence: Synthetic oligonucleotide
ccguauagcggucuguacc

SEQ ID NO: 172915 - RNA, 19 nt, Artificial Sequence
  Description of Artificial Sequence: Synthetic oligonucleotide
cgcaauauuaugcaccaac

SEQ ID NO: 172916 - RNA, 19 nt, Artificial Sequence
  Description of Artificial Sequence: Synthetic oligonucleotide
gugacauggaugccuguuc

SEQ ID NO: 172917 - RNA, 19 nt, Artificial Sequence
  Description of Artificial Sequence: Synthetic oligonucleotide
aucggccugugcugcauag

SEQ ID NO: 172918 - RNA, 19 nt, Artificial Sequence
  Description of Artificial Sequence: Synthetic oligonucleotide
ugcacggcgaacugacaaa

SEQ ID NO: 172919 - RNA, 19 nt, Artificial Sequence
  Description of Artificial Sequence: Synthetic oligonucleotide
agaggacuauccugucuca

SEQ ID NO: 172920 - RNA, 19 nt, Artificial Sequence
  Description of Artificial Sequence: Synthetic oligonucleotide
guaacagauggguccuuga

SEQ ID NO: 172921 - RNA, 19 nt, Artificial Sequence
  Description of Artificial Sequence: Synthetic oligonucleotide
acacacacacacacacacg

SEQ ID NO: 172922 - RNA, 19 nt, Artificial Sequence
  Description of Artificial Sequence: Synthetic oligonucleotide
uccguauagcggucuguac

SEQ ID NO: 172923 - RNA, 19 nt, Artificial Sequence
  Description of Artificial Sequence: Synthetic oligonucleotide
ucucucucucucacacaca

SEQ ID NO: 172924 - RNA, 19 nt, Artificial Sequence
  Description of Artificial Sequence: Synthetic oligonucleotide
aacggauuauugagaucug

SEQ ID NO: 172925 - RNA, 19 nt, Artificial Sequence
  Description of Artificial Sequence: Synthetic oligonucleotide
aucaugauuccaacuggga

SEQ ID NO: 172926 - RNA, 19 nt, Artificial Sequence
  Description of Artificial Sequence: Synthetic oligonucleotide
aggcguucuagaaucugag

SEQ ID NO: 172927 - RNA, 19 nt, Artificial Sequence
  Description of Artificial Sequence: Synthetic oligonucleotide
gauuagucagaggaauaua

SEQ ID NO: 172928 - RNA, 19 nt, Artificial Sequence
  Description of Artificial Sequence: Synthetic oligonucleotide
uacauguauuuagucuguc

SEQ ID NO: 172929 - RNA, 19 nt, Artificial Sequence
  Description of Artificial Sequence: Synthetic oligonucleotide
auucucucucucucucaca

SEQ ID NO: 172930 - RNA, 19 nt, Artificial Sequence
  Description of Artificial Sequence: Synthetic oligonucleotide
gaggcguucuagaaucuga

SEQ ID NO: 172931 - RNA, 19 nt, Artificial Sequence
  Description of Artificial Sequence: Synthetic oligonucleotide
ucucucucucucucacaca

SEQ ID NO: 172932 - RNA, 19 nt, Artificial Sequence
  Description of Artificial Sequence: Synthetic oligonucleotide
gugguuaguaucgagugcu

SEQ ID NO: 172933 - RNA, 19 nt, Artificial Sequence
  Description of Artificial Sequence: Synthetic oligonucleotide
uucaaggguuaggcuagcc

SEQ ID NO: 172934 - RNA, 19 nt, Artificial Sequence
  Description of Artificial Sequence: Synthetic oligonucleotide
acccaugcaaggucagaga

SEQ ID NO: 172935 - RNA, 19 nt, Artificial Sequence
  Description of Artificial Sequence: Synthetic oligonucleotide
agcguggaacauccauaag

SEQ ID NO: 172936 - RNA, 19 nt, Artificial Sequence
  Description of Artificial Sequence: Synthetic oligonucleotide
ucucggcggucuaacucug

SEQ ID NO: 172937 - RNA, 19 nt, Artificial Sequence
  Description of Artificial Sequence: Synthetic oligonucleotide
uccaaaguccacugcucuu

SEQ ID NO: 172938 - RNA, 19 nt, Artificial Sequence
  Description of Artificial Sequence: Synthetic oligonucleotide
caaaauucucucucucucu

SEQ ID NO: 172939 - RNA, 19 nt, Artificial Sequence
  Description of Artificial Sequence: Synthetic oligonucleotide
ggcagcgcaauauuaugca

SEQ ID NO: 172940 - RNA, 19 nt, Artificial Sequence
  Description of Artificial Sequence: Synthetic oligonucleotide
acccuauauuuaaauaaaa

SEQ ID NO: 172941 - RNA, 19 nt, Artificial Sequence
  Description of Artificial Sequence: Synthetic oligonucleotide
acaugcaacaugagaggga

SEQ ID NO: 172942 - RNA, 19 nt, Artificial Sequence
  Description of Artificial Sequence: Synthetic oligonucleotide
gacaucacuccuguugcaa

SEQ ID NO: 172943 - RNA, 19 nt, Artificial Sequence
  Description of Artificial Sequence: Synthetic oligonucleotide
cauggaugccuguucuaca

SEQ ID NO: 172944 - RNA, 19 nt, Artificial Sequence
  Description of Artificial Sequence: Synthetic oligonucleotide
cccuuaucuguacugacuc

SEQ ID NO: 172945 - RNA, 19 nt, Artificial Sequence
  Description of Artificial Sequence: Synthetic oligonucleotide
cuugaagcaucaacacaaa

SEQ ID NO: 172946 - RNA, 19 nt, Artificial Sequence
  Description of Artificial Sequence: Synthetic oligonucleotide
auuuagcagaugguaguuu

SEQ ID NO: 172947 - RNA, 19 nt, Artificial Sequence
  Description of Artificial Sequence: Synthetic oligonucleotide
ccguagaauacaguaacug

SEQ ID NO: 172948 - RNA, 19 nt, Artificial Sequence
  Description of Artificial Sequence: Synthetic oligonucleotide
aaggguuaggcuagccuuu

SEQ ID NO: 172949 - RNA, 19 nt, Artificial Sequence
  Description of Artificial Sequence: Synthetic oligonucleotide
acaaaucaccaagcaauua

SEQ ID NO: 172950 - RNA, 19 nt, Artificial Sequence
  Description of Artificial Sequence: Synthetic oligonucleotide
gacgagugagauaacugcu

SEQ ID NO: 172951 - RNA, 19 nt, Artificial Sequence
  Description of Artificial Sequence: Synthetic oligonucleotide
cagcguggaacauccauaa

SEQ ID NO: 172952 - RNA, 19 nt, Artificial Sequence
  Description of Artificial Sequence: Synthetic oligonucleotide
ugaacccacaucggccugu

SEQ ID NO: 172953 - RNA, 19 nt, Artificial Sequence
  Description of Artificial Sequence: Synthetic oligonucleotide
gcuuggucgauguuuuaca

SEQ ID NO: 172954 - RNA, 19 nt, Artificial Sequence
  Description of Artificial Sequence: Synthetic oligonucleotide
ggauuauugagaucuggau

SEQ ID NO: 172955 - RNA, 19 nt, Artificial Sequence
  Description of Artificial Sequence: Synthetic oligonucleotide
gggaugaaauccaaccaca

SEQ ID NO: 172956 - RNA, 19 nt, Artificial Sequence
  Description of Artificial Sequence: Synthetic oligonucleotide
ugguuaguaucgagugcuu

SEQ ID NO: 172957 - RNA, 19 nt, Artificial Sequence
  Description of Artificial Sequence: Synthetic oligonucleotide
agcuccguauagcggucug

SEQ ID NO: 172958 - RNA, 19 nt, Artificial Sequence
  Description of Artificial Sequence: Synthetic oligonucleotide
guaguacauaagcuuuacu

SEQ ID NO: 172959 - RNA, 19 nt, Artificial Sequence
  Description of Artificial Sequence: Synthetic oligonucleotide
caaggguuaggcuagccuu

SEQ ID NO: 172960 - RNA, 19 nt, Artificial Sequence
  Description of Artificial Sequence: Synthetic oligonucleotide
ccaugcacaugugaauagg

SEQ ID NO: 172961 - RNA, 19 nt, Artificial Sequence
  Description of Artificial Sequence: Synthetic oligonucleotide
cugagaggacuauccuguc

SEQ ID NO: 172962 - RNA, 19 nt, Artificial Sequence
  Description of Artificial Sequence: Synthetic oligonucleotide
cagcuugagccaaggcaug

SEQ ID NO: 172963 - RNA, 19 nt, Artificial Sequence
  Description of Artificial Sequence: Synthetic oligonucleotide
gggcagcgcaauauuaugc

SEQ ID NO: 172964 - RNA, 19 nt, Artificial Sequence
  Description of Artificial Sequence: Synthetic oligonucleotide
caacccuuaucuguacuga

SEQ ID NO: 172965 - RNA, 19 nt, Artificial Sequence
  Description of Artificial Sequence: Synthetic oligonucleotide
acagcguggaacauccaua

SEQ ID NO: 172966 - RNA, 19 nt, Artificial Sequence
  Description of Artificial Sequence: Synthetic oligonucleotide
acacacgaagcugccaaau

SEQ ID NO: 172967 - RNA, 19 nt, Artificial Sequence
  Description of Artificial Sequence: Synthetic oligonucleotide
gaaccaugacaguugccau

SEQ ID NO: 172968 - RNA, 19 nt, Artificial Sequence
  Description of Artificial Sequence: Synthetic oligonucleotide
agaaaugcuaggggcuuuu

SEQ ID NO: 172969 - RNA, 19 nt, Artificial Sequence
  Description of Artificial Sequence: Synthetic oligonucleotide
gcagcgcaauauuaugcac

SEQ ID NO: 172970 - RNA, 19 nt, Artificial Sequence
  Description of Artificial Sequence: Synthetic oligonucleotide
caugacgagugagauaacu

SEQ ID NO: 172971 - RNA, 19 nt, Artificial Sequence
  Description of Artificial Sequence: Synthetic oligonucleotide
ggcauccgaagauguuuag

SEQ ID NO: 172972 - RNA, 19 nt, Artificial Sequence
  Description of Artificial Sequence: Synthetic oligonucleotide
cuaccacuauaagcaguac

SEQ ID NO: 172973 - RNA, 19 nt, Artificial Sequence
  Description of Artificial Sequence: Synthetic oligonucleotide
acacacacacacacacaca

SEQ ID NO: 172974 - RNA, 19 nt, Artificial Sequence
  Description of Artificial Sequence: Synthetic oligonucleotide
ggauccgcaaacggauugc

SEQ ID NO: 172975 - RNA, 19 nt, Artificial Sequence
  Description of Artificial Sequence: Synthetic oligonucleotide
gaacccacaucggccugug

SEQ ID NO: 172976 - RNA, 19 nt, Artificial Sequence
  Description of Artificial Sequence: Synthetic oligonucleotide
cacacacacacacgaagcu

SEQ ID NO: 172977 - RNA, 19 nt, Artificial Sequence
  Description of Artificial Sequence: Synthetic oligonucleotide
gagcacaugcacggcgaac

SEQ ID NO: 172978 - RNA, 19 nt, Artificial Sequence
  Description of Artificial Sequence: Synthetic oligonucleotide
ugcugcugagaggacuauc

SEQ ID NO: 172979 - RNA, 19 nt, Artificial Sequence
  Description of Artificial Sequence: Synthetic oligonucleotide
cucggcggucuaacucugc

SEQ ID NO: 172980 - RNA, 19 nt, Artificial Sequence
  Description of Artificial Sequence: Synthetic oligonucleotide
ggcauucugcgccgcacug

SEQ ID NO: 172981 - RNA, 19 nt, Artificial Sequence
  Description of Artificial Sequence: Synthetic oligonucleotide
cauuaggcauuuucacacu

SEQ ID NO: 172982 - RNA, 19 nt, Artificial Sequence
  Description of Artificial Sequence: Synthetic oligonucleotide
gcccucuauaucugguuac

SEQ ID NO: 172983 - RNA, 19 nt, Artificial Sequence
  Description of Artificial Sequence: Synthetic oligonucleotide
gcuagcaccuguugugcga

SEQ ID NO: 172984 - RNA, 19 nt, Artificial Sequence
  Description of Artificial Sequence: Synthetic oligonucleotide
ggcguucuagaaucugaga

SEQ ID NO: 172985 - RNA, 19 nt, Artificial Sequence
  Description of Artificial Sequence: Synthetic oligonucleotide
cacaaaucaccaagcaauu

SEQ ID NO: 172986 - RNA, 19 nt, Artificial Sequence
  Description of Artificial Sequence: Synthetic oligonucleotide
cguauagcggucuguacca

SEQ ID NO: 172987 - RNA, 19 nt, Artificial Sequence
  Description of Artificial Sequence: Synthetic oligonucleotide
cugcgaggcccucuauauc

SEQ ID NO: 172988 - RNA, 19 nt, Artificial Sequence
  Description of Artificial Sequence: Synthetic oligonucleotide
cccucuauaucugguuacc

SEQ ID NO: 172989 - RNA, 19 nt, Artificial Sequence
  Description of Artificial Sequence: Synthetic oligonucleotide
gugcgauacaguccaugua

SEQ ID NO: 172990 - RNA, 19 nt, Artificial Sequence
  Description of Artificial Sequence: Synthetic oligonucleotide
ggucagagauuguuaucaa

SEQ ID NO: 172991 - RNA, 19 nt, Artificial Sequence
  Description of Artificial Sequence: Synthetic oligonucleotide
aggcauccgaagauguuua

SEQ ID NO: 172992 - RNA, 19 nt, Artificial Sequence
  Description of Artificial Sequence: Synthetic oligonucleotide
cggauuauugagaucugga

SEQ ID NO: 172993 - RNA, 19 nt, Artificial Sequence
  Description of Artificial Sequence: Synthetic oligonucleotide
caaacggauugcugucaaa

SEQ ID NO: 172994 - RNA, 19 nt, Artificial Sequence
  Description of Artificial Sequence: Synthetic oligonucleotide
cauucugcgccgcacuggu

SEQ ID NO: 172995 - RNA, 19 nt, Artificial Sequence
  Description of Artificial Sequence: Synthetic oligonucleotide
aagaaccgcugugguuagu

SEQ ID NO: 172996 - RNA, 19 nt, Artificial Sequence
  Description of Artificial Sequence: Synthetic oligonucleotide
gauccgcaaacggauugcu

SEQ ID NO: 172997 - RNA, 19 nt, Artificial Sequence
  Description of Artificial Sequence: Synthetic oligonucleotide
acacacacacacacacgaa

SEQ ID NO: 172998 - RNA, 19 nt, Artificial Sequence
  Description of Artificial Sequence: Synthetic oligonucleotide
guuggguacauuaggcauu

SEQ ID NO: 172999 - RNA, 19 nt, Artificial Sequence
  Description of Artificial Sequence: Synthetic oligonucleotide
ugcgccgcacuggucgcug

SEQ ID NO: 173000 - RNA, 19 nt, Artificial Sequence
  Description of Artificial Sequence: Synthetic oligonucleotide
cacaugcacggcgaacuga

SEQ ID NO: 173001 - RNA, 19 nt, Artificial Sequence
  Description of Artificial Sequence: Synthetic oligonucleotide
ccagcuccuaccacuauaa

SEQ ID NO: 173002 - RNA, 19 nt, Artificial Sequence
  Description of Artificial Sequence: Synthetic oligonucleotide
cacuccugaaagcuccgua

SEQ ID NO: 173003 - RNA, 19 nt, Artificial Sequence
  Description of Artificial Sequence: Synthetic oligonucleotide
gcaaacggauugcugucaa

SEQ ID NO: 173004 - RNA, 19 nt, Artificial Sequence
  Description of Artificial Sequence: Synthetic oligonucleotide
gaaaugcuaggggcuuuua

SEQ ID NO: 173005 - RNA, 19 nt, Artificial Sequence
  Description of Artificial Sequence: Synthetic oligonucleotide
gcacaugcacggcgaacug

SEQ ID NO: 173006 - RNA, 19 nt, Artificial Sequence
  Description of Artificial Sequence: Synthetic oligonucleotide
cacacacgaagcugccaaa

SEQ ID NO: 173007 - RNA, 19 nt, Artificial Sequence
  Description of Artificial Sequence: Synthetic oligonucleotide
gaaccgcugugguuaguau

SEQ ID NO: 173008 - RNA, 19 nt, Artificial Sequence
  Description of Artificial Sequence: Synthetic oligonucleotide
agccacuauuugauaucga

SEQ ID NO: 173009 - RNA, 19 nt, Artificial Sequence
  Description of Artificial Sequence: Synthetic oligonucleotide
guacccaugcaaggucaga

SEQ ID NO: 173010 - RNA, 19 nt, Artificial Sequence
  Description of Artificial Sequence: Synthetic oligonucleotide
ggcccucuauaucugguua

SEQ ID NO: 173011 - RNA, 19 nt, Artificial Sequence
  Description of Artificial Sequence: Synthetic oligonucleotide
ccuagaaagcaagccgauc

SEQ ID NO: 173012 - RNA, 19 nt, Artificial Sequence
  Description of Artificial Sequence: Synthetic oligonucleotide
cuccguauagcggucugua

SEQ ID NO: 173013 - RNA, 19 nt, Artificial Sequence
  Description of Artificial Sequence: Synthetic oligonucleotide
gcgaacugacaaauauaca

SEQ ID NO: 173014 - RNA, 19 nt, Artificial Sequence
  Description of Artificial Sequence: Synthetic oligonucleotide
cgaggcccucuauaucugg

SEQ ID NO: 173015 - RNA, 19 nt, Artificial Sequence
  Description of Artificial Sequence: Synthetic oligonucleotide
ccgcaaacggauugcuguc

SEQ ID NO: 173016 - RNA, 19 nt, Artificial Sequence
  Description of Artificial Sequence: Synthetic oligonucleotide
gaggcccucuauaucuggu

SEQ ID NO: 173017 - RNA, 19 nt, Artificial Sequence
  Description of Artificial Sequence: Synthetic oligonucleotide
gcugcgaggcccucuauau

SEQ ID NO: 173018 - RNA, 19 nt, Artificial Sequence
  Description of Artificial Sequence: Synthetic oligonucleotide
guauagcggucuguaccaa

SEQ ID NO: 173019 - RNA, 19 nt, Artificial Sequence
  Description of Artificial Sequence: Synthetic oligonucleotide
caggcauccgaagauguuu

SEQ ID NO: 173020 - RNA, 19 nt, Artificial Sequence
  Description of Artificial Sequence: Synthetic oligonucleotide
cacggcgaacugacaaaua

SEQ ID NO: 173021 - RNA, 19 nt, Artificial Sequence
  Description of Artificial Sequence: Synthetic oligonucleotide
cuagcaccuguugugcgau

SEQ ID NO: 173022 - RNA, 19 nt, Artificial Sequence
  Description of Artificial Sequence: Synthetic oligonucleotide
gcgaggcccucuauaucug

SEQ ID NO: 173023 - RNA, 19 nt, Artificial Sequence
  Description of Artificial Sequence: Synthetic oligonucleotide
gguuaguaucgagugcuuu

SEQ ID NO: 173024 - RNA, 19 nt, Artificial Sequence
  Description of Artificial Sequence: Synthetic oligonucleotide
gaguuacagcguggaacau

SEQ ID NO: 173025 - RNA, 19 nt, Artificial Sequence
  Description of Artificial Sequence: Synthetic oligonucleotide
cggcgaacugacaaauaua

SEQ ID NO: 173026 - RNA, 19 nt, Artificial Sequence
  Description of Artificial Sequence: Synthetic oligonucleotide
ccauaagggcagcgcaaua

SEQ ID NO: 173027 - RNA, 19 nt, Artificial Sequence
  Description of Artificial Sequence: Synthetic oligonucleotide
guugugcgauacaguccau

SEQ ID NO: 173028 - RNA, 19 nt, Artificial Sequence
  Description of Artificial Sequence: Synthetic oligonucleotide
gcuccguauagcggucugu

SEQ ID NO: 173029 - RNA, 19 nt, Artificial Sequence
  Description of Artificial Sequence: Synthetic oligonucleotide
gcgcaauauuaugcaccaa

SEQ ID NO: 173030 - RNA, 19 nt, Artificial Sequence
  Description of Artificial Sequence: Synthetic oligonucleotide
cguucucggcggucuaacu

SEQ ID NO: 173031 - RNA, 19 nt, Artificial Sequence
  Description of Artificial Sequence: Synthetic oligonucleotide
uuuaaaauaucacagagac

SEQ ID NO: 173032 - RNA, 19 nt, Artificial Sequence
  Description of Artificial Sequence: Synthetic oligonucleotide
aguuauagaugacaaaggc

SEQ ID NO: 173033 - RNA, 19 nt, Artificial Sequence
  Description of Artificial Sequence: Synthetic oligonucleotide
aacaucucgacacagauga

SEQ ID NO: 173034 - RNA, 19 nt, Artificial Sequence
  Description of Artificial Sequence: Synthetic oligonucleotide
aaagcuugggaccagcugg

SEQ ID NO: 173035 - RNA, 19 nt, Artificial Sequence
  Description of Artificial Sequence: Synthetic oligonucleotide
aacccgauggaguaggucc

SEQ ID NO: 173036 - RNA, 19 nt, Artificial Sequence
  Description of Artificial Sequence: Synthetic oligonucleotide
aauaacggugcugacagcc

SEQ ID NO: 173037 - RNA, 19 nt, Artificial Sequence
  Description of Artificial Sequence: Synthetic oligonucleotide
gaaguuauagaugacaaag

SEQ ID NO: 173038 - RNA, 19 nt, Artificial Sequence
  Description of Artificial Sequence: Synthetic oligonucleotide
ugguccaauaaauaaaggg

SEQ ID NO: 173039 - RNA, 19 nt, Artificial Sequence
  Description of Artificial Sequence: Synthetic oligonucleotide
aagaugacggacuugacca

SEQ ID NO: 173040 - RNA, 19 nt, Artificial Sequence
  Description of Artificial Sequence: Synthetic oligonucleotide
ucagaacucaucaucagag

SEQ ID NO: 173041 - RNA, 19 nt, Artificial Sequence
  Description of Artificial Sequence: Synthetic oligonucleotide
agaauaacggugcugacag

SEQ ID NO: 173042 - RNA, 19 nt, Artificial Sequence
  Description of Artificial Sequence: Synthetic oligonucleotide
ucagcguagaccuuguagg

SEQ ID NO: 173043 - RNA, 19 nt, Artificial Sequence
  Description of Artificial Sequence: Synthetic oligonucleotide
aaagagcuacucuaucugg

SEQ ID NO: 173044 - RNA, 19 nt, Artificial Sequence
  Description of Artificial Sequence: Synthetic oligonucleotide
uucuacaccacucugucca

SEQ ID NO: 173045 - RNA, 19 nt, Artificial Sequence
  Description of Artificial Sequence: Synthetic oligonucleotide
ugaagguuuggccauguag

SEQ ID NO: 173046 - RNA, 19 nt, Artificial Sequence
  Description of Artificial Sequence: Synthetic oligonucleotide
aucacagagaccaaaauag

SEQ ID NO: 173047 - RNA, 19 nt, Artificial Sequence
  Description of Artificial Sequence: Synthetic oligonucleotide
ucuggaagugauaugugag

SEQ ID NO: 173048 - RNA, 19 nt, Artificial Sequence
  Description of Artificial Sequence: Synthetic oligonucleotide
auauauacuucuuccugac

SEQ ID NO: 173049 - RNA, 19 nt, Artificial Sequence
  Description of Artificial Sequence: Synthetic oligonucleotide
uggucguugguaaagaaga

SEQ ID NO: 173050 - RNA, 19 nt, Artificial Sequence
  Description of Artificial Sequence: Synthetic oligonucleotide
gguuaugcauccuagaaag

SEQ ID NO: 173051 - RNA, 19 nt, Artificial Sequence
  Description of Artificial Sequence: Synthetic oligonucleotide
guagacacauuccugaggc

SEQ ID NO: 173052 - RNA, 19 nt, Artificial Sequence
  Description of Artificial Sequence: Synthetic oligonucleotide
aaguuauagaugacaaagg

SEQ ID NO: 173053 - RNA, 19 nt, Artificial Sequence
  Description of Artificial Sequence: Synthetic oligonucleotide
uagaugggcacgaugaaca

SEQ ID NO: 173054 - RNA, 19 nt, Artificial Sequence
  Description of Artificial Sequence: Synthetic oligonucleotide
aacgagauacaaaacuagg

SEQ ID NO: 173055 - RNA, 19 nt, Artificial Sequence
  Description of Artificial Sequence: Synthetic oligonucleotide
agguguggcagcuacggcc

SEQ ID NO: 173056 - RNA, 19 nt, Artificial Sequence
  Description of Artificial Sequence: Synthetic oligonucleotide
agugauaugugaguguuuc

SEQ ID NO: 173057 - RNA, 19 nt, Artificial Sequence
  Description of Artificial Sequence: Synthetic oligonucleotide
gaugauagucacauagagg

SEQ ID NO: 173058 - RNA, 19 nt, Artificial Sequence
  Description of Artificial Sequence: Synthetic oligonucleotide
uuaaaauaucacagagacc

SEQ ID NO: 173059 - RNA, 19 nt, Artificial Sequence
  Description of Artificial Sequence: Synthetic oligonucleotide
uucauaugugacuaaggca

SEQ ID NO: 173060 - RNA, 19 nt, Artificial Sequence
  Description of Artificial Sequence: Synthetic oligonucleotide
aaacccaaaugcugugugg

SEQ ID NO: 173061 - RNA, 19 nt, Artificial Sequence
  Description of Artificial Sequence: Synthetic oligonucleotide
  modified_base (4)..(4): a, c, u, g, unknown or other
gaancugcugcaguugugg

SEQ ID NO: 173062 - RNA, 19 nt, Artificial Sequence
  Description of Artificial Sequence: Synthetic oligonucleotide
  modified_base (2)..(2): a, c, u, g, unknown or other
  modified_base (18)..(18): a, c, u, g, unknown or other
uncagaacaccagagaanc

SEQ ID NO: 173063 - RNA, 19 nt, Artificial Sequence
  Description of Artificial Sequence: Synthetic oligonucleotide
aaggccucguagcagucgc

SEQ ID NO: 173064 - RNA, 19 nt, Artificial Sequence
  Description of Artificial Sequence: Synthetic oligonucleotide
aaauaggacaggaagggca

SEQ ID NO: 173065 - RNA, 19 nt, Artificial Sequence
  Description of Artificial Sequence: Synthetic oligonucleotide
gauagucacauagagguac

SEQ ID NO: 173066 - RNA, 19 nt, Artificial Sequence
  Description of Artificial Sequence: Synthetic oligonucleotide
uuacagaaccgcaggaacc

SEQ ID NO: 173067 - RNA, 19 nt, Artificial Sequence
  Description of Artificial Sequence: Synthetic oligonucleotide
  modified_base (9)..(9): a, c, u, g, unknown or other
ucaggguuncagaacacca

SEQ ID NO: 173068 - RNA, 19 nt, Artificial Sequence
  Description of Artificial Sequence: Synthetic oligonucleotide
ucuugcccaauagugaagg

SEQ ID NO: 173069 - RNA, 19 nt, Artificial Sequence
  Description of Artificial Sequence: Synthetic oligonucleotide
cauuccugaggcuuguucc

SEQ ID NO: 173070 - RNA, 19 nt, Artificial Sequence
  Description of Artificial Sequence: Synthetic oligonucleotide
agcauaccuugccagaagg

SEQ ID NO: 173071 - RNA, 19 nt, Artificial Sequence
  Description of Artificial Sequence: Synthetic oligonucleotide
cuuuggccuggaaagaagg

SEQ ID NO: 173072 - RNA, 19 nt, Artificial Sequence
  Description of Artificial Sequence: Synthetic oligonucleotide
gaugcaacagccccaugag

SEQ ID NO: 173073 - RNA, 19 nt, Artificial Sequence
  Description of Artificial Sequence: Synthetic oligonucleotide
  modified_base (3)..(3): a, c, u, g, unknown or other
aancugcugcaguuguggg

SEQ ID NO: 173074 - RNA, 19 nt, Artificial Sequence
  Description of Artificial Sequence: Synthetic oligonucleotide
uggagaauaacggugcuga

SEQ ID NO: 173075 - RNA, 19 nt, Artificial Sequence
  Description of Artificial Sequence: Synthetic oligonucleotide
aaaaggggaggguccacag

SEQ ID NO: 173076 - RNA, 19 nt, Artificial Sequence
  Description of Artificial Sequence: Synthetic oligonucleotide
gaagaacuugaggacaggg

SEQ ID NO: 173077 - RNA, 19 nt, Artificial Sequence
  Description of Artificial Sequence: Synthetic oligonucleotide
agagguacccacuggugac

SEQ ID NO: 173078 - RNA, 19 nt, Artificial Sequence
  Description of Artificial Sequence: Synthetic oligonucleotide
  modified_base (3)..(3): a, c, u, g, unknown or other
  modified_base (19)..(19): a, c, u, g, unknown or other
uuncagaacaccagagaan

SEQ ID NO: 173079 - RNA, 19 nt, Artificial Sequence
  Description of Artificial Sequence: Synthetic oligonucleotide
caacgagauacaaaacuag

SEQ ID NO: 173080 - RNA, 19 nt, Artificial Sequence
  Description of Artificial Sequence: Synthetic oligonucleotide
ugucacgcauuuaaaauau

SEQ ID NO: 173081 - RNA, 19 nt, Artificial Sequence
  Description of Artificial Sequence: Synthetic oligonucleotide
auccuagaaagaaagaaug

SEQ ID NO: 173082 - RNA, 19 nt, Artificial Sequence
  Description of Artificial Sequence: Synthetic oligonucleotide
uacuggguggagcugagug

SEQ ID NO: 173083 - RNA, 19 nt, Artificial Sequence
  Description of Artificial Sequence: Synthetic oligonucleotide
gaaggccuggagaauaacg

SEQ ID NO: 173084 - RNA, 19 nt, Artificial Sequence
  Description of Artificial Sequence: Synthetic oligonucleotide
aguagagcuguccacacaa

SEQ ID NO: 173085 - RNA, 19 nt, Artificial Sequence
  Description of Artificial Sequence: Synthetic oligonucleotide
cuugggaccagcuggcuag

SEQ ID NO: 173086 - RNA, 19 nt, Artificial Sequence
  Description of Artificial Sequence: Synthetic oligonucleotide
cacgauguggcgcugcucg

SEQ ID NO: 173087 - RNA, 19 nt, Artificial Sequence
  Description of Artificial Sequence: Synthetic oligonucleotide
gaagguuuggccauguaga

SEQ ID NO: 173088 - RNA, 19 nt, Artificial Sequence
  Description of Artificial Sequence: Synthetic oligonucleotide
cuguuuacagaaccgcagg

SEQ ID NO: 173089 - RNA, 19 nt, Artificial Sequence
  Description of Artificial Sequence: Synthetic oligonucleotide
aaaggcguagaugggcacg

SEQ ID NO: 173090 - RNA, 19 nt, Artificial Sequence
  Description of Artificial Sequence: Synthetic oligonucleotide
  modified_base (3)..(3): a, c, u, g, unknown or other
gunaugcugggucuggggc

SEQ ID NO: 173091 - RNA, 19 nt, Artificial Sequence
  Description of Artificial Sequence: Synthetic oligonucleotide
gagacaagauagguuaugc

SEQ ID NO: 173092 - RNA, 19 nt, Artificial Sequence
  Description of Artificial Sequence: Synthetic oligonucleotide
  modified_base (7)..(7): a, c, u, g, unknown or other
aggguuncagaacaccaga

SEQ ID NO: 173093 - RNA, 19 nt, Artificial Sequence
  Description of Artificial Sequence: Synthetic oligonucleotide
cagcacgugccauacaugc

SEQ ID NO: 173094 - RNA, 19 nt, Artificial Sequence
  Description of Artificial Sequence: Synthetic oligonucleotide
  modified_base (9)..(9): a, c, u, g, unknown or other
uugugggunaugcuggguc

SEQ ID NO: 173095 - RNA, 19 nt, Artificial Sequence
  Description of Artificial Sequence: Synthetic oligonucleotide
ugugggaccgggaaaggcu

SEQ ID NO: 173096 - RNA, 19 nt, Artificial Sequence
  Description of Artificial Sequence: Synthetic oligonucleotide
acacaaagaagccggagau

SEQ ID NO: 173097 - RNA, 19 nt, Artificial Sequence
  Description of Artificial Sequence: Synthetic oligonucleotide
uguuccguguucccaagga

SEQ ID NO: 173098 - RNA, 19 nt, Artificial Sequence
  Description of Artificial Sequence: Synthetic oligonucleotide
gauggaguagguccuuccc

SEQ ID NO: 173099 - RNA, 19 nt, Artificial Sequence
  Description of Artificial Sequence: Synthetic oligonucleotide
agcgguggucaucaggaac

SEQ ID NO: 173100 - RNA, 19 nt, Artificial Sequence
  Description of Artificial Sequence: Synthetic oligonucleotide
  modified_base (2)..(2): a, c, u, g, unknown or other
unaugcugggucuggggcc

SEQ ID NO: 173101 - RNA, 19 nt, Artificial Sequence
  Description of Artificial Sequence: Synthetic oligonucleotide
aguguuucugguccaauaa

SEQ ID NO: 173102 - RNA, 19 nt, Artificial Sequence
  Description of Artificial Sequence: Synthetic oligonucleotide
ugcucuugcccaauaguga

SEQ ID NO: 173103 - RNA, 19 nt, Artificial Sequence
  Description of Artificial Sequence: Synthetic oligonucleotide
cuucccacggacccuaggg

SEQ ID NO: 173104 - RNA, 19 nt, Artificial Sequence
  Description of Artificial Sequence: Synthetic oligonucleotide
acauacuuuggccuggaaa

SEQ ID NO: 173105 - RNA, 19 nt, Artificial Sequence
  Description of Artificial Sequence: Synthetic oligonucleotide
agaacuguaggguggccug

SEQ ID NO: 173106 - RNA, 19 nt, Artificial Sequence
  Description of Artificial Sequence: Synthetic oligonucleotide
cuggucguugguaaagaag

SEQ ID NO: 173107 - RNA, 19 nt, Artificial Sequence
  Description of Artificial Sequence: Synthetic oligonucleotide
  modified_base (2)..(2): a, c, u, g, unknown or other
ancugcugcaguugugggu

SEQ ID NO: 173108 - RNA, 19 nt, Artificial Sequence
  Description of Artificial Sequence: Synthetic oligonucleotide
cagucacacaacgagauac

SEQ ID NO: 173109 - RNA, 19 nt, Artificial Sequence
  Description of Artificial Sequence: Synthetic oligonucleotide
uccguguucccaaggacca

SEQ ID NO: 173110 - RNA, 19 nt, Artificial Sequence
  Description of Artificial Sequence: Synthetic oligonucleotide
augucgugugggcucaugg

SEQ ID NO: 173111 - RNA, 19 nt, Artificial Sequence
  Description of Artificial Sequence: Synthetic oligonucleotide
uggaagcaaucccauggcc

SEQ ID NO: 173112 - RNA, 19 nt, Artificial Sequence
  Description of Artificial Sequence: Synthetic oligonucleotide
agagguguggcagcuacgg

SEQ ID NO: 173113 - RNA, 19 nt, Artificial Sequence
  Description of Artificial Sequence: Synthetic oligonucleotide
uggaguagguccuucccca

SEQ ID NO: 173114 - RNA, 19 nt, Artificial Sequence
  Description of Artificial Sequence: Synthetic oligonucleotide
agcuugacgaaguuauaga

SEQ ID NO: 173115 - RNA, 19 nt, Artificial Sequence
  Description of Artificial Sequence: Synthetic oligonucleotide
agcuacucuaucuggaaaa

SEQ ID NO: 173116 - RNA, 19 nt, Artificial Sequence
  Description of Artificial Sequence: Synthetic oligonucleotide
aguagcauaccuugccaga

SEQ ID NO: 173117 - RNA, 19 nt, Artificial Sequence
  Description of Artificial Sequence: Synthetic oligonucleotide
uggccaugccccaaggagc

SEQ ID NO: 173118 - RNA, 19 nt, Artificial Sequence
  Description of Artificial Sequence: Synthetic oligonucleotide
cucgacacagaugaugaag

SEQ ID NO: 173119 - RNA, 19 nt, Artificial Sequence
  Description of Artificial Sequence: Synthetic oligonucleotide
auagguuaugcauccuaga

SEQ ID NO: 173120 - RNA, 19 nt, Artificial Sequence
  Description of Artificial Sequence: Synthetic oligonucleotide
aacaaggaagugccuggga

SEQ ID NO: 173121 - RNA, 19 nt, Artificial Sequence
  Description of Artificial Sequence: Synthetic oligonucleotide
uccugcacaaugucgugug

SEQ ID NO: 173122 - RNA, 19 nt, Artificial Sequence
  Description of Artificial Sequence: Synthetic oligonucleotide
augaacaggaugcgcacga

SEQ ID NO: 173123 - RNA, 19 nt, Artificial Sequence
  Description of Artificial Sequence: Synthetic oligonucleotide
ugagacaagauagguuaug

SEQ ID NO: 173124 - RNA, 19 nt, Artificial Sequence
  Description of Artificial Sequence: Synthetic oligonucleotide
  modified_base (8)..(8): a, c, u, g, unknown or other
ugugggunaugcugggucu

SEQ ID NO: 173125 - RNA, 19 nt, Artificial Sequence
  Description of Artificial Sequence: Synthetic oligonucleotide
  modified_base (11)..(11): a, c, u, g, unknown or other
aguugugggunaugcuggg

SEQ ID NO: 173126 - RNA, 19 nt, Artificial Sequence
  Description of Artificial Sequence: Synthetic oligonucleotide
agguuaugcauccuagaaa

SEQ ID NO: 173127 - RNA, 19 nt, Artificial Sequence
  Description of Artificial Sequence: Synthetic oligonucleotide
cagcuucuggccaacacac

SEQ ID NO: 173128 - RNA, 19 nt, Artificial Sequence
  Description of Artificial Sequence: Synthetic oligonucleotide
ugggaagaucagaucaggu

SEQ ID NO: 173129 - RNA, 19 nt, Artificial Sequence
  Description of Artificial Sequence: Synthetic oligonucleotide
augugacuaaggcacagaa

SEQ ID NO: 173130 - RNA, 19 nt, Artificial Sequence
  Description of Artificial Sequence: Synthetic oligonucleotide
ucgugugggcucauggucu

SEQ ID NO: 173131 - RNA, 19 nt, Artificial Sequence
  Description of Artificial Sequence: Synthetic oligonucleotide
uagcauaccuugccagaag

SEQ ID NO: 173132 - RNA, 19 nt, Artificial Sequence
  Description of Artificial Sequence: Synthetic oligonucleotide
agaguagacugcugggugu

SEQ ID NO: 173133 - RNA, 19 nt, Artificial Sequence
  Description of Artificial Sequence: Synthetic oligonucleotide
caguagcauaccuugccag

SEQ ID NO: 173134 - RNA, 19 nt, Artificial Sequence
  Description of Artificial Sequence: Synthetic oligonucleotide
  modified_base (8)..(8): a, c, u, g, unknown or other
caggguuncagaacaccag

SEQ ID NO: 173135 - RNA, 19 nt, Artificial Sequence
  Description of Artificial Sequence: Synthetic oligonucleotide
cuggguguacugcugguag

SEQ ID NO: 173136 - RNA, 19 nt, Artificial Sequence
  Description of Artificial Sequence: Synthetic oligonucleotide
  modified_base (4)..(4): a, c, u, g, unknown or other
ggunaugcugggucugggg

SEQ ID NO: 173137 - RNA, 19 nt, Artificial Sequence
  Description of Artificial Sequence: Synthetic oligonucleotide
agauugggaaaaggggagg

SEQ ID NO: 173138 - RNA, 19 nt, Artificial Sequence
  Description of Artificial Sequence: Synthetic oligonucleotide
ggugccgaaguacacguag

SEQ ID NO: 173139 - RNA, 19 nt, Artificial Sequence
  Description of Artificial Sequence: Synthetic oligonucleotide
cuaggcaggccuagauugg

SEQ ID NO: 173140 - RNA, 19 nt, Artificial Sequence
  Description of Artificial Sequence: Synthetic oligonucleotide
agcagucgcggauggugcc

SEQ ID NO: 173141 - RNA, 19 nt, Artificial Sequence
  Description of Artificial Sequence: Synthetic oligonucleotide
uggguguacugcugguagg

SEQ ID NO: 173142 - RNA, 19 nt, Artificial Sequence
  Description of Artificial Sequence: Synthetic oligonucleotide
aagagcuacucuaucugga

SEQ ID NO: 173143 - RNA, 19 nt, Artificial Sequence
  Description of Artificial Sequence: Synthetic oligonucleotide
gagaauaacggugcugaca

SEQ ID NO: 173144 - RNA, 19 nt, Artificial Sequence
  Description of Artificial Sequence: Synthetic oligonucleotide
ggagcagaacaccaggccc

SEQ ID NO: 173145 - RNA, 19 nt, Artificial Sequence
  Description of Artificial Sequence: Synthetic oligonucleotide
ggcguaaagggccaggcug

SEQ ID NO: 173146 - RNA, 19 nt, Artificial Sequence
  Description of Artificial Sequence: Synthetic oligonucleotide
uccaccucaagaagcuacu

SEQ ID NO: 173147 - RNA, 19 nt, Artificial Sequence
  Description of Artificial Sequence: Synthetic oligonucleotide
aucucgacacagaugauga

SEQ ID NO: 173148 - RNA, 19 nt, Artificial Sequence
  Description of Artificial Sequence: Synthetic oligonucleotide
uagcagucgcggauggugc

SEQ ID NO: 173149 - RNA, 19 nt, Artificial Sequence
  Description of Artificial Sequence: Synthetic oligonucleotide
cacaacgagauacaaaacu

SEQ ID NO: 173150 - RNA, 19 nt, Artificial Sequence
  Description of Artificial Sequence: Synthetic oligonucleotide
caucucgacacagaugaug

SEQ ID NO: 173151 - RNA, 19 nt, Artificial Sequence
  Description of Artificial Sequence: Synthetic oligonucleotide
acaacgagauacaaaacua

SEQ ID NO: 173152 - RNA, 19 nt, Artificial Sequence
  Description of Artificial Sequence: Synthetic oligonucleotide
caugccguagggccaaggc

SEQ ID NO: 173153 - RNA, 19 nt, Artificial Sequence
  Description of Artificial Sequence: Synthetic oligonucleotide
ggugaaggcaugccguagg

SEQ ID NO: 173154 - RNA, 19 nt, Artificial Sequence
  Description of Artificial Sequence: Synthetic oligonucleotide
uuacgcccgcugcauaacc

SEQ ID NO: 173155 - RNA, 19 nt, Artificial Sequence
  Description of Artificial Sequence: Synthetic oligonucleotide
guagcagucgcggauggug

SEQ ID NO: 173156 - RNA, 19 nt, Artificial Sequence
  Description of Artificial Sequence: Synthetic oligonucleotide
uguucccaaggaccacuag

SEQ ID NO: 173157 - RNA, 19 nt, Artificial Sequence
  Description of Artificial Sequence: Synthetic oligonucleotide
agggaaggaaccuguuugu

SEQ ID NO: 173158 - RNA, 19 nt, Artificial Sequence
  Description of Artificial Sequence: Synthetic oligonucleotide
accccacaugcucaggaag

SEQ ID NO: 173159 - RNA, 19 nt, Artificial Sequence
  Description of Artificial Sequence: Synthetic oligonucleotide
cuucuacaccacucugucc

SEQ ID NO: 173160 - RNA, 19 nt, Artificial Sequence
  Description of Artificial Sequence: Synthetic oligonucleotide
acgaaguuauagaugacaa

SEQ ID NO: 173161 - RNA, 19 nt, Artificial Sequence
  Description of Artificial Sequence: Synthetic oligonucleotide
cugcacaaugucguguggg

SEQ ID NO: 173162 - RNA, 19 nt, Artificial Sequence
  Description of Artificial Sequence: Synthetic oligonucleotide
agcuggcuaggccuacugg

SEQ ID NO: 173163 - RNA, 19 nt, Artificial Sequence
  Description of Artificial Sequence: Synthetic oligonucleotide
uaggcaggccuagauuggg

SEQ ID NO: 173164 - RNA, 19 nt, Artificial Sequence
  Description of Artificial Sequence: Synthetic oligonucleotide
gggaagaucagaucagguc

SEQ ID NO: 173165 - RNA, 19 nt, Artificial Sequence
  Description of Artificial Sequence: Synthetic oligonucleotide
guacccacuggugacauca

SEQ ID NO: 173166 - RNA, 19 nt, Artificial Sequence
  Description of Artificial Sequence: Synthetic oligonucleotide
ggggacaggaaccagcaac

SEQ ID NO: 173167 - RNA, 19 nt, Artificial Sequence
  Description of Artificial Sequence: Synthetic oligonucleotide
ucgcggauggugccgaagu

SEQ ID NO: 173168 - RNA, 19 nt, Artificial Sequence
  Description of Artificial Sequence: Synthetic oligonucleotide
uucccacggacccuaggga

SEQ ID NO: 173169 - RNA, 19 nt, Artificial Sequence
  Description of Artificial Sequence: Synthetic oligonucleotide
ggcugcgaagaacaucucg

SEQ ID NO: 173170 - RNA, 19 nt, Artificial Sequence
  Description of Artificial Sequence: Synthetic oligonucleotide
accccuaccuuacgcccgc

SEQ ID NO: 173171 - RNA, 19 nt, Artificial Sequence
  Description of Artificial Sequence: Synthetic oligonucleotide
aaggagcucccaccuguca

SEQ ID NO: 173172 - RNA, 19 nt, Artificial Sequence
  Description of Artificial Sequence: Synthetic oligonucleotide
ugacaucaaaguccccguc

SEQ ID NO: 173173 - RNA, 19 nt, Artificial Sequence
  Description of Artificial Sequence: Synthetic oligonucleotide
ggguauugcacgguguggg

SEQ ID NO: 173174 - RNA, 19 nt, Artificial Sequence
  Description of Artificial Sequence: Synthetic oligonucleotide
  modified_base (6)..(6): a, c, u, g, unknown or other
ugggunaugcugggucugg

SEQ ID NO: 173175 - RNA, 19 nt, Artificial Sequence
  Description of Artificial Sequence: Synthetic oligonucleotide
cucagaacucaucaucaga

SEQ ID NO: 173176 - RNA, 19 nt, Artificial Sequence
  Description of Artificial Sequence: Synthetic oligonucleotide
uguagggaccaguggggac

SEQ ID NO: 173177 - RNA, 19 nt, Artificial Sequence
  Description of Artificial Sequence: Synthetic oligonucleotide
  modified_base (5)..(5): a, c, u, g, unknown or other
gguuncagaacaccagaga

SEQ ID NO: 173178 - RNA, 19 nt, Artificial Sequence
  Description of Artificial Sequence: Synthetic oligonucleotide
cugucacgcauuuaaaaua

SEQ ID NO: 173179 - RNA, 19 nt, Artificial Sequence
  Description of Artificial Sequence: Synthetic oligonucleotide
acagcggccuugagcaucc

SEQ ID NO: 173180 - RNA, 19 nt, Artificial Sequence
  Description of Artificial Sequence: Synthetic oligonucleotide
caaucuauauuaucucaua

SEQ ID NO: 173181 - RNA, 19 nt, Artificial Sequence
  Description of Artificial Sequence: Synthetic oligonucleotide
uccuguuccguguucccaa

SEQ ID NO: 173182 - RNA, 19 nt, Artificial Sequence
  Description of Artificial Sequence: Synthetic oligonucleotide
aggccuacuggguggagcu

SEQ ID NO: 173183 - RNA, 19 nt, Artificial Sequence
  Description of Artificial Sequence: Synthetic oligonucleotide
gguauugcacggugugggg

SEQ ID NO: 173184 - RNA, 19 nt, Artificial Sequence
  Description of Artificial Sequence: Synthetic oligonucleotide
guagaugggcacgaugaac

SEQ ID NO: 173185 - RNA, 19 nt, Artificial Sequence
  Description of Artificial Sequence: Synthetic oligonucleotide
agaacggcuuucuggugga

SEQ ID NO: 173186 - RNA, 19 nt, Artificial Sequence
  Description of Artificial Sequence: Synthetic oligonucleotide
uacgcccgcugcauaacca

SEQ ID NO: 173187 - RNA, 19 nt, Artificial Sequence
  Description of Artificial Sequence: Synthetic oligonucleotide
cucuugcccaauagugaag

SEQ ID NO: 173188 - RNA, 19 nt, Artificial Sequence
  Description of Artificial Sequence: Synthetic oligonucleotide
auaccuugccagaaggaga

SEQ ID NO: 173189 - RNA, 19 nt, Artificial Sequence
  Description of Artificial Sequence: Synthetic oligonucleotide
guagcagcgcaggugcgcg

SEQ ID NO: 173190 - RNA, 19 nt, Artificial Sequence
  Description of Artificial Sequence: Synthetic oligonucleotide
gaauaacggugcugacagc

SEQ ID NO: 173191 - RNA, 19 nt, Artificial Sequence
  Description of Artificial Sequence: Synthetic oligonucleotide
gcagaugucuuguugggga

SEQ ID NO: 173192 - RNA, 19 nt, Artificial Sequence
  Description of Artificial Sequence: Synthetic oligonucleotide
cuaccuuggaggcuccauc

SEQ ID NO: 173193 - RNA, 19 nt, Artificial Sequence
  Description of Artificial Sequence: Synthetic oligonucleotide
acgguguggggucggcugg

SEQ ID NO: 173194 - RNA, 19 nt, Artificial Sequence
  Description of Artificial Sequence: Synthetic oligonucleotide
  modified_base (6)..(6): a, c, u, g, unknown or other
gagaancugcugcaguugu

SEQ ID NO: 173195 - RNA, 19 nt, Artificial Sequence
  Description of Artificial Sequence: Synthetic oligonucleotide
acuuuggccuggaaagaag

SEQ ID NO: 173196 - RNA, 19 nt, Artificial Sequence
  Description of Artificial Sequence: Synthetic oligonucleotide
cccacauuucucuaagaug

SEQ ID NO: 173197 - RNA, 19 nt, Artificial Sequence
  Description of Artificial Sequence: Synthetic oligonucleotide
guuccguguucccaaggac

SEQ ID NO: 173198 - RNA, 19 nt, Artificial Sequence
  Description of Artificial Sequence: Synthetic oligonucleotide
gccaguagcauaccuugcc

SEQ ID NO: 173199 - RNA, 19 nt, Artificial Sequence
  Description of Artificial Sequence: Synthetic oligonucleotide
cacgugccauacaugcagc

SEQ ID NO: 173200 - RNA, 19 nt, Artificial Sequence
  Description of Artificial Sequence: Synthetic oligonucleotide
cuaggaugcaacagcccca

SEQ ID NO: 173201 - RNA, 19 nt, Artificial Sequence
  Description of Artificial Sequence: Synthetic oligonucleotide
uacuggucguugguaaaga

SEQ ID NO: 173202 - RNA, 19 nt, Artificial Sequence
  Description of Artificial Sequence: Synthetic oligonucleotide
ccgggaaaggcuaugggug

SEQ ID NO: 173203 - RNA, 19 nt, Artificial Sequence
  Description of Artificial Sequence: Synthetic oligonucleotide
ucuacaccacucuguccac

SEQ ID NO: 173204 - RNA, 19 nt, Artificial Sequence
  Description of Artificial Sequence: Synthetic oligonucleotide
caccccuaccuuacgcccg

SEQ ID NO: 173205 - RNA, 19 nt, Artificial Sequence
  Description of Artificial Sequence: Synthetic oligonucleotide
acuggucguugguaaagaa

SEQ ID NO: 173206 - RNA, 19 nt, Artificial Sequence
  Description of Artificial Sequence: Synthetic oligonucleotide
uggaggcacccuuccuagg

SEQ ID NO: 173207 - RNA, 19 nt, Artificial Sequence
  Description of Artificial Sequence: Synthetic oligonucleotide
guagguccuuccccagagg

SEQ ID NO: 173208 - RNA, 19 nt, Artificial Sequence
  Description of Artificial Sequence: Synthetic oligonucleotide
aaugucgugugggcucaug

SEQ ID NO: 173209 - RNA, 19 nt, Artificial Sequence
  Description of Artificial Sequence: Synthetic oligonucleotide
caaaggcguagaugggcac

SEQ ID NO: 173210 - RNA, 19 nt, Artificial Sequence
  Description of Artificial Sequence: Synthetic oligonucleotide
uaggccuacuggguggagc

SEQ ID NO: 173211 - RNA, 19 nt, Artificial Sequence
  Description of Artificial Sequence: Synthetic oligonucleotide
cacgguguggggucggcug

SEQ ID NO: 173212 - RNA, 19 nt, Artificial Sequence
  Description of Artificial Sequence: Synthetic oligonucleotide
agcguagaccuuguaggug

SEQ ID NO: 173213 - RNA, 19 nt, Artificial Sequence
  Description of Artificial Sequence: Synthetic oligonucleotide
guagggaccaguggggaca

SEQ ID NO: 173214 - RNA, 19 nt, Artificial Sequence
  Description of Artificial Sequence: Synthetic oligonucleotide
cucguuggggcagcgguag

SEQ ID NO: 173215 - RNA, 19 nt, Artificial Sequence
  Description of Artificial Sequence: Synthetic oligonucleotide
augcgcacgauguggcgcu

SEQ ID NO: 173216 - RNA, 19 nt, Artificial Sequence
  Description of Artificial Sequence: Synthetic oligonucleotide
agucacacaacgagauaca

SEQ ID NO: 173217 - RNA, 19 nt, Artificial Sequence
  Description of Artificial Sequence: Synthetic oligonucleotide
acagaaccgcaggaacccg

SEQ ID NO: 173218 - RNA, 19 nt, Artificial Sequence
  Description of Artificial Sequence: Synthetic oligonucleotide
  modified_base (7)..(7): a, c, u, g, unknown or other
gugggunaugcugggucug

SEQ ID NO: 173219 - RNA, 19 nt, Artificial Sequence
  Description of Artificial Sequence: Synthetic oligonucleotide
agaccaccccuaccuuacg

SEQ ID NO: 173220 - RNA, 19 nt, Artificial Sequence
  Description of Artificial Sequence: Synthetic oligonucleotide
  modified_base (6)..(6): a, c, u, g, unknown or other
ggguuncagaacaccagag

SEQ ID NO: 173221 - RNA, 19 nt, Artificial Sequence
  Description of Artificial Sequence: Synthetic oligonucleotide
acaaugucgugugggcuca

SEQ ID NO: 173222 - RNA, 19 nt, Artificial Sequence
  Description of Artificial Sequence: Synthetic oligonucleotide
guaaagggccaggcugacg

SEQ ID NO: 173223 - RNA, 19 nt, Artificial Sequence
  Description of Artificial Sequence: Synthetic oligonucleotide
gcaggugaugaguagagcu

SEQ ID NO: 173224 - RNA, 19 nt, Artificial Sequence
  Description of Artificial Sequence: Synthetic oligonucleotide
ucucgacacagaugaugaa

SEQ ID NO: 173225 - RNA, 19 nt, Artificial Sequence
  Description of Artificial Sequence: Synthetic oligonucleotide
gcguagaccuuguagguga

SEQ ID NO: 173226 - RNA, 19 nt, Artificial Sequence
  Description of Artificial Sequence: Synthetic oligonucleotide
aagugcacccaagggcaca

SEQ ID NO: 173227 - RNA, 19 nt, Artificial Sequence
  Description of Artificial Sequence: Synthetic oligonucleotide
  modified_base (5)..(5): a, c, u, g, unknown or other
agaancugcugcaguugug

SEQ ID NO: 173228 - RNA, 19 nt, Artificial Sequence
  Description of Artificial Sequence: Synthetic oligonucleotide
aaagcucacguuggacaaa

SEQ ID NO: 173229 - RNA, 19 nt, Artificial Sequence
  Description of Artificial Sequence: Synthetic oligonucleotide
cacccuuccuaggugggcc

SEQ ID NO: 173230 - RNA, 19 nt, Artificial Sequence
  Description of Artificial Sequence: Synthetic oligonucleotide
cuaaggcugugggaccggg

SEQ ID NO: 173231 - RNA, 19 nt, Artificial Sequence
  Description of Artificial Sequence: Synthetic oligonucleotide
ccggagauggcuugggcag

SEQ ID NO: 173232 - RNA, 19 nt, Artificial Sequence
  Description of Artificial Sequence: Synthetic oligonucleotide
caccagugcccacacucag

SEQ ID NO: 173233 - RNA, 19 nt, Artificial Sequence
  Description of Artificial Sequence: Synthetic oligonucleotide
ccuaccuuacgcccgcugc

SEQ ID NO: 173234 - RNA, 19 nt, Artificial Sequence
  Description of Artificial Sequence: Synthetic oligonucleotide
cacguaguacuggucguug

SEQ ID NO: 173235 - RNA, 19 nt, Artificial Sequence
  Description of Artificial Sequence: Synthetic oligonucleotide
acgggcugaguugaucuug

SEQ ID NO: 173236 - RNA, 19 nt, Artificial Sequence
  Description of Artificial Sequence: Synthetic oligonucleotide
guagcauaccuugccagaa

SEQ ID NO: 173237 - RNA, 19 nt, Artificial Sequence
  Description of Artificial Sequence: Synthetic oligonucleotide
agaaagcuugggaccagcu

SEQ ID NO: 173238 - RNA, 19 nt, Artificial Sequence
  Description of Artificial Sequence: Synthetic oligonucleotide
agccucggcagaugucuug

SEQ ID NO: 173239 - RNA, 19 nt, Artificial Sequence
  Description of Artificial Sequence: Synthetic oligonucleotide
caugccccaaggagcuccc

SEQ ID NO: 173240 - RNA, 19 nt, Artificial Sequence
  Description of Artificial Sequence: Synthetic oligonucleotide
ggcguccugcacaaugucg

SEQ ID NO: 173241 - RNA, 19 nt, Artificial Sequence
  Description of Artificial Sequence: Synthetic oligonucleotide
gaaccgcaggaacccgaug

SEQ ID NO: 173242 - RNA, 19 nt, Artificial Sequence
  Description of Artificial Sequence: Synthetic oligonucleotide
auaacggugcugacagcca

SEQ ID NO: 173243 - RNA, 19 nt, Artificial Sequence
  Description of Artificial Sequence: Synthetic oligonucleotide
cacccuaccuuggaggcuc

SEQ ID NO: 173244 - RNA, 19 nt, Artificial Sequence
  Description of Artificial Sequence: Synthetic oligonucleotide
cuaccuuacgcccgcugca

SEQ ID NO: 173245 - RNA, 19 nt, Artificial Sequence
  Description of Artificial Sequence: Synthetic oligonucleotide
augacggacuugaccauga

SEQ ID NO: 173246 - RNA, 19 nt, Artificial Sequence
  Description of Artificial Sequence: Synthetic oligonucleotide
ggccccacauuucucuaag

SEQ ID NO: 173247 - RNA, 19 nt, Artificial Sequence
  Description of Artificial Sequence: Synthetic oligonucleotide
ggaugcgcacgauguggcg

SEQ ID NO: 173248 - RNA, 19 nt, Artificial Sequence
  Description of Artificial Sequence: Synthetic oligonucleotide
auggcguccugcacaaugu

SEQ ID NO: 173249 - RNA, 19 nt, Artificial Sequence
  Description of Artificial Sequence: Synthetic oligonucleotide
ggccauguagacacauucc

SEQ ID NO: 173250 - RNA, 19 nt, Artificial Sequence
  Description of Artificial Sequence: Synthetic oligonucleotide
caaggagcucccaccuguc

SEQ ID NO: 173251 - RNA, 19 nt, Artificial Sequence
  Description of Artificial Sequence: Synthetic oligonucleotide
agaucaggucuggguauug

SEQ ID NO: 173252 - RNA, 19 nt, Artificial Sequence
  Description of Artificial Sequence: Synthetic oligonucleotide
ccaugaguggcuucaccac

SEQ ID NO: 173253 - RNA, 19 nt, Artificial Sequence
  Description of Artificial Sequence: Synthetic oligonucleotide
guagaccuuguaggugaag

SEQ ID NO: 173254 - RNA, 19 nt, Artificial Sequence
  Description of Artificial Sequence: Synthetic oligonucleotide
gaacccgauggaguagguc

SEQ ID NO: 173255 - RNA, 19 nt, Artificial Sequence
  Description of Artificial Sequence: Synthetic oligonucleotide
ggaguagguccuuccccag

SEQ ID NO: 173256 - RNA, 19 nt, Artificial Sequence
  Description of Artificial Sequence: Synthetic oligonucleotide
ggccuagauugggaaaagg

SEQ ID NO: 173257 - RNA, 19 nt, Artificial Sequence
  Description of Artificial Sequence: Synthetic oligonucleotide
caggugcgcguagaucugg

SEQ ID NO: 173258 - RNA, 19 nt, Artificial Sequence
  Description of Artificial Sequence: Synthetic oligonucleotide
gcuugacgaaguuauagau

SEQ ID NO: 173259 - RNA, 19 nt, Artificial Sequence
  Description of Artificial Sequence: Synthetic oligonucleotide
gcgaaguagaagaggaaga

SEQ ID NO: 173260 - RNA, 19 nt, Artificial Sequence
  Description of Artificial Sequence: Synthetic oligonucleotide
gucacacaacgagauacaa

SEQ ID NO: 173261 - RNA, 19 nt, Artificial Sequence
  Description of Artificial Sequence: Synthetic oligonucleotide
cuuacgcccgcugcauaac

SEQ ID NO: 173262 - RNA, 19 nt, Artificial Sequence
  Description of Artificial Sequence: Synthetic oligonucleotide
gagcagaacaccaggcccu

SEQ ID NO: 173263 - RNA, 19 nt, Artificial Sequence
  Description of Artificial Sequence: Synthetic oligonucleotide
gguacuugccgaaggccug

SEQ ID NO: 173264 - RNA, 19 nt, Artificial Sequence
  Description of Artificial Sequence: Synthetic oligonucleotide
augagacaagauagguuau

SEQ ID NO: 173265 - RNA, 19 nt, Artificial Sequence
  Description of Artificial Sequence: Synthetic oligonucleotide
ggagaauaacggugcugac

SEQ ID NO: 173266 - RNA, 19 nt, Artificial Sequence
  Description of Artificial Sequence: Synthetic oligonucleotide
gagauggcuugggcagcgg

SEQ ID NO: 173267 - RNA, 19 nt, Artificial Sequence
  Description of Artificial Sequence: Synthetic oligonucleotide
aggcauggaggcacccuuc

SEQ ID NO: 173268 - RNA, 19 nt, Artificial Sequence
  Description of Artificial Sequence: Synthetic oligonucleotide
cagaaccgcaggaacccga

SEQ ID NO: 173269 - RNA, 19 nt, Artificial Sequence
  Description of Artificial Sequence: Synthetic oligonucleotide
cccaauagugaagguuugg

SEQ ID NO: 173270 - RNA, 19 nt, Artificial Sequence
  Description of Artificial Sequence: Synthetic oligonucleotide
cacagcggccuugagcauc

SEQ ID NO: 173271 - RNA, 19 nt, Artificial Sequence
  Description of Artificial Sequence: Synthetic oligonucleotide
uaccuuacgcccgcugcau

SEQ ID NO: 173272 - RNA, 19 nt, Artificial Sequence
  Description of Artificial Sequence: Synthetic oligonucleotide
cucgccagguccucugcca

SEQ ID NO: 173273 - RNA, 19 nt, Artificial Sequence
  Description of Artificial Sequence: Synthetic oligonucleotide
ccgaaguacacguaguacu

SEQ ID NO: 173274 - RNA, 19 nt, Artificial Sequence
  Description of Artificial Sequence: Synthetic oligonucleotide
uacccacuggugacaucaa

SEQ ID NO: 173275 - RNA, 19 nt, Artificial Sequence
  Description of Artificial Sequence: Synthetic oligonucleotide
acugacacacgggcugagu

SEQ ID NO: 173276 - RNA, 19 nt, Artificial Sequence
  Description of Artificial Sequence: Synthetic oligonucleotide
guaggguggccuguuuaca

SEQ ID NO: 173277 - RNA, 19 nt, Artificial Sequence
  Description of Artificial Sequence: Synthetic oligonucleotide
gguagcagcgcaggugcgc

SEQ ID NO: 173278 - RNA, 19 nt, Artificial Sequence
  Description of Artificial Sequence: Synthetic oligonucleotide
  modified_base (5)..(5): a, c, u, g, unknown or other
gggunaugcugggucuggg

SEQ ID NO: 173279 - RNA, 19 nt, Artificial Sequence
  Description of Artificial Sequence: Synthetic oligonucleotide
agugcacccaagggcacau

SEQ ID NO: 173280 - RNA, 19 nt, Artificial Sequence
  Description of Artificial Sequence: Synthetic oligonucleotide
acgauguggcgcugcucgu

SEQ ID NO: 173281 - RNA, 19 nt, Artificial Sequence
  Description of Artificial Sequence: Synthetic oligonucleotide
gccgaaguacacguaguac

SEQ ID NO: 173282 - RNA, 19 nt, Artificial Sequence
  Description of Artificial Sequence: Synthetic oligonucleotide
gggagaguuuccagugaag

SEQ ID NO: 173283 - RNA, 19 nt, Artificial Sequence
  Description of Artificial Sequence: Synthetic oligonucleotide
cauggccaugccccaagga

SEQ ID NO: 173284 - RNA, 19 nt, Artificial Sequence
  Description of Artificial Sequence: Synthetic oligonucleotide
gucacgcauuuaaaauauc

SEQ ID NO: 173285 - RNA, 19 nt, Artificial Sequence
  Description of Artificial Sequence: Synthetic oligonucleotide
  modified_base (8)..(8): a, c, u, g, unknown or other
cagagaancugcugcaguu

SEQ ID NO: 173286 - RNA, 19 nt, Artificial Sequence
  Description of Artificial Sequence: Synthetic oligonucleotide
agaaccgcaggaacccgau

SEQ ID NO: 173287 - RNA, 19 nt, Artificial Sequence
  Description of Artificial Sequence: Synthetic oligonucleotide
acacguaguacuggucguu

SEQ ID NO: 173288 - RNA, 19 nt, Artificial Sequence
  Description of Artificial Sequence: Synthetic oligonucleotide
ggugcgcguagaucuggug

SEQ ID NO: 173289 - RNA, 19 nt, Artificial Sequence
  Description of Artificial Sequence: Synthetic oligonucleotide
uggugccgaaguacacgua

SEQ ID NO: 173290 - RNA, 19 nt, Artificial Sequence
  Description of Artificial Sequence: Synthetic oligonucleotide
agccucuugucagcguaga

SEQ ID NO: 173291 - RNA, 19 nt, Artificial Sequence
  Description of Artificial Sequence: Synthetic oligonucleotide
uccacucgccagguccucu

SEQ ID NO: 173292 - RNA, 19 nt, Artificial Sequence
  Description of Artificial Sequence: Synthetic oligonucleotide
cuguaggguggccuguuua

SEQ ID NO: 173293 - RNA, 19 nt, Artificial Sequence
  Description of Artificial Sequence: Synthetic oligonucleotide
cgauggaguagguccuucc

SEQ ID NO: 173294 - RNA, 19 nt, Artificial Sequence
  Description of Artificial Sequence: Synthetic oligonucleotide
ccaugccccaaggagcucc

SEQ ID NO: 173295 - RNA, 19 nt, Artificial Sequence
  Description of Artificial Sequence: Synthetic oligonucleotide
guauugcacgguguggggu

SEQ ID NO: 173296 - RNA, 19 nt, Artificial Sequence
  Description of Artificial Sequence: Synthetic oligonucleotide
cuggcuaggccuacugggu

SEQ ID NO: 173297 - RNA, 19 nt, Artificial Sequence
  Description of Artificial Sequence: Synthetic oligonucleotide
uacuugccgaaggccugga

SEQ ID NO: 173298 - RNA, 19 nt, Artificial Sequence
  Description of Artificial Sequence: Synthetic oligonucleotide
gucgcggauggugccgaag

SEQ ID NO: 173299 - RNA, 19 nt, Artificial Sequence
  Description of Artificial Sequence: Synthetic oligonucleotide
accugucaauugccuuccu

SEQ ID NO: 173300 - RNA, 19 nt, Artificial Sequence
  Description of Artificial Sequence: Synthetic oligonucleotide
cccacacucagaacucauc

SEQ ID NO: 173301 - RNA, 19 nt, Artificial Sequence
  Description of Artificial Sequence: Synthetic oligonucleotide
ugacagccaugaguggcuu

SEQ ID NO: 173302 - RNA, 19 nt, Artificial Sequence
  Description of Artificial Sequence: Synthetic oligonucleotide
gccuguuuacagaaccgca

SEQ ID NO: 173303 - RNA, 19 nt, Artificial Sequence
  Description of Artificial Sequence: Synthetic oligonucleotide
uggcagcuacggccagugu

SEQ ID NO: 173304 - RNA, 19 nt, Artificial Sequence
  Description of Artificial Sequence: Synthetic oligonucleotide
ugaccccuugcagcaugcu

SEQ ID NO: 173305 - RNA, 19 nt, Artificial Sequence
  Description of Artificial Sequence: Synthetic oligonucleotide
acccuaccuuggaggcucc

SEQ ID NO: 173306 - RNA, 19 nt, Artificial Sequence
  Description of Artificial Sequence: Synthetic oligonucleotide
gcuguaggacugcccucag

SEQ ID NO: 173307 - RNA, 19 nt, Artificial Sequence
  Description of Artificial Sequence: Synthetic oligonucleotide
gcguaaagggccaggcuga

SEQ ID NO: 173308 - RNA, 19 nt, Artificial Sequence
  Description of Artificial Sequence: Synthetic oligonucleotide
cugacacacgggcugaguu

SEQ ID NO: 173309 - RNA, 19 nt, Artificial Sequence
  Description of Artificial Sequence: Synthetic oligonucleotide
accuuacgcccgcugcaua

SEQ ID NO: 173310 - RNA, 19 nt, Artificial Sequence
  Description of Artificial Sequence: Synthetic oligonucleotide
uagcagcgcaggugcgcgu

SEQ ID NO: 173311 - RNA, 19 nt, Artificial Sequence
  Description of Artificial Sequence: Synthetic oligonucleotide
ccgguacuugccgaaggcc

SEQ ID NO: 173312 - RNA, 19 nt, Artificial Sequence
  Description of Artificial Sequence: Synthetic oligonucleotide
gcuugcuucugucacgcau

SEQ ID NO: 173313 - RNA, 19 nt, Artificial Sequence
  Description of Artificial Sequence: Synthetic oligonucleotide
cugggcccgacagccucgg

SEQ ID NO: 173314 - RNA, 19 nt, Artificial Sequence
  Description of Artificial Sequence: Synthetic oligonucleotide
cugcucguuggggcagcgg

SEQ ID NO: 173315 - RNA, 19 nt, Artificial Sequence
  Description of Artificial Sequence: Synthetic oligonucleotide
gcauaccuugccagaagga

SEQ ID NO: 173316 - RNA, 19 nt, Artificial Sequence
  Description of Artificial Sequence: Synthetic oligonucleotide
cuugcccaauagugaaggu

SEQ ID NO: 173317 - RNA, 19 nt, Artificial Sequence
  Description of Artificial Sequence: Synthetic oligonucleotide
gcuaaggcugugggaccgg

SEQ ID NO: 173318 - RNA, 19 nt, Artificial Sequence
  Description of Artificial Sequence: Synthetic oligonucleotide
ccauggccaugccccaagg

SEQ ID NO: 173319 - RNA, 19 nt, Artificial Sequence
  Description of Artificial Sequence: Synthetic oligonucleotide
gugggaccgggaaaggcua

SEQ ID NO: 173320 - RNA, 19 nt, Artificial Sequence
  Description of Artificial Sequence: Synthetic oligonucleotide
gcccaauagugaagguuug

SEQ ID NO: 173321 - RNA, 19 nt, Artificial Sequence
  Description of Artificial Sequence: Synthetic oligonucleotide
cuaggccuacuggguggag

SEQ ID NO: 173322 - RNA, 19 nt, Artificial Sequence
  Description of Artificial Sequence: Synthetic oligonucleotide
gaacuguaggguggccugu

SEQ ID NO: 173323 - RNA, 19 nt, Artificial Sequence
  Description of Artificial Sequence: Synthetic oligonucleotide
cccgucccgguacuugccg

SEQ ID NO: 173324 - RNA, 19 nt, Artificial Sequence
  Description of Artificial Sequence: Synthetic oligonucleotide
gcaggccuagauugggaaa

SEQ ID NO: 173325 - RNA, 19 nt, Artificial Sequence
  Description of Artificial Sequence: Synthetic oligonucleotide
gcagcacgugccauacaug

SEQ ID NO: 173326 - RNA, 19 nt, Artificial Sequence
  Description of Artificial Sequence: Synthetic oligonucleotide
acggacccuagggaaggaa

SEQ ID NO: 173327 - RNA, 19 nt, Artificial Sequence
  Description of Artificial Sequence: Synthetic oligonucleotide
ggcuuucugguggaacgca

SEQ ID NO: 173328 - RNA, 19 nt, Artificial Sequence
  Description of Artificial Sequence: Synthetic oligonucleotide
aggcaugccguagggccaa

SEQ ID NO: 173329 - RNA, 19 nt, Artificial Sequence
  Description of Artificial Sequence: Synthetic oligonucleotide
aggcagcacgugccauaca

SEQ ID NO: 173330 - RNA, 19 nt, Artificial Sequence
  Description of Artificial Sequence: Synthetic oligonucleotide
agcagcgcaggugcgcgua

SEQ ID NO: 173331 - RNA, 19 nt, Artificial Sequence
  Description of Artificial Sequence: Synthetic oligonucleotide
ccuuacgcccgcugcauaa

SEQ ID NO: 173332 - RNA, 19 nt, Artificial Sequence
  Description of Artificial Sequence: Synthetic oligonucleotide
agcaugcuaggcaggccua

SEQ ID NO: 173333 - RNA, 19 nt, Artificial Sequence
  Description of Artificial Sequence: Synthetic oligonucleotide
acaucucgacacagaugau

SEQ ID NO: 173334 - RNA, 19 nt, Artificial Sequence
  Description of Artificial Sequence: Synthetic oligonucleotide
gcagucacacaacgagaua

SEQ ID NO: 173335 - RNA, 19 nt, Artificial Sequence
  Description of Artificial Sequence: Synthetic oligonucleotide
ccaaggagcucccaccugu

SEQ ID NO: 173336 - RNA, 19 nt, Artificial Sequence
  Description of Artificial Sequence: Synthetic oligonucleotide
ccacucgccagguccucug

SEQ ID NO: 173337 - RNA, 19 nt, Artificial Sequence
  Description of Artificial Sequence: Synthetic oligonucleotide
gcuugggaccagcuggcua

SEQ ID NO: 173338 - RNA, 19 nt, Artificial Sequence
  Description of Artificial Sequence: Synthetic oligonucleotide
gcguccugcacaaugucgu

SEQ ID NO: 173339 - RNA, 19 nt, Artificial Sequence
  Description of Artificial Sequence: Synthetic oligonucleotide
ggcccuacauggccaggga

SEQ ID NO: 173340 - RNA, 19 nt, Artificial Sequence
  Description of Artificial Sequence: Synthetic oligonucleotide
agucgcggauggugccgaa

SEQ ID NO: 173341 - RNA, 19 nt, Artificial Sequence
  Description of Artificial Sequence: Synthetic oligonucleotide
gcaggugcgcguagaucug

SEQ ID NO: 173342 - RNA, 19 nt, Artificial Sequence
  Description of Artificial Sequence: Synthetic oligonucleotide
gccguagggccaaggcugc

SEQ ID NO: 173343 - RNA, 19 nt, Artificial Sequence
  Description of Artificial Sequence: Synthetic oligonucleotide
gguacccacuggugacauc

SEQ ID NO: 173344 - RNA, 19 nt, Artificial Sequence
  Description of Artificial Sequence: Synthetic oligonucleotide
gcccuacauggccagggaa

SEQ ID NO: 173345 - RNA, 19 nt, Artificial Sequence
  Description of Artificial Sequence: Synthetic oligonucleotide
gccccaugagggcccuucc

SEQ ID NO: 173346 - RNA, 19 nt, Artificial Sequence
  Description of Artificial Sequence: Synthetic oligonucleotide
gguggucaucaggaacaca

SEQ ID NO: 173347 - RNA, 19 nt, Artificial Sequence
  Description of Artificial Sequence: Synthetic oligonucleotide
ccgcaggaacccgauggag

SEQ ID NO: 173348 - RNA, 19 nt, Artificial Sequence
  Description of Artificial Sequence: Synthetic oligonucleotide
gcugcucguuggggcagcg

SEQ ID NO: 173349 - RNA, 19 nt, Artificial Sequence
  Description of Artificial Sequence: Synthetic oligonucleotide
gaacggcuuucugguggaa

SEQ ID NO: 173350 - RNA, 19 nt, Artificial Sequence
  Description of Artificial Sequence: Synthetic oligonucleotide
cggacuugaccaugaagaa

SEQ ID NO: 173351 - RNA, 19 nt, Artificial Sequence
  Description of Artificial Sequence: Synthetic oligonucleotide
ggccaugccccaaggagcu

SEQ ID NO: 173352 - RNA, 19 nt, Artificial Sequence
  Description of Artificial Sequence: Synthetic oligonucleotide
cccuaccuuacgcccgcug

SEQ ID NO: 173353 - RNA, 19 nt, Artificial Sequence
  Description of Artificial Sequence: Synthetic oligonucleotide
gccauacaugcagcuugac

SEQ ID NO: 173354 - RNA, 19 nt, Artificial Sequence
  Description of Artificial Sequence: Synthetic oligonucleotide
ggaacgcauggcagucaca

SEQ ID NO: 173355 - RNA, 19 nt, Artificial Sequence
  Description of Artificial Sequence: Synthetic oligonucleotide
ccccgucccgguacuugcc

SEQ ID NO: 173356 - RNA, 19 nt, Artificial Sequence
  Description of Artificial Sequence: Synthetic oligonucleotide
aggcguagaugggcacgau

SEQ ID NO: 173357 - RNA, 19 nt, Artificial Sequence
  Description of Artificial Sequence: Synthetic oligonucleotide
cgguacuugccgaaggccu

SEQ ID NO: 173358 - RNA, 19 nt, Artificial Sequence
  Description of Artificial Sequence: Synthetic oligonucleotide
cgcguagaucugguggcag

SEQ ID NO: 173359 - RNA, 19 nt, Artificial Sequence
  Description of Artificial Sequence: Synthetic oligonucleotide
ggccuacuggguggagcug

SEQ ID NO: 173360 - RNA, 19 nt, Artificial Sequence
  Description of Artificial Sequence: Synthetic oligonucleotide
cguaaagggccaggcugac

SEQ ID NO: 173361 - RNA, 19 nt, Artificial Sequence
  Description of Artificial Sequence: Synthetic oligonucleotide
cugagaccaccccuaccuu

SEQ ID NO: 173362 - RNA, 19 nt, Artificial Sequence
  Description of Artificial Sequence: Synthetic oligonucleotide
ccucgcccacugacacacg

SEQ ID NO: 173363 - RNA, 19 nt, Artificial Sequence
  Description of Artificial Sequence: Synthetic oligonucleotide
gcagaacaccaggcccuac

SEQ ID NO: 173364 - RNA, 19 nt, Artificial Sequence
  Description of Artificial Sequence: Synthetic oligonucleotide
ccuggagaauaacggugcu

SEQ ID NO: 173365 - RNA, 19 nt, Artificial Sequence
  Description of Artificial Sequence: Synthetic oligonucleotide
gcgcacgauguggcgcugc

SEQ ID NO: 173366 - RNA, 19 nt, Artificial Sequence
  Description of Artificial Sequence: Synthetic oligonucleotide
ccgacagccucggcagaug

SEQ ID NO: 173367 - RNA, 19 nt, Artificial Sequence
  Description of Artificial Sequence: Synthetic oligonucleotide
gggucggcugggcccgaca

SEQ ID NO: 173368 - RNA, 19 nt, Artificial Sequence
  Description of Artificial Sequence: Synthetic oligonucleotide
ccucguagcagucgcggau

SEQ ID NO: 173369 - RNA, 19 nt, Artificial Sequence
  Description of Artificial Sequence: Synthetic oligonucleotide
gcacgauguggcgcugcuc

SEQ ID NO: 173370 - RNA, 19 nt, Artificial Sequence
  Description of Artificial Sequence: Synthetic oligonucleotide
ccguagggccaaggcugcg

SEQ ID NO: 173371 - RNA, 19 nt, Artificial Sequence
  Description of Artificial Sequence: Synthetic oligonucleotide
ccguguucccaaggaccac

SEQ ID NO: 173372 - RNA, 19 nt, Artificial Sequence
  Description of Artificial Sequence: Synthetic oligonucleotide
ccgucccgguacuugccga

SEQ ID NO: 173373 - RNA, 19 nt, Artificial Sequence
  Description of Artificial Sequence: Synthetic oligonucleotide
cuacuggguggagcugagu

SEQ ID NO: 173374 - RNA, 19 nt, Artificial Sequence
  Description of Artificial Sequence: Synthetic oligonucleotide
cuugggcagcgguggucau

SEQ ID NO: 173375 - RNA, 19 nt, Artificial Sequence
  Description of Artificial Sequence: Synthetic oligonucleotide
cagcuacggccaguguccu

SEQ ID NO: 173376 - RNA, 19 nt, Artificial Sequence
  Description of Artificial Sequence: Synthetic oligonucleotide
cguguucccaaggaccacu

SEQ ID NO: 173377 - RNA, 19 nt, Artificial Sequence
  Description of Artificial Sequence: Synthetic oligonucleotide
cggugcugacagccaugag

SEQ ID NO: 173378 - RNA, 19 nt, Artificial Sequence
  Description of Artificial Sequence: Synthetic oligonucleotide
gcccacacucagaacucau

SEQ ID NO: 173379 - RNA, 19 nt, Artificial Sequence
  Description of Artificial Sequence: Synthetic oligonucleotide
gccaugccccaaggagcuc

SEQ ID NO: 173380 - RNA, 19 nt, Artificial Sequence
  Description of Artificial Sequence: Synthetic oligonucleotide
ccuaccuuggaggcuccau

SEQ ID NO: 173381 - RNA, 19 nt, Artificial Sequence
  Description of Artificial Sequence: Synthetic oligonucleotide
ggggucggcugggcccgac

SEQ ID NO: 173382 - RNA, 19 nt, Artificial Sequence
  Description of Artificial Sequence: Synthetic oligonucleotide
gggugccaccacgccaggu

SEQ ID NO: 173383 - RNA, 19 nt, Artificial Sequence
  Description of Artificial Sequence: Synthetic oligonucleotide
cgcacgauguggcgcugcu

SEQ ID NO: 173384 - RNA, 19 nt, Artificial Sequence
  Description of Artificial Sequence: Synthetic oligonucleotide
cccuaccuuggaggcucca

SEQ ID NO: 173385 - RNA, 19 nt, Artificial Sequence
  Description of Artificial Sequence: Synthetic oligonucleotide
cccgacagccucggcagau

SEQ ID NO: 173386 - RNA, 19 nt, Artificial Sequence
  Description of Artificial Sequence: Synthetic oligonucleotide
cccuuccuaggugggcccu

SEQ ID NO: 173387 - RNA, 19 nt, Artificial Sequence
  Description of Artificial Sequence: Synthetic oligonucleotide
ccccuaccuuacgcccgcu

SEQ ID NO: 173388 - RNA, 19 nt, Artificial Sequence
  Description of Artificial Sequence: Synthetic oligonucleotide
  modified_base (1)..(1): a, c, u, g, unknown or other
  modified_base (17)..(17): a, c, u, g, unknown or other
ncagaacaccagagaancu

SEQ ID NO: 173389 - RNA, 19 nt, Artificial Sequence
  Description of Artificial Sequence: Synthetic oligonucleotide
aaacuuaagcgucucaucc

SEQ ID NO: 173390 - RNA, 19 nt, Artificial Sequence
  Description of Artificial Sequence: Synthetic oligonucleotide
aaucgauuaaguuaaaaca

SEQ ID NO: 173391 - RNA, 19 nt, Artificial Sequence
  Description of Artificial Sequence: Synthetic oligonucleotide
aaacucaacgaucuuagac

SEQ ID NO: 173392 - RNA, 19 nt, Artificial Sequence
  Description of Artificial Sequence: Synthetic oligonucleotide
aacguaacagccaauagcc

SEQ ID NO: 173393 - RNA, 19 nt, Artificial Sequence
  Description of Artificial Sequence: Synthetic oligonucleotide
aaauuaaucgauuaaguua

SEQ ID NO: 173394 - RNA, 19 nt, Artificial Sequence
  Description of Artificial Sequence: Synthetic oligonucleotide
auaaccuuaaaacuaggcg

SEQ ID NO: 173395 - RNA, 19 nt, Artificial Sequence
  Description of Artificial Sequence: Synthetic oligonucleotide
aaguaugaguauuaaacag

SEQ ID NO: 173396 - RNA, 19 nt, Artificial Sequence
  Description of Artificial Sequence: Synthetic oligonucleotide
aacccagucgauuugaauc

SEQ ID NO: 173397 - RNA, 19 nt, Artificial Sequence
  Description of Artificial Sequence: Synthetic oligonucleotide
uucgguaucaaauacauuc

SEQ ID NO: 173398 - RNA, 19 nt, Artificial Sequence
  Description of Artificial Sequence: Synthetic oligonucleotide
aauuaauuugcugacaaug

SEQ ID NO: 173399 - RNA, 19 nt, Artificial Sequence
  Description of Artificial Sequence: Synthetic oligonucleotide
aaacaucgggcauucaagc

SEQ ID NO: 173400 - RNA, 19 nt, Artificial Sequence
  Description of Artificial Sequence: Synthetic oligonucleotide
ucaagaccagaacauaucg

SEQ ID NO: 173401 - RNA, 19 nt, Artificial Sequence
  Description of Artificial Sequence: Synthetic oligonucleotide
aauucggcgacagauggcc

SEQ ID NO: 173402 - RNA, 19 nt, Artificial Sequence
  Description of Artificial Sequence: Synthetic oligonucleotide
aauuaaucgauuaaguuaa

SEQ ID NO: 173403 - RNA, 19 nt, Artificial Sequence
  Description of Artificial Sequence: Synthetic oligonucleotide
agcgcugucagucaagacc

SEQ ID NO: 173404 - RNA, 19 nt, Artificial Sequence
  Description of Artificial Sequence: Synthetic oligonucleotide
cucauuauaauccaaagca

SEQ ID NO: 173405 - RNA, 19 nt, Artificial Sequence
  Description of Artificial Sequence: Synthetic oligonucleotide
uaaucgauuaaguuaaaac

SEQ ID NO: 173406 - RNA, 19 nt, Artificial Sequence
  Description of Artificial Sequence: Synthetic oligonucleotide
aacgaucuuagacuugugg

SEQ ID NO: 173407 - RNA, 19 nt, Artificial Sequence
  Description of Artificial Sequence: Synthetic oligonucleotide
ucuaugguuacuagaacag

SEQ ID NO: 173408 - RNA, 19 nt, Artificial Sequence
  Description of Artificial Sequence: Synthetic oligonucleotide
aagaccagaacauaucgcu

SEQ ID NO: 173409 - RNA, 19 nt, Artificial Sequence
  Description of Artificial Sequence: Synthetic oligonucleotide
auagacaguugcuuuaaac

SEQ ID NO: 173410 - RNA, 19 nt, Artificial Sequence
  Description of Artificial Sequence: Synthetic oligonucleotide
gucgauuugaaucuggagc

SEQ ID NO: 173411 - RNA, 19 nt, Artificial Sequence
  Description of Artificial Sequence: Synthetic oligonucleotide
uuuaccggguuccagguag

SEQ ID NO: 173412 - RNA, 19 nt, Artificial Sequence
  Description of Artificial Sequence: Synthetic oligonucleotide
ucgauuuucuaucacguga

SEQ ID NO: 173413 - RNA, 19 nt, Artificial Sequence
  Description of Artificial Sequence: Synthetic oligonucleotide
acgaucuuagacuuguggg

SEQ ID NO: 173414 - RNA, 19 nt, Artificial Sequence
  Description of Artificial Sequence: Synthetic oligonucleotide
gagucauuacacuagagca

SEQ ID NO: 173415 - RNA, 19 nt, Artificial Sequence
  Description of Artificial Sequence: Synthetic oligonucleotide
aaauuagacugugauauca

SEQ ID NO: 173416 - RNA, 19 nt, Artificial Sequence
  Description of Artificial Sequence: Synthetic oligonucleotide
acaucgauuuucuaucacg

SEQ ID NO: 173417 - RNA, 19 nt, Artificial Sequence
  Description of Artificial Sequence: Synthetic oligonucleotide
uucaugaugucuaggucgg

SEQ ID NO: 173418 - RNA, 19 nt, Artificial Sequence
  Description of Artificial Sequence: Synthetic oligonucleotide
aaacuagauugugaagugc

SEQ ID NO: 173419 - RNA, 19 nt, Artificial Sequence
  Description of Artificial Sequence: Synthetic oligonucleotide
aacauaucgcuaaaguuag

SEQ ID NO: 173420 - RNA, 19 nt, Artificial Sequence
  Description of Artificial Sequence: Synthetic oligonucleotide
ucuagaguaaauuccuucu

SEQ ID NO: 173421 - RNA, 19 nt, Artificial Sequence
  Description of Artificial Sequence: Synthetic oligonucleotide
agugaagacggauguaaac

SEQ ID NO: 173422 - RNA, 19 nt, Artificial Sequence
  Description of Artificial Sequence: Synthetic oligonucleotide
guaaacagaaccaucagac

SEQ ID NO: 173423 - RNA, 19 nt, Artificial Sequence
  Description of Artificial Sequence: Synthetic oligonucleotide
gccaacaaaagucagauug

SEQ ID NO: 173424 - RNA, 19 nt, Artificial Sequence
  Description of Artificial Sequence: Synthetic oligonucleotide
ucuaucacgugaaaacucu

SEQ ID NO: 173425 - RNA, 19 nt, Artificial Sequence
  Description of Artificial Sequence: Synthetic oligonucleotide
cuacagaagaagccgagcg

SEQ ID NO: 173426 - RNA, 19 nt, Artificial Sequence
  Description of Artificial Sequence: Synthetic oligonucleotide
aaaacaucgggcauucaag

SEQ ID NO: 173427 - RNA, 19 nt, Artificial Sequence
  Description of Artificial Sequence: Synthetic oligonucleotide
gaagagaugagguaucgga

SEQ ID NO: 173428 - RNA, 19 nt, Artificial Sequence
  Description of Artificial Sequence: Synthetic oligonucleotide
uaucacgugaaaacucuag

SEQ ID NO: 173429 - RNA, 19 nt, Artificial Sequence
  Description of Artificial Sequence: Synthetic oligonucleotide
ucuguuugacaccaggagu

SEQ ID NO: 173430 - RNA, 19 nt, Artificial Sequence
  Description of Artificial Sequence: Synthetic oligonucleotide
caaccucuagugaagacgg

SEQ ID NO: 173431 - RNA, 19 nt, Artificial Sequence
  Description of Artificial Sequence: Synthetic oligonucleotide
agaugaguggcaaagguuc

SEQ ID NO: 173432 - RNA, 19 nt, Artificial Sequence
  Description of Artificial Sequence: Synthetic oligonucleotide
cacguagagaaucaggaag

SEQ ID NO: 173433 - RNA, 19 nt, Artificial Sequence
  Description of Artificial Sequence: Synthetic oligonucleotide
caacguaacagccaauagc

SEQ ID NO: 173434 - RNA, 19 nt, Artificial Sequence
  Description of Artificial Sequence: Synthetic oligonucleotide
uuaauuugcugacaauguc

SEQ ID NO: 173435 - RNA, 19 nt, Artificial Sequence
  Description of Artificial Sequence: Synthetic oligonucleotide
uaucgcuaaaguuaguguc

SEQ ID NO: 173436 - RNA, 19 nt, Artificial Sequence
  Description of Artificial Sequence: Synthetic oligonucleotide
uuaagcgucucauccauga

SEQ ID NO: 173437 - RNA, 19 nt, Artificial Sequence
  Description of Artificial Sequence: Synthetic oligonucleotide
aauaccaauucggcgacag

SEQ ID NO: 173438 - RNA, 19 nt, Artificial Sequence
  Description of Artificial Sequence: Synthetic oligonucleotide
guaguuucgggccacaaac

SEQ ID NO: 173439 - RNA, 19 nt, Artificial Sequence
  Description of Artificial Sequence: Synthetic oligonucleotide
uguaucacugccacugccc

SEQ ID NO: 173440 - RNA, 19 nt, Artificial Sequence
  Description of Artificial Sequence: Synthetic oligonucleotide
cacgcucuauuuuagacag

SEQ ID NO: 173441 - RNA, 19 nt, Artificial Sequence
  Description of Artificial Sequence: Synthetic oligonucleotide
uccuucaccagccaauaug

SEQ ID NO: 173442 - RNA, 19 nt, Artificial Sequence
  Description of Artificial Sequence: Synthetic oligonucleotide
uguacaauagacagacauc

SEQ ID NO: 173443 - RNA, 19 nt, Artificial Sequence
  Description of Artificial Sequence: Synthetic oligonucleotide
accgcaguguaucacugcc

SEQ ID NO: 173444 - RNA, 19 nt, Artificial Sequence
  Description of Artificial Sequence: Synthetic oligonucleotide
gaggguugaacccuagugc

SEQ ID NO: 173445 - RNA, 19 nt, Artificial Sequence
  Description of Artificial Sequence: Synthetic oligonucleotide
ucgauuaaguuaaaacauc

SEQ ID NO: 173446 - RNA, 19 nt, Artificial Sequence
  Description of Artificial Sequence: Synthetic oligonucleotide
ucgagcaaaacaucgggca

SEQ ID NO: 173447 - RNA, 19 nt, Artificial Sequence
  Description of Artificial Sequence: Synthetic oligonucleotide
acagccaauagccagguaa

SEQ ID NO: 173448 - RNA, 19 nt, Artificial Sequence
  Description of Artificial Sequence: Synthetic oligonucleotide
gaagugacucagcugguag

SEQ ID NO: 173449 - RNA, 19 nt, Artificial Sequence
  Description of Artificial Sequence: Synthetic oligonucleotide
acucccgcccuguaaaagc

SEQ ID NO: 173450 - RNA, 19 nt, Artificial Sequence
  Description of Artificial Sequence: Synthetic oligonucleotide
uuugcacgcucuauuuuag

SEQ ID NO: 173451 - RNA, 19 nt, Artificial Sequence
  Description of Artificial Sequence: Synthetic oligonucleotide
agcacaaacggccaggaaa

SEQ ID NO: 173452 - RNA, 19 nt, Artificial Sequence
  Description of Artificial Sequence: Synthetic oligonucleotide
agaaacucaacgaucuuag

SEQ ID NO: 173453 - RNA, 19 nt, Artificial Sequence
  Description of Artificial Sequence: Synthetic oligonucleotide
gacguuggaagagaugagg

SEQ ID NO: 173454 - RNA, 19 nt, Artificial Sequence
  Description of Artificial Sequence: Synthetic oligonucleotide
uguacaugucaauggacac

SEQ ID NO: 173455 - RNA, 19 nt, Artificial Sequence
  Description of Artificial Sequence: Synthetic oligonucleotide
uggcaaagguuccacguag

SEQ ID NO: 173456 - RNA, 19 nt, Artificial Sequence
  Description of Artificial Sequence: Synthetic oligonucleotide
caaguaugaguauuaaaca

SEQ ID NO: 173457 - RNA, 19 nt, Artificial Sequence
  Description of Artificial Sequence: Synthetic oligonucleotide
uuaugaccgaguugcaggc

SEQ ID NO: 173458 - RNA, 19 nt, Artificial Sequence
  Description of Artificial Sequence: Synthetic oligonucleotide
agucauuacacuagagcac

SEQ ID NO: 173459 - RNA, 19 nt, Artificial Sequence
  Description of Artificial Sequence: Synthetic oligonucleotide
cagaccuacagaagaagcc

SEQ ID NO: 173460 - RNA, 19 nt, Artificial Sequence
  Description of Artificial Sequence: Synthetic oligonucleotide
cucuuuaccggguuccagg

SEQ ID NO: 173461 - RNA, 19 nt, Artificial Sequence
  Description of Artificial Sequence: Synthetic oligonucleotide
uuucuaucacgugaaaacu

SEQ ID NO: 173462 - RNA, 19 nt, Artificial Sequence
  Description of Artificial Sequence: Synthetic oligonucleotide
uucuaucacgugaaaacuc

SEQ ID NO: 173463 - RNA, 19 nt, Artificial Sequence
  Description of Artificial Sequence: Synthetic oligonucleotide
cagacaucgauuuucuauc

SEQ ID NO: 173464 - RNA, 19 nt, Artificial Sequence
  Description of Artificial Sequence: Synthetic oligonucleotide
acgugaaaacucuagagua

SEQ ID NO: 173465 - RNA, 19 nt, Artificial Sequence
  Description of Artificial Sequence: Synthetic oligonucleotide
guuuguuugguguacaaua

SEQ ID NO: 173466 - RNA, 19 nt, Artificial Sequence
  Description of Artificial Sequence: Synthetic oligonucleotide
aaagucugcugccaauuaa

SEQ ID NO: 173467 - RNA, 19 nt, Artificial Sequence
  Description of Artificial Sequence: Synthetic oligonucleotide
aacaucgggcauucaagca

SEQ ID NO: 173468 - RNA, 19 nt, Artificial Sequence
  Description of Artificial Sequence: Synthetic oligonucleotide
aguguaucacugccacugc

SEQ ID NO: 173469 - RNA, 19 nt, Artificial Sequence
  Description of Artificial Sequence: Synthetic oligonucleotide
auaucgcuaaaguuagugu

SEQ ID NO: 173470 - RNA, 19 nt, Artificial Sequence
  Description of Artificial Sequence: Synthetic oligonucleotide
cauaucgcuaaaguuagug

SEQ ID NO: 173471 - RNA, 19 nt, Artificial Sequence
  Description of Artificial Sequence: Synthetic oligonucleotide
aucgauuaaguuaaaacau

SEQ ID NO: 173472 - RNA, 19 nt, Artificial Sequence
  Description of Artificial Sequence: Synthetic oligonucleotide
cuuuuaaacuagauuguga

SEQ ID NO: 173473 - RNA, 19 nt, Artificial Sequence
  Description of Artificial Sequence: Synthetic oligonucleotide
cucuaugguuacuagaaca

SEQ ID NO: 173474 - RNA, 19 nt, Artificial Sequence
  Description of Artificial Sequence: Synthetic oligonucleotide
uuguuugguguacaauaga

SEQ ID NO: 173475 - RNA, 19 nt, Artificial Sequence
  Description of Artificial Sequence: Synthetic oligonucleotide
aacccuagugcaguggcag

SEQ ID NO: 173476 - RNA, 19 nt, Artificial Sequence
  Description of Artificial Sequence: Synthetic oligonucleotide
caagaccagaacauaucgc

SEQ ID NO: 173477 - RNA, 19 nt, Artificial Sequence
  Description of Artificial Sequence: Synthetic oligonucleotide
aggguugaacccuagugca

SEQ ID NO: 173478 - RNA, 19 nt, Artificial Sequence
  Description of Artificial Sequence: Synthetic oligonucleotide
cuguaaaagccuuugaugu

SEQ ID NO: 173479 - RNA, 19 nt, Artificial Sequence
  Description of Artificial Sequence: Synthetic oligonucleotide
acuuccccgacguuggaag

SEQ ID NO: 173480 - RNA, 19 nt, Artificial Sequence
  Description of Artificial Sequence: Synthetic oligonucleotide
caugccgacagcgagcagg

SEQ ID NO: 173481 - RNA, 19 nt, Artificial Sequence
  Description of Artificial Sequence: Synthetic oligonucleotide
aucacgugaaaacucuaga

SEQ ID NO: 173482 - RNA, 19 nt, Artificial Sequence
  Description of Artificial Sequence: Synthetic oligonucleotide
agccaauauguucauguga

SEQ ID NO: 173483 - RNA, 19 nt, Artificial Sequence
  Description of Artificial Sequence: Synthetic oligonucleotide
caguguaucacugccacug

SEQ ID NO: 173484 - RNA, 19 nt, Artificial Sequence
  Description of Artificial Sequence: Synthetic oligonucleotide
uuaaucgauuaaguuaaaa

SEQ ID NO: 173485 - RNA, 19 nt, Artificial Sequence
  Description of Artificial Sequence: Synthetic oligonucleotide
gccacuucgauccugggag

SEQ ID NO: 173486 - RNA, 19 nt, Artificial Sequence
  Description of Artificial Sequence: Synthetic oligonucleotide
caucgggcauucaagcagg

SEQ ID NO: 173487 - RNA, 19 nt, Artificial Sequence
  Description of Artificial Sequence: Synthetic oligonucleotide
auuugcacgcucuauuuua

SEQ ID NO: 173488 - RNA, 19 nt, Artificial Sequence
  Description of Artificial Sequence: Synthetic oligonucleotide
ucucuaugguuacuagaac

SEQ ID NO: 173489 - RNA, 19 nt, Artificial Sequence
  Description of Artificial Sequence: Synthetic oligonucleotide
uacaauagacagacaucga

SEQ ID NO: 173490 - RNA, 19 nt, Artificial Sequence
  Description of Artificial Sequence: Synthetic oligonucleotide
gugaagugccaaugaauag

SEQ ID NO: 173491 - RNA, 19 nt, Artificial Sequence
  Description of Artificial Sequence: Synthetic oligonucleotide
acaucucuaugguuacuag

SEQ ID NO: 173492 - RNA, 19 nt, Artificial Sequence
  Description of Artificial Sequence: Synthetic oligonucleotide
auuagacugugauaucaaa

SEQ ID NO: 173493 - RNA, 19 nt, Artificial Sequence
  Description of Artificial Sequence: Synthetic oligonucleotide
acccagucgauuugaaucu

SEQ ID NO: 173494 - RNA, 19 nt, Artificial Sequence
  Description of Artificial Sequence: Synthetic oligonucleotide
agcagcgccaacguaacag

SEQ ID NO: 173495 - RNA, 19 nt, Artificial Sequence
  Description of Artificial Sequence: Synthetic oligonucleotide
guagacccagaccaccagg

SEQ ID NO: 173496 - RNA, 19 nt, Artificial Sequence
  Description of Artificial Sequence: Synthetic oligonucleotide
uaccaauucggcgacagau

SEQ ID NO: 173497 - RNA, 19 nt, Artificial Sequence
  Description of Artificial Sequence: Synthetic oligonucleotide
aucgauuuucuaucacgug

SEQ ID NO: 173498 - RNA, 19 nt, Artificial Sequence
  Description of Artificial Sequence: Synthetic oligonucleotide
uuuucugcacaagcgagaa

SEQ ID NO: 173499 - RNA, 19 nt, Artificial Sequence
  Description of Artificial Sequence: Synthetic oligonucleotide
agcaaaacaucgggcauuc

SEQ ID NO: 173500 - RNA, 19 nt, Artificial Sequence
  Description of Artificial Sequence: Synthetic oligonucleotide
acaagcgagaacaggcaac

SEQ ID NO: 173501 - RNA, 19 nt, Artificial Sequence
  Description of Artificial Sequence: Synthetic oligonucleotide
aauuagacugugauaucaa

SEQ ID NO: 173502 - RNA, 19 nt, Artificial Sequence
  Description of Artificial Sequence: Synthetic oligonucleotide
aacuaggcgagggacagaa

SEQ ID NO: 173503 - RNA, 19 nt, Artificial Sequence
  Description of Artificial Sequence: Synthetic oligonucleotide
gaagguucaacucgagcaa

SEQ ID NO: 173504 - RNA, 19 nt, Artificial Sequence
  Description of Artificial Sequence: Synthetic oligonucleotide
gcagcgaugaaccaccaug

SEQ ID NO: 173505 - RNA, 19 nt, Artificial Sequence
  Description of Artificial Sequence: Synthetic oligonucleotide
gugaagacggauguaaaca

SEQ ID NO: 173506 - RNA, 19 nt, Artificial Sequence
  Description of Artificial Sequence: Synthetic oligonucleotide
agacugugauaucaaauua

SEQ ID NO: 173507 - RNA, 19 nt, Artificial Sequence
  Description of Artificial Sequence: Synthetic oligonucleotide
uggguacggggacucaaag

SEQ ID NO: 173508 - RNA, 19 nt, Artificial Sequence
  Description of Artificial Sequence: Synthetic oligonucleotide
guaugaguauuaaacagaa

SEQ ID NO: 173509 - RNA, 19 nt, Artificial Sequence
  Description of Artificial Sequence: Synthetic oligonucleotide
gaccagaacauaucgcuaa

SEQ ID NO: 173510 - RNA, 19 nt, Artificial Sequence
  Description of Artificial Sequence: Synthetic oligonucleotide
uguagcgcugucagucaag

SEQ ID NO: 173511 - RNA, 19 nt, Artificial Sequence
  Description of Artificial Sequence: Synthetic oligonucleotide
auauguucaugugaaaauu

SEQ ID NO: 173512 - RNA, 19 nt, Artificial Sequence
  Description of Artificial Sequence: Synthetic oligonucleotide
aagcuguugagggcauuac

SEQ ID NO: 173513 - RNA, 19 nt, Artificial Sequence
  Description of Artificial Sequence: Synthetic oligonucleotide
uggacacuuuaauuaugug

SEQ ID NO: 173514 - RNA, 19 nt, Artificial Sequence
  Description of Artificial Sequence: Synthetic oligonucleotide
aucaaggguucuuuugggu

SEQ ID NO: 173515 - RNA, 19 nt, Artificial Sequence
  Description of Artificial Sequence: Synthetic oligonucleotide
aguucgguaucaaauacau

SEQ ID NO: 173516 - RNA, 19 nt, Artificial Sequence
  Description of Artificial Sequence: Synthetic oligonucleotide
caggaaucaaagccucagg

SEQ ID NO: 173517 - RNA, 19 nt, Artificial Sequence
  Description of Artificial Sequence: Synthetic oligonucleotide
ggaggguugaacccuagug

SEQ ID NO: 173518 - RNA, 19 nt, Artificial Sequence
  Description of Artificial Sequence: Synthetic oligonucleotide
agacaucgauuuucuauca

SEQ ID NO: 173519 - RNA, 19 nt, Artificial Sequence
  Description of Artificial Sequence: Synthetic oligonucleotide
gacaucgauuuucuaucac

SEQ ID NO: 173520 - RNA, 19 nt, Artificial Sequence
  Description of Artificial Sequence: Synthetic oligonucleotide
caaaacaucgggcauucaa

SEQ ID NO: 173521 - RNA, 19 nt, Artificial Sequence
  Description of Artificial Sequence: Synthetic oligonucleotide
gagcccacgagccagauau

SEQ ID NO: 173522 - RNA, 19 nt, Artificial Sequence
  Description of Artificial Sequence: Synthetic oligonucleotide
ccaauucggcgacagaugg

SEQ ID NO: 173523 - RNA, 19 nt, Artificial Sequence
  Description of Artificial Sequence: Synthetic oligonucleotide
agacaagcuguugagggca

SEQ ID NO: 173524 - RNA, 19 nt, Artificial Sequence
  Description of Artificial Sequence: Synthetic oligonucleotide
uagugaagacggauguaaa

SEQ ID NO: 173525 - RNA, 19 nt, Artificial Sequence
  Description of Artificial Sequence: Synthetic oligonucleotide
uguggguacaccugucgau

SEQ ID NO: 173526 - RNA, 19 nt, Artificial Sequence
  Description of Artificial Sequence: Synthetic oligonucleotide
aucgcuaaaguuagugucu

SEQ ID NO: 173527 - RNA, 19 nt, Artificial Sequence
  Description of Artificial Sequence: Synthetic oligonucleotide
gcuaaaguuagugucugug

SEQ ID NO: 173528 - RNA, 19 nt, Artificial Sequence
  Description of Artificial Sequence: Synthetic oligonucleotide
acggccaggaaaugccauc

SEQ ID NO: 173529 - RNA, 19 nt, Artificial Sequence
  Description of Artificial Sequence: Synthetic oligonucleotide
gacagcgagcaggauuugg

SEQ ID NO: 173530 - RNA, 19 nt, Artificial Sequence
  Description of Artificial Sequence: Synthetic oligonucleotide
ucgcuaaaguuagugucug

SEQ ID NO: 173531 - RNA, 19 nt, Artificial Sequence
  Description of Artificial Sequence: Synthetic oligonucleotide
aacucccgcccuguaaaag

SEQ ID NO: 173532 - RNA, 19 nt, Artificial Sequence
  Description of Artificial Sequence: Synthetic oligonucleotide
uccaacucggaugugggua

SEQ ID NO: 173533 - RNA, 19 nt, Artificial Sequence
  Description of Artificial Sequence: Synthetic oligonucleotide
aagggccgccgucagaaaa

SEQ ID NO: 173534 - RNA, 19 nt, Artificial Sequence
  Description of Artificial Sequence: Synthetic oligonucleotide
gaccacuuccccgacguug

SEQ ID NO: 173535 - RNA, 19 nt, Artificial Sequence
  Description of Artificial Sequence: Synthetic oligonucleotide
acacuuuaauuauguguau

SEQ ID NO: 173536 - RNA, 19 nt, Artificial Sequence
  Description of Artificial Sequence: Synthetic oligonucleotide
agacggauguaaacagaac

SEQ ID NO: 173537 - RNA, 19 nt, Artificial Sequence
  Description of Artificial Sequence: Synthetic oligonucleotide
auguggguacaccugucga

SEQ ID NO: 173538 - RNA, 19 nt, Artificial Sequence
  Description of Artificial Sequence: Synthetic oligonucleotide
ugcaugccgacagcgagca

SEQ ID NO: 173539 - RNA, 19 nt, Artificial Sequence
  Description of Artificial Sequence: Synthetic oligonucleotide
uuccggggugguuuguuca

SEQ ID NO: 173540 - RNA, 19 nt, Artificial Sequence
  Description of Artificial Sequence: Synthetic oligonucleotide
agucaagaccagaacauau

SEQ ID NO: 173541 - RNA, 19 nt, Artificial Sequence
  Description of Artificial Sequence: Synthetic oligonucleotide
uagugucugugcuguagac

SEQ ID NO: 173542 - RNA, 19 nt, Artificial Sequence
  Description of Artificial Sequence: Synthetic oligonucleotide
caauucggcgacagauggc

SEQ ID NO: 173543 - RNA, 19 nt, Artificial Sequence
  Description of Artificial Sequence: Synthetic oligonucleotide
gcgaugaaccaccaugcag

SEQ ID NO: 173544 - RNA, 19 nt, Artificial Sequence
  Description of Artificial Sequence: Synthetic oligonucleotide
cuucaguucgguaucaaau

SEQ ID NO: 173545 - RNA, 19 nt, Artificial Sequence
  Description of Artificial Sequence: Synthetic oligonucleotide
auacugacugagguagcag

SEQ ID NO: 173546 - RNA, 19 nt, Artificial Sequence
  Description of Artificial Sequence: Synthetic oligonucleotide
augaccgaguugcaggcau

SEQ ID NO: 173547 - RNA, 19 nt, Artificial Sequence
  Description of Artificial Sequence: Synthetic oligonucleotide
auaauccaaagcagaguca

SEQ ID NO: 173548 - RNA, 19 nt, Artificial Sequence
  Description of Artificial Sequence: Synthetic oligonucleotide
accuuaaaacuaggcgagg

SEQ ID NO: 173549 - RNA, 19 nt, Artificial Sequence
  Description of Artificial Sequence: Synthetic oligonucleotide
caucgauuuucuaucacgu

SEQ ID NO: 173550 - RNA, 19 nt, Artificial Sequence
  Description of Artificial Sequence: Synthetic oligonucleotide
ucuaggucgggaggguuga

SEQ ID NO: 173551 - RNA, 19 nt, Artificial Sequence
  Description of Artificial Sequence: Synthetic oligonucleotide
agauugacccagaggagcu

SEQ ID NO: 173552 - RNA, 19 nt, Artificial Sequence
  Description of Artificial Sequence: Synthetic oligonucleotide
guacuuccaacucggaugu

SEQ ID NO: 173553 - RNA, 19 nt, Artificial Sequence
  Description of Artificial Sequence: Synthetic oligonucleotide
aaacucccgcccuguaaaa

SEQ ID NO: 173554 - RNA, 19 nt, Artificial Sequence
  Description of Artificial Sequence: Synthetic oligonucleotide
acguuggaagagaugaggu

SEQ ID NO: 173555 - RNA, 19 nt, Artificial Sequence
  Description of Artificial Sequence: Synthetic oligonucleotide
caguucgguaucaaauaca

SEQ ID NO: 173556 - RNA, 19 nt, Artificial Sequence
  Description of Artificial Sequence: Synthetic oligonucleotide
agcgccauugucauugggu

SEQ ID NO: 173557 - RNA, 19 nt, Artificial Sequence
  Description of Artificial Sequence: Synthetic oligonucleotide
uuggguacggggacucaaa

SEQ ID NO: 173558 - RNA, 19 nt, Artificial Sequence
  Description of Artificial Sequence: Synthetic oligonucleotide
acuagauugugaagugcca

SEQ ID NO: 173559 - RNA, 19 nt, Artificial Sequence
  Description of Artificial Sequence: Synthetic oligonucleotide
guggguacaccugucgaug

SEQ ID NO: 173560 - RNA, 19 nt, Artificial Sequence
  Description of Artificial Sequence: Synthetic oligonucleotide
acccuagugcaguggcagg

SEQ ID NO: 173561 - RNA, 19 nt, Artificial Sequence
  Description of Artificial Sequence: Synthetic oligonucleotide
agcgaugaaccaccaugca

SEQ ID NO: 173562 - RNA, 19 nt, Artificial Sequence
  Description of Artificial Sequence: Synthetic oligonucleotide
agaagaagccgagcgggcu

SEQ ID NO: 173563 - RNA, 19 nt, Artificial Sequence
  Description of Artificial Sequence: Synthetic oligonucleotide
cagcgccaacguaacagcc

SEQ ID NO: 173564 - RNA, 19 nt, Artificial Sequence
  Description of Artificial Sequence: Synthetic oligonucleotide
uuccccgacguuggaagag

SEQ ID NO: 173565 - RNA, 19 nt, Artificial Sequence
  Description of Artificial Sequence: Synthetic oligonucleotide
accaauucggcgacagaug

SEQ ID NO: 173566 - RNA, 19 nt, Artificial Sequence
  Description of Artificial Sequence: Synthetic oligonucleotide
uugguacuuccaacucgga

SEQ ID NO: 173567 - RNA, 19 nt, Artificial Sequence
  Description of Artificial Sequence: Synthetic oligonucleotide
cacuucgauccugggaggg

SEQ ID NO: 173568 - RNA, 19 nt, Artificial Sequence
  Description of Artificial Sequence: Synthetic oligonucleotide
aaauaccaauucggcgaca

SEQ ID NO: 173569 - RNA, 19 nt, Artificial Sequence
  Description of Artificial Sequence: Synthetic oligonucleotide
uuccaacucggaugugggu

SEQ ID NO: 173570 - RNA, 19 nt, Artificial Sequence
  Description of Artificial Sequence: Synthetic oligonucleotide
ucauuggguacggggacuc

SEQ ID NO: 173571 - RNA, 19 nt, Artificial Sequence
  Description of Artificial Sequence: Synthetic oligonucleotide
ucgguuuguuugguguaca

SEQ ID NO: 173572 - RNA, 19 nt, Artificial Sequence
  Description of Artificial Sequence: Synthetic oligonucleotide
gauugacccagaggagcug

SEQ ID NO: 173573 - RNA, 19 nt, Artificial Sequence
  Description of Artificial Sequence: Synthetic oligonucleotide
accugaacccauggcaaug

SEQ ID NO: 173574 - RNA, 19 nt, Artificial Sequence
  Description of Artificial Sequence: Synthetic oligonucleotide
caauagacagacaucgauu

SEQ ID NO: 173575 - RNA, 19 nt, Artificial Sequence
  Description of Artificial Sequence: Synthetic oligonucleotide
auaccaauucggcgacaga

SEQ ID NO: 173576 - RNA, 19 nt, Artificial Sequence
  Description of Artificial Sequence: Synthetic oligonucleotide
acugagguagcaggacucu

SEQ ID NO: 173577 - RNA, 19 nt, Artificial Sequence
  Description of Artificial Sequence: Synthetic oligonucleotide
guagauggcucgacccucc

SEQ ID NO: 173578 - RNA, 19 nt, Artificial Sequence
  Description of Artificial Sequence: Synthetic oligonucleotide
uuaccggguuccagguagu

SEQ ID NO: 173579 - RNA, 19 nt, Artificial Sequence
  Description of Artificial Sequence: Synthetic oligonucleotide
ucucuccucaguggguugu

SEQ ID NO: 173580 - RNA, 19 nt, Artificial Sequence
  Description of Artificial Sequence: Synthetic oligonucleotide
ccaacguaacagccaauag

SEQ ID NO: 173581 - RNA, 19 nt, Artificial Sequence
  Description of Artificial Sequence: Synthetic oligonucleotide
cuagaauaugaaaccuccu

SEQ ID NO: 173582 - RNA, 19 nt, Artificial Sequence
  Description of Artificial Sequence: Synthetic oligonucleotide
caccgcaguguaucacugc

SEQ ID NO: 173583 - RNA, 19 nt, Artificial Sequence
  Description of Artificial Sequence: Synthetic oligonucleotide
cagcuguuuuaugaccgag

SEQ ID NO: 173584 - RNA, 19 nt, Artificial Sequence
  Description of Artificial Sequence: Synthetic oligonucleotide
gucuaggucgggaggguug

SEQ ID NO: 173585 - RNA, 19 nt, Artificial Sequence
  Description of Artificial Sequence: Synthetic oligonucleotide
aucgggcauucaagcaggc

SEQ ID NO: 173586 - RNA, 19 nt, Artificial Sequence
  Description of Artificial Sequence: Synthetic oligonucleotide
caacgaucuuagacuugug

SEQ ID NO: 173587 - RNA, 19 nt, Artificial Sequence
  Description of Artificial Sequence: Synthetic oligonucleotide
auuggguacggggacucaa

SEQ ID NO: 173588 - RNA, 19 nt, Artificial Sequence
  Description of Artificial Sequence: Synthetic oligonucleotide
cauugucauuggguacggg

SEQ ID NO: 173589 - RNA, 19 nt, Artificial Sequence
  Description of Artificial Sequence: Synthetic oligonucleotide
ccgacguuggaagagauga

SEQ ID NO: 173590 - RNA, 19 nt, Artificial Sequence
  Description of Artificial Sequence: Synthetic oligonucleotide
cacaagcgagaacaggcaa

SEQ ID NO: 173591 - RNA, 19 nt, Artificial Sequence
  Description of Artificial Sequence: Synthetic oligonucleotide
uccccgacguuggaagaga

SEQ ID NO: 173592 - RNA, 19 nt, Artificial Sequence
  Description of Artificial Sequence: Synthetic oligonucleotide
cuaucacgugaaaacucua

SEQ ID NO: 173593 - RNA, 19 nt, Artificial Sequence
  Description of Artificial Sequence: Synthetic oligonucleotide
cuugaugaaguuggcugaa

SEQ ID NO: 173594 - RNA, 19 nt, Artificial Sequence
  Description of Artificial Sequence: Synthetic oligonucleotide
gugcaugccgacagcgagc

SEQ ID NO: 173595 - RNA, 19 nt, Artificial Sequence
  Description of Artificial Sequence: Synthetic oligonucleotide
ucgggaggguugaacccua

SEQ ID NO: 173596 - RNA, 19 nt, Artificial Sequence
  Description of Artificial Sequence: Synthetic oligonucleotide
agaccagaacauaucgcua

SEQ ID NO: 173597 - RNA, 19 nt, Artificial Sequence
  Description of Artificial Sequence: Synthetic oligonucleotide
ugaccgaguugcaggcauu

SEQ ID NO: 173598 - RNA, 19 nt, Artificial Sequence
  Description of Artificial Sequence: Synthetic oligonucleotide
cgaucuuagacuuguggga

SEQ ID NO: 173599 - RNA, 19 nt, Artificial Sequence
  Description of Artificial Sequence: Synthetic oligonucleotide
acguaacagccaauagcca

SEQ ID NO: 173600 - RNA, 19 nt, Artificial Sequence
  Description of Artificial Sequence: Synthetic oligonucleotide
gaacccuagugcaguggca

SEQ ID NO: 173601 - RNA, 19 nt, Artificial Sequence
  Description of Artificial Sequence: Synthetic oligonucleotide
ccugaacccauggcaaugc

SEQ ID NO: 173602 - RNA, 19 nt, Artificial Sequence
  Description of Artificial Sequence: Synthetic oligonucleotide
aaccucuagugaagacgga

SEQ ID NO: 173603 - RNA, 19 nt, Artificial Sequence
  Description of Artificial Sequence: Synthetic oligonucleotide
ggacacucuuggaccaccg

SEQ ID NO: 173604 - RNA, 19 nt, Artificial Sequence
  Description of Artificial Sequence: Synthetic oligonucleotide
ggcaaccucuagugaagac

SEQ ID NO: 173605 - RNA, 19 nt, Artificial Sequence
  Description of Artificial Sequence: Synthetic oligonucleotide
agcagcgaugaaccaccau

SEQ ID NO: 173606 - RNA, 19 nt, Artificial Sequence
  Description of Artificial Sequence: Synthetic oligonucleotide
ggguacggggacucaaaga

SEQ ID NO: 173607 - RNA, 19 nt, Artificial Sequence
  Description of Artificial Sequence: Synthetic oligonucleotide
ggaaacccaagggccgccg

SEQ ID NO: 173608 - RNA, 19 nt, Artificial Sequence
  Description of Artificial Sequence: Synthetic oligonucleotide
cgcaguguaucacugccac

SEQ ID NO: 173609 - RNA, 19 nt, Artificial Sequence
  Description of Artificial Sequence: Synthetic oligonucleotide
gcucgacccuccucaacag

SEQ ID NO: 173610 - RNA, 19 nt, Artificial Sequence
  Description of Artificial Sequence: Synthetic oligonucleotide
ggguugaacccuagugcag

SEQ ID NO: 173611 - RNA, 19 nt, Artificial Sequence
  Description of Artificial Sequence: Synthetic oligonucleotide
augacacggaugccugcuu

SEQ ID NO: 173612 - RNA, 19 nt, Artificial Sequence
  Description of Artificial Sequence: Synthetic oligonucleotide
ugucuaggucgggaggguu

SEQ ID NO: 173613 - RNA, 19 nt, Artificial Sequence
  Description of Artificial Sequence: Synthetic oligonucleotide
cuuccccgacguuggaaga

SEQ ID NO: 173614 - RNA, 19 nt, Artificial Sequence
  Description of Artificial Sequence: Synthetic oligonucleotide
accgaguugcaggcauuug

SEQ ID NO: 173615 - RNA, 19 nt, Artificial Sequence
  Description of Artificial Sequence: Synthetic oligonucleotide
augucuaggucgggagggu

SEQ ID NO: 173616 - RNA, 19 nt, Artificial Sequence
  Description of Artificial Sequence: Synthetic oligonucleotide
gccacccgcugaucaaggg

SEQ ID NO: 173617 - RNA, 19 nt, Artificial Sequence
  Description of Artificial Sequence: Synthetic oligonucleotide
gccaauuaauuugcugaca

SEQ ID NO: 173618 - RNA, 19 nt, Artificial Sequence
  Description of Artificial Sequence: Synthetic oligonucleotide
augacaccuucgggagcac

SEQ ID NO: 173619 - RNA, 19 nt, Artificial Sequence
  Description of Artificial Sequence: Synthetic oligonucleotide
ggcucgguuuguuuggugu

SEQ ID NO: 173620 - RNA, 19 nt, Artificial Sequence
  Description of Artificial Sequence: Synthetic oligonucleotide
acauaucgcuaaaguuagu

SEQ ID NO: 173621 - RNA, 19 nt, Artificial Sequence
  Description of Artificial Sequence: Synthetic oligonucleotide
cgucucauccaugaggauc

SEQ ID NO: 173622 - RNA, 19 nt, Artificial Sequence
  Description of Artificial Sequence: Synthetic oligonucleotide
gcgccauugucauugggua

SEQ ID NO: 173623 - RNA, 19 nt, Artificial Sequence
  Description of Artificial Sequence: Synthetic oligonucleotide
gccaacguaacagccaaua

SEQ ID NO: 173624 - RNA, 19 nt, Artificial Sequence
  Description of Artificial Sequence: Synthetic oligonucleotide
ccauugucauuggguacgg

SEQ ID NO: 173625 - RNA, 19 nt, Artificial Sequence
  Description of Artificial Sequence: Synthetic oligonucleotide
uacuuccaacucggaugug

SEQ ID NO: 173626 - RNA, 19 nt, Artificial Sequence
  Description of Artificial Sequence: Synthetic oligonucleotide
acggugugaucuggaagau

SEQ ID NO: 173627 - RNA, 19 nt, Artificial Sequence
  Description of Artificial Sequence: Synthetic oligonucleotide
cacaguccacuccuucgaa

SEQ ID NO: 173628 - RNA, 19 nt, Artificial Sequence
  Description of Artificial Sequence: Synthetic oligonucleotide
cacacacucuuuaccgggu

SEQ ID NO: 173629 - RNA, 19 nt, Artificial Sequence
  Description of Artificial Sequence: Synthetic oligonucleotide
gcacaagcgagaacaggca

SEQ ID NO: 173630 - RNA, 19 nt, Artificial Sequence
  Description of Artificial Sequence: Synthetic oligonucleotide
gcgccaacguaacagccaa

SEQ ID NO: 173631 - RNA, 19 nt, Artificial Sequence
  Description of Artificial Sequence: Synthetic oligonucleotide
auucggcgacagauggcca

SEQ ID NO: 173632 - RNA, 19 nt, Artificial Sequence
  Description of Artificial Sequence: Synthetic oligonucleotide
cacccgcugaucaaggguu

SEQ ID NO: 173633 - RNA, 19 nt, Artificial Sequence
  Description of Artificial Sequence: Synthetic oligonucleotide
cuuuaccggguuccaggua

SEQ ID NO: 173634 - RNA, 19 nt, Artificial Sequence
  Description of Artificial Sequence: Synthetic oligonucleotide
gcacaaacggccaggaaau

SEQ ID NO: 173635 - RNA, 19 nt, Artificial Sequence
  Description of Artificial Sequence: Synthetic oligonucleotide
gucgggaggguugaacccu

SEQ ID NO: 173636 - RNA, 19 nt, Artificial Sequence
  Description of Artificial Sequence: Synthetic oligonucleotide
cccgacguuggaagagaug

SEQ ID NO: 173637 - RNA, 19 nt, Artificial Sequence
  Description of Artificial Sequence: Synthetic oligonucleotide
cuucuguauguagcgcugu

SEQ ID NO: 173638 - RNA, 19 nt, Artificial Sequence
  Description of Artificial Sequence: Synthetic oligonucleotide
gcucgguuuguuuggugua

SEQ ID NO: 173639 - RNA, 19 nt, Artificial Sequence
  Description of Artificial Sequence: Synthetic oligonucleotide
uaccggguuccagguaguu

SEQ ID NO: 173640 - RNA, 19 nt, Artificial Sequence
  Description of Artificial Sequence: Synthetic oligonucleotide
cccuguaaaagccuuugau

SEQ ID NO: 173641 - RNA, 19 nt, Artificial Sequence
  Description of Artificial Sequence: Synthetic oligonucleotide
gguguacaauagacagaca

SEQ ID NO: 173642 - RNA, 19 nt, Artificial Sequence
  Description of Artificial Sequence: Synthetic oligonucleotide
cagcagcgaugaaccacca

SEQ ID NO: 173643 - RNA, 19 nt, Artificial Sequence
  Description of Artificial Sequence: Synthetic oligonucleotide
gccaucggugcaugccgac

SEQ ID NO: 173644 - RNA, 19 nt, Artificial Sequence
  Description of Artificial Sequence: Synthetic oligonucleotide
cauuggguacggggacuca

SEQ ID NO: 173645 - RNA, 19 nt, Artificial Sequence
  Description of Artificial Sequence: Synthetic oligonucleotide
ccgacagcgagcaggauuu

SEQ ID NO: 173646 - RNA, 19 nt, Artificial Sequence
  Description of Artificial Sequence: Synthetic oligonucleotide
auguccggcucgguuuguu

SEQ ID NO: 173647 - RNA, 19 nt, Artificial Sequence
  Description of Artificial Sequence: Synthetic oligonucleotide
cccagucgauuugaaucug

SEQ ID NO: 173648 - RNA, 19 nt, Artificial Sequence
  Description of Artificial Sequence: Synthetic oligonucleotide
guucgguaucaaauacauu

SEQ ID NO: 173649 - RNA, 19 nt, Artificial Sequence
  Description of Artificial Sequence: Synthetic oligonucleotide
ccuaaagucugcugccaau

SEQ ID NO: 173650 - RNA, 19 nt, Artificial Sequence
  Description of Artificial Sequence: Synthetic oligonucleotide
ccgcaguguaucacugcca

SEQ ID NO: 173651 - RNA, 19 nt, Artificial Sequence
  Description of Artificial Sequence: Synthetic oligonucleotide
caagggccgccgucagaaa

SEQ ID NO: 173652 - RNA, 19 nt, Artificial Sequence
  Description of Artificial Sequence: Synthetic oligonucleotide
gcaguguaucacugccacu

SEQ ID NO: 173653 - RNA, 19 nt, Artificial Sequence
  Description of Artificial Sequence: Synthetic oligonucleotide
gggaggguugaacccuagu

SEQ ID NO: 173654 - RNA, 19 nt, Artificial Sequence
  Description of Artificial Sequence: Synthetic oligonucleotide
gauguccggcucgguuugu

SEQ ID NO: 173655 - RNA, 19 nt, Artificial Sequence
  Description of Artificial Sequence: Synthetic oligonucleotide
caccugucgaugacaccuu

SEQ ID NO: 173656 - RNA, 19 nt, Artificial Sequence
  Description of Artificial Sequence: Synthetic oligonucleotide
ccacccgcugaucaagggu

SEQ ID NO: 173657 - RNA, 19 nt, Artificial Sequence
  Description of Artificial Sequence: Synthetic oligonucleotide
ccaucggugcaugccgaca

SEQ ID NO: 173658 - RNA, 19 nt, Artificial Sequence
  Description of Artificial Sequence: Synthetic oligonucleotide
cuaggucgggaggguugaa

SEQ ID NO: 173659 - RNA, 19 nt, Artificial Sequence
  Description of Artificial Sequence: Synthetic oligonucleotide
cccgcccuguaaaagccuu

SEQ ID NO: 173660 - RNA, 19 nt, Artificial Sequence
  Description of Artificial Sequence: Synthetic oligonucleotide
ccgcccuguaaaagccuuu

SEQ ID NO: 173661 - RNA, 19 nt, Artificial Sequence
  Description of Artificial Sequence: Synthetic oligonucleotide
ccgcugaucaaggguucuu

SEQ ID NO: 173662 - RNA, 19 nt, Artificial Sequence
  Description of Artificial Sequence: Synthetic oligonucleotide
uauuaauaggacuugaaag

SEQ ID NO: 173663 - RNA, 19 nt, Artificial Sequence
  Description of Artificial Sequence: Synthetic oligonucleotide
uugacuauaaggauuaaug

SEQ ID NO: 173664 - RNA, 19 nt, Artificial Sequence
  Description of Artificial Sequence: Synthetic oligonucleotide
uuuuaaacgagccuguucu

SEQ ID NO: 173665 - RNA, 19 nt, Artificial Sequence
  Description of Artificial Sequence: Synthetic oligonucleotide
auaaugcuucccuaaaucc

SEQ ID NO: 173666 - RNA, 19 nt, Artificial Sequence
  Description of Artificial Sequence: Synthetic oligonucleotide
uugguaaucauaaauaaau

SEQ ID NO: 173667 - RNA, 19 nt, Artificial Sequence
  Description of Artificial Sequence: Synthetic oligonucleotide
agacauaucauacccuugc

SEQ ID NO: 173668 - RNA, 19 nt, Artificial Sequence
  Description of Artificial Sequence: Synthetic oligonucleotide
uauaucgucuaauaaaugu

SEQ ID NO: 173669 - RNA, 19 nt, Artificial Sequence
  Description of Artificial Sequence: Synthetic oligonucleotide
uuuggaaaggcccuaaugu

SEQ ID NO: 173670 - RNA, 19 nt, Artificial Sequence
  Description of Artificial Sequence: Synthetic oligonucleotide
agaucuuagucuuaaauca

SEQ ID NO: 173671 - RNA, 19 nt, Artificial Sequence
  Description of Artificial Sequence: Synthetic oligonucleotide
auuaacuaaacucuuggcu

SEQ ID NO: 173672 - RNA, 19 nt, Artificial Sequence
  Description of Artificial Sequence: Synthetic oligonucleotide
uguggauaaaaucaaacau

SEQ ID NO: 173673 - RNA, 19 nt, Artificial Sequence
  Description of Artificial Sequence: Synthetic oligonucleotide
gauuauggguauuaauagg

SEQ ID NO: 173674 - RNA, 19 nt, Artificial Sequence
  Description of Artificial Sequence: Synthetic oligonucleotide
uaucgucuaauaaauguag

SEQ ID NO: 173675 - RNA, 19 nt, Artificial Sequence
  Description of Artificial Sequence: Synthetic oligonucleotide
cuauaaacuagucccaucc

SEQ ID NO: 173676 - RNA, 19 nt, Artificial Sequence
  Description of Artificial Sequence: Synthetic oligonucleotide
uacuggagcgcucuaaugg

SEQ ID NO: 173677 - RNA, 19 nt, Artificial Sequence
  Description of Artificial Sequence: Synthetic oligonucleotide
aaguaugcaauucuucucu

SEQ ID NO: 173678 - RNA, 19 nt, Artificial Sequence
  Description of Artificial Sequence: Synthetic oligonucleotide
aaugcaacuugucuguaug

SEQ ID NO: 173679 - RNA, 19 nt, Artificial Sequence
  Description of Artificial Sequence: Synthetic oligonucleotide
ugacuauaaggauuaaugc

SEQ ID NO: 173680 - RNA, 19 nt, Artificial Sequence
  Description of Artificial Sequence: Synthetic oligonucleotide
aacccaagcauuaagaugu

SEQ ID NO: 173681 - RNA, 19 nt, Artificial Sequence
  Description of Artificial Sequence: Synthetic oligonucleotide
auaaacgguauugacaacg

SEQ ID NO: 173682 - RNA, 19 nt, Artificial Sequence
  Description of Artificial Sequence: Synthetic oligonucleotide
uguaaaauugguaaucaua

SEQ ID NO: 173683 - RNA, 19 nt, Artificial Sequence
  Description of Artificial Sequence: Synthetic oligonucleotide
gaaaauaugucgauggcug

SEQ ID NO: 173684 - RNA, 19 nt, Artificial Sequence
  Description of Artificial Sequence: Synthetic oligonucleotide
acauaaacuguaucugagc

SEQ ID NO: 173685 - RNA, 19 nt, Artificial Sequence
  Description of Artificial Sequence: Synthetic oligonucleotide
uccuuuaaugcuuuuaaac

SEQ ID NO: 173686 - RNA, 19 nt, Artificial Sequence
  Description of Artificial Sequence: Synthetic oligonucleotide
acaacgcucuccuauaaac

SEQ ID NO: 173687 - RNA, 19 nt, Artificial Sequence
  Description of Artificial Sequence: Synthetic oligonucleotide
ucagagauaggccagugcu

SEQ ID NO: 173688 - RNA, 19 nt, Artificial Sequence
  Description of Artificial Sequence: Synthetic oligonucleotide
uugaauuuaaagauacuau

SEQ ID NO: 173689 - RNA, 19 nt, Artificial Sequence
  Description of Artificial Sequence: Synthetic oligonucleotide
aauugguacggucuuuaag

SEQ ID NO: 173690 - RNA, 19 nt, Artificial Sequence
  Description of Artificial Sequence: Synthetic oligonucleotide
ucugucaaugccaacuugc

SEQ ID NO: 173691 - RNA, 19 nt, Artificial Sequence
  Description of Artificial Sequence: Synthetic oligonucleotide
uaugcuuaacucauguaca

SEQ ID NO: 173692 - RNA, 19 nt, Artificial Sequence
  Description of Artificial Sequence: Synthetic oligonucleotide
uacuauaucgucuaauaaa

SEQ ID NO: 173693 - RNA, 19 nt, Artificial Sequence
  Description of Artificial Sequence: Synthetic oligonucleotide
aaagcaucaagaagacugc

SEQ ID NO: 173694 - RNA, 19 nt, Artificial Sequence
  Description of Artificial Sequence: Synthetic oligonucleotide
aaggcagcauuuauuaccc

SEQ ID NO: 173695 - RNA, 19 nt, Artificial Sequence
  Description of Artificial Sequence: Synthetic oligonucleotide
gacuauaaggauuaaugca

SEQ ID NO: 173696 - RNA, 19 nt, Artificial Sequence
  Description of Artificial Sequence: Synthetic oligonucleotide
aggauaggccauuacaggg

SEQ ID NO: 173697 - RNA, 19 nt, Artificial Sequence
  Description of Artificial Sequence: Synthetic oligonucleotide
guaugcuuaacucauguac

SEQ ID NO: 173698 - RNA, 19 nt, Artificial Sequence
  Description of Artificial Sequence: Synthetic oligonucleotide
uauccuaucaugccuguug

SEQ ID NO: 173699 - RNA, 19 nt, Artificial Sequence
  Description of Artificial Sequence: Synthetic oligonucleotide
agcaguaaagauccuuccc

SEQ ID NO: 173700 - RNA, 19 nt, Artificial Sequence
  Description of Artificial Sequence: Synthetic oligonucleotide
ugcguauuguggaaaaugc

SEQ ID NO: 173701 - RNA, 19 nt, Artificial Sequence
  Description of Artificial Sequence: Synthetic oligonucleotide
ugcaauucuucucuccagg

SEQ ID NO: 173702 - RNA, 19 nt, Artificial Sequence
  Description of Artificial Sequence: Synthetic oligonucleotide
aaguaugcuuaacucaugu

SEQ ID NO: 173703 - RNA, 19 nt, Artificial Sequence
  Description of Artificial Sequence: Synthetic oligonucleotide
uggauaauugguacggucu

SEQ ID NO: 173704 - RNA, 19 nt, Artificial Sequence
  Description of Artificial Sequence: Synthetic oligonucleotide
uugguuacugauuaugggu

SEQ ID NO: 173705 - RNA, 19 nt, Artificial Sequence
  Description of Artificial Sequence: Synthetic oligonucleotide
aagaugcuaaauguuguuc

SEQ ID NO: 173706 - RNA, 19 nt, Artificial Sequence
  Description of Artificial Sequence: Synthetic oligonucleotide
aagauucagaccuaugguu

SEQ ID NO: 173707 - RNA, 19 nt, Artificial Sequence
  Description of Artificial Sequence: Synthetic oligonucleotide
agauaucuacuauaucguc

SEQ ID NO: 173708 - RNA, 19 nt, Artificial Sequence
  Description of Artificial Sequence: Synthetic oligonucleotide
auaaacuguaucugagcuc

SEQ ID NO: 173709 - RNA, 19 nt, Artificial Sequence
  Description of Artificial Sequence: Synthetic oligonucleotide
uaaggagucgccaccugcg

SEQ ID NO: 173710 - RNA, 19 nt, Artificial Sequence
  Description of Artificial Sequence: Synthetic oligonucleotide
ucccaaugcacuaaugcug

SEQ ID NO: 173711 - RNA, 19 nt, Artificial Sequence
  Description of Artificial Sequence: Synthetic oligonucleotide
aaguacgggcuuuucuugg

SEQ ID NO: 173712 - RNA, 19 nt, Artificial Sequence
  Description of Artificial Sequence: Synthetic oligonucleotide
ucuacuauaucgucuaaua

SEQ ID NO: 173713 - RNA, 19 nt, Artificial Sequence
  Description of Artificial Sequence: Synthetic oligonucleotide
aacauucguagauuuauuu

SEQ ID NO: 173714 - RNA, 19 nt, Artificial Sequence
  Description of Artificial Sequence: Synthetic oligonucleotide
guugguuacugauuauggg

SEQ ID NO: 173715 - RNA, 19 nt, Artificial Sequence
  Description of Artificial Sequence: Synthetic oligonucleotide
agaacugaaguguuaguca

SEQ ID NO: 173716 - RNA, 19 nt, Artificial Sequence
  Description of Artificial Sequence: Synthetic oligonucleotide
ucgucuaauaaauguagac

SEQ ID NO: 173717 - RNA, 19 nt, Artificial Sequence
  Description of Artificial Sequence: Synthetic oligonucleotide
uugccuuaaaauauuuagu

SEQ ID NO: 173718 - RNA, 19 nt, Artificial Sequence
  Description of Artificial Sequence: Synthetic oligonucleotide
ugcucuguaugucagcuga

SEQ ID NO: 173719 - RNA, 19 nt, Artificial Sequence
  Description of Artificial Sequence: Synthetic oligonucleotide
uaaacgguauugacaacgc

SEQ ID NO: 173720 - RNA, 19 nt, Artificial Sequence
  Description of Artificial Sequence: Synthetic oligonucleotide
gacacuaauuuguuaggug

SEQ ID NO: 173721 - RNA, 19 nt, Artificial Sequence
  Description of Artificial Sequence: Synthetic oligonucleotide
uccauauccuaucaugccu

SEQ ID NO: 173722 - RNA, 19 nt, Artificial Sequence
  Description of Artificial Sequence: Synthetic oligonucleotide
auuuauaaugcuucccuaa

SEQ ID NO: 173723 - RNA, 19 nt, Artificial Sequence
  Description of Artificial Sequence: Synthetic oligonucleotide
acuauuaaaucuccccaug

SEQ ID NO: 173724 - RNA, 19 nt, Artificial Sequence
  Description of Artificial Sequence: Synthetic oligonucleotide
uuaaggagguuugauauaa

SEQ ID NO: 173725 - RNA, 19 nt, Artificial Sequence
  Description of Artificial Sequence: Synthetic oligonucleotide
ugcgaacuuauguucuugg

SEQ ID NO: 173726 - RNA, 19 nt, Artificial Sequence
  Description of Artificial Sequence: Synthetic oligonucleotide
uauauuaagguugguugug

SEQ ID NO: 173727 - RNA, 19 nt, Artificial Sequence
  Description of Artificial Sequence: Synthetic oligonucleotide
uaccccauuuguaaguuca

SEQ ID NO: 173728 - RNA, 19 nt, Artificial Sequence
  Description of Artificial Sequence: Synthetic oligonucleotide
acuauaaggauuaaugcau

SEQ ID NO: 173729 - RNA, 19 nt, Artificial Sequence
  Description of Artificial Sequence: Synthetic oligonucleotide
aaagauccuucccaaugca

SEQ ID NO: 173730 - RNA, 19 nt, Artificial Sequence
  Description of Artificial Sequence: Synthetic oligonucleotide
cuuauagaugucaagaccu

SEQ ID NO: 173731 - RNA, 19 nt, Artificial Sequence
  Description of Artificial Sequence: Synthetic oligonucleotide
uccauuugauuuuggauaa

SEQ ID NO: 173732 - RNA, 19 nt, Artificial Sequence
  Description of Artificial Sequence: Synthetic oligonucleotide
ucucaacccaagcauuaag

SEQ ID NO: 173733 - RNA, 19 nt, Artificial Sequence
  Description of Artificial Sequence: Synthetic oligonucleotide
auaucuacuauaucgucua

SEQ ID NO: 173734 - RNA, 19 nt, Artificial Sequence
  Description of Artificial Sequence: Synthetic oligonucleotide
uucccaaugcacuaaugcu

SEQ ID NO: 173735 - RNA, 19 nt, Artificial Sequence
  Description of Artificial Sequence: Synthetic oligonucleotide
ugugcuguuagaagaacua

SEQ ID NO: 173736 - RNA, 19 nt, Artificial Sequence
  Description of Artificial Sequence: Synthetic oligonucleotide
acuauaucgucuaauaaau

SEQ ID NO: 173737 - RNA, 19 nt, Artificial Sequence
  Description of Artificial Sequence: Synthetic oligonucleotide
ugguaaucauaaauaaaua

SEQ ID NO: 173738 - RNA, 19 nt, Artificial Sequence
  Description of Artificial Sequence: Synthetic oligonucleotide
ugguugugucauuacaggc

SEQ ID NO: 173739 - RNA, 19 nt, Artificial Sequence
  Description of Artificial Sequence: Synthetic oligonucleotide
aacgcucuccuauaaacua

SEQ ID NO: 173740 - RNA, 19 nt, Artificial Sequence
  Description of Artificial Sequence: Synthetic oligonucleotide
guaguagcaggauaggcca

SEQ ID NO: 173741 - RNA, 19 nt, Artificial Sequence
  Description of Artificial Sequence: Synthetic oligonucleotide
cccuaaaucccauagagac

SEQ ID NO: 173742 - RNA, 19 nt, Artificial Sequence
  Description of Artificial Sequence: Synthetic oligonucleotide
guauuaauaggacuugaaa

SEQ ID NO: 173743 - RNA, 19 nt, Artificial Sequence
  Description of Artificial Sequence: Synthetic oligonucleotide
acaugaucauaacauggca

SEQ ID NO: 173744 - RNA, 19 nt, Artificial Sequence
  Description of Artificial Sequence: Synthetic oligonucleotide
ugguuacugauuaugggua

SEQ ID NO: 173745 - RNA, 19 nt, Artificial Sequence
  Description of Artificial Sequence: Synthetic oligonucleotide
uugugaaaucgaaugcaac

SEQ ID NO: 173746 - RNA, 19 nt, Artificial Sequence
  Description of Artificial Sequence: Synthetic oligonucleotide
uuggauaauugguacgguc

SEQ ID NO: 173747 - RNA, 19 nt, Artificial Sequence
  Description of Artificial Sequence: Synthetic oligonucleotide
ugcacuaaugcugaguuuu

SEQ ID NO: 173748 - RNA, 19 nt, Artificial Sequence
  Description of Artificial Sequence: Synthetic oligonucleotide
uuagaagaacuagggguag

SEQ ID NO: 173749 - RNA, 19 nt, Artificial Sequence
  Description of Artificial Sequence: Synthetic oligonucleotide
cuauaucgucuaauaaaug

SEQ ID NO: 173750 - RNA, 19 nt, Artificial Sequence
  Description of Artificial Sequence: Synthetic oligonucleotide
aaagggguuugguggucuc

SEQ ID NO: 173751 - RNA, 19 nt, Artificial Sequence
  Description of Artificial Sequence: Synthetic oligonucleotide
aaacgguauugacaacgcu

SEQ ID NO: 173752 - RNA, 19 nt, Artificial Sequence
  Description of Artificial Sequence: Synthetic oligonucleotide
aaaauccacccauuugcua

SEQ ID NO: 173753 - RNA, 19 nt, Artificial Sequence
  Description of Artificial Sequence: Synthetic oligonucleotide
auuuguaaguucauuacua

SEQ ID NO: 173754 - RNA, 19 nt, Artificial Sequence
  Description of Artificial Sequence: Synthetic oligonucleotide
aauuuguuagguggaaguu

SEQ ID NO: 173755 - RNA, 19 nt, Artificial Sequence
  Description of Artificial Sequence: Synthetic oligonucleotide
cuaauuuguuagguggaag

SEQ ID NO: 173756 - RNA, 19 nt, Artificial Sequence
  Description of Artificial Sequence: Synthetic oligonucleotide
acaaguaugcuuaacucau

SEQ ID NO: 173757 - RNA, 19 nt, Artificial Sequence
  Description of Artificial Sequence: Synthetic oligonucleotide
gaaaguguuguagcccugc

SEQ ID NO: 173758 - RNA, 19 nt, Artificial Sequence
  Description of Artificial Sequence: Synthetic oligonucleotide
ucccuucuaaagaugcuaa

SEQ ID NO: 173759 - RNA, 19 nt, Artificial Sequence
  Description of Artificial Sequence: Synthetic oligonucleotide
ggugcagucauuauucccc

SEQ ID NO: 173760 - RNA, 19 nt, Artificial Sequence
  Description of Artificial Sequence: Synthetic oligonucleotide
uggugcagucauuauuccc

SEQ ID NO: 173761 - RNA, 19 nt, Artificial Sequence
  Description of Artificial Sequence: Synthetic oligonucleotide
guaaggagucgccaccugc

SEQ ID NO: 173762 - RNA, 19 nt, Artificial Sequence
  Description of Artificial Sequence: Synthetic oligonucleotide
uuacuggagcgcucuaaug

SEQ ID NO: 173763 - RNA, 19 nt, Artificial Sequence
  Description of Artificial Sequence: Synthetic oligonucleotide
aaugaaagguuggcugcug

SEQ ID NO: 173764 - RNA, 19 nt, Artificial Sequence
  Description of Artificial Sequence: Synthetic oligonucleotide
gauaucuacuauaucgucu

SEQ ID NO: 173765 - RNA, 19 nt, Artificial Sequence
  Description of Artificial Sequence: Synthetic oligonucleotide
uaugucgauggcuggugca

SEQ ID NO: 173766 - RNA, 19 nt, Artificial Sequence
  Description of Artificial Sequence: Synthetic oligonucleotide
guaaggacuggagaaaaga

SEQ ID NO: 173767 - RNA, 19 nt, Artificial Sequence
  Description of Artificial Sequence: Synthetic oligonucleotide
aguagacauagcauggaca

SEQ ID NO: 173768 - RNA, 19 nt, Artificial Sequence
  Description of Artificial Sequence: Synthetic oligonucleotide
uuggcuagacauugaauuu

SEQ ID NO: 173769 - RNA, 19 nt, Artificial Sequence
  Description of Artificial Sequence: Synthetic oligonucleotide
uggugcaaccuuugguugc

SEQ ID NO: 173770 - RNA, 19 nt, Artificial Sequence
  Description of Artificial Sequence: Synthetic oligonucleotide
cuacaaugaacuguccuuc

SEQ ID NO: 173771 - RNA, 19 nt, Artificial Sequence
  Description of Artificial Sequence: Synthetic oligonucleotide
auggguauuaauaggacuu

SEQ ID NO: 173772 - RNA, 19 nt, Artificial Sequence
  Description of Artificial Sequence: Synthetic oligonucleotide
caaguacgggcuuuucuug

SEQ ID NO: 173773 - RNA, 19 nt, Artificial Sequence
  Description of Artificial Sequence: Synthetic oligonucleotide
ucuuggcuagacauugaau

SEQ ID NO: 173774 - RNA, 19 nt, Artificial Sequence
  Description of Artificial Sequence: Synthetic oligonucleotide
guggauaaaaucaaacaua

SEQ ID NO: 173775 - RNA, 19 nt, Artificial Sequence
  Description of Artificial Sequence: Synthetic oligonucleotide
uacgggcuuuucuugguug

SEQ ID NO: 173776 - RNA, 19 nt, Artificial Sequence
  Description of Artificial Sequence: Synthetic oligonucleotide
acggauucaaagucaacua

SEQ ID NO: 173777 - RNA, 19 nt, Artificial Sequence
  Description of Artificial Sequence: Synthetic oligonucleotide
aagcauuaagauguauuua

SEQ ID NO: 173778 - RNA, 19 nt, Artificial Sequence
  Description of Artificial Sequence: Synthetic oligonucleotide
agguugguugugucauuac

SEQ ID NO: 173779 - RNA, 19 nt, Artificial Sequence
  Description of Artificial Sequence: Synthetic oligonucleotide
cuuggcuagacauugaauu

SEQ ID NO: 173780 - RNA, 19 nt, Artificial Sequence
  Description of Artificial Sequence: Synthetic oligonucleotide
auauuaagguugguugugu

SEQ ID NO: 173781 - RNA, 19 nt, Artificial Sequence
  Description of Artificial Sequence: Synthetic oligonucleotide
uuuguaacaggagcaugaa

SEQ ID NO: 173782 - RNA, 19 nt, Artificial Sequence
  Description of Artificial Sequence: Synthetic oligonucleotide
gacauaucauacccuugca

SEQ ID NO: 173783 - RNA, 19 nt, Artificial Sequence
  Description of Artificial Sequence: Synthetic oligonucleotide
caguagacauagcauggac

SEQ ID NO: 173784 - RNA, 19 nt, Artificial Sequence
  Description of Artificial Sequence: Synthetic oligonucleotide
uucaaggguuuuaguuccc

SEQ ID NO: 173785 - RNA, 19 nt, Artificial Sequence
  Description of Artificial Sequence: Synthetic oligonucleotide
auaucgucuaauaaaugua

SEQ ID NO: 173786 - RNA, 19 nt, Artificial Sequence
  Description of Artificial Sequence: Synthetic oligonucleotide
ggaaguaaggagucgccac

SEQ ID NO: 173787 - RNA, 19 nt, Artificial Sequence
  Description of Artificial Sequence: Synthetic oligonucleotide
uuuggauaauugguacggu

SEQ ID NO: 173788 - RNA, 19 nt, Artificial Sequence
  Description of Artificial Sequence: Synthetic oligonucleotide
cuuagaugugcuguuagaa

SEQ ID NO: 173789 - RNA, 19 nt, Artificial Sequence
  Description of Artificial Sequence: Synthetic oligonucleotide
cagugaacuguucccuugc

SEQ ID NO: 173790 - RNA, 19 nt, Artificial Sequence
  Description of Artificial Sequence: Synthetic oligonucleotide
ggcuguauauuaagguugg

SEQ ID NO: 173791 - RNA, 19 nt, Artificial Sequence
  Description of Artificial Sequence: Synthetic oligonucleotide
ugguacggucuuuaagagu

SEQ ID NO: 173792 - RNA, 19 nt, Artificial Sequence
  Description of Artificial Sequence: Synthetic oligonucleotide
uccccauguacuugcuacc

SEQ ID NO: 173793 - RNA, 19 nt, Artificial Sequence
  Description of Artificial Sequence: Synthetic oligonucleotide
cuacuauaucgucuaauaa

SEQ ID NO: 173794 - RNA, 19 nt, Artificial Sequence
  Description of Artificial Sequence: Synthetic oligonucleotide
cacuaauuuguuaggugga

SEQ ID NO: 173795 - RNA, 19 nt, Artificial Sequence
  Description of Artificial Sequence: Synthetic oligonucleotide
uccccauaacaucuccuaa

SEQ ID NO: 173796 - RNA, 19 nt, Artificial Sequence
  Description of Artificial Sequence: Synthetic oligonucleotide
gucagagauaggccagugc

SEQ ID NO: 173797 - RNA, 19 nt, Artificial Sequence
  Description of Artificial Sequence: Synthetic oligonucleotide
uugacaacgcucuccuaua

SEQ ID NO: 173798 - RNA, 19 nt, Artificial Sequence
  Description of Artificial Sequence: Synthetic oligonucleotide
aguaugcuuaacucaugua

SEQ ID NO: 173799 - RNA, 19 nt, Artificial Sequence
  Description of Artificial Sequence: Synthetic oligonucleotide
agauucagaccuaugguuu

SEQ ID NO: 173800 - RNA, 19 nt, Artificial Sequence
  Description of Artificial Sequence: Synthetic oligonucleotide
uaauugguacggucuuuaa

SEQ ID NO: 173801 - RNA, 19 nt, Artificial Sequence
  Description of Artificial Sequence: Synthetic oligonucleotide
acuuauguucuuggaauaa

SEQ ID NO: 173802 - RNA, 19 nt, Artificial Sequence
  Description of Artificial Sequence: Synthetic oligonucleotide
acuaauuuguuagguggaa

SEQ ID NO: 173803 - RNA, 19 nt, Artificial Sequence
  Description of Artificial Sequence: Synthetic oligonucleotide
auaauugguacggucuuua

SEQ ID NO: 173804 - RNA, 19 nt, Artificial Sequence
  Description of Artificial Sequence: Synthetic oligonucleotide
agcaucaagaagacugcug

SEQ ID NO: 173805 - RNA, 19 nt, Artificial Sequence
  Description of Artificial Sequence: Synthetic oligonucleotide
uuuaaacgagccuguucuu

SEQ ID NO: 173806 - RNA, 19 nt, Artificial Sequence
  Description of Artificial Sequence: Synthetic oligonucleotide
cccauaacaucuccuaaag

SEQ ID NO: 173807 - RNA, 19 nt, Artificial Sequence
  Description of Artificial Sequence: Synthetic oligonucleotide
gaaaucgaaugcaacuugu

SEQ ID NO: 173808 - RNA, 19 nt, Artificial Sequence
  Description of Artificial Sequence: Synthetic oligonucleotide
uuacaggcacacuucccau

SEQ ID NO: 173809 - RNA, 19 nt, Artificial Sequence
  Description of Artificial Sequence: Synthetic oligonucleotide
caccugcgaacuuauguuc

SEQ ID NO: 173810 - RNA, 19 nt, Artificial Sequence
  Description of Artificial Sequence: Synthetic oligonucleotide
aguaaggagucgccaccug

SEQ ID NO: 173811 - RNA, 19 nt, Artificial Sequence
  Description of Artificial Sequence: Synthetic oligonucleotide
cuggagcgcucuaauggag

SEQ ID NO: 173812 - RNA, 19 nt, Artificial Sequence
  Description of Artificial Sequence: Synthetic oligonucleotide
aucgucuaauaaauguaga

SEQ ID NO: 173813 - RNA, 19 nt, Artificial Sequence
  Description of Artificial Sequence: Synthetic oligonucleotide
cuggaauaucaccucuguc

SEQ ID NO: 173814 - RNA, 19 nt, Artificial Sequence
  Description of Artificial Sequence: Synthetic oligonucleotide
aacauggcacacgccaaau

SEQ ID NO: 173815 - RNA, 19 nt, Artificial Sequence
  Description of Artificial Sequence: Synthetic oligonucleotide
gaagaguuucagagacagc

SEQ ID NO: 173816 - RNA, 19 nt, Artificial Sequence
  Description of Artificial Sequence: Synthetic oligonucleotide
ccaacuuacaucauucuua

SEQ ID NO: 173817 - RNA, 19 nt, Artificial Sequence
  Description of Artificial Sequence: Synthetic oligonucleotide
guaugugguuucuuugcaa

SEQ ID NO: 173818 - RNA, 19 nt, Artificial Sequence
  Description of Artificial Sequence: Synthetic oligonucleotide
gguuggcuaaagaugaguc

SEQ ID NO: 173819 - RNA, 19 nt, Artificial Sequence
  Description of Artificial Sequence: Synthetic oligonucleotide
uuuagacgcuguuccuuua

SEQ ID NO: 173820 - RNA, 19 nt, Artificial Sequence
  Description of Artificial Sequence: Synthetic oligonucleotide
ggagguuugauauaauauu

SEQ ID NO: 173821 - RNA, 19 nt, Artificial Sequence
  Description of Artificial Sequence: Synthetic oligonucleotide
agauacuaucuccccuuau

SEQ ID NO: 173822 - RNA, 19 nt, Artificial Sequence
  Description of Artificial Sequence: Synthetic oligonucleotide
acgcucuccuauaaacuag

SEQ ID NO: 173823 - RNA, 19 nt, Artificial Sequence
  Description of Artificial Sequence: Synthetic oligonucleotide
gguuugguggucucaugac

SEQ ID NO: 173824 - RNA, 19 nt, Artificial Sequence
  Description of Artificial Sequence: Synthetic oligonucleotide
ggauuaaugcauuuauaau

SEQ ID NO: 173825 - RNA, 19 nt, Artificial Sequence
  Description of Artificial Sequence: Synthetic oligonucleotide
aguaacauucguagauuua

SEQ ID NO: 173826 - RNA, 19 nt, Artificial Sequence
  Description of Artificial Sequence: Synthetic oligonucleotide
acacggauucaaagucaac

SEQ ID NO: 173827 - RNA, 19 nt, Artificial Sequence
  Description of Artificial Sequence: Synthetic oligonucleotide
gguauuaauaggacuugaa

SEQ ID NO: 173828 - RNA, 19 nt, Artificial Sequence
  Description of Artificial Sequence: Synthetic oligonucleotide
accugcgaacuuauguucu

SEQ ID NO: 173829 - RNA, 19 nt, Artificial Sequence
  Description of Artificial Sequence: Synthetic oligonucleotide
gguacggucuuuaagaguu

SEQ ID NO: 173830 - RNA, 19 nt, Artificial Sequence
  Description of Artificial Sequence: Synthetic oligonucleotide
cugcgaacuuauguucuug

SEQ ID NO: 173831 - RNA, 19 nt, Artificial Sequence
  Description of Artificial Sequence: Synthetic oligonucleotide
caaugccaagauugcccac

SEQ ID NO: 173832 - RNA, 19 nt, Artificial Sequence
  Description of Artificial Sequence: Synthetic oligonucleotide
ccuauaaacuagucccauc

SEQ ID NO: 173833 - RNA, 19 nt, Artificial Sequence
  Description of Artificial Sequence: Synthetic oligonucleotide
gguggaaguuuggcaauag

SEQ ID NO: 173834 - RNA, 19 nt, Artificial Sequence
  Description of Artificial Sequence: Synthetic oligonucleotide
guuacuggagcgcucuaau

SEQ ID NO: 173835 - RNA, 19 nt, Artificial Sequence
  Description of Artificial Sequence: Synthetic oligonucleotide
ugguugccaguuagauccu

SEQ ID NO: 173836 - RNA, 19 nt, Artificial Sequence
  Description of Artificial Sequence: Synthetic oligonucleotide
cauucauuguugcagcauu

SEQ ID NO: 173837 - RNA, 19 nt, Artificial Sequence
  Description of Artificial Sequence: Synthetic oligonucleotide
caacgcucuccuauaaacu

SEQ ID NO: 173838 - RNA, 19 nt, Artificial Sequence
  Description of Artificial Sequence: Synthetic oligonucleotide
ggugcaaccuuugguugcc

SEQ ID NO: 173839 - RNA, 19 nt, Artificial Sequence
  Description of Artificial Sequence: Synthetic oligonucleotide
agcaugaaggcagcauuua

SEQ ID NO: 173840 - RNA, 19 nt, Artificial Sequence
  Description of Artificial Sequence: Synthetic oligonucleotide
cgucuaauaaauguagaca

SEQ ID NO: 173841 - RNA, 19 nt, Artificial Sequence
  Description of Artificial Sequence: Synthetic oligonucleotide
auggcacacgccaaauaaa

SEQ ID NO: 173842 - RNA, 19 nt, Artificial Sequence
  Description of Artificial Sequence: Synthetic oligonucleotide
ggcccuaaugucaaaugga

SEQ ID NO: 173843 - RNA, 19 nt, Artificial Sequence
  Description of Artificial Sequence: Synthetic oligonucleotide
cugcauuggaaaguguugu

SEQ ID NO: 173844 - RNA, 19 nt, Artificial Sequence
  Description of Artificial Sequence: Synthetic oligonucleotide
cacuuuugugaaaucgaau

SEQ ID NO: 173845 - RNA, 19 nt, Artificial Sequence
  Description of Artificial Sequence: Synthetic oligonucleotide
uugcuaccugaggagcagu

SEQ ID NO: 173846 - RNA, 19 nt, Artificial Sequence
  Description of Artificial Sequence: Synthetic oligonucleotide
gcgaacuuauguucuugga

SEQ ID NO: 173847 - RNA, 19 nt, Artificial Sequence
  Description of Artificial Sequence: Synthetic oligonucleotide
caguaacauucguagauuu

SEQ ID NO: 173848 - RNA, 19 nt, Artificial Sequence
  Description of Artificial Sequence: Synthetic oligonucleotide
gauaauugguacggucuuu

SEQ ID NO: 173849 - RNA, 19 nt, Artificial Sequence
  Description of Artificial Sequence: Synthetic oligonucleotide
ccugccgugggccuucaug

SEQ ID NO: 173850 - RNA, 19 nt, Artificial Sequence
  Description of Artificial Sequence: Synthetic oligonucleotide
cauauccuaucaugccugu

SEQ ID NO: 173851 - RNA, 19 nt, Artificial Sequence
  Description of Artificial Sequence: Synthetic oligonucleotide
gcguauuguggaaaaugca

SEQ ID NO: 173852 - RNA, 19 nt, Artificial Sequence
  Description of Artificial Sequence: Synthetic oligonucleotide
cguauuguggaaaaugcau

SEQ ID NO: 173853 - RNA, 19 nt, Artificial Sequence
  Description of Artificial Sequence: Synthetic oligonucleotide
ggauaauugguacggucuu

SEQ ID NO: 173854 - RNA, 19 nt, Artificial Sequence
  Description of Artificial Sequence: Synthetic oligonucleotide
cauggcaauucuuggcuuu

SEQ ID NO: 173855 - RNA, 19 nt, Artificial Sequence
  Description of Artificial Sequence: Synthetic oligonucleotide
gaucaacagugcaguuuaa

SEQ ID NO: 173856 - RNA, 19 nt, Artificial Sequence
  Description of Artificial Sequence: Synthetic oligonucleotide
ccuagucagugaacuguuc

SEQ ID NO: 173857 - RNA, 19 nt, Artificial Sequence
  Description of Artificial Sequence: Synthetic oligonucleotide
gguuacugauuauggguau

SEQ ID NO: 173858 - RNA, 19 nt, Artificial Sequence
  Description of Artificial Sequence: Synthetic oligonucleotide
gcaguagacauagcaugga

SEQ ID NO: 173859 - RNA, 19 nt, Artificial Sequence
  Description of Artificial Sequence: Synthetic oligonucleotide
cuuuuagacgcuguuccuu

SEQ ID NO: 173860 - RNA, 19 nt, Artificial Sequence
  Description of Artificial Sequence: Synthetic oligonucleotide
ggaaaguguuguagcccug

SEQ ID NO: 173861 - RNA, 19 nt, Artificial Sequence
  Description of Artificial Sequence: Synthetic oligonucleotide
ccccauaacaucuccuaaa

SEQ ID NO: 173862 - RNA, 19 nt, Artificial Sequence
  Description of Artificial Sequence: Synthetic oligonucleotide
caugccuguugguguagua

SEQ ID NO: 173863 - RNA, 19 nt, Artificial Sequence
  Description of Artificial Sequence: Synthetic oligonucleotide
cccauuugcuaacauacau

SEQ ID NO: 173864 - RNA, 19 nt, Artificial Sequence
  Description of Artificial Sequence: Synthetic oligonucleotide
cccgauaaguccuguuuaa

SEQ ID NO: 173865 - RNA, 19 nt, Artificial Sequence
  Description of Artificial Sequence: Synthetic oligonucleotide
ccaaguacgggcuuuucuu

SEQ ID NO: 173866 - RNA, 19 nt, Artificial Sequence
  Description of Artificial Sequence: Synthetic oligonucleotide
caaagggguuugguggucu

SEQ ID NO: 173867 - RNA, 19 nt, Artificial Sequence
  Description of Artificial Sequence: Synthetic oligonucleotide
ccucucaacccaagcauua

SEQ ID NO: 173868 - RNA, 19 nt, Artificial Sequence
  Description of Artificial Sequence: Synthetic oligonucleotide
guacgggcuuuucuugguu

SEQ ID NO: 173869 - RNA, 19 nt, Artificial Sequence
  Description of Artificial Sequence: Synthetic oligonucleotide
gcagugguuggugcaaccu

SEQ ID NO: 173870 - RNA, 19 nt, Artificial Sequence
  Description of Artificial Sequence: Synthetic oligonucleotide
gugcaaccuuugguugcca

SEQ ID NO: 173871 - RNA, 19 nt, Artificial Sequence
  Description of Artificial Sequence: Synthetic oligonucleotide
gucucaugacaggcuggcu

SEQ ID NO: 173872 - RNA, 19 nt, Artificial Sequence
  Description of Artificial Sequence: Synthetic oligonucleotide
ggugcguauuguggaaaau

SEQ ID NO: 173873 - RNA, 19 nt, Artificial Sequence
  Description of Artificial Sequence: Synthetic oligonucleotide
gcucuguaugucagcugaa

SEQ ID NO: 173874 - RNA, 19 nt, Artificial Sequence
  Description of Artificial Sequence: Synthetic oligonucleotide
cgcucuccuauaaacuagu

SEQ ID NO: 173875 - RNA, 19 nt, Artificial Sequence
  Description of Artificial Sequence: Synthetic oligonucleotide
guacggucuuuaagaguuu

SEQ ID NO: 173876 - RNA, 19 nt, Artificial Sequence
  Description of Artificial Sequence: Synthetic oligonucleotide
ccugcgaacuuauguucuu

SEQ ID NO: 173877 - RNA, 19 nt, Artificial Sequence
  Description of Artificial Sequence: Synthetic oligonucleotide
cagccccucucuucacuuu

SEQ ID NO: 173878 - RNA, 19 nt, Artificial Sequence
  Description of Artificial Sequence: Synthetic oligonucleotide
ccgugggccuucauggguu

SEQ ID NO: 173879 - RNA, 19 nt, Artificial Sequence
  Description of Artificial Sequence: Synthetic oligonucleotide
ucgucaaugaucaauaucc

SEQ ID NO: 173880 - RNA, 19 nt, Artificial Sequence
  Description of Artificial Sequence: Synthetic oligonucleotide
aagcaaaugggcuuuggcc

SEQ ID NO: 173881 - RNA, 19 nt, Artificial Sequence
  Description of Artificial Sequence: Synthetic oligonucleotide
acagauggcguccagacgc

SEQ ID NO: 173882 - RNA, 19 nt, Artificial Sequence
  Description of Artificial Sequence: Synthetic oligonucleotide
uguuguauuaacucaucag

SEQ ID NO: 173883 - RNA, 19 nt, Artificial Sequence
  Description of Artificial Sequence: Synthetic oligonucleotide
uggcuuuaccaucacaugg

SEQ ID NO: 173884 - RNA, 19 nt, Artificial Sequence
  Description of Artificial Sequence: Synthetic oligonucleotide
aauauugcuccucacagua

SEQ ID NO: 173885 - RNA, 19 nt, Artificial Sequence
  Description of Artificial Sequence: Synthetic oligonucleotide
aaacauauggcucaucaua

SEQ ID NO: 173886 - RNA, 19 nt, Artificial Sequence
  Description of Artificial Sequence: Synthetic oligonucleotide
uuuguguauucaaucaccc

SEQ ID NO: 173887 - RNA, 19 nt, Artificial Sequence
  Description of Artificial Sequence: Synthetic oligonucleotide
aacacuaaaauuggauccg

SEQ ID NO: 173888 - RNA, 19 nt, Artificial Sequence
  Description of Artificial Sequence: Synthetic oligonucleotide
gguaaaaucuugcacaugc

SEQ ID NO: 173889 - RNA, 19 nt, Artificial Sequence
  Description of Artificial Sequence: Synthetic oligonucleotide
aauaccuccgcagaaccac

SEQ ID NO: 173890 - RNA, 19 nt, Artificial Sequence
  Description of Artificial Sequence: Synthetic oligonucleotide
uuuguuaggacccgaaauc

SEQ ID NO: 173891 - RNA, 19 nt, Artificial Sequence
  Description of Artificial Sequence: Synthetic oligonucleotide
uaacaauucaccaggccug

SEQ ID NO: 173892 - RNA, 19 nt, Artificial Sequence
  Description of Artificial Sequence: Synthetic oligonucleotide
uuauuucaguugaauuugg

SEQ ID NO: 173893 - RNA, 19 nt, Artificial Sequence
  Description of Artificial Sequence: Synthetic oligonucleotide
ggaaaguguacuuuuaaag

SEQ ID NO: 173894 - RNA, 19 nt, Artificial Sequence
  Description of Artificial Sequence: Synthetic oligonucleotide
ugcuauaucuggauaauuc

SEQ ID NO: 173895 - RNA, 19 nt, Artificial Sequence
  Description of Artificial Sequence: Synthetic oligonucleotide
aaaucuugcacaugcacua

SEQ ID NO: 173896 - RNA, 19 nt, Artificial Sequence
  Description of Artificial Sequence: Synthetic oligonucleotide
gacaucguuggacagcagg

SEQ ID NO: 173897 - RNA, 19 nt, Artificial Sequence
  Description of Artificial Sequence: Synthetic oligonucleotide
uguaccucuucuaaggcgu

SEQ ID NO: 173898 - RNA, 19 nt, Artificial Sequence
  Description of Artificial Sequence: Synthetic oligonucleotide
ucuuacuccgcagugauga

SEQ ID NO: 173899 - RNA, 19 nt, Artificial Sequence
  Description of Artificial Sequence: Synthetic oligonucleotide
auuggagguguucguaacc

SEQ ID NO: 173900 - RNA, 19 nt, Artificial Sequence
  Description of Artificial Sequence: Synthetic oligonucleotide
uucggaguccgucuaaugc

SEQ ID NO: 173901 - RNA, 19 nt, Artificial Sequence
  Description of Artificial Sequence: Synthetic oligonucleotide
agaagaucgucacuugguc

SEQ ID NO: 173902 - RNA, 19 nt, Artificial Sequence
  Description of Artificial Sequence: Synthetic oligonucleotide
uugagaaucgcccucgcaa

SEQ ID NO: 173903 - RNA, 19 nt, Artificial Sequence
  Description of Artificial Sequence: Synthetic oligonucleotide
ucggcaucuugguagacgg

SEQ ID NO: 173904 - RNA, 19 nt, Artificial Sequence
  Description of Artificial Sequence: Synthetic oligonucleotide
ucgcaaggcacacuaauug

SEQ ID NO: 173905 - RNA, 19 nt, Artificial Sequence
  Description of Artificial Sequence: Synthetic oligonucleotide
uuaggacccgaaaucagug

SEQ ID NO: 173906 - RNA, 19 nt, Artificial Sequence
  Description of Artificial Sequence: Synthetic oligonucleotide
aagaucgucacuuggucaa

SEQ ID NO: 173907 - RNA, 19 nt, Artificial Sequence
  Description of Artificial Sequence: Synthetic oligonucleotide
uuguuguauuaacucauca

SEQ ID NO: 173908 - RNA, 19 nt, Artificial Sequence
  Description of Artificial Sequence: Synthetic oligonucleotide
ucccuauacagcuuugcag

SEQ ID NO: 173909 - RNA, 19 nt, Artificial Sequence
  Description of Artificial Sequence: Synthetic oligonucleotide
uucguaaccacagggcugg

SEQ ID NO: 173910 - RNA, 19 nt, Artificial Sequence
  Description of Artificial Sequence: Synthetic oligonucleotide
cuagagucuuuuaaggcac

SEQ ID NO: 173911 - RNA, 19 nt, Artificial Sequence
  Description of Artificial Sequence: Synthetic oligonucleotide
uuguauuaacucaucaguu

SEQ ID NO: 173912 - RNA, 19 nt, Artificial Sequence
  Description of Artificial Sequence: Synthetic oligonucleotide
acaguacccgagaagaccc

SEQ ID NO: 173913 - RNA, 19 nt, Artificial Sequence
  Description of Artificial Sequence: Synthetic oligonucleotide
uuugaugagugccgucagg

SEQ ID NO: 173914 - RNA, 19 nt, Artificial Sequence
  Description of Artificial Sequence: Synthetic oligonucleotide
gaaugcuauaucuggauaa

SEQ ID NO: 173915 - RNA, 19 nt, Artificial Sequence
  Description of Artificial Sequence: Synthetic oligonucleotide
uguuaggacccgaaaucag

SEQ ID NO: 173916 - RNA, 19 nt, Artificial Sequence
  Description of Artificial Sequence: Synthetic oligonucleotide
aucaaggagguagaugucg

SEQ ID NO: 173917 - RNA, 19 nt, Artificial Sequence
  Description of Artificial Sequence: Synthetic oligonucleotide
agugaacagaacagguucc

SEQ ID NO: 173918 - RNA, 19 nt, Artificial Sequence
  Description of Artificial Sequence: Synthetic oligonucleotide
acggcaaaccaucucgacg

SEQ ID NO: 173919 - RNA, 19 nt, Artificial Sequence
  Description of Artificial Sequence: Synthetic oligonucleotide
caagaagaucgucacuugg

SEQ ID NO: 173920 - RNA, 19 nt, Artificial Sequence
  Description of Artificial Sequence: Synthetic oligonucleotide
cauauggcucaucauauuc

SEQ ID NO: 173921 - RNA, 19 nt, Artificial Sequence
  Description of Artificial Sequence: Synthetic oligonucleotide
uuguugacaucguuggaca

SEQ ID NO: 173922 - RNA, 19 nt, Artificial Sequence
  Description of Artificial Sequence: Synthetic oligonucleotide
gacguuucuaagaaauacc

SEQ ID NO: 173923 - RNA, 19 nt, Artificial Sequence
  Description of Artificial Sequence: Synthetic oligonucleotide
agguuuguguauucaauca

SEQ ID NO: 173924 - RNA, 19 nt, Artificial Sequence
  Description of Artificial Sequence: Synthetic oligonucleotide
gguguucguaaccacaggg

SEQ ID NO: 173925 - RNA, 19 nt, Artificial Sequence
  Description of Artificial Sequence: Synthetic oligonucleotide
aacggcacagauggcgucc

SEQ ID NO: 173926 - RNA, 19 nt, Artificial Sequence
  Description of Artificial Sequence: Synthetic oligonucleotide
uuagaaacuugaacuugac

SEQ ID NO: 173927 - RNA, 19 nt, Artificial Sequence
  Description of Artificial Sequence: Synthetic oligonucleotide
gcuauaucuggauaauucc

SEQ ID NO: 173928 - RNA, 19 nt, Artificial Sequence
  Description of Artificial Sequence: Synthetic oligonucleotide
aacauauggcucaucauau

SEQ ID NO: 173929 - RNA, 19 nt, Artificial Sequence
  Description of Artificial Sequence: Synthetic oligonucleotide
uccgcauuguuccagugaa

SEQ ID NO: 173930 - RNA, 19 nt, Artificial Sequence
  Description of Artificial Sequence: Synthetic oligonucleotide
aaacgaugucucccaggcg

SEQ ID NO: 173931 - RNA, 19 nt, Artificial Sequence
  Description of Artificial Sequence: Synthetic oligonucleotide
acauagguccccaagaccu

SEQ ID NO: 173932 - RNA, 19 nt, Artificial Sequence
  Description of Artificial Sequence: Synthetic oligonucleotide
cucaucaguucuugggucc

SEQ ID NO: 173933 - RNA, 19 nt, Artificial Sequence
  Description of Artificial Sequence: Synthetic oligonucleotide
gauucucccgugcacguug

SEQ ID NO: 173934 - RNA, 19 nt, Artificial Sequence
  Description of Artificial Sequence: Synthetic oligonucleotide
uccgucuaaugccuugucc

SEQ ID NO: 173935 - RNA, 19 nt, Artificial Sequence
  Description of Artificial Sequence: Synthetic oligonucleotide
uccuguucgccccacaauc

SEQ ID NO: 173936 - RNA, 19 nt, Artificial Sequence
  Description of Artificial Sequence: Synthetic oligonucleotide
uucccuauacagcuuugca

SEQ ID NO: 173937 - RNA, 19 nt, Artificial Sequence
  Description of Artificial Sequence: Synthetic oligonucleotide
ugaaugcuauaucuggaua

SEQ ID NO: 173938 - RNA, 19 nt, Artificial Sequence
  Description of Artificial Sequence: Synthetic oligonucleotide
uuguuaggacccgaaauca

SEQ ID NO: 173939 - RNA, 19 nt, Artificial Sequence
  Description of Artificial Sequence: Synthetic oligonucleotide
uuccuuaaaucaugaaguc

SEQ ID NO: 173940 - RNA, 19 nt, Artificial Sequence
  Description of Artificial Sequence: Synthetic oligonucleotide
aaacggcacagauggcguc

SEQ ID NO: 173941 - RNA, 19 nt, Artificial Sequence
  Description of Artificial Sequence: Synthetic oligonucleotide
gaaaggcgcagucuuacuc

SEQ ID NO: 173942 - RNA, 19 nt, Artificial Sequence
  Description of Artificial Sequence: Synthetic oligonucleotide
uuguacgcccggauggucc

SEQ ID NO: 173943 - RNA, 19 nt, Artificial Sequence
  Description of Artificial Sequence: Synthetic oligonucleotide
cuggcaacgucacacaguc

SEQ ID NO: 173944 - RNA, 19 nt, Artificial Sequence
  Description of Artificial Sequence: Synthetic oligonucleotide
gcuuuguacgcccggaugg

SEQ ID NO: 173945 - RNA, 19 nt, Artificial Sequence
  Description of Artificial Sequence: Synthetic oligonucleotide
agaaucgcccucgcaaggc

SEQ ID NO: 173946 - RNA, 19 nt, Artificial Sequence
  Description of Artificial Sequence: Synthetic oligonucleotide
uggugcgcaucaaacagcu

SEQ ID NO: 173947 - RNA, 19 nt, Artificial Sequence
  Description of Artificial Sequence: Synthetic oligonucleotide
acguugacgagcccacugg

SEQ ID NO: 173948 - RNA, 19 nt, Artificial Sequence
  Description of Artificial Sequence: Synthetic oligonucleotide
gaagaucgucacuugguca

SEQ ID NO: 173949 - RNA, 19 nt, Artificial Sequence
  Description of Artificial Sequence: Synthetic oligonucleotide
ugcuuuguacgcccggaug

SEQ ID NO: 173950 - RNA, 19 nt, Artificial Sequence
  Description of Artificial Sequence: Synthetic oligonucleotide
guaggauaaggccaagcca

SEQ ID NO: 173951 - RNA, 19 nt, Artificial Sequence
  Description of Artificial Sequence: Synthetic oligonucleotide
cuaacaauucaccaggccu

SEQ ID NO: 173952 - RNA, 19 nt, Artificial Sequence
  Description of Artificial Sequence: Synthetic oligonucleotide
gagaaucgcccucgcaagg

SEQ ID NO: 173953 - RNA, 19 nt, Artificial Sequence
  Description of Artificial Sequence: Synthetic oligonucleotide
aguguacaaagugcacgcc

SEQ ID NO: 173954 - RNA, 19 nt, Artificial Sequence
  Description of Artificial Sequence: Synthetic oligonucleotide
cacuucggcacucugucgc

SEQ ID NO: 173955 - RNA, 19 nt, Artificial Sequence
  Description of Artificial Sequence: Synthetic oligonucleotide
  modified_base (6)..(6): a, c, u, g, unknown or other
acaggnguugccacucugc

SEQ ID NO: 173956 - RNA, 19 nt, Artificial Sequence
  Description of Artificial Sequence: Synthetic oligonucleotide
cuggugaaugcuauaucug

SEQ ID NO: 173957 - RNA, 19 nt, Artificial Sequence
  Description of Artificial Sequence: Synthetic oligonucleotide
auccggauucugcuaacuc

SEQ ID NO: 173958 - RNA, 19 nt, Artificial Sequence
  Description of Artificial Sequence: Synthetic oligonucleotide
ucugugagcaauggugagc

SEQ ID NO: 173959 - RNA, 19 nt, Artificial Sequence
  Description of Artificial Sequence: Synthetic oligonucleotide
ccgaaaucagugaauaaag

SEQ ID NO: 173960 - RNA, 19 nt, Artificial Sequence
  Description of Artificial Sequence: Synthetic oligonucleotide
aaaacggcacagauggcgu

SEQ ID NO: 173961 - RNA, 19 nt, Artificial Sequence
  Description of Artificial Sequence: Synthetic oligonucleotide
  modified_base (5)..(5): a, c, u, g, unknown or other
caggnguugccacucugcg

SEQ ID NO: 173962 - RNA, 19 nt, Artificial Sequence
  Description of Artificial Sequence: Synthetic oligonucleotide
gugacgacuugccugcucc

SEQ ID NO: 173963 - RNA, 19 nt, Artificial Sequence
  Description of Artificial Sequence: Synthetic oligonucleotide
gguuccugagguaugauug

SEQ ID NO: 173964 - RNA, 19 nt, Artificial Sequence
  Description of Artificial Sequence: Synthetic oligonucleotide
uuguguauucaaucacccu

SEQ ID NO: 173965 - RNA, 19 nt, Artificial Sequence
  Description of Artificial Sequence: Synthetic oligonucleotide
  modified_base (3)..(3): a, c, u, g, unknown or other
ggnguugccacucugcguc

SEQ ID NO: 173966 - RNA, 19 nt, Artificial Sequence
  Description of Artificial Sequence: Synthetic oligonucleotide
ucucgacguugucagaaac

SEQ ID NO: 173967 - RNA, 19 nt, Artificial Sequence
  Description of Artificial Sequence: Synthetic oligonucleotide
auggcuuuaccaucacaug

SEQ ID NO: 173968 - RNA, 19 nt, Artificial Sequence
  Description of Artificial Sequence: Synthetic oligonucleotide
ucgacguugucagaaacaa

SEQ ID NO: 173969 - RNA, 19 nt, Artificial Sequence
  Description of Artificial Sequence: Synthetic oligonucleotide
cacaguacccgagaagacc

SEQ ID NO: 173970 - RNA, 19 nt, Artificial Sequence
  Description of Artificial Sequence: Synthetic oligonucleotide
gcgucgacggcacugaggg

SEQ ID NO: 173971 - RNA, 19 nt, Artificial Sequence
  Description of Artificial Sequence: Synthetic oligonucleotide
cucgucaaugaucaauauc

SEQ ID NO: 173972 - RNA, 19 nt, Artificial Sequence
  Description of Artificial Sequence: Synthetic oligonucleotide
uuccgcauuguuccaguga

SEQ ID NO: 173973 - RNA, 19 nt, Artificial Sequence
  Description of Artificial Sequence: Synthetic oligonucleotide
ggauaauuccuucugaagu

SEQ ID NO: 173974 - RNA, 19 nt, Artificial Sequence
  Description of Artificial Sequence: Synthetic oligonucleotide
ugcuaacucaguauccauu

SEQ ID NO: 173975 - RNA, 19 nt, Artificial Sequence
  Description of Artificial Sequence: Synthetic oligonucleotide
acugcacucaacagugacg

SEQ ID NO: 173976 - RNA, 19 nt, Artificial Sequence
  Description of Artificial Sequence: Synthetic oligonucleotide
agaccugacauuagugguc

SEQ ID NO: 173977 - RNA, 19 nt, Artificial Sequence
  Description of Artificial Sequence: Synthetic oligonucleotide
uaggcgauucucccgugca

SEQ ID NO: 173978 - RNA, 19 nt, Artificial Sequence
  Description of Artificial Sequence: Synthetic oligonucleotide
acgacuugccugcucccac

SEQ ID NO: 173979 - RNA, 19 nt, Artificial Sequence
  Description of Artificial Sequence: Synthetic oligonucleotide
gguuuguguauucaaucac

SEQ ID NO: 173980 - RNA, 19 nt, Artificial Sequence
  Description of Artificial Sequence: Synthetic oligonucleotide
uguacacugggcgaacuuc

SEQ ID NO: 173981 - RNA, 19 nt, Artificial Sequence
  Description of Artificial Sequence: Synthetic oligonucleotide
uccuggugcgcaucaaaca

SEQ ID NO: 173982 - RNA, 19 nt, Artificial Sequence
  Description of Artificial Sequence: Synthetic oligonucleotide
caucuugguagacggcccg

SEQ ID NO: 173983 - RNA, 19 nt, Artificial Sequence
  Description of Artificial Sequence: Synthetic oligonucleotide
cagugaauaaagauggagu

SEQ ID NO: 173984 - RNA, 19 nt, Artificial Sequence
  Description of Artificial Sequence: Synthetic oligonucleotide
auauggcucaucauauucu

SEQ ID NO: 173985 - RNA, 19 nt, Artificial Sequence
  Description of Artificial Sequence: Synthetic oligonucleotide
cauuggagguguucguaac

SEQ ID NO: 173986 - RNA, 19 nt, Artificial Sequence
  Description of Artificial Sequence: Synthetic oligonucleotide
gcccuagagucuuuuaagg

SEQ ID NO: 173987 - RNA, 19 nt, Artificial Sequence
  Description of Artificial Sequence: Synthetic oligonucleotide
ugcacguugacgagcccac

SEQ ID NO: 173988 - RNA, 19 nt, Artificial Sequence
  Description of Artificial Sequence: Synthetic oligonucleotide
cuggugcgcaucaaacagc

SEQ ID NO: 173989 - RNA, 19 nt, Artificial Sequence
  Description of Artificial Sequence: Synthetic oligonucleotide
ucccucgacguuucuaaga

SEQ ID NO: 173990 - RNA, 19 nt, Artificial Sequence
  Description of Artificial Sequence: Synthetic oligonucleotide
ucucaugcccgugaugacu

SEQ ID NO: 173991 - RNA, 19 nt, Artificial Sequence
  Description of Artificial Sequence: Synthetic oligonucleotide
ccgucuaaugccuuguccc

SEQ ID NO: 173992 - RNA, 19 nt, Artificial Sequence
  Description of Artificial Sequence: Synthetic oligonucleotide
aaguccaauuucaguuguc

SEQ ID NO: 173993 - RNA, 19 nt, Artificial Sequence
  Description of Artificial Sequence: Synthetic oligonucleotide
gauggcguccagacgcacg

SEQ ID NO: 173994 - RNA, 19 nt, Artificial Sequence
  Description of Artificial Sequence: Synthetic oligonucleotide
aggacccgaaaucagugaa

SEQ ID NO: 173995 - RNA, 19 nt, Artificial Sequence
  Description of Artificial Sequence: Synthetic oligonucleotide
agugacgacuugccugcuc

SEQ ID NO: 173996 - RNA, 19 nt, Artificial Sequence
  Description of Artificial Sequence: Synthetic oligonucleotide
acuaauugucuuuguccaa

SEQ ID NO: 173997 - RNA, 19 nt, Artificial Sequence
  Description of Artificial Sequence: Synthetic oligonucleotide
acguaggcgauucucccgu

SEQ ID NO: 173998 - RNA, 19 nt, Artificial Sequence
  Description of Artificial Sequence: Synthetic oligonucleotide
guguucguaaccacagggc

SEQ ID NO: 173999 - RNA, 19 nt, Artificial Sequence
  Description of Artificial Sequence: Synthetic oligonucleotide
cacugcacucaacagugac

SEQ ID NO: 174000 - RNA, 19 nt, Artificial Sequence
  Description of Artificial Sequence: Synthetic oligonucleotide
ucgacguuucuaagaaaua

SEQ ID NO: 174001 - RNA, 19 nt, Artificial Sequence
  Description of Artificial Sequence: Synthetic oligonucleotide
gugagggcguaggauaagg

SEQ ID NO: 174002 - RNA, 19 nt, Artificial Sequence
  Description of Artificial Sequence: Synthetic oligonucleotide
gagagcaacuggcaacguc

SEQ ID NO: 174003 - RNA, 19 nt, Artificial Sequence
  Description of Artificial Sequence: Synthetic oligonucleotide
uguuucggugagggcagcg

SEQ ID NO: 174004 - RNA, 19 nt, Artificial Sequence
  Description of Artificial Sequence: Synthetic oligonucleotide
ggcccuagagucuuuuaag

SEQ ID NO: 174005 - RNA, 19 nt, Artificial Sequence
  Description of Artificial Sequence: Synthetic oligonucleotide
agcguuccuucucauauuu

SEQ ID NO: 174006 - RNA, 19 nt, Artificial Sequence
  Description of Artificial Sequence: Synthetic oligonucleotide
uugacaucccucgacguuu

SEQ ID NO: 174007 - RNA, 19 nt, Artificial Sequence
  Description of Artificial Sequence: Synthetic oligonucleotide
cuguucgccccacaauccc

SEQ ID NO: 174008 - RNA, 19 nt, Artificial Sequence
  Description of Artificial Sequence: Synthetic oligonucleotide
aggcgauucucccgugcac

SEQ ID NO: 174009 - RNA, 19 nt, Artificial Sequence
  Description of Artificial Sequence: Synthetic oligonucleotide
cucccgugcacguugacga

SEQ ID NO: 174010 - RNA, 19 nt, Artificial Sequence
  Description of Artificial Sequence: Synthetic oligonucleotide
  modified_base (2)..(2): a, c, u, g, unknown or other
gnguugccacucugcgucg

SEQ ID NO: 174011 - RNA, 19 nt, Artificial Sequence
  Description of Artificial Sequence: Synthetic oligonucleotide
aggaggcccgucuaagcug

SEQ ID NO: 174012 - RNA, 19 nt, Artificial Sequence
  Description of Artificial Sequence: Synthetic oligonucleotide
gcuaacaauucaccaggcc

SEQ ID NO: 174013 - RNA, 19 nt, Artificial Sequence
  Description of Artificial Sequence: Synthetic oligonucleotide
gucggcaucuugguagacg

SEQ ID NO: 174014 - RNA, 19 nt, Artificial Sequence
  Description of Artificial Sequence: Synthetic oligonucleotide
cuucccuauacagcuuugc

SEQ ID NO: 174015 - RNA, 19 nt, Artificial Sequence
  Description of Artificial Sequence: Synthetic oligonucleotide
uuacuccgcagugaugaga

SEQ ID NO: 174016 - RNA, 19 nt, Artificial Sequence
  Description of Artificial Sequence: Synthetic oligonucleotide
guuucggugagggcagcgg

SEQ ID NO: 174017 - RNA, 19 nt, Artificial Sequence
  Description of Artificial Sequence: Synthetic oligonucleotide
gacuccguguuguggacuc

SEQ ID NO: 174018 - RNA, 19 nt, Artificial Sequence
  Description of Artificial Sequence: Synthetic oligonucleotide
uuaccaucacaugguugag

SEQ ID NO: 174019 - RNA, 19 nt, Artificial Sequence
  Description of Artificial Sequence: Synthetic oligonucleotide
uguacgcccggauggucca

SEQ ID NO: 174020 - RNA, 19 nt, Artificial Sequence
  Description of Artificial Sequence: Synthetic oligonucleotide
ccuagagucuuuuaaggca

SEQ ID NO: 174021 - RNA, 19 nt, Artificial Sequence
  Description of Artificial Sequence: Synthetic oligonucleotide
guucguaaccacagggcug

SEQ ID NO: 174022 - RNA, 19 nt, Artificial Sequence
  Description of Artificial Sequence: Synthetic oligonucleotide
  modified_base (4)..(4): a, c, u, g, unknown or other
aggnguugccacucugcgu

SEQ ID NO: 174023 - RNA, 19 nt, Artificial Sequence
  Description of Artificial Sequence: Synthetic oligonucleotide
gggagaauaccggacuccg

SEQ ID NO: 174024 - RNA, 19 nt, Artificial Sequence
  Description of Artificial Sequence: Synthetic oligonucleotide
gcguacaucuuuauuauuc

SEQ ID NO: 174025 - RNA, 19 nt, Artificial Sequence
  Description of Artificial Sequence: Synthetic oligonucleotide
caaucaccccuuccugggg

SEQ ID NO: 174026 - RNA, 19 nt, Artificial Sequence
  Description of Artificial Sequence: Synthetic oligonucleotide
cacguugacgagcccacug

SEQ ID NO: 174027 - RNA, 19 nt, Artificial Sequence
  Description of Artificial Sequence: Synthetic oligonucleotide
cucgacguugucagaaaca

SEQ ID NO: 174028 - RNA, 19 nt, Artificial Sequence
  Description of Artificial Sequence: Synthetic oligonucleotide
gucgacggcacugagggga

SEQ ID NO: 174029 - RNA, 19 nt, Artificial Sequence
  Description of Artificial Sequence: Synthetic oligonucleotide
cuuacuccgcagugaugag

SEQ ID NO: 174030 - RNA, 19 nt, Artificial Sequence
  Description of Artificial Sequence: Synthetic oligonucleotide
cauuuuguuaggacccgaa

SEQ ID NO: 174031 - RNA, 19 nt, Artificial Sequence
  Description of Artificial Sequence: Synthetic oligonucleotide
guaggcgauucucccgugc

SEQ ID NO: 174032 - RNA, 19 nt, Artificial Sequence
  Description of Artificial Sequence: Synthetic oligonucleotide
ugggcgaacuucucccgga

SEQ ID NO: 174033 - RNA, 19 nt, Artificial Sequence
  Description of Artificial Sequence: Synthetic oligonucleotide
gcuggugaaugcuauaucu

SEQ ID NO: 174034 - RNA, 19 nt, Artificial Sequence
  Description of Artificial Sequence: Synthetic oligonucleotide
ggcacacuaauugucuuug

SEQ ID NO: 174035 - RNA, 19 nt, Artificial Sequence
  Description of Artificial Sequence: Synthetic oligonucleotide
cugggcgaacuucucccgg

SEQ ID NO: 174036 - RNA, 19 nt, Artificial Sequence
  Description of Artificial Sequence: Synthetic oligonucleotide
caucccucgacguuucuaa

SEQ ID NO: 174037 - RNA, 19 nt, Artificial Sequence
  Description of Artificial Sequence: Synthetic oligonucleotide
guugacgagcccacuggcc

SEQ ID NO: 174038 - RNA, 19 nt, Artificial Sequence
  Description of Artificial Sequence: Synthetic oligonucleotide
uccagacgcacggcaaacc

SEQ ID NO: 174039 - RNA, 19 nt, Artificial Sequence
  Description of Artificial Sequence: Synthetic oligonucleotide
acgaccuucagagcagacu

SEQ ID NO: 174040 - RNA, 19 nt, Artificial Sequence
  Description of Artificial Sequence: Synthetic oligonucleotide
caaaccaucucgacguugu

SEQ ID NO: 174041 - RNA, 19 nt, Artificial Sequence
  Description of Artificial Sequence: Synthetic oligonucleotide
aucccucgacguuucuaag

SEQ ID NO: 174042 - RNA, 19 nt, Artificial Sequence
  Description of Artificial Sequence: Synthetic oligonucleotide
uacacugggcgaacuucuc

SEQ ID NO: 174043 - RNA, 19 nt, Artificial Sequence
  Description of Artificial Sequence: Synthetic oligonucleotide
uuccggcucugacaaucug

SEQ ID NO: 174044 - RNA, 19 nt, Artificial Sequence
  Description of Artificial Sequence: Synthetic oligonucleotide
ugacgacuugccugcuccc

SEQ ID NO: 174045 - RNA, 19 nt, Artificial Sequence
  Description of Artificial Sequence: Synthetic oligonucleotide
ugacaucccucgacguuuc

SEQ ID NO: 174046 - RNA, 19 nt, Artificial Sequence
  Description of Artificial Sequence: Synthetic oligonucleotide
ggcccgucuaagcuguagg

SEQ ID NO: 174047 - RNA, 19 nt, Artificial Sequence
  Description of Artificial Sequence: Synthetic oligonucleotide
cacggcaaaccaucucgac

SEQ ID NO: 174048 - RNA, 19 nt, Artificial Sequence
  Description of Artificial Sequence: Synthetic oligonucleotide
ugaguguggcuccccgguc

SEQ ID NO: 174049 - RNA, 19 nt, Artificial Sequence
  Description of Artificial Sequence: Synthetic oligonucleotide
cacucugcgucgacggcac

SEQ ID NO: 174050 - RNA, 19 nt, Artificial Sequence
  Description of Artificial Sequence: Synthetic oligonucleotide
agucccugauauaacugga

SEQ ID NO: 174051 - RNA, 19 nt, Artificial Sequence
  Description of Artificial Sequence: Synthetic oligonucleotide
cuuccgcauuguuccagug

SEQ ID NO: 174052 - RNA, 19 nt, Artificial Sequence
  Description of Artificial Sequence: Synthetic oligonucleotide
aucgucacuuggucaaauu

SEQ ID NO: 174053 - RNA, 19 nt, Artificial Sequence
  Description of Artificial Sequence: Synthetic oligonucleotide
cucguagcguuccuucuca

SEQ ID NO: 174054 - RNA, 19 nt, Artificial Sequence
  Description of Artificial Sequence: Synthetic oligonucleotide
aucucgacguugucagaaa

SEQ ID NO: 174055 - RNA, 19 nt, Artificial Sequence
  Description of Artificial Sequence: Synthetic oligonucleotide
acuggcaacgucacacagu

SEQ ID NO: 174056 - RNA, 19 nt, Artificial Sequence
  Description of Artificial Sequence: Synthetic oligonucleotide
ucccaggcguacaucuuua

SEQ ID NO: 174057 - RNA, 19 nt, Artificial Sequence
  Description of Artificial Sequence: Synthetic oligonucleotide
acggucagaucuccauccu

SEQ ID NO: 174058 - RNA, 19 nt, Artificial Sequence
  Description of Artificial Sequence: Synthetic oligonucleotide
gugcacgccccuuggggag

SEQ ID NO: 174059 - RNA, 19 nt, Artificial Sequence
  Description of Artificial Sequence: Synthetic oligonucleotide
ggugaaugcuauaucugga

SEQ ID NO: 174060 - RNA, 19 nt, Artificial Sequence
  Description of Artificial Sequence: Synthetic oligonucleotide
guuaggacccgaaaucagu

SEQ ID NO: 174061 - RNA, 19 nt, Artificial Sequence
  Description of Artificial Sequence: Synthetic oligonucleotide
uuuguacgcccggaugguc

SEQ ID NO: 174062 - RNA, 19 nt, Artificial Sequence
  Description of Artificial Sequence: Synthetic oligonucleotide
acccgaaaucagugaauaa

SEQ ID NO: 174063 - RNA, 19 nt, Artificial Sequence
  Description of Artificial Sequence: Synthetic oligonucleotide
aguccgucuaaugccuugu

SEQ ID NO: 174064 - RNA, 19 nt, Artificial Sequence
  Description of Artificial Sequence: Synthetic oligonucleotide
ucccgugcacguugacgag

SEQ ID NO: 174065 - RNA, 19 nt, Artificial Sequence
  Description of Artificial Sequence: Synthetic oligonucleotide
cuugagaaucgcccucgca

SEQ ID NO: 174066 - RNA, 19 nt, Artificial Sequence
  Description of Artificial Sequence: Synthetic oligonucleotide
caggugggagaauaccgga

SEQ ID NO: 174067 - RNA, 19 nt, Artificial Sequence
  Description of Artificial Sequence: Synthetic oligonucleotide
ccuguucgccccacaaucc

SEQ ID NO: 174068 - RNA, 19 nt, Artificial Sequence
  Description of Artificial Sequence: Synthetic oligonucleotide
agcaaaacauauggcucau

SEQ ID NO: 174069 - RNA, 19 nt, Artificial Sequence
  Description of Artificial Sequence: Synthetic oligonucleotide
cacccagagaaggaugguc

SEQ ID NO: 174070 - RNA, 19 nt, Artificial Sequence
  Description of Artificial Sequence: Synthetic oligonucleotide
caucucgacguugucagaa

SEQ ID NO: 174071 - RNA, 19 nt, Artificial Sequence
  Description of Artificial Sequence: Synthetic oligonucleotide
ccgucuaagcuguagguga

SEQ ID NO: 174072 - RNA, 19 nt, Artificial Sequence
  Description of Artificial Sequence: Synthetic oligonucleotide
ggguggucgcuucugguac

SEQ ID NO: 174073 - RNA, 19 nt, Artificial Sequence
  Description of Artificial Sequence: Synthetic oligonucleotide
cccgugaugacuucauuca

SEQ ID NO: 174074 - RNA, 19 nt, Artificial Sequence
  Description of Artificial Sequence: Synthetic oligonucleotide
guagacggcccgugccaag

SEQ ID NO: 174075 - RNA, 19 nt, Artificial Sequence
  Description of Artificial Sequence: Synthetic oligonucleotide
ggcaacgucacacagucuu

SEQ ID NO: 174076 - RNA, 19 nt, Artificial Sequence
  Description of Artificial Sequence: Synthetic oligonucleotide
acuguacacugggcgaacu

SEQ ID NO: 174077 - RNA, 19 nt, Artificial Sequence
  Description of Artificial Sequence: Synthetic oligonucleotide
cagaaccacacagcuggac

SEQ ID NO: 174078 - RNA, 19 nt, Artificial Sequence
  Description of Artificial Sequence: Synthetic oligonucleotide
gcuguuucggugagggcag

SEQ ID NO: 174079 - RNA, 19 nt, Artificial Sequence
  Description of Artificial Sequence: Synthetic oligonucleotide
caacgucacacagucuuca

SEQ ID NO: 174080 - RNA, 19 nt, Artificial Sequence
  Description of Artificial Sequence: Synthetic oligonucleotide
guccacguuugcuguugcc

SEQ ID NO: 174081 - RNA, 19 nt, Artificial Sequence
  Description of Artificial Sequence: Synthetic oligonucleotide
cucugcgucgacggcacug

SEQ ID NO: 174082 - RNA, 19 nt, Artificial Sequence
  Description of Artificial Sequence: Synthetic oligonucleotide
ccuaucacggucagaucuc

SEQ ID NO: 174083 - RNA, 19 nt, Artificial Sequence
  Description of Artificial Sequence: Synthetic oligonucleotide
augcuauaucuggauaauu

SEQ ID NO: 174084 - RNA, 19 nt, Artificial Sequence
  Description of Artificial Sequence: Synthetic oligonucleotide
gacggcccgugccaaguuc

SEQ ID NO: 174085 - RNA, 19 nt, Artificial Sequence
  Description of Artificial Sequence: Synthetic oligonucleotide
ugggccgaccacagcuaac

SEQ ID NO: 174086 - RNA, 19 nt, Artificial Sequence
  Description of Artificial Sequence: Synthetic oligonucleotide
gugcacguugacgagccca

SEQ ID NO: 174087 - RNA, 19 nt, Artificial Sequence
  Description of Artificial Sequence: Synthetic oligonucleotide
gacgacuugccugcuccca

SEQ ID NO: 174088 - RNA, 19 nt, Artificial Sequence
  Description of Artificial Sequence: Synthetic oligonucleotide
cgcuugacaucccucgacg

SEQ ID NO: 174089 - RNA, 19 nt, Artificial Sequence
  Description of Artificial Sequence: Synthetic oligonucleotide
guccugauccuggcauccg

SEQ ID NO: 174090 - RNA, 19 nt, Artificial Sequence
  Description of Artificial Sequence: Synthetic oligonucleotide
uaccggacuccguguugug

SEQ ID NO: 174091 - RNA, 19 nt, Artificial Sequence
  Description of Artificial Sequence: Synthetic oligonucleotide
cuaaggcguuccacagcuc

SEQ ID NO: 174092 - RNA, 19 nt, Artificial Sequence
  Description of Artificial Sequence: Synthetic oligonucleotide
uggcaacgucacacagucu

SEQ ID NO: 174093 - RNA, 19 nt, Artificial Sequence
  Description of Artificial Sequence: Synthetic oligonucleotide
cuaaugccuugucccagaa

SEQ ID NO: 174094 - RNA, 19 nt, Artificial Sequence
  Description of Artificial Sequence: Synthetic oligonucleotide
agcccgggguggucgcuuc

SEQ ID NO: 174095 - RNA, 19 nt, Artificial Sequence
  Description of Artificial Sequence: Synthetic oligonucleotide
uucucccgugcacguugac

SEQ ID NO: 174096 - RNA, 19 nt, Artificial Sequence
  Description of Artificial Sequence: Synthetic oligonucleotide
ggcuggugaaugcuauauc

SEQ ID NO: 174097 - RNA, 19 nt, Artificial Sequence
  Description of Artificial Sequence: Synthetic oligonucleotide
aggcccgucuaagcuguag

SEQ ID NO: 174098 - RNA, 19 nt, Artificial Sequence
  Description of Artificial Sequence: Synthetic oligonucleotide
guacacugggcgaacuucu

SEQ ID NO: 174099 - RNA, 19 nt, Artificial Sequence
  Description of Artificial Sequence: Synthetic oligonucleotide
gucccugauauaacuggaa

SEQ ID NO: 174100 - RNA, 19 nt, Artificial Sequence
  Description of Artificial Sequence: Synthetic oligonucleotide
gacgaccuucagagcagac

SEQ ID NO: 174101 - RNA, 19 nt, Artificial Sequence
  Description of Artificial Sequence: Synthetic oligonucleotide
guccgucuaaugccuuguc

SEQ ID NO: 174102 - RNA, 19 nt, Artificial Sequence
  Description of Artificial Sequence: Synthetic oligonucleotide
gguccacguuugcuguugc

SEQ ID NO: 174103 - RNA, 19 nt, Artificial Sequence
  Description of Artificial Sequence: Synthetic oligonucleotide
cuucggcacucugucgcac

SEQ ID NO: 174104 - RNA, 19 nt, Artificial Sequence
  Description of Artificial Sequence: Synthetic oligonucleotide
gauccggauucugcuaacu

SEQ ID NO: 174105 - RNA, 19 nt, Artificial Sequence
  Description of Artificial Sequence: Synthetic oligonucleotide
cagauggcguccagacgca

SEQ ID NO: 174106 - RNA, 19 nt, Artificial Sequence
  Description of Artificial Sequence: Synthetic oligonucleotide
acggcccgugccaaguuca

SEQ ID NO: 174107 - RNA, 19 nt, Artificial Sequence
  Description of Artificial Sequence: Synthetic oligonucleotide
acgccccuuggggaguggg

SEQ ID NO: 174108 - RNA, 19 nt, Artificial Sequence
  Description of Artificial Sequence: Synthetic oligonucleotide
caugcccgugaugacuuca

SEQ ID NO: 174109 - RNA, 19 nt, Artificial Sequence
  Description of Artificial Sequence: Synthetic oligonucleotide
ccacuucggcacucugucg

SEQ ID NO: 174110 - RNA, 19 nt, Artificial Sequence
  Description of Artificial Sequence: Synthetic oligonucleotide
agaucgucacuuggucaaa

SEQ ID NO: 174111 - RNA, 19 nt, Artificial Sequence
  Description of Artificial Sequence: Synthetic oligonucleotide
gucgcacagaccacuggaa

SEQ ID NO: 174112 - RNA, 19 nt, Artificial Sequence
  Description of Artificial Sequence: Synthetic oligonucleotide
cuugacaucccucgacguu

SEQ ID NO: 174113 - RNA, 19 nt, Artificial Sequence
  Description of Artificial Sequence: Synthetic oligonucleotide
ggccacgacgaugacaaaa

SEQ ID NO: 174114 - RNA, 19 nt, Artificial Sequence
  Description of Artificial Sequence: Synthetic oligonucleotide
gggccgaccacagcuaaca

SEQ ID NO: 174115 - RNA, 19 nt, Artificial Sequence
  Description of Artificial Sequence: Synthetic oligonucleotide
gcguaggauaaggccaagc

SEQ ID NO: 174116 - RNA, 19 nt, Artificial Sequence
  Description of Artificial Sequence: Synthetic oligonucleotide
cccgucuaagcuguaggug

SEQ ID NO: 174117 - RNA, 19 nt, Artificial Sequence
  Description of Artificial Sequence: Synthetic oligonucleotide
cguugacgagcccacuggc

SEQ ID NO: 174118 - RNA, 19 nt, Artificial Sequence
  Description of Artificial Sequence: Synthetic oligonucleotide
cccucgacguuucuaagaa

SEQ ID NO: 174119 - RNA, 19 nt, Artificial Sequence
  Description of Artificial Sequence: Synthetic oligonucleotide
ccagacgcacggcaaacca

SEQ ID NO: 174120 - RNA, 19 nt, Artificial Sequence
  Description of Artificial Sequence: Synthetic oligonucleotide
gcgguaaaaucuugcacau

SEQ ID NO: 174121 - RNA, 19 nt, Artificial Sequence
  Description of Artificial Sequence: Synthetic oligonucleotide
cgacguugucagaaacaag

SEQ ID NO: 174122 - RNA, 19 nt, Artificial Sequence
  Description of Artificial Sequence: Synthetic oligonucleotide
guguucagucugugagcaa

SEQ ID NO: 174123 - RNA, 19 nt, Artificial Sequence
  Description of Artificial Sequence: Synthetic oligonucleotide
agacggcccgugccaaguu

SEQ ID NO: 174124 - RNA, 19 nt, Artificial Sequence
  Description of Artificial Sequence: Synthetic oligonucleotide
cuuuguacgcccggauggu

SEQ ID NO: 174125 - RNA, 19 nt, Artificial Sequence
  Description of Artificial Sequence: Synthetic oligonucleotide
gacgcacggcaaaccaucu

SEQ ID NO: 174126 - RNA, 19 nt, Artificial Sequence
  Description of Artificial Sequence: Synthetic oligonucleotide
cugggccgaccacagcuaa

SEQ ID NO: 174127 - RNA, 19 nt, Artificial Sequence
  Description of Artificial Sequence: Synthetic oligonucleotide
acugggccgaccacagcua

SEQ ID NO: 174128 - RNA, 19 nt, Artificial Sequence
  Description of Artificial Sequence: Synthetic oligonucleotide
uuguggacuccaggcgcuu

SEQ ID NO: 174129 - RNA, 19 nt, Artificial Sequence
  Description of Artificial Sequence: Synthetic oligonucleotide
cgucuaaugccuuguccca

SEQ ID NO: 174130 - RNA, 19 nt, Artificial Sequence
  Description of Artificial Sequence: Synthetic oligonucleotide
gcaaaacauauggcucauc

SEQ ID NO: 174131 - RNA, 19 nt, Artificial Sequence
  Description of Artificial Sequence: Synthetic oligonucleotide
ccgcauuguuccagugaac

SEQ ID NO: 174132 - RNA, 19 nt, Artificial Sequence
  Description of Artificial Sequence: Synthetic oligonucleotide
guacgcccggaugguccag

SEQ ID NO: 174133 - RNA, 19 nt, Artificial Sequence
  Description of Artificial Sequence: Synthetic oligonucleotide
cccaagaccugacauuagu

SEQ ID NO: 174134 - RNA, 19 nt, Artificial Sequence
  Description of Artificial Sequence: Synthetic oligonucleotide
ucguaaccacagggcuggu

SEQ ID NO: 174135 - RNA, 19 nt, Artificial Sequence
  Description of Artificial Sequence: Synthetic oligonucleotide
ggcguaggauaaggccaag

SEQ ID NO: 174136 - RNA, 19 nt, Artificial Sequence
  Description of Artificial Sequence: Synthetic oligonucleotide
gcccgucuaagcuguaggu

SEQ ID NO: 174137 - RNA, 19 nt, Artificial Sequence
  Description of Artificial Sequence: Synthetic oligonucleotide
gagguaugauugacauuuu

SEQ ID NO: 174138 - RNA, 19 nt, Artificial Sequence
  Description of Artificial Sequence: Synthetic oligonucleotide
ggaggcccgucuaagcugu

SEQ ID NO: 174139 - RNA, 19 nt, Artificial Sequence
  Description of Artificial Sequence: Synthetic oligonucleotide
gguagacggcccgugccaa

SEQ ID NO: 174140 - RNA, 19 nt, Artificial Sequence
  Description of Artificial Sequence: Synthetic oligonucleotide
gggcuggugaaugcuauau

SEQ ID NO: 174141 - RNA, 19 nt, Artificial Sequence
  Description of Artificial Sequence: Synthetic oligonucleotide
gcgauucucccgugcacgu

SEQ ID NO: 174142 - RNA, 19 nt, Artificial Sequence
  Description of Artificial Sequence: Synthetic oligonucleotide
aggccacgacgaugacaaa

SEQ ID NO: 174143 - RNA, 19 nt, Artificial Sequence
  Description of Artificial Sequence: Synthetic oligonucleotide
gcgugagggcguaggauaa

SEQ ID NO: 174144 - RNA, 19 nt, Artificial Sequence
  Description of Artificial Sequence: Synthetic oligonucleotide
cacgccccuuggggagugg

SEQ ID NO: 174145 - RNA, 19 nt, Artificial Sequence
  Description of Artificial Sequence: Synthetic oligonucleotide
ggccgaccacagcuaacaa

SEQ ID NO: 174146 - RNA, 19 nt, Artificial Sequence
  Description of Artificial Sequence: Synthetic oligonucleotide
cguaaccacagggcuggug

SEQ ID NO: 174147 - RNA, 19 nt, Artificial Sequence
  Description of Artificial Sequence: Synthetic oligonucleotide
ggagaauaccggacuccgu

SEQ ID NO: 174148 - RNA, 19 nt, Artificial Sequence
  Description of Artificial Sequence: Synthetic oligonucleotide
ccucgcaaggcacacuaau

SEQ ID NO: 174149 - RNA, 19 nt, Artificial Sequence
  Description of Artificial Sequence: Synthetic oligonucleotide
ccucgacguuucuaagaaa

SEQ ID NO: 174150 - RNA, 19 nt, Artificial Sequence
  Description of Artificial Sequence: Synthetic oligonucleotide
gguucggaguccgucuaau

SEQ ID NO: 174151 - RNA, 19 nt, Artificial Sequence
  Description of Artificial Sequence: Synthetic oligonucleotide
cuguugccucgucaaugau

SEQ ID NO: 174152 - RNA, 19 nt, Artificial Sequence
  Description of Artificial Sequence: Synthetic oligonucleotide
ccggcaccucaaaaucaga

SEQ ID NO: 174153 - RNA, 19 nt, Artificial Sequence
  Description of Artificial Sequence: Synthetic oligonucleotide
cguaggcgauucucccgug

SEQ ID NO: 174154 - RNA, 19 nt, Artificial Sequence
  Description of Artificial Sequence: Synthetic oligonucleotide
cgucgacggcacugagggg

SEQ ID NO: 174155 - RNA, 19 nt, Artificial Sequence
  Description of Artificial Sequence: Synthetic oligonucleotide
gggcgaacuucucccggau

SEQ ID NO: 174156 - RNA, 19 nt, Artificial Sequence
  Description of Artificial Sequence: Synthetic oligonucleotide
cuuuggcccuagagucuuu

SEQ ID NO: 174157 - RNA, 19 nt, Artificial Sequence
  Description of Artificial Sequence: Synthetic oligonucleotide
gcacgccccuuggggagug

SEQ ID NO: 174158 - RNA, 19 nt, Artificial Sequence
  Description of Artificial Sequence: Synthetic oligonucleotide
ccaggcguacaucuuuauu

SEQ ID NO: 174159 - RNA, 19 nt, Artificial Sequence
  Description of Artificial Sequence: Synthetic oligonucleotide
ggagagcaacuggcaacgu

SEQ ID NO: 174160 - RNA, 19 nt, Artificial Sequence
  Description of Artificial Sequence: Synthetic oligonucleotide
cccucgcaaggcacacuaa

SEQ ID NO: 174161 - RNA, 19 nt, Artificial Sequence
  Description of Artificial Sequence: Synthetic oligonucleotide
gaggcccgucuaagcugua

SEQ ID NO: 174162 - RNA, 19 nt, Artificial Sequence
  Description of Artificial Sequence: Synthetic oligonucleotide
cccggaucuuuuguuguau

SEQ ID NO: 174163 - RNA, 19 nt, Artificial Sequence
  Description of Artificial Sequence: Synthetic oligonucleotide
cagugacgacuugccugcu

SEQ ID NO: 174164 - RNA, 19 nt, Artificial Sequence
  Description of Artificial Sequence: Synthetic oligonucleotide
cccaggcguacaucuuuau

SEQ ID NO: 174165 - RNA, 19 nt, Artificial Sequence
  Description of Artificial Sequence: Synthetic oligonucleotide
gcacguugacgagcccacu

SEQ ID NO: 174166 - RNA, 19 nt, Artificial Sequence
  Description of Artificial Sequence: Synthetic oligonucleotide
cgcccggaugguccagagu

SEQ ID NO: 174167 - RNA, 19 nt, Artificial Sequence
  Description of Artificial Sequence: Synthetic oligonucleotide
cgauucucccgugcacguu

SEQ ID NO: 174168 - RNA, 19 nt, Artificial Sequence
  Description of Artificial Sequence: Synthetic oligonucleotide
ucuauaauaguuauuaugc

SEQ ID NO: 174169 - RNA, 19 nt, Artificial Sequence
  Description of Artificial Sequence: Synthetic oligonucleotide
uuuaccaugaugcauaaag

SEQ ID NO: 174170 - RNA, 19 nt, Artificial Sequence
  Description of Artificial Sequence: Synthetic oligonucleotide
ugaaguuucccacacaagg

SEQ ID NO: 174171 - RNA, 19 nt, Artificial Sequence
  Description of Artificial Sequence: Synthetic oligonucleotide
uuagaauucacuucaauga

SEQ ID NO: 174172 - RNA, 19 nt, Artificial Sequence
  Description of Artificial Sequence: Synthetic oligonucleotide
uuaacucuaagucuccugg

SEQ ID NO: 174173 - RNA, 19 nt, Artificial Sequence
  Description of Artificial Sequence: Synthetic oligonucleotide
uuuagaauucacuucaaug

SEQ ID NO: 174174 - RNA, 19 nt, Artificial Sequence
  Description of Artificial Sequence: Synthetic oligonucleotide
uuuagucucacaauacggg

SEQ ID NO: 174175 - RNA, 19 nt, Artificial Sequence
  Description of Artificial Sequence: Synthetic oligonucleotide
ucuaaaugacucaauauca

SEQ ID NO: 174176 - RNA, 19 nt, Artificial Sequence
  Description of Artificial Sequence: Synthetic oligonucleotide
agcuauauaauggaggugc

SEQ ID NO: 174177 - RNA, 19 nt, Artificial Sequence
  Description of Artificial Sequence: Synthetic oligonucleotide
auaauaguuauuaugcucg

SEQ ID NO: 174178 - RNA, 19 nt, Artificial Sequence
  Description of Artificial Sequence: Synthetic oligonucleotide
uuucaagaaaacaucagga

SEQ ID NO: 174179 - RNA, 19 nt, Artificial Sequence
  Description of Artificial Sequence: Synthetic oligonucleotide
cuaggugucugaaugaucg

SEQ ID NO: 174180 - RNA, 19 nt, Artificial Sequence
  Description of Artificial Sequence: Synthetic oligonucleotide
aacaccucguaccauauag

SEQ ID NO: 174181 - RNA, 19 nt, Artificial Sequence
  Description of Artificial Sequence: Synthetic oligonucleotide
aggauauccauucugaaug

SEQ ID NO: 174182 - RNA, 19 nt, Artificial Sequence
  Description of Artificial Sequence: Synthetic oligonucleotide
uauuuguggagacaguaag

SEQ ID NO: 174183 - RNA, 19 nt, Artificial Sequence
  Description of Artificial Sequence: Synthetic oligonucleotide
uuagacucacaaaugacca

SEQ ID NO: 174184 - RNA, 19 nt, Artificial Sequence
  Description of Artificial Sequence: Synthetic oligonucleotide
agcuuguuaccacagaagg

SEQ ID NO: 174185 - RNA, 19 nt, Artificial Sequence
  Description of Artificial Sequence: Synthetic oligonucleotide
uacguucucacauugaagu

SEQ ID NO: 174186 - RNA, 19 nt, Artificial Sequence
  Description of Artificial Sequence: Synthetic oligonucleotide
uauucuggcaaggauaucc

SEQ ID NO: 174187 - RNA, 19 nt, Artificial Sequence
  Description of Artificial Sequence: Synthetic oligonucleotide
aaccaaauuucccugagau

SEQ ID NO: 174188 - RNA, 19 nt, Artificial Sequence
  Description of Artificial Sequence: Synthetic oligonucleotide
ucauaauucaggacagaag

SEQ ID NO: 174189 - RNA, 19 nt, Artificial Sequence
  Description of Artificial Sequence: Synthetic oligonucleotide
uauuaugcucgagagaucc

SEQ ID NO: 174190 - RNA, 19 nt, Artificial Sequence
  Description of Artificial Sequence: Synthetic oligonucleotide
cacauuaaguucauuagac

SEQ ID NO: 174191 - RNA, 19 nt, Artificial Sequence
  Description of Artificial Sequence: Synthetic oligonucleotide
auaguuauuaugcucgaga

SEQ ID NO: 174192 - RNA, 19 nt, Artificial Sequence
  Description of Artificial Sequence: Synthetic oligonucleotide
ucaauuaaagcgacgcuac

SEQ ID NO: 174193 - RNA, 19 nt, Artificial Sequence
  Description of Artificial Sequence: Synthetic oligonucleotide
uaguugaaagaucauaaaa

SEQ ID NO: 174194 - RNA, 19 nt, Artificial Sequence
  Description of Artificial Sequence: Synthetic oligonucleotide
ugcgucauaauacuggcac

SEQ ID NO: 174195 - RNA, 19 nt, Artificial Sequence
  Description of Artificial Sequence: Synthetic oligonucleotide
uuucuaacagcucacccga

SEQ ID NO: 174196 - RNA, 19 nt, Artificial Sequence
  Description of Artificial Sequence: Synthetic oligonucleotide
cauaguuggaagagaaagg

SEQ ID NO: 174197 - RNA, 19 nt, Artificial Sequence
  Description of Artificial Sequence: Synthetic oligonucleotide
uaacugaauacacaccaug

SEQ ID NO: 174198 - RNA, 19 nt, Artificial Sequence
  Description of Artificial Sequence: Synthetic oligonucleotide
cuuauugcuauuacacacc

SEQ ID NO: 174199 - RNA, 19 nt, Artificial Sequence
  Description of Artificial Sequence: Synthetic oligonucleotide
uuagugucaauaucauucc

SEQ ID NO: 174200 - RNA, 19 nt, Artificial Sequence
  Description of Artificial Sequence: Synthetic oligonucleotide
ucacaaauucucaaguggu

SEQ ID NO: 174201 - RNA, 19 nt, Artificial Sequence
  Description of Artificial Sequence: Synthetic oligonucleotide
ugaagcaaucucuuggggc

SEQ ID NO: 174202 - RNA, 19 nt, Artificial Sequence
  Description of Artificial Sequence: Synthetic oligonucleotide
augacuaagaagaacaaca

SEQ ID NO: 174203 - RNA, 19 nt, Artificial Sequence
  Description of Artificial Sequence: Synthetic oligonucleotide
cauaauacuggcacaugcc

SEQ ID NO: 174204 - RNA, 19 nt, Artificial Sequence
  Description of Artificial Sequence: Synthetic oligonucleotide
aagaugaccugacacugug

SEQ ID NO: 174205 - RNA, 19 nt, Artificial Sequence
  Description of Artificial Sequence: Synthetic oligonucleotide
cuucgggacauugagaagg

SEQ ID NO: 174206 - RNA, 19 nt, Artificial Sequence
  Description of Artificial Sequence: Synthetic oligonucleotide
ucgugagcaacaauggaug

SEQ ID NO: 174207 - RNA, 19 nt, Artificial Sequence
  Description of Artificial Sequence: Synthetic oligonucleotide
uaaugauaacugaagucga

SEQ ID NO: 174208 - RNA, 19 nt, Artificial Sequence
  Description of Artificial Sequence: Synthetic oligonucleotide
caacucgugagcaacaaug

SEQ ID NO: 174209 - RNA, 19 nt, Artificial Sequence
  Description of Artificial Sequence: Synthetic oligonucleotide
ucaauccgcaccuaucugc

SEQ ID NO: 174210 - RNA, 19 nt, Artificial Sequence
  Description of Artificial Sequence: Synthetic oligonucleotide
agauccugagaauggaauc

SEQ ID NO: 174211 - RNA, 19 nt, Artificial Sequence
  Description of Artificial Sequence: Synthetic oligonucleotide
auaauacuggcacaugcca

SEQ ID NO: 174212 - RNA, 19 nt, Artificial Sequence
  Description of Artificial Sequence: Synthetic oligonucleotide
uguacguucucacauugaa

SEQ ID NO: 174213 - RNA, 19 nt, Artificial Sequence
  Description of Artificial Sequence: Synthetic oligonucleotide
caugaccuaguaauugugg

SEQ ID NO: 174214 - RNA, 19 nt, Artificial Sequence
  Description of Artificial Sequence: Synthetic oligonucleotide
agacauuacuggcaguuag

SEQ ID NO: 174215 - RNA, 19 nt, Artificial Sequence
  Description of Artificial Sequence: Synthetic oligonucleotide
aacaauggaugcaaacguc

SEQ ID NO: 174216 - RNA, 19 nt, Artificial Sequence
  Description of Artificial Sequence: Synthetic oligonucleotide
ugagcuuacaagugcuucc

SEQ ID NO: 174217 - RNA, 19 nt, Artificial Sequence
  Description of Artificial Sequence: Synthetic oligonucleotide
ucauuuuaauacagcugag

SEQ ID NO: 174218 - RNA, 19 nt, Artificial Sequence
  Description of Artificial Sequence: Synthetic oligonucleotide
ugauaacugaagucgauua

SEQ ID NO: 174219 - RNA, 19 nt, Artificial Sequence
  Description of Artificial Sequence: Synthetic oligonucleotide
gcuauuacacaccccaugg

SEQ ID NO: 174220 - RNA, 19 nt, Artificial Sequence
  Description of Artificial Sequence: Synthetic oligonucleotide
ugcuauuacacaccccaug

SEQ ID NO: 174221 - RNA, 19 nt, Artificial Sequence
  Description of Artificial Sequence: Synthetic oligonucleotide
aauaguuauuaugcucgag

SEQ ID NO: 174222 - RNA, 19 nt, Artificial Sequence
  Description of Artificial Sequence: Synthetic oligonucleotide
gaguugagaguuaaagugc

SEQ ID NO: 174223 - RNA, 19 nt, Artificial Sequence
  Description of Artificial Sequence: Synthetic oligonucleotide
auauaauggaggugcagga

SEQ ID NO: 174224 - RNA, 19 nt, Artificial Sequence
  Description of Artificial Sequence: Synthetic oligonucleotide
cuuugcauuguauguuggg

SEQ ID NO: 174225 - RNA, 19 nt, Artificial Sequence
  Description of Artificial Sequence: Synthetic oligonucleotide
auagugugcacuucaauua

SEQ ID NO: 174226 - RNA, 19 nt, Artificial Sequence
  Description of Artificial Sequence: Synthetic oligonucleotide
cacauuaaucccaccggcg

SEQ ID NO: 174227 - RNA, 19 nt, Artificial Sequence
  Description of Artificial Sequence: Synthetic oligonucleotide
acaccccaacauuuggugc

SEQ ID NO: 174228 - RNA, 19 nt, Artificial Sequence
  Description of Artificial Sequence: Synthetic oligonucleotide
uuagucaguuuuccuaggu

SEQ ID NO: 174229 - RNA, 19 nt, Artificial Sequence
  Description of Artificial Sequence: Synthetic oligonucleotide
cucgggucuacuaaacacc

SEQ ID NO: 174230 - RNA, 19 nt, Artificial Sequence
  Description of Artificial Sequence: Synthetic oligonucleotide
gaagguucuccguaguuca

SEQ ID NO: 174231 - RNA, 19 nt, Artificial Sequence
  Description of Artificial Sequence: Synthetic oligonucleotide
cuagguuaauacauguuca

SEQ ID NO: 174232 - RNA, 19 nt, Artificial Sequence
  Description of Artificial Sequence: Synthetic oligonucleotide
acuauuaaugauaacugaa

SEQ ID NO: 174233 - RNA, 19 nt, Artificial Sequence
  Description of Artificial Sequence: Synthetic oligonucleotide
agcacaucuuagcaaaugu

SEQ ID NO: 174234 - RNA, 19 nt, Artificial Sequence
  Description of Artificial Sequence: Synthetic oligonucleotide
guaaauggcuguuaaucca

SEQ ID NO: 174235 - RNA, 19 nt, Artificial Sequence
  Description of Artificial Sequence: Synthetic oligonucleotide
agaagguucuccguaguuc

SEQ ID NO: 174236 - RNA, 19 nt, Artificial Sequence
  Description of Artificial Sequence: Synthetic oligonucleotide
ucgagagauccugagaaug

SEQ ID NO: 174237 - RNA, 19 nt, Artificial Sequence
  Description of Artificial Sequence: Synthetic oligonucleotide
acacugugcgucauaauac

SEQ ID NO: 174238 - RNA, 19 nt, Artificial Sequence
  Description of Artificial Sequence: Synthetic oligonucleotide
ugauucugaucaauccgca

SEQ ID NO: 174239 - RNA, 19 nt, Artificial Sequence
  Description of Artificial Sequence: Synthetic oligonucleotide
aguuauuaugcucgagaga

SEQ ID NO: 174240 - RNA, 19 nt, Artificial Sequence
  Description of Artificial Sequence: Synthetic oligonucleotide
uaugacccaacucgugagc

SEQ ID NO: 174241 - RNA, 19 nt, Artificial Sequence
  Description of Artificial Sequence: Synthetic oligonucleotide
agcgacgcuacugcaaugc

SEQ ID NO: 174242 - RNA, 19 nt, Artificial Sequence
  Description of Artificial Sequence: Synthetic oligonucleotide
uuccuagguuaauacaugu

SEQ ID NO: 174243 - RNA, 19 nt, Artificial Sequence
  Description of Artificial Sequence: Synthetic oligonucleotide
augaccuaguaauuguggu

SEQ ID NO: 174244 - RNA, 19 nt, Artificial Sequence
  Description of Artificial Sequence: Synthetic oligonucleotide
cucggggacaucaacacuc

SEQ ID NO: 174245 - RNA, 19 nt, Artificial Sequence
  Description of Artificial Sequence: Synthetic oligonucleotide
uaauaguuauuaugcucga

SEQ ID NO: 174246 - RNA, 19 nt, Artificial Sequence
  Description of Artificial Sequence: Synthetic oligonucleotide
uuaugcucgagagauccug

SEQ ID NO: 174247 - RNA, 19 nt, Artificial Sequence
  Description of Artificial Sequence: Synthetic oligonucleotide
uuaugucaugaccuaguaa

SEQ ID NO: 174248 - RNA, 19 nt, Artificial Sequence
  Description of Artificial Sequence: Synthetic oligonucleotide
gaccuaguaauugugguuc

SEQ ID NO: 174249 - RNA, 19 nt, Artificial Sequence
  Description of Artificial Sequence: Synthetic oligonucleotide
uggcauauccuguacguuc

SEQ ID NO: 174250 - RNA, 19 nt, Artificial Sequence
  Description of Artificial Sequence: Synthetic oligonucleotide
ucgccauaugcacauucag

SEQ ID NO: 174251 - RNA, 19 nt, Artificial Sequence
  Description of Artificial Sequence: Synthetic oligonucleotide
cugagaugguuacucacag

SEQ ID NO: 174252 - RNA, 19 nt, Artificial Sequence
  Description of Artificial Sequence: Synthetic oligonucleotide
uuguuauucuggcaaggau

SEQ ID NO: 174253 - RNA, 19 nt, Artificial Sequence
  Description of Artificial Sequence: Synthetic oligonucleotide
ugaccaaagaggagguuuc

SEQ ID NO: 174254 - RNA, 19 nt, Artificial Sequence
  Description of Artificial Sequence: Synthetic oligonucleotide
gauaacugaagucgauuaa

SEQ ID NO: 174255 - RNA, 19 nt, Artificial Sequence
  Description of Artificial Sequence: Synthetic oligonucleotide
uauugcuauuacacacccc

SEQ ID NO: 174256 - RNA, 19 nt, Artificial Sequence
  Description of Artificial Sequence: Synthetic oligonucleotide
ugaucaauccgcaccuauc

SEQ ID NO: 174257 - RNA, 19 nt, Artificial Sequence
  Description of Artificial Sequence: Synthetic oligonucleotide
gagggagcuauauaaugga

SEQ ID NO: 174258 - RNA, 19 nt, Artificial Sequence
  Description of Artificial Sequence: Synthetic oligonucleotide
caccccaacauuuggugcc

SEQ ID NO: 174259 - RNA, 19 nt, Artificial Sequence
  Description of Artificial Sequence: Synthetic oligonucleotide
ugguucuugugaaaucuuc

SEQ ID NO: 174260 - RNA, 19 nt, Artificial Sequence
  Description of Artificial Sequence: Synthetic oligonucleotide
uagugugcacuucaauuaa

SEQ ID NO: 174261 - RNA, 19 nt, Artificial Sequence
  Description of Artificial Sequence: Synthetic oligonucleotide
ccucguaccauauagugug

SEQ ID NO: 174262 - RNA, 19 nt, Artificial Sequence
  Description of Artificial Sequence: Synthetic oligonucleotide
caccucguaccauauagug

SEQ ID NO: 174263 - RNA, 19 nt, Artificial Sequence
  Description of Artificial Sequence: Synthetic oligonucleotide
ugaaugaucgcuggcacua

SEQ ID NO: 174264 - RNA, 19 nt, Artificial Sequence
  Description of Artificial Sequence: Synthetic oligonucleotide
ugaagucgauuaagucagg

SEQ ID NO: 174265 - RNA, 19 nt, Artificial Sequence
  Description of Artificial Sequence: Synthetic oligonucleotide
ccuagguuaauacauguuc

SEQ ID NO: 174266 - RNA, 19 nt, Artificial Sequence
  Description of Artificial Sequence: Synthetic oligonucleotide
uucgggacauugagaaggc

SEQ ID NO: 174267 - RNA, 19 nt, Artificial Sequence
  Description of Artificial Sequence: Synthetic oligonucleotide
gaucaauccgcaccuaucu

SEQ ID NO: 174268 - RNA, 19 nt, Artificial Sequence
  Description of Artificial Sequence: Synthetic oligonucleotide
gcuacugcaaugcuuuacc

SEQ ID NO: 174269 - RNA, 19 nt, Artificial Sequence
  Description of Artificial Sequence: Synthetic oligonucleotide
cagaauucaugauacagcu

SEQ ID NO: 174270 - RNA, 19 nt, Artificial Sequence
  Description of Artificial Sequence: Synthetic oligonucleotide
cauuuugugccuucauuca

SEQ ID NO: 174271 - RNA, 19 nt, Artificial Sequence
  Description of Artificial Sequence: Synthetic oligonucleotide
aauccgcaccuaucugcuc

SEQ ID NO: 174272 - RNA, 19 nt, Artificial Sequence
  Description of Artificial Sequence: Synthetic oligonucleotide
aagaagguucuccguaguu

SEQ ID NO: 174273 - RNA, 19 nt, Artificial Sequence
  Description of Artificial Sequence: Synthetic oligonucleotide
cacaccccaacauuuggug

SEQ ID NO: 174274 - RNA, 19 nt, Artificial Sequence
  Description of Artificial Sequence: Synthetic oligonucleotide
cacagucauaauucaggac

SEQ ID NO: 174275 - RNA, 19 nt, Artificial Sequence
  Description of Artificial Sequence: Synthetic oligonucleotide
uuauuaugcucgagagauc

SEQ ID NO: 174276 - RNA, 19 nt, Artificial Sequence
  Description of Artificial Sequence: Synthetic oligonucleotide
ucugcucgggucuacuaaa

SEQ ID NO: 174277 - RNA, 19 nt, Artificial Sequence
  Description of Artificial Sequence: Synthetic oligonucleotide
uugaaccaaagaugaccug

SEQ ID NO: 174278 - RNA, 19 nt, Artificial Sequence
  Description of Artificial Sequence: Synthetic oligonucleotide
uugagcuuacaagugcuuc

SEQ ID NO: 174279 - RNA, 19 nt, Artificial Sequence
  Description of Artificial Sequence: Synthetic oligonucleotide
aucaauccgcaccuaucug

SEQ ID NO: 174280 - RNA, 19 nt, Artificial Sequence
  Description of Artificial Sequence: Synthetic oligonucleotide
ugagaugguuacucacaga

SEQ ID NO: 174281 - RNA, 19 nt, Artificial Sequence
  Description of Artificial Sequence: Synthetic oligonucleotide
uacucacucccggagaaac

SEQ ID NO: 174282 - RNA, 19 nt, Artificial Sequence
  Description of Artificial Sequence: Synthetic oligonucleotide
ugcucgggucuacuaaaca

SEQ ID NO: 174283 - RNA, 19 nt, Artificial Sequence
  Description of Artificial Sequence: Synthetic oligonucleotide
augaucgcuggcacuauuc

SEQ ID NO: 174284 - RNA, 19 nt, Artificial Sequence
  Description of Artificial Sequence: Synthetic oligonucleotide
agacucacaaaugaccaaa

SEQ ID NO: 174285 - RNA, 19 nt, Artificial Sequence
  Description of Artificial Sequence: Synthetic oligonucleotide
ucuccguaguucauuucuc

SEQ ID NO: 174286 - RNA, 19 nt, Artificial Sequence
  Description of Artificial Sequence: Synthetic oligonucleotide
accgugauuugcccaaaca

SEQ ID NO: 174287 - RNA, 19 nt, Artificial Sequence
  Description of Artificial Sequence: Synthetic oligonucleotide
aauucaggacagaagcauu

SEQ ID NO: 174288 - RNA, 19 nt, Artificial Sequence
  Description of Artificial Sequence: Synthetic oligonucleotide
cuaaacaccucguaccaua

SEQ ID NO: 174289 - RNA, 19 nt, Artificial Sequence
  Description of Artificial Sequence: Synthetic oligonucleotide
uccaccgugauuugcccaa

SEQ ID NO: 174290 - RNA, 19 nt, Artificial Sequence
  Description of Artificial Sequence: Synthetic oligonucleotide
uccuagguuaauacauguu

SEQ ID NO: 174291 - RNA, 19 nt, Artificial Sequence
  Description of Artificial Sequence: Synthetic oligonucleotide
guacguucucacauugaag

SEQ ID NO: 174292 - RNA, 19 nt, Artificial Sequence
  Description of Artificial Sequence: Synthetic oligonucleotide
gaagucgauuaagucagga

SEQ ID NO: 174293 - RNA, 19 nt, Artificial Sequence
  Description of Artificial Sequence: Synthetic oligonucleotide
ucgauuaagucaggauuac

SEQ ID NO: 174294 - RNA, 19 nt, Artificial Sequence
  Description of Artificial Sequence: Synthetic oligonucleotide
guucucacauugaaguuuc

SEQ ID NO: 174295 - RNA, 19 nt, Artificial Sequence
  Description of Artificial Sequence: Synthetic oligonucleotide
gaucgcuggcacuauucca

SEQ ID NO: 174296 - RNA, 19 nt, Artificial Sequence
  Description of Artificial Sequence: Synthetic oligonucleotide
guauguugggccgcugucc

SEQ ID NO: 174297 - RNA, 19 nt, Artificial Sequence
  Description of Artificial Sequence: Synthetic oligonucleotide
uccgcaccuaucugcucgg

SEQ ID NO: 174298 - RNA, 19 nt, Artificial Sequence
  Description of Artificial Sequence: Synthetic oligonucleotide
cacuccuugggugugccgc

SEQ ID NO: 174299 - RNA, 19 nt, Artificial Sequence
  Description of Artificial Sequence: Synthetic oligonucleotide
acauuuggugccucggcua

SEQ ID NO: 174300 - RNA, 19 nt, Artificial Sequence
  Description of Artificial Sequence: Synthetic oligonucleotide
uguugggccgcuguccaca

SEQ ID NO: 174301 - RNA, 19 nt, Artificial Sequence
  Description of Artificial Sequence: Synthetic oligonucleotide
uuuggugccucggcuaggu

SEQ ID NO: 174302 - RNA, 19 nt, Artificial Sequence
  Description of Artificial Sequence: Synthetic oligonucleotide
gagcuauauaauggaggug

SEQ ID NO: 174303 - RNA, 19 nt, Artificial Sequence
  Description of Artificial Sequence: Synthetic oligonucleotide
accuaguaauugugguucu

SEQ ID NO: 174304 - RNA, 19 nt, Artificial Sequence
  Description of Artificial Sequence: Synthetic oligonucleotide
agguuaauacauguucaaa

SEQ ID NO: 174305 - RNA, 19 nt, Artificial Sequence
  Description of Artificial Sequence: Synthetic oligonucleotide
ucguaccauauagugugca

SEQ ID NO: 174306 - RNA, 19 nt, Artificial Sequence
  Description of Artificial Sequence: Synthetic oligonucleotide
agggagcuauauaauggag

SEQ ID NO: 174307 - RNA, 19 nt, Artificial Sequence
  Description of Artificial Sequence: Synthetic oligonucleotide
aucugcucgggucuacuaa

SEQ ID NO: 174308 - RNA, 19 nt, Artificial Sequence
  Description of Artificial Sequence: Synthetic oligonucleotide
cucguaccauauagugugc

SEQ ID NO: 174309 - RNA, 19 nt, Artificial Sequence
  Description of Artificial Sequence: Synthetic oligonucleotide
cauuguaacaguaggcuuu

SEQ ID NO: 174310 - RNA, 19 nt, Artificial Sequence
  Description of Artificial Sequence: Synthetic oligonucleotide
ugggccgcuguccacacuu

SEQ ID NO: 174311 - RNA, 19 nt, Artificial Sequence
  Description of Artificial Sequence: Synthetic oligonucleotide
gcucgggucuacuaaacac

SEQ ID NO: 174312 - RNA, 19 nt, Artificial Sequence
  Description of Artificial Sequence: Synthetic oligonucleotide
aagcgacgcuacugcaaug

SEQ ID NO: 174313 - RNA, 19 nt, Artificial Sequence
  Description of Artificial Sequence: Synthetic oligonucleotide
ccgugauuugcccaaacac

SEQ ID NO: 174314 - RNA, 19 nt, Artificial Sequence
  Description of Artificial Sequence: Synthetic oligonucleotide
gcuuacaagugcuuccuuc

SEQ ID NO: 174315 - RNA, 19 nt, Artificial Sequence
  Description of Artificial Sequence: Synthetic oligonucleotide
ccggagaaaccacaguugc

SEQ ID NO: 174316 - RNA, 19 nt, Artificial Sequence
  Description of Artificial Sequence: Synthetic oligonucleotide
guaucucucggcuccccac

SEQ ID NO: 174317 - RNA, 19 nt, Artificial Sequence
  Description of Artificial Sequence: Synthetic oligonucleotide
augacccaacucgugagca

SEQ ID NO: 174318 - RNA, 19 nt, Artificial Sequence
  Description of Artificial Sequence: Synthetic oligonucleotide
guuaccacagaagggcgca

SEQ ID NO: 174319 - RNA, 19 nt, Artificial Sequence
  Description of Artificial Sequence: Synthetic oligonucleotide
aaacaccucguaccauaua

SEQ ID NO: 174320 - RNA, 19 nt, Artificial Sequence
  Description of Artificial Sequence: Synthetic oligonucleotide
gcugucgagggacacuugc

SEQ ID NO: 174321 - RNA, 19 nt, Artificial Sequence
  Description of Artificial Sequence: Synthetic oligonucleotide
caucacauuuugugccuuc

SEQ ID NO: 174322 - RNA, 19 nt, Artificial Sequence
  Description of Artificial Sequence: Synthetic oligonucleotide
aucgcuggcacuauuccaa

SEQ ID NO: 174323 - RNA, 19 nt, Artificial Sequence
  Description of Artificial Sequence: Synthetic oligonucleotide
cgagagauccugagaaugg

SEQ ID NO: 174324 - RNA, 19 nt, Artificial Sequence
  Description of Artificial Sequence: Synthetic oligonucleotide
caaggauauccauucugaa

SEQ ID NO: 174325 - RNA, 19 nt, Artificial Sequence
  Description of Artificial Sequence: Synthetic oligonucleotide
acugugcgucauaauacug

SEQ ID NO: 174326 - RNA, 19 nt, Artificial Sequence
  Description of Artificial Sequence: Synthetic oligonucleotide
guacucggggacaucaaca

SEQ ID NO: 174327 - RNA, 19 nt, Artificial Sequence
  Description of Artificial Sequence: Synthetic oligonucleotide
guuacucacagaggccaug

SEQ ID NO: 174328 - RNA, 19 nt, Artificial Sequence
  Description of Artificial Sequence: Synthetic oligonucleotide
ggugucugaaugaucgcug

SEQ ID NO: 174329 - RNA, 19 nt, Artificial Sequence
  Description of Artificial Sequence: Synthetic oligonucleotide
gcaaggauauccauucuga

SEQ ID NO: 174330 - RNA, 19 nt, Artificial Sequence
  Description of Artificial Sequence: Synthetic oligonucleotide
accucguaccauauagugu

SEQ ID NO: 174331 - RNA, 19 nt, Artificial Sequence
  Description of Artificial Sequence: Synthetic oligonucleotide
uaucugcucgggucuacua

SEQ ID NO: 174332 - RNA, 19 nt, Artificial Sequence
  Description of Artificial Sequence: Synthetic oligonucleotide
acguucucacauugaaguu

SEQ ID NO: 174333 - RNA, 19 nt, Artificial Sequence
  Description of Artificial Sequence: Synthetic oligonucleotide
cagaggccaugauaauuuc

SEQ ID NO: 174334 - RNA, 19 nt, Artificial Sequence
  Description of Artificial Sequence: Synthetic oligonucleotide
gugagcaacaauggaugca

SEQ ID NO: 174335 - RNA, 19 nt, Artificial Sequence
  Description of Artificial Sequence: Synthetic oligonucleotide
cugcucgggucuacuaaac

SEQ ID NO: 174336 - RNA, 19 nt, Artificial Sequence
  Description of Artificial Sequence: Synthetic oligonucleotide
cgggacauugagaaggcag

SEQ ID NO: 174337 - RNA, 19 nt, Artificial Sequence
  Description of Artificial Sequence: Synthetic oligonucleotide
uuaaucccaccggcguggc

SEQ ID NO: 174338 - RNA, 19 nt, Artificial Sequence
  Description of Artificial Sequence: Synthetic oligonucleotide
auuuggugccucggcuagg

SEQ ID NO: 174339 - RNA, 19 nt, Artificial Sequence
  Description of Artificial Sequence: Synthetic oligonucleotide
caguuaauauaccuauuau

SEQ ID NO: 174340 - RNA, 19 nt, Artificial Sequence
  Description of Artificial Sequence: Synthetic oligonucleotide
uucccguaucucucggcuc

SEQ ID NO: 174341 - RNA, 19 nt, Artificial Sequence
  Description of Artificial Sequence: Synthetic oligonucleotide
ccuguacguucucacauug

SEQ ID NO: 174342 - RNA, 19 nt, Artificial Sequence
  Description of Artificial Sequence: Synthetic oligonucleotide
uucuaacagcucacccgau

SEQ ID NO: 174343 - RNA, 19 nt, Artificial Sequence
  Description of Artificial Sequence: Synthetic oligonucleotide
ggaauccaguaacugaaua

SEQ ID NO: 174344 - RNA, 19 nt, Artificial Sequence
  Description of Artificial Sequence: Synthetic oligonucleotide
ccacauuaaguucauuaga

SEQ ID NO: 174345 - RNA, 19 nt, Artificial Sequence
  Description of Artificial Sequence: Synthetic oligonucleotide
gaacaacaccaggagucca

SEQ ID NO: 174346 - RNA, 19 nt, Artificial Sequence
  Description of Artificial Sequence: Synthetic oligonucleotide
cgugauuugcccaaacaca

SEQ ID NO: 174347 - RNA, 19 nt, Artificial Sequence
  Description of Artificial Sequence: Synthetic oligonucleotide
gguuaugacccaacucgug

SEQ ID NO: 174348 - RNA, 19 nt, Artificial Sequence
  Description of Artificial Sequence: Synthetic oligonucleotide
cuuuagaauucacuucaau

SEQ ID NO: 174349 - RNA, 19 nt, Artificial Sequence
  Description of Artificial Sequence: Synthetic oligonucleotide
ccauauagugugcacuuca

SEQ ID NO: 174350 - RNA, 19 nt, Artificial Sequence
  Description of Artificial Sequence: Synthetic oligonucleotide
gaccugacacugugcguca

SEQ ID NO: 174351 - RNA, 19 nt, Artificial Sequence
  Description of Artificial Sequence: Synthetic oligonucleotide
cacccgauggaaggcauuc

SEQ ID NO: 174352 - RNA, 19 nt, Artificial Sequence
  Description of Artificial Sequence: Synthetic oligonucleotide
gucgccauaugcacauuca

SEQ ID NO: 174353 - RNA, 19 nt, Artificial Sequence
  Description of Artificial Sequence: Synthetic oligonucleotide
ccaacauuuggugccucgg

SEQ ID NO: 174354 - RNA, 19 nt, Artificial Sequence
  Description of Artificial Sequence: Synthetic oligonucleotide
auuaugcucgagagauccu

SEQ ID NO: 174355 - RNA, 19 nt, Artificial Sequence
  Description of Artificial Sequence: Synthetic oligonucleotide
acaccucguaccauauagu

SEQ ID NO: 174356 - RNA, 19 nt, Artificial Sequence
  Description of Artificial Sequence: Synthetic oligonucleotide
cuguacguucucacauuga

SEQ ID NO: 174357 - RNA, 19 nt, Artificial Sequence
  Description of Artificial Sequence: Synthetic oligonucleotide
cccggagaaaccacaguug

SEQ ID NO: 174358 - RNA, 19 nt, Artificial Sequence
  Description of Artificial Sequence: Synthetic oligonucleotide
cacugugcgucauaauacu

SEQ ID NO: 174359 - RNA, 19 nt, Artificial Sequence
  Description of Artificial Sequence: Synthetic oligonucleotide
gagcuuacaagugcuuccu

SEQ ID NO: 174360 - RNA, 19 nt, Artificial Sequence
  Description of Artificial Sequence: Synthetic oligonucleotide
cgugagcaacaauggaugc

SEQ ID NO: 174361 - RNA, 19 nt, Artificial Sequence
  Description of Artificial Sequence: Synthetic oligonucleotide
caauccgcaccuaucugcu

SEQ ID NO: 174362 - RNA, 19 nt, Artificial Sequence
  Description of Artificial Sequence: Synthetic oligonucleotide
uaaucccaccggcguggcu

SEQ ID NO: 174363 - RNA, 19 nt, Artificial Sequence
  Description of Artificial Sequence: Synthetic oligonucleotide
ucgggacauugagaaggca

SEQ ID NO: 174364 - RNA, 19 nt, Artificial Sequence
  Description of Artificial Sequence: Synthetic oligonucleotide
caccgugauuugcccaaac

SEQ ID NO: 174365 - RNA, 19 nt, Artificial Sequence
  Description of Artificial Sequence: Synthetic oligonucleotide
cguaccauauagugugcac

SEQ ID NO: 174366 - RNA, 19 nt, Artificial Sequence
  Description of Artificial Sequence: Synthetic oligonucleotide
caucaacacucauugguuu

SEQ ID NO: 174367 - RNA, 19 nt, Artificial Sequence
  Description of Artificial Sequence: Synthetic oligonucleotide
gcacuucaauuaaagcgac

SEQ ID NO: 174368 - RNA, 19 nt, Artificial Sequence
  Description of Artificial Sequence: Synthetic oligonucleotide
cacaaauucucaagugguu

SEQ ID NO: 174369 - RNA, 19 nt, Artificial Sequence
  Description of Artificial Sequence: Synthetic oligonucleotide
cugaaugaucgcuggcacu

SEQ ID NO: 174370 - RNA, 19 nt, Artificial Sequence
  Description of Artificial Sequence: Synthetic oligonucleotide
gacaggagucuguguaaau

SEQ ID NO: 174371 - RNA, 19 nt, Artificial Sequence
  Description of Artificial Sequence: Synthetic oligonucleotide
gcgucauaauacuggcaca

SEQ ID NO: 174372 - RNA, 19 nt, Artificial Sequence
  Description of Artificial Sequence: Synthetic oligonucleotide
gugcgucauaauacuggca

SEQ ID NO: 174373 - RNA, 19 nt, Artificial Sequence
  Description of Artificial Sequence: Synthetic oligonucleotide
uugggccgcuguccacacu

SEQ ID NO: 174374 - RNA, 19 nt, Artificial Sequence
  Description of Artificial Sequence: Synthetic oligonucleotide
cugucgagggacacuugcu

SEQ ID NO: 174375 - RNA, 19 nt, Artificial Sequence
  Description of Artificial Sequence: Synthetic oligonucleotide
ggcauauccuguacguucu

SEQ ID NO: 174376 - RNA, 19 nt, Artificial Sequence
  Description of Artificial Sequence: Synthetic oligonucleotide
cacaccccauggccgugac

SEQ ID NO: 174377 - RNA, 19 nt, Artificial Sequence
  Description of Artificial Sequence: Synthetic oligonucleotide
ccgagcaggaaccaaauuu

SEQ ID NO: 174378 - RNA, 19 nt, Artificial Sequence
  Description of Artificial Sequence: Synthetic oligonucleotide
acgcuacugcaaugcuuua

SEQ ID NO: 174379 - RNA, 19 nt, Artificial Sequence
  Description of Artificial Sequence: Synthetic oligonucleotide
gcauauccuguacguucuc

SEQ ID NO: 174380 - RNA, 19 nt, Artificial Sequence
  Description of Artificial Sequence: Synthetic oligonucleotide
guacucacucccggagaaa

SEQ ID NO: 174381 - RNA, 19 nt, Artificial Sequence
  Description of Artificial Sequence: Synthetic oligonucleotide
guccaucccucagugcugu

SEQ ID NO: 174382 - RNA, 19 nt, Artificial Sequence
  Description of Artificial Sequence: Synthetic oligonucleotide
gcucacccgauggaaggca

SEQ ID NO: 174383 - RNA, 19 nt, Artificial Sequence
  Description of Artificial Sequence: Synthetic oligonucleotide
cgcuacugcaaugcuuuac

SEQ ID NO: 174384 - RNA, 19 nt, Artificial Sequence
  Description of Artificial Sequence: Synthetic oligonucleotide
cucggcuaggugucugaau

SEQ ID NO: 174385 - RNA, 19 nt, Artificial Sequence
  Description of Artificial Sequence: Synthetic oligonucleotide
ccacaccccaacauuuggu

SEQ ID NO: 174386 - RNA, 19 nt, Artificial Sequence
  Description of Artificial Sequence: Synthetic oligonucleotide
ggcguggcuccuugaacau

SEQ ID NO: 174387 - RNA, 19 nt, Artificial Sequence
  Description of Artificial Sequence: Synthetic oligonucleotide
cccguaucucucggcuccc

SEQ ID NO: 174388 - RNA, 19 nt, Artificial Sequence
  Description of Artificial Sequence: Synthetic oligonucleotide
gcgacgcuacugcaaugcu

SEQ ID NO: 174389 - RNA, 19 nt, Artificial Sequence
  Description of Artificial Sequence: Synthetic oligonucleotide
ccguaucucucggcucccc

SEQ ID NO: 174390 - RNA, 19 nt, Artificial Sequence
  Description of Artificial Sequence: Synthetic oligonucleotide
gguuacucacagaggccau

SEQ ID NO: 174391 - RNA, 19 nt, Artificial Sequence
  Description of Artificial Sequence: Synthetic oligonucleotide
cguucucacauugaaguuu

SEQ ID NO: 174392 - RNA, 19 nt, Artificial Sequence
  Description of Artificial Sequence: Synthetic oligonucleotide
cccaacucgugagcaacaa

SEQ ID NO: 174393 - RNA, 19 nt, Artificial Sequence
  Description of Artificial Sequence: Synthetic oligonucleotide
caccggcguggcuccuuga

SEQ ID NO: 174394 - RNA, 19 nt, Artificial Sequence
  Description of Artificial Sequence: Synthetic oligonucleotide
ccgcaccuaucugcucggg

SEQ ID NO: 174395 - RNA, 19 nt, Artificial Sequence
  Description of Artificial Sequence: Synthetic oligonucleotide
gugccgcagucacacucuu

SEQ ID NO: 174396 - RNA, 19 nt, Artificial Sequence
  Description of Artificial Sequence: Synthetic oligonucleotide
ggccgagcaggaaccaaau

SEQ ID NO: 174397 - RNA, 19 nt, Artificial Sequence
  Description of Artificial Sequence: Synthetic oligonucleotide
gccgagcaggaaccaaauu

SEQ ID NO: 174398 - RNA, 19 nt, Artificial Sequence
  Description of Artificial Sequence: Synthetic oligonucleotide
ccuccgcacugcaacugcu

SEQ ID NO: 174399 - RNA, 19 nt, Artificial Sequence
  Description of Artificial Sequence: Synthetic oligonucleotide
ccucggcuaggugucugaa

SEQ ID NO: 174400 - RNA, 19 nt, Artificial Sequence
  Description of Artificial Sequence: Synthetic oligonucleotide
uuagauacaauaaaucuga

SEQ ID NO: 174401 - RNA, 19 nt, Artificial Sequence
  Description of Artificial Sequence: Synthetic oligonucleotide
uguuagauacaauaaaucu

SEQ ID NO: 174402 - RNA, 19 nt, Artificial Sequence
  Description of Artificial Sequence: Synthetic oligonucleotide
aacgguucuguuuaggcuc

SEQ ID NO: 174403 - RNA, 19 nt, Artificial Sequence
  Description of Artificial Sequence: Synthetic oligonucleotide
ugucauuuuacuccaagcc

SEQ ID NO: 174404 - RNA, 19 nt, Artificial Sequence
  Description of Artificial Sequence: Synthetic oligonucleotide
agcaagauauuuuagcauc

SEQ ID NO: 174405 - RNA, 19 nt, Artificial Sequence
  Description of Artificial Sequence: Synthetic oligonucleotide
uacaucgcuaaacaaagag

SEQ ID NO: 174406 - RNA, 19 nt, Artificial Sequence
  Description of Artificial Sequence: Synthetic oligonucleotide
ugguuaaucugcaaagagg

SEQ ID NO: 174407 - RNA, 19 nt, Artificial Sequence
  Description of Artificial Sequence: Synthetic oligonucleotide
aucacuuaaagccccacac

SEQ ID NO: 174408 - RNA, 19 nt, Artificial Sequence
  Description of Artificial Sequence: Synthetic oligonucleotide
guaacugucaccuaaugac

SEQ ID NO: 174409 - RNA, 19 nt, Artificial Sequence
  Description of Artificial Sequence: Synthetic oligonucleotide
aaucggaaaguaccagacc

SEQ ID NO: 174410 - RNA, 19 nt, Artificial Sequence
  Description of Artificial Sequence: Synthetic oligonucleotide
ucuauugcucccaacacca

SEQ ID NO: 174411 - RNA, 19 nt, Artificial Sequence
  Description of Artificial Sequence: Synthetic oligonucleotide
guggguaaaacugagaugc

SEQ ID NO: 174412 - RNA, 19 nt, Artificial Sequence
  Description of Artificial Sequence: Synthetic oligonucleotide
accuauucgaguucuaggg

SEQ ID NO: 174413 - RNA, 19 nt, Artificial Sequence
  Description of Artificial Sequence: Synthetic oligonucleotide
aagacuugcuccuagacua

SEQ ID NO: 174414 - RNA, 19 nt, Artificial Sequence
  Description of Artificial Sequence: Synthetic oligonucleotide
uguguaucacuuaaagccc

SEQ ID NO: 174415 - RNA, 19 nt, Artificial Sequence
  Description of Artificial Sequence: Synthetic oligonucleotide
augccuaugaucuguggcc

SEQ ID NO: 174416 - RNA, 19 nt, Artificial Sequence
  Description of Artificial Sequence: Synthetic oligonucleotide
gauagccuauguuagcagg

SEQ ID NO: 174417 - RNA, 19 nt, Artificial Sequence
  Description of Artificial Sequence: Synthetic oligonucleotide
aagacggugacaaaugaag

SEQ ID NO: 174418 - RNA, 19 nt, Artificial Sequence
  Description of Artificial Sequence: Synthetic oligonucleotide
gagauuguggguaaaacug

SEQ ID NO: 174419 - RNA, 19 nt, Artificial Sequence
  Description of Artificial Sequence: Synthetic oligonucleotide
aucgacgcuucucagaaac

SEQ ID NO: 174420 - RNA, 19 nt, Artificial Sequence
  Description of Artificial Sequence: Synthetic oligonucleotide
gaucuacuccuacugaggg

SEQ ID NO: 174421 - RNA, 19 nt, Artificial Sequence
  Description of Artificial Sequence: Synthetic oligonucleotide
guuagauacaauaaaucug

SEQ ID NO: 174422 - RNA, 19 nt, Artificial Sequence
  Description of Artificial Sequence: Synthetic oligonucleotide
uggacuuugcacuuuaccu

SEQ ID NO: 174423 - RNA, 19 nt, Artificial Sequence
  Description of Artificial Sequence: Synthetic oligonucleotide
ucauauuguuuaacaaaag

SEQ ID NO: 174424 - RNA, 19 nt, Artificial Sequence
  Description of Artificial Sequence: Synthetic oligonucleotide
cucgcuuuaauaaucauga

SEQ ID NO: 174425 - RNA, 19 nt, Artificial Sequence
  Description of Artificial Sequence: Synthetic oligonucleotide
ucuguguaucacuuaaagc

SEQ ID NO: 174426 - RNA, 19 nt, Artificial Sequence
  Description of Artificial Sequence: Synthetic oligonucleotide
uuguggguaaaacugagau

SEQ ID NO: 174427 - RNA, 19 nt, Artificial Sequence
  Description of Artificial Sequence: Synthetic oligonucleotide
ugcuccuagacuacaacag

SEQ ID NO: 174428 - RNA, 19 nt, Artificial Sequence
  Description of Artificial Sequence: Synthetic oligonucleotide
cugauucugaaucuagggg

SEQ ID NO: 174429 - RNA, 19 nt, Artificial Sequence
  Description of Artificial Sequence: Synthetic oligonucleotide
uacauucuauugaugagac

SEQ ID NO: 174430 - RNA, 19 nt, Artificial Sequence
  Description of Artificial Sequence: Synthetic oligonucleotide
auucguaugaucuacuaua

SEQ ID NO: 174431 - RNA, 19 nt, Artificial Sequence
  Description of Artificial Sequence: Synthetic oligonucleotide
uaaacgggaagugugaacu

SEQ ID NO: 174432 - RNA, 19 nt, Artificial Sequence
  Description of Artificial Sequence: Synthetic oligonucleotide
acugauagccuauguuagc

SEQ ID NO: 174433 - RNA, 19 nt, Artificial Sequence
  Description of Artificial Sequence: Synthetic oligonucleotide
gacggugacaaaugaagag

SEQ ID NO: 174434 - RNA, 19 nt, Artificial Sequence
  Description of Artificial Sequence: Synthetic oligonucleotide
ucgcuaaacaaagagauaa

SEQ ID NO: 174435 - RNA, 19 nt, Artificial Sequence
  Description of Artificial Sequence: Synthetic oligonucleotide
ucuauugaugagacgaaaa

SEQ ID NO: 174436 - RNA, 19 nt, Artificial Sequence
  Description of Artificial Sequence: Synthetic oligonucleotide
cauucuauugaugagacga

SEQ ID NO: 174437 - RNA, 19 nt, Artificial Sequence
  Description of Artificial Sequence: Synthetic oligonucleotide
augaguagcccauuucauc

SEQ ID NO: 174438 - RNA, 19 nt, Artificial Sequence
  Description of Artificial Sequence: Synthetic oligonucleotide
caccuaaugaccaacauaa

SEQ ID NO: 174439 - RNA, 19 nt, Artificial Sequence
  Description of Artificial Sequence: Synthetic oligonucleotide
acaugaguagcccauuuca

SEQ ID NO: 174440 - RNA, 19 nt, Artificial Sequence
  Description of Artificial Sequence: Synthetic oligonucleotide
gagaugcuaauucaaggac

SEQ ID NO: 174441 - RNA, 19 nt, Artificial Sequence
  Description of Artificial Sequence: Synthetic oligonucleotide
uguaugcgcagccucaaac

SEQ ID NO: 174442 - RNA, 19 nt, Artificial Sequence
  Description of Artificial Sequence: Synthetic oligonucleotide
accaacauaaagcuuuggu

SEQ ID NO: 174443 - RNA, 19 nt, Artificial Sequence
  Description of Artificial Sequence: Synthetic oligonucleotide
agaaacuaaacuugucuau

SEQ ID NO: 174444 - RNA, 19 nt, Artificial Sequence
  Description of Artificial Sequence: Synthetic oligonucleotide
uucagaguacaugaguagc

SEQ ID NO: 174445 - RNA, 19 nt, Artificial Sequence
  Description of Artificial Sequence: Synthetic oligonucleotide
uauguuagcagggaaucga

SEQ ID NO: 174446 - RNA, 19 nt, Artificial Sequence
  Description of Artificial Sequence: Synthetic oligonucleotide
aaacuaagagucccaagua

SEQ ID NO: 174447 - RNA, 19 nt, Artificial Sequence
  Description of Artificial Sequence: Synthetic oligonucleotide
cacuuaaagccccacacac

SEQ ID NO: 174448 - RNA, 19 nt, Artificial Sequence
  Description of Artificial Sequence: Synthetic oligonucleotide
uucucgacguuucugcucu

SEQ ID NO: 174449 - RNA, 19 nt, Artificial Sequence
  Description of Artificial Sequence: Synthetic oligonucleotide
aaacgggaagugugaacuc

SEQ ID NO: 174450 - RNA, 19 nt, Artificial Sequence
  Description of Artificial Sequence: Synthetic oligonucleotide
ugcacuuuaccuuacccau

SEQ ID NO: 174451 - RNA, 19 nt, Artificial Sequence
  Description of Artificial Sequence: Synthetic oligonucleotide
uugcacuuuaccuuaccca

SEQ ID NO: 174452 - RNA, 19 nt, Artificial Sequence
  Description of Artificial Sequence: Synthetic oligonucleotide
uacaauaaaucugauugau

SEQ ID NO: 174453 - RNA, 19 nt, Artificial Sequence
  Description of Artificial Sequence: Synthetic oligonucleotide
uguggguaaaacugagaug

SEQ ID NO: 174454 - RNA, 19 nt, Artificial Sequence
  Description of Artificial Sequence: Synthetic oligonucleotide
agguguaagucucuuugag

SEQ ID NO: 174455 - RNA, 19 nt, Artificial Sequence
  Description of Artificial Sequence: Synthetic oligonucleotide
caugccuaugaucuguggc

SEQ ID NO: 174456 - RNA, 19 nt, Artificial Sequence
  Description of Artificial Sequence: Synthetic oligonucleotide
cauggauggugucugaaug

SEQ ID NO: 174457 - RNA, 19 nt, Artificial Sequence
  Description of Artificial Sequence: Synthetic oligonucleotide
ucacuuaaagccccacaca

SEQ ID NO: 174458 - RNA, 19 nt, Artificial Sequence
  Description of Artificial Sequence: Synthetic oligonucleotide
ugucuaaagacagccgaag

SEQ ID NO: 174459 - RNA, 19 nt, Artificial Sequence
  Description of Artificial Sequence: Synthetic oligonucleotide
acauaagguccuaaggagg

SEQ ID NO: 174460 - RNA, 19 nt, Artificial Sequence
  Description of Artificial Sequence: Synthetic oligonucleotide
ugcaacgagguguaagucu

SEQ ID NO: 174461 - RNA, 19 nt, Artificial Sequence
  Description of Artificial Sequence: Synthetic oligonucleotide
acuuaggucuuuaauagga

SEQ ID NO: 174462 - RNA, 19 nt, Artificial Sequence
  Description of Artificial Sequence: Synthetic oligonucleotide
cagaucuacuccuacugag

SEQ ID NO: 174463 - RNA, 19 nt, Artificial Sequence
  Description of Artificial Sequence: Synthetic oligonucleotide
augaguaacugucaccuaa

SEQ ID NO: 174464 - RNA, 19 nt, Artificial Sequence
  Description of Artificial Sequence: Synthetic oligonucleotide
uaugcgcagccucaaacac

SEQ ID NO: 174465 - RNA, 19 nt, Artificial Sequence
  Description of Artificial Sequence: Synthetic oligonucleotide
uuaaagacuugcuccuaga

SEQ ID NO: 174466 - RNA, 19 nt, Artificial Sequence
  Description of Artificial Sequence: Synthetic oligonucleotide
uugcuccuagacuacaaca

SEQ ID NO: 174467 - RNA, 19 nt, Artificial Sequence
  Description of Artificial Sequence: Synthetic oligonucleotide
gauuguggguaaaacugag

SEQ ID NO: 174468 - RNA, 19 nt, Artificial Sequence
  Description of Artificial Sequence: Synthetic oligonucleotide
uccgacaggagcaauucaa

SEQ ID NO: 174469 - RNA, 19 nt, Artificial Sequence
  Description of Artificial Sequence: Synthetic oligonucleotide
gaaucggaaaguaccagac

SEQ ID NO: 174470 - RNA, 19 nt, Artificial Sequence
  Description of Artificial Sequence: Synthetic oligonucleotide
uucguaugaucuacuauau

SEQ ID NO: 174471 - RNA, 19 nt, Artificial Sequence
  Description of Artificial Sequence: Synthetic oligonucleotide
ugauagccuauguuagcag

SEQ ID NO: 174472 - RNA, 19 nt, Artificial Sequence
  Description of Artificial Sequence: Synthetic oligonucleotide
ucaccuaaugaccaacaua

SEQ ID NO: 174473 - RNA, 19 nt, Artificial Sequence
  Description of Artificial Sequence: Synthetic oligonucleotide
ugaugaggauuguaugcgc

SEQ ID NO: 174474 - RNA, 19 nt, Artificial Sequence
  Description of Artificial Sequence: Synthetic oligonucleotide
gaaucgacgcuucucagaa

SEQ ID NO: 174475 - RNA, 19 nt, Artificial Sequence
  Description of Artificial Sequence: Synthetic oligonucleotide
gaggauuguaugcgcagcc

SEQ ID NO: 174476 - RNA, 19 nt, Artificial Sequence
  Description of Artificial Sequence: Synthetic oligonucleotide
uuaauggauuucagaguac

SEQ ID NO: 174477 - RNA, 19 nt, Artificial Sequence
  Description of Artificial Sequence: Synthetic oligonucleotide
aucaauuguaaaacuaaga

SEQ ID NO: 174478 - RNA, 19 nt, Artificial Sequence
  Description of Artificial Sequence: Synthetic oligonucleotide
ucgacguuucugcucugcg

SEQ ID NO: 174479 - RNA, 19 nt, Artificial Sequence
  Description of Artificial Sequence: Synthetic oligonucleotide
agaagacaaugcuguuccc

SEQ ID NO: 174480 - RNA, 19 nt, Artificial Sequence
  Description of Artificial Sequence: Synthetic oligonucleotide
accaagacucacuugguaa

SEQ ID NO: 174481 - RNA, 19 nt, Artificial Sequence
  Description of Artificial Sequence: Synthetic oligonucleotide
gcugaccuuaccuaguucc

SEQ ID NO: 174482 - RNA, 19 nt, Artificial Sequence
  Description of Artificial Sequence: Synthetic oligonucleotide
acauucuauugaugagacg

SEQ ID NO: 174483 - RNA, 19 nt, Artificial Sequence
  Description of Artificial Sequence: Synthetic oligonucleotide
agggaaucgacgcuucuca

SEQ ID NO: 174484 - RNA, 19 nt, Artificial Sequence
  Description of Artificial Sequence: Synthetic oligonucleotide
aucuacuccuacugagggg

SEQ ID NO: 174485 - RNA, 19 nt, Artificial Sequence
  Description of Artificial Sequence: Synthetic oligonucleotide
ucuucuugucaggucgugg

SEQ ID NO: 174486 - RNA, 19 nt, Artificial Sequence
  Description of Artificial Sequence: Synthetic oligonucleotide
uucauucguaugaucuacu

SEQ ID NO: 174487 - RNA, 19 nt, Artificial Sequence
  Description of Artificial Sequence: Synthetic oligonucleotide
acgaaaagagagucugaug

SEQ ID NO: 174488 - RNA, 19 nt, Artificial Sequence
  Description of Artificial Sequence: Synthetic oligonucleotide
agaucuacuccuacugagg

SEQ ID NO: 174489 - RNA, 19 nt, Artificial Sequence
  Description of Artificial Sequence: Synthetic oligonucleotide
gaacgaacgguucuguuua

SEQ ID NO: 174490 - RNA, 19 nt, Artificial Sequence
  Description of Artificial Sequence: Synthetic oligonucleotide
ucaugccuaugaucugugg

SEQ ID NO: 174491 - RNA, 19 nt, Artificial Sequence
  Description of Artificial Sequence: Synthetic oligonucleotide
uauagacuuaggucuuuaa

SEQ ID NO: 174492 - RNA, 19 nt, Artificial Sequence
  Description of Artificial Sequence: Synthetic oligonucleotide
caguaucggauccauguug

SEQ ID NO: 174493 - RNA, 19 nt, Artificial Sequence
  Description of Artificial Sequence: Synthetic oligonucleotide
uuaccuuacccaugcauuu

SEQ ID NO: 174494 - RNA, 19 nt, Artificial Sequence
  Description of Artificial Sequence: Synthetic oligonucleotide
aacgggaagugugaacucu

SEQ ID NO: 174495 - RNA, 19 nt, Artificial Sequence
  Description of Artificial Sequence: Synthetic oligonucleotide
uaucggauccauguugaga

SEQ ID NO: 174496 - RNA, 19 nt, Artificial Sequence
  Description of Artificial Sequence: Synthetic oligonucleotide
ucauucguaugaucuacua

SEQ ID NO: 174497 - RNA, 19 nt, Artificial Sequence
  Description of Artificial Sequence: Synthetic oligonucleotide
aacgaacgguucuguuuag

SEQ ID NO: 174498 - RNA, 19 nt, Artificial Sequence
  Description of Artificial Sequence: Synthetic oligonucleotide
cugaccuuaccuaguuccc

SEQ ID NO: 174499 - RNA, 19 nt, Artificial Sequence
  Description of Artificial Sequence: Synthetic oligonucleotide
guagguggagcaauucaag

SEQ ID NO: 174500 - RNA, 19 nt, Artificial Sequence
  Description of Artificial Sequence: Synthetic oligonucleotide
auguuagcagggaaucgac

SEQ ID NO: 174501 - RNA, 19 nt, Artificial Sequence
  Description of Artificial Sequence: Synthetic oligonucleotide
gcucaagucaucucugcag

SEQ ID NO: 174502 - RNA, 19 nt, Artificial Sequence
  Description of Artificial Sequence: Synthetic oligonucleotide
cuugcuccuagacuacaac

SEQ ID NO: 174503 - RNA, 19 nt, Artificial Sequence
  Description of Artificial Sequence: Synthetic oligonucleotide
guaaacgggaagugugaac

SEQ ID NO: 174504 - RNA, 19 nt, Artificial Sequence
  Description of Artificial Sequence: Synthetic oligonucleotide
augaggcggauccugauuu

SEQ ID NO: 174505 - RNA, 19 nt, Artificial Sequence
  Description of Artificial Sequence: Synthetic oligonucleotide
aguaucggauccauguuga

SEQ ID NO: 174506 - RNA, 19 nt, Artificial Sequence
  Description of Artificial Sequence: Synthetic oligonucleotide
acaucgcuaaacaaagaga

SEQ ID NO: 174507 - RNA, 19 nt, Artificial Sequence
  Description of Artificial Sequence: Synthetic oligonucleotide
ucggaaaguaccagaccaa

SEQ ID NO: 174508 - RNA, 19 nt, Artificial Sequence
  Description of Artificial Sequence: Synthetic oligonucleotide
aaugaguaacugucaccua

SEQ ID NO: 174509 - RNA, 19 nt, Artificial Sequence
  Description of Artificial Sequence: Synthetic oligonucleotide
uugcgggaaaaguucugug

SEQ ID NO: 174510 - RNA, 19 nt, Artificial Sequence
  Description of Artificial Sequence: Synthetic oligonucleotide
guaugcgcagccucaaaca

SEQ ID NO: 174511 - RNA, 19 nt, Artificial Sequence
  Description of Artificial Sequence: Synthetic oligonucleotide
cugugcucgaucuucucuc

SEQ ID NO: 174512 - RNA, 19 nt, Artificial Sequence
  Description of Artificial Sequence: Synthetic oligonucleotide
ugucaggucguggaucuca

SEQ ID NO: 174513 - RNA, 19 nt, Artificial Sequence
  Description of Artificial Sequence: Synthetic oligonucleotide
ucaguaucggauccauguu

SEQ ID NO: 174514 - RNA, 19 nt, Artificial Sequence
  Description of Artificial Sequence: Synthetic oligonucleotide
uauucgaguucuagggcuu

SEQ ID NO: 174515 - RNA, 19 nt, Artificial Sequence
  Description of Artificial Sequence: Synthetic oligonucleotide
gaggggccauaauaugaag

SEQ ID NO: 174516 - RNA, 19 nt, Artificial Sequence
  Description of Artificial Sequence: Synthetic oligonucleotide
gauuguaugcgcagccuca

SEQ ID NO: 174517 - RNA, 19 nt, Artificial Sequence
  Description of Artificial Sequence: Synthetic oligonucleotide
aauggauuucagaguacau

SEQ ID NO: 174518 - RNA, 19 nt, Artificial Sequence
  Description of Artificial Sequence: Synthetic oligonucleotide
ucugcgaucuccuggcguu

SEQ ID NO: 174519 - RNA, 19 nt, Artificial Sequence
  Description of Artificial Sequence: Synthetic oligonucleotide
uaccuaguucccucugagc

SEQ ID NO: 174520 - RNA, 19 nt, Artificial Sequence
  Description of Artificial Sequence: Synthetic oligonucleotide
guguaucacuuaaagcccc

SEQ ID NO: 174521 - RNA, 19 nt, Artificial Sequence
  Description of Artificial Sequence: Synthetic oligonucleotide
caagauauuuuagcaucug

SEQ ID NO: 174522 - RNA, 19 nt, Artificial Sequence
  Description of Artificial Sequence: Synthetic oligonucleotide
gcugccucggaagagacag

SEQ ID NO: 174523 - RNA, 19 nt, Artificial Sequence
  Description of Artificial Sequence: Synthetic oligonucleotide
uucacagaguacuccucaa

SEQ ID NO: 174524 - RNA, 19 nt, Artificial Sequence
  Description of Artificial Sequence: Synthetic oligonucleotide
acuaagagucccaaguauu

SEQ ID NO: 174525 - RNA, 19 nt, Artificial Sequence
  Description of Artificial Sequence: Synthetic oligonucleotide
cagccgaagagaaggucag

SEQ ID NO: 174526 - RNA, 19 nt, Artificial Sequence
  Description of Artificial Sequence: Synthetic oligonucleotide
cugaaucuaggggucuggg

SEQ ID NO: 174527 - RNA, 19 nt, Artificial Sequence
  Description of Artificial Sequence: Synthetic oligonucleotide
accagaccaagacucacuu

SEQ ID NO: 174528 - RNA, 19 nt, Artificial Sequence
  Description of Artificial Sequence: Synthetic oligonucleotide
ucgcuuuaauaaucaugac

SEQ ID NO: 174529 - RNA, 19 nt, Artificial Sequence
  Description of Artificial Sequence: Synthetic oligonucleotide
ccuagacuacaacagcugc

SEQ ID NO: 174530 - RNA, 19 nt, Artificial Sequence
  Description of Artificial Sequence: Synthetic oligonucleotide
cuuaggucuuuaauaggaa

SEQ ID NO: 174531 - RNA, 19 nt, Artificial Sequence
  Description of Artificial Sequence: Synthetic oligonucleotide
ucaguggcguucuucuuuu

SEQ ID NO: 174532 - RNA, 19 nt, Artificial Sequence
  Description of Artificial Sequence: Synthetic oligonucleotide
uucugaaucuaggggucug

SEQ ID NO: 174533 - RNA, 19 nt, Artificial Sequence
  Description of Artificial Sequence: Synthetic oligonucleotide
gaacgguucuguuuaggcu

SEQ ID NO: 174534 - RNA, 19 nt, Artificial Sequence
  Description of Artificial Sequence: Synthetic oligonucleotide
agagcucaaagcagcaaca

SEQ ID NO: 174535 - RNA, 19 nt, Artificial Sequence
  Description of Artificial Sequence: Synthetic oligonucleotide
cauccauggauggugucug

SEQ ID NO: 174536 - RNA, 19 nt, Artificial Sequence
  Description of Artificial Sequence: Synthetic oligonucleotide
caccucuaagcacacucug

SEQ ID NO: 174537 - RNA, 19 nt, Artificial Sequence
  Description of Artificial Sequence: Synthetic oligonucleotide
cagcaugcaggcauccgac

SEQ ID NO: 174538 - RNA, 19 nt, Artificial Sequence
  Description of Artificial Sequence: Synthetic oligonucleotide
ugaccuuaccuaguucccu

SEQ ID NO: 174539 - RNA, 19 nt, Artificial Sequence
  Description of Artificial Sequence: Synthetic oligonucleotide
uguuugcagugcuuucaaa

SEQ ID NO: 174540 - RNA, 19 nt, Artificial Sequence
  Description of Artificial Sequence: Synthetic oligonucleotide
ucguaugaucuacuauauu

SEQ ID NO: 174541 - RNA, 19 nt, Artificial Sequence
  Description of Artificial Sequence: Synthetic oligonucleotide
guaucggauccauguugag

SEQ ID NO: 174542 - RNA, 19 nt, Artificial Sequence
  Description of Artificial Sequence: Synthetic oligonucleotide
ugccuaugaucuguggccu

SEQ ID NO: 174543 - RNA, 19 nt, Artificial Sequence
  Description of Artificial Sequence: Synthetic oligonucleotide
aggggccauaauaugaaga

SEQ ID NO: 174544 - RNA, 19 nt, Artificial Sequence
  Description of Artificial Sequence: Synthetic oligonucleotide
gaaucacuuuuacaucgcu

SEQ ID NO: 174545 - RNA, 19 nt, Artificial Sequence
  Description of Artificial Sequence: Synthetic oligonucleotide
aggucagggucauuauuaa

SEQ ID NO: 174546 - RNA, 19 nt, Artificial Sequence
  Description of Artificial Sequence: Synthetic oligonucleotide
acaauaaaucugauugauu

SEQ ID NO: 174547 - RNA, 19 nt, Artificial Sequence
  Description of Artificial Sequence: Synthetic oligonucleotide
ccaagacucacuugguaac

SEQ ID NO: 174548 - RNA, 19 nt, Artificial Sequence
  Description of Artificial Sequence: Synthetic oligonucleotide
gcuccuagacuacaacagc

SEQ ID NO: 174549 - RNA, 19 nt, Artificial Sequence
  Description of Artificial Sequence: Synthetic oligonucleotide
acgaacgguucuguuuagg

SEQ ID NO: 174550 - RNA, 19 nt, Artificial Sequence
  Description of Artificial Sequence: Synthetic oligonucleotide
gcucgcuuuaauaaucaug

SEQ ID NO: 174551 - RNA, 19 nt, Artificial Sequence
  Description of Artificial Sequence: Synthetic oligonucleotide
agcuuuggucccucaguga

SEQ ID NO: 174552 - RNA, 19 nt, Artificial Sequence
  Description of Artificial Sequence: Synthetic oligonucleotide
aaucgacgcuucucagaaa

SEQ ID NO: 174553 - RNA, 19 nt, Artificial Sequence
  Description of Artificial Sequence: Synthetic oligonucleotide
agacuugcuccuagacuac

SEQ ID NO: 174554 - RNA, 19 nt, Artificial Sequence
  Description of Artificial Sequence: Synthetic oligonucleotide
cauccgacaggagcaauuc

SEQ ID NO: 174555 - RNA, 19 nt, Artificial Sequence
  Description of Artificial Sequence: Synthetic oligonucleotide
ggaagacggugacaaauga

SEQ ID NO: 174556 - RNA, 19 nt, Artificial Sequence
  Description of Artificial Sequence: Synthetic oligonucleotide
acgggaagugugaacucuc

SEQ ID NO: 174557 - RNA, 19 nt, Artificial Sequence
  Description of Artificial Sequence: Synthetic oligonucleotide
ggauuguaugcgcagccuc

SEQ ID NO: 174558 - RNA, 19 nt, Artificial Sequence
  Description of Artificial Sequence: Synthetic oligonucleotide
cuagacuacaacagcugcu

SEQ ID NO: 174559 - RNA, 19 nt, Artificial Sequence
  Description of Artificial Sequence: Synthetic oligonucleotide
agauccuuuuaaagacuug

SEQ ID NO: 174560 - RNA, 19 nt, Artificial Sequence
  Description of Artificial Sequence: Synthetic oligonucleotide
agcaugcaggcauccgaca

SEQ ID NO: 174561 - RNA, 19 nt, Artificial Sequence
  Description of Artificial Sequence: Synthetic oligonucleotide
uuguaugcgcagccucaaa

SEQ ID NO: 174562 - RNA, 19 nt, Artificial Sequence
  Description of Artificial Sequence: Synthetic oligonucleotide
gaccaagacucacuuggua

SEQ ID NO: 174563 - RNA, 19 nt, Artificial Sequence
  Description of Artificial Sequence: Synthetic oligonucleotide
aagcuugaggggccauaau

SEQ ID NO: 174564 - RNA, 19 nt, Artificial Sequence
  Description of Artificial Sequence: Synthetic oligonucleotide
cacucuaaggugggucugc

SEQ ID NO: 174565 - RNA, 19 nt, Artificial Sequence
  Description of Artificial Sequence: Synthetic oligonucleotide
ccaaguauugacauauucu

SEQ ID NO: 174566 - RNA, 19 nt, Artificial Sequence
  Description of Artificial Sequence: Synthetic oligonucleotide
aggucagucuuaagaaagu

SEQ ID NO: 174567 - RNA, 19 nt, Artificial Sequence
  Description of Artificial Sequence: Synthetic oligonucleotide
aggauuguaugcgcagccu

SEQ ID NO: 174568 - RNA, 19 nt, Artificial Sequence
  Description of Artificial Sequence: Synthetic oligonucleotide
uaccuuacccaugcauuuc

SEQ ID NO: 174569 - RNA, 19 nt, Artificial Sequence
  Description of Artificial Sequence: Synthetic oligonucleotide
cuguuuaggcucaagucau

SEQ ID NO: 174570 - RNA, 19 nt, Artificial Sequence
  Description of Artificial Sequence: Synthetic oligonucleotide
ucuggcacccuuggucaug

SEQ ID NO: 174571 - RNA, 19 nt, Artificial Sequence
  Description of Artificial Sequence: Synthetic oligonucleotide
gggaagacggugacaaaug

SEQ ID NO: 174572 - RNA, 19 nt, Artificial Sequence
  Description of Artificial Sequence: Synthetic oligonucleotide
ugaggacaggcucgcuuua

SEQ ID NO: 174573 - RNA, 19 nt, Artificial Sequence
  Description of Artificial Sequence: Synthetic oligonucleotide
agucccaaguauugacaua

SEQ ID NO: 174574 - RNA, 19 nt, Artificial Sequence
  Description of Artificial Sequence: Synthetic oligonucleotide
ucuaggggucugggaauug

SEQ ID NO: 174575 - RNA, 19 nt, Artificial Sequence
  Description of Artificial Sequence: Synthetic oligonucleotide
gagggcuuaggaagaguca

SEQ ID NO: 174576 - RNA, 19 nt, Artificial Sequence
  Description of Artificial Sequence: Synthetic oligonucleotide
ucggaagagacagcaucau

SEQ ID NO: 174577 - RNA, 19 nt, Artificial Sequence
  Description of Artificial Sequence: Synthetic oligonucleotide
ugccauccgugggacuugg

SEQ ID NO: 174578 - RNA, 19 nt, Artificial Sequence
  Description of Artificial Sequence: Synthetic oligonucleotide
auuguaugcgcagccucaa

SEQ ID NO: 174579 - RNA, 19 nt, Artificial Sequence
  Description of Artificial Sequence: Synthetic oligonucleotide
gcaacgagguguaagucuc

SEQ ID NO: 174580 - RNA, 19 nt, Artificial Sequence
  Description of Artificial Sequence: Synthetic oligonucleotide
cucgacguuucugcucugc

SEQ ID NO: 174581 - RNA, 19 nt, Artificial Sequence
  Description of Artificial Sequence: Synthetic oligonucleotide
gggaaaaguucuguguauc

SEQ ID NO: 174582 - RNA, 19 nt, Artificial Sequence
  Description of Artificial Sequence: Synthetic oligonucleotide
ugccuauaucagggcagag

SEQ ID NO: 174583 - RNA, 19 nt, Artificial Sequence
  Description of Artificial Sequence: Synthetic oligonucleotide
gcaccuauucgaguucuag

SEQ ID NO: 174584 - RNA, 19 nt, Artificial Sequence
  Description of Artificial Sequence: Synthetic oligonucleotide
acucuuaggccuggccuug

SEQ ID NO: 174585 - RNA, 19 nt, Artificial Sequence
  Description of Artificial Sequence: Synthetic oligonucleotide
guccuaaggaggccucaac

SEQ ID NO: 174586 - RNA, 19 nt, Artificial Sequence
  Description of Artificial Sequence: Synthetic oligonucleotide
ggcggauccugauuuccug

SEQ ID NO: 174587 - RNA, 19 nt, Artificial Sequence
  Description of Artificial Sequence: Synthetic oligonucleotide
gguggugccauccguggga

SEQ ID NO: 174588 - RNA, 19 nt, Artificial Sequence
  Description of Artificial Sequence: Synthetic oligonucleotide
gcggauccugauuuccugc

SEQ ID NO: 174589 - RNA, 19 nt, Artificial Sequence
  Description of Artificial Sequence: Synthetic oligonucleotide
agccgaagagaaggucagg

SEQ ID NO: 174590 - RNA, 19 nt, Artificial Sequence
  Description of Artificial Sequence: Synthetic oligonucleotide
cagggaaucgacgcuucuc

SEQ ID NO: 174591 - RNA, 19 nt, Artificial Sequence
  Description of Artificial Sequence: Synthetic oligonucleotide
gcagaucuacuccuacuga

SEQ ID NO: 174592 - RNA, 19 nt, Artificial Sequence
  Description of Artificial Sequence: Synthetic oligonucleotide
cauucguaugaucuacuau

SEQ ID NO: 174593 - RNA, 19 nt, Artificial Sequence
  Description of Artificial Sequence: Synthetic oligonucleotide
acucuaaggugggucugca

SEQ ID NO: 174594 - RNA, 19 nt, Artificial Sequence
  Description of Artificial Sequence: Synthetic oligonucleotide
uacccaccucuaagcacac

SEQ ID NO: 174595 - RNA, 19 nt, Artificial Sequence
  Description of Artificial Sequence: Synthetic oligonucleotide
acgcugaccuuaccuaguu

SEQ ID NO: 174596 - RNA, 19 nt, Artificial Sequence
  Description of Artificial Sequence: Synthetic oligonucleotide
ccgacaggagcaauucaac

SEQ ID NO: 174597 - RNA, 19 nt, Artificial Sequence
  Description of Artificial Sequence: Synthetic oligonucleotide
gacuugcuccuagacuaca

SEQ ID NO: 174598 - RNA, 19 nt, Artificial Sequence
  Description of Artificial Sequence: Synthetic oligonucleotide
gaguacaugaguagcccau

SEQ ID NO: 174599 - RNA, 19 nt, Artificial Sequence
  Description of Artificial Sequence: Synthetic oligonucleotide
caugaguagcccauuucau

SEQ ID NO: 174600 - RNA, 19 nt, Artificial Sequence
  Description of Artificial Sequence: Synthetic oligonucleotide
aucgcuaaacaaagagaua

SEQ ID NO: 174601 - RNA, 19 nt, Artificial Sequence
  Description of Artificial Sequence: Synthetic oligonucleotide
cuaugaucuguggccucug

SEQ ID NO: 174602 - RNA, 19 nt, Artificial Sequence
  Description of Artificial Sequence: Synthetic oligonucleotide
cugcaacgagguguaaguc

SEQ ID NO: 174603 - RNA, 19 nt, Artificial Sequence
  Description of Artificial Sequence: Synthetic oligonucleotide
gaugaggcggauccugauu

SEQ ID NO: 174604 - RNA, 19 nt, Artificial Sequence
  Description of Artificial Sequence: Synthetic oligonucleotide
gcgggaaaaguucugugua

SEQ ID NO: 174605 - RNA, 19 nt, Artificial Sequence
  Description of Artificial Sequence: Synthetic oligonucleotide
cuuucucgacguuucugcu

SEQ ID NO: 174606 - RNA, 19 nt, Artificial Sequence
  Description of Artificial Sequence: Synthetic oligonucleotide
gcucuuuucaguaucggau

SEQ ID NO: 174607 - RNA, 19 nt, Artificial Sequence
  Description of Artificial Sequence: Synthetic oligonucleotide
aguccacucaagaguguau

SEQ ID NO: 174608 - RNA, 19 nt, Artificial Sequence
  Description of Artificial Sequence: Synthetic oligonucleotide
cuagggcuuuuacuuccca

SEQ ID NO: 174609 - RNA, 19 nt, Artificial Sequence
  Description of Artificial Sequence: Synthetic oligonucleotide
gcagaacugauagccuaug

SEQ ID NO: 174610 - RNA, 19 nt, Artificial Sequence
  Description of Artificial Sequence: Synthetic oligonucleotide
gccugccuauaucagggca

SEQ ID NO: 174611 - RNA, 19 nt, Artificial Sequence
  Description of Artificial Sequence: Synthetic oligonucleotide
guacaugaguagcccauuu

SEQ ID NO: 174612 - RNA, 19 nt, Artificial Sequence
  Description of Artificial Sequence: Synthetic oligonucleotide
agguccuaaggaggccuca

SEQ ID NO: 174613 - RNA, 19 nt, Artificial Sequence
  Description of Artificial Sequence: Synthetic oligonucleotide
ccagaccaagacucacuug

SEQ ID NO: 174614 - RNA, 19 nt, Artificial Sequence
  Description of Artificial Sequence: Synthetic oligonucleotide
ccucuaagcacacucugua

SEQ ID NO: 174615 - RNA, 19 nt, Artificial Sequence
  Description of Artificial Sequence: Synthetic oligonucleotide
ccaagccuccacacauaag

SEQ ID NO: 174616 - RNA, 19 nt, Artificial Sequence
  Description of Artificial Sequence: Synthetic oligonucleotide
ccuuaccuaguucccucug

SEQ ID NO: 174617 - RNA, 19 nt, Artificial Sequence
  Description of Artificial Sequence: Synthetic oligonucleotide
ccacucaagaguguaugca

SEQ ID NO: 174618 - RNA, 19 nt, Artificial Sequence
  Description of Artificial Sequence: Synthetic oligonucleotide
ccucugccccauucaacag

SEQ ID NO: 174619 - RNA, 19 nt, Artificial Sequence
  Description of Artificial Sequence: Synthetic oligonucleotide
guacauggcacugguuuau

SEQ ID NO: 174620 - RNA, 19 nt, Artificial Sequence
  Description of Artificial Sequence: Synthetic oligonucleotide
ggcagacaguggcccacgc

SEQ ID NO: 174621 - RNA, 19 nt, Artificial Sequence
  Description of Artificial Sequence: Synthetic oligonucleotide
gggaagugugaacucuccu

SEQ ID NO: 174622 - RNA, 19 nt, Artificial Sequence
  Description of Artificial Sequence: Synthetic oligonucleotide
cacgcugaccuuaccuagu

SEQ ID NO: 174623 - RNA, 19 nt, Artificial Sequence
  Description of Artificial Sequence: Synthetic oligonucleotide
ggucugcaugaguccacuc

SEQ ID NO: 174624 - RNA, 19 nt, Artificial Sequence
  Description of Artificial Sequence: Synthetic oligonucleotide
uugucaggucguggaucuc

SEQ ID NO: 174625 - RNA, 19 nt, Artificial Sequence
  Description of Artificial Sequence: Synthetic oligonucleotide
cuaggggucugggaauugu

SEQ ID NO: 174626 - RNA, 19 nt, Artificial Sequence
  Description of Artificial Sequence: Synthetic oligonucleotide
aggcauccgacaggagcaa

SEQ ID NO: 174627 - RNA, 19 nt, Artificial Sequence
  Description of Artificial Sequence: Synthetic oligonucleotide
gggcacgcugaccuuaccu

SEQ ID NO: 174628 - RNA, 19 nt, Artificial Sequence
  Description of Artificial Sequence: Synthetic oligonucleotide
cuauugcucccaacaccau

SEQ ID NO: 174629 - RNA, 19 nt, Artificial Sequence
  Description of Artificial Sequence: Synthetic oligonucleotide
ccaagugagaucucucauu

SEQ ID NO: 174630 - RNA, 19 nt, Artificial Sequence
  Description of Artificial Sequence: Synthetic oligonucleotide
gguccuaaggaggccucaa

SEQ ID NO: 174631 - RNA, 19 nt, Artificial Sequence
  Description of Artificial Sequence: Synthetic oligonucleotide
cucuaaggugggucugcau

SEQ ID NO: 174632 - RNA, 19 nt, Artificial Sequence
  Description of Artificial Sequence: Synthetic oligonucleotide
ccaccucuaagcacacucu

SEQ ID NO: 174633 - RNA, 19 nt, Artificial Sequence
  Description of Artificial Sequence: Synthetic oligonucleotide
caugacugucaguggcguu

SEQ ID NO: 174634 - RNA, 19 nt, Artificial Sequence
  Description of Artificial Sequence: Synthetic oligonucleotide
ggcucgcuuuaauaaucau

SEQ ID NO: 174635 - RNA, 19 nt, Artificial Sequence
  Description of Artificial Sequence: Synthetic oligonucleotide
ccuaugaucuguggccucu

SEQ ID NO: 174636 - RNA, 19 nt, Artificial Sequence
  Description of Artificial Sequence: Synthetic oligonucleotide
gggaacgaacgguucuguu

SEQ ID NO: 174637 - RNA, 19 nt, Artificial Sequence
  Description of Artificial Sequence: Synthetic oligonucleotide
gcagggaaucgacgcuucu

SEQ ID NO: 174638 - RNA, 19 nt, Artificial Sequence
  Description of Artificial Sequence: Synthetic oligonucleotide
gggucugcaugaguccacu

SEQ ID NO: 174639 - RNA, 19 nt, Artificial Sequence
  Description of Artificial Sequence: Synthetic oligonucleotide
cgcugaccuuaccuaguuc

SEQ ID NO: 174640 - RNA, 19 nt, Artificial Sequence
  Description of Artificial Sequence: Synthetic oligonucleotide
gcauccgacaggagcaauu

SEQ ID NO: 174641 - RNA, 19 nt, Artificial Sequence
  Description of Artificial Sequence: Synthetic oligonucleotide
cugcugcaacgagguguaa

SEQ ID NO: 174642 - RNA, 19 nt, Artificial Sequence
  Description of Artificial Sequence: Synthetic oligonucleotide
gccacacucuaaggugggu

SEQ ID NO: 174643 - RNA, 19 nt, Artificial Sequence
  Description of Artificial Sequence: Synthetic oligonucleotide
ggcauccgacaggagcaau

SEQ ID NO: 174644 - RNA, 19 nt, Artificial Sequence
  Description of Artificial Sequence: Synthetic oligonucleotide
ccccgagauuguggguaaa

SEQ ID NO: 174645 - RNA, 19 nt, Artificial Sequence
  Description of Artificial Sequence: Synthetic oligonucleotide
gccauccgugggacuuggu

SEQ ID NO: 174646 - RNA, 19 nt, Artificial Sequence
  Description of Artificial Sequence: Synthetic oligonucleotide
cuagaaacggccuagcacg

SEQ ID NO: 174647 - RNA, 19 nt, Artificial Sequence
  Description of Artificial Sequence: Synthetic oligonucleotide
aguacucuagucuggagcc

SEQ ID NO: 174648 - RNA, 19 nt, Artificial Sequence
  Description of Artificial Sequence: Synthetic oligonucleotide
guaacguaagcucacacgg

SEQ ID NO: 174649 - RNA, 19 nt, Artificial Sequence
  Description of Artificial Sequence: Synthetic oligonucleotide
augacugccauauucuccc

SEQ ID NO: 174650 - RNA, 19 nt, Artificial Sequence
  Description of Artificial Sequence: Synthetic oligonucleotide
acgcuuaucucauugacac

SEQ ID NO: 174651 - RNA, 19 nt, Artificial Sequence
  Description of Artificial Sequence: Synthetic oligonucleotide
auaugcuugggcuaucugg

SEQ ID NO: 174652 - RNA, 19 nt, Artificial Sequence
  Description of Artificial Sequence: Synthetic oligonucleotide
cugaaugcgagucauguag

SEQ ID NO: 174653 - RNA, 19 nt, Artificial Sequence
  Description of Artificial Sequence: Synthetic oligonucleotide
cauucaauaacuuucagcu

SEQ ID NO: 174654 - RNA, 19 nt, Artificial Sequence
  Description of Artificial Sequence: Synthetic oligonucleotide
aagcgauuccccuuucugg

SEQ ID NO: 174655 - RNA, 19 nt, Artificial Sequence
  Description of Artificial Sequence: Synthetic oligonucleotide
acgacaucagcguagcaac

SEQ ID NO: 174656 - RNA, 19 nt, Artificial Sequence
  Description of Artificial Sequence: Synthetic oligonucleotide
auauaagcaaccuccccuc

SEQ ID NO: 174657 - RNA, 19 nt, Artificial Sequence
  Description of Artificial Sequence: Synthetic oligonucleotide
aucgucaugccguugacag

SEQ ID NO: 174658 - RNA, 19 nt, Artificial Sequence
  Description of Artificial Sequence: Synthetic oligonucleotide
gacggaaguaggcagcucg

SEQ ID NO: 174659 - RNA, 19 nt, Artificial Sequence
  Description of Artificial Sequence: Synthetic oligonucleotide
ucccgauuuaagaagaggu

SEQ ID NO: 174660 - RNA, 19 nt, Artificial Sequence
  Description of Artificial Sequence: Synthetic oligonucleotide
aguaucagagacaguaccc

SEQ ID NO: 174661 - RNA, 19 nt, Artificial Sequence
  Description of Artificial Sequence: Synthetic oligonucleotide
ugugcguccaugcuucagg

SEQ ID NO: 174662 - RNA, 19 nt, Artificial Sequence
  Description of Artificial Sequence: Synthetic oligonucleotide
augcgagucauguagagca

SEQ ID NO: 174663 - RNA, 19 nt, Artificial Sequence
  Description of Artificial Sequence: Synthetic oligonucleotide
ucuucgacaaugcuuggcu

SEQ ID NO: 174664 - RNA, 19 nt, Artificial Sequence
  Description of Artificial Sequence: Synthetic oligonucleotide
cucaccucguagaacaugg

SEQ ID NO: 174665 - RNA, 19 nt, Artificial Sequence
  Description of Artificial Sequence: Synthetic oligonucleotide
uguacacauauaugcuugg

SEQ ID NO: 174666 - RNA, 19 nt, Artificial Sequence
  Description of Artificial Sequence: Synthetic oligonucleotide
gaguacucuagucuggagc

SEQ ID NO: 174667 - RNA, 19 nt, Artificial Sequence
  Description of Artificial Sequence: Synthetic oligonucleotide
uugagguguaagaacggag

SEQ ID NO: 174668 - RNA, 19 nt, Artificial Sequence
  Description of Artificial Sequence: Synthetic oligonucleotide
uguccaucgauauaagcaa

SEQ ID NO: 174669 - RNA, 19 nt, Artificial Sequence
  Description of Artificial Sequence: Synthetic oligonucleotide
agugaggaugaacugacca

SEQ ID NO: 174670 - RNA, 19 nt, Artificial Sequence
  Description of Artificial Sequence: Synthetic oligonucleotide
gucgugguuacuucggugg

SEQ ID NO: 174671 - RNA, 19 nt, Artificial Sequence
  Description of Artificial Sequence: Synthetic oligonucleotide
ugacauaugugcacugggc

SEQ ID NO: 174672 - RNA, 19 nt, Artificial Sequence
  Description of Artificial Sequence: Synthetic oligonucleotide
guaaguaucagagacagua

SEQ ID NO: 174673 - RNA, 19 nt, Artificial Sequence
  Description of Artificial Sequence: Synthetic oligonucleotide
uccaucgauauaagcaacc

SEQ ID NO: 174674 - RNA, 19 nt, Artificial Sequence
  Description of Artificial Sequence: Synthetic oligonucleotide
ugauccuuagugaacugcu

SEQ ID NO: 174675 - RNA, 19 nt, Artificial Sequence
  Description of Artificial Sequence: Synthetic oligonucleotide
ugccacguugaacaaauga

SEQ ID NO: 174676 - RNA, 19 nt, Artificial Sequence
  Description of Artificial Sequence: Synthetic oligonucleotide
cuggcgagcagacucaagg

SEQ ID NO: 174677 - RNA, 19 nt, Artificial Sequence
  Description of Artificial Sequence: Synthetic oligonucleotide
uucgacaaugcuuggcugc

SEQ ID NO: 174678 - RNA, 19 nt, Artificial Sequence
  Description of Artificial Sequence: Synthetic oligonucleotide
ucgauauaagcaaccuccc

SEQ ID NO: 174679 - RNA, 19 nt, Artificial Sequence
  Description of Artificial Sequence: Synthetic oligonucleotide
uguuggcccacuaaagagu

SEQ ID NO: 174680 - RNA, 19 nt, Artificial Sequence
  Description of Artificial Sequence: Synthetic oligonucleotide
aguggagccaaaucgcucu

SEQ ID NO: 174681 - RNA, 19 nt, Artificial Sequence
  Description of Artificial Sequence: Synthetic oligonucleotide
ugaucacuggucuucgaca

SEQ ID NO: 174682 - RNA, 19 nt, Artificial Sequence
  Description of Artificial Sequence: Synthetic oligonucleotide
uugaucacuggucuucgac

SEQ ID NO: 174683 - RNA, 19 nt, Artificial Sequence
  Description of Artificial Sequence: Synthetic oligonucleotide
uaagcucacacgguacugg

SEQ ID NO: 174684 - RNA, 19 nt, Artificial Sequence
  Description of Artificial Sequence: Synthetic oligonucleotide
cagagaguacucuagucug

SEQ ID NO: 174685 - RNA, 19 nt, Artificial Sequence
  Description of Artificial Sequence: Synthetic oligonucleotide
gaaugcgagucauguagag

SEQ ID NO: 174686 - RNA, 19 nt, Artificial Sequence
  Description of Artificial Sequence: Synthetic oligonucleotide
aacguaagcucacacggua

SEQ ID NO: 174687 - RNA, 19 nt, Artificial Sequence
  Description of Artificial Sequence: Synthetic oligonucleotide
auucaauaacuuucagcug

SEQ ID NO: 174688 - RNA, 19 nt, Artificial Sequence
  Description of Artificial Sequence: Synthetic oligonucleotide
aacggccuagcacgguggc

SEQ ID NO: 174689 - RNA, 19 nt, Artificial Sequence
  Description of Artificial Sequence: Synthetic oligonucleotide
ugaaugcgagucauguaga

SEQ ID NO: 174690 - RNA, 19 nt, Artificial Sequence
  Description of Artificial Sequence: Synthetic oligonucleotide
gaugacugccauauucucc

SEQ ID NO: 174691 - RNA, 19 nt, Artificial Sequence
  Description of Artificial Sequence: Synthetic oligonucleotide
uaagcaaccuccccucgca

SEQ ID NO: 174692 - RNA, 19 nt, Artificial Sequence
  Description of Artificial Sequence: Synthetic oligonucleotide
cuugacggaaguaggcagc

SEQ ID NO: 174693 - RNA, 19 nt, Artificial Sequence
  Description of Artificial Sequence: Synthetic oligonucleotide
ugggaggugccacguaacg

SEQ ID NO: 174694 - RNA, 19 nt, Artificial Sequence
  Description of Artificial Sequence: Synthetic oligonucleotide
uucccgauuuaagaagagg

SEQ ID NO: 174695 - RNA, 19 nt, Artificial Sequence
  Description of Artificial Sequence: Synthetic oligonucleotide
aagccacaaagucgcgaac

SEQ ID NO: 174696 - RNA, 19 nt, Artificial Sequence
  Description of Artificial Sequence: Synthetic oligonucleotide
caucggaugcaucaccacc

SEQ ID NO: 174697 - RNA, 19 nt, Artificial Sequence
  Description of Artificial Sequence: Synthetic oligonucleotide
agucuucccgauuuaagaa

SEQ ID NO: 174698 - RNA, 19 nt, Artificial Sequence
  Description of Artificial Sequence: Synthetic oligonucleotide
agcacgacgacaucagcgu

SEQ ID NO: 174699 - RNA, 19 nt, Artificial Sequence
  Description of Artificial Sequence: Synthetic oligonucleotide
aagucgcgaacgcugggug

SEQ ID NO: 174700 - RNA, 19 nt, Artificial Sequence
  Description of Artificial Sequence: Synthetic oligonucleotide
agcgauuccccuuucugga

SEQ ID NO: 174701 - RNA, 19 nt, Artificial Sequence
  Description of Artificial Sequence: Synthetic oligonucleotide
agcaacacucugccgcucg

SEQ ID NO: 174702 - RNA, 19 nt, Artificial Sequence
  Description of Artificial Sequence: Synthetic oligonucleotide
aggugucgugguuacuucg

SEQ ID NO: 174703 - RNA, 19 nt, Artificial Sequence
  Description of Artificial Sequence: Synthetic oligonucleotide
ugccacguaacguaagcuc

SEQ ID NO: 174704 - RNA, 19 nt, Artificial Sequence
  Description of Artificial Sequence: Synthetic oligonucleotide
gugguuacuucgguggugg

SEQ ID NO: 174705 - RNA, 19 nt, Artificial Sequence
  Description of Artificial Sequence: Synthetic oligonucleotide
acgucuuguccauagccug

SEQ ID NO: 174706 - RNA, 19 nt, Artificial Sequence
  Description of Artificial Sequence: Synthetic oligonucleotide
gacacggggcaucggaugc

SEQ ID NO: 174707 - RNA, 19 nt, Artificial Sequence
  Description of Artificial Sequence: Synthetic oligonucleotide
ugcacugagucggcaagcg

SEQ ID NO: 174708 - RNA, 19 nt, Artificial Sequence
  Description of Artificial Sequence: Synthetic oligonucleotide
uaacguaagcucacacggu

SEQ ID NO: 174709 - RNA, 19 nt, Artificial Sequence
  Description of Artificial Sequence: Synthetic oligonucleotide
gggaaccaagcucaggccg

SEQ ID NO: 174710 - RNA, 19 nt, Artificial Sequence
  Description of Artificial Sequence: Synthetic oligonucleotide
aaagucgcgaacgcugggu

SEQ ID NO: 174711 - RNA, 19 nt, Artificial Sequence
  Description of Artificial Sequence: Synthetic oligonucleotide
caccucguagaacauggag

SEQ ID NO: 174712 - RNA, 19 nt, Artificial Sequence
  Description of Artificial Sequence: Synthetic oligonucleotide
ucaccagcguagcaucccc

SEQ ID NO: 174713 - RNA, 19 nt, Artificial Sequence
  Description of Artificial Sequence: Synthetic oligonucleotide
acgacgacaucagcguagc

SEQ ID NO: 174714 - RNA, 19 nt, Artificial Sequence
  Description of Artificial Sequence: Synthetic oligonucleotide
cauugaucacuggucuucg

SEQ ID NO: 174715 - RNA, 19 nt, Artificial Sequence
  Description of Artificial Sequence: Synthetic oligonucleotide
caucgauauaagcaaccuc

SEQ ID NO: 174716 - RNA, 19 nt, Artificial Sequence
  Description of Artificial Sequence: Synthetic oligonucleotide
agagaguacucuagucugg

SEQ ID NO: 174717 - RNA, 19 nt, Artificial Sequence
  Description of Artificial Sequence: Synthetic oligonucleotide
caggucaccuaccauggug

SEQ ID NO: 174718 - RNA, 19 nt, Artificial Sequence
  Description of Artificial Sequence: Synthetic oligonucleotide
agucgcgaacgcugggugg

SEQ ID NO: 174719 - RNA, 19 nt, Artificial Sequence
  Description of Artificial Sequence: Synthetic oligonucleotide
aagcaaccuccccucgcag

SEQ ID NO: 174720 - RNA, 19 nt, Artificial Sequence
  Description of Artificial Sequence: Synthetic oligonucleotide
acauauaugcuugggcuau

SEQ ID NO: 174721 - RNA, 19 nt, Artificial Sequence
  Description of Artificial Sequence: Synthetic oligonucleotide
gaagauccgccgaggauug

SEQ ID NO: 174722 - RNA, 19 nt, Artificial Sequence
  Description of Artificial Sequence: Synthetic oligonucleotide
agagauggcgauagccgac

SEQ ID NO: 174723 - RNA, 19 nt, Artificial Sequence
  Description of Artificial Sequence: Synthetic oligonucleotide
gaugacucggcguggucuc

SEQ ID NO: 174724 - RNA, 19 nt, Artificial Sequence
  Description of Artificial Sequence: Synthetic oligonucleotide
gaugccugucuagguaccg

SEQ ID NO: 174725 - RNA, 19 nt, Artificial Sequence
  Description of Artificial Sequence: Synthetic oligonucleotide
cuucccgauuuaagaagag

SEQ ID NO: 174726 - RNA, 19 nt, Artificial Sequence
  Description of Artificial Sequence: Synthetic oligonucleotide
ucgacaaugcuuggcugcc

SEQ ID NO: 174727 - RNA, 19 nt, Artificial Sequence
  Description of Artificial Sequence: Synthetic oligonucleotide
cacguucauggcagcaccg

SEQ ID NO: 174728 - RNA, 19 nt, Artificial Sequence
  Description of Artificial Sequence: Synthetic oligonucleotide
ucaggugucgugguuacuu

SEQ ID NO: 174729 - RNA, 19 nt, Artificial Sequence
  Description of Artificial Sequence: Synthetic oligonucleotide
cugcuaagugugcugcccc

SEQ ID NO: 174730 - RNA, 19 nt, Artificial Sequence
  Description of Artificial Sequence: Synthetic oligonucleotide
ugcgcagacugggaggugc

SEQ ID NO: 174731 - RNA, 19 nt, Artificial Sequence
  Description of Artificial Sequence: Synthetic oligonucleotide
guggauucgggguggcaag

SEQ ID NO: 174732 - RNA, 19 nt, Artificial Sequence
  Description of Artificial Sequence: Synthetic oligonucleotide
ccuagaaacggccuagcac

SEQ ID NO: 174733 - RNA, 19 nt, Artificial Sequence
  Description of Artificial Sequence: Synthetic oligonucleotide
ugccggagcacgacgacau

SEQ ID NO: 174734 - RNA, 19 nt, Artificial Sequence
  Description of Artificial Sequence: Synthetic oligonucleotide
cacgaugccaucgcaggcc

SEQ ID NO: 174735 - RNA, 19 nt, Artificial Sequence
  Description of Artificial Sequence: Synthetic oligonucleotide
cacuggucuucgacaaugc

SEQ ID NO: 174736 - RNA, 19 nt, Artificial Sequence
  Description of Artificial Sequence: Synthetic oligonucleotide
cauagguguccuccuggag

SEQ ID NO: 174737 - RNA, 19 nt, Artificial Sequence
  Description of Artificial Sequence: Synthetic oligonucleotide
uugacggaaguaggcagcu

SEQ ID NO: 174738 - RNA, 19 nt, Artificial Sequence
  Description of Artificial Sequence: Synthetic oligonucleotide
acuacgcagggguacccca

SEQ ID NO: 174739 - RNA, 19 nt, Artificial Sequence
  Description of Artificial Sequence: Synthetic oligonucleotide
ggaccucucccuuuccagg

SEQ ID NO: 174740 - RNA, 19 nt, Artificial Sequence
  Description of Artificial Sequence: Synthetic oligonucleotide
ucgugguuacuucgguggu

SEQ ID NO: 174741 - RNA, 19 nt, Artificial Sequence
  Description of Artificial Sequence: Synthetic oligonucleotide
ggugccacguaacguaagc

SEQ ID NO: 174742 - RNA, 19 nt, Artificial Sequence
  Description of Artificial Sequence: Synthetic oligonucleotide
cacgcuuaucucauugaca

SEQ ID NO: 174743 - RNA, 19 nt, Artificial Sequence
  Description of Artificial Sequence: Synthetic oligonucleotide
gguuacuucggugguggcg

SEQ ID NO: 174744 - RNA, 19 nt, Artificial Sequence
  Description of Artificial Sequence: Synthetic oligonucleotide
ccuuucuggacggaggacg

SEQ ID NO: 174745 - RNA, 19 nt, Artificial Sequence
  Description of Artificial Sequence: Synthetic oligonucleotide
caugcggauguacaugcca

SEQ ID NO: 174746 - RNA, 19 nt, Artificial Sequence
  Description of Artificial Sequence: Synthetic oligonucleotide
uuuagcccagcugcagaug

SEQ ID NO: 174747 - RNA, 19 nt, Artificial Sequence
  Description of Artificial Sequence: Synthetic oligonucleotide
auagccgacacgaugccau

SEQ ID NO: 174748 - RNA, 19 nt, Artificial Sequence
  Description of Artificial Sequence: Synthetic oligonucleotide
caaagucgcgaacgcuggg

SEQ ID NO: 174749 - RNA, 19 nt, Artificial Sequence
  Description of Artificial Sequence: Synthetic oligonucleotide
agcgcucuagguccccauc

SEQ ID NO: 174750 - RNA, 19 nt, Artificial Sequence
  Description of Artificial Sequence: Synthetic oligonucleotide
ugcgagucauguagagcac

SEQ ID NO: 174751 - RNA, 19 nt, Artificial Sequence
  Description of Artificial Sequence: Synthetic oligonucleotide
agggugccggagcacgacg

SEQ ID NO: 174752 - RNA, 19 nt, Artificial Sequence
  Description of Artificial Sequence: Synthetic oligonucleotide
guggcuagggauuguccac

SEQ ID NO: 174753 - RNA, 19 nt, Artificial Sequence
  Description of Artificial Sequence: Synthetic oligonucleotide
uaccgguggugcaggguag

SEQ ID NO: 174754 - RNA, 19 nt, Artificial Sequence
  Description of Artificial Sequence: Synthetic oligonucleotide
gcgauagccgacacgaugc

SEQ ID NO: 174755 - RNA, 19 nt, Artificial Sequence
  Description of Artificial Sequence: Synthetic oligonucleotide
auggggagcauggucugag

SEQ ID NO: 174756 - RNA, 19 nt, Artificial Sequence
  Description of Artificial Sequence: Synthetic oligonucleotide
ggaaccaagcucaggccgg

SEQ ID NO: 174757 - RNA, 19 nt, Artificial Sequence
  Description of Artificial Sequence: Synthetic oligonucleotide
ugucuagguaccgguggug

SEQ ID NO: 174758 - RNA, 19 nt, Artificial Sequence
  Description of Artificial Sequence: Synthetic oligonucleotide
cacauauaugcuugggcua

SEQ ID NO: 174759 - RNA, 19 nt, Artificial Sequence
  Description of Artificial Sequence: Synthetic oligonucleotide
cccgauuuaagaagaggug

SEQ ID NO: 174760 - RNA, 19 nt, Artificial Sequence
  Description of Artificial Sequence: Synthetic oligonucleotide
acgugacauaugugcacug

SEQ ID NO: 174761 - RNA, 19 nt, Artificial Sequence
  Description of Artificial Sequence: Synthetic oligonucleotide
gaugccccuggaugucugc

SEQ ID NO: 174762 - RNA, 19 nt, Artificial Sequence
  Description of Artificial Sequence: Synthetic oligonucleotide
aggggcgcacuacgcaggg

SEQ ID NO: 174763 - RNA, 19 nt, Artificial Sequence
  Description of Artificial Sequence: Synthetic oligonucleotide
gucuucgacaaugcuuggc

SEQ ID NO: 174764 - RNA, 19 nt, Artificial Sequence
  Description of Artificial Sequence: Synthetic oligonucleotide
agauccgccgaggauugug

SEQ ID NO: 174765 - RNA, 19 nt, Artificial Sequence
  Description of Artificial Sequence: Synthetic oligonucleotide
aggaggggcgcacuacgca

SEQ ID NO: 174766 - RNA, 19 nt, Artificial Sequence
  Description of Artificial Sequence: Synthetic oligonucleotide
cacacggcggaugguaccc

SEQ ID NO: 174767 - RNA, 19 nt, Artificial Sequence
  Description of Artificial Sequence: Synthetic oligonucleotide
uuccguacgucuuguccau

SEQ ID NO: 174768 - RNA, 19 nt, Artificial Sequence
  Description of Artificial Sequence: Synthetic oligonucleotide
aaccaagcucaggccggac

SEQ ID NO: 174769 - RNA, 19 nt, Artificial Sequence
  Description of Artificial Sequence: Synthetic oligonucleotide
agcauugaucacuggucuu

SEQ ID NO: 174770 - RNA, 19 nt, Artificial Sequence
  Description of Artificial Sequence: Synthetic oligonucleotide
ccuguccaucgauauaagc

SEQ ID NO: 174771 - RNA, 19 nt, Artificial Sequence
  Description of Artificial Sequence: Synthetic oligonucleotide
ugaugcggcagaggagccc

SEQ ID NO: 174772 - RNA, 19 nt, Artificial Sequence
  Description of Artificial Sequence: Synthetic oligonucleotide
agucggcaagcgauucccc

SEQ ID NO: 174773 - RNA, 19 nt, Artificial Sequence
  Description of Artificial Sequence: Synthetic oligonucleotide
cauaggaggggcgcacuac

SEQ ID NO: 174774 - RNA, 19 nt, Artificial Sequence
  Description of Artificial Sequence: Synthetic oligonucleotide
caccagcguagcauccccg

SEQ ID NO: 174775 - RNA, 19 nt, Artificial Sequence
  Description of Artificial Sequence: Synthetic oligonucleotide
agccgacacgaugccaucg

SEQ ID NO: 174776 - RNA, 19 nt, Artificial Sequence
  Description of Artificial Sequence: Synthetic oligonucleotide
gucugcuaagugugcugcc

SEQ ID NO: 174777 - RNA, 19 nt, Artificial Sequence
  Description of Artificial Sequence: Synthetic oligonucleotide
gagauggcgauagccgaca

SEQ ID NO: 174778 - RNA, 19 nt, Artificial Sequence
  Description of Artificial Sequence: Synthetic oligonucleotide
guggaagauccgccgagga

SEQ ID NO: 174779 - RNA, 19 nt, Artificial Sequence
  Description of Artificial Sequence: Synthetic oligonucleotide
gucgcgaacgcuggguggc

SEQ ID NO: 174780 - RNA, 19 nt, Artificial Sequence
  Description of Artificial Sequence: Synthetic oligonucleotide
guaccgguggugcagggua

SEQ ID NO: 174781 - RNA, 19 nt, Artificial Sequence
  Description of Artificial Sequence: Synthetic oligonucleotide
ggaggugccacguaacgua

SEQ ID NO: 174782 - RNA, 19 nt, Artificial Sequence
  Description of Artificial Sequence: Synthetic oligonucleotide
auccguagugugugugcca

SEQ ID NO: 174783 - RNA, 19 nt, Artificial Sequence
  Description of Artificial Sequence: Synthetic oligonucleotide
guccaucgauauaagcaac

SEQ ID NO: 174784 - RNA, 19 nt, Artificial Sequence
  Description of Artificial Sequence: Synthetic oligonucleotide
gaguggagccaaaucgcuc

SEQ ID NO: 174785 - RNA, 19 nt, Artificial Sequence
  Description of Artificial Sequence: Synthetic oligonucleotide
caggugucgugguuacuuc

SEQ ID NO: 174786 - RNA, 19 nt, Artificial Sequence
  Description of Artificial Sequence: Synthetic oligonucleotide
gaacuggcgagcagacuca

SEQ ID NO: 174787 - RNA, 19 nt, Artificial Sequence
  Description of Artificial Sequence: Synthetic oligonucleotide
ucgucaugccguugacagu

SEQ ID NO: 174788 - RNA, 19 nt, Artificial Sequence
  Description of Artificial Sequence: Synthetic oligonucleotide
agugcacugugcguccaug

SEQ ID NO: 174789 - RNA, 19 nt, Artificial Sequence
  Description of Artificial Sequence: Synthetic oligonucleotide
ccgaggauuguggugacag

SEQ ID NO: 174790 - RNA, 19 nt, Artificial Sequence
  Description of Artificial Sequence: Synthetic oligonucleotide
gcauugaucacuggucuuc

SEQ ID NO: 174791 - RNA, 19 nt, Artificial Sequence
  Description of Artificial Sequence: Synthetic oligonucleotide
acgcagggguaccccacag

SEQ ID NO: 174792 - RNA, 19 nt, Artificial Sequence
  Description of Artificial Sequence: Synthetic oligonucleotide
gcgagucauguagagcacg

SEQ ID NO: 174793 - RNA, 19 nt, Artificial Sequence
  Description of Artificial Sequence: Synthetic oligonucleotide
gaacgcuggguggcaugcg

SEQ ID NO: 174794 - RNA, 19 nt, Artificial Sequence
  Description of Artificial Sequence: Synthetic oligonucleotide
cuggguagggugcucucca

SEQ ID NO: 174795 - RNA, 19 nt, Artificial Sequence
  Description of Artificial Sequence: Synthetic oligonucleotide
cgauauaagcaaccucccc

SEQ ID NO: 174796 - RNA, 19 nt, Artificial Sequence
  Description of Artificial Sequence: Synthetic oligonucleotide
gccagagaguacucuaguc

SEQ ID NO: 174797 - RNA, 19 nt, Artificial Sequence
  Description of Artificial Sequence: Synthetic oligonucleotide
ccacuaaagagugcagcag

SEQ ID NO: 174798 - RNA, 19 nt, Artificial Sequence
  Description of Artificial Sequence: Synthetic oligonucleotide
ugcguccaugcuucagguc

SEQ ID NO: 174799 - RNA, 19 nt, Artificial Sequence
  Description of Artificial Sequence: Synthetic oligonucleotide
ccguacgucuuguccauag

SEQ ID NO: 174800 - RNA, 19 nt, Artificial Sequence
  Description of Artificial Sequence: Synthetic oligonucleotide
uuccgagccacgugacaua

SEQ ID NO: 174801 - RNA, 19 nt, Artificial Sequence
  Description of Artificial Sequence: Synthetic oligonucleotide
cauauaugcuugggcuauc

SEQ ID NO: 174802 - RNA, 19 nt, Artificial Sequence
  Description of Artificial Sequence: Synthetic oligonucleotide
cuguuuggcuauuuauuau

SEQ ID NO: 174803 - RNA, 19 nt, Artificial Sequence
  Description of Artificial Sequence: Synthetic oligonucleotide
cugagucggcaagcgauuc

SEQ ID NO: 174804 - RNA, 19 nt, Artificial Sequence
  Description of Artificial Sequence: Synthetic oligonucleotide
gcccacuaaagagugcagc

SEQ ID NO: 174805 - RNA, 19 nt, Artificial Sequence
  Description of Artificial Sequence: Synthetic oligonucleotide
aacuggcgagcagacucaa

SEQ ID NO: 174806 - RNA, 19 nt, Artificial Sequence
  Description of Artificial Sequence: Synthetic oligonucleotide
cuguaaccuguaguuccug

SEQ ID NO: 174807 - RNA, 19 nt, Artificial Sequence
  Description of Artificial Sequence: Synthetic oligonucleotide
ccucgcaggaccacacggc

SEQ ID NO: 174808 - RNA, 19 nt, Artificial Sequence
  Description of Artificial Sequence: Synthetic oligonucleotide
gggagugcacugugcgucc

SEQ ID NO: 174809 - RNA, 19 nt, Artificial Sequence
  Description of Artificial Sequence: Synthetic oligonucleotide
uggugaucgucaugccguu

SEQ ID NO: 174810 - RNA, 19 nt, Artificial Sequence
  Description of Artificial Sequence: Synthetic oligonucleotide
gccgacacgaugccaucgc

SEQ ID NO: 174811 - RNA, 19 nt, Artificial Sequence
  Description of Artificial Sequence: Synthetic oligonucleotide
gacucggcguggucucuca

SEQ ID NO: 174812 - RNA, 19 nt, Artificial Sequence
  Description of Artificial Sequence: Synthetic oligonucleotide
gcgggugcucaccucguag

SEQ ID NO: 174813 - RNA, 19 nt, Artificial Sequence
  Description of Artificial Sequence: Synthetic oligonucleotide
augucaaggcuccgcucuu

SEQ ID NO: 174814 - RNA, 19 nt, Artificial Sequence
  Description of Artificial Sequence: Synthetic oligonucleotide
gaaccaagcucaggccgga

SEQ ID NO: 174815 - RNA, 19 nt, Artificial Sequence
  Description of Artificial Sequence: Synthetic oligonucleotide
uagccgacacgaugccauc

SEQ ID NO: 174816 - RNA, 19 nt, Artificial Sequence
  Description of Artificial Sequence: Synthetic oligonucleotide
ccagagaguacucuagucu

SEQ ID NO: 174817 - RNA, 19 nt, Artificial Sequence
  Description of Artificial Sequence: Synthetic oligonucleotide
ggauguguuggcccacuaa

SEQ ID NO: 174818 - RNA, 19 nt, Artificial Sequence
  Description of Artificial Sequence: Synthetic oligonucleotide
ccgcacugcucagaaagcg

SEQ ID NO: 174819 - RNA, 19 nt, Artificial Sequence
  Description of Artificial Sequence: Synthetic oligonucleotide
acugagucggcaagcgauu

SEQ ID NO: 174820 - RNA, 19 nt, Artificial Sequence
  Description of Artificial Sequence: Synthetic oligonucleotide
ccccggaaugcacaccugc

SEQ ID NO: 174821 - RNA, 19 nt, Artificial Sequence
  Description of Artificial Sequence: Synthetic oligonucleotide
cugccgcucggcagugggc

SEQ ID NO: 174822 - RNA, 19 nt, Artificial Sequence
  Description of Artificial Sequence: Synthetic oligonucleotide
aggugccacguaacguaag

SEQ ID NO: 174823 - RNA, 19 nt, Artificial Sequence
  Description of Artificial Sequence: Synthetic oligonucleotide
ggaagauccgccgaggauu

SEQ ID NO: 174824 - RNA, 19 nt, Artificial Sequence
  Description of Artificial Sequence: Synthetic oligonucleotide
ggguagggugcucuccaac

SEQ ID NO: 174825 - RNA, 19 nt, Artificial Sequence
  Description of Artificial Sequence: Synthetic oligonucleotide
gucggcaagcgauuccccu

SEQ ID NO: 174826 - RNA, 19 nt, Artificial Sequence
  Description of Artificial Sequence: Synthetic oligonucleotide
ugucaaggcuccgcucuuu

SEQ ID NO: 174827 - RNA, 19 nt, Artificial Sequence
  Description of Artificial Sequence: Synthetic oligonucleotide
cuacuggugcgggugcuca

SEQ ID NO: 174828 - RNA, 19 nt, Artificial Sequence
  Description of Artificial Sequence: Synthetic oligonucleotide
gcaacucauggucugcacu

SEQ ID NO: 174829 - RNA, 19 nt, Artificial Sequence
  Description of Artificial Sequence: Synthetic oligonucleotide
caggaccacacggcggaug

SEQ ID NO: 174830 - RNA, 19 nt, Artificial Sequence
  Description of Artificial Sequence: Synthetic oligonucleotide
ggugcucaccucguagaac

SEQ ID NO: 174831 - RNA, 19 nt, Artificial Sequence
  Description of Artificial Sequence: Synthetic oligonucleotide
cacuuccguacgucuuguc

SEQ ID NO: 174832 - RNA, 19 nt, Artificial Sequence
  Description of Artificial Sequence: Synthetic oligonucleotide
ugacggaaguaggcagcuc

SEQ ID NO: 174833 - RNA, 19 nt, Artificial Sequence
  Description of Artificial Sequence: Synthetic oligonucleotide
ugacucggcguggucucuc

SEQ ID NO: 174834 - RNA, 19 nt, Artificial Sequence
  Description of Artificial Sequence: Synthetic oligonucleotide
ccauauccucucgggaacc

SEQ ID NO: 174835 - RNA, 19 nt, Artificial Sequence
  Description of Artificial Sequence: Synthetic oligonucleotide
agucgaugacugccauauu

SEQ ID NO: 174836 - RNA, 19 nt, Artificial Sequence
  Description of Artificial Sequence: Synthetic oligonucleotide
ccacacggcggaugguacc

SEQ ID NO: 174837 - RNA, 19 nt, Artificial Sequence
  Description of Artificial Sequence: Synthetic oligonucleotide
ggucaccagcguagcaucc

SEQ ID NO: 174838 - RNA, 19 nt, Artificial Sequence
  Description of Artificial Sequence: Synthetic oligonucleotide
guccacucaugcucuagau

SEQ ID NO: 174839 - RNA, 19 nt, Artificial Sequence
  Description of Artificial Sequence: Synthetic oligonucleotide
caugcgcagacugggaggu

SEQ ID NO: 174840 - RNA, 19 nt, Artificial Sequence
  Description of Artificial Sequence: Synthetic oligonucleotide
ggguaccaacaccugucca

SEQ ID NO: 174841 - RNA, 19 nt, Artificial Sequence
  Description of Artificial Sequence: Synthetic oligonucleotide
gcgcucuagguccccauca

SEQ ID NO: 174842 - RNA, 19 nt, Artificial Sequence
  Description of Artificial Sequence: Synthetic oligonucleotide
gcuagggauuguccacuca

SEQ ID NO: 174843 - RNA, 19 nt, Artificial Sequence
  Description of Artificial Sequence: Synthetic oligonucleotide
ggcuagggauuguccacuc

SEQ ID NO: 174844 - RNA, 19 nt, Artificial Sequence
  Description of Artificial Sequence: Synthetic oligonucleotide
accgaacuccagaguuuug

SEQ ID NO: 174845 - RNA, 19 nt, Artificial Sequence
  Description of Artificial Sequence: Synthetic oligonucleotide
gggcgcacuacgcaggggu

SEQ ID NO: 174846 - RNA, 19 nt, Artificial Sequence
  Description of Artificial Sequence: Synthetic oligonucleotide
augacucggcguggucucu

SEQ ID NO: 174847 - RNA, 19 nt, Artificial Sequence
  Description of Artificial Sequence: Synthetic oligonucleotide
gcguagcauccccggaaug

SEQ ID NO: 174848 - RNA, 19 nt, Artificial Sequence
  Description of Artificial Sequence: Synthetic oligonucleotide
gugccacguaacguaagcu

SEQ ID NO: 174849 - RNA, 19 nt, Artificial Sequence
  Description of Artificial Sequence: Synthetic oligonucleotide
gugccacguugaacaaaug

SEQ ID NO: 174850 - RNA, 19 nt, Artificial Sequence
  Description of Artificial Sequence: Synthetic oligonucleotide
gggugcucaccucguagaa

SEQ ID NO: 174851 - RNA, 19 nt, Artificial Sequence
  Description of Artificial Sequence: Synthetic oligonucleotide
acggccuagcacgguggca

SEQ ID NO: 174852 - RNA, 19 nt, Artificial Sequence
  Description of Artificial Sequence: Synthetic oligonucleotide
cgauagccgacacgaugcc

SEQ ID NO: 174853 - RNA, 19 nt, Artificial Sequence
  Description of Artificial Sequence: Synthetic oligonucleotide
ggggugcaaccucacaggu

SEQ ID NO: 174854 - RNA, 19 nt, Artificial Sequence
  Description of Artificial Sequence: Synthetic oligonucleotide
aggccggaccucucccuuu

SEQ ID NO: 174855 - RNA, 19 nt, Artificial Sequence
  Description of Artificial Sequence: Synthetic oligonucleotide
gccugucuagguaccggug

SEQ ID NO: 174856 - RNA, 19 nt, Artificial Sequence
  Description of Artificial Sequence: Synthetic oligonucleotide
cgagccacgugacauaugu

SEQ ID NO: 174857 - RNA, 19 nt, Artificial Sequence
  Description of Artificial Sequence: Synthetic oligonucleotide
cccggaaugcacaccugca

SEQ ID NO: 174858 - RNA, 19 nt, Artificial Sequence
  Description of Artificial Sequence: Synthetic oligonucleotide
acacggcggaugguacccu

SEQ ID NO: 174859 - RNA, 19 nt, Artificial Sequence
  Description of Artificial Sequence: Synthetic oligonucleotide
cccuagaaacggccuagca

SEQ ID NO: 174860 - RNA, 19 nt, Artificial Sequence
  Description of Artificial Sequence: Synthetic oligonucleotide
ggccggaccucucccuuuc

SEQ ID NO: 174861 - RNA, 19 nt, Artificial Sequence
  Description of Artificial Sequence: Synthetic oligonucleotide
guacucuagucuggagccu

SEQ ID NO: 174862 - RNA, 19 nt, Artificial Sequence
  Description of Artificial Sequence: Synthetic oligonucleotide
ccccuuucuggacggagga

SEQ ID NO: 174863 - RNA, 19 nt, Artificial Sequence
  Description of Artificial Sequence: Synthetic oligonucleotide
gcccuagaaacggccuagc

SEQ ID NO: 174864 - RNA, 19 nt, Artificial Sequence
  Description of Artificial Sequence: Synthetic oligonucleotide
gcacuacgcagggguaccc

SEQ ID NO: 174865 - RNA, 19 nt, Artificial Sequence
  Description of Artificial Sequence: Synthetic oligonucleotide
gggaugacucggcgugguc

SEQ ID NO: 174866 - RNA, 19 nt, Artificial Sequence
  Description of Artificial Sequence: Synthetic oligonucleotide
gcgcacuacgcagggguac

SEQ ID NO: 174867 - RNA, 19 nt, Artificial Sequence
  Description of Artificial Sequence: Synthetic oligonucleotide
ccggagcacgacgacauca

SEQ ID NO: 174868 - RNA, 19 nt, Artificial Sequence
  Description of Artificial Sequence: Synthetic oligonucleotide
gagugcacugugcguccau

SEQ ID NO: 174869 - RNA, 19 nt, Artificial Sequence
  Description of Artificial Sequence: Synthetic oligonucleotide
cgugguuacuucgguggug

SEQ ID NO: 174870 - RNA, 19 nt, Artificial Sequence
  Description of Artificial Sequence: Synthetic oligonucleotide
gggaggugccacguaacgu

SEQ ID NO: 174871 - RNA, 19 nt, Artificial Sequence
  Description of Artificial Sequence: Synthetic oligonucleotide
gcacgacgacaucagcgua

SEQ ID NO: 174872 - RNA, 19 nt, Artificial Sequence
  Description of Artificial Sequence: Synthetic oligonucleotide
gcgcagacugggaggugcc

SEQ ID NO: 174873 - RNA, 19 nt, Artificial Sequence
  Description of Artificial Sequence: Synthetic oligonucleotide
cguaagcucacacgguacu

SEQ ID NO: 174874 - RNA, 19 nt, Artificial Sequence
  Description of Artificial Sequence: Synthetic oligonucleotide
ggggcgcacuacgcagggg

SEQ ID NO: 174875 - RNA, 19 nt, Artificial Sequence
  Description of Artificial Sequence: Synthetic oligonucleotide
ggagugcacugugcgucca

SEQ ID NO: 174876 - RNA, 19 nt, Artificial Sequence
  Description of Artificial Sequence: Synthetic oligonucleotide
cgggugcucaccucguaga

SEQ ID NO: 174877 - RNA, 19 nt, Artificial Sequence
  Description of Artificial Sequence: Synthetic oligonucleotide
caguguaggccacguucau

SEQ ID NO: 174878 - RNA, 19 nt, Artificial Sequence
  Description of Artificial Sequence: Synthetic oligonucleotide
ccagcguagcauccccgga

SEQ ID NO: 174879 - RNA, 19 nt, Artificial Sequence
  Description of Artificial Sequence: Synthetic oligonucleotide
cgagucauguagagcacgu

SEQ ID NO: 174880 - RNA, 19 nt, Artificial Sequence
  Description of Artificial Sequence: Synthetic oligonucleotide
caucaguguaggccacguu

SEQ ID NO: 174881 - RNA, 19 nt, Artificial Sequence
  Description of Artificial Sequence: Synthetic oligonucleotide
gguaccgguggugcagggu

SEQ ID NO: 174882 - RNA, 19 nt, Artificial Sequence
  Description of Artificial Sequence: Synthetic oligonucleotide
gccggagcacgacgacauc

SEQ ID NO: 174883 - RNA, 19 nt, Artificial Sequence
  Description of Artificial Sequence: Synthetic oligonucleotide
ccggaaugcacaccugcau

SEQ ID NO: 174884 - RNA, 19 nt, Artificial Sequence
  Description of Artificial Sequence: Synthetic oligonucleotide
cugcaccaucauccguagu

SEQ ID NO: 174885 - RNA, 19 nt, Artificial Sequence
  Description of Artificial Sequence: Synthetic oligonucleotide
cggccuagcacgguggcaa

SEQ ID NO: 174886 - RNA, 19 nt, Artificial Sequence
  Description of Artificial Sequence: Synthetic oligonucleotide
cacggcggaugguacccuu

SEQ ID NO: 174887 - RNA, 19 nt, Artificial Sequence
  Description of Artificial Sequence: Synthetic oligonucleotide
ggcgcacuacgcaggggua

SEQ ID NO: 174888 - RNA, 19 nt, Artificial Sequence
  Description of Artificial Sequence: Synthetic oligonucleotide
gcccucacucacagcgguc

SEQ ID NO: 174889 - RNA, 19 nt, Artificial Sequence
  Description of Artificial Sequence: Synthetic oligonucleotide
cggaaugcacaccugcauu

SEQ ID NO: 174890 - RNA, 19 nt, Artificial Sequence
  Description of Artificial Sequence: Synthetic oligonucleotide
cucggcagugggccacaau

SEQ ID NO: 174891 - RNA, 19 nt, Artificial Sequence
  Description of Artificial Sequence: Synthetic oligonucleotide
cgacaucagcguagcaacu

SEQ ID NO: 174892 - RNA, 19 nt, Artificial Sequence
  Description of Artificial Sequence: Synthetic oligonucleotide
caccuaccauggugaucgu

SEQ ID NO: 174893 - RNA, 19 nt, Artificial Sequence
  Description of Artificial Sequence: Synthetic oligonucleotide
cgacaaugcuuggcugcca

SEQ ID NO: 174894 - RNA, 19 nt, Artificial Sequence
  Description of Artificial Sequence: Synthetic oligonucleotide
ccacuuccguacgucuugu

SEQ ID NO: 174895 - RNA, 19 nt, Artificial Sequence
  Description of Artificial Sequence: Synthetic oligonucleotide
cgacgacaucagcguagca

SEQ ID NO: 174896 - RNA, 19 nt, Artificial Sequence
  Description of Artificial Sequence: Synthetic oligonucleotide
ggccgucagggguccccau

SEQ ID NO: 174897 - RNA, 19 nt, Artificial Sequence
  Description of Artificial Sequence: Synthetic oligonucleotide
ccuccacgcuuaucucauu

SEQ ID NO: 174898 - RNA, 19 nt, Artificial Sequence
  Description of Artificial Sequence: Synthetic oligonucleotide
aacaagacaagacuagacc

SEQ ID NO: 174899 - RNA, 19 nt, Artificial Sequence
  Description of Artificial Sequence: Synthetic oligonucleotide
aaaagcuugagaauguccc

SEQ ID NO: 174900 - RNA, 19 nt, Artificial Sequence
  Description of Artificial Sequence: Synthetic oligonucleotide
aguuacucaaagcugauuc

SEQ ID NO: 174901 - RNA, 19 nt, Artificial Sequence
  Description of Artificial Sequence: Synthetic oligonucleotide
aagagguacauaaauacac

SEQ ID NO: 174902 - RNA, 19 nt, Artificial Sequence
  Description of Artificial Sequence: Synthetic oligonucleotide
acuguuguguuucugaagg

SEQ ID NO: 174903 - RNA, 19 nt, Artificial Sequence
  Description of Artificial Sequence: Synthetic oligonucleotide
cauacuuugcccaucaccc

SEQ ID NO: 174904 - RNA, 19 nt, Artificial Sequence
  Description of Artificial Sequence: Synthetic oligonucleotide
uagggugaaaccauggagg

SEQ ID NO: 174905 - RNA, 19 nt, Artificial Sequence
  Description of Artificial Sequence: Synthetic oligonucleotide
uuaauuguagagaaccucu

SEQ ID NO: 174906 - RNA, 19 nt, Artificial Sequence
  Description of Artificial Sequence: Synthetic oligonucleotide
aauaagucuucuccaacag

SEQ ID NO: 174907 - RNA, 19 nt, Artificial Sequence
  Description of Artificial Sequence: Synthetic oligonucleotide
ugagagggaaaccugcucg

SEQ ID NO: 174908 - RNA, 19 nt, Artificial Sequence
  Description of Artificial Sequence: Synthetic oligonucleotide
accguuaagaacuauauaa

SEQ ID NO: 174909 - RNA, 19 nt, Artificial Sequence
  Description of Artificial Sequence: Synthetic oligonucleotide
uguucugucaugcucagac

SEQ ID NO: 174910 - RNA, 19 nt, Artificial Sequence
  Description of Artificial Sequence: Synthetic oligonucleotide
ugauaaacagggcaagaag

SEQ ID NO: 174911 - RNA, 19 nt, Artificial Sequence
  Description of Artificial Sequence: Synthetic oligonucleotide
uguagagaaccucugauaa

SEQ ID NO: 174912 - RNA, 19 nt, Artificial Sequence
  Description of Artificial Sequence: Synthetic oligonucleotide
uaugauauaguguuccacu

SEQ ID NO: 174913 - RNA, 19 nt, Artificial Sequence
  Description of Artificial Sequence: Synthetic oligonucleotide
aauuaacauacacaauggu

SEQ ID NO: 174914 - RNA, 19 nt, Artificial Sequence
  Description of Artificial Sequence: Synthetic oligonucleotide
agaaaauguacaguuacuc

SEQ ID NO: 174915 - RNA, 19 nt, Artificial Sequence
  Description of Artificial Sequence: Synthetic oligonucleotide
ucuccucucauaaaguuca

SEQ ID NO: 174916 - RNA, 19 nt, Artificial Sequence
  Description of Artificial Sequence: Synthetic oligonucleotide
uuuggaauagggaacccug

SEQ ID NO: 174917 - RNA, 19 nt, Artificial Sequence
  Description of Artificial Sequence: Synthetic oligonucleotide
uaacaauugaaacuccaac

SEQ ID NO: 174918 - RNA, 19 nt, Artificial Sequence
  Description of Artificial Sequence: Synthetic oligonucleotide
uguuccacuuacaugaggu

SEQ ID NO: 174919 - RNA, 19 nt, Artificial Sequence
  Description of Artificial Sequence: Synthetic oligonucleotide
acuuacaugaggucaugac

SEQ ID NO: 174920 - RNA, 19 nt, Artificial Sequence
  Description of Artificial Sequence: Synthetic oligonucleotide
uggguuaugauauaguguu

SEQ ID NO: 174921 - RNA, 19 nt, Artificial Sequence
  Description of Artificial Sequence: Synthetic oligonucleotide
acaagacaagacuagacca

SEQ ID NO: 174922 - RNA, 19 nt, Artificial Sequence
  Description of Artificial Sequence: Synthetic oligonucleotide
auuaauuguagagaaccuc

SEQ ID NO: 174923 - RNA, 19 nt, Artificial Sequence
  Description of Artificial Sequence: Synthetic oligonucleotide
uuguuugugugacucaggc

SEQ ID NO: 174924 - RNA, 19 nt, Artificial Sequence
  Description of Artificial Sequence: Synthetic oligonucleotide
auguaucuuaaauaggccu

SEQ ID NO: 174925 - RNA, 19 nt, Artificial Sequence
  Description of Artificial Sequence: Synthetic oligonucleotide
aaugagagggaaugaucag

SEQ ID NO: 174926 - RNA, 19 nt, Artificial Sequence
  Description of Artificial Sequence: Synthetic oligonucleotide
uuugucugucccaucaccc

SEQ ID NO: 174927 - RNA, 19 nt, Artificial Sequence
  Description of Artificial Sequence: Synthetic oligonucleotide
gacauaaugggguugggga

SEQ ID NO: 174928 - RNA, 19 nt, Artificial Sequence
  Description of Artificial Sequence: Synthetic oligonucleotide
cuuugcgcggaaauguucg

SEQ ID NO: 174929 - RNA, 19 nt, Artificial Sequence
  Description of Artificial Sequence: Synthetic oligonucleotide
uguaucuuaaauaggccua

SEQ ID NO: 174930 - RNA, 19 nt, Artificial Sequence
  Description of Artificial Sequence: Synthetic oligonucleotide
augagaauagccuggggug

SEQ ID NO: 174931 - RNA, 19 nt, Artificial Sequence
  Description of Artificial Sequence: Synthetic oligonucleotide
agagggaaugaucagagaa

SEQ ID NO: 174932 - RNA, 19 nt, Artificial Sequence
  Description of Artificial Sequence: Synthetic oligonucleotide
aggaguuuggaauagggaa

SEQ ID NO: 174933 - RNA, 19 nt, Artificial Sequence
  Description of Artificial Sequence: Synthetic oligonucleotide
agccucgugagucaggcac

SEQ ID NO: 174934 - RNA, 19 nt, Artificial Sequence
  Description of Artificial Sequence: Synthetic oligonucleotide
agagguacauaaauacacc

SEQ ID NO: 174935 - RNA, 19 nt, Artificial Sequence
  Description of Artificial Sequence: Synthetic oligonucleotide
augagugugcaagagguac

SEQ ID NO: 174936 - RNA, 19 nt, Artificial Sequence
  Description of Artificial Sequence: Synthetic oligonucleotide
uugucucuaaggaagucug

SEQ ID NO: 174937 - RNA, 19 nt, Artificial Sequence
  Description of Artificial Sequence: Synthetic oligonucleotide
gaauguauagcugcgccag

SEQ ID NO: 174938 - RNA, 19 nt, Artificial Sequence
  Description of Artificial Sequence: Synthetic oligonucleotide
ugagaucccucaaugggcc

SEQ ID NO: 174939 - RNA, 19 nt, Artificial Sequence
  Description of Artificial Sequence: Synthetic oligonucleotide
uuggaauagggaacccugg

SEQ ID NO: 174940 - RNA, 19 nt, Artificial Sequence
  Description of Artificial Sequence: Synthetic oligonucleotide
uaucagagggagcuggagc

SEQ ID NO: 174941 - RNA, 19 nt, Artificial Sequence
  Description of Artificial Sequence: Synthetic oligonucleotide
guagggugaaaccauggag

SEQ ID NO: 174942 - RNA, 19 nt, Artificial Sequence
  Description of Artificial Sequence: Synthetic oligonucleotide
auaagcccagaccauuaac

SEQ ID NO: 174943 - RNA, 19 nt, Artificial Sequence
  Description of Artificial Sequence: Synthetic oligonucleotide
auugaucuccaggucaggc

SEQ ID NO: 174944 - RNA, 19 nt, Artificial Sequence
  Description of Artificial Sequence: Synthetic oligonucleotide
uaauuguagagaaccucug

SEQ ID NO: 174945 - RNA, 19 nt, Artificial Sequence
  Description of Artificial Sequence: Synthetic oligonucleotide
accucugauaaacagggca

SEQ ID NO: 174946 - RNA, 19 nt, Artificial Sequence
  Description of Artificial Sequence: Synthetic oligonucleotide
cauagguugaugagugugc

SEQ ID NO: 174947 - RNA, 19 nt, Artificial Sequence
  Description of Artificial Sequence: Synthetic oligonucleotide
agggugaaaccauggaggg

SEQ ID NO: 174948 - RNA, 19 nt, Artificial Sequence
  Description of Artificial Sequence: Synthetic oligonucleotide
uuucgugugaaaagcuuga

SEQ ID NO: 174949 - RNA, 19 nt, Artificial Sequence
  Description of Artificial Sequence: Synthetic oligonucleotide
aaccugcucguuuuaaaca

SEQ ID NO: 174950 - RNA, 19 nt, Artificial Sequence
  Description of Artificial Sequence: Synthetic oligonucleotide
aauuaauuguagagaaccu

SEQ ID NO: 174951 - RNA, 19 nt, Artificial Sequence
  Description of Artificial Sequence: Synthetic oligonucleotide
agcgagaaaauguacaguu

SEQ ID NO: 174952 - RNA, 19 nt, Artificial Sequence
  Description of Artificial Sequence: Synthetic oligonucleotide
accugcucguuuuaaacag

SEQ ID NO: 174953 - RNA, 19 nt, Artificial Sequence
  Description of Artificial Sequence: Synthetic oligonucleotide
caugacauaaugggguugg

SEQ ID NO: 174954 - RNA, 19 nt, Artificial Sequence
  Description of Artificial Sequence: Synthetic oligonucleotide
guaccgggcaaucuggagg

SEQ ID NO: 174955 - RNA, 19 nt, Artificial Sequence
  Description of Artificial Sequence: Synthetic oligonucleotide
cugagaucccucaaugggc

SEQ ID NO: 174956 - RNA, 19 nt, Artificial Sequence
  Description of Artificial Sequence: Synthetic oligonucleotide
ugcuguuacugccuccagg

SEQ ID NO: 174957 - RNA, 19 nt, Artificial Sequence
  Description of Artificial Sequence: Synthetic oligonucleotide
uccuuuucgugugaaaagc

SEQ ID NO: 174958 - RNA, 19 nt, Artificial Sequence
  Description of Artificial Sequence: Synthetic oligonucleotide
cagaauguauagcugcgcc

SEQ ID NO: 174959 - RNA, 19 nt, Artificial Sequence
  Description of Artificial Sequence: Synthetic oligonucleotide
aucuuaaauaggccuaaga

SEQ ID NO: 174960 - RNA, 19 nt, Artificial Sequence
  Description of Artificial Sequence: Synthetic oligonucleotide
uggaauagggaacccuggc

SEQ ID NO: 174961 - RNA, 19 nt, Artificial Sequence
  Description of Artificial Sequence: Synthetic oligonucleotide
ugacauaaugggguugggg

SEQ ID NO: 174962 - RNA, 19 nt, Artificial Sequence
  Description of Artificial Sequence: Synthetic oligonucleotide
auacaccugacaccccgcc

SEQ ID NO: 174963 - RNA, 19 nt, Artificial Sequence
  Description of Artificial Sequence: Synthetic oligonucleotide
cuuacaugaggucaugaca

SEQ ID NO: 174964 - RNA, 19 nt, Artificial Sequence
  Description of Artificial Sequence: Synthetic oligonucleotide
aauacaccugacaccccgc

SEQ ID NO: 174965 - RNA, 19 nt, Artificial Sequence
  Description of Artificial Sequence: Synthetic oligonucleotide
uuaugauauaguguuccac

SEQ ID NO: 174966 - RNA, 19 nt, Artificial Sequence
  Description of Artificial Sequence: Synthetic oligonucleotide
aauaagcccagaccauuaa

SEQ ID NO: 174967 - RNA, 19 nt, Artificial Sequence
  Description of Artificial Sequence: Synthetic oligonucleotide
uggggugacgaguggacgg

SEQ ID NO: 174968 - RNA, 19 nt, Artificial Sequence
  Description of Artificial Sequence: Synthetic oligonucleotide
uuccacuuacaugagguca

SEQ ID NO: 174969 - RNA, 19 nt, Artificial Sequence
  Description of Artificial Sequence: Synthetic oligonucleotide
agaggaguuuggaauaggg

SEQ ID NO: 174970 - RNA, 19 nt, Artificial Sequence
  Description of Artificial Sequence: Synthetic oligonucleotide
aagcugauucugccagugg

SEQ ID NO: 174971 - RNA, 19 nt, Artificial Sequence
  Description of Artificial Sequence: Synthetic oligonucleotide
agaauguauagcugcgcca

SEQ ID NO: 174972 - RNA, 19 nt, Artificial Sequence
  Description of Artificial Sequence: Synthetic oligonucleotide
uguauagcugcgccagccc

SEQ ID NO: 174973 - RNA, 19 nt, Artificial Sequence
  Description of Artificial Sequence: Synthetic oligonucleotide
ucucaccucccucucgggg

SEQ ID NO: 174974 - RNA, 19 nt, Artificial Sequence
  Description of Artificial Sequence: Synthetic oligonucleotide
ugcgcggaaauguucggag

SEQ ID NO: 174975 - RNA, 19 nt, Artificial Sequence
  Description of Artificial Sequence: Synthetic oligonucleotide
uuaaacagguggccuuuca

SEQ ID NO: 174976 - RNA, 19 nt, Artificial Sequence
  Description of Artificial Sequence: Synthetic oligonucleotide
gacuagaccagcucgugga

SEQ ID NO: 174977 - RNA, 19 nt, Artificial Sequence
  Description of Artificial Sequence: Synthetic oligonucleotide
auacuuugcccaucacccg

SEQ ID NO: 174978 - RNA, 19 nt, Artificial Sequence
  Description of Artificial Sequence: Synthetic oligonucleotide
gacaaaaguggguagggua

SEQ ID NO: 174979 - RNA, 19 nt, Artificial Sequence
  Description of Artificial Sequence: Synthetic oligonucleotide
agacuagaccagcucgugg

SEQ ID NO: 174980 - RNA, 19 nt, Artificial Sequence
  Description of Artificial Sequence: Synthetic oligonucleotide
uguucggaggaguuucagc

SEQ ID NO: 174981 - RNA, 19 nt, Artificial Sequence
  Description of Artificial Sequence: Synthetic oligonucleotide
gucgaggagagacaccucc

SEQ ID NO: 174982 - RNA, 19 nt, Artificial Sequence
  Description of Artificial Sequence: Synthetic oligonucleotide
ugagucaggcacuuuucga

SEQ ID NO: 174983 - RNA, 19 nt, Artificial Sequence
  Description of Artificial Sequence: Synthetic oligonucleotide
ugagugugcaagagguaca

SEQ ID NO: 174984 - RNA, 19 nt, Artificial Sequence
  Description of Artificial Sequence: Synthetic oligonucleotide
ggugggauugaucuccagg

SEQ ID NO: 174985 - RNA, 19 nt, Artificial Sequence
  Description of Artificial Sequence: Synthetic oligonucleotide
uguaaacuggcuggggaug

SEQ ID NO: 174986 - RNA, 19 nt, Artificial Sequence
  Description of Artificial Sequence: Synthetic oligonucleotide
agugagcaaggcgugugcc

SEQ ID NO: 174987 - RNA, 19 nt, Artificial Sequence
  Description of Artificial Sequence: Synthetic oligonucleotide
aaggguuauguuggugggg

SEQ ID NO: 174988 - RNA, 19 nt, Artificial Sequence
  Description of Artificial Sequence: Synthetic oligonucleotide
gagccuaugggugcgcugg

SEQ ID NO: 174989 - RNA, 19 nt, Artificial Sequence
  Description of Artificial Sequence: Synthetic oligonucleotide
uuugcgcggaaauguucgg

SEQ ID NO: 174990 - RNA, 19 nt, Artificial Sequence
  Description of Artificial Sequence: Synthetic oligonucleotide
uccaacaaauaagucuucu

SEQ ID NO: 174991 - RNA, 19 nt, Artificial Sequence
  Description of Artificial Sequence: Synthetic oligonucleotide
caacaauccccuuucccug

SEQ ID NO: 174992 - RNA, 19 nt, Artificial Sequence
  Description of Artificial Sequence: Synthetic oligonucleotide
ucagaauguauagcugcgc

SEQ ID NO: 174993 - RNA, 19 nt, Artificial Sequence
  Description of Artificial Sequence: Synthetic oligonucleotide
uccccauugccacucuacc

SEQ ID NO: 174994 - RNA, 19 nt, Artificial Sequence
  Description of Artificial Sequence: Synthetic oligonucleotide
augucgaggagagacaccu

SEQ ID NO: 174995 - RNA, 19 nt, Artificial Sequence
  Description of Artificial Sequence: Synthetic oligonucleotide
aggucaugacauaaugggg

SEQ ID NO: 174996 - RNA, 19 nt, Artificial Sequence
  Description of Artificial Sequence: Synthetic oligonucleotide
gagguacauaaauacaccu

SEQ ID NO: 174997 - RNA, 19 nt, Artificial Sequence
  Description of Artificial Sequence: Synthetic oligonucleotide
cauaaugggguuggggaag

SEQ ID NO: 174998 - RNA, 19 nt, Artificial Sequence
  Description of Artificial Sequence: Synthetic oligonucleotide
guuacugccuccaggguug

SEQ ID NO: 174999 - RNA, 19 nt, Artificial Sequence
  Description of Artificial Sequence: Synthetic oligonucleotide
aguuuggaauagggaaccc

SEQ ID NO: 175000 - RNA, 19 nt, Artificial Sequence
  Description of Artificial Sequence: Synthetic oligonucleotide
agaggguuuguuuguguga

SEQ ID NO: 175001 - RNA, 19 nt, Artificial Sequence
  Description of Artificial Sequence: Synthetic oligonucleotide
ccgagaagaagccuguugg

SEQ ID NO: 175002 - RNA, 19 nt, Artificial Sequence
  Description of Artificial Sequence: Synthetic oligonucleotide
uaucuuaaauaggccuaag

SEQ ID NO: 175003 - RNA, 19 nt, Artificial Sequence
  Description of Artificial Sequence: Synthetic oligonucleotide
uauagcugcgccagcccac

SEQ ID NO: 175004 - RNA, 19 nt, Artificial Sequence
  Description of Artificial Sequence: Synthetic oligonucleotide
uuucccugguuccuaccca

SEQ ID NO: 175005 - RNA, 19 nt, Artificial Sequence
  Description of Artificial Sequence: Synthetic oligonucleotide
uaggguagggugaaaccau

SEQ ID NO: 175006 - RNA, 19 nt, Artificial Sequence
  Description of Artificial Sequence: Synthetic oligonucleotide
aagacuagaccagcucgug

SEQ ID NO: 175007 - RNA, 19 nt, Artificial Sequence
  Description of Artificial Sequence: Synthetic oligonucleotide
ucgugagucaggcacuuuu

SEQ ID NO: 175008 - RNA, 19 nt, Artificial Sequence
  Description of Artificial Sequence: Synthetic oligonucleotide
cucuccucucauaaaguuc

SEQ ID NO: 175009 - RNA, 19 nt, Artificial Sequence
  Description of Artificial Sequence: Synthetic oligonucleotide
acuagaccagcucguggag

SEQ ID NO: 175010 - RNA, 19 nt, Artificial Sequence
  Description of Artificial Sequence: Synthetic oligonucleotide
ugguaagggcaugucgagg

SEQ ID NO: 175011 - RNA, 19 nt, Artificial Sequence
  Description of Artificial Sequence: Synthetic oligonucleotide
agggaaugaucagagaaaa

SEQ ID NO: 175012 - RNA, 19 nt, Artificial Sequence
  Description of Artificial Sequence: Synthetic oligonucleotide
uucgaugagcuggagguaa

SEQ ID NO: 175013 - RNA, 19 nt, Artificial Sequence
  Description of Artificial Sequence: Synthetic oligonucleotide
acggggagcgagugagugc

SEQ ID NO: 175014 - RNA, 19 nt, Artificial Sequence
  Description of Artificial Sequence: Synthetic oligonucleotide
aaugguuaccagccauauu

SEQ ID NO: 175015 - RNA, 19 nt, Artificial Sequence
  Description of Artificial Sequence: Synthetic oligonucleotide
cugguaagggcaugucgag

SEQ ID NO: 175016 - RNA, 19 nt, Artificial Sequence
  Description of Artificial Sequence: Synthetic oligonucleotide
uccgucggcgacaggagcu

SEQ ID NO: 175017 - RNA, 19 nt, Artificial Sequence
  Description of Artificial Sequence: Synthetic oligonucleotide
ucgaggagagacaccucca

SEQ ID NO: 175018 - RNA, 19 nt, Artificial Sequence
  Description of Artificial Sequence: Synthetic oligonucleotide
uacaccugacaccccgccc

SEQ ID NO: 175019 - RNA, 19 nt, Artificial Sequence
  Description of Artificial Sequence: Synthetic oligonucleotide
auagcugcgccagcccacc

SEQ ID NO: 175020 - RNA, 19 nt, Artificial Sequence
  Description of Artificial Sequence: Synthetic oligonucleotide
augccugaagggcucagga

SEQ ID NO: 175021 - RNA, 19 nt, Artificial Sequence
  Description of Artificial Sequence: Synthetic oligonucleotide
uaaggaagucugcucucuc

SEQ ID NO: 175022 - RNA, 19 nt, Artificial Sequence
  Description of Artificial Sequence: Synthetic oligonucleotide
ucuccgucggcgacaggag

SEQ ID NO: 175023 - RNA, 19 nt, Artificial Sequence
  Description of Artificial Sequence: Synthetic oligonucleotide
gagugagcaaggcgugugc

SEQ ID NO: 175024 - RNA, 19 nt, Artificial Sequence
  Description of Artificial Sequence: Synthetic oligonucleotide
aggguuauguuggugggga

SEQ ID NO: 175025 - RNA, 19 nt, Artificial Sequence
  Description of Artificial Sequence: Synthetic oligonucleotide
ugggauugaucuccagguc

SEQ ID NO: 175026 - RNA, 19 nt, Artificial Sequence
  Description of Artificial Sequence: Synthetic oligonucleotide
gauugaucuccaggucagg

SEQ ID NO: 175027 - RNA, 19 nt, Artificial Sequence
  Description of Artificial Sequence: Synthetic oligonucleotide
auugggaacugugcauguc

SEQ ID NO: 175028 - RNA, 19 nt, Artificial Sequence
  Description of Artificial Sequence: Synthetic oligonucleotide
gacauuaaggcaacagacu

SEQ ID NO: 175029 - RNA, 19 nt, Artificial Sequence
  Description of Artificial Sequence: Synthetic oligonucleotide
ucauaaaguucaggcuccc

SEQ ID NO: 175030 - RNA, 19 nt, Artificial Sequence
  Description of Artificial Sequence: Synthetic oligonucleotide
ggcugguaagggcaugucg

SEQ ID NO: 175031 - RNA, 19 nt, Artificial Sequence
  Description of Artificial Sequence: Synthetic oligonucleotide
cccauugccacucuacccc

SEQ ID NO: 175032 - RNA, 19 nt, Artificial Sequence
  Description of Artificial Sequence: Synthetic oligonucleotide
acccaaggcguguucuguc

SEQ ID NO: 175033 - RNA, 19 nt, Artificial Sequence
  Description of Artificial Sequence: Synthetic oligonucleotide
gaggaguuuggaauaggga

SEQ ID NO: 175034 - RNA, 19 nt, Artificial Sequence
  Description of Artificial Sequence: Synthetic oligonucleotide
ucccgucagaugguggagg

SEQ ID NO: 175035 - RNA, 19 nt, Artificial Sequence
  Description of Artificial Sequence: Synthetic oligonucleotide
ucacccguguaaacuggcu

SEQ ID NO: 175036 - RNA, 19 nt, Artificial Sequence
  Description of Artificial Sequence: Synthetic oligonucleotide
ugggaguuagagggaauga

SEQ ID NO: 175037 - RNA, 19 nt, Artificial Sequence
  Description of Artificial Sequence: Synthetic oligonucleotide
ugauucugccaguggggcu

SEQ ID NO: 175038 - RNA, 19 nt, Artificial Sequence
  Description of Artificial Sequence: Synthetic oligonucleotide
guaagggcaugucgaggag

SEQ ID NO: 175039 - RNA, 19 nt, Artificial Sequence
  Description of Artificial Sequence: Synthetic oligonucleotide
cuagaggaggcaggguggg

SEQ ID NO: 175040 - RNA, 19 nt, Artificial Sequence
  Description of Artificial Sequence: Synthetic oligonucleotide
caugucgaggagagacacc

SEQ ID NO: 175041 - RNA, 19 nt, Artificial Sequence
  Description of Artificial Sequence: Synthetic oligonucleotide
uccucgucuggucgggaca

SEQ ID NO: 175042 - RNA, 19 nt, Artificial Sequence
  Description of Artificial Sequence: Synthetic oligonucleotide
aauguucggaggaguuuca

SEQ ID NO: 175043 - RNA, 19 nt, Artificial Sequence
  Description of Artificial Sequence: Synthetic oligonucleotide
agagaaggguuauguuggu

SEQ ID NO: 175044 - RNA, 19 nt, Artificial Sequence
  Description of Artificial Sequence: Synthetic oligonucleotide
gucuggucgggacaccagc

SEQ ID NO: 175045 - RNA, 19 nt, Artificial Sequence
  Description of Artificial Sequence: Synthetic oligonucleotide
ugacgaguggacggggagc

SEQ ID NO: 175046 - RNA, 19 nt, Artificial Sequence
  Description of Artificial Sequence: Synthetic oligonucleotide
gaaagccucgugagucagg

SEQ ID NO: 175047 - RNA, 19 nt, Artificial Sequence
  Description of Artificial Sequence: Synthetic oligonucleotide
cauaaaguucaggcucccc

SEQ ID NO: 175048 - RNA, 19 nt, Artificial Sequence
  Description of Artificial Sequence: Synthetic oligonucleotide
guauagcugcgccagccca

SEQ ID NO: 175049 - RNA, 19 nt, Artificial Sequence
  Description of Artificial Sequence: Synthetic oligonucleotide
agaauagccuggggugacg

SEQ ID NO: 175050 - RNA, 19 nt, Artificial Sequence
  Description of Artificial Sequence: Synthetic oligonucleotide
cucuaaggaagucugcucu

SEQ ID NO: 175051 - RNA, 19 nt, Artificial Sequence
  Description of Artificial Sequence: Synthetic oligonucleotide
gggaguuagagggaaugag

SEQ ID NO: 175052 - RNA, 19 nt, Artificial Sequence
  Description of Artificial Sequence: Synthetic oligonucleotide
cuaucagagggagcuggag

SEQ ID NO: 175053 - RNA, 19 nt, Artificial Sequence
  Description of Artificial Sequence: Synthetic oligonucleotide
ucgaugagcuggagguaac

SEQ ID NO: 175054 - RNA, 19 nt, Artificial Sequence
  Description of Artificial Sequence: Synthetic oligonucleotide
acccacaagucuuuugcua

SEQ ID NO: 175055 - RNA, 19 nt, Artificial Sequence
  Description of Artificial Sequence: Synthetic oligonucleotide
gcauagguugaugagugug

SEQ ID NO: 175056 - RNA, 19 nt, Artificial Sequence
  Description of Artificial Sequence: Synthetic oligonucleotide
caggucaggcccagguacc

SEQ ID NO: 175057 - RNA, 19 nt, Artificial Sequence
  Description of Artificial Sequence: Synthetic oligonucleotide
ggggacaaaaguggguagg

SEQ ID NO: 175058 - RNA, 19 nt, Artificial Sequence
  Description of Artificial Sequence: Synthetic oligonucleotide
ucucgcugccgagaagaag

SEQ ID NO: 175059 - RNA, 19 nt, Artificial Sequence
  Description of Artificial Sequence: Synthetic oligonucleotide
cugauaaacagggcaagaa

SEQ ID NO: 175060 - RNA, 19 nt, Artificial Sequence
  Description of Artificial Sequence: Synthetic oligonucleotide
guaucuuaaauaggccuaa

SEQ ID NO: 175061 - RNA, 19 nt, Artificial Sequence
  Description of Artificial Sequence: Synthetic oligonucleotide
ugucccaaugaggguguag

SEQ ID NO: 175062 - RNA, 19 nt, Artificial Sequence
  Description of Artificial Sequence: Synthetic oligonucleotide
agcagagaaggguuauguu

SEQ ID NO: 175063 - RNA, 19 nt, Artificial Sequence
  Description of Artificial Sequence: Synthetic oligonucleotide
uacaugaggucaugacaua

SEQ ID NO: 175064 - RNA, 19 nt, Artificial Sequence
  Description of Artificial Sequence: Synthetic oligonucleotide
ccaacaaauaagucuucuc

SEQ ID NO: 175065 - RNA, 19 nt, Artificial Sequence
  Description of Artificial Sequence: Synthetic oligonucleotide
uuuaaacagguggccuuuc

SEQ ID NO: 175066 - RNA, 19 nt, Artificial Sequence
  Description of Artificial Sequence: Synthetic oligonucleotide
uaugggugcgcugggcugu

SEQ ID NO: 175067 - RNA, 19 nt, Artificial Sequence
  Description of Artificial Sequence: Synthetic oligonucleotide
gugcauacuuugcccauca

SEQ ID NO: 175068 - RNA, 19 nt, Artificial Sequence
  Description of Artificial Sequence: Synthetic oligonucleotide
ccggccucagcugagaucc

SEQ ID NO: 175069 - RNA, 19 nt, Artificial Sequence
  Description of Artificial Sequence: Synthetic oligonucleotide
gagaauagccuggggugac

SEQ ID NO: 175070 - RNA, 19 nt, Artificial Sequence
  Description of Artificial Sequence: Synthetic oligonucleotide
ggggacauuaaggcaacag

SEQ ID NO: 175071 - RNA, 19 nt, Artificial Sequence
  Description of Artificial Sequence: Synthetic oligonucleotide
acccugaugggaagugaac

SEQ ID NO: 175072 - RNA, 19 nt, Artificial Sequence
  Description of Artificial Sequence: Synthetic oligonucleotide
gguagggugaaaccaugga

SEQ ID NO: 175073 - RNA, 19 nt, Artificial Sequence
  Description of Artificial Sequence: Synthetic oligonucleotide
ggcaacagacuuccugacc

SEQ ID NO: 175074 - RNA, 19 nt, Artificial Sequence
  Description of Artificial Sequence: Synthetic oligonucleotide
agaucccucaaugggccug

SEQ ID NO: 175075 - RNA, 19 nt, Artificial Sequence
  Description of Artificial Sequence: Synthetic oligonucleotide
gggcaugucgaggagagac

SEQ ID NO: 175076 - RNA, 19 nt, Artificial Sequence
  Description of Artificial Sequence: Synthetic oligonucleotide
ccaucacccguguaaacug

SEQ ID NO: 175077 - RNA, 19 nt, Artificial Sequence
  Description of Artificial Sequence: Synthetic oligonucleotide
aggguaucccuuaccaccu

SEQ ID NO: 175078 - RNA, 19 nt, Artificial Sequence
  Description of Artificial Sequence: Synthetic oligonucleotide
gcgugugccaauguuaaac

SEQ ID NO: 175079 - RNA, 19 nt, Artificial Sequence
  Description of Artificial Sequence: Synthetic oligonucleotide
gugcaagagguacauaaau

SEQ ID NO: 175080 - RNA, 19 nt, Artificial Sequence
  Description of Artificial Sequence: Synthetic oligonucleotide
aggcugacagaaagagggg

SEQ ID NO: 175081 - RNA, 19 nt, Artificial Sequence
  Description of Artificial Sequence: Synthetic oligonucleotide
cuaacagaccuggggagca

SEQ ID NO: 175082 - RNA, 19 nt, Artificial Sequence
  Description of Artificial Sequence: Synthetic oligonucleotide
gcugguaagggcaugucga

SEQ ID NO: 175083 - RNA, 19 nt, Artificial Sequence
  Description of Artificial Sequence: Synthetic oligonucleotide
uugcgcggaaauguucgga

SEQ ID NO: 175084 - RNA, 19 nt, Artificial Sequence
  Description of Artificial Sequence: Synthetic oligonucleotide
auguucggaggaguuucag

SEQ ID NO: 175085 - RNA, 19 nt, Artificial Sequence
  Description of Artificial Sequence: Synthetic oligonucleotide
agccgucuagaggaggcag

SEQ ID NO: 175086 - RNA, 19 nt, Artificial Sequence
  Description of Artificial Sequence: Synthetic oligonucleotide
gagcagagaaggguuaugu

SEQ ID NO: 175087 - RNA, 19 nt, Artificial Sequence
  Description of Artificial Sequence: Synthetic oligonucleotide
gguugaugagugugcaaga

SEQ ID NO: 175088 - RNA, 19 nt, Artificial Sequence
  Description of Artificial Sequence: Synthetic oligonucleotide
ucgucuggucgggacacca

SEQ ID NO: 175089 - RNA, 19 nt, Artificial Sequence
  Description of Artificial Sequence: Synthetic oligonucleotide
acaauccccuuucccuggu

SEQ ID NO: 175090 - RNA, 19 nt, Artificial Sequence
  Description of Artificial Sequence: Synthetic oligonucleotide
ggcguguucugucaugcuc

SEQ ID NO: 175091 - RNA, 19 nt, Artificial Sequence
  Description of Artificial Sequence: Synthetic oligonucleotide
ggguagggugaaaccaugg

SEQ ID NO: 175092 - RNA, 19 nt, Artificial Sequence
  Description of Artificial Sequence: Synthetic oligonucleotide
aagccucgugagucaggca

SEQ ID NO: 175093 - RNA, 19 nt, Artificial Sequence
  Description of Artificial Sequence: Synthetic oligonucleotide
gucagccgucuagaggagg

SEQ ID NO: 175094 - RNA, 19 nt, Artificial Sequence
  Description of Artificial Sequence: Synthetic oligonucleotide
caguuagugggagggccag

SEQ ID NO: 175095 - RNA, 19 nt, Artificial Sequence
  Description of Artificial Sequence: Synthetic oligonucleotide
gguuccuacccacaagucu

SEQ ID NO: 175096 - RNA, 19 nt, Artificial Sequence
  Description of Artificial Sequence: Synthetic oligonucleotide
uuugcccaucacccgugua

SEQ ID NO: 175097 - RNA, 19 nt, Artificial Sequence
  Description of Artificial Sequence: Synthetic oligonucleotide
uuucgaugagcuggaggua

SEQ ID NO: 175098 - RNA, 19 nt, Artificial Sequence
  Description of Artificial Sequence: Synthetic oligonucleotide
ggaggguaucccuuaccac

SEQ ID NO: 175099 - RNA, 19 nt, Artificial Sequence
  Description of Artificial Sequence: Synthetic oligonucleotide
caagacuagaccagcucgu

SEQ ID NO: 175100 - RNA, 19 nt, Artificial Sequence
  Description of Artificial Sequence: Synthetic oligonucleotide
caccucuggguuaugauau

SEQ ID NO: 175101 - RNA, 19 nt, Artificial Sequence
  Description of Artificial Sequence: Synthetic oligonucleotide
gcaaucuggagggaacaug

SEQ ID NO: 175102 - RNA, 19 nt, Artificial Sequence
  Description of Artificial Sequence: Synthetic oligonucleotide
ugucgaggagagacaccuc

SEQ ID NO: 175103 - RNA, 19 nt, Artificial Sequence
  Description of Artificial Sequence: Synthetic oligonucleotide
cuccgucggcgacaggagc

SEQ ID NO: 175104 - RNA, 19 nt, Artificial Sequence
  Description of Artificial Sequence: Synthetic oligonucleotide
cagaguggggccgccugcg

SEQ ID NO: 175105 - RNA, 19 nt, Artificial Sequence
  Description of Artificial Sequence: Synthetic oligonucleotide
ccguuaagaacuauauaaa

SEQ ID NO: 175106 - RNA, 19 nt, Artificial Sequence
  Description of Artificial Sequence: Synthetic oligonucleotide
gcgcggaaauguucggagg

SEQ ID NO: 175107 - RNA, 19 nt, Artificial Sequence
  Description of Artificial Sequence: Synthetic oligonucleotide
uucugucggcccugacccc

SEQ ID NO: 175108 - RNA, 19 nt, Artificial Sequence
  Description of Artificial Sequence: Synthetic oligonucleotide
ucugcccucuccucucaua

SEQ ID NO: 175109 - RNA, 19 nt, Artificial Sequence
  Description of Artificial Sequence: Synthetic oligonucleotide
aggguagggugaaaccaug

SEQ ID NO: 175110 - RNA, 19 nt, Artificial Sequence
  Description of Artificial Sequence: Synthetic oligonucleotide
ggucccgucagauggugga

SEQ ID NO: 175111 - RNA, 19 nt, Artificial Sequence
  Description of Artificial Sequence: Synthetic oligonucleotide
agcugcgccagcccacccu

SEQ ID NO: 175112 - RNA, 19 nt, Artificial Sequence
  Description of Artificial Sequence: Synthetic oligonucleotide
cugugggucccgucagaug

SEQ ID NO: 175113 - RNA, 19 nt, Artificial Sequence
  Description of Artificial Sequence: Synthetic oligonucleotide
cucucggggaggguauccc

SEQ ID NO: 175114 - RNA, 19 nt, Artificial Sequence
  Description of Artificial Sequence: Synthetic oligonucleotide
guguaaacuggcuggggau

SEQ ID NO: 175115 - RNA, 19 nt, Artificial Sequence
  Description of Artificial Sequence: Synthetic oligonucleotide
ggagugagcaaggcgugug

SEQ ID NO: 175116 - RNA, 19 nt, Artificial Sequence
  Description of Artificial Sequence: Synthetic oligonucleotide
guuccuacccacaagucuu

SEQ ID NO: 175117 - RNA, 19 nt, Artificial Sequence
  Description of Artificial Sequence: Synthetic oligonucleotide
aggcgugugccaauguuaa

SEQ ID NO: 175118 - RNA, 19 nt, Artificial Sequence
  Description of Artificial Sequence: Synthetic oligonucleotide
ccaacaauccccuuucccu

SEQ ID NO: 175119 - RNA, 19 nt, Artificial Sequence
  Description of Artificial Sequence: Synthetic oligonucleotide
gaugagugugcaagaggua

SEQ ID NO: 175120 - RNA, 19 nt, Artificial Sequence
  Description of Artificial Sequence: Synthetic oligonucleotide
agucacccugaugggaagu

SEQ ID NO: 175121 - RNA, 19 nt, Artificial Sequence
  Description of Artificial Sequence: Synthetic oligonucleotide
gggugaaaccauggagggg

SEQ ID NO: 175122 - RNA, 19 nt, Artificial Sequence
  Description of Artificial Sequence: Synthetic oligonucleotide
gcagcuuugcgcggaaaug

SEQ ID NO: 175123 - RNA, 19 nt, Artificial Sequence
  Description of Artificial Sequence: Synthetic oligonucleotide
cccaguuagugggagggcc

SEQ ID NO: 175124 - RNA, 19 nt, Artificial Sequence
  Description of Artificial Sequence: Synthetic oligonucleotide
gucggcgacaggagcuggg

SEQ ID NO: 175125 - RNA, 19 nt, Artificial Sequence
  Description of Artificial Sequence: Synthetic oligonucleotide
ggggugacgaguggacggg

SEQ ID NO: 175126 - RNA, 19 nt, Artificial Sequence
  Description of Artificial Sequence: Synthetic oligonucleotide
ccacaagucuuuugcuaac

SEQ ID NO: 175127 - RNA, 19 nt, Artificial Sequence
  Description of Artificial Sequence: Synthetic oligonucleotide
gguuauguugguggggaaa

SEQ ID NO: 175128 - RNA, 19 nt, Artificial Sequence
  Description of Artificial Sequence: Synthetic oligonucleotide
cacuuacaugaggucauga

SEQ ID NO: 175129 - RNA, 19 nt, Artificial Sequence
  Description of Artificial Sequence: Synthetic oligonucleotide
aggcguguucugucaugcu

SEQ ID NO: 175130 - RNA, 19 nt, Artificial Sequence
  Description of Artificial Sequence: Synthetic oligonucleotide
acccucucgcugccgagaa

SEQ ID NO: 175131 - RNA, 19 nt, Artificial Sequence
  Description of Artificial Sequence: Synthetic oligonucleotide
ggggaggguaucccuuacc

SEQ ID NO: 175132 - RNA, 19 nt, Artificial Sequence
  Description of Artificial Sequence: Synthetic oligonucleotide
gcggaaauguucggaggag

SEQ ID NO: 175133 - RNA, 19 nt, Artificial Sequence
  Description of Artificial Sequence: Synthetic oligonucleotide
ucaccccacuucccaguua

SEQ ID NO: 175134 - RNA, 19 nt, Artificial Sequence
  Description of Artificial Sequence: Synthetic oligonucleotide
cccagaccauuaacaauug

SEQ ID NO: 175135 - RNA, 19 nt, Artificial Sequence
  Description of Artificial Sequence: Synthetic oligonucleotide
ccugcguccugcacucugc

SEQ ID NO: 175136 - RNA, 19 nt, Artificial Sequence
  Description of Artificial Sequence: Synthetic oligonucleotide
gucccgucagaugguggag

SEQ ID NO: 175137 - RNA, 19 nt, Artificial Sequence
  Description of Artificial Sequence: Synthetic oligonucleotide
agaguggggccgccugcgu

SEQ ID NO: 175138 - RNA, 19 nt, Artificial Sequence
  Description of Artificial Sequence: Synthetic oligonucleotide
uagcugcgccagcccaccc

SEQ ID NO: 175139 - RNA, 19 nt, Artificial Sequence
  Description of Artificial Sequence: Synthetic oligonucleotide
gagugugcaagagguacau

SEQ ID NO: 175140 - RNA, 19 nt, Artificial Sequence
  Description of Artificial Sequence: Synthetic oligonucleotide
ccgucuagaggaggcaggg

SEQ ID NO: 175141 - RNA, 19 nt, Artificial Sequence
  Description of Artificial Sequence: Synthetic oligonucleotide
gacaccccgcccagcccgg

SEQ ID NO: 175142 - RNA, 19 nt, Artificial Sequence
  Description of Artificial Sequence: Synthetic oligonucleotide
gccgucuagaggaggcagg

SEQ ID NO: 175143 - RNA, 19 nt, Artificial Sequence
  Description of Artificial Sequence: Synthetic oligonucleotide
guccugcacucugcugucg

SEQ ID NO: 175144 - RNA, 19 nt, Artificial Sequence
  Description of Artificial Sequence: Synthetic oligonucleotide
ggagccuaugggugcgcug

SEQ ID NO: 175145 - RNA, 19 nt, Artificial Sequence
  Description of Artificial Sequence: Synthetic oligonucleotide
agagggaaaccugcucguu

SEQ ID NO: 175146 - RNA, 19 nt, Artificial Sequence
  Description of Artificial Sequence: Synthetic oligonucleotide
cagcuuugcgcggaaaugu

SEQ ID NO: 175147 - RNA, 19 nt, Artificial Sequence
  Description of Artificial Sequence: Synthetic oligonucleotide
gcaagcucucaccucccuc

SEQ ID NO: 175148 - RNA, 19 nt, Artificial Sequence
  Description of Artificial Sequence: Synthetic oligonucleotide
cguguaaacuggcugggga

SEQ ID NO: 175149 - RNA, 19 nt, Artificial Sequence
  Description of Artificial Sequence: Synthetic oligonucleotide
ggcgacaggagcuggggcu

SEQ ID NO: 175150 - RNA, 19 nt, Artificial Sequence
  Description of Artificial Sequence: Synthetic oligonucleotide
ccgaggaggcauugggaac

SEQ ID NO: 175151 - RNA, 19 nt, Artificial Sequence
  Description of Artificial Sequence: Synthetic oligonucleotide
agcuuugcgcggaaauguu

SEQ ID NO: 175152 - RNA, 19 nt, Artificial Sequence
  Description of Artificial Sequence: Synthetic oligonucleotide
gcugggccgcaccucuggg

SEQ ID NO: 175153 - RNA, 19 nt, Artificial Sequence
  Description of Artificial Sequence: Synthetic oligonucleotide
ggugcauacuuugcccauc

SEQ ID NO: 175154 - RNA, 19 nt, Artificial Sequence
  Description of Artificial Sequence: Synthetic oligonucleotide
ggguuaugauauaguguuc

SEQ ID NO: 175155 - RNA, 19 nt, Artificial Sequence
  Description of Artificial Sequence: Synthetic oligonucleotide
caccuuccagugccaagca

SEQ ID NO: 175156 - RNA, 19 nt, Artificial Sequence
  Description of Artificial Sequence: Synthetic oligonucleotide
guguagguugagaggggaa

SEQ ID NO: 175157 - RNA, 19 nt, Artificial Sequence
  Description of Artificial Sequence: Synthetic oligonucleotide
agaccagcucguggaggug

SEQ ID NO: 175158 - RNA, 19 nt, Artificial Sequence
  Description of Artificial Sequence: Synthetic oligonucleotide
gagaucccucaaugggccu

SEQ ID NO: 175159 - RNA, 19 nt, Artificial Sequence
  Description of Artificial Sequence: Synthetic oligonucleotide
cugugaaagccucgugagu

SEQ ID NO: 175160 - RNA, 19 nt, Artificial Sequence
  Description of Artificial Sequence: Synthetic oligonucleotide
gcuuugcgcggaaauguuc

SEQ ID NO: 175161 - RNA, 19 nt, Artificial Sequence
  Description of Artificial Sequence: Synthetic oligonucleotide
caaugguuaccagccauau

SEQ ID NO: 175162 - RNA, 19 nt, Artificial Sequence
  Description of Artificial Sequence: Synthetic oligonucleotide
cccaaauucccucccucca

SEQ ID NO: 175163 - RNA, 19 nt, Artificial Sequence
  Description of Artificial Sequence: Synthetic oligonucleotide
ccgcccagggagccuaugg

SEQ ID NO: 175164 - RNA, 19 nt, Artificial Sequence
  Description of Artificial Sequence: Synthetic oligonucleotide
ccaguuagugggagggcca

SEQ ID NO: 175165 - RNA, 19 nt, Artificial Sequence
  Description of Artificial Sequence: Synthetic oligonucleotide
guggacggggagcgaguga

SEQ ID NO: 175166 - RNA, 19 nt, Artificial Sequence
  Description of Artificial Sequence: Synthetic oligonucleotide
ccucucgcugccgagaaga

SEQ ID NO: 175167 - RNA, 19 nt, Artificial Sequence
  Description of Artificial Sequence: Synthetic oligonucleotide
gccugcguccugcacucug

SEQ ID NO: 175168 - RNA, 19 nt, Artificial Sequence
  Description of Artificial Sequence: Synthetic oligonucleotide
ccuuuucgugugaaaagcu

SEQ ID NO: 175169 - RNA, 19 nt, Artificial Sequence
  Description of Artificial Sequence: Synthetic oligonucleotide
cucgucuggucgggacacc

SEQ ID NO: 175170 - RNA, 19 nt, Artificial Sequence
  Description of Artificial Sequence: Synthetic oligonucleotide
ggccugggagugagcaagg

SEQ ID NO: 175171 - RNA, 19 nt, Artificial Sequence
  Description of Artificial Sequence: Synthetic oligonucleotide
cagcgagaaaauguacagu

SEQ ID NO: 175172 - RNA, 19 nt, Artificial Sequence
  Description of Artificial Sequence: Synthetic oligonucleotide
caaggcgugugccaauguu

SEQ ID NO: 175173 - RNA, 19 nt, Artificial Sequence
  Description of Artificial Sequence: Synthetic oligonucleotide
cugccgagaagaagccugu

SEQ ID NO: 175174 - RNA, 19 nt, Artificial Sequence
  Description of Artificial Sequence: Synthetic oligonucleotide
ccucacugcgggccugggg

SEQ ID NO: 175175 - RNA, 19 nt, Artificial Sequence
  Description of Artificial Sequence: Synthetic oligonucleotide
cucucgcugccgagaagaa

SEQ ID NO: 175176 - RNA, 19 nt, Artificial Sequence
  Description of Artificial Sequence: Synthetic oligonucleotide
gggguggccugaaggacac

SEQ ID NO: 175177 - RNA, 19 nt, Artificial Sequence
  Description of Artificial Sequence: Synthetic oligonucleotide
cgcggaaauguucggagga

SEQ ID NO: 175178 - RNA, 19 nt, Artificial Sequence
  Description of Artificial Sequence: Synthetic oligonucleotide
gcgagaaaauguacaguua

SEQ ID NO: 175179 - RNA, 19 nt, Artificial Sequence
  Description of Artificial Sequence: Synthetic oligonucleotide
ccguguaaacuggcugggg

SEQ ID NO: 175180 - RNA, 19 nt, Artificial Sequence
  Description of Artificial Sequence: Synthetic oligonucleotide
cccaaggcguguucuguca

SEQ ID NO: 175181 - RNA, 19 nt, Artificial Sequence
  Description of Artificial Sequence: Synthetic oligonucleotide
ccagaccauuaacaauuga

SEQ ID NO: 175182 - RNA, 19 nt, Artificial Sequence
  Description of Artificial Sequence: Synthetic oligonucleotide
ggacaaaaguggguagggu

SEQ ID NO: 175183 - RNA, 19 nt, Artificial Sequence
  Description of Artificial Sequence: Synthetic oligonucleotide
agggcaugucgaggagaga

SEQ ID NO: 175184 - RNA, 19 nt, Artificial Sequence
  Description of Artificial Sequence: Synthetic oligonucleotide
gcccaucacccguguaaac

SEQ ID NO: 175185 - RNA, 19 nt, Artificial Sequence
  Description of Artificial Sequence: Synthetic oligonucleotide
gggagggccagagaagccu

SEQ ID NO: 175186 - RNA, 19 nt, Artificial Sequence
  Description of Artificial Sequence: Synthetic oligonucleotide
ggguuauguugguggggaa

SEQ ID NO: 175187 - RNA, 19 nt, Artificial Sequence
  Description of Artificial Sequence: Synthetic oligonucleotide
agcccggcacugggagagg

SEQ ID NO: 175188 - RNA, 19 nt, Artificial Sequence
  Description of Artificial Sequence: Synthetic oligonucleotide
ccacuuacaugaggucaug

SEQ ID NO: 175189 - RNA, 19 nt, Artificial Sequence
  Description of Artificial Sequence: Synthetic oligonucleotide
cacccucucgcugccgaga

SEQ ID NO: 175190 - RNA, 19 nt, Artificial Sequence
  Description of Artificial Sequence: Synthetic oligonucleotide
gaguggacggggagcgagu

SEQ ID NO: 175191 - RNA, 19 nt, Artificial Sequence
  Description of Artificial Sequence: Synthetic oligonucleotide
gccuaugggugcgcugggc

SEQ ID NO: 175192 - RNA, 19 nt, Artificial Sequence
  Description of Artificial Sequence: Synthetic oligonucleotide
acgaguggacggggagcga

SEQ ID NO: 175193 - RNA, 19 nt, Artificial Sequence
  Description of Artificial Sequence: Synthetic oligonucleotide
ccucaaugggccugggagu

SEQ ID NO: 175194 - RNA, 19 nt, Artificial Sequence
  Description of Artificial Sequence: Synthetic oligonucleotide
cgucuggucgggacaccag

SEQ ID NO: 175195 - RNA, 19 nt, Artificial Sequence
  Description of Artificial Sequence: Synthetic oligonucleotide
guaauggggcagaggguuu

SEQ ID NO: 175196 - RNA, 19 nt, Artificial Sequence
  Description of Artificial Sequence: Synthetic oligonucleotide
cucggggaggguaucccuu

SEQ ID NO: 175197 - RNA, 19 nt, Artificial Sequence
  Description of Artificial Sequence: Synthetic oligonucleotide
cccaucacccguguaaacu

SEQ ID NO: 175198 - RNA, 19 nt, Artificial Sequence
  Description of Artificial Sequence: Synthetic oligonucleotide
ggcgugugccaauguuaaa

SEQ ID NO: 175199 - RNA, 19 nt, Artificial Sequence
  Description of Artificial Sequence: Synthetic oligonucleotide
cccggccucagcugagauc

SEQ ID NO: 175200 - RNA, 19 nt, Artificial Sequence
  Description of Artificial Sequence: Synthetic oligonucleotide
ccacccucucgcugccgag

SEQ ID NO: 175201 - RNA, 19 nt, Artificial Sequence
  Description of Artificial Sequence: Synthetic oligonucleotide
ggugcgcugggcugugggu

SEQ ID NO: 175202 - RNA, 19 nt, Artificial Sequence
  Description of Artificial Sequence: Synthetic oligonucleotide
cugcguccugcacucugcu

SEQ ID NO: 175203 - RNA, 19 nt, Artificial Sequence
  Description of Artificial Sequence: Synthetic oligonucleotide
ccgucggcgacaggagcug

SEQ ID NO: 175204 - RNA, 19 nt, Artificial Sequence
  Description of Artificial Sequence: Synthetic oligonucleotide
cccucucgcugccgagaag

SEQ ID NO: 175205 - RNA, 19 nt, Artificial Sequence
  Description of Artificial Sequence: Synthetic oligonucleotide
cccacccucucgcugccga

SEQ ID NO: 175206 - RNA, 19 nt, Artificial Sequence
  Description of Artificial Sequence: Synthetic oligonucleotide
caccccgcccagcccggca

SEQ ID NO: 175207 - RNA, 19 nt, Artificial Sequence
  Description of Artificial Sequence: Synthetic oligonucleotide
cgucagaugguggagguuu

SEQ ID NO: 175208 - RNA, 19 nt, Artificial Sequence
  Description of Artificial Sequence: Synthetic oligonucleotide
cgucggcgacaggagcugg

SEQ ID NO: 175209 - RNA, 19 nt, Artificial Sequence
  Description of Artificial Sequence: Synthetic oligonucleotide
ccgggcaaucuggagggaa

SEQ ID NO: 175210 - RNA, 19 nt, Artificial Sequence
  Description of Artificial Sequence: Synthetic oligonucleotide
gccucgugagucaggcacu

SEQ ID NO: 175211 - RNA, 19 nt, Artificial Sequence
  Description of Artificial Sequence: Synthetic oligonucleotide
caauccccuuucccugguu

SEQ ID NO: 175212 - RNA, 19 nt, Artificial Sequence
  Description of Artificial Sequence: Synthetic oligonucleotide
cggaaauguucggaggagu

SEQ ID NO: 175213 - RNA, 19 nt, Artificial Sequence
  Description of Artificial Sequence: Synthetic oligonucleotide
ccaaggcguguucugucau

SEQ ID NO: 175214 - RNA, 19 nt, Artificial Sequence
  Description of Artificial Sequence: Synthetic oligonucleotide
ccgcaccucuggguuauga

SEQ ID NO: 175215 - RNA, 19 nt, Artificial Sequence
  Description of Artificial Sequence: Synthetic oligonucleotide
gggucccaugagagggaaa

SEQ ID NO: 175216 - RNA, 19 nt, Artificial Sequence
  Description of Artificial Sequence: Synthetic oligonucleotide
gccgcccagggagccuaug

SEQ ID NO: 175217 - RNA, 19 nt, Artificial Sequence
  Description of Artificial Sequence: Synthetic oligonucleotide
cccaucacccaaggcgugu

SEQ ID NO: 175218 - RNA, 19 nt, Artificial Sequence
  Description of Artificial Sequence: Synthetic oligonucleotide
cgcaccucuggguuaugau

SEQ ID NO: 175219 - RNA, 19 nt, Artificial Sequence
  Description of Artificial Sequence: Synthetic oligonucleotide
cucgugagucaggcacuuu

SEQ ID NO: 175220 - RNA, 19 nt, Artificial Sequence
  Description of Artificial Sequence: Synthetic oligonucleotide
cccgcccagcccggcacug

SEQ ID NO: 175221 - RNA, 19 nt, Artificial Sequence
  Description of Artificial Sequence: Synthetic oligonucleotide
uuuaauagaacgcucaucu

SEQ ID NO: 175222 - RNA, 19 nt, Artificial Sequence
  Description of Artificial Sequence: Synthetic oligonucleotide
aaucgagggauguaguugc

SEQ ID NO: 175223 - RNA, 19 nt, Artificial Sequence
  Description of Artificial Sequence: Synthetic oligonucleotide
aaaucgacagccuccgccc

SEQ ID NO: 175224 - RNA, 19 nt, Artificial Sequence
  Description of Artificial Sequence: Synthetic oligonucleotide
guaagugcaaguuuggucc

SEQ ID NO: 175225 - RNA, 19 nt, Artificial Sequence
  Description of Artificial Sequence: Synthetic oligonucleotide
gagaucauuaugaaggugg

SEQ ID NO: 175226 - RNA, 19 nt, Artificial Sequence
  Description of Artificial Sequence: Synthetic oligonucleotide
uugaacaacauuuaauaga

SEQ ID NO: 175227 - RNA, 19 nt, Artificial Sequence
  Description of Artificial Sequence: Synthetic oligonucleotide
aauauuaccaccgucugcu

SEQ ID NO: 175228 - RNA, 19 nt, Artificial Sequence
  Description of Artificial Sequence: Synthetic oligonucleotide
uuuugcucaaucaggagcc

SEQ ID NO: 175229 - RNA, 19 nt, Artificial Sequence
  Description of Artificial Sequence: Synthetic oligonucleotide
aguaagugcaaguuugguc

SEQ ID NO: 175230 - RNA, 19 nt, Artificial Sequence
  Description of Artificial Sequence: Synthetic oligonucleotide
ucuucgagagguauucugg

SEQ ID NO: 175231 - RNA, 19 nt, Artificial Sequence
  Description of Artificial Sequence: Synthetic oligonucleotide
aauaguggggacguuuucg

SEQ ID NO: 175232 - RNA, 19 nt, Artificial Sequence
  Description of Artificial Sequence: Synthetic oligonucleotide
uuauagcggacuacaaagg

SEQ ID NO: 175233 - RNA, 19 nt, Artificial Sequence
  Description of Artificial Sequence: Synthetic oligonucleotide
gaaaccugaaacaggaucc

SEQ ID NO: 175234 - RNA, 19 nt, Artificial Sequence
  Description of Artificial Sequence: Synthetic oligonucleotide
aguacgacuucaucuaagg

SEQ ID NO: 175235 - RNA, 19 nt, Artificial Sequence
  Description of Artificial Sequence: Synthetic oligonucleotide
cuacguaguccucagagcg

SEQ ID NO: 175236 - RNA, 19 nt, Artificial Sequence
  Description of Artificial Sequence: Synthetic oligonucleotide
aauggccgaagguauggcg

SEQ ID NO: 175237 - RNA, 19 nt, Artificial Sequence
  Description of Artificial Sequence: Synthetic oligonucleotide
guuuugcucaaucaggagc

SEQ ID NO: 175238 - RNA, 19 nt, Artificial Sequence
  Description of Artificial Sequence: Synthetic oligonucleotide
aacauuuaauagaacgcuc

SEQ ID NO: 175239 - RNA, 19 nt, Artificial Sequence
  Description of Artificial Sequence: Synthetic oligonucleotide
aucauuaugaaggugggug

SEQ ID NO: 175240 - RNA, 19 nt, Artificial Sequence
  Description of Artificial Sequence: Synthetic oligonucleotide
uggugaggcaucaacgagg

SEQ ID NO: 175241 - RNA, 19 nt, Artificial Sequence
  Description of Artificial Sequence: Synthetic oligonucleotide
ugaauauuaccaccgucug

SEQ ID NO: 175242 - RNA, 19 nt, Artificial Sequence
  Description of Artificial Sequence: Synthetic oligonucleotide
agcaauauagcggguaccc

SEQ ID NO: 175243 - RNA, 19 nt, Artificial Sequence
  Description of Artificial Sequence: Synthetic oligonucleotide
uccggguccaagaagaucu

SEQ ID NO: 175244 - RNA, 19 nt, Artificial Sequence
  Description of Artificial Sequence: Synthetic oligonucleotide
gaaaaugcggcagcggugg

SEQ ID NO: 175245 - RNA, 19 nt, Artificial Sequence
  Description of Artificial Sequence: Synthetic oligonucleotide
uagggaucgacgaaggaca

SEQ ID NO: 175246 - RNA, 19 nt, Artificial Sequence
  Description of Artificial Sequence: Synthetic oligonucleotide
ucucgaagguccagaaucg

SEQ ID NO: 175247 - RNA, 19 nt, Artificial Sequence
  Description of Artificial Sequence: Synthetic oligonucleotide
ugaggcaucaacgagggcu

SEQ ID NO: 175248 - RNA, 19 nt, Artificial Sequence
  Description of Artificial Sequence: Synthetic oligonucleotide
uauuaccaccgucugcugg

SEQ ID NO: 175249 - RNA, 19 nt, Artificial Sequence
  Description of Artificial Sequence: Synthetic oligonucleotide
aggacacagcaauauagcg

SEQ ID NO: 175250 - RNA, 19 nt, Artificial Sequence
  Description of Artificial Sequence: Synthetic oligonucleotide
acagcaauauagcggguac

SEQ ID NO: 175251 - RNA, 19 nt, Artificial Sequence
  Description of Artificial Sequence: Synthetic oligonucleotide
gagaccgucggauacuuag

SEQ ID NO: 175252 - RNA, 19 nt, Artificial Sequence
  Description of Artificial Sequence: Synthetic oligonucleotide
auguuugagauguaaggca

SEQ ID NO: 175253 - RNA, 19 nt, Artificial Sequence
  Description of Artificial Sequence: Synthetic oligonucleotide
aacacaccgaccaggacgg

SEQ ID NO: 175254 - RNA, 19 nt, Artificial Sequence
  Description of Artificial Sequence: Synthetic oligonucleotide
uucaacaguccuagguccg

SEQ ID NO: 175255 - RNA, 19 nt, Artificial Sequence
  Description of Artificial Sequence: Synthetic oligonucleotide
aacgaccuaacugucagug

SEQ ID NO: 175256 - RNA, 19 nt, Artificial Sequence
  Description of Artificial Sequence: Synthetic oligonucleotide
uaaccgaugaagccuccgg

SEQ ID NO: 175257 - RNA, 19 nt, Artificial Sequence
  Description of Artificial Sequence: Synthetic oligonucleotide
ucgagagguauucugggca

SEQ ID NO: 175258 - RNA, 19 nt, Artificial Sequence
  Description of Artificial Sequence: Synthetic oligonucleotide
uguagcgcagaaaucgaca

SEQ ID NO: 175259 - RNA, 19 nt, Artificial Sequence
  Description of Artificial Sequence: Synthetic oligonucleotide
ugcucaaugaacacaccga

SEQ ID NO: 175260 - RNA, 19 nt, Artificial Sequence
  Description of Artificial Sequence: Synthetic oligonucleotide
auuccgugcucucacgugg

SEQ ID NO: 175261 - RNA, 19 nt, Artificial Sequence
  Description of Artificial Sequence: Synthetic oligonucleotide
augaauauuaccaccgucu

SEQ ID NO: 175262 - RNA, 19 nt, Artificial Sequence
  Description of Artificial Sequence: Synthetic oligonucleotide
cugcucaaugaacacaccg

SEQ ID NO: 175263 - RNA, 19 nt, Artificial Sequence
  Description of Artificial Sequence: Synthetic oligonucleotide
gaauauuaccaccgucugc

SEQ ID NO: 175264 - RNA, 19 nt, Artificial Sequence
  Description of Artificial Sequence: Synthetic oligonucleotide
gaugaauauuaccaccguc

SEQ ID NO: 175265 - RNA, 19 nt, Artificial Sequence
  Description of Artificial Sequence: Synthetic oligonucleotide
ugaugauacaaaccuggaa

SEQ ID NO: 175266 - RNA, 19 nt, Artificial Sequence
  Description of Artificial Sequence: Synthetic oligonucleotide
acugaaaccugaaacagga

SEQ ID NO: 175267 - RNA, 19 nt, Artificial Sequence
  Description of Artificial Sequence: Synthetic oligonucleotide
cagacugauauugauuugc

SEQ ID NO: 175268 - RNA, 19 nt, Artificial Sequence
  Description of Artificial Sequence: Synthetic oligonucleotide
ggcuagaucaaacugcgcc

SEQ ID NO: 175269 - RNA, 19 nt, Artificial Sequence
  Description of Artificial Sequence: Synthetic oligonucleotide
guagcgcagaaaucgacag

SEQ ID NO: 175270 - RNA, 19 nt, Artificial Sequence
  Description of Artificial Sequence: Synthetic oligonucleotide
ucgaagguccagaaucgag

SEQ ID NO: 175271 - RNA, 19 nt, Artificial Sequence
  Description of Artificial Sequence: Synthetic oligonucleotide
aucgacgaaggacacagca

SEQ ID NO: 175272 - RNA, 19 nt, Artificial Sequence
  Description of Artificial Sequence: Synthetic oligonucleotide
cuacuucaagcuuauggug

SEQ ID NO: 175273 - RNA, 19 nt, Artificial Sequence
  Description of Artificial Sequence: Synthetic oligonucleotide
aaauggccgaagguauggc

SEQ ID NO: 175274 - RNA, 19 nt, Artificial Sequence
  Description of Artificial Sequence: Synthetic oligonucleotide
auacaaaccuggaagggag

SEQ ID NO: 175275 - RNA, 19 nt, Artificial Sequence
  Description of Artificial Sequence: Synthetic oligonucleotide
ucugcgcccauguuccugg

SEQ ID NO: 175276 - RNA, 19 nt, Artificial Sequence
  Description of Artificial Sequence: Synthetic oligonucleotide
auguggaugucaauagugg

SEQ ID NO: 175277 - RNA, 19 nt, Artificial Sequence
  Description of Artificial Sequence: Synthetic oligonucleotide
gucuacgugcugcagcucg

SEQ ID NO: 175278 - RNA, 19 nt, Artificial Sequence
  Description of Artificial Sequence: Synthetic oligonucleotide
auccgggcaaggcaucucc

SEQ ID NO: 175279 - RNA, 19 nt, Artificial Sequence
  Description of Artificial Sequence: Synthetic oligonucleotide
gcugcguaggcccucaucg

SEQ ID NO: 175280 - RNA, 19 nt, Artificial Sequence
  Description of Artificial Sequence: Synthetic oligonucleotide
uauggagcaguuguagcgc

SEQ ID NO: 175281 - RNA, 19 nt, Artificial Sequence
  Description of Artificial Sequence: Synthetic oligonucleotide
uugccaucagagaccgucg

SEQ ID NO: 175282 - RNA, 19 nt, Artificial Sequence
  Description of Artificial Sequence: Synthetic oligonucleotide
cuugaguacgacuucaucu

SEQ ID NO: 175283 - RNA, 19 nt, Artificial Sequence
  Description of Artificial Sequence: Synthetic oligonucleotide
uaguggaacaggucuacgu

SEQ ID NO: 175284 - RNA, 19 nt, Artificial Sequence
  Description of Artificial Sequence: Synthetic oligonucleotide
aguguggacauagcacgcc

SEQ ID NO: 175285 - RNA, 19 nt, Artificial Sequence
  Description of Artificial Sequence: Synthetic oligonucleotide
aggucugcgcccauguucc

SEQ ID NO: 175286 - RNA, 19 nt, Artificial Sequence
  Description of Artificial Sequence: Synthetic oligonucleotide
gucaguuagggaucgacga

SEQ ID NO: 175287 - RNA, 19 nt, Artificial Sequence
  Description of Artificial Sequence: Synthetic oligonucleotide
cuuggcgucguccuucgcc

SEQ ID NO: 175288 - RNA, 19 nt, Artificial Sequence
  Description of Artificial Sequence: Synthetic oligonucleotide
uucguagccgcccuggaua

SEQ ID NO: 175289 - RNA, 19 nt, Artificial Sequence
  Description of Artificial Sequence: Synthetic oligonucleotide
agaucauuaugaagguggg

SEQ ID NO: 175290 - RNA, 19 nt, Artificial Sequence
  Description of Artificial Sequence: Synthetic oligonucleotide
gauacgguuguccuuguua

SEQ ID NO: 175291 - RNA, 19 nt, Artificial Sequence
  Description of Artificial Sequence: Synthetic oligonucleotide
uucgagagguauucugggc

SEQ ID NO: 175292 - RNA, 19 nt, Artificial Sequence
  Description of Artificial Sequence: Synthetic oligonucleotide
ucuacgugcugcagcucgg

SEQ ID NO: 175293 - RNA, 19 nt, Artificial Sequence
  Description of Artificial Sequence: Synthetic oligonucleotide
gaccgucggauacuuagcc

SEQ ID NO: 175294 - RNA, 19 nt, Artificial Sequence
  Description of Artificial Sequence: Synthetic oligonucleotide
caaauggccgaagguaugg

SEQ ID NO: 175295 - RNA, 19 nt, Artificial Sequence
  Description of Artificial Sequence: Synthetic oligonucleotide
ucaauaguggggacguuuu

SEQ ID NO: 175296 - RNA, 19 nt, Artificial Sequence
  Description of Artificial Sequence: Synthetic oligonucleotide
auccgcguuggccauucgc

SEQ ID NO: 175297 - RNA, 19 nt, Artificial Sequence
  Description of Artificial Sequence: Synthetic oligonucleotide
acggacugguacucugugc

SEQ ID NO: 175298 - RNA, 19 nt, Artificial Sequence
  Description of Artificial Sequence: Synthetic oligonucleotide
ucggucagagccacgucag

SEQ ID NO: 175299 - RNA, 19 nt, Artificial Sequence
  Description of Artificial Sequence: Synthetic oligonucleotide
uuaauagaacgcucaucuc

SEQ ID NO: 175300 - RNA, 19 nt, Artificial Sequence
  Description of Artificial Sequence: Synthetic oligonucleotide
acuucaagcuuauggugcu

SEQ ID NO: 175301 - RNA, 19 nt, Artificial Sequence
  Description of Artificial Sequence: Synthetic oligonucleotide
agaugaauauuaccaccgu

SEQ ID NO: 175302 - RNA, 19 nt, Artificial Sequence
  Description of Artificial Sequence: Synthetic oligonucleotide
auaguggggacguuuucgu

SEQ ID NO: 175303 - RNA, 19 nt, Artificial Sequence
  Description of Artificial Sequence: Synthetic oligonucleotide
cacagaaacucaugucagc

SEQ ID NO: 175304 - RNA, 19 nt, Artificial Sequence
  Description of Artificial Sequence: Synthetic oligonucleotide
ucaguuagggaucgacgaa

SEQ ID NO: 175305 - RNA, 19 nt, Artificial Sequence
  Description of Artificial Sequence: Synthetic oligonucleotide
aaucggagguuggacuggg

SEQ ID NO: 175306 - RNA, 19 nt, Artificial Sequence
  Description of Artificial Sequence: Synthetic oligonucleotide
cugagaacgaccuaacugu

SEQ ID NO: 175307 - RNA, 19 nt, Artificial Sequence
  Description of Artificial Sequence: Synthetic oligonucleotide
uauugauuugcucccucuu

SEQ ID NO: 175308 - RNA, 19 nt, Artificial Sequence
  Description of Artificial Sequence: Synthetic oligonucleotide
accgucucaacagagacaa

SEQ ID NO: 175309 - RNA, 19 nt, Artificial Sequence
  Description of Artificial Sequence: Synthetic oligonucleotide
uuguagcgcagaaaucgac

SEQ ID NO: 175310 - RNA, 19 nt, Artificial Sequence
  Description of Artificial Sequence: Synthetic oligonucleotide
cagaaaucgacagccuccg

SEQ ID NO: 175311 - RNA, 19 nt, Artificial Sequence
  Description of Artificial Sequence: Synthetic oligonucleotide
gguugugaaugaaaagccg

SEQ ID NO: 175312 - RNA, 19 nt, Artificial Sequence
  Description of Artificial Sequence: Synthetic oligonucleotide
uccacacgccgacacgccg

SEQ ID NO: 175313 - RNA, 19 nt, Artificial Sequence
  Description of Artificial Sequence: Synthetic oligonucleotide
gauuccgugcucucacgug

SEQ ID NO: 175314 - RNA, 19 nt, Artificial Sequence
  Description of Artificial Sequence: Synthetic oligonucleotide
gaaccgcuugccaucagag

SEQ ID NO: 175315 - RNA, 19 nt, Artificial Sequence
  Description of Artificial Sequence: Synthetic oligonucleotide
aaaccugaaacaggauccu

SEQ ID NO: 175316 - RNA, 19 nt, Artificial Sequence
  Description of Artificial Sequence: Synthetic oligonucleotide
uucacggacugguacucug

SEQ ID NO: 175317 - RNA, 19 nt, Artificial Sequence
  Description of Artificial Sequence: Synthetic oligonucleotide
gcuagaucaaacugcgccc

SEQ ID NO: 175318 - RNA, 19 nt, Artificial Sequence
  Description of Artificial Sequence: Synthetic oligonucleotide
ucaacaguccuagguccgg

SEQ ID NO: 175319 - RNA, 19 nt, Artificial Sequence
  Description of Artificial Sequence: Synthetic oligonucleotide
accugaaacaggauccuag

SEQ ID NO: 175320 - RNA, 19 nt, Artificial Sequence
  Description of Artificial Sequence: Synthetic oligonucleotide
ugacccaguacagugugga

SEQ ID NO: 175321 - RNA, 19 nt, Artificial Sequence
  Description of Artificial Sequence: Synthetic oligonucleotide
cauaggccagauuccgugc

SEQ ID NO: 175322 - RNA, 19 nt, Artificial Sequence
  Description of Artificial Sequence: Synthetic oligonucleotide
gaauugggaguagguaugc

SEQ ID NO: 175323 - RNA, 19 nt, Artificial Sequence
  Description of Artificial Sequence: Synthetic oligonucleotide
aggucuacgugcugcagcu

SEQ ID NO: 175324 - RNA, 19 nt, Artificial Sequence
  Description of Artificial Sequence: Synthetic oligonucleotide
cuugcccaacccuauucag

SEQ ID NO: 175325 - RNA, 19 nt, Artificial Sequence
  Description of Artificial Sequence: Synthetic oligonucleotide
aaaugcggcagcggugguc

SEQ ID NO: 175326 - RNA, 19 nt, Artificial Sequence
  Description of Artificial Sequence: Synthetic oligonucleotide
guacgacuucaucuaaggc

SEQ ID NO: 175327 - RNA, 19 nt, Artificial Sequence
  Description of Artificial Sequence: Synthetic oligonucleotide
ugaguacgacuucaucuaa

SEQ ID NO: 175328 - RNA, 19 nt, Artificial Sequence
  Description of Artificial Sequence: Synthetic oligonucleotide
guuuucguagccgcccugg

SEQ ID NO: 175329 - RNA, 19 nt, Artificial Sequence
  Description of Artificial Sequence: Synthetic oligonucleotide
caucgggacagggugaccc

SEQ ID NO: 175330 - RNA, 19 nt, Artificial Sequence
  Description of Artificial Sequence: Synthetic oligonucleotide
guggugaggcaucaacgag

SEQ ID NO: 175331 - RNA, 19 nt, Artificial Sequence
  Description of Artificial Sequence: Synthetic oligonucleotide
caaacuugaguacgacuuc

SEQ ID NO: 175332 - RNA, 19 nt, Artificial Sequence
  Description of Artificial Sequence: Synthetic oligonucleotide
caguuagggaucgacgaag

SEQ ID NO: 175333 - RNA, 19 nt, Artificial Sequence
  Description of Artificial Sequence: Synthetic oligonucleotide
aauggcgugggcugcucaa

SEQ ID NO: 175334 - RNA, 19 nt, Artificial Sequence
  Description of Artificial Sequence: Synthetic oligonucleotide
gaguacgacuucaucuaag

SEQ ID NO: 175335 - RNA, 19 nt, Artificial Sequence
  Description of Artificial Sequence: Synthetic oligonucleotide
gaaucggagguuggacugg

SEQ ID NO: 175336 - RNA, 19 nt, Artificial Sequence
  Description of Artificial Sequence: Synthetic oligonucleotide
uaagugcaaguuugguccu

SEQ ID NO: 175337 - RNA, 19 nt, Artificial Sequence
  Description of Artificial Sequence: Synthetic oligonucleotide
ucggauacuuagccuccag

SEQ ID NO: 175338 - RNA, 19 nt, Artificial Sequence
  Description of Artificial Sequence: Synthetic oligonucleotide
ugcgcccugguguaguagc

SEQ ID NO: 175339 - RNA, 19 nt, Artificial Sequence
  Description of Artificial Sequence: Synthetic oligonucleotide
ucaggcuuauagcggacua

SEQ ID NO: 175340 - RNA, 19 nt, Artificial Sequence
  Description of Artificial Sequence: Synthetic oligonucleotide
uagcgcagaaaucgacagc

SEQ ID NO: 175341 - RNA, 19 nt, Artificial Sequence
  Description of Artificial Sequence: Synthetic oligonucleotide
agauuccgugcucucacgu

SEQ ID NO: 175342 - RNA, 19 nt, Artificial Sequence
  Description of Artificial Sequence: Synthetic oligonucleotide
auaggccagauuccgugcu

SEQ ID NO: 175343 - RNA, 19 nt, Artificial Sequence
  Description of Artificial Sequence: Synthetic oligonucleotide
aaccgcuugccaucagaga

SEQ ID NO: 175344 - RNA, 19 nt, Artificial Sequence
  Description of Artificial Sequence: Synthetic oligonucleotide
agagaucauuaugaaggug

SEQ ID NO: 175345 - RNA, 19 nt, Artificial Sequence
  Description of Artificial Sequence: Synthetic oligonucleotide
guagccaggguagaguuuc

SEQ ID NO: 175346 - RNA, 19 nt, Artificial Sequence
  Description of Artificial Sequence: Synthetic oligonucleotide
uauucagggcuauguugac

SEQ ID NO: 175347 - RNA, 19 nt, Artificial Sequence
  Description of Artificial Sequence: Synthetic oligonucleotide
uuuucguagccgcccugga

SEQ ID NO: 175348 - RNA, 19 nt, Artificial Sequence
  Description of Artificial Sequence: Synthetic oligonucleotide
agaccgucggauacuuagc

SEQ ID NO: 175349 - RNA, 19 nt, Artificial Sequence
  Description of Artificial Sequence: Synthetic oligonucleotide
gacauagcacgccccuccc

SEQ ID NO: 175350 - RNA, 19 nt, Artificial Sequence
  Description of Artificial Sequence: Synthetic oligonucleotide
aaucgacagccuccgcccu

SEQ ID NO: 175351 - RNA, 19 nt, Artificial Sequence
  Description of Artificial Sequence: Synthetic oligonucleotide
caguguggacauagcacgc

SEQ ID NO: 175352 - RNA, 19 nt, Artificial Sequence
  Description of Artificial Sequence: Synthetic oligonucleotide
aguacccaucugcacucag

SEQ ID NO: 175353 - RNA, 19 nt, Artificial Sequence
  Description of Artificial Sequence: Synthetic oligonucleotide
aaucuugcccaacccuauu

SEQ ID NO: 175354 - RNA, 19 nt, Artificial Sequence
  Description of Artificial Sequence: Synthetic oligonucleotide
guagauguuugagauguaa

SEQ ID NO: 175355 - RNA, 19 nt, Artificial Sequence
  Description of Artificial Sequence: Synthetic oligonucleotide
ucggagguuggacuggguu

SEQ ID NO: 175356 - RNA, 19 nt, Artificial Sequence
  Description of Artificial Sequence: Synthetic oligonucleotide
ucacggacugguacucugu

SEQ ID NO: 175357 - RNA, 19 nt, Artificial Sequence
  Description of Artificial Sequence: Synthetic oligonucleotide
agccuccgcccucauaauc

SEQ ID NO: 175358 - RNA, 19 nt, Artificial Sequence
  Description of Artificial Sequence: Synthetic oligonucleotide
ggucaguuagggaucgacg

SEQ ID NO: 175359 - RNA, 19 nt, Artificial Sequence
  Description of Artificial Sequence: Synthetic oligonucleotide
aguuugguccuggcggcac

SEQ ID NO: 175360 - RNA, 19 nt, Artificial Sequence
  Description of Artificial Sequence: Synthetic oligonucleotide
aggcuuauagcggacuaca

SEQ ID NO: 175361 - RNA, 19 nt, Artificial Sequence
  Description of Artificial Sequence: Synthetic oligonucleotide
guuggccauucgcaccucg

SEQ ID NO: 175362 - RNA, 19 nt, Artificial Sequence
  Description of Artificial Sequence: Synthetic oligonucleotide
acgaaggacacagcaauau

SEQ ID NO: 175363 - RNA, 19 nt, Artificial Sequence
  Description of Artificial Sequence: Synthetic oligonucleotide
ggaauugggaguagguaug

SEQ ID NO: 175364 - RNA, 19 nt, Artificial Sequence
  Description of Artificial Sequence: Synthetic oligonucleotide
uuucguagccgcccuggau

SEQ ID NO: 175365 - RNA, 19 nt, Artificial Sequence
  Description of Artificial Sequence: Synthetic oligonucleotide
augaguggcgcgaugacau

SEQ ID NO: 175366 - RNA, 19 nt, Artificial Sequence
  Description of Artificial Sequence: Synthetic oligonucleotide
agcaaauggccgaagguau

SEQ ID NO: 175367 - RNA, 19 nt, Artificial Sequence
  Description of Artificial Sequence: Synthetic oligonucleotide
gggacguuuucguagccgc

SEQ ID NO: 175368 - RNA, 19 nt, Artificial Sequence
  Description of Artificial Sequence: Synthetic oligonucleotide
cugaacgcuugaagcggcg

SEQ ID NO: 175369 - RNA, 19 nt, Artificial Sequence
  Description of Artificial Sequence: Synthetic oligonucleotide
uggcgcgaugacauucuug

SEQ ID NO: 175370 - RNA, 19 nt, Artificial Sequence
  Description of Artificial Sequence: Synthetic oligonucleotide
aggagccguaggcuguccg

SEQ ID NO: 175371 - RNA, 19 nt, Artificial Sequence
  Description of Artificial Sequence: Synthetic oligonucleotide
auauuaccaccgucugcug

SEQ ID NO: 175372 - RNA, 19 nt, Artificial Sequence
  Description of Artificial Sequence: Synthetic oligonucleotide
gaacgcuugaagcggcgga

SEQ ID NO: 175373 - RNA, 19 nt, Artificial Sequence
  Description of Artificial Sequence: Synthetic oligonucleotide
cuccggucgggguagauga

SEQ ID NO: 175374 - RNA, 19 nt, Artificial Sequence
  Description of Artificial Sequence: Synthetic oligonucleotide
uuccgugcucucacguggc

SEQ ID NO: 175375 - RNA, 19 nt, Artificial Sequence
  Description of Artificial Sequence: Synthetic oligonucleotide
gggcauaaccgaugaagcc

SEQ ID NO: 175376 - RNA, 19 nt, Artificial Sequence
  Description of Artificial Sequence: Synthetic oligonucleotide
guaguggaacaggucuacg

SEQ ID NO: 175377 - RNA, 19 nt, Artificial Sequence
  Description of Artificial Sequence: Synthetic oligonucleotide
cauaaccgaugaagccucc

SEQ ID NO: 175378 - RNA, 19 nt, Artificial Sequence
  Description of Artificial Sequence: Synthetic oligonucleotide
ucgagggauguaguugccc

SEQ ID NO: 175379 - RNA, 19 nt, Artificial Sequence
  Description of Artificial Sequence: Synthetic oligonucleotide
aacugggcugaacgcuuga

SEQ ID NO: 175380 - RNA, 19 nt, Artificial Sequence
  Description of Artificial Sequence: Synthetic oligonucleotide
ucagagaccgucggauacu

SEQ ID NO: 175381 - RNA, 19 nt, Artificial Sequence
  Description of Artificial Sequence: Synthetic oligonucleotide
agacugauauugauuugcu

SEQ ID NO: 175382 - RNA, 19 nt, Artificial Sequence
  Description of Artificial Sequence: Synthetic oligonucleotide
gguuguccuuguuaucacc

SEQ ID NO: 175383 - RNA, 19 nt, Artificial Sequence
  Description of Artificial Sequence: Synthetic oligonucleotide
aacgcuugaagcggcggaa

SEQ ID NO: 175384 - RNA, 19 nt, Artificial Sequence
  Description of Artificial Sequence: Synthetic oligonucleotide
aaaaugcggcagcgguggu

SEQ ID NO: 175385 - RNA, 19 nt, Artificial Sequence
  Description of Artificial Sequence: Synthetic oligonucleotide
ucguagccgcccuggauac

SEQ ID NO: 175386 - RNA, 19 nt, Artificial Sequence
  Description of Artificial Sequence: Synthetic oligonucleotide
ggggcauaaccgaugaagc

SEQ ID NO: 175387 - RNA, 19 nt, Artificial Sequence
  Description of Artificial Sequence: Synthetic oligonucleotide
accgucggauacuuagccu

SEQ ID NO: 175388 - RNA, 19 nt, Artificial Sequence
  Description of Artificial Sequence: Synthetic oligonucleotide
ggcugaacgcuugaagcgg

SEQ ID NO: 175389 - RNA, 19 nt, Artificial Sequence
  Description of Artificial Sequence: Synthetic oligonucleotide
cucggucagagccacguca

SEQ ID NO: 175390 - RNA, 19 nt, Artificial Sequence
  Description of Artificial Sequence: Synthetic oligonucleotide
aucgacagccuccgcccuc

SEQ ID NO: 175391 - RNA, 19 nt, Artificial Sequence
  Description of Artificial Sequence: Synthetic oligonucleotide
guagagaaccaagcuucgc

SEQ ID NO: 175392 - RNA, 19 nt, Artificial Sequence
  Description of Artificial Sequence: Synthetic oligonucleotide
ggagguuggacuggguucc

SEQ ID NO: 175393 - RNA, 19 nt, Artificial Sequence
  Description of Artificial Sequence: Synthetic oligonucleotide
acgaccuaacugucaguga

SEQ ID NO: 175394 - RNA, 19 nt, Artificial Sequence
  Description of Artificial Sequence: Synthetic oligonucleotide
gaguagguaugcccagauc

SEQ ID NO: 175395 - RNA, 19 nt, Artificial Sequence
  Description of Artificial Sequence: Synthetic oligonucleotide
cagcaauauagcggguacc

SEQ ID NO: 175396 - RNA, 19 nt, Artificial Sequence
  Description of Artificial Sequence: Synthetic oligonucleotide
ggaucuucgagagguauuc

SEQ ID NO: 175397 - RNA, 19 nt, Artificial Sequence
  Description of Artificial Sequence: Synthetic oligonucleotide
uggccgaagguauggcggu

SEQ ID NO: 175398 - RNA, 19 nt, Artificial Sequence
  Description of Artificial Sequence: Synthetic oligonucleotide
ucgggguagaugaguuccu

SEQ ID NO: 175399 - RNA, 19 nt, Artificial Sequence
  Description of Artificial Sequence: Synthetic oligonucleotide
aacuugaguacgacuucau

SEQ ID NO: 175400 - RNA, 19 nt, Artificial Sequence
  Description of Artificial Sequence: Synthetic oligonucleotide
gagaacgaccuaacuguca

SEQ ID NO: 175401 - RNA, 19 nt, Artificial Sequence
  Description of Artificial Sequence: Synthetic oligonucleotide
gugccacucccgcucaaag

SEQ ID NO: 175402 - RNA, 19 nt, Artificial Sequence
  Description of Artificial Sequence: Synthetic oligonucleotide
ggagccguaggcuguccgg

SEQ ID NO: 175403 - RNA, 19 nt, Artificial Sequence
  Description of Artificial Sequence: Synthetic oligonucleotide
caauaguggggacguuuuc

SEQ ID NO: 175404 - RNA, 19 nt, Artificial Sequence
  Description of Artificial Sequence: Synthetic oligonucleotide
ggacugguacucugugccg

SEQ ID NO: 175405 - RNA, 19 nt, Artificial Sequence
  Description of Artificial Sequence: Synthetic oligonucleotide
cugcguaggcccucaucgc

SEQ ID NO: 175406 - RNA, 19 nt, Artificial Sequence
  Description of Artificial Sequence: Synthetic oligonucleotide
aucaacgagggcugcucau

SEQ ID NO: 175407 - RNA, 19 nt, Artificial Sequence
  Description of Artificial Sequence: Synthetic oligonucleotide
gcuuauagcggacuacaaa

SEQ ID NO: 175408 - RNA, 19 nt, Artificial Sequence
  Description of Artificial Sequence: Synthetic oligonucleotide
acguuuucguagccgcccu

SEQ ID NO: 175409 - RNA, 19 nt, Artificial Sequence
  Description of Artificial Sequence: Synthetic oligonucleotide
ggcgcgaugacauucuugu

SEQ ID NO: 175410 - RNA, 19 nt, Artificial Sequence
  Description of Artificial Sequence: Synthetic oligonucleotide
guuguagcgcagaaaucga

SEQ ID NO: 175411 - RNA, 19 nt, Artificial Sequence
  Description of Artificial Sequence: Synthetic oligonucleotide
guuugagauguaaggcaca

SEQ ID NO: 175412 - RNA, 19 nt, Artificial Sequence
  Description of Artificial Sequence: Synthetic oligonucleotide
caucaggcuuauagcggac

SEQ ID NO: 175413 - RNA, 19 nt, Artificial Sequence
  Description of Artificial Sequence: Synthetic oligonucleotide
cacggacugguacucugug

SEQ ID NO: 175414 - RNA, 19 nt, Artificial Sequence
  Description of Artificial Sequence: Synthetic oligonucleotide
caacaguccuagguccggg

SEQ ID NO: 175415 - RNA, 19 nt, Artificial Sequence
  Description of Artificial Sequence: Synthetic oligonucleotide
gagccguaggcuguccggc

SEQ ID NO: 175416 - RNA, 19 nt, Artificial Sequence
  Description of Artificial Sequence: Synthetic oligonucleotide
gcaacagguauucaggaau

SEQ ID NO: 175417 - RNA, 19 nt, Artificial Sequence
  Description of Artificial Sequence: Synthetic oligonucleotide
ggcgcagcaaccucaagaa

SEQ ID NO: 175418 - RNA, 19 nt, Artificial Sequence
  Description of Artificial Sequence: Synthetic oligonucleotide
aggcuagaucaaacugcgc

SEQ ID NO: 175419 - RNA, 19 nt, Artificial Sequence
  Description of Artificial Sequence: Synthetic oligonucleotide
augaaaagccgcauccguu

SEQ ID NO: 175420 - RNA, 19 nt, Artificial Sequence
  Description of Artificial Sequence: Synthetic oligonucleotide
guuaucacccagagaccac

SEQ ID NO: 175421 - RNA, 19 nt, Artificial Sequence
  Description of Artificial Sequence: Synthetic oligonucleotide
ggauccuaggggcuggauc

SEQ ID NO: 175422 - RNA, 19 nt, Artificial Sequence
  Description of Artificial Sequence: Synthetic oligonucleotide
caggcuuauagcggacuac

SEQ ID NO: 175423 - RNA, 19 nt, Artificial Sequence
  Description of Artificial Sequence: Synthetic oligonucleotide
aucgcaggcgcagcaaccu

SEQ ID NO: 175424 - RNA, 19 nt, Artificial Sequence
  Description of Artificial Sequence: Synthetic oligonucleotide
ccgucggauacuuagccuc

SEQ ID NO: 175425 - RNA, 19 nt, Artificial Sequence
  Description of Artificial Sequence: Synthetic oligonucleotide
caaacugcgcccuggugua

SEQ ID NO: 175426 - RNA, 19 nt, Artificial Sequence
  Description of Artificial Sequence: Synthetic oligonucleotide
aaccugaaacaggauccua

SEQ ID NO: 175427 - RNA, 19 nt, Artificial Sequence
  Description of Artificial Sequence: Synthetic oligonucleotide
aaacugcgcccugguguag

SEQ ID NO: 175428 - RNA, 19 nt, Artificial Sequence
  Description of Artificial Sequence: Synthetic oligonucleotide
gaauggcgugggcugcuca

SEQ ID NO: 175429 - RNA, 19 nt, Artificial Sequence
  Description of Artificial Sequence: Synthetic oligonucleotide
uccagaaucgagggaugua

SEQ ID NO: 175430 - RNA, 19 nt, Artificial Sequence
  Description of Artificial Sequence: Synthetic oligonucleotide
ugccuccgugaagaugggg

SEQ ID NO: 175431 - RNA, 19 nt, Artificial Sequence
  Description of Artificial Sequence: Synthetic oligonucleotide
ucgacagccuccgcccuca

SEQ ID NO: 175432 - RNA, 19 nt, Artificial Sequence
  Description of Artificial Sequence: Synthetic oligonucleotide
aaugcccuugaggcugcgu

SEQ ID NO: 175433 - RNA, 19 nt, Artificial Sequence
  Description of Artificial Sequence: Synthetic oligonucleotide
aucgggacagggugaccca

SEQ ID NO: 175434 - RNA, 19 nt, Artificial Sequence
  Description of Artificial Sequence: Synthetic oligonucleotide
aguggcgcgaugacauucu

SEQ ID NO: 175435 - RNA, 19 nt, Artificial Sequence
  Description of Artificial Sequence: Synthetic oligonucleotide
caugaguggcgcgaugaca

SEQ ID NO: 175436 - RNA, 19 nt, Artificial Sequence
  Description of Artificial Sequence: Synthetic oligonucleotide
cacacgccgacacgccgcc

SEQ ID NO: 175437 - RNA, 19 nt, Artificial Sequence
  Description of Artificial Sequence: Synthetic oligonucleotide
ggcauaaccgaugaagccu

SEQ ID NO: 175438 - RNA, 19 nt, Artificial Sequence
  Description of Artificial Sequence: Synthetic oligonucleotide
agcggcggaagcccucugu

SEQ ID NO: 175439 - RNA, 19 nt, Artificial Sequence
  Description of Artificial Sequence: Synthetic oligonucleotide
ggggacguuuucguagccg

SEQ ID NO: 175440 - RNA, 19 nt, Artificial Sequence
  Description of Artificial Sequence: Synthetic oligonucleotide
gaaccaagcuucgcacaga

SEQ ID NO: 175441 - RNA, 19 nt, Artificial Sequence
  Description of Artificial Sequence: Synthetic oligonucleotide
accucccagagaucauuau

SEQ ID NO: 175442 - RNA, 19 nt, Artificial Sequence
  Description of Artificial Sequence: Synthetic oligonucleotide
gaucauuaugaaggugggu

SEQ ID NO: 175443 - RNA, 19 nt, Artificial Sequence
  Description of Artificial Sequence: Synthetic oligonucleotide
gcauaaccgaugaagccuc

SEQ ID NO: 175444 - RNA, 19 nt, Artificial Sequence
  Description of Artificial Sequence: Synthetic oligonucleotide
ggaaccgcuugccaucaga

SEQ ID NO: 175445 - RNA, 19 nt, Artificial Sequence
  Description of Artificial Sequence: Synthetic oligonucleotide
cugguacucugugccgugc

SEQ ID NO: 175446 - RNA, 19 nt, Artificial Sequence
  Description of Artificial Sequence: Synthetic oligonucleotide
cacaccgaccaggacggug

SEQ ID NO: 175447 - RNA, 19 nt, Artificial Sequence
  Description of Artificial Sequence: Synthetic oligonucleotide
ugugccacucccgcucaaa

SEQ ID NO: 175448 - RNA, 19 nt, Artificial Sequence
  Description of Artificial Sequence: Synthetic oligonucleotide
caccgucucaacagagaca

SEQ ID NO: 175449 - RNA, 19 nt, Artificial Sequence
  Description of Artificial Sequence: Synthetic oligonucleotide
ggacuacaaaggcuagauc

SEQ ID NO: 175450 - RNA, 19 nt, Artificial Sequence
  Description of Artificial Sequence: Synthetic oligonucleotide
agcggacuacaaaggcuag

SEQ ID NO: 175451 - RNA, 19 nt, Artificial Sequence
  Description of Artificial Sequence: Synthetic oligonucleotide
uaguacccaucugcacuca

SEQ ID NO: 175452 - RNA, 19 nt, Artificial Sequence
  Description of Artificial Sequence: Synthetic oligonucleotide
cacagcaauauagcgggua

SEQ ID NO: 175453 - RNA, 19 nt, Artificial Sequence
  Description of Artificial Sequence: Synthetic oligonucleotide
gcaaauggccgaagguaug

SEQ ID NO: 175454 - RNA, 19 nt, Artificial Sequence
  Description of Artificial Sequence: Synthetic oligonucleotide
aacaccucccagagaucau

SEQ ID NO: 175455 - RNA, 19 nt, Artificial Sequence
  Description of Artificial Sequence: Synthetic oligonucleotide
ugaccacuggaaggguguc

SEQ ID NO: 175456 - RNA, 19 nt, Artificial Sequence
  Description of Artificial Sequence: Synthetic oligonucleotide
ccauucgcaccucgggacc

SEQ ID NO: 175457 - RNA, 19 nt, Artificial Sequence
  Description of Artificial Sequence: Synthetic oligonucleotide
gacugguacucugugccgu

SEQ ID NO: 175458 - RNA, 19 nt, Artificial Sequence
  Description of Artificial Sequence: Synthetic oligonucleotide
acgccgccccugcacaaug

SEQ ID NO: 175459 - RNA, 19 nt, Artificial Sequence
  Description of Artificial Sequence: Synthetic oligonucleotide
ugaguggcgcgaugacauu

SEQ ID NO: 175460 - RNA, 19 nt, Artificial Sequence
  Description of Artificial Sequence: Synthetic oligonucleotide
ggagcccaggaaccgcuug

SEQ ID NO: 175461 - RNA, 19 nt, Artificial Sequence
  Description of Artificial Sequence: Synthetic oligonucleotide
gcugaacgcuugaagcggc

SEQ ID NO: 175462 - RNA, 19 nt, Artificial Sequence
  Description of Artificial Sequence: Synthetic oligonucleotide
ggcguaguacccaucugca

SEQ ID NO: 175463 - RNA, 19 nt, Artificial Sequence
  Description of Artificial Sequence: Synthetic oligonucleotide
gcuccguccagguucugga

SEQ ID NO: 175464 - RNA, 19 nt, Artificial Sequence
  Description of Artificial Sequence: Synthetic oligonucleotide
ggcucuuauggagcaguug

SEQ ID NO: 175465 - RNA, 19 nt, Artificial Sequence
  Description of Artificial Sequence: Synthetic oligonucleotide
ggccauucgcaccucggga

SEQ ID NO: 175466 - RNA, 19 nt, Artificial Sequence
  Description of Artificial Sequence: Synthetic oligonucleotide
gaacgaccuaacugucagu

SEQ ID NO: 175467 - RNA, 19 nt, Artificial Sequence
  Description of Artificial Sequence: Synthetic oligonucleotide
ucucuggucugugccugau

SEQ ID NO: 175468 - RNA, 19 nt, Artificial Sequence
  Description of Artificial Sequence: Synthetic oligonucleotide
ucccgucucuggcccgucu

SEQ ID NO: 175469 - RNA, 19 nt, Artificial Sequence
  Description of Artificial Sequence: Synthetic oligonucleotide
gacauccgggcaaggcauc

SEQ ID NO: 175470 - RNA, 19 nt, Artificial Sequence
  Description of Artificial Sequence: Synthetic oligonucleotide
ccacacgccgacacgccgc

SEQ ID NO: 175471 - RNA, 19 nt, Artificial Sequence
  Description of Artificial Sequence: Synthetic oligonucleotide
gcguaguacccaucugcac

SEQ ID NO: 175472 - RNA, 19 nt, Artificial Sequence
  Description of Artificial Sequence: Synthetic oligonucleotide
gaucuucgagagguauucu

SEQ ID NO: 175473 - RNA, 19 nt, Artificial Sequence
  Description of Artificial Sequence: Synthetic oligonucleotide
ggacguuuucguagccgcc

SEQ ID NO: 175474 - RNA, 19 nt, Artificial Sequence
  Description of Artificial Sequence: Synthetic oligonucleotide
ggugcuguucgugguugug

SEQ ID NO: 175475 - RNA, 19 nt, Artificial Sequence
  Description of Artificial Sequence: Synthetic oligonucleotide
cggagguuggacuggguuc

SEQ ID NO: 175476 - RNA, 19 nt, Artificial Sequence
  Description of Artificial Sequence: Synthetic oligonucleotide
acugcgcccugguguagua

SEQ ID NO: 175477 - RNA, 19 nt, Artificial Sequence
  Description of Artificial Sequence: Synthetic oligonucleotide
cucucacguggcccauuuc

SEQ ID NO: 175478 - RNA, 19 nt, Artificial Sequence
  Description of Artificial Sequence: Synthetic oligonucleotide
gguaugcccagaucuuggu

SEQ ID NO: 175479 - RNA, 19 nt, Artificial Sequence
  Description of Artificial Sequence: Synthetic oligonucleotide
ugucaauaguggggacguu

SEQ ID NO: 175480 - RNA, 19 nt, Artificial Sequence
  Description of Artificial Sequence: Synthetic oligonucleotide
auucgcaccucgggaccca

SEQ ID NO: 175481 - RNA, 19 nt, Artificial Sequence
  Description of Artificial Sequence: Synthetic oligonucleotide
cauccgcguuggccauucg

SEQ ID NO: 175482 - RNA, 19 nt, Artificial Sequence
  Description of Artificial Sequence: Synthetic oligonucleotide
acacgccgacacgccgccc

SEQ ID NO: 175483 - RNA, 19 nt, Artificial Sequence
  Description of Artificial Sequence: Synthetic oligonucleotide
uucgcaccucgggacccac

SEQ ID NO: 175484 - RNA, 19 nt, Artificial Sequence
  Description of Artificial Sequence: Synthetic oligonucleotide
acacagcaauauagcgggu

SEQ ID NO: 175485 - RNA, 19 nt, Artificial Sequence
  Description of Artificial Sequence: Synthetic oligonucleotide
cgcccgggaugcaugagag

SEQ ID NO: 175486 - RNA, 19 nt, Artificial Sequence
  Description of Artificial Sequence: Synthetic oligonucleotide
ccgggcaaggcaucuccac

SEQ ID NO: 175487 - RNA, 19 nt, Artificial Sequence
  Description of Artificial Sequence: Synthetic oligonucleotide
gacggugggcagagcuuca

SEQ ID NO: 175488 - RNA, 19 nt, Artificial Sequence
  Description of Artificial Sequence: Synthetic oligonucleotide
agccgcccuggauacgguu

SEQ ID NO: 175489 - RNA, 19 nt, Artificial Sequence
  Description of Artificial Sequence: Synthetic oligonucleotide
ccacucccgcucaaaggug

SEQ ID NO: 175490 - RNA, 19 nt, Artificial Sequence
  Description of Artificial Sequence: Synthetic oligonucleotide
caaugcccuugaggcugcg

SEQ ID NO: 175491 - RNA, 19 nt, Artificial Sequence
  Description of Artificial Sequence: Synthetic oligonucleotide
acgccgacacgccgccccu

SEQ ID NO: 175492 - RNA, 19 nt, Artificial Sequence
  Description of Artificial Sequence: Synthetic oligonucleotide
gcggcggaagcccucuguc

SEQ ID NO: 175493 - RNA, 19 nt, Artificial Sequence
  Description of Artificial Sequence: Synthetic oligonucleotide
ccccugcacaaugucuacg

SEQ ID NO: 175494 - RNA, 19 nt, Artificial Sequence
  Description of Artificial Sequence: Synthetic oligonucleotide
ggucugugccugaucuuuc

SEQ ID NO: 175495 - RNA, 19 nt, Artificial Sequence
  Description of Artificial Sequence: Synthetic oligonucleotide
ccgcccucauaaucuugcc

SEQ ID NO: 175496 - RNA, 19 nt, Artificial Sequence
  Description of Artificial Sequence: Synthetic oligonucleotide
cccaacccuauucagggcu

SEQ ID NO: 175497 - RNA, 19 nt, Artificial Sequence
  Description of Artificial Sequence: Synthetic oligonucleotide
ggcugcguaggcccucauc

SEQ ID NO: 175498 - RNA, 19 nt, Artificial Sequence
  Description of Artificial Sequence: Synthetic oligonucleotide
gccgaaccuucuguccucc

SEQ ID NO: 175499 - RNA, 19 nt, Artificial Sequence
  Description of Artificial Sequence: Synthetic oligonucleotide
ggcuuauagcggacuacaa

SEQ ID NO: 175500 - RNA, 19 nt, Artificial Sequence
  Description of Artificial Sequence: Synthetic oligonucleotide
gcggcacaggucugcgccc

SEQ ID NO: 175501 - RNA, 19 nt, Artificial Sequence
  Description of Artificial Sequence: Synthetic oligonucleotide
gggacagcaaauggccgaa

SEQ ID NO: 175502 - RNA, 19 nt, Artificial Sequence
  Description of Artificial Sequence: Synthetic oligonucleotide
ccugaaucuuguaguugaa

SEQ ID NO: 175503 - RNA, 19 nt, Artificial Sequence
  Description of Artificial Sequence: Synthetic oligonucleotide
gcguaggcccucaucgcac

SEQ ID NO: 175504 - RNA, 19 nt, Artificial Sequence
  Description of Artificial Sequence: Synthetic oligonucleotide
gugaagguagaggcaucgu

SEQ ID NO: 175505 - RNA, 19 nt, Artificial Sequence
  Description of Artificial Sequence: Synthetic oligonucleotide
ccgugcucucacguggccc

SEQ ID NO: 175506 - RNA, 19 nt, Artificial Sequence
  Description of Artificial Sequence: Synthetic oligonucleotide
cgugcucucacguggccca

SEQ ID NO: 175507 - RNA, 19 nt, Artificial Sequence
  Description of Artificial Sequence: Synthetic oligonucleotide
gcggacuacaaaggcuaga

SEQ ID NO: 175508 - RNA, 19 nt, Artificial Sequence
  Description of Artificial Sequence: Synthetic oligonucleotide
auccuaggggcuggaucuu

SEQ ID NO: 175509 - RNA, 19 nt, Artificial Sequence
  Description of Artificial Sequence: Synthetic oligonucleotide
ggcucggucagagccacgu

SEQ ID NO: 175510 - RNA, 19 nt, Artificial Sequence
  Description of Artificial Sequence: Synthetic oligonucleotide
gcauccgcguuggccauuc

SEQ ID NO: 175511 - RNA, 19 nt, Artificial Sequence
  Description of Artificial Sequence: Synthetic oligonucleotide
agagaccgucggauacuua

SEQ ID NO: 175512 - RNA, 19 nt, Artificial Sequence
  Description of Artificial Sequence: Synthetic oligonucleotide
cccuggauacgguuguccu

SEQ ID NO: 175513 - RNA, 19 nt, Artificial Sequence
  Description of Artificial Sequence: Synthetic oligonucleotide
ccaacccuauucagggcua

SEQ ID NO: 175514 - RNA, 19 nt, Artificial Sequence
  Description of Artificial Sequence: Synthetic oligonucleotide
cccgucucuggcccgucuc

SEQ ID NO: 175515 - RNA, 19 nt, Artificial Sequence
  Description of Artificial Sequence: Synthetic oligonucleotide
cguuuucguagccgcccug

SEQ ID NO: 175516 - RNA, 19 nt, Artificial Sequence
  Description of Artificial Sequence: Synthetic oligonucleotide
ccccuaagcagggucagua

SEQ ID NO: 175517 - RNA, 19 nt, Artificial Sequence
  Description of Artificial Sequence: Synthetic oligonucleotide
gcuuggcgucguccuucgc

SEQ ID NO: 175518 - RNA, 19 nt, Artificial Sequence
  Description of Artificial Sequence: Synthetic oligonucleotide
acacaccgaccaggacggu

SEQ ID NO: 175519 - RNA, 19 nt, Artificial Sequence
  Description of Artificial Sequence: Synthetic oligonucleotide
ccggcucggucagagccac

SEQ ID NO: 175520 - RNA, 19 nt, Artificial Sequence
  Description of Artificial Sequence: Synthetic oligonucleotide
cagagaccgucggauacuu

SEQ ID NO: 175521 - RNA, 19 nt, Artificial Sequence
  Description of Artificial Sequence: Synthetic oligonucleotide
ggaugaccacuggaagggu

SEQ ID NO: 175522 - RNA, 19 nt, Artificial Sequence
  Description of Artificial Sequence: Synthetic oligonucleotide
caacccuauucagggcuau

SEQ ID NO: 175523 - RNA, 19 nt, Artificial Sequence
  Description of Artificial Sequence: Synthetic oligonucleotide
cggacuacaaaggcuagau

SEQ ID NO: 175524 - RNA, 19 nt, Artificial Sequence
  Description of Artificial Sequence: Synthetic oligonucleotide
cgggcguaguacccaucug

SEQ ID NO: 175525 - RNA, 19 nt, Artificial Sequence
  Description of Artificial Sequence: Synthetic oligonucleotide
guggcgcgaugacauucuu

SEQ ID NO: 175526 - RNA, 19 nt, Artificial Sequence
  Description of Artificial Sequence: Synthetic oligonucleotide
cgggucaugaguggcgcga

SEQ ID NO: 175527 - RNA, 19 nt, Artificial Sequence
  Description of Artificial Sequence: Synthetic oligonucleotide
cgagagguauucugggcau

SEQ ID NO: 175528 - RNA, 19 nt, Artificial Sequence
  Description of Artificial Sequence: Synthetic oligonucleotide
cagccuccgcccucauaau

SEQ ID NO: 175529 - RNA, 19 nt, Artificial Sequence
  Description of Artificial Sequence: Synthetic oligonucleotide
ggucugcgcccauguuccu

SEQ ID NO: 175530 - RNA, 19 nt, Artificial Sequence
  Description of Artificial Sequence: Synthetic oligonucleotide
ccacuggaagggugucaua

SEQ ID NO: 175531 - RNA, 19 nt, Artificial Sequence
  Description of Artificial Sequence: Synthetic oligonucleotide
ccgucucuggcccgucucu

SEQ ID NO: 175532 - RNA, 19 nt, Artificial Sequence
  Description of Artificial Sequence: Synthetic oligonucleotide
gcgcgaugacauucuuguu

SEQ ID NO: 175533 - RNA, 19 nt, Artificial Sequence
  Description of Artificial Sequence: Synthetic oligonucleotide
ccggucgggguagaugagu

SEQ ID NO: 175534 - RNA, 19 nt, Artificial Sequence
  Description of Artificial Sequence: Synthetic oligonucleotide
ggccgaagguauggcgguu

SEQ ID NO: 175535 - RNA, 19 nt, Artificial Sequence
  Description of Artificial Sequence: Synthetic oligonucleotide
aauauuggauuucagaccc

SEQ ID NO: 175536 - RNA, 19 nt, Artificial Sequence
  Description of Artificial Sequence: Synthetic oligonucleotide
uuuaaugauacuaucagag

SEQ ID NO: 175537 - RNA, 19 nt, Artificial Sequence
  Description of Artificial Sequence: Synthetic oligonucleotide
uuuaaguuggaaaucuggg

SEQ ID NO: 175538 - RNA, 19 nt, Artificial Sequence
  Description of Artificial Sequence: Synthetic oligonucleotide
aaugcauagcaccagcagg

SEQ ID NO: 175539 - RNA, 19 nt, Artificial Sequence
  Description of Artificial Sequence: Synthetic oligonucleotide
uggaguugcacccagaaug

SEQ ID NO: 175540 - RNA, 19 nt, Artificial Sequence
  Description of Artificial Sequence: Synthetic oligonucleotide
auaucgauaaccucucugg

SEQ ID NO: 175541 - RNA, 19 nt, Artificial Sequence
  Description of Artificial Sequence: Synthetic oligonucleotide
agcaaugacuuccuggugc

SEQ ID NO: 175542 - RNA, 19 nt, Artificial Sequence
  Description of Artificial Sequence: Synthetic oligonucleotide
ugacauaucgauaaccucu

SEQ ID NO: 175543 - RNA, 19 nt, Artificial Sequence
  Description of Artificial Sequence: Synthetic oligonucleotide
uuugccgagucacagaaag

SEQ ID NO: 175544 - RNA, 19 nt, Artificial Sequence
  Description of Artificial Sequence: Synthetic oligonucleotide
uucucuauuucauacgugc

SEQ ID NO: 175545 - RNA, 19 nt, Artificial Sequence
  Description of Artificial Sequence: Synthetic oligonucleotide
uuugcuucaaucugcuggg

SEQ ID NO: 175546 - RNA, 19 nt, Artificial Sequence
  Description of Artificial Sequence: Synthetic oligonucleotide
uuaaaggcuacguagcuac

SEQ ID NO: 175547 - RNA, 19 nt, Artificial Sequence
  Description of Artificial Sequence: Synthetic oligonucleotide
cuugcguucagauucuucc

SEQ ID NO: 175548 - RNA, 19 nt, Artificial Sequence
  Description of Artificial Sequence: Synthetic oligonucleotide
ugucgcaucuguaugaucu

SEQ ID NO: 175549 - RNA, 19 nt, Artificial Sequence
  Description of Artificial Sequence: Synthetic oligonucleotide
agaaaguucgcauggcuuc

SEQ ID NO: 175550 - RNA, 19 nt, Artificial Sequence
  Description of Artificial Sequence: Synthetic oligonucleotide
agguguguccgauagauag

SEQ ID NO: 175551 - RNA, 19 nt, Artificial Sequence
  Description of Artificial Sequence: Synthetic oligonucleotide
uggagcauauuucagcuug

SEQ ID NO: 175552 - RNA, 19 nt, Artificial Sequence
  Description of Artificial Sequence: Synthetic oligonucleotide
uacuaucagaguaaggcca

SEQ ID NO: 175553 - RNA, 19 nt, Artificial Sequence
  Description of Artificial Sequence: Synthetic oligonucleotide
uaccuugugagccaguuca

SEQ ID NO: 175554 - RNA, 19 nt, Artificial Sequence
  Description of Artificial Sequence: Synthetic oligonucleotide
ucgauaaccucucuggucu

SEQ ID NO: 175555 - RNA, 19 nt, Artificial Sequence
  Description of Artificial Sequence: Synthetic oligonucleotide
uuugugggcacauacuggc

SEQ ID NO: 175556 - RNA, 19 nt, Artificial Sequence
  Description of Artificial Sequence: Synthetic oligonucleotide
uccagaucguucuuugugg

SEQ ID NO: 175557 - RNA, 19 nt, Artificial Sequence
  Description of Artificial Sequence: Synthetic oligonucleotide
auacgugccacauuccuuc

SEQ ID NO: 175558 - RNA, 19 nt, Artificial Sequence
  Description of Artificial Sequence: Synthetic oligonucleotide
gacauucuuagucagccug

SEQ ID NO: 175559 - RNA, 19 nt, Artificial Sequence
  Description of Artificial Sequence: Synthetic oligonucleotide
uuaaguuggaaaucugggu

SEQ ID NO: 175560 - RNA, 19 nt, Artificial Sequence
  Description of Artificial Sequence: Synthetic oligonucleotide
ugacuuaugucgucaaacc

SEQ ID NO: 175561 - RNA, 19 nt, Artificial Sequence
  Description of Artificial Sequence: Synthetic oligonucleotide
aaguuggaaaucugggucu

SEQ ID NO: 175562 - RNA, 19 nt, Artificial Sequence
  Description of Artificial Sequence: Synthetic oligonucleotide
uguccgauagauagcaaug

SEQ ID NO: 175563 - RNA, 19 nt, Artificial Sequence
  Description of Artificial Sequence: Synthetic oligonucleotide
cucguuggcuuuuaaaggc

SEQ ID NO: 175564 - RNA, 19 nt, Artificial Sequence
  Description of Artificial Sequence: Synthetic oligonucleotide
uccaccauagcauucuuac

SEQ ID NO: 175565 - RNA, 19 nt, Artificial Sequence
  Description of Artificial Sequence: Synthetic oligonucleotide
ucguacuuccuauucaggc

SEQ ID NO: 175566 - RNA, 19 nt, Artificial Sequence
  Description of Artificial Sequence: Synthetic oligonucleotide
uuauuaaguucagacagcu

SEQ ID NO: 175567 - RNA, 19 nt, Artificial Sequence
  Description of Artificial Sequence: Synthetic oligonucleotide
uuucaugauuccaaccucu

SEQ ID NO: 175568 - RNA, 19 nt, Artificial Sequence
  Description of Artificial Sequence: Synthetic oligonucleotide
caugauuccaaccucuuuc

SEQ ID NO: 175569 - RNA, 19 nt, Artificial Sequence
  Description of Artificial Sequence: Synthetic oligonucleotide
uuccuauucaggcuggcca

SEQ ID NO: 175570 - RNA, 19 nt, Artificial Sequence
  Description of Artificial Sequence: Synthetic oligonucleotide
guucagauucuuccaagcg

SEQ ID NO: 175571 - RNA, 19 nt, Artificial Sequence
  Description of Artificial Sequence: Synthetic oligonucleotide
uguaaucucuuauuuuccu

SEQ ID NO: 175572 - RNA, 19 nt, Artificial Sequence
  Description of Artificial Sequence: Synthetic oligonucleotide
ugaucuguaguaaggccgc

SEQ ID NO: 175573 - RNA, 19 nt, Artificial Sequence
  Description of Artificial Sequence: Synthetic oligonucleotide
cagaugaucugccaggggc

SEQ ID NO: 175574 - RNA, 19 nt, Artificial Sequence
  Description of Artificial Sequence: Synthetic oligonucleotide
aucgauaaccucucugguc

SEQ ID NO: 175575 - RNA, 19 nt, Artificial Sequence
  Description of Artificial Sequence: Synthetic oligonucleotide
ugauacuaucagaguaagg

SEQ ID NO: 175576 - RNA, 19 nt, Artificial Sequence
  Description of Artificial Sequence: Synthetic oligonucleotide
uuuaucugcagaugaucug

SEQ ID NO: 175577 - RNA, 19 nt, Artificial Sequence
  Description of Artificial Sequence: Synthetic oligonucleotide
ucugauaacugcucccuca

SEQ ID NO: 175578 - RNA, 19 nt, Artificial Sequence
  Description of Artificial Sequence: Synthetic oligonucleotide
agcguuagcauccugcgcu

SEQ ID NO: 175579 - RNA, 19 nt, Artificial Sequence
  Description of Artificial Sequence: Synthetic oligonucleotide
gaccucauuggauaaugag

SEQ ID NO: 175580 - RNA, 19 nt, Artificial Sequence
  Description of Artificial Sequence: Synthetic oligonucleotide
ucucuauuucauacgugcc

SEQ ID NO: 175581 - RNA, 19 nt, Artificial Sequence
  Description of Artificial Sequence: Synthetic oligonucleotide
gauugugucauugagagau

SEQ ID NO: 175582 - RNA, 19 nt, Artificial Sequence
  Description of Artificial Sequence: Synthetic oligonucleotide
cuugaugcauuccuggaug

SEQ ID NO: 175583 - RNA, 19 nt, Artificial Sequence
  Description of Artificial Sequence: Synthetic oligonucleotide
uuucccuucggacucguac

SEQ ID NO: 175584 - RNA, 19 nt, Artificial Sequence
  Description of Artificial Sequence: Synthetic oligonucleotide
ucucucgcacuccagagcu

SEQ ID NO: 175585 - RNA, 19 nt, Artificial Sequence
  Description of Artificial Sequence: Synthetic oligonucleotide
caugauuguugucagggac

SEQ ID NO: 175586 - RNA, 19 nt, Artificial Sequence
  Description of Artificial Sequence: Synthetic oligonucleotide
uugaugcauuccuggaugg

SEQ ID NO: 175587 - RNA, 19 nt, Artificial Sequence
  Description of Artificial Sequence: Synthetic oligonucleotide
ggagcaauuccuuugaguc

SEQ ID NO: 175588 - RNA, 19 nt, Artificial Sequence
  Description of Artificial Sequence: Synthetic oligonucleotide
ucagcgugcagugugagga

SEQ ID NO: 175589 - RNA, 19 nt, Artificial Sequence
  Description of Artificial Sequence: Synthetic oligonucleotide
uucauuugauucugaacgu

SEQ ID NO: 175590 - RNA, 19 nt, Artificial Sequence
  Description of Artificial Sequence: Synthetic oligonucleotide
acagucaaccuucauuuga

SEQ ID NO: 175591 - RNA, 19 nt, Artificial Sequence
  Description of Artificial Sequence: Synthetic oligonucleotide
aguaaggccgcuuguacgu

SEQ ID NO: 175592 - RNA, 19 nt, Artificial Sequence
  Description of Artificial Sequence: Synthetic oligonucleotide
ucagcaauauuggauuuca

SEQ ID NO: 175593 - RNA, 19 nt, Artificial Sequence
  Description of Artificial Sequence: Synthetic oligonucleotide
guugucagggacuugucac

SEQ ID NO: 175594 - RNA, 19 nt, Artificial Sequence
  Description of Artificial Sequence: Synthetic oligonucleotide
cauaucgauaaccucucug

SEQ ID NO: 175595 - RNA, 19 nt, Artificial Sequence
  Description of Artificial Sequence: Synthetic oligonucleotide
uuuagagacuuccuugguu

SEQ ID NO: 175596 - RNA, 19 nt, Artificial Sequence
  Description of Artificial Sequence: Synthetic oligonucleotide
cacacuuggucguacuucc

SEQ ID NO: 175597 - RNA, 19 nt, Artificial Sequence
  Description of Artificial Sequence: Synthetic oligonucleotide
ucguacauccucuucugca

SEQ ID NO: 175598 - RNA, 19 nt, Artificial Sequence
  Description of Artificial Sequence: Synthetic oligonucleotide
agcaagauccugccucagc

SEQ ID NO: 175599 - RNA, 19 nt, Artificial Sequence
  Description of Artificial Sequence: Synthetic oligonucleotide
uuaucccucaguucuuccc

SEQ ID NO: 175600 - RNA, 19 nt, Artificial Sequence
  Description of Artificial Sequence: Synthetic oligonucleotide
agcagcguuagcauccugc

SEQ ID NO: 175601 - RNA, 19 nt, Artificial Sequence
  Description of Artificial Sequence: Synthetic oligonucleotide
uccgaguccuccuugacuc

SEQ ID NO: 175602 - RNA, 19 nt, Artificial Sequence
  Description of Artificial Sequence: Synthetic oligonucleotide
uucugaacguucuccaggu

SEQ ID NO: 175603 - RNA, 19 nt, Artificial Sequence
  Description of Artificial Sequence: Synthetic oligonucleotide
cugggccuuaaucucagcg

SEQ ID NO: 175604 - RNA, 19 nt, Artificial Sequence
  Description of Artificial Sequence: Synthetic oligonucleotide
cuugaucugcucauccgag

SEQ ID NO: 175605 - RNA, 19 nt, Artificial Sequence
  Description of Artificial Sequence: Synthetic oligonucleotide
uccgauagauagcaaugac

SEQ ID NO: 175606 - RNA, 19 nt, Artificial Sequence
  Description of Artificial Sequence: Synthetic oligonucleotide
cugcuugguauucuggacc

SEQ ID NO: 175607 - RNA, 19 nt, Artificial Sequence
  Description of Artificial Sequence: Synthetic oligonucleotide
ggacuugucacaucgcucc

SEQ ID NO: 175608 - RNA, 19 nt, Artificial Sequence
  Description of Artificial Sequence: Synthetic oligonucleotide
ugucauugagagauguuuu

SEQ ID NO: 175609 - RNA, 19 nt, Artificial Sequence
  Description of Artificial Sequence: Synthetic oligonucleotide
cugacuuaugucgucaaac

SEQ ID NO: 175610 - RNA, 19 nt, Artificial Sequence
  Description of Artificial Sequence: Synthetic oligonucleotide
ucuugcuuugccgagucac

SEQ ID NO: 175611 - RNA, 19 nt, Artificial Sequence
  Description of Artificial Sequence: Synthetic oligonucleotide
uugaccucauuggauaaug

SEQ ID NO: 175612 - RNA, 19 nt, Artificial Sequence
  Description of Artificial Sequence: Synthetic oligonucleotide
agcaauuccuuugaguccu

SEQ ID NO: 175613 - RNA, 19 nt, Artificial Sequence
  Description of Artificial Sequence: Synthetic oligonucleotide
uucuccguguacuucugug

SEQ ID NO: 175614 - RNA, 19 nt, Artificial Sequence
  Description of Artificial Sequence: Synthetic oligonucleotide
uggagcaauuccuuugagu

SEQ ID NO: 175615 - RNA, 19 nt, Artificial Sequence
  Description of Artificial Sequence: Synthetic oligonucleotide
cugaacguucuccagguuc

SEQ ID NO: 175616 - RNA, 19 nt, Artificial Sequence
  Description of Artificial Sequence: Synthetic oligonucleotide
aguucgcauggcuucuaac

SEQ ID NO: 175617 - RNA, 19 nt, Artificial Sequence
  Description of Artificial Sequence: Synthetic oligonucleotide
aggcgggugacauucuuag

SEQ ID NO: 175618 - RNA, 19 nt, Artificial Sequence
  Description of Artificial Sequence: Synthetic oligonucleotide
augauacuaucagaguaag

SEQ ID NO: 175619 - RNA, 19 nt, Artificial Sequence
  Description of Artificial Sequence: Synthetic oligonucleotide
ugcuugguauucuggaccu

SEQ ID NO: 175620 - RNA, 19 nt, Artificial Sequence
  Description of Artificial Sequence: Synthetic oligonucleotide
aaaggcuacguagcuacgu

SEQ ID NO: 175621 - RNA, 19 nt, Artificial Sequence
  Description of Artificial Sequence: Synthetic oligonucleotide
uugacucucucgcacucca

SEQ ID NO: 175622 - RNA, 19 nt, Artificial Sequence
  Description of Artificial Sequence: Synthetic oligonucleotide
ucucguucuucacacuggu

SEQ ID NO: 175623 - RNA, 19 nt, Artificial Sequence
  Description of Artificial Sequence: Synthetic oligonucleotide
uuggucguacuuccuauuc

SEQ ID NO: 175624 - RNA, 19 nt, Artificial Sequence
  Description of Artificial Sequence: Synthetic oligonucleotide
uggucguacuuccuauuca

SEQ ID NO: 175625 - RNA, 19 nt, Artificial Sequence
  Description of Artificial Sequence: Synthetic oligonucleotide
ucgguguugcagaguaucc

SEQ ID NO: 175626 - RNA, 19 nt, Artificial Sequence
  Description of Artificial Sequence: Synthetic oligonucleotide
cuuucaugauuccaaccuc

SEQ ID NO: 175627 - RNA, 19 nt, Artificial Sequence
  Description of Artificial Sequence: Synthetic oligonucleotide
ugggccuuaaucucagcgu

SEQ ID NO: 175628 - RNA, 19 nt, Artificial Sequence
  Description of Artificial Sequence: Synthetic oligonucleotide
cuccagaucguucuuugug

SEQ ID NO: 175629 - RNA, 19 nt, Artificial Sequence
  Description of Artificial Sequence: Synthetic oligonucleotide
uucccuucggacucguaca

SEQ ID NO: 175630 - RNA, 19 nt, Artificial Sequence
  Description of Artificial Sequence: Synthetic oligonucleotide
acucucucgcacuccagag

SEQ ID NO: 175631 - RNA, 19 nt, Artificial Sequence
  Description of Artificial Sequence: Synthetic oligonucleotide
cagagcuaaggcuuugcac

SEQ ID NO: 175632 - RNA, 19 nt, Artificial Sequence
  Description of Artificial Sequence: Synthetic oligonucleotide
accauagcauucuuacccu

SEQ ID NO: 175633 - RNA, 19 nt, Artificial Sequence
  Description of Artificial Sequence: Synthetic oligonucleotide
acacacuuggucguacuuc

SEQ ID NO: 175634 - RNA, 19 nt, Artificial Sequence
  Description of Artificial Sequence: Synthetic oligonucleotide
uucauacgugccacauucc

SEQ ID NO: 175635 - RNA, 19 nt, Artificial Sequence
  Description of Artificial Sequence: Synthetic oligonucleotide
ucuccguguacuucugugu

SEQ ID NO: 175636 - RNA, 19 nt, Artificial Sequence
  Description of Artificial Sequence: Synthetic oligonucleotide
ugcuuucaaauuucucgcu

SEQ ID NO: 175637 - RNA, 19 nt, Artificial Sequence
  Description of Artificial Sequence: Synthetic oligonucleotide
ugaccucauuggauaauga

SEQ ID NO: 175638 - RNA, 19 nt, Artificial Sequence
  Description of Artificial Sequence: Synthetic oligonucleotide
ucguuggcuuuuaaaggcu

SEQ ID NO: 175639 - RNA, 19 nt, Artificial Sequence
  Description of Artificial Sequence: Synthetic oligonucleotide
auuugauucugaacguucu

SEQ ID NO: 175640 - RNA, 19 nt, Artificial Sequence
  Description of Artificial Sequence: Synthetic oligonucleotide
ccgagucacagaaaguucg

SEQ ID NO: 175641 - RNA, 19 nt, Artificial Sequence
  Description of Artificial Sequence: Synthetic oligonucleotide
ucgcacuccagagcuaagg

SEQ ID NO: 175642 - RNA, 19 nt, Artificial Sequence
  Description of Artificial Sequence: Synthetic oligonucleotide
acucguacauccucuucug

SEQ ID NO: 175643 - RNA, 19 nt, Artificial Sequence
  Description of Artificial Sequence: Synthetic oligonucleotide
uuuaaaggcuacguagcua

SEQ ID NO: 175644 - RNA, 19 nt, Artificial Sequence
  Description of Artificial Sequence: Synthetic oligonucleotide
ucggacucguacauccucu

SEQ ID NO: 175645 - RNA, 19 nt, Artificial Sequence
  Description of Artificial Sequence: Synthetic oligonucleotide
cuucucuauuucauacgug

SEQ ID NO: 175646 - RNA, 19 nt, Artificial Sequence
  Description of Artificial Sequence: Synthetic oligonucleotide
aaggcuacguagcuacguu

SEQ ID NO: 175647 - RNA, 19 nt, Artificial Sequence
  Description of Artificial Sequence: Synthetic oligonucleotide
ucgcauggcuucuaacucu

SEQ ID NO: 175648 - RNA, 19 nt, Artificial Sequence
  Description of Artificial Sequence: Synthetic oligonucleotide
acuuagcacucuuucugcu

SEQ ID NO: 175649 - RNA, 19 nt, Artificial Sequence
  Description of Artificial Sequence: Synthetic oligonucleotide
gacauaucgauaaccucuc

SEQ ID NO: 175650 - RNA, 19 nt, Artificial Sequence
  Description of Artificial Sequence: Synthetic oligonucleotide
ugcgucugcucugauaacu

SEQ ID NO: 175651 - RNA, 19 nt, Artificial Sequence
  Description of Artificial Sequence: Synthetic oligonucleotide
acuuaugucgucaaaccuu

SEQ ID NO: 175652 - RNA, 19 nt, Artificial Sequence
  Description of Artificial Sequence: Synthetic oligonucleotide
uacguagcuacguuuccau

SEQ ID NO: 175653 - RNA, 19 nt, Artificial Sequence
  Description of Artificial Sequence: Synthetic oligonucleotide
uggagcgccugcuuuaguc

SEQ ID NO: 175654 - RNA, 19 nt, Artificial Sequence
  Description of Artificial Sequence: Synthetic oligonucleotide
ugugacccugugcagcacu

SEQ ID NO: 175655 - RNA, 19 nt, Artificial Sequence
  Description of Artificial Sequence: Synthetic oligonucleotide
gaccucggaggcuugcuug

SEQ ID NO: 175656 - RNA, 19 nt, Artificial Sequence
  Description of Artificial Sequence: Synthetic oligonucleotide
ugcucgauugugucauuga

SEQ ID NO: 175657 - RNA, 19 nt, Artificial Sequence
  Description of Artificial Sequence: Synthetic oligonucleotide
aguuggaaaucugggucuc

SEQ ID NO: 175658 - RNA, 19 nt, Artificial Sequence
  Description of Artificial Sequence: Synthetic oligonucleotide
cugacgcgacacuugugcg

SEQ ID NO: 175659 - RNA, 19 nt, Artificial Sequence
  Description of Artificial Sequence: Synthetic oligonucleotide
uggcuuuuaaaggcuacgu

SEQ ID NO: 175660 - RNA, 19 nt, Artificial Sequence
  Description of Artificial Sequence: Synthetic oligonucleotide
acuagccugccuucaucuc

SEQ ID NO: 175661 - RNA, 19 nt, Artificial Sequence
  Description of Artificial Sequence: Synthetic oligonucleotide
uguaguaaggccgcuugua

SEQ ID NO: 175662 - RNA, 19 nt, Artificial Sequence
  Description of Artificial Sequence: Synthetic oligonucleotide
ccuucggacucguacaucc

SEQ ID NO: 175663 - RNA, 19 nt, Artificial Sequence
  Description of Artificial Sequence: Synthetic oligonucleotide
gacccauuagcuccuuuuc

SEQ ID NO: 175664 - RNA, 19 nt, Artificial Sequence
  Description of Artificial Sequence: Synthetic oligonucleotide
accucggaggcuugcuugg

SEQ ID NO: 175665 - RNA, 19 nt, Artificial Sequence
  Description of Artificial Sequence: Synthetic oligonucleotide
ucaugauuccaaccucuuu

SEQ ID NO: 175666 - RNA, 19 nt, Artificial Sequence
  Description of Artificial Sequence: Synthetic oligonucleotide
cucgauugugucauugaga

SEQ ID NO: 175667 - RNA, 19 nt, Artificial Sequence
  Description of Artificial Sequence: Synthetic oligonucleotide
acuuggucguacuuccuau

SEQ ID NO: 175668 - RNA, 19 nt, Artificial Sequence
  Description of Artificial Sequence: Synthetic oligonucleotide
cucaguccuuucucugugg

SEQ ID NO: 175669 - RNA, 19 nt, Artificial Sequence
  Description of Artificial Sequence: Synthetic oligonucleotide
uagcaaugacuuccuggug

SEQ ID NO: 175670 - RNA, 19 nt, Artificial Sequence
  Description of Artificial Sequence: Synthetic oligonucleotide
gacuuaugucgucaaaccu

SEQ ID NO: 175671 - RNA, 19 nt, Artificial Sequence
  Description of Artificial Sequence: Synthetic oligonucleotide
gguguugcagaguauccac

SEQ ID NO: 175672 - RNA, 19 nt, Artificial Sequence
  Description of Artificial Sequence: Synthetic oligonucleotide
acguagcuacguuuccauc

SEQ ID NO: 175673 - RNA, 19 nt, Artificial Sequence
  Description of Artificial Sequence: Synthetic oligonucleotide
ugacgcgacacuugugcgu

SEQ ID NO: 175674 - RNA, 19 nt, Artificial Sequence
  Description of Artificial Sequence: Synthetic oligonucleotide
uugugagccaguucauuuu

SEQ ID NO: 175675 - RNA, 19 nt, Artificial Sequence
  Description of Artificial Sequence: Synthetic oligonucleotide
gcagcguuagcauccugcg

SEQ ID NO: 175676 - RNA, 19 nt, Artificial Sequence
  Description of Artificial Sequence: Synthetic oligonucleotide
guagcuacguuuccaucuc

SEQ ID NO: 175677 - RNA, 19 nt, Artificial Sequence
  Description of Artificial Sequence: Synthetic oligonucleotide
ucggucuugcuuugccgag

SEQ ID NO: 175678 - RNA, 19 nt, Artificial Sequence
  Description of Artificial Sequence: Synthetic oligonucleotide
ccugacgcgacacuugugc

SEQ ID NO: 175679 - RNA, 19 nt, Artificial Sequence
  Description of Artificial Sequence: Synthetic oligonucleotide
ucccugacgcgacacuugu

SEQ ID NO: 175680 - RNA, 19 nt, Artificial Sequence
  Description of Artificial Sequence: Synthetic oligonucleotide
guucaguuaucuuguuauc

SEQ ID NO: 175681 - RNA, 19 nt, Artificial Sequence
  Description of Artificial Sequence: Synthetic oligonucleotide
auccgaguccuccuugacu

SEQ ID NO: 175682 - RNA, 19 nt, Artificial Sequence
  Description of Artificial Sequence: Synthetic oligonucleotide
ugucuggaguuuagagacu

SEQ ID NO: 175683 - RNA, 19 nt, Artificial Sequence
  Description of Artificial Sequence: Synthetic oligonucleotide
uuucucucaggcuggcuuu

SEQ ID NO: 175684 - RNA, 19 nt, Artificial Sequence
  Description of Artificial Sequence: Synthetic oligonucleotide
cucucucgcacuccagagc

SEQ ID NO: 175685 - RNA, 19 nt, Artificial Sequence
  Description of Artificial Sequence: Synthetic oligonucleotide
cugcaaggaccucggaggc

SEQ ID NO: 175686 - RNA, 19 nt, Artificial Sequence
  Description of Artificial Sequence: Synthetic oligonucleotide
cucgguguugcagaguauc

SEQ ID NO: 175687 - RNA, 19 nt, Artificial Sequence
  Description of Artificial Sequence: Synthetic oligonucleotide
ucaauaccccauucucguc

SEQ ID NO: 175688 - RNA, 19 nt, Artificial Sequence
  Description of Artificial Sequence: Synthetic oligonucleotide
ucuuccaagcgggccagug

SEQ ID NO: 175689 - RNA, 19 nt, Artificial Sequence
  Description of Artificial Sequence: Synthetic oligonucleotide
cucguacauccucuucugc

SEQ ID NO: 175690 - RNA, 19 nt, Artificial Sequence
  Description of Artificial Sequence: Synthetic oligonucleotide
agaucguucuuuguggcuu

SEQ ID NO: 175691 - RNA, 19 nt, Artificial Sequence
  Description of Artificial Sequence: Synthetic oligonucleotide
aucccggacucgguguugc

SEQ ID NO: 175692 - RNA, 19 nt, Artificial Sequence
  Description of Artificial Sequence: Synthetic oligonucleotide
guguguccgauagauagca

SEQ ID NO: 175693 - RNA, 19 nt, Artificial Sequence
  Description of Artificial Sequence: Synthetic oligonucleotide
cuuaaucucagcgugcagu

SEQ ID NO: 175694 - RNA, 19 nt, Artificial Sequence
  Description of Artificial Sequence: Synthetic oligonucleotide
cagguuccuccucaauacc

SEQ ID NO: 175695 - RNA, 19 nt, Artificial Sequence
  Description of Artificial Sequence: Synthetic oligonucleotide
cuuccuauucaggcuggcc

SEQ ID NO: 175696 - RNA, 19 nt, Artificial Sequence
  Description of Artificial Sequence: Synthetic oligonucleotide
gacgcgguggcucccugug

SEQ ID NO: 175697 - RNA, 19 nt, Artificial Sequence
  Description of Artificial Sequence: Synthetic oligonucleotide
ucucgcacuccagagcuaa

SEQ ID NO: 175698 - RNA, 19 nt, Artificial Sequence
  Description of Artificial Sequence: Synthetic oligonucleotide
cagcaauauuggauuucag

SEQ ID NO: 175699 - RNA, 19 nt, Artificial Sequence
  Description of Artificial Sequence: Synthetic oligonucleotide
ucuucccuuaagugcucga

SEQ ID NO: 175700 - RNA, 19 nt, Artificial Sequence
  Description of Artificial Sequence: Synthetic oligonucleotide
acuugcguucagauucuuc

SEQ ID NO: 175701 - RNA, 19 nt, Artificial Sequence
  Description of Artificial Sequence: Synthetic oligonucleotide
uccgggucagcugacacua

SEQ ID NO: 175702 - RNA, 19 nt, Artificial Sequence
  Description of Artificial Sequence: Synthetic oligonucleotide
acauaucgauaaccucucu

SEQ ID NO: 175703 - RNA, 19 nt, Artificial Sequence
  Description of Artificial Sequence: Synthetic oligonucleotide
cugguguaggugagcuggg

SEQ ID NO: 175704 - RNA, 19 nt, Artificial Sequence
  Description of Artificial Sequence: Synthetic oligonucleotide
cagucggucuugcuuugcc

SEQ ID NO: 175705 - RNA, 19 nt, Artificial Sequence
  Description of Artificial Sequence: Synthetic oligonucleotide
gucgcaucuguaugaucug

SEQ ID NO: 175706 - RNA, 19 nt, Artificial Sequence
  Description of Artificial Sequence: Synthetic oligonucleotide
cuggccucggcgguagucg

SEQ ID NO: 175707 - RNA, 19 nt, Artificial Sequence
  Description of Artificial Sequence: Synthetic oligonucleotide
ucggugacgcgguggcucc

SEQ ID NO: 175708 - RNA, 19 nt, Artificial Sequence
  Description of Artificial Sequence: Synthetic oligonucleotide
ggaaaggccguggagcgcc

SEQ ID NO: 175709 - RNA, 19 nt, Artificial Sequence
  Description of Artificial Sequence: Synthetic oligonucleotide
uuguugucagggacuuguc

SEQ ID NO: 175710 - RNA, 19 nt, Artificial Sequence
  Description of Artificial Sequence: Synthetic oligonucleotide
cuugacucucucgcacucc

SEQ ID NO: 175711 - RNA, 19 nt, Artificial Sequence
  Description of Artificial Sequence: Synthetic oligonucleotide
gacgcgacacuugugcguc

SEQ ID NO: 175712 - RNA, 19 nt, Artificial Sequence
  Description of Artificial Sequence: Synthetic oligonucleotide
acuaucagaguaaggccaa

SEQ ID NO: 175713 - RNA, 19 nt, Artificial Sequence
  Description of Artificial Sequence: Synthetic oligonucleotide
caguuccucggugacgcgg

SEQ ID NO: 175714 - RNA, 19 nt, Artificial Sequence
  Description of Artificial Sequence: Synthetic oligonucleotide
augggaugggcuguuucug

SEQ ID NO: 175715 - RNA, 19 nt, Artificial Sequence
  Description of Artificial Sequence: Synthetic oligonucleotide
uguguccgauagauagcaa

SEQ ID NO: 175716 - RNA, 19 nt, Artificial Sequence
  Description of Artificial Sequence: Synthetic oligonucleotide
ucccuucggacucguacau

SEQ ID NO: 175717 - RNA, 19 nt, Artificial Sequence
  Description of Artificial Sequence: Synthetic oligonucleotide
cauccugcgcuuccuucag

SEQ ID NO: 175718 - RNA, 19 nt, Artificial Sequence
  Description of Artificial Sequence: Synthetic oligonucleotide
ucgcaucuguaugaucugu

SEQ ID NO: 175719 - RNA, 19 nt, Artificial Sequence
  Description of Artificial Sequence: Synthetic oligonucleotide
uccacuagccugccuucau

SEQ ID NO: 175720 - RNA, 19 nt, Artificial Sequence
  Description of Artificial Sequence: Synthetic oligonucleotide
cuuaugucgucaaaccuuu

SEQ ID NO: 175721 - RNA, 19 nt, Artificial Sequence
  Description of Artificial Sequence: Synthetic oligonucleotide
ugaugcauuccuggauggu

SEQ ID NO: 175722 - RNA, 19 nt, Artificial Sequence
  Description of Artificial Sequence: Synthetic oligonucleotide
agcgugcagugugaggauc

SEQ ID NO: 175723 - RNA, 19 nt, Artificial Sequence
  Description of Artificial Sequence: Synthetic oligonucleotide
acuagcacacaaggccuug

SEQ ID NO: 175724 - RNA, 19 nt, Artificial Sequence
  Description of Artificial Sequence: Synthetic oligonucleotide
uccguguacuucuguguua

SEQ ID NO: 175725 - RNA, 19 nt, Artificial Sequence
  Description of Artificial Sequence: Synthetic oligonucleotide
agucaaccuucauuugauu

SEQ ID NO: 175726 - RNA, 19 nt, Artificial Sequence
  Description of Artificial Sequence: Synthetic oligonucleotide
ccagaucguucuuuguggc

SEQ ID NO: 175727 - RNA, 19 nt, Artificial Sequence
  Description of Artificial Sequence: Synthetic oligonucleotide
ugcagaucccggacucggu

SEQ ID NO: 175728 - RNA, 19 nt, Artificial Sequence
  Description of Artificial Sequence: Synthetic oligonucleotide
caauaccccauucucgucu

SEQ ID NO: 175729 - RNA, 19 nt, Artificial Sequence
  Description of Artificial Sequence: Synthetic oligonucleotide
gcuuguacgucuucaucca

SEQ ID NO: 175730 - RNA, 19 nt, Artificial Sequence
  Description of Artificial Sequence: Synthetic oligonucleotide
cuaccuugugagccaguuc

SEQ ID NO: 175731 - RNA, 19 nt, Artificial Sequence
  Description of Artificial Sequence: Synthetic oligonucleotide
ugagagcgucuuccagcug

SEQ ID NO: 175732 - RNA, 19 nt, Artificial Sequence
  Description of Artificial Sequence: Synthetic oligonucleotide
cauuccugacuuaugucgu

SEQ ID NO: 175733 - RNA, 19 nt, Artificial Sequence
  Description of Artificial Sequence: Synthetic oligonucleotide
auugugucauugagagaug

SEQ ID NO: 175734 - RNA, 19 nt, Artificial Sequence
  Description of Artificial Sequence: Synthetic oligonucleotide
cagcguuagcauccugcgc

SEQ ID NO: 175735 - RNA, 19 nt, Artificial Sequence
  Description of Artificial Sequence: Synthetic oligonucleotide
ggugacauucuuagucagc

SEQ ID NO: 175736 - RNA, 19 nt, Artificial Sequence
  Description of Artificial Sequence: Synthetic oligonucleotide
gcuuugccgagucacagaa

SEQ ID NO: 175737 - RNA, 19 nt, Artificial Sequence
  Description of Artificial Sequence: Synthetic oligonucleotide
uucgcuggucaggugcucu

SEQ ID NO: 175738 - RNA, 19 nt, Artificial Sequence
  Description of Artificial Sequence: Synthetic oligonucleotide
cacaaggccuugucgcauc

SEQ ID NO: 175739 - RNA, 19 nt, Artificial Sequence
  Description of Artificial Sequence: Synthetic oligonucleotide
guguccgauagauagcaau

SEQ ID NO: 175740 - RNA, 19 nt, Artificial Sequence
  Description of Artificial Sequence: Synthetic oligonucleotide
guugcacccagaaugcaua

SEQ ID NO: 175741 - RNA, 19 nt, Artificial Sequence
  Description of Artificial Sequence: Synthetic oligonucleotide
aggcuacguagcuacguuu

SEQ ID NO: 175742 - RNA, 19 nt, Artificial Sequence
  Description of Artificial Sequence: Synthetic oligonucleotide
gcuacguagcuacguuucc

SEQ ID NO: 175743 - RNA, 19 nt, Artificial Sequence
  Description of Artificial Sequence: Synthetic oligonucleotide
uacgugccacauuccuucu

SEQ ID NO: 175744 - RNA, 19 nt, Artificial Sequence
  Description of Artificial Sequence: Synthetic oligonucleotide
uugucgcaucuguaugauc

SEQ ID NO: 175745 - RNA, 19 nt, Artificial Sequence
  Description of Artificial Sequence: Synthetic oligonucleotide
acuugugcgucugcucuga

SEQ ID NO: 175746 - RNA, 19 nt, Artificial Sequence
  Description of Artificial Sequence: Synthetic oligonucleotide
ucugaacguucuccagguu

SEQ ID NO: 175747 - RNA, 19 nt, Artificial Sequence
  Description of Artificial Sequence: Synthetic oligonucleotide
uggcaucaagcaaggcuuu

SEQ ID NO: 175748 - RNA, 19 nt, Artificial Sequence
  Description of Artificial Sequence: Synthetic oligonucleotide
ucagucggucuugcuuugc

SEQ ID NO: 175749 - RNA, 19 nt, Artificial Sequence
  Description of Artificial Sequence: Synthetic oligonucleotide
cauacuggcuacucagagu

SEQ ID NO: 175750 - RNA, 19 nt, Artificial Sequence
  Description of Artificial Sequence: Synthetic oligonucleotide
uuaugucgucaaaccuuuu

SEQ ID NO: 175751 - RNA, 19 nt, Artificial Sequence
  Description of Artificial Sequence: Synthetic oligonucleotide
aaaguucgcauggcuucua

SEQ ID NO: 175752 - RNA, 19 nt, Artificial Sequence
  Description of Artificial Sequence: Synthetic oligonucleotide
ucuuacccuucaacucuuu

SEQ ID NO: 175753 - RNA, 19 nt, Artificial Sequence
  Description of Artificial Sequence: Synthetic oligonucleotide
cguacauccucuucugcac

SEQ ID NO: 175754 - RNA, 19 nt, Artificial Sequence
  Description of Artificial Sequence: Synthetic oligonucleotide
gcagaucccggacucggug

SEQ ID NO: 175755 - RNA, 19 nt, Artificial Sequence
  Description of Artificial Sequence: Synthetic oligonucleotide
gaaaguucgcauggcuucu

SEQ ID NO: 175756 - RNA, 19 nt, Artificial Sequence
  Description of Artificial Sequence: Synthetic oligonucleotide
cuacguagcuacguuucca

SEQ ID NO: 175757 - RNA, 19 nt, Artificial Sequence
  Description of Artificial Sequence: Synthetic oligonucleotide
aguuccucggugacgcggu

SEQ ID NO: 175758 - RNA, 19 nt, Artificial Sequence
  Description of Artificial Sequence: Synthetic oligonucleotide
cuugguauucuggaccucu

SEQ ID NO: 175759 - RNA, 19 nt, Artificial Sequence
  Description of Artificial Sequence: Synthetic oligonucleotide
cacaacccuucuuccuuuc

SEQ ID NO: 175760 - RNA, 19 nt, Artificial Sequence
  Description of Artificial Sequence: Synthetic oligonucleotide
cucggcgguagucggccag

SEQ ID NO: 175761 - RNA, 19 nt, Artificial Sequence
  Description of Artificial Sequence: Synthetic oligonucleotide
ucucccgccugguggggcu

SEQ ID NO: 175762 - RNA, 19 nt, Artificial Sequence
  Description of Artificial Sequence: Synthetic oligonucleotide
ucguucuuuguggcuuugu

SEQ ID NO: 175763 - RNA, 19 nt, Artificial Sequence
  Description of Artificial Sequence: Synthetic oligonucleotide
cccagaaugcauagcacca

SEQ ID NO: 175764 - RNA, 19 nt, Artificial Sequence
  Description of Artificial Sequence: Synthetic oligonucleotide
ugcaaggaccucggaggcu

SEQ ID NO: 175765 - RNA, 19 nt, Artificial Sequence
  Description of Artificial Sequence: Synthetic oligonucleotide
ggcuacguagcuacguuuc

SEQ ID NO: 175766 - RNA, 19 nt, Artificial Sequence
  Description of Artificial Sequence: Synthetic oligonucleotide
agcuaaggcuuugcacucu

SEQ ID NO: 175767 - RNA, 19 nt, Artificial Sequence
  Description of Artificial Sequence: Synthetic oligonucleotide
ucccucaguucuucccuua

SEQ ID NO: 175768 - RNA, 19 nt, Artificial Sequence
  Description of Artificial Sequence: Synthetic oligonucleotide
cagucaaccuucauuugau

SEQ ID NO: 175769 - RNA, 19 nt, Artificial Sequence
  Description of Artificial Sequence: Synthetic oligonucleotide
ugcuaccuugugagccagu

SEQ ID NO: 175770 - RNA, 19 nt, Artificial Sequence
  Description of Artificial Sequence: Synthetic oligonucleotide
cgauagauagcaaugacuu

SEQ ID NO: 175771 - RNA, 19 nt, Artificial Sequence
  Description of Artificial Sequence: Synthetic oligonucleotide
aaaggccguggagcgccug

SEQ ID NO: 175772 - RNA, 19 nt, Artificial Sequence
  Description of Artificial Sequence: Synthetic oligonucleotide
auaccccauucucgucucu

SEQ ID NO: 175773 - RNA, 19 nt, Artificial Sequence
  Description of Artificial Sequence: Synthetic oligonucleotide
gcauuccuggauggugucg

SEQ ID NO: 175774 - RNA, 19 nt, Artificial Sequence
  Description of Artificial Sequence: Synthetic oligonucleotide
ccuugucgcaucuguauga

SEQ ID NO: 175775 - RNA, 19 nt, Artificial Sequence
  Description of Artificial Sequence: Synthetic oligonucleotide
acacaaggccuugucgcau

SEQ ID NO: 175776 - RNA, 19 nt, Artificial Sequence
  Description of Artificial Sequence: Synthetic oligonucleotide
aucucagcgugcaguguga

SEQ ID NO: 175777 - RNA, 19 nt, Artificial Sequence
  Description of Artificial Sequence: Synthetic oligonucleotide
ccguguacuucuguguuac

SEQ ID NO: 175778 - RNA, 19 nt, Artificial Sequence
  Description of Artificial Sequence: Synthetic oligonucleotide
ugggcacauacuggcuacu

SEQ ID NO: 175779 - RNA, 19 nt, Artificial Sequence
  Description of Artificial Sequence: Synthetic oligonucleotide
cauuggauaaugagcucuu

SEQ ID NO: 175780 - RNA, 19 nt, Artificial Sequence
  Description of Artificial Sequence: Synthetic oligonucleotide
ccgauagauagcaaugacu

SEQ ID NO: 175781 - RNA, 19 nt, Artificial Sequence
  Description of Artificial Sequence: Synthetic oligonucleotide
uaccccauucucgucucuu

SEQ ID NO: 175782 - RNA, 19 nt, Artificial Sequence
  Description of Artificial Sequence: Synthetic oligonucleotide
cuuugccgccagcucuuuc

SEQ ID NO: 175783 - RNA, 19 nt, Artificial Sequence
  Description of Artificial Sequence: Synthetic oligonucleotide
ggccuuaaucucagcgugc

SEQ ID NO: 175784 - RNA, 19 nt, Artificial Sequence
  Description of Artificial Sequence: Synthetic oligonucleotide
gccuuaaucucagcgugca

SEQ ID NO: 175785 - RNA, 19 nt, Artificial Sequence
  Description of Artificial Sequence: Synthetic oligonucleotide
ggacucguacauccucuuc

SEQ ID NO: 175786 - RNA, 19 nt, Artificial Sequence
  Description of Artificial Sequence: Synthetic oligonucleotide
gcuuguguuuucagacaug

SEQ ID NO: 175787 - RNA, 19 nt, Artificial Sequence
  Description of Artificial Sequence: Synthetic oligonucleotide
cauacgugccacauuccuu

SEQ ID NO: 175788 - RNA, 19 nt, Artificial Sequence
  Description of Artificial Sequence: Synthetic oligonucleotide
gaucguucuuuguggcuuu

SEQ ID NO: 175789 - RNA, 19 nt, Artificial Sequence
  Description of Artificial Sequence: Synthetic oligonucleotide
ccuuaaucucagcgugcag

SEQ ID NO: 175790 - RNA, 19 nt, Artificial Sequence
  Description of Artificial Sequence: Synthetic oligonucleotide
cuuugccgagucacagaaa

SEQ ID NO: 175791 - RNA, 19 nt, Artificial Sequence
  Description of Artificial Sequence: Synthetic oligonucleotide
gcgucugcucugauaacug

SEQ ID NO: 175792 - RNA, 19 nt, Artificial Sequence
  Description of Artificial Sequence: Synthetic oligonucleotide
ucgcuggucaggugcucuu

SEQ ID NO: 175793 - RNA, 19 nt, Artificial Sequence
  Description of Artificial Sequence: Synthetic oligonucleotide
augaucugccaggggcaca

SEQ ID NO: 175794 - RNA, 19 nt, Artificial Sequence
  Description of Artificial Sequence: Synthetic oligonucleotide
caucaagcaaggcuuuguu

SEQ ID NO: 175795 - RNA, 19 nt, Artificial Sequence
  Description of Artificial Sequence: Synthetic oligonucleotide
aaggccgcuuguacgucuu

SEQ ID NO: 175796 - RNA, 19 nt, Artificial Sequence
  Description of Artificial Sequence: Synthetic oligonucleotide
cagaucguucuuuguggcu

SEQ ID NO: 175797 - RNA, 19 nt, Artificial Sequence
  Description of Artificial Sequence: Synthetic oligonucleotide
ccaagcgggccaguggagc

SEQ ID NO: 175798 - RNA, 19 nt, Artificial Sequence
  Description of Artificial Sequence: Synthetic oligonucleotide
gugcgucugcucugauaac

SEQ ID NO: 175799 - RNA, 19 nt, Artificial Sequence
  Description of Artificial Sequence: Synthetic oligonucleotide
cagcaagauccugccucag

SEQ ID NO: 175800 - RNA, 19 nt, Artificial Sequence
  Description of Artificial Sequence: Synthetic oligonucleotide
gcuccgggucagcugacac

SEQ ID NO: 175801 - RNA, 19 nt, Artificial Sequence
  Description of Artificial Sequence: Synthetic oligonucleotide
ccuugacucucucgcacuc

SEQ ID NO: 175802 - RNA, 19 nt, Artificial Sequence
  Description of Artificial Sequence: Synthetic oligonucleotide
ucccggacucgguguugca

SEQ ID NO: 175803 - RNA, 19 nt, Artificial Sequence
  Description of Artificial Sequence: Synthetic oligonucleotide
aguccuuggcagagaacuu

SEQ ID NO: 175804 - RNA, 19 nt, Artificial Sequence
  Description of Artificial Sequence: Synthetic oligonucleotide
ggagcgccugcuuuagucu

SEQ ID NO: 175805 - RNA, 19 nt, Artificial Sequence
  Description of Artificial Sequence: Synthetic oligonucleotide
caggcgggugacauucuua

SEQ ID NO: 175806 - RNA, 19 nt, Artificial Sequence
  Description of Artificial Sequence: Synthetic oligonucleotide
cugcuucgcuggucaggug

SEQ ID NO: 175807 - RNA, 19 nt, Artificial Sequence
  Description of Artificial Sequence: Synthetic oligonucleotide
cuguaguaaggccgcuugu

SEQ ID NO: 175808 - RNA, 19 nt, Artificial Sequence
  Description of Artificial Sequence: Synthetic oligonucleotide
cuccguguacuucuguguu

SEQ ID NO: 175809 - RNA, 19 nt, Artificial Sequence
  Description of Artificial Sequence: Synthetic oligonucleotide
cuaucagaguaaggccaaa

SEQ ID NO: 175810 - RNA, 19 nt, Artificial Sequence
  Description of Artificial Sequence: Synthetic oligonucleotide
gaccucugucuggaguuua

SEQ ID NO: 175811 - RNA, 19 nt, Artificial Sequence
  Description of Artificial Sequence: Synthetic oligonucleotide
gugacgcgguggcucccug

SEQ ID NO: 175812 - RNA, 19 nt, Artificial Sequence
  Description of Artificial Sequence: Synthetic oligonucleotide
gagcgccugcuuuagucuu

SEQ ID NO: 175813 - RNA, 19 nt, Artificial Sequence
  Description of Artificial Sequence: Synthetic oligonucleotide
cuuggucguacuuccuauu

SEQ ID NO: 175814 - RNA, 19 nt, Artificial Sequence
  Description of Artificial Sequence: Synthetic oligonucleotide
acgcgacacuugugcgucu

SEQ ID NO: 175815 - RNA, 19 nt, Artificial Sequence
  Description of Artificial Sequence: Synthetic oligonucleotide
cuugucgcaucuguaugau

SEQ ID NO: 175816 - RNA, 19 nt, Artificial Sequence
  Description of Artificial Sequence: Synthetic oligonucleotide
cuucggacucguacauccu

SEQ ID NO: 175817 - RNA, 19 nt, Artificial Sequence
  Description of Artificial Sequence: Synthetic oligonucleotide
ccgcuuguacgucuucauc

SEQ ID NO: 175818 - RNA, 19 nt, Artificial Sequence
  Description of Artificial Sequence: Synthetic oligonucleotide
auuucucgcuggggaugga

SEQ ID NO: 175819 - RNA, 19 nt, Artificial Sequence
  Description of Artificial Sequence: Synthetic oligonucleotide
cuucgcuggucaggugcuc

SEQ ID NO: 175820 - RNA, 19 nt, Artificial Sequence
  Description of Artificial Sequence: Synthetic oligonucleotide
ccauucucgucucuuauuu

SEQ ID NO: 175821 - RNA, 19 nt, Artificial Sequence
  Description of Artificial Sequence: Synthetic oligonucleotide
cuccgggucagcugacacu

SEQ ID NO: 175822 - RNA, 19 nt, Artificial Sequence
  Description of Artificial Sequence: Synthetic oligonucleotide
gcugcuucgcuggucaggu

SEQ ID NO: 175823 - RNA, 19 nt, Artificial Sequence
  Description of Artificial Sequence: Synthetic oligonucleotide
ucccgccugguggggcugc

SEQ ID NO: 175824 - RNA, 19 nt, Artificial Sequence
  Description of Artificial Sequence: Synthetic oligonucleotide
cacacacuuggucguacuu

SEQ ID NO: 175825 - RNA, 19 nt, Artificial Sequence
  Description of Artificial Sequence: Synthetic oligonucleotide
cuagcacacaaggccuugu

SEQ ID NO: 175826 - RNA, 19 nt, Artificial Sequence
  Description of Artificial Sequence: Synthetic oligonucleotide
uccuggccucggcgguagu

SEQ ID NO: 175827 - RNA, 19 nt, Artificial Sequence
  Description of Artificial Sequence: Synthetic oligonucleotide
cacuagcacacaaggccuu

SEQ ID NO: 175828 - RNA, 19 nt, Artificial Sequence
  Description of Artificial Sequence: Synthetic oligonucleotide
agcgggccaguggagcaua

SEQ ID NO: 175829 - RNA, 19 nt, Artificial Sequence
  Description of Artificial Sequence: Synthetic oligonucleotide
cucucgcacuccagagcua

SEQ ID NO: 175830 - RNA, 19 nt, Artificial Sequence
  Description of Artificial Sequence: Synthetic oligonucleotide
cguggagcgccugcuuuag

SEQ ID NO: 175831 - RNA, 19 nt, Artificial Sequence
  Description of Artificial Sequence: Synthetic oligonucleotide
gcuaccuugugagccaguu

SEQ ID NO: 175832 - RNA, 19 nt, Artificial Sequence
  Description of Artificial Sequence: Synthetic oligonucleotide
ccucggaggcuugcuuggc

SEQ ID NO: 175833 - RNA, 19 nt, Artificial Sequence
  Description of Artificial Sequence: Synthetic oligonucleotide
gaaaggccguggagcgccu

SEQ ID NO: 175834 - RNA, 19 nt, Artificial Sequence
  Description of Artificial Sequence: Synthetic oligonucleotide
ccgggucagcugacacuag

SEQ ID NO: 175835 - RNA, 19 nt, Artificial Sequence
  Description of Artificial Sequence: Synthetic oligonucleotide
cucccgccugguggggcug

SEQ ID NO: 175836 - RNA, 19 nt, Artificial Sequence
  Description of Artificial Sequence: Synthetic oligonucleotide
gcucucccgccuggugggg

SEQ ID NO: 175837 - RNA, 19 nt, Artificial Sequence
  Description of Artificial Sequence: Synthetic oligonucleotide
ccuggccucggcgguaguc

SEQ ID NO: 175838 - RNA, 19 nt, Artificial Sequence
  Description of Artificial Sequence: Synthetic oligonucleotide
cccuucggacucguacauc

SEQ ID NO: 175839 - RNA, 19 nt, Artificial Sequence
  Description of Artificial Sequence: Synthetic oligonucleotide
cuugugcgucugcucugau

SEQ ID NO: 175840 - RNA, 19 nt, Artificial Sequence
  Description of Artificial Sequence: Synthetic oligonucleotide
ggcuccgggucagcugaca

SEQ ID NO: 175841 - RNA, 19 nt, Artificial Sequence
  Description of Artificial Sequence: Synthetic oligonucleotide
ccguggagcgccugcuuua

SEQ ID NO: 175842 - RNA, 19 nt, Artificial Sequence
  Description of Artificial Sequence: Synthetic oligonucleotide
cguuagcauccugcgcuuc

SEQ ID NO: 175843 - RNA, 19 nt, Artificial Sequence
  Description of Artificial Sequence: Synthetic oligonucleotide
ccugcgcuuccuucaggcu

SEQ ID NO: 175844 - RNA, 19 nt, Artificial Sequence
  Description of Artificial Sequence: Synthetic oligonucleotide
ggugacgcgguggcucccu

SEQ ID NO: 175845 - RNA, 19 nt, Artificial Sequence
  Description of Artificial Sequence: Synthetic oligonucleotide
ccuugugagccaguucauu

SEQ ID NO: 175846 - RNA, 19 nt, Artificial Sequence
  Description of Artificial Sequence: Synthetic oligonucleotide
ccgaguccuccuugacucu

SEQ ID NO: 175847 - RNA, 19 nt, Artificial Sequence
  Description of Artificial Sequence: Synthetic oligonucleotide
ccucggcgguagucggcca

SEQ ID NO: 175848 - RNA, 19 nt, Artificial Sequence
  Description of Artificial Sequence: Synthetic oligonucleotide
ccaggcgggugacauucuu

SEQ ID NO: 175849 - RNA, 19 nt, Artificial Sequence
  Description of Artificial Sequence: Synthetic oligonucleotide
ggccguggagcgccugcuu

SEQ ID NO: 175850 - RNA, 19 nt, Artificial Sequence
  Description of Artificial Sequence: Synthetic oligonucleotide
cggaggcuugcuuggccuu

SEQ ID NO: 175851 - RNA, 19 nt, Artificial Sequence
  Description of Artificial Sequence: Synthetic oligonucleotide
gcgggccaguggagcauau

SEQ ID NO: 175852 - RNA, 19 nt, Artificial Sequence
  Description of Artificial Sequence: Synthetic oligonucleotide
uuuuaaagcgguaauagca

SEQ ID NO: 175853 - RNA, 19 nt, Artificial Sequence
  Description of Artificial Sequence: Synthetic oligonucleotide
uguuguaugguaauuuggg

SEQ ID NO: 175854 - RNA, 19 nt, Artificial Sequence
  Description of Artificial Sequence: Synthetic oligonucleotide
gauacaucauauuuggugc

SEQ ID NO: 175855 - RNA, 19 nt, Artificial Sequence
  Description of Artificial Sequence: Synthetic oligonucleotide
auaauaauccgucaguuug

SEQ ID NO: 175856 - RNA, 19 nt, Artificial Sequence
  Description of Artificial Sequence: Synthetic oligonucleotide
uauacgaagauaaacugcu

SEQ ID NO: 175857 - RNA, 19 nt, Artificial Sequence
  Description of Artificial Sequence: Synthetic oligonucleotide
uuuaaagcgguaauagcag

SEQ ID NO: 175858 - RNA, 19 nt, Artificial Sequence
  Description of Artificial Sequence: Synthetic oligonucleotide
aagggugcgucauauaggg

SEQ ID NO: 175859 - RNA, 19 nt, Artificial Sequence
  Description of Artificial Sequence: Synthetic oligonucleotide
acugcuaucauauguggac

SEQ ID NO: 175860 - RNA, 19 nt, Artificial Sequence
  Description of Artificial Sequence: Synthetic oligonucleotide
caaguuuaguaaaagggcg

SEQ ID NO: 175861 - RNA, 19 nt, Artificial Sequence
  Description of Artificial Sequence: Synthetic oligonucleotide
ugggauacaaauucuaggc

SEQ ID NO: 175862 - RNA, 19 nt, Artificial Sequence
  Description of Artificial Sequence: Synthetic oligonucleotide
aagggaacgguauacgaag

SEQ ID NO: 175863 - RNA, 19 nt, Artificial Sequence
  Description of Artificial Sequence: Synthetic oligonucleotide
uaaauaauaauccgucagu

SEQ ID NO: 175864 - RNA, 19 nt, Artificial Sequence
  Description of Artificial Sequence: Synthetic oligonucleotide
aaacugcuaucauaugugg

SEQ ID NO: 175865 - RNA, 19 nt, Artificial Sequence
  Description of Artificial Sequence: Synthetic oligonucleotide
cuggauacaucauauuugg

SEQ ID NO: 175866 - RNA, 19 nt, Artificial Sequence
  Description of Artificial Sequence: Synthetic oligonucleotide
aaauucuaggccacuagac

SEQ ID NO: 175867 - RNA, 19 nt, Artificial Sequence
  Description of Artificial Sequence: Synthetic oligonucleotide
uauaaauaauaauccguca

SEQ ID NO: 175868 - RNA, 19 nt, Artificial Sequence
  Description of Artificial Sequence: Synthetic oligonucleotide
uacugaguggaauaagcgg

SEQ ID NO: 175869 - RNA, 19 nt, Artificial Sequence
  Description of Artificial Sequence: Synthetic oligonucleotide
aauaauccgucaguuuggc

SEQ ID NO: 175870 - RNA, 19 nt, Artificial Sequence
  Description of Artificial Sequence: Synthetic oligonucleotide
aaaguugaaccacuguaga

SEQ ID NO: 175871 - RNA, 19 nt, Artificial Sequence
  Description of Artificial Sequence: Synthetic oligonucleotide
ugugggauacaaauucuag

SEQ ID NO: 175872 - RNA, 19 nt, Artificial Sequence
  Description of Artificial Sequence: Synthetic oligonucleotide
uuuaguaaaagggcguucc

SEQ ID NO: 175873 - RNA, 19 nt, Artificial Sequence
  Description of Artificial Sequence: Synthetic oligonucleotide
aguaaaagggcguuccaag

SEQ ID NO: 175874 - RNA, 19 nt, Artificial Sequence
  Description of Artificial Sequence: Synthetic oligonucleotide
gagacuguguauuggaagc

SEQ ID NO: 175875 - RNA, 19 nt, Artificial Sequence
  Description of Artificial Sequence: Synthetic oligonucleotide
auggaauuauggaacagcc

SEQ ID NO: 175876 - RNA, 19 nt, Artificial Sequence
  Description of Artificial Sequence: Synthetic oligonucleotide
cugauaaugcggcacaugc

SEQ ID NO: 175877 - RNA, 19 nt, Artificial Sequence
  Description of Artificial Sequence: Synthetic oligonucleotide
acugguuugcccuugccuc

SEQ ID NO: 175878 - RNA, 19 nt, Artificial Sequence
  Description of Artificial Sequence: Synthetic oligonucleotide
guaggcaacguacugagug

SEQ ID NO: 175879 - RNA, 19 nt, Artificial Sequence
  Description of Artificial Sequence: Synthetic oligonucleotide
aauaauaauccgucaguuu

SEQ ID NO: 175880 - RNA, 19 nt, Artificial Sequence
  Description of Artificial Sequence: Synthetic oligonucleotide
ucccuuaacuuaaaaguug

SEQ ID NO: 175881 - RNA, 19 nt, Artificial Sequence
  Description of Artificial Sequence: Synthetic oligonucleotide
ggaauuauggaacagccac

SEQ ID NO: 175882 - RNA, 19 nt, Artificial Sequence
  Description of Artificial Sequence: Synthetic oligonucleotide
uuagcauuccuaucggaug

SEQ ID NO: 175883 - RNA, 19 nt, Artificial Sequence
  Description of Artificial Sequence: Synthetic oligonucleotide
uuaucucuuucuaagggaa

SEQ ID NO: 175884 - RNA, 19 nt, Artificial Sequence
  Description of Artificial Sequence: Synthetic oligonucleotide
uaucguugggaucccaucc

SEQ ID NO: 175885 - RNA, 19 nt, Artificial Sequence
  Description of Artificial Sequence: Synthetic oligonucleotide
uuauaucgaaacauaucgu

SEQ ID NO: 175886 - RNA, 19 nt, Artificial Sequence
  Description of Artificial Sequence: Synthetic oligonucleotide
ugauccauagauuccggug

SEQ ID NO: 175887 - RNA, 19 nt, Artificial Sequence
  Description of Artificial Sequence: Synthetic oligonucleotide
uguuaaaucaguguauuuu

SEQ ID NO: 175888 - RNA, 19 nt, Artificial Sequence
  Description of Artificial Sequence: Synthetic oligonucleotide
uagauuccgguguagaacu

SEQ ID NO: 175889 - RNA, 19 nt, Artificial Sequence
  Description of Artificial Sequence: Synthetic oligonucleotide
aacuguuagcauuccuauc

SEQ ID NO: 175890 - RNA, 19 nt, Artificial Sequence
  Description of Artificial Sequence: Synthetic oligonucleotide
uaaagcgguaauagcagca

SEQ ID NO: 175891 - RNA, 19 nt, Artificial Sequence
  Description of Artificial Sequence: Synthetic oligonucleotide
aaauaauaauccgucaguu

SEQ ID NO: 175892 - RNA, 19 nt, Artificial Sequence
  Description of Artificial Sequence: Synthetic oligonucleotide
acgguauacgaagauaaac

SEQ ID NO: 175893 - RNA, 19 nt, Artificial Sequence
  Description of Artificial Sequence: Synthetic oligonucleotide
agaaggaaccauuccugac

SEQ ID NO: 175894 - RNA, 19 nt, Artificial Sequence
  Description of Artificial Sequence: Synthetic oligonucleotide
ucugaagacaugcguuuag

SEQ ID NO: 175895 - RNA, 19 nt, Artificial Sequence
  Description of Artificial Sequence: Synthetic oligonucleotide
gcguucaugacucucaagg

SEQ ID NO: 175896 - RNA, 19 nt, Artificial Sequence
  Description of Artificial Sequence: Synthetic oligonucleotide
agcacauggaauuauggaa

SEQ ID NO: 175897 - RNA, 19 nt, Artificial Sequence
  Description of Artificial Sequence: Synthetic oligonucleotide
uggcuguaaccuaaaauca

SEQ ID NO: 175898 - RNA, 19 nt, Artificial Sequence
  Description of Artificial Sequence: Synthetic oligonucleotide
uguaaccuaaaaucauucu

SEQ ID NO: 175899 - RNA, 19 nt, Artificial Sequence
  Description of Artificial Sequence: Synthetic oligonucleotide
uuaaagcgguaauagcagc

SEQ ID NO: 175900 - RNA, 19 nt, Artificial Sequence
  Description of Artificial Sequence: Synthetic oligonucleotide
agguacgugggccaugugg

SEQ ID NO: 175901 - RNA, 19 nt, Artificial Sequence
  Description of Artificial Sequence: Synthetic oligonucleotide
ugaugacccaccauugaug

SEQ ID NO: 175902 - RNA, 19 nt, Artificial Sequence
  Description of Artificial Sequence: Synthetic oligonucleotide
ucuaagggaacgguauacg

SEQ ID NO: 175903 - RNA, 19 nt, Artificial Sequence
  Description of Artificial Sequence: Synthetic oligonucleotide
aauuauggaacagccacaa

SEQ ID NO: 175904 - RNA, 19 nt, Artificial Sequence
  Description of Artificial Sequence: Synthetic oligonucleotide
gguauacgaagauaaacug

SEQ ID NO: 175905 - RNA, 19 nt, Artificial Sequence
  Description of Artificial Sequence: Synthetic oligonucleotide
auauaaagguugcacgccu

SEQ ID NO: 175906 - RNA, 19 nt, Artificial Sequence
  Description of Artificial Sequence: Synthetic oligonucleotide
uaggcaacguacugagugg

SEQ ID NO: 175907 - RNA, 19 nt, Artificial Sequence
  Description of Artificial Sequence: Synthetic oligonucleotide
auucuaggccacuagacau

SEQ ID NO: 175908 - RNA, 19 nt, Artificial Sequence
  Description of Artificial Sequence: Synthetic oligonucleotide
uaaaagggcguuccaaguc

SEQ ID NO: 175909 - RNA, 19 nt, Artificial Sequence
  Description of Artificial Sequence: Synthetic oligonucleotide
uuuggcgguaagaauuuac

SEQ ID NO: 175910 - RNA, 19 nt, Artificial Sequence
  Description of Artificial Sequence: Synthetic oligonucleotide
guauacgaagauaaacugc

SEQ ID NO: 175911 - RNA, 19 nt, Artificial Sequence
  Description of Artificial Sequence: Synthetic oligonucleotide
ucggauguuaaaucagugu

SEQ ID NO: 175912 - RNA, 19 nt, Artificial Sequence
  Description of Artificial Sequence: Synthetic oligonucleotide
ugguaaauggcugacugcu

SEQ ID NO: 175913 - RNA, 19 nt, Artificial Sequence
  Description of Artificial Sequence: Synthetic oligonucleotide
aucgaaacauaucguuggg

SEQ ID NO: 175914 - RNA, 19 nt, Artificial Sequence
  Description of Artificial Sequence: Synthetic oligonucleotide
auaucguugggaucccauc

SEQ ID NO: 175915 - RNA, 19 nt, Artificial Sequence
  Description of Artificial Sequence: Synthetic oligonucleotide
ugacauaccuuuguuguca

SEQ ID NO: 175916 - RNA, 19 nt, Artificial Sequence
  Description of Artificial Sequence: Synthetic oligonucleotide
gaauaagcggguggggugg

SEQ ID NO: 175917 - RNA, 19 nt, Artificial Sequence
  Description of Artificial Sequence: Synthetic oligonucleotide
uacaccguaaauucucuuc

SEQ ID NO: 175918 - RNA, 19 nt, Artificial Sequence
  Description of Artificial Sequence: Synthetic oligonucleotide
gucauauaggggaaaugcg

SEQ ID NO: 175919 - RNA, 19 nt, Artificial Sequence
  Description of Artificial Sequence: Synthetic oligonucleotide
guacugaguggaauaagcg

SEQ ID NO: 175920 - RNA, 19 nt, Artificial Sequence
  Description of Artificial Sequence: Synthetic oligonucleotide
cuguaaccuaaaaucauuc

SEQ ID NO: 175921 - RNA, 19 nt, Artificial Sequence
  Description of Artificial Sequence: Synthetic oligonucleotide
cauuaggaugugcauacug

SEQ ID NO: 175922 - RNA, 19 nt, Artificial Sequence
  Description of Artificial Sequence: Synthetic oligonucleotide
uacaugagccugagguacg

SEQ ID NO: 175923 - RNA, 19 nt, Artificial Sequence
  Description of Artificial Sequence: Synthetic oligonucleotide
uguugucgagacuggaaug

SEQ ID NO: 175924 - RNA, 19 nt, Artificial Sequence
  Description of Artificial Sequence: Synthetic oligonucleotide
uuaguaaaagggcguucca

SEQ ID NO: 175925 - RNA, 19 nt, Artificial Sequence
  Description of Artificial Sequence: Synthetic oligonucleotide
aaguuuaguaaaagggcgu

SEQ ID NO: 175926 - RNA, 19 nt, Artificial Sequence
  Description of Artificial Sequence: Synthetic oligonucleotide
uccgguguagaacuuggcu

SEQ ID NO: 175927 - RNA, 19 nt, Artificial Sequence
  Description of Artificial Sequence: Synthetic oligonucleotide
gauacaaauucuaggccac

SEQ ID NO: 175928 - RNA, 19 nt, Artificial Sequence
  Description of Artificial Sequence: Synthetic oligonucleotide
gguugugggauacaaauuc

SEQ ID NO: 175929 - RNA, 19 nt, Artificial Sequence
  Description of Artificial Sequence: Synthetic oligonucleotide
ucaucaaaucucgagacuu

SEQ ID NO: 175930 - RNA, 19 nt, Artificial Sequence
  Description of Artificial Sequence: Synthetic oligonucleotide
aagcgguaauagcagcaag

SEQ ID NO: 175931 - RNA, 19 nt, Artificial Sequence
  Description of Artificial Sequence: Synthetic oligonucleotide
uaggaugugcauacugcug

SEQ ID NO: 175932 - RNA, 19 nt, Artificial Sequence
  Description of Artificial Sequence: Synthetic oligonucleotide
gaagggugcgucauauagg

SEQ ID NO: 175933 - RNA, 19 nt, Artificial Sequence
  Description of Artificial Sequence: Synthetic oligonucleotide
gaacgguauacgaagauaa

SEQ ID NO: 175934 - RNA, 19 nt, Artificial Sequence
  Description of Artificial Sequence: Synthetic oligonucleotide
uuacugaacuucugucaag

SEQ ID NO: 175935 - RNA, 19 nt, Artificial Sequence
  Description of Artificial Sequence: Synthetic oligonucleotide
ucuuucuaagggaacggua

SEQ ID NO: 175936 - RNA, 19 nt, Artificial Sequence
  Description of Artificial Sequence: Synthetic oligonucleotide
auauaggggaaaugcgcug

SEQ ID NO: 175937 - RNA, 19 nt, Artificial Sequence
  Description of Artificial Sequence: Synthetic oligonucleotide
gcugaguauacacuggagc

SEQ ID NO: 175938 - RNA, 19 nt, Artificial Sequence
  Description of Artificial Sequence: Synthetic oligonucleotide
agaccgucuguugugcugc

SEQ ID NO: 175939 - RNA, 19 nt, Artificial Sequence
  Description of Artificial Sequence: Synthetic oligonucleotide
cuaaccacugaggaccacg

SEQ ID NO: 175940 - RNA, 19 nt, Artificial Sequence
  Description of Artificial Sequence: Synthetic oligonucleotide
ugcugaugacccaccauug

SEQ ID NO: 175941 - RNA, 19 nt, Artificial Sequence
  Description of Artificial Sequence: Synthetic oligonucleotide
cucugaguuacucagcaca

SEQ ID NO: 175942 - RNA, 19 nt, Artificial Sequence
  Description of Artificial Sequence: Synthetic oligonucleotide
uuugcuagcugaugcguuc

SEQ ID NO: 175943 - RNA, 19 nt, Artificial Sequence
  Description of Artificial Sequence: Synthetic oligonucleotide
uccuaucggauguuaaauc

SEQ ID NO: 175944 - RNA, 19 nt, Artificial Sequence
  Description of Artificial Sequence: Synthetic oligonucleotide
agcugaugcguucaugacu

SEQ ID NO: 175945 - RNA, 19 nt, Artificial Sequence
  Description of Artificial Sequence: Synthetic oligonucleotide
ugugauuccgagggugccg

SEQ ID NO: 175946 - RNA, 19 nt, Artificial Sequence
  Description of Artificial Sequence: Synthetic oligonucleotide
auggggcguauguggaugc

SEQ ID NO: 175947 - RNA, 19 nt, Artificial Sequence
  Description of Artificial Sequence: Synthetic oligonucleotide
uucuaagggaacgguauac

SEQ ID NO: 175948 - RNA, 19 nt, Artificial Sequence
  Description of Artificial Sequence: Synthetic oligonucleotide
ggagacuguguauuggaag

SEQ ID NO: 175949 - RNA, 19 nt, Artificial Sequence
  Description of Artificial Sequence: Synthetic oligonucleotide
aauaagcgggugggguggc

SEQ ID NO: 175950 - RNA, 19 nt, Artificial Sequence
  Description of Artificial Sequence: Synthetic oligonucleotide
gauccauagauuccggugu

SEQ ID NO: 175951 - RNA, 19 nt, Artificial Sequence
  Description of Artificial Sequence: Synthetic oligonucleotide
uauaggggaaaugcgcugu

SEQ ID NO: 175952 - RNA, 19 nt, Artificial Sequence
  Description of Artificial Sequence: Synthetic oligonucleotide
uguuagcauuccuaucgga

SEQ ID NO: 175953 - RNA, 19 nt, Artificial Sequence
  Description of Artificial Sequence: Synthetic oligonucleotide
cuguuagcauuccuaucgg

SEQ ID NO: 175954 - RNA, 19 nt, Artificial Sequence
  Description of Artificial Sequence: Synthetic oligonucleotide
uugugggauacaaauucua

SEQ ID NO: 175955 - RNA, 19 nt, Artificial Sequence
  Description of Artificial Sequence: Synthetic oligonucleotide
acuuaaaaguugaaccacu

SEQ ID NO: 175956 - RNA, 19 nt, Artificial Sequence
  Description of Artificial Sequence: Synthetic oligonucleotide
guacaugagccugagguac

SEQ ID NO: 175957 - RNA, 19 nt, Artificial Sequence
  Description of Artificial Sequence: Synthetic oligonucleotide
gagacugauaaugcggcac

SEQ ID NO: 175958 - RNA, 19 nt, Artificial Sequence
  Description of Artificial Sequence: Synthetic oligonucleotide
acauaccuuuguugucagc

SEQ ID NO: 175959 - RNA, 19 nt, Artificial Sequence
  Description of Artificial Sequence: Synthetic oligonucleotide
ggcgguaagaauuuacuga

SEQ ID NO: 175960 - RNA, 19 nt, Artificial Sequence
  Description of Artificial Sequence: Synthetic oligonucleotide
agccccgcgugguaaaugg

SEQ ID NO: 175961 - RNA, 19 nt, Artificial Sequence
  Description of Artificial Sequence: Synthetic oligonucleotide
cugaagacaugcguuuagg

SEQ ID NO: 175962 - RNA, 19 nt, Artificial Sequence
  Description of Artificial Sequence: Synthetic oligonucleotide
cucuuaugcucugaguuac

SEQ ID NO: 175963 - RNA, 19 nt, Artificial Sequence
  Description of Artificial Sequence: Synthetic oligonucleotide
auuagcaucauuggcgcau

SEQ ID NO: 175964 - RNA, 19 nt, Artificial Sequence
  Description of Artificial Sequence: Synthetic oligonucleotide
ccacuaaccacugaggacc

SEQ ID NO: 175965 - RNA, 19 nt, Artificial Sequence
  Description of Artificial Sequence: Synthetic oligonucleotide
aaagcgguaauagcagcaa

SEQ ID NO: 175966 - RNA, 19 nt, Artificial Sequence
  Description of Artificial Sequence: Synthetic oligonucleotide
ucaguuuggcgguaagaau

SEQ ID NO: 175967 - RNA, 19 nt, Artificial Sequence
  Description of Artificial Sequence: Synthetic oligonucleotide
gguaagaauuuacugaacu

SEQ ID NO: 175968 - RNA, 19 nt, Artificial Sequence
  Description of Artificial Sequence: Synthetic oligonucleotide
gugacguugggguaguaga

SEQ ID NO: 175969 - RNA, 19 nt, Artificial Sequence
  Description of Artificial Sequence: Synthetic oligonucleotide
gggaaaugcgcuguugucg

SEQ ID NO: 175970 - RNA, 19 nt, Artificial Sequence
  Description of Artificial Sequence: Synthetic oligonucleotide
cugucaaguuuaguaaaag

SEQ ID NO: 175971 - RNA, 19 nt, Artificial Sequence
  Description of Artificial Sequence: Synthetic oligonucleotide
cuaagggaacgguauacga

SEQ ID NO: 175972 - RNA, 19 nt, Artificial Sequence
  Description of Artificial Sequence: Synthetic oligonucleotide
caaauucuaggccacuaga

SEQ ID NO: 175973 - RNA, 19 nt, Artificial Sequence
  Description of Artificial Sequence: Synthetic oligonucleotide
gguacgugggccauguggg

SEQ ID NO: 175974 - RNA, 19 nt, Artificial Sequence
  Description of Artificial Sequence: Synthetic oligonucleotide
ugaagaccgucuguugugc

SEQ ID NO: 175975 - RNA, 19 nt, Artificial Sequence
  Description of Artificial Sequence: Synthetic oligonucleotide
aaaugcgcuguugucgaga

SEQ ID NO: 175976 - RNA, 19 nt, Artificial Sequence
  Description of Artificial Sequence: Synthetic oligonucleotide
ccauccauuagacacauca

SEQ ID NO: 175977 - RNA, 19 nt, Artificial Sequence
  Description of Artificial Sequence: Synthetic oligonucleotide
uuccuaucggauguuaaau

SEQ ID NO: 175978 - RNA, 19 nt, Artificial Sequence
  Description of Artificial Sequence: Synthetic oligonucleotide
ccuacaugccucuacucgg

SEQ ID NO: 175979 - RNA, 19 nt, Artificial Sequence
  Description of Artificial Sequence: Synthetic oligonucleotide
agccuuacaacugcuguug

SEQ ID NO: 175980 - RNA, 19 nt, Artificial Sequence
  Description of Artificial Sequence: Synthetic oligonucleotide
uauaugucuuggcuugguu

SEQ ID NO: 175981 - RNA, 19 nt, Artificial Sequence
  Description of Artificial Sequence: Synthetic oligonucleotide
guggcuuuguaugaugcug

SEQ ID NO: 175982 - RNA, 19 nt, Artificial Sequence
  Description of Artificial Sequence: Synthetic oligonucleotide
uaugccggcugaacaugag

SEQ ID NO: 175983 - RNA, 19 nt, Artificial Sequence
  Description of Artificial Sequence: Synthetic oligonucleotide
gguauaugccggcugaaca

SEQ ID NO: 175984 - RNA, 19 nt, Artificial Sequence
  Description of Artificial Sequence: Synthetic oligonucleotide
uaguaaaagggcguuccaa

SEQ ID NO: 175985 - RNA, 19 nt, Artificial Sequence
  Description of Artificial Sequence: Synthetic oligonucleotide
gauuccgguguagaacuug

SEQ ID NO: 175986 - RNA, 19 nt, Artificial Sequence
  Description of Artificial Sequence: Synthetic oligonucleotide
guaaccuaaaaucauucuu

SEQ ID NO: 175987 - RNA, 19 nt, Artificial Sequence
  Description of Artificial Sequence: Synthetic oligonucleotide
caucauuggcgcaugggca

SEQ ID NO: 175988 - RNA, 19 nt, Artificial Sequence
  Description of Artificial Sequence: Synthetic oligonucleotide
cuuuaccugcucuauaugu

SEQ ID NO: 175989 - RNA, 19 nt, Artificial Sequence
  Description of Artificial Sequence: Synthetic oligonucleotide
uggauucaauuuuccucug

SEQ ID NO: 175990 - RNA, 19 nt, Artificial Sequence
  Description of Artificial Sequence: Synthetic oligonucleotide
uuuguaugaugcuggucuu

SEQ ID NO: 175991 - RNA, 19 nt, Artificial Sequence
  Description of Artificial Sequence: Synthetic oligonucleotide
ugauugccucaucaaacuu

SEQ ID NO: 175992 - RNA, 19 nt, Artificial Sequence
  Description of Artificial Sequence: Synthetic oligonucleotide
agccacaagucccuacaug

SEQ ID NO: 175993 - RNA, 19 nt, Artificial Sequence
  Description of Artificial Sequence: Synthetic oligonucleotide
cuacaauggguggaccugc

SEQ ID NO: 175994 - RNA, 19 nt, Artificial Sequence
  Description of Artificial Sequence: Synthetic oligonucleotide
cguacugaguggaauaagc

SEQ ID NO: 175995 - RNA, 19 nt, Artificial Sequence
  Description of Artificial Sequence: Synthetic oligonucleotide
acuuugagcgagggcggcc

SEQ ID NO: 175996 - RNA, 19 nt, Artificial Sequence
  Description of Artificial Sequence: Synthetic oligonucleotide
ggggcuauuggucuugcug

SEQ ID NO: 175997 - RNA, 19 nt, Artificial Sequence
  Description of Artificial Sequence: Synthetic oligonucleotide
gggugcgucauauagggga

SEQ ID NO: 175998 - RNA, 19 nt, Artificial Sequence
  Description of Artificial Sequence: Synthetic oligonucleotide
uaaugcggcacaugcugaa

SEQ ID NO: 175999 - RNA, 19 nt, Artificial Sequence
  Description of Artificial Sequence: Synthetic oligonucleotide
cuuaugcucugaguuacuc

SEQ ID NO: 176000 - RNA, 19 nt, Artificial Sequence
  Description of Artificial Sequence: Synthetic oligonucleotide
gaaaugcgcuguugucgag

SEQ ID NO: 176001 - RNA, 19 nt, Artificial Sequence
  Description of Artificial Sequence: Synthetic oligonucleotide
cuaacugguuugcccuugc

SEQ ID NO: 176002 - RNA, 19 nt, Artificial Sequence
  Description of Artificial Sequence: Synthetic oligonucleotide
cagcacauggaauuaugga

SEQ ID NO: 176003 - RNA, 19 nt, Artificial Sequence
  Description of Artificial Sequence: Synthetic oligonucleotide
ggaccugccgcugaggcgg

SEQ ID NO: 176004 - RNA, 19 nt, Artificial Sequence
  Description of Artificial Sequence: Synthetic oligonucleotide
cgucauauaggggaaaugc

SEQ ID NO: 176005 - RNA, 19 nt, Artificial Sequence
  Description of Artificial Sequence: Synthetic oligonucleotide
aguuuaguaaaagggcguu

SEQ ID NO: 176006 - RNA, 19 nt, Artificial Sequence
  Description of Artificial Sequence: Synthetic oligonucleotide
guaugacagggcuguacac

SEQ ID NO: 176007 - RNA, 19 nt, Artificial Sequence
  Description of Artificial Sequence: Synthetic oligonucleotide
cacuguagacagugauugc

SEQ ID NO: 176008 - RNA, 19 nt, Artificial Sequence
  Description of Artificial Sequence: Synthetic oligonucleotide
acugauaaugcggcacaug

SEQ ID NO: 176009 - RNA, 19 nt, Artificial Sequence
  Description of Artificial Sequence: Synthetic oligonucleotide
uugccucccguuuuagaaa

SEQ ID NO: 176010 - RNA, 19 nt, Artificial Sequence
  Description of Artificial Sequence: Synthetic oligonucleotide
cugaguuaucucuuucuaa

SEQ ID NO: 176011 - RNA, 19 nt, Artificial Sequence
  Description of Artificial Sequence: Synthetic oligonucleotide
acugaagggugcgucauau

SEQ ID NO: 176012 - RNA, 19 nt, Artificial Sequence
  Description of Artificial Sequence: Synthetic oligonucleotide
ggcguauguggaugcaggg

SEQ ID NO: 176013 - RNA, 19 nt, Artificial Sequence
  Description of Artificial Sequence: Synthetic oligonucleotide
uaugguaauuugggacaug

SEQ ID NO: 176014 - RNA, 19 nt, Artificial Sequence
  Description of Artificial Sequence: Synthetic oligonucleotide
uggcugugucgucauuagc

SEQ ID NO: 176015 - RNA, 19 nt, Artificial Sequence
  Description of Artificial Sequence: Synthetic oligonucleotide
guacgugggccaugugggg

SEQ ID NO: 176016 - RNA, 19 nt, Artificial Sequence
  Description of Artificial Sequence: Synthetic oligonucleotide
aacgguauacgaagauaaa

SEQ ID NO: 176017 - RNA, 19 nt, Artificial Sequence
  Description of Artificial Sequence: Synthetic oligonucleotide
cuggguacuugcgggaccc

SEQ ID NO: 176018 - RNA, 19 nt, Artificial Sequence
  Description of Artificial Sequence: Synthetic oligonucleotide
gugacauaccuuuguuguc

SEQ ID NO: 176019 - RNA, 19 nt, Artificial Sequence
  Description of Artificial Sequence: Synthetic oligonucleotide
guuuaguaaaagggcguuc

SEQ ID NO: 176020 - RNA, 19 nt, Artificial Sequence
  Description of Artificial Sequence: Synthetic oligonucleotide
acuacaccguaaauucucu

SEQ ID NO: 176021 - RNA, 19 nt, Artificial Sequence
  Description of Artificial Sequence: Synthetic oligonucleotide
guggacacuacaccguaaa

SEQ ID NO: 176022 - RNA, 19 nt, Artificial Sequence
  Description of Artificial Sequence: Synthetic oligonucleotide
caccccuugggaugugacc

SEQ ID NO: 176023 - RNA, 19 nt, Artificial Sequence
  Description of Artificial Sequence: Synthetic oligonucleotide
ccuggcauugcccuguaug

SEQ ID NO: 176024 - RNA, 19 nt, Artificial Sequence
  Description of Artificial Sequence: Synthetic oligonucleotide
guggaauaagcgggugggg

SEQ ID NO: 176025 - RNA, 19 nt, Artificial Sequence
  Description of Artificial Sequence: Synthetic oligonucleotide
ugcgucauauaggggaaau

SEQ ID NO: 176026 - RNA, 19 nt, Artificial Sequence
  Description of Artificial Sequence: Synthetic oligonucleotide
cguauguggaugcagggug

SEQ ID NO: 176027 - RNA, 19 nt, Artificial Sequence
  Description of Artificial Sequence: Synthetic oligonucleotide
guauaugccggcugaacau

SEQ ID NO: 176028 - RNA, 19 nt, Artificial Sequence
  Description of Artificial Sequence: Synthetic oligonucleotide
acguacugaguggaauaag

SEQ ID NO: 176029 - RNA, 19 nt, Artificial Sequence
  Description of Artificial Sequence: Synthetic oligonucleotide
auaaugcggcacaugcuga

SEQ ID NO: 176030 - RNA, 19 nt, Artificial Sequence
  Description of Artificial Sequence: Synthetic oligonucleotide
acugaacuucugucaaguu

SEQ ID NO: 176031 - RNA, 19 nt, Artificial Sequence
  Description of Artificial Sequence: Synthetic oligonucleotide
cuuggcuguaaccuaaaau

SEQ ID NO: 176032 - RNA, 19 nt, Artificial Sequence
  Description of Artificial Sequence: Synthetic oligonucleotide
cauuccuaucggauguuaa

SEQ ID NO: 176033 - RNA, 19 nt, Artificial Sequence
  Description of Artificial Sequence: Synthetic oligonucleotide
uuugagcgagggcggccug

SEQ ID NO: 176034 - RNA, 19 nt, Artificial Sequence
  Description of Artificial Sequence: Synthetic oligonucleotide
guuagcauuccuaucggau

SEQ ID NO: 176035 - RNA, 19 nt, Artificial Sequence
  Description of Artificial Sequence: Synthetic oligonucleotide
cuaguuuucugugcuucca

SEQ ID NO: 176036 - RNA, 19 nt, Artificial Sequence
  Description of Artificial Sequence: Synthetic oligonucleotide
cccuuaacuuaaaaguuga

SEQ ID NO: 176037 - RNA, 19 nt, Artificial Sequence
  Description of Artificial Sequence: Synthetic oligonucleotide
cugugauuccgagggugcc

SEQ ID NO: 176038 - RNA, 19 nt, Artificial Sequence
  Description of Artificial Sequence: Synthetic oligonucleotide
ggugacguugggguaguag

SEQ ID NO: 176039 - RNA, 19 nt, Artificial Sequence
  Description of Artificial Sequence: Synthetic oligonucleotide
gggcguauguggaugcagg

SEQ ID NO: 176040 - RNA, 19 nt, Artificial Sequence
  Description of Artificial Sequence: Synthetic oligonucleotide
aguuuggcgguaagaauuu

SEQ ID NO: 176041 - RNA, 19 nt, Artificial Sequence
  Description of Artificial Sequence: Synthetic oligonucleotide
agacaugcguuuaggcaca

SEQ ID NO: 176042 - RNA, 19 nt, Artificial Sequence
  Description of Artificial Sequence: Synthetic oligonucleotide
gggguugugggauacaaau

SEQ ID NO: 176043 - RNA, 19 nt, Artificial Sequence
  Description of Artificial Sequence: Synthetic oligonucleotide
aggcaacguacugagugga

SEQ ID NO: 176044 - RNA, 19 nt, Artificial Sequence
  Description of Artificial Sequence: Synthetic oligonucleotide
gacuggaaugggcuguagu

SEQ ID NO: 176045 - RNA, 19 nt, Artificial Sequence
  Description of Artificial Sequence: Synthetic oligonucleotide
auaugccggcugaacauga

SEQ ID NO: 176046 - RNA, 19 nt, Artificial Sequence
  Description of Artificial Sequence: Synthetic oligonucleotide
ggggauauuugguacuuua

SEQ ID NO: 176047 - RNA, 19 nt, Artificial Sequence
  Description of Artificial Sequence: Synthetic oligonucleotide
aagggcguuccaagucuug

SEQ ID NO: 176048 - RNA, 19 nt, Artificial Sequence
  Description of Artificial Sequence: Synthetic oligonucleotide
guacuuuaccugcucuaua

SEQ ID NO: 176049 - RNA, 19 nt, Artificial Sequence
  Description of Artificial Sequence: Synthetic oligonucleotide
guugugggauacaaauucu

SEQ ID NO: 176050 - RNA, 19 nt, Artificial Sequence
  Description of Artificial Sequence: Synthetic oligonucleotide
ugcccuugccucccguuuu

SEQ ID NO: 176051 - RNA, 19 nt, Artificial Sequence
  Description of Artificial Sequence: Synthetic oligonucleotide
cuguugucgagacuggaau

SEQ ID NO: 176052 - RNA, 19 nt, Artificial Sequence
  Description of Artificial Sequence: Synthetic oligonucleotide
uggcuacaauggguggacc

SEQ ID NO: 176053 - RNA, 19 nt, Artificial Sequence
  Description of Artificial Sequence: Synthetic oligonucleotide
ggccuuucgguuccuccag

SEQ ID NO: 176054 - RNA, 19 nt, Artificial Sequence
  Description of Artificial Sequence: Synthetic oligonucleotide
gacaugcguuuaggcacag

SEQ ID NO: 176055 - RNA, 19 nt, Artificial Sequence
  Description of Artificial Sequence: Synthetic oligonucleotide
gagggcuguaggcaacgua

SEQ ID NO: 176056 - RNA, 19 nt, Artificial Sequence
  Description of Artificial Sequence: Synthetic oligonucleotide
gcugaugacccaccauuga

SEQ ID NO: 176057 - RNA, 19 nt, Artificial Sequence
  Description of Artificial Sequence: Synthetic oligonucleotide
cugaugacccaccauugau

SEQ ID NO: 176058 - RNA, 19 nt, Artificial Sequence
  Description of Artificial Sequence: Synthetic oligonucleotide
gaagaccgucuguugugcu

SEQ ID NO: 176059 - RNA, 19 nt, Artificial Sequence
  Description of Artificial Sequence: Synthetic oligonucleotide
agggugcgucauauagggg

SEQ ID NO: 176060 - RNA, 19 nt, Artificial Sequence
  Description of Artificial Sequence: Synthetic oligonucleotide
gguggcuacaaugggugga

SEQ ID NO: 176061 - RNA, 19 nt, Artificial Sequence
  Description of Artificial Sequence: Synthetic oligonucleotide
auuggcgcaugggcaguug

SEQ ID NO: 176062 - RNA, 19 nt, Artificial Sequence
  Description of Artificial Sequence: Synthetic oligonucleotide
ggaacgguauacgaagaua

SEQ ID NO: 176063 - RNA, 19 nt, Artificial Sequence
  Description of Artificial Sequence: Synthetic oligonucleotide
gcagccuuacaacugcugu

SEQ ID NO: 176064 - RNA, 19 nt, Artificial Sequence
  Description of Artificial Sequence: Synthetic oligonucleotide
cuacaugccucuacucggu

SEQ ID NO: 176065 - RNA, 19 nt, Artificial Sequence
  Description of Artificial Sequence: Synthetic oligonucleotide
acauaucguugggauccca

SEQ ID NO: 176066 - RNA, 19 nt, Artificial Sequence
  Description of Artificial Sequence: Synthetic oligonucleotide
gggacccugcaacagcaca

SEQ ID NO: 176067 - RNA, 19 nt, Artificial Sequence
  Description of Artificial Sequence: Synthetic oligonucleotide
uccgucaguuuggcgguaa

SEQ ID NO: 176068 - RNA, 19 nt, Artificial Sequence
  Description of Artificial Sequence: Synthetic oligonucleotide
gcgguaauagcagcaagaa

SEQ ID NO: 176069 - RNA, 19 nt, Artificial Sequence
  Description of Artificial Sequence: Synthetic oligonucleotide
gcuggguacuugcgggacc

SEQ ID NO: 176070 - RNA, 19 nt, Artificial Sequence
  Description of Artificial Sequence: Synthetic oligonucleotide
ccauuagacacaucauucu

SEQ ID NO: 176071 - RNA, 19 nt, Artificial Sequence
  Description of Artificial Sequence: Synthetic oligonucleotide
ccucccguuuuagaaauuc

SEQ ID NO: 176072 - RNA, 19 nt, Artificial Sequence
  Description of Artificial Sequence: Synthetic oligonucleotide
gcuaacugguuugcccuug

SEQ ID NO: 176073 - RNA, 19 nt, Artificial Sequence
  Description of Artificial Sequence: Synthetic oligonucleotide
guaugguaauuugggacau

SEQ ID NO: 176074 - RNA, 19 nt, Artificial Sequence
  Description of Artificial Sequence: Synthetic oligonucleotide
cccgcgugguaaauggcug

SEQ ID NO: 176075 - RNA, 19 nt, Artificial Sequence
  Description of Artificial Sequence: Synthetic oligonucleotide
uggggcguauguggaugca

SEQ ID NO: 176076 - RNA, 19 nt, Artificial Sequence
  Description of Artificial Sequence: Synthetic oligonucleotide
ggggcguauguggaugcag

SEQ ID NO: 176077 - RNA, 19 nt, Artificial Sequence
  Description of Artificial Sequence: Synthetic oligonucleotide
gagguacgugggccaugug

SEQ ID NO: 176078 - RNA, 19 nt, Artificial Sequence
  Description of Artificial Sequence: Synthetic oligonucleotide
ggugcaaaacaaacaggcu

SEQ ID NO: 176079 - RNA, 19 nt, Artificial Sequence
  Description of Artificial Sequence: Synthetic oligonucleotide
gcgucauauaggggaaaug

SEQ ID NO: 176080 - RNA, 19 nt, Artificial Sequence
  Description of Artificial Sequence: Synthetic oligonucleotide
gcccguggaaauggcaaag

SEQ ID NO: 176081 - RNA, 19 nt, Artificial Sequence
  Description of Artificial Sequence: Synthetic oligonucleotide
aggugauguuucacuugcu

SEQ ID NO: 176082 - RNA, 19 nt, Artificial Sequence
  Description of Artificial Sequence: Synthetic oligonucleotide
ggcagccuuacaacugcug

SEQ ID NO: 176083 - RNA, 19 nt, Artificial Sequence
  Description of Artificial Sequence: Synthetic oligonucleotide
gaacgaggguugaacuccu

SEQ ID NO: 176084 - RNA, 19 nt, Artificial Sequence
  Description of Artificial Sequence: Synthetic oligonucleotide
augcgcuguugucgagacu

SEQ ID NO: 176085 - RNA, 19 nt, Artificial Sequence
  Description of Artificial Sequence: Synthetic oligonucleotide
cugagguacgugggccaug

SEQ ID NO: 176086 - RNA, 19 nt, Artificial Sequence
  Description of Artificial Sequence: Synthetic oligonucleotide
ccuuaacuuaaaaguugaa

SEQ ID NO: 176087 - RNA, 19 nt, Artificial Sequence
  Description of Artificial Sequence: Synthetic oligonucleotide
gcuuuguaugaugcugguc

SEQ ID NO: 176088 - RNA, 19 nt, Artificial Sequence
  Description of Artificial Sequence: Synthetic oligonucleotide
gguugcacgccugggcuca

SEQ ID NO: 176089 - RNA, 19 nt, Artificial Sequence
  Description of Artificial Sequence: Synthetic oligonucleotide
gcaugggcgucauaggaau

SEQ ID NO: 176090 - RNA, 19 nt, Artificial Sequence
  Description of Artificial Sequence: Synthetic oligonucleotide
auaagcgggugggguggcu

SEQ ID NO: 176091 - RNA, 19 nt, Artificial Sequence
  Description of Artificial Sequence: Synthetic oligonucleotide
gacugauaaugcggcacau

SEQ ID NO: 176092 - RNA, 19 nt, Artificial Sequence
  Description of Artificial Sequence: Synthetic oligonucleotide
acaugcguuuaggcacagu

SEQ ID NO: 176093 - RNA, 19 nt, Artificial Sequence
  Description of Artificial Sequence: Synthetic oligonucleotide
cuuugagcgagggcggccu

SEQ ID NO: 176094 - RNA, 19 nt, Artificial Sequence
  Description of Artificial Sequence: Synthetic oligonucleotide
ggcaugggcgucauaggaa

SEQ ID NO: 176095 - RNA, 19 nt, Artificial Sequence
  Description of Artificial Sequence: Synthetic oligonucleotide
cuaggccacuagacaugga

SEQ ID NO: 176096 - RNA, 19 nt, Artificial Sequence
  Description of Artificial Sequence: Synthetic oligonucleotide
ggcuguaaccuaaaaucau

SEQ ID NO: 176097 - RNA, 19 nt, Artificial Sequence
  Description of Artificial Sequence: Synthetic oligonucleotide
cugaagggugcgucauaua

SEQ ID NO: 176098 - RNA, 19 nt, Artificial Sequence
  Description of Artificial Sequence: Synthetic oligonucleotide
caugggcaguuggaugaga

SEQ ID NO: 176099 - RNA, 19 nt, Artificial Sequence
  Description of Artificial Sequence: Synthetic oligonucleotide
caccguaaauucucuucau

SEQ ID NO: 176100 - RNA, 19 nt, Artificial Sequence
  Description of Artificial Sequence: Synthetic oligonucleotide
gggaacgguauacgaagau

SEQ ID NO: 176101 - RNA, 19 nt, Artificial Sequence
  Description of Artificial Sequence: Synthetic oligonucleotide
cagccuuacaacugcuguu

SEQ ID NO: 176102 - RNA, 19 nt, Artificial Sequence
  Description of Artificial Sequence: Synthetic oligonucleotide
gcugaggcgggguggcauc

SEQ ID NO: 176103 - RNA, 19 nt, Artificial Sequence
  Description of Artificial Sequence: Synthetic oligonucleotide
agauuccgguguagaacuu

SEQ ID NO: 176104 - RNA, 19 nt, Artificial Sequence
  Description of Artificial Sequence: Synthetic oligonucleotide
cagccccgcgugguaaaug

SEQ ID NO: 176105 - RNA, 19 nt, Artificial Sequence
  Description of Artificial Sequence: Synthetic oligonucleotide
ccguggaaauggcaaagua

SEQ ID NO: 176106 - RNA, 19 nt, Artificial Sequence
  Description of Artificial Sequence: Synthetic oligonucleotide
gugcgucauauaggggaaa

SEQ ID NO: 176107 - RNA, 19 nt, Artificial Sequence
  Description of Artificial Sequence: Synthetic oligonucleotide
ggaugcugagacugauaau

SEQ ID NO: 176108 - RNA, 19 nt, Artificial Sequence
  Description of Artificial Sequence: Synthetic oligonucleotide
gaccgucuguugugcugcu

SEQ ID NO: 176109 - RNA, 19 nt, Artificial Sequence
  Description of Artificial Sequence: Synthetic oligonucleotide
ccuuguuguaugguaauuu

SEQ ID NO: 176110 - RNA, 19 nt, Artificial Sequence
  Description of Artificial Sequence: Synthetic oligonucleotide
ggacccugcaacagcacau

SEQ ID NO: 176111 - RNA, 19 nt, Artificial Sequence
  Description of Artificial Sequence: Synthetic oligonucleotide
ccgcgugguaaauggcuga

SEQ ID NO: 176112 - RNA, 19 nt, Artificial Sequence
  Description of Artificial Sequence: Synthetic oligonucleotide
ggcgggguggcaucauggu

SEQ ID NO: 176113 - RNA, 19 nt, Artificial Sequence
  Description of Artificial Sequence: Synthetic oligonucleotide
caugggcgucauaggaauu

SEQ ID NO: 176114 - RNA, 19 nt, Artificial Sequence
  Description of Artificial Sequence: Synthetic oligonucleotide
cgcgugguaaauggcugac

SEQ ID NO: 176115 - RNA, 19 nt, Artificial Sequence
  Description of Artificial Sequence: Synthetic oligonucleotide
ggauggggcguauguggau

SEQ ID NO: 176116 - RNA, 19 nt, Artificial Sequence
  Description of Artificial Sequence: Synthetic oligonucleotide
ggguugugggauacaaauu

SEQ ID NO: 176117 - RNA, 19 nt, Artificial Sequence
  Description of Artificial Sequence: Synthetic oligonucleotide
uggugacguugggguagua

SEQ ID NO: 176118 - RNA, 19 nt, Artificial Sequence
  Description of Artificial Sequence: Synthetic oligonucleotide
gggauucaauguugacuuu

SEQ ID NO: 176119 - RNA, 19 nt, Artificial Sequence
  Description of Artificial Sequence: Synthetic oligonucleotide
ggcgcaugggcaguuggau

SEQ ID NO: 176120 - RNA, 19 nt, Artificial Sequence
  Description of Artificial Sequence: Synthetic oligonucleotide
ccccgcgugguaaauggcu

SEQ ID NO: 176121 - RNA, 19 nt, Artificial Sequence
  Description of Artificial Sequence: Synthetic oligonucleotide
gccccgcgugguaaauggc

SEQ ID NO: 176122 - RNA, 19 nt, Artificial Sequence
  Description of Artificial Sequence: Synthetic oligonucleotide
gugucgucauuagcaucau

SEQ ID NO: 176123 - RNA, 19 nt, Artificial Sequence
  Description of Artificial Sequence: Synthetic oligonucleotide
gccagccccgcgugguaaa

SEQ ID NO: 176124 - RNA, 19 nt, Artificial Sequence
  Description of Artificial Sequence: Synthetic oligonucleotide
gcgugguaaauggcugacu

SEQ ID NO: 176125 - RNA, 19 nt, Artificial Sequence
  Description of Artificial Sequence: Synthetic oligonucleotide
cgguaauagcagcaagaau

SEQ ID NO: 176126 - RNA, 19 nt, Artificial Sequence
  Description of Artificial Sequence: Synthetic oligonucleotide
cccguggaaauggcaaagu

SEQ ID NO: 176127 - RNA, 19 nt, Artificial Sequence
  Description of Artificial Sequence: Synthetic oligonucleotide
cguugggaucccauccauu

SEQ ID NO: 176128 - RNA, 19 nt, Artificial Sequence
  Description of Artificial Sequence: Synthetic oligonucleotide
gccucccguuuuagaaauu

SEQ ID NO: 176129 - RNA, 19 nt, Artificial Sequence
  Description of Artificial Sequence: Synthetic oligonucleotide
ccucgcuccugucgucauu

SEQ ID NO: 176130 - RNA, 19 nt, Artificial Sequence
  Description of Artificial Sequence: Synthetic oligonucleotide
ccagccccgcgugguaaau

SEQ ID NO: 176131 - RNA, 19 nt, Artificial Sequence
  Description of Artificial Sequence: Synthetic oligonucleotide
uauauauauauauauauau

SEQ ID NO: 176132 - RNA, 19 nt, Artificial Sequence
  Description of Artificial Sequence: Synthetic oligonucleotide
acaaauugcauagagagac

SEQ ID NO: 176133 - RNA, 19 nt, Artificial Sequence
  Description of Artificial Sequence: Synthetic oligonucleotide
uauauauauauauauauua

SEQ ID NO: 176134 - RNA, 19 nt, Artificial Sequence
  Description of Artificial Sequence: Synthetic oligonucleotide
auauauauauauuauuuug

SEQ ID NO: 176135 - RNA, 19 nt, Artificial Sequence
  Description of Artificial Sequence: Synthetic oligonucleotide
accaauauuguguacuucc

SEQ ID NO: 176136 - RNA, 19 nt, Artificial Sequence
  Description of Artificial Sequence: Synthetic oligonucleotide
uuaagcaccaugcaguuag

SEQ ID NO: 176137 - RNA, 19 nt, Artificial Sequence
  Description of Artificial Sequence: Synthetic oligonucleotide
aaacucacuggccucagcc

SEQ ID NO: 176138 - RNA, 19 nt, Artificial Sequence
  Description of Artificial Sequence: Synthetic oligonucleotide
aauauaugcggcuaugacu

SEQ ID NO: 176139 - RNA, 19 nt, Artificial Sequence
  Description of Artificial Sequence: Synthetic oligonucleotide
aaauaguugguucuguccu

SEQ ID NO: 176140 - RNA, 19 nt, Artificial Sequence
  Description of Artificial Sequence: Synthetic oligonucleotide
uaaggauauauauauauau

SEQ ID NO: 176141 - RNA, 19 nt, Artificial Sequence
  Description of Artificial Sequence: Synthetic oligonucleotide
aaagggacgguuugcaggg

SEQ ID NO: 176142 - RNA, 19 nt, Artificial Sequence
  Description of Artificial Sequence: Synthetic oligonucleotide
gauauauauauauauauau

SEQ ID NO: 176143 - RNA, 19 nt, Artificial Sequence
  Description of Artificial Sequence: Synthetic oligonucleotide
aggauauauauauauauau

SEQ ID NO: 176144 - RNA, 19 nt, Artificial Sequence
  Description of Artificial Sequence: Synthetic oligonucleotide
ggguuaggcacuuagaucg

SEQ ID NO: 176145 - RNA, 19 nt, Artificial Sequence
  Description of Artificial Sequence: Synthetic oligonucleotide
ucuaauuuuccacuggaaa

SEQ ID NO: 176146 - RNA, 19 nt, Artificial Sequence
  Description of Artificial Sequence: Synthetic oligonucleotide
aauauuguguacuuccuua

SEQ ID NO: 176147 - RNA, 19 nt, Artificial Sequence
  Description of Artificial Sequence: Synthetic oligonucleotide
uauauauauauauauuauu

SEQ ID NO: 176148 - RNA, 19 nt, Artificial Sequence
  Description of Artificial Sequence: Synthetic oligonucleotide
ucaaucaacagcaggcgcc

SEQ ID NO: 176149 - RNA, 19 nt, Artificial Sequence
  Description of Artificial Sequence: Synthetic oligonucleotide
aaacaagaacagcaggcag

SEQ ID NO: 176150 - RNA, 19 nt, Artificial Sequence
  Description of Artificial Sequence: Synthetic oligonucleotide
uauauauauauauuauuuu

SEQ ID NO: 176151 - RNA, 19 nt, Artificial Sequence
  Description of Artificial Sequence: Synthetic oligonucleotide
uuaguagaggcggugaggg

SEQ ID NO: 176152 - RNA, 19 nt, Artificial Sequence
  Description of Artificial Sequence: Synthetic oligonucleotide
aaugacgggccuguggugc

SEQ ID NO: 176153 - RNA, 19 nt, Artificial Sequence
  Description of Artificial Sequence: Synthetic oligonucleotide
auaugcugugggcaaaacc

SEQ ID NO: 176154 - RNA, 19 nt, Artificial Sequence
  Description of Artificial Sequence: Synthetic oligonucleotide
agagggucuggccaggucc

SEQ ID NO: 176155 - RNA, 19 nt, Artificial Sequence
  Description of Artificial Sequence: Synthetic oligonucleotide
uauuucauguaaucgcuug

SEQ ID NO: 176156 - RNA, 19 nt, Artificial Sequence
  Description of Artificial Sequence: Synthetic oligonucleotide
uuagguaaauaguugguuc

SEQ ID NO: 176157 - RNA, 19 nt, Artificial Sequence
  Description of Artificial Sequence: Synthetic oligonucleotide
auauaugcggcuaugacug

SEQ ID NO: 176158 - RNA, 19 nt, Artificial Sequence
  Description of Artificial Sequence: Synthetic oligonucleotide
agauuuguccaucucgguc

SEQ ID NO: 176159 - RNA, 19 nt, Artificial Sequence
  Description of Artificial Sequence: Synthetic oligonucleotide
auugcauagagagacaugu

SEQ ID NO: 176160 - RNA, 19 nt, Artificial Sequence
  Description of Artificial Sequence: Synthetic oligonucleotide
uuugguaaggauauauaua

SEQ ID NO: 176161 - RNA, 19 nt, Artificial Sequence
  Description of Artificial Sequence: Synthetic oligonucleotide
auauauauauauauuauuu

SEQ ID NO: 176162 - RNA, 19 nt, Artificial Sequence
  Description of Artificial Sequence: Synthetic oligonucleotide
cuuauggcaauccuccugc

SEQ ID NO: 176163 - RNA, 19 nt, Artificial Sequence
  Description of Artificial Sequence: Synthetic oligonucleotide
uaauauaugcggcuaugac

SEQ ID NO: 176164 - RNA, 19 nt, Artificial Sequence
  Description of Artificial Sequence: Synthetic oligonucleotide
cugugcacugcaaugacgg

SEQ ID NO: 176165 - RNA, 19 nt, Artificial Sequence
  Description of Artificial Sequence: Synthetic oligonucleotide
cuagauagugaccuccgcg

SEQ ID NO: 176166 - RNA, 19 nt, Artificial Sequence
  Description of Artificial Sequence: Synthetic oligonucleotide
uuuuaguagaggcggugag

SEQ ID NO: 176167 - RNA, 19 nt, Artificial Sequence
  Description of Artificial Sequence: Synthetic oligonucleotide
ugcaguuagguaaauaguu

SEQ ID NO: 176168 - RNA, 19 nt, Artificial Sequence
  Description of Artificial Sequence: Synthetic oligonucleotide
uccgcgauguccccaaugg

SEQ ID NO: 176169 - RNA, 19 nt, Artificial Sequence
  Description of Artificial Sequence: Synthetic oligonucleotide
uacaccuagauagugaccu

SEQ ID NO: 176170 - RNA, 19 nt, Artificial Sequence
  Description of Artificial Sequence: Synthetic oligonucleotide
aaccaugaccaauauugug

SEQ ID NO: 176171 - RNA, 19 nt, Artificial Sequence
  Description of Artificial Sequence: Synthetic oligonucleotide
agcuccgugacacugaaca

SEQ ID NO: 176172 - RNA, 19 nt, Artificial Sequence
  Description of Artificial Sequence: Synthetic oligonucleotide
gaaguauagggacagcgca

SEQ ID NO: 176173 - RNA, 19 nt, Artificial Sequence
  Description of Artificial Sequence: Synthetic oligonucleotide
ucaugcacgcagcagcccg

SEQ ID NO: 176174 - RNA, 19 nt, Artificial Sequence
  Description of Artificial Sequence: Synthetic oligonucleotide
guagggaagaaacaagaac

SEQ ID NO: 176175 - RNA, 19 nt, Artificial Sequence
  Description of Artificial Sequence: Synthetic oligonucleotide
aauaguugguucuguccug

SEQ ID NO: 176176 - RNA, 19 nt, Artificial Sequence
  Description of Artificial Sequence: Synthetic oligonucleotide
uuaggcacuuagaucgcgg

SEQ ID NO: 176177 - RNA, 19 nt, Artificial Sequence
  Description of Artificial Sequence: Synthetic oligonucleotide
agaaguauagggacagcgc

SEQ ID NO: 176178 - RNA, 19 nt, Artificial Sequence
  Description of Artificial Sequence: Synthetic oligonucleotide
acuugugccgcuugcuccc

SEQ ID NO: 176179 - RNA, 19 nt, Artificial Sequence
  Description of Artificial Sequence: Synthetic oligonucleotide
auauauauauauauauuau

SEQ ID NO: 176180 - RNA, 19 nt, Artificial Sequence
  Description of Artificial Sequence: Synthetic oligonucleotide
gucacuacaggugugcggg

SEQ ID NO: 176181 - RNA, 19 nt, Artificial Sequence
  Description of Artificial Sequence: Synthetic oligonucleotide
auggagcccgacuugugcc

SEQ ID NO: 176182 - RNA, 19 nt, Artificial Sequence
  Description of Artificial Sequence: Synthetic oligonucleotide
uuggcaaacaccgucggug

SEQ ID NO: 176183 - RNA, 19 nt, Artificial Sequence
  Description of Artificial Sequence: Synthetic oligonucleotide
cugaaacuucccaugugcg

SEQ ID NO: 176184 - RNA, 19 nt, Artificial Sequence
  Description of Artificial Sequence: Synthetic oligonucleotide
cagaaguauagggacagcg

SEQ ID NO: 176185 - RNA, 19 nt, Artificial Sequence
  Description of Artificial Sequence: Synthetic oligonucleotide
aaauaccaccccuuuugga

SEQ ID NO: 176186 - RNA, 19 nt, Artificial Sequence
  Description of Artificial Sequence: Synthetic oligonucleotide
ugcggugaauaagagcugg

SEQ ID NO: 176187 - RNA, 19 nt, Artificial Sequence
  Description of Artificial Sequence: Synthetic oligonucleotide
acaggcaugugcuaccaug

SEQ ID NO: 176188 - RNA, 19 nt, Artificial Sequence
  Description of Artificial Sequence: Synthetic oligonucleotide
gggagauuuguccaucucg

SEQ ID NO: 176189 - RNA, 19 nt, Artificial Sequence
  Description of Artificial Sequence: Synthetic oligonucleotide
uccuuucaaacgagguccg

SEQ ID NO: 176190 - RNA, 19 nt, Artificial Sequence
  Description of Artificial Sequence: Synthetic oligonucleotide
aauaugcugugggcaaaac

SEQ ID NO: 176191 - RNA, 19 nt, Artificial Sequence
  Description of Artificial Sequence: Synthetic oligonucleotide
agguguaguagucgccgcc

SEQ ID NO: 176192 - RNA, 19 nt, Artificial Sequence
  Description of Artificial Sequence: Synthetic oligonucleotide
cugucaugcacgcagcagc

SEQ ID NO: 176193 - RNA, 19 nt, Artificial Sequence
  Description of Artificial Sequence: Synthetic oligonucleotide
aaggauauauauauauaua

SEQ ID NO: 176194 - RNA, 19 nt, Artificial Sequence
  Description of Artificial Sequence: Synthetic oligonucleotide
cauguccuuucaaacgagg

SEQ ID NO: 176195 - RNA, 19 nt, Artificial Sequence
  Description of Artificial Sequence: Synthetic oligonucleotide
gauggcuguguguggaaag

SEQ ID NO: 176196 - RNA, 19 nt, Artificial Sequence
  Description of Artificial Sequence: Synthetic oligonucleotide
gacgaagcucuccuggaag

SEQ ID NO: 176197 - RNA, 19 nt, Artificial Sequence
  Description of Artificial Sequence: Synthetic oligonucleotide
caggaaguaaggcacuggc

SEQ ID NO: 176198 - RNA, 19 nt, Artificial Sequence
  Description of Artificial Sequence: Synthetic oligonucleotide
cuuagaucgcggcaccucc

SEQ ID NO: 176199 - RNA, 19 nt, Artificial Sequence
  Description of Artificial Sequence: Synthetic oligonucleotide
ugcuaccaugcccaguucc

SEQ ID NO: 176200 - RNA, 19 nt, Artificial Sequence
  Description of Artificial Sequence: Synthetic oligonucleotide
accaugaccaauauugugu

SEQ ID NO: 176201 - RNA, 19 nt, Artificial Sequence
  Description of Artificial Sequence: Synthetic oligonucleotide
uguguacuuccuuaauagu

SEQ ID NO: 176202 - RNA, 19 nt, Artificial Sequence
  Description of Artificial Sequence: Synthetic oligonucleotide
uguugaagggagauuuguc

SEQ ID NO: 176203 - RNA, 19 nt, Artificial Sequence
  Description of Artificial Sequence: Synthetic oligonucleotide
ugucaugcacgcagcagcc

SEQ ID NO: 176204 - RNA, 19 nt, Artificial Sequence
  Description of Artificial Sequence: Synthetic oligonucleotide
auauauauauauauauaua

SEQ ID NO: 176205 - RNA, 19 nt, Artificial Sequence
  Description of Artificial Sequence: Synthetic oligonucleotide
auauauauauauauauauu

SEQ ID NO: 176206 - RNA, 19 nt, Artificial Sequence
  Description of Artificial Sequence: Synthetic oligonucleotide
cagcucuuaucccuggugg

SEQ ID NO: 176207 - RNA, 19 nt, Artificial Sequence
  Description of Artificial Sequence: Synthetic oligonucleotide
aucccuccguccuaauccc

SEQ ID NO: 176208 - RNA, 19 nt, Artificial Sequence
  Description of Artificial Sequence: Synthetic oligonucleotide
agugaccuccgcgaugucc

SEQ ID NO: 176209 - RNA, 19 nt, Artificial Sequence
  Description of Artificial Sequence: Synthetic oligonucleotide
aggugugcgggacaccugg

SEQ ID NO: 176210 - RNA, 19 nt, Artificial Sequence
  Description of Artificial Sequence: Synthetic oligonucleotide
agcaaccaaaaugaguuug

SEQ ID NO: 176211 - RNA, 19 nt, Artificial Sequence
  Description of Artificial Sequence: Synthetic oligonucleotide
gaugccucccucgaugucc

SEQ ID NO: 176212 - RNA, 19 nt, Artificial Sequence
  Description of Artificial Sequence: Synthetic oligonucleotide
agcucuuaucccugguggg

SEQ ID NO: 176213 - RNA, 19 nt, Artificial Sequence
  Description of Artificial Sequence: Synthetic oligonucleotide
uagaucgcggcaccucccg

SEQ ID NO: 176214 - RNA, 19 nt, Artificial Sequence
  Description of Artificial Sequence: Synthetic oligonucleotide
ugucgcggggccuuaagca

SEQ ID NO: 176215 - RNA, 19 nt, Artificial Sequence
  Description of Artificial Sequence: Synthetic oligonucleotide
auauuguguacuuccuuaa

SEQ ID NO: 176216 - RNA, 19 nt, Artificial Sequence
  Description of Artificial Sequence: Synthetic oligonucleotide
gauagugaccuccgcgaug

SEQ ID NO: 176217 - RNA, 19 nt, Artificial Sequence
  Description of Artificial Sequence: Synthetic oligonucleotide
aauugcauagagagacaug

SEQ ID NO: 176218 - RNA, 19 nt, Artificial Sequence
  Description of Artificial Sequence: Synthetic oligonucleotide
gaugcgugcggugaauaag

SEQ ID NO: 176219 - RNA, 19 nt, Artificial Sequence
  Description of Artificial Sequence: Synthetic oligonucleotide
ggaaaguagguggaggccg

SEQ ID NO: 176220 - RNA, 19 nt, Artificial Sequence
  Description of Artificial Sequence: Synthetic oligonucleotide
ugcaagaggaucccuccgu

SEQ ID NO: 176221 - RNA, 19 nt, Artificial Sequence
  Description of Artificial Sequence: Synthetic oligonucleotide
ugcgacugcuacucguggg

SEQ ID NO: 176222 - RNA, 19 nt, Artificial Sequence
  Description of Artificial Sequence: Synthetic oligonucleotide
cuacucgugggcgagcugg

SEQ ID NO: 176223 - RNA, 19 nt, Artificial Sequence
  Description of Artificial Sequence: Synthetic oligonucleotide
cuccgugacacugaacacg

SEQ ID NO: 176224 - RNA, 19 nt, Artificial Sequence
  Description of Artificial Sequence: Synthetic oligonucleotide
uuauuucauguaaucgcuu

SEQ ID NO: 176225 - RNA, 19 nt, Artificial Sequence
  Description of Artificial Sequence: Synthetic oligonucleotide
gguaaggauauauauauau

SEQ ID NO: 176226 - RNA, 19 nt, Artificial Sequence
  Description of Artificial Sequence: Synthetic oligonucleotide
gacgggugaggacuccugg

SEQ ID NO: 176227 - RNA, 19 nt, Artificial Sequence
  Description of Artificial Sequence: Synthetic oligonucleotide
aaucccgcugugcacugca

SEQ ID NO: 176228 - RNA, 19 nt, Artificial Sequence
  Description of Artificial Sequence: Synthetic oligonucleotide
uaggcacuuagaucgcggc

SEQ ID NO: 176229 - RNA, 19 nt, Artificial Sequence
  Description of Artificial Sequence: Synthetic oligonucleotide
augugcgagaggaggaggc

SEQ ID NO: 176230 - RNA, 19 nt, Artificial Sequence
  Description of Artificial Sequence: Synthetic oligonucleotide
uuagaucgcggcaccuccc

SEQ ID NO: 176231 - RNA, 19 nt, Artificial Sequence
  Description of Artificial Sequence: Synthetic oligonucleotide
uuuugcaguagggaagaaa

SEQ ID NO: 176232 - RNA, 19 nt, Artificial Sequence
  Description of Artificial Sequence: Synthetic oligonucleotide
aacacgccggacgugacga

SEQ ID NO: 176233 - RNA, 19 nt, Artificial Sequence
  Description of Artificial Sequence: Synthetic oligonucleotide
ucuagcccaggcuggaccu

SEQ ID NO: 176234 - RNA, 19 nt, Artificial Sequence
  Description of Artificial Sequence: Synthetic oligonucleotide
uggagcccgacuugugccg

SEQ ID NO: 176235 - RNA, 19 nt, Artificial Sequence
  Description of Artificial Sequence: Synthetic oligonucleotide
gaacacgccggacgugacg

SEQ ID NO: 176236 - RNA, 19 nt, Artificial Sequence
  Description of Artificial Sequence: Synthetic oligonucleotide
guuuguaauauaugcggcu

SEQ ID NO: 176237 - RNA, 19 nt, Artificial Sequence
  Description of Artificial Sequence: Synthetic oligonucleotide
aguugcgacugcuacucgu

SEQ ID NO: 176238 - RNA, 19 nt, Artificial Sequence
  Description of Artificial Sequence: Synthetic oligonucleotide
uaggcgcauccacaaaaca

SEQ ID NO: 176239 - RNA, 19 nt, Artificial Sequence
  Description of Artificial Sequence: Synthetic oligonucleotide
cuuggagggucccugagga

SEQ ID NO: 176240 - RNA, 19 nt, Artificial Sequence
  Description of Artificial Sequence: Synthetic oligonucleotide
agggagauuuguccaucuc

SEQ ID NO: 176241 - RNA, 19 nt, Artificial Sequence
  Description of Artificial Sequence: Synthetic oligonucleotide
ugugcgggacaccuggauc

SEQ ID NO: 176242 - RNA, 19 nt, Artificial Sequence
  Description of Artificial Sequence: Synthetic oligonucleotide
cuacaccuagauagugacc

SEQ ID NO: 176243 - RNA, 19 nt, Artificial Sequence
  Description of Artificial Sequence: Synthetic oligonucleotide
ugcgugcggugaauaagag

SEQ ID NO: 176244 - RNA, 19 nt, Artificial Sequence
  Description of Artificial Sequence: Synthetic oligonucleotide
acgagguccgcaaggaggg

SEQ ID NO: 176245 - RNA, 19 nt, Artificial Sequence
  Description of Artificial Sequence: Synthetic oligonucleotide
gacaaauugcauagagaga

SEQ ID NO: 176246 - RNA, 19 nt, Artificial Sequence
  Description of Artificial Sequence: Synthetic oligonucleotide
uaugcggcuaugacuggaa

SEQ ID NO: 176247 - RNA, 19 nt, Artificial Sequence
  Description of Artificial Sequence: Synthetic oligonucleotide
ucccggucacuacaggugu

SEQ ID NO: 176248 - RNA, 19 nt, Artificial Sequence
  Description of Artificial Sequence: Synthetic oligonucleotide
guugagaugcggcggguac

SEQ ID NO: 176249 - RNA, 19 nt, Artificial Sequence
  Description of Artificial Sequence: Synthetic oligonucleotide
ucggcuaucccagguacca

SEQ ID NO: 176250 - RNA, 19 nt, Artificial Sequence
  Description of Artificial Sequence: Synthetic oligonucleotide
caccuagauagugaccucc

SEQ ID NO: 176251 - RNA, 19 nt, Artificial Sequence
  Description of Artificial Sequence: Synthetic oligonucleotide
cuuaggcgcauccacaaaa

SEQ ID NO: 176252 - RNA, 19 nt, Artificial Sequence
  Description of Artificial Sequence: Synthetic oligonucleotide
cuugcguggaugcgugcgg

SEQ ID NO: 176253 - RNA, 19 nt, Artificial Sequence
  Description of Artificial Sequence: Synthetic oligonucleotide
guuaggcacuuagaucgcg

SEQ ID NO: 176254 - RNA, 19 nt, Artificial Sequence
  Description of Artificial Sequence: Synthetic oligonucleotide
uguccuccguccaguugcg

SEQ ID NO: 176255 - RNA, 19 nt, Artificial Sequence
  Description of Artificial Sequence: Synthetic oligonucleotide
gaucgcggcaccucccgcc

SEQ ID NO: 176256 - RNA, 19 nt, Artificial Sequence
  Description of Artificial Sequence: Synthetic oligonucleotide
cauguaaucgcuugucugu

SEQ ID NO: 176257 - RNA, 19 nt, Artificial Sequence
  Description of Artificial Sequence: Synthetic oligonucleotide
agguaaauaguugguucug

SEQ ID NO: 176258 - RNA, 19 nt, Artificial Sequence
  Description of Artificial Sequence: Synthetic oligonucleotide
ccuacaccuagauagugac

SEQ ID NO: 176259 - RNA, 19 nt, Artificial Sequence
  Description of Artificial Sequence: Synthetic oligonucleotide
ggcuaucccagguaccagg

SEQ ID NO: 176260 - RNA, 19 nt, Artificial Sequence
  Description of Artificial Sequence: Synthetic oligonucleotide
ggcuaugacuggaauaugc

SEQ ID NO: 176261 - RNA, 19 nt, Artificial Sequence
  Description of Artificial Sequence: Synthetic oligonucleotide
gaagacgugggagggcgag

SEQ ID NO: 176262 - RNA, 19 nt, Artificial Sequence
  Description of Artificial Sequence: Synthetic oligonucleotide
ggagggguuaggcacuuag

SEQ ID NO: 176263 - RNA, 19 nt, Artificial Sequence
  Description of Artificial Sequence: Synthetic oligonucleotide
guaaggauauauauauaua

SEQ ID NO: 176264 - RNA, 19 nt, Artificial Sequence
  Description of Artificial Sequence: Synthetic oligonucleotide
uaauugcugggagucggca

SEQ ID NO: 176265 - RNA, 19 nt, Artificial Sequence
  Description of Artificial Sequence: Synthetic oligonucleotide
ggagaugccucccucgaug

SEQ ID NO: 176266 - RNA, 19 nt, Artificial Sequence
  Description of Artificial Sequence: Synthetic oligonucleotide
aaacaccgucgguggggac

SEQ ID NO: 176267 - RNA, 19 nt, Artificial Sequence
  Description of Artificial Sequence: Synthetic oligonucleotide
aaguuggguccccgucccg

SEQ ID NO: 176268 - RNA, 19 nt, Artificial Sequence
  Description of Artificial Sequence: Synthetic oligonucleotide
uacucgugggcgagcuggg

SEQ ID NO: 176269 - RNA, 19 nt, Artificial Sequence
  Description of Artificial Sequence: Synthetic oligonucleotide
accuagauagugaccuccg

SEQ ID NO: 176270 - RNA, 19 nt, Artificial Sequence
  Description of Artificial Sequence: Synthetic oligonucleotide
aaucaacagcaggcgccac

SEQ ID NO: 176271 - RNA, 19 nt, Artificial Sequence
  Description of Artificial Sequence: Synthetic oligonucleotide
agaucgcggcaccucccgc

SEQ ID NO: 176272 - RNA, 19 nt, Artificial Sequence
  Description of Artificial Sequence: Synthetic oligonucleotide
agggcgagcucggcuaucc

SEQ ID NO: 176273 - RNA, 19 nt, Artificial Sequence
  Description of Artificial Sequence: Synthetic oligonucleotide
acuacaggugugcgggaca

SEQ ID NO: 176274 - RNA, 19 nt, Artificial Sequence
  Description of Artificial Sequence: Synthetic oligonucleotide
ggugcuuaggcgcauccac

SEQ ID NO: 176275 - RNA, 19 nt, Artificial Sequence
  Description of Artificial Sequence: Synthetic oligonucleotide
guaguagucgccgccagga

SEQ ID NO: 176276 - RNA, 19 nt, Artificial Sequence
  Description of Artificial Sequence: Synthetic oligonucleotide
aguuggguccccgucccgg

SEQ ID NO: 176277 - RNA, 19 nt, Artificial Sequence
  Description of Artificial Sequence: Synthetic oligonucleotide
cugcaagaggaucccuccg

SEQ ID NO: 176278 - RNA, 19 nt, Artificial Sequence
  Description of Artificial Sequence: Synthetic oligonucleotide
ucuucaccggggaggagau

SEQ ID NO: 176279 - RNA, 19 nt, Artificial Sequence
  Description of Artificial Sequence: Synthetic oligonucleotide
auaguugguucuguccuga

SEQ ID NO: 176280 - RNA, 19 nt, Artificial Sequence
  Description of Artificial Sequence: Synthetic oligonucleotide
ucgcggggccuuaagcacc

SEQ ID NO: 176281 - RNA, 19 nt, Artificial Sequence
  Description of Artificial Sequence: Synthetic oligonucleotide
cuggaauaugcugugggca

SEQ ID NO: 176282 - RNA, 19 nt, Artificial Sequence
  Description of Artificial Sequence: Synthetic oligonucleotide
caugcacgcagcagcccgg

SEQ ID NO: 176283 - RNA, 19 nt, Artificial Sequence
  Description of Artificial Sequence: Synthetic oligonucleotide
ggauauauauauauauaua

SEQ ID NO: 176284 - RNA, 19 nt, Artificial Sequence
  Description of Artificial Sequence: Synthetic oligonucleotide
ggggacgggcuguugaagg

SEQ ID NO: 176285 - RNA, 19 nt, Artificial Sequence
  Description of Artificial Sequence: Synthetic oligonucleotide
ugguugggaagguuuuguc

SEQ ID NO: 176286 - RNA, 19 nt, Artificial Sequence
  Description of Artificial Sequence: Synthetic oligonucleotide
cuuucaaacgagguccgca

SEQ ID NO: 176287 - RNA, 19 nt, Artificial Sequence
  Description of Artificial Sequence: Synthetic oligonucleotide
agauagugaccuccgcgau

SEQ ID NO: 176288 - RNA, 19 nt, Artificial Sequence
  Description of Artificial Sequence: Synthetic oligonucleotide
caaauugcauagagagaca

SEQ ID NO: 176289 - RNA, 19 nt, Artificial Sequence
  Description of Artificial Sequence: Synthetic oligonucleotide
guugcgacugcuacucgug

SEQ ID NO: 176290 - RNA, 19 nt, Artificial Sequence
  Description of Artificial Sequence: Synthetic oligonucleotide
aggcgagggacaccagauc

SEQ ID NO: 176291 - RNA, 19 nt, Artificial Sequence
  Description of Artificial Sequence: Synthetic oligonucleotide
auaagagcugggguacaug

SEQ ID NO: 176292 - RNA, 19 nt, Artificial Sequence
  Description of Artificial Sequence: Synthetic oligonucleotide
ugugcgagaggaggaggcc

SEQ ID NO: 176293 - RNA, 19 nt, Artificial Sequence
  Description of Artificial Sequence: Synthetic oligonucleotide
ggggccuuaagcaccaugc

SEQ ID NO: 176294 - RNA, 19 nt, Artificial Sequence
  Description of Artificial Sequence: Synthetic oligonucleotide
auaccaccccuuuuggauu

SEQ ID NO: 176295 - RNA, 19 nt, Artificial Sequence
  Description of Artificial Sequence: Synthetic oligonucleotide
caugcuuggagggucccug

SEQ ID NO: 176296 - RNA, 19 nt, Artificial Sequence
  Description of Artificial Sequence: Synthetic oligonucleotide
auggacguggcagggaagu

SEQ ID NO: 176297 - RNA, 19 nt, Artificial Sequence
  Description of Artificial Sequence: Synthetic oligonucleotide
ggcgagguguaguagucgc

SEQ ID NO: 176298 - RNA, 19 nt, Artificial Sequence
  Description of Artificial Sequence: Synthetic oligonucleotide
cucgauguccuccguccag

SEQ ID NO: 176299 - RNA, 19 nt, Artificial Sequence
  Description of Artificial Sequence: Synthetic oligonucleotide
gacgggcuguugaagggag

SEQ ID NO: 176300 - RNA, 19 nt, Artificial Sequence
  Description of Artificial Sequence: Synthetic oligonucleotide
ucgugggcgagcugggcga

SEQ ID NO: 176301 - RNA, 19 nt, Artificial Sequence
  Description of Artificial Sequence: Synthetic oligonucleotide
cugaggacccaccucguca

SEQ ID NO: 176302 - RNA, 19 nt, Artificial Sequence
  Description of Artificial Sequence: Synthetic oligonucleotide
ugggucgcaggcgagggac

SEQ ID NO: 176303 - RNA, 19 nt, Artificial Sequence
  Description of Artificial Sequence: Synthetic oligonucleotide
accccuuuuggauuuuauu

SEQ ID NO: 176304 - RNA, 19 nt, Artificial Sequence
  Description of Artificial Sequence: Synthetic oligonucleotide
aggcacuuagaucgcggca

SEQ ID NO: 176305 - RNA, 19 nt, Artificial Sequence
  Description of Artificial Sequence: Synthetic oligonucleotide
gacgugacgaagcucuccu

SEQ ID NO: 176306 - RNA, 19 nt, Artificial Sequence
  Description of Artificial Sequence: Synthetic oligonucleotide
aucccagguaccaggacug

SEQ ID NO: 176307 - RNA, 19 nt, Artificial Sequence
  Description of Artificial Sequence: Synthetic oligonucleotide
aggacccucccaggggucc

SEQ ID NO: 176308 - RNA, 19 nt, Artificial Sequence
  Description of Artificial Sequence: Synthetic oligonucleotide
ucuuaucccuggugggguc

SEQ ID NO: 176309 - RNA, 19 nt, Artificial Sequence
  Description of Artificial Sequence: Synthetic oligonucleotide
cucggcuaucccagguacc

SEQ ID NO: 176310 - RNA, 19 nt, Artificial Sequence
  Description of Artificial Sequence: Synthetic oligonucleotide
ugggcgugauggcaggguc

SEQ ID NO: 176311 - RNA, 19 nt, Artificial Sequence
  Description of Artificial Sequence: Synthetic oligonucleotide
agaugccucccucgauguc

SEQ ID NO: 176312 - RNA, 19 nt, Artificial Sequence
  Description of Artificial Sequence: Synthetic oligonucleotide
uccguccuaaucccacaaa

SEQ ID NO: 176313 - RNA, 19 nt, Artificial Sequence
  Description of Artificial Sequence: Synthetic oligonucleotide
ugaggacgggugaggacuc

SEQ ID NO: 176314 - RNA, 19 nt, Artificial Sequence
  Description of Artificial Sequence: Synthetic oligonucleotide
augcgugcggugaauaaga

SEQ ID NO: 176315 - RNA, 19 nt, Artificial Sequence
  Description of Artificial Sequence: Synthetic oligonucleotide
acgccggacgugacgaagc

SEQ ID NO: 176316 - RNA, 19 nt, Artificial Sequence
  Description of Artificial Sequence: Synthetic oligonucleotide
ugaagacgugggagggcga

SEQ ID NO: 176317 - RNA, 19 nt, Artificial Sequence
  Description of Artificial Sequence: Synthetic oligonucleotide
ccguccuaaucccacaaag

SEQ ID NO: 176318 - RNA, 19 nt, Artificial Sequence
  Description of Artificial Sequence: Synthetic oligonucleotide
gacguggcagggaagugca

SEQ ID NO: 176319 - RNA, 19 nt, Artificial Sequence
  Description of Artificial Sequence: Synthetic oligonucleotide
gucgcggggccuuaagcac

SEQ ID NO: 176320 - RNA, 19 nt, Artificial Sequence
  Description of Artificial Sequence: Synthetic oligonucleotide
ugaacacgccggacgugac

SEQ ID NO: 176321 - RNA, 19 nt, Artificial Sequence
  Description of Artificial Sequence: Synthetic oligonucleotide
aggcgcauccacaaaacaa

SEQ ID NO: 176322 - RNA, 19 nt, Artificial Sequence
  Description of Artificial Sequence: Synthetic oligonucleotide
gcaggcgccacagagcucc

SEQ ID NO: 176323 - RNA, 19 nt, Artificial Sequence
  Description of Artificial Sequence: Synthetic oligonucleotide
auaugcggcuaugacugga

SEQ ID NO: 176324 - RNA, 19 nt, Artificial Sequence
  Description of Artificial Sequence: Synthetic oligonucleotide
ggcacuuagaucgcggcac

SEQ ID NO: 176325 - RNA, 19 nt, Artificial Sequence
  Description of Artificial Sequence: Synthetic oligonucleotide
ucgauguccuccguccagu

SEQ ID NO: 176326 - RNA, 19 nt, Artificial Sequence
  Description of Artificial Sequence: Synthetic oligonucleotide
acaccgucgguggggacgg

SEQ ID NO: 176327 - RNA, 19 nt, Artificial Sequence
  Description of Artificial Sequence: Synthetic oligonucleotide
gccggguucaggucguagg

SEQ ID NO: 176328 - RNA, 19 nt, Artificial Sequence
  Description of Artificial Sequence: Synthetic oligonucleotide
gugucgcggggccuuaagc

SEQ ID NO: 176329 - RNA, 19 nt, Artificial Sequence
  Description of Artificial Sequence: Synthetic oligonucleotide
gggacgggcuguugaaggg

SEQ ID NO: 176330 - RNA, 19 nt, Artificial Sequence
  Description of Artificial Sequence: Synthetic oligonucleotide
ggcuguguguggaaaguag

SEQ ID NO: 176331 - RNA, 19 nt, Artificial Sequence
  Description of Artificial Sequence: Synthetic oligonucleotide
gucugggcgugauggcagg

SEQ ID NO: 176332 - RNA, 19 nt, Artificial Sequence
  Description of Artificial Sequence: Synthetic oligonucleotide
gcucuuaucccuggugggg

SEQ ID NO: 176333 - RNA, 19 nt, Artificial Sequence
  Description of Artificial Sequence: Synthetic oligonucleotide
uggagggcuugcguggaug

SEQ ID NO: 176334 - RNA, 19 nt, Artificial Sequence
  Description of Artificial Sequence: Synthetic oligonucleotide
gagggucgcgggcgggucg

SEQ ID NO: 176335 - RNA, 19 nt, Artificial Sequence
  Description of Artificial Sequence: Synthetic oligonucleotide
caccucgucaccccaucac

SEQ ID NO: 176336 - RNA, 19 nt, Artificial Sequence
  Description of Artificial Sequence: Synthetic oligonucleotide
gucccggucacuacaggug

SEQ ID NO: 176337 - RNA, 19 nt, Artificial Sequence
  Description of Artificial Sequence: Synthetic oligonucleotide
cgugcggugaauaagagcu

SEQ ID NO: 176338 - RNA, 19 nt, Artificial Sequence
  Description of Artificial Sequence: Synthetic oligonucleotide
guauagggacagcgcacac

SEQ ID NO: 176339 - RNA, 19 nt, Artificial Sequence
  Description of Artificial Sequence: Synthetic oligonucleotide
caaacgagguccgcaagga

SEQ ID NO: 176340 - RNA, 19 nt, Artificial Sequence
  Description of Artificial Sequence: Synthetic oligonucleotide
cuaucccagguaccaggac

SEQ ID NO: 176341 - RNA, 19 nt, Artificial Sequence
  Description of Artificial Sequence: Synthetic oligonucleotide
caaugacgggccuguggug

SEQ ID NO: 176342 - RNA, 19 nt, Artificial Sequence
  Description of Artificial Sequence: Synthetic oligonucleotide
gacugcuacucgugggcga

SEQ ID NO: 176343 - RNA, 19 nt, Artificial Sequence
  Description of Artificial Sequence: Synthetic oligonucleotide
guguggaaaguagguggag

SEQ ID NO: 176344 - RNA, 19 nt, Artificial Sequence
  Description of Artificial Sequence: Synthetic oligonucleotide
accgucgguggggacggcc

SEQ ID NO: 176345 - RNA, 19 nt, Artificial Sequence
  Description of Artificial Sequence: Synthetic oligonucleotide
acggccagcggaggucucc

SEQ ID NO: 176346 - RNA, 19 nt, Artificial Sequence
  Description of Artificial Sequence: Synthetic oligonucleotide
uaguagaggcggugagggu

SEQ ID NO: 176347 - RNA, 19 nt, Artificial Sequence
  Description of Artificial Sequence: Synthetic oligonucleotide
guuagguaaauaguugguu

SEQ ID NO: 176348 - RNA, 19 nt, Artificial Sequence
  Description of Artificial Sequence: Synthetic oligonucleotide
gcgacugcuacucgugggc

SEQ ID NO: 176349 - RNA, 19 nt, Artificial Sequence
  Description of Artificial Sequence: Synthetic oligonucleotide
cugaacacgccggacguga

SEQ ID NO: 176350 - RNA, 19 nt, Artificial Sequence
  Description of Artificial Sequence: Synthetic oligonucleotide
caaucaacagcaggcgcca

SEQ ID NO: 176351 - RNA, 19 nt, Artificial Sequence
  Description of Artificial Sequence: Synthetic oligonucleotide
ugcguggaugcgugcggug

SEQ ID NO: 176352 - RNA, 19 nt, Artificial Sequence
  Description of Artificial Sequence: Synthetic oligonucleotide
ucccgcugugcacugcaau

SEQ ID NO: 176353 - RNA, 19 nt, Artificial Sequence
  Description of Artificial Sequence: Synthetic oligonucleotide
gcuugcguggaugcgugcg

SEQ ID NO: 176354 - RNA, 19 nt, Artificial Sequence
  Description of Artificial Sequence: Synthetic oligonucleotide
gccgucugaggcaggaugg

SEQ ID NO: 176355 - RNA, 19 nt, Artificial Sequence
  Description of Artificial Sequence: Synthetic oligonucleotide
agggcuugcguggaugcgu

SEQ ID NO: 176356 - RNA, 19 nt, Artificial Sequence
  Description of Artificial Sequence: Synthetic oligonucleotide
acgugacgaagcucuccug

SEQ ID NO: 176357 - RNA, 19 nt, Artificial Sequence
  Description of Artificial Sequence: Synthetic oligonucleotide
ggccgucugaggcaggaug

SEQ ID NO: 176358 - RNA, 19 nt, Artificial Sequence
  Description of Artificial Sequence: Synthetic oligonucleotide
ggggucgggagcugcgugg

SEQ ID NO: 176359 - RNA, 19 nt, Artificial Sequence
  Description of Artificial Sequence: Synthetic oligonucleotide
uggggacaaauugcauaga

SEQ ID NO: 176360 - RNA, 19 nt, Artificial Sequence
  Description of Artificial Sequence: Synthetic oligonucleotide
ugugucccugauggauaag

SEQ ID NO: 176361 - RNA, 19 nt, Artificial Sequence
  Description of Artificial Sequence: Synthetic oligonucleotide
cacuacaggugugcgggac

SEQ ID NO: 176362 - RNA, 19 nt, Artificial Sequence
  Description of Artificial Sequence: Synthetic oligonucleotide
aggcggugagggucgcggg

SEQ ID NO: 176363 - RNA, 19 nt, Artificial Sequence
  Description of Artificial Sequence: Synthetic oligonucleotide
gggacaaauugcauagaga

SEQ ID NO: 176364 - RNA, 19 nt, Artificial Sequence
  Description of Artificial Sequence: Synthetic oligonucleotide
ggacguggcagggaagugc

SEQ ID NO: 176365 - RNA, 19 nt, Artificial Sequence
  Description of Artificial Sequence: Synthetic oligonucleotide
guaaucgcuugucuguuuu

SEQ ID NO: 176366 - RNA, 19 nt, Artificial Sequence
  Description of Artificial Sequence: Synthetic oligonucleotide
cugcguggccucucaugcc

SEQ ID NO: 176367 - RNA, 19 nt, Artificial Sequence
  Description of Artificial Sequence: Synthetic oligonucleotide
ggcgcauccacaaaacaaa

SEQ ID NO: 176368 - RNA, 19 nt, Artificial Sequence
  Description of Artificial Sequence: Synthetic oligonucleotide
gagggguuaggcacuuaga

SEQ ID NO: 176369 - RNA, 19 nt, Artificial Sequence
  Description of Artificial Sequence: Synthetic oligonucleotide
caguugcgacugcuacucg

SEQ ID NO: 176370 - RNA, 19 nt, Artificial Sequence
  Description of Artificial Sequence: Synthetic oligonucleotide
ugaccuccgcgaugucccc

SEQ ID NO: 176371 - RNA, 19 nt, Artificial Sequence
  Description of Artificial Sequence: Synthetic oligonucleotide
gugccgggcggagagcagg

SEQ ID NO: 176372 - RNA, 19 nt, Artificial Sequence
  Description of Artificial Sequence: Synthetic oligonucleotide
cuccgcgauguccccaaug

SEQ ID NO: 176373 - RNA, 19 nt, Artificial Sequence
  Description of Artificial Sequence: Synthetic oligonucleotide
aucgcggcaccucccgccu

SEQ ID NO: 176374 - RNA, 19 nt, Artificial Sequence
  Description of Artificial Sequence: Synthetic oligonucleotide
ccaguugcgacugcuacuc

SEQ ID NO: 176375 - RNA, 19 nt, Artificial Sequence
  Description of Artificial Sequence: Synthetic oligonucleotide
caccaugcaguuagguaaa

SEQ ID NO: 176376 - RNA, 19 nt, Artificial Sequence
  Description of Artificial Sequence: Synthetic oligonucleotide
guggaggccgucugaggca

SEQ ID NO: 176377 - RNA, 19 nt, Artificial Sequence
  Description of Artificial Sequence: Synthetic oligonucleotide
ggacgguuugcaggggacg

SEQ ID NO: 176378 - RNA, 19 nt, Artificial Sequence
  Description of Artificial Sequence: Synthetic oligonucleotide
uugcguggaugcgugcggu

SEQ ID NO: 176379 - RNA, 19 nt, Artificial Sequence
  Description of Artificial Sequence: Synthetic oligonucleotide
gcucggcuaucccagguac

SEQ ID NO: 176380 - RNA, 19 nt, Artificial Sequence
  Description of Artificial Sequence: Synthetic oligonucleotide
ccuagauagugaccuccgc

SEQ ID NO: 176381 - RNA, 19 nt, Artificial Sequence
  Description of Artificial Sequence: Synthetic oligonucleotide
cugaggacgggugaggacu

SEQ ID NO: 176382 - RNA, 19 nt, Artificial Sequence
  Description of Artificial Sequence: Synthetic oligonucleotide
uuggggacacccagcucuu

SEQ ID NO: 176383 - RNA, 19 nt, Artificial Sequence
  Description of Artificial Sequence: Synthetic oligonucleotide
uggacguggcagggaagug

SEQ ID NO: 176384 - RNA, 19 nt, Artificial Sequence
  Description of Artificial Sequence: Synthetic oligonucleotide
agcucggcuaucccaggua

SEQ ID NO: 176385 - RNA, 19 nt, Artificial Sequence
  Description of Artificial Sequence: Synthetic oligonucleotide
gcgugcggugaauaagagc

SEQ ID NO: 176386 - RNA, 19 nt, Artificial Sequence
  Description of Artificial Sequence: Synthetic oligonucleotide
aggcaccccaggguggguc

SEQ ID NO: 176387 - RNA, 19 nt, Artificial Sequence
  Description of Artificial Sequence: Synthetic oligonucleotide
gcugucaugcacgcagcag

SEQ ID NO: 176388 - RNA, 19 nt, Artificial Sequence
  Description of Artificial Sequence: Synthetic oligonucleotide
augcggcuaugacuggaau

SEQ ID NO: 176389 - RNA, 19 nt, Artificial Sequence
  Description of Artificial Sequence: Synthetic oligonucleotide
gcacuuagaucgcggcacc

SEQ ID NO: 176390 - RNA, 19 nt, Artificial Sequence
  Description of Artificial Sequence: Synthetic oligonucleotide
cacgccggacgugacgaag

SEQ ID NO: 176391 - RNA, 19 nt, Artificial Sequence
  Description of Artificial Sequence: Synthetic oligonucleotide
ccggguucaggucguaggc

SEQ ID NO: 176392 - RNA, 19 nt, Artificial Sequence
  Description of Artificial Sequence: Synthetic oligonucleotide
gcaagaggaucccuccguc

SEQ ID NO: 176393 - RNA, 19 nt, Artificial Sequence
  Description of Artificial Sequence: Synthetic oligonucleotide
gugggcggagggguuaggc

SEQ ID NO: 176394 - RNA, 19 nt, Artificial Sequence
  Description of Artificial Sequence: Synthetic oligonucleotide
caaacaccgucggugggga

SEQ ID NO: 176395 - RNA, 19 nt, Artificial Sequence
  Description of Artificial Sequence: Synthetic oligonucleotide
cacugcaaugacgggccug

SEQ ID NO: 176396 - RNA, 19 nt, Artificial Sequence
  Description of Artificial Sequence: Synthetic oligonucleotide
gucaugcacgcagcagccc

SEQ ID NO: 176397 - RNA, 19 nt, Artificial Sequence
  Description of Artificial Sequence: Synthetic oligonucleotide
gguguaguagucgccgcca

SEQ ID NO: 176398 - RNA, 19 nt, Artificial Sequence
  Description of Artificial Sequence: Synthetic oligonucleotide
gcgagcucggcuaucccag

SEQ ID NO: 176399 - RNA, 19 nt, Artificial Sequence
  Description of Artificial Sequence: Synthetic oligonucleotide
accuccgcgauguccccaa

SEQ ID NO: 176400 - RNA, 19 nt, Artificial Sequence
  Description of Artificial Sequence: Synthetic oligonucleotide
caggacucguguccacauc

SEQ ID NO: 176401 - RNA, 19 nt, Artificial Sequence
  Description of Artificial Sequence: Synthetic oligonucleotide
gguuaggcacuuagaucgc

SEQ ID NO: 176402 - RNA, 19 nt, Artificial Sequence
  Description of Artificial Sequence: Synthetic oligonucleotide
ggcgagcucggcuauccca

SEQ ID NO: 176403 - RNA, 19 nt, Artificial Sequence
  Description of Artificial Sequence: Synthetic oligonucleotide
gguaaauaguugguucugu

SEQ ID NO: 176404 - RNA, 19 nt, Artificial Sequence
  Description of Artificial Sequence: Synthetic oligonucleotide
acgguuugcaggggacgug

SEQ ID NO: 176405 - RNA, 19 nt, Artificial Sequence
  Description of Artificial Sequence: Synthetic oligonucleotide
gcggugaauaagagcuggg

SEQ ID NO: 176406 - RNA, 19 nt, Artificial Sequence
  Description of Artificial Sequence: Synthetic oligonucleotide
gacgguuugcaggggacgu

SEQ ID NO: 176407 - RNA, 19 nt, Artificial Sequence
  Description of Artificial Sequence: Synthetic oligonucleotide
ggugucgcggggccuuaag

SEQ ID NO: 176408 - RNA, 19 nt, Artificial Sequence
  Description of Artificial Sequence: Synthetic oligonucleotide
gcugggucgcaggcgaggg

SEQ ID NO: 176409 - RNA, 19 nt, Artificial Sequence
  Description of Artificial Sequence: Synthetic oligonucleotide
ggcgccacagagcucccac

SEQ ID NO: 176410 - RNA, 19 nt, Artificial Sequence
  Description of Artificial Sequence: Synthetic oligonucleotide
ggaucccuccguccuaauc

SEQ ID NO: 176411 - RNA, 19 nt, Artificial Sequence
  Description of Artificial Sequence: Synthetic oligonucleotide
ggacgugacgaagcucucc

SEQ ID NO: 176412 - RNA, 19 nt, Artificial Sequence
  Description of Artificial Sequence: Synthetic oligonucleotide
acgugccgggcggagagca

SEQ ID NO: 176413 - RNA, 19 nt, Artificial Sequence
  Description of Artificial Sequence: Synthetic oligonucleotide
gccucucaugccagggugg

SEQ ID NO: 176414 - RNA, 19 nt, Artificial Sequence
  Description of Artificial Sequence: Synthetic oligonucleotide
gagaugcggcggguaccgg

SEQ ID NO: 176415 - RNA, 19 nt, Artificial Sequence
  Description of Artificial Sequence: Synthetic oligonucleotide
gggcgagguguaguagucg

SEQ ID NO: 176416 - RNA, 19 nt, Artificial Sequence
  Description of Artificial Sequence: Synthetic oligonucleotide
ccaaaguaccugugggaca

SEQ ID NO: 176417 - RNA, 19 nt, Artificial Sequence
  Description of Artificial Sequence: Synthetic oligonucleotide
gaggacgggugaggacucc

SEQ ID NO: 176418 - RNA, 19 nt, Artificial Sequence
  Description of Artificial Sequence: Synthetic oligonucleotide
cccuacaccuagauaguga

SEQ ID NO: 176419 - RNA, 19 nt, Artificial Sequence
  Description of Artificial Sequence: Synthetic oligonucleotide
cuccguccuaaucccacaa

SEQ ID NO: 176420 - RNA, 19 nt, Artificial Sequence
  Description of Artificial Sequence: Synthetic oligonucleotide
ggaugcgugcggugaauaa

SEQ ID NO: 176421 - RNA, 19 nt, Artificial Sequence
  Description of Artificial Sequence: Synthetic oligonucleotide
ccagcggaggucucccgag

SEQ ID NO: 176422 - RNA, 19 nt, Artificial Sequence
  Description of Artificial Sequence: Synthetic oligonucleotide
ggacagcgcacaccucagc

SEQ ID NO: 176423 - RNA, 19 nt, Artificial Sequence
  Description of Artificial Sequence: Synthetic oligonucleotide
gucgccgccaggacucgug

SEQ ID NO: 176424 - RNA, 19 nt, Artificial Sequence
  Description of Artificial Sequence: Synthetic oligonucleotide
gcggcuaugacuggaauau

SEQ ID NO: 176425 - RNA, 19 nt, Artificial Sequence
  Description of Artificial Sequence: Synthetic oligonucleotide
ggcgguccaggcugcuggg

SEQ ID NO: 176426 - RNA, 19 nt, Artificial Sequence
  Description of Artificial Sequence: Synthetic oligonucleotide
gcuaucccagguaccagga

SEQ ID NO: 176427 - RNA, 19 nt, Artificial Sequence
  Description of Artificial Sequence: Synthetic oligonucleotide
uuaucccugguggggucuu

SEQ ID NO: 176428 - RNA, 19 nt, Artificial Sequence
  Description of Artificial Sequence: Synthetic oligonucleotide
gcaaucccgcugugcacug

SEQ ID NO: 176429 - RNA, 19 nt, Artificial Sequence
  Description of Artificial Sequence: Synthetic oligonucleotide
caaucccgcugugcacugc

SEQ ID NO: 176430 - RNA, 19 nt, Artificial Sequence
  Description of Artificial Sequence: Synthetic oligonucleotide
gacgugggagggcgagcuc

SEQ ID NO: 176431 - RNA, 19 nt, Artificial Sequence
  Description of Artificial Sequence: Synthetic oligonucleotide
gcaaccaaaaugaguuugu

SEQ ID NO: 176432 - RNA, 19 nt, Artificial Sequence
  Description of Artificial Sequence: Synthetic oligonucleotide
ccggacgugacgaagcucu

SEQ ID NO: 176433 - RNA, 19 nt, Artificial Sequence
  Description of Artificial Sequence: Synthetic oligonucleotide
cccuccguccuaaucccac

SEQ ID NO: 176434 - RNA, 19 nt, Artificial Sequence
  Description of Artificial Sequence: Synthetic oligonucleotide
ccggucacuacaggugugc

SEQ ID NO: 176435 - RNA, 19 nt, Artificial Sequence
  Description of Artificial Sequence: Synthetic oligonucleotide
cuuaagcaccaugcaguua

SEQ ID NO: 176436 - RNA, 19 nt, Artificial Sequence
  Description of Artificial Sequence: Synthetic oligonucleotide
cucgccuggucugggcgug

SEQ ID NO: 176437 - RNA, 19 nt, Artificial Sequence
  Description of Artificial Sequence: Synthetic oligonucleotide
caggacccucccagggguc

SEQ ID NO: 176438 - RNA, 19 nt, Artificial Sequence
  Description of Artificial Sequence: Synthetic oligonucleotide
agucggcagggagcuucuc

SEQ ID NO: 176439 - RNA, 19 nt, Artificial Sequence
  Description of Artificial Sequence: Synthetic oligonucleotide
gaugcggcggguaccggau

SEQ ID NO: 176440 - RNA, 19 nt, Artificial Sequence
  Description of Artificial Sequence: Synthetic oligonucleotide
cagcuccgugacacugaac

SEQ ID NO: 176441 - RNA, 19 nt, Artificial Sequence
  Description of Artificial Sequence: Synthetic oligonucleotide
gacgugccgggcggagagc

SEQ ID NO: 176442 - RNA, 19 nt, Artificial Sequence
  Description of Artificial Sequence: Synthetic oligonucleotide
cccgucccggucacuacag

SEQ ID NO: 176443 - RNA, 19 nt, Artificial Sequence
  Description of Artificial Sequence: Synthetic oligonucleotide
gggacgguuugcaggggac

SEQ ID NO: 176444 - RNA, 19 nt, Artificial Sequence
  Description of Artificial Sequence: Synthetic oligonucleotide
uagugaccuccgcgauguc

SEQ ID NO: 176445 - RNA, 19 nt, Artificial Sequence
  Description of Artificial Sequence: Synthetic oligonucleotide
ccccaugcuuggagggucc

SEQ ID NO: 176446 - RNA, 19 nt, Artificial Sequence
  Description of Artificial Sequence: Synthetic oligonucleotide
gggcuugcguggaugcgug

SEQ ID NO: 176447 - RNA, 19 nt, Artificial Sequence
  Description of Artificial Sequence: Synthetic oligonucleotide
caggggucccaaaguaccu

SEQ ID NO: 176448 - RNA, 19 nt, Artificial Sequence
  Description of Artificial Sequence: Synthetic oligonucleotide
ggacgggcuguugaaggga

SEQ ID NO: 176449 - RNA, 19 nt, Artificial Sequence
  Description of Artificial Sequence: Synthetic oligonucleotide
cacucuagcccaggcugga

SEQ ID NO: 176450 - RNA, 19 nt, Artificial Sequence
  Description of Artificial Sequence: Synthetic oligonucleotide
ggagcccgacuugugccgc

SEQ ID NO: 176451 - RNA, 19 nt, Artificial Sequence
  Description of Artificial Sequence: Synthetic oligonucleotide
agcaggcgccacagagcuc

SEQ ID NO: 176452 - RNA, 19 nt, Artificial Sequence
  Description of Artificial Sequence: Synthetic oligonucleotide
cgguuugcaggggacgugc

SEQ ID NO: 176453 - RNA, 19 nt, Artificial Sequence
  Description of Artificial Sequence: Synthetic oligonucleotide
ggucgcaggcgagggacac

SEQ ID NO: 176454 - RNA, 19 nt, Artificial Sequence
  Description of Artificial Sequence: Synthetic oligonucleotide
cucccaggggucccaaagu

SEQ ID NO: 176455 - RNA, 19 nt, Artificial Sequence
  Description of Artificial Sequence: Synthetic oligonucleotide
acacgccggacgugacgaa

SEQ ID NO: 176456 - RNA, 19 nt, Artificial Sequence
  Description of Artificial Sequence: Synthetic oligonucleotide
cuucaccggggaggagaug

SEQ ID NO: 176457 - RNA, 19 nt, Artificial Sequence
  Description of Artificial Sequence: Synthetic oligonucleotide
gcuacucgugggcgagcug

SEQ ID NO: 176458 - RNA, 19 nt, Artificial Sequence
  Description of Artificial Sequence: Synthetic oligonucleotide
gcuuaggcgcauccacaaa

SEQ ID NO: 176459 - RNA, 19 nt, Artificial Sequence
  Description of Artificial Sequence: Synthetic oligonucleotide
gccagcggaggucucccga

SEQ ID NO: 176460 - RNA, 19 nt, Artificial Sequence
  Description of Artificial Sequence: Synthetic oligonucleotide
cgacuugugccgcuugcuc

SEQ ID NO: 176461 - RNA, 19 nt, Artificial Sequence
  Description of Artificial Sequence: Synthetic oligonucleotide
gcgcauccacaaaacaaaa

SEQ ID NO: 176462 - RNA, 19 nt, Artificial Sequence
  Description of Artificial Sequence: Synthetic oligonucleotide
acgggcuguugaagggaga

SEQ ID NO: 176463 - RNA, 19 nt, Artificial Sequence
  Description of Artificial Sequence: Synthetic oligonucleotide
gccgggcucgccuggucug

SEQ ID NO: 176464 - RNA, 19 nt, Artificial Sequence
  Description of Artificial Sequence: Synthetic oligonucleotide
gucccggcuccccaccugu

SEQ ID NO: 176465 - RNA, 19 nt, Artificial Sequence
  Description of Artificial Sequence: Synthetic oligonucleotide
cugugccgggccccacauc

SEQ ID NO: 176466 - RNA, 19 nt, Artificial Sequence
  Description of Artificial Sequence: Synthetic oligonucleotide
cugggucgcaggcgaggga

SEQ ID NO: 176467 - RNA, 19 nt, Artificial Sequence
  Description of Artificial Sequence: Synthetic oligonucleotide
gcuccccaccuguuucuca

SEQ ID NO: 176468 - RNA, 19 nt, Artificial Sequence
  Description of Artificial Sequence: Synthetic oligonucleotide
gagcugggcgagguguagu

SEQ ID NO: 176469 - RNA, 19 nt, Artificial Sequence
  Description of Artificial Sequence: Synthetic oligonucleotide
gggcgagcucggcuauccc

SEQ ID NO: 176470 - RNA, 19 nt, Artificial Sequence
  Description of Artificial Sequence: Synthetic oligonucleotide
gguggcccggcuggguggc

SEQ ID NO: 176471 - RNA, 19 nt, Artificial Sequence
  Description of Artificial Sequence: Synthetic oligonucleotide
ucgccuggucugggcguga

SEQ ID NO: 176472 - RNA, 19 nt, Artificial Sequence
  Description of Artificial Sequence: Synthetic oligonucleotide
gguugagaugcggcgggua

SEQ ID NO: 176473 - RNA, 19 nt, Artificial Sequence
  Description of Artificial Sequence: Synthetic oligonucleotide
ccgucccggucacuacagg

SEQ ID NO: 176474 - RNA, 19 nt, Artificial Sequence
  Description of Artificial Sequence: Synthetic oligonucleotide
cggucacuacaggugugcg

SEQ ID NO: 176475 - RNA, 19 nt, Artificial Sequence
  Description of Artificial Sequence: Synthetic oligonucleotide
gacccucccagggguccca

SEQ ID NO: 176476 - RNA, 19 nt, Artificial Sequence
  Description of Artificial Sequence: Synthetic oligonucleotide
ggugggcggagggguuagg

SEQ ID NO: 176477 - RNA, 19 nt, Artificial Sequence
  Description of Artificial Sequence: Synthetic oligonucleotide
caggcagucaauggugcuu

SEQ ID NO: 176478 - RNA, 19 nt, Artificial Sequence
  Description of Artificial Sequence: Synthetic oligonucleotide
ccuuaagcaccaugcaguu

SEQ ID NO: 176479 - RNA, 19 nt, Artificial Sequence
  Description of Artificial Sequence: Synthetic oligonucleotide
ccuccguccuaaucccaca

SEQ ID NO: 176480 - RNA, 19 nt, Artificial Sequence
  Description of Artificial Sequence: Synthetic oligonucleotide
gcccgacuugugccgcuug

SEQ ID NO: 176481 - RNA, 19 nt, Artificial Sequence
  Description of Artificial Sequence: Synthetic oligonucleotide
ggacccucccagggguccc

SEQ ID NO: 176482 - RNA, 19 nt, Artificial Sequence
  Description of Artificial Sequence: Synthetic oligonucleotide
gagcccgacuugugccgcu

SEQ ID NO: 176483 - RNA, 19 nt, Artificial Sequence
  Description of Artificial Sequence: Synthetic oligonucleotide
aggcgccacagagcuccca

SEQ ID NO: 176484 - RNA, 19 nt, Artificial Sequence
  Description of Artificial Sequence: Synthetic oligonucleotide
ccucgauguccuccgucca

SEQ ID NO: 176485 - RNA, 19 nt, Artificial Sequence
  Description of Artificial Sequence: Synthetic oligonucleotide
ggggacgugccgggcggag

SEQ ID NO: 176486 - RNA, 19 nt, Artificial Sequence
  Description of Artificial Sequence: Synthetic oligonucleotide
aucccgcugugcacugcaa

SEQ ID NO: 176487 - RNA, 19 nt, Artificial Sequence
  Description of Artificial Sequence: Synthetic oligonucleotide
ggugugcgggacaccugga

SEQ ID NO: 176488 - RNA, 19 nt, Artificial Sequence
  Description of Artificial Sequence: Synthetic oligonucleotide
aggccgucugaggcaggau

SEQ ID NO: 176489 - RNA, 19 nt, Artificial Sequence
  Description of Artificial Sequence: Synthetic oligonucleotide
gacggccagcggaggucuc

SEQ ID NO: 176490 - RNA, 19 nt, Artificial Sequence
  Description of Artificial Sequence: Synthetic oligonucleotide
guggaugcgugcggugaau

SEQ ID NO: 176491 - RNA, 19 nt, Artificial Sequence
  Description of Artificial Sequence: Synthetic oligonucleotide
gcggcggguaccggauggc

SEQ ID NO: 176492 - RNA, 19 nt, Artificial Sequence
  Description of Artificial Sequence: Synthetic oligonucleotide
ccgggcucgccuggucugg

SEQ ID NO: 176493 - RNA, 19 nt, Artificial Sequence
  Description of Artificial Sequence: Synthetic oligonucleotide
gccggacgugacgaagcuc

SEQ ID NO: 176494 - RNA, 19 nt, Artificial Sequence
  Description of Artificial Sequence: Synthetic oligonucleotide
ccccgucccggucacuaca

SEQ ID NO: 176495 - RNA, 19 nt, Artificial Sequence
  Description of Artificial Sequence: Synthetic oligonucleotide
ggccgggcucgccuggucu

SEQ ID NO: 176496 - RNA, 19 nt, Artificial Sequence
  Description of Artificial Sequence: Synthetic oligonucleotide
caccggggaggagaugccu

SEQ ID NO: 176497 - RNA, 19 nt, Artificial Sequence
  Description of Artificial Sequence: Synthetic oligonucleotide
cgucccggucacuacaggu

SEQ ID NO: 176498 - RNA, 19 nt, Artificial Sequence
  Description of Artificial Sequence: Synthetic oligonucleotide
ggcggagggguuaggcacu

SEQ ID NO: 176499 - RNA, 19 nt, Artificial Sequence
  Description of Artificial Sequence: Synthetic oligonucleotide
gggacgugccgggcggaga

SEQ ID NO: 176500 - RNA, 19 nt, Artificial Sequence
  Description of Artificial Sequence: Synthetic oligonucleotide
cgugccgggcggagagcag

SEQ ID NO: 176501 - RNA, 19 nt, Artificial Sequence
  Description of Artificial Sequence: Synthetic oligonucleotide
ggcccggcuggguggccca

SEQ ID NO: 176502 - RNA, 19 nt, Artificial Sequence
  Description of Artificial Sequence: Synthetic oligonucleotide
cggcuaucccagguaccag

SEQ ID NO: 176503 - RNA, 19 nt, Artificial Sequence
  Description of Artificial Sequence: Synthetic oligonucleotide
gggcggagagcaggcgguc

SEQ ID NO: 176504 - RNA, 19 nt, Artificial Sequence
  Description of Artificial Sequence: Synthetic oligonucleotide
cggacgugacgaagcucuc

SEQ ID NO: 176505 - RNA, 19 nt, Artificial Sequence
  Description of Artificial Sequence: Synthetic oligonucleotide
guggcccggcuggguggcc

SEQ ID NO: 176506 - RNA, 19 nt, Artificial Sequence
  Description of Artificial Sequence: Synthetic oligonucleotide
ccgucugaggcaggaugga

SEQ ID NO: 176507 - RNA, 19 nt, Artificial Sequence
  Description of Artificial Sequence: Synthetic oligonucleotide
cguccaguugcgacugcua

SEQ ID NO: 176508 - RNA, 19 nt, Artificial Sequence
  Description of Artificial Sequence: Synthetic oligonucleotide
cgcggggccuuaagcacca

SEQ ID NO: 176509 - RNA, 19 nt, Artificial Sequence
  Description of Artificial Sequence: Synthetic oligonucleotide
caccgucgguggggacggc

SEQ ID NO: 176510 - RNA, 19 nt, Artificial Sequence
  Description of Artificial Sequence: Synthetic oligonucleotide
ggccucagcccuacaccua

SEQ ID NO: 176511 - RNA, 19 nt, Artificial Sequence
  Description of Artificial Sequence: Synthetic oligonucleotide
gcacuuccaccagccuucu

SEQ ID NO: 176512 - RNA, 19 nt, Artificial Sequence
  Description of Artificial Sequence: Synthetic oligonucleotide
cgggcucgccuggucuggg

SEQ ID NO: 176513 - RNA, 19 nt, Artificial Sequence
  Description of Artificial Sequence: Synthetic oligonucleotide
ccgcgauguccccaauggu

SEQ ID NO: 176514 - RNA, 19 nt, Artificial Sequence
  Description of Artificial Sequence: Synthetic oligonucleotide
ggacaaggguggggugccu

SEQ ID NO: 176515 - RNA, 19 nt, Artificial Sequence
  Description of Artificial Sequence: Synthetic oligonucleotide
ccugugccgggccccacau

SEQ ID NO: 176516 - RNA, 19 nt, Artificial Sequence
  Description of Artificial Sequence: Synthetic oligonucleotide
ccaugcuuggagggucccu

SEQ ID NO: 176517 - RNA, 19 nt, Artificial Sequence
  Description of Artificial Sequence: Synthetic oligonucleotide
gggugucgcggggccuuaa

SEQ ID NO: 176518 - RNA, 19 nt, Artificial Sequence
  Description of Artificial Sequence: Synthetic oligonucleotide
ggggugucgcggggccuua

SEQ ID NO: 176519 - RNA, 19 nt, Artificial Sequence
  Description of Artificial Sequence: Synthetic oligonucleotide
cgccggacgugacgaagcu

SEQ ID NO: 176520 - RNA, 19 nt, Artificial Sequence
  Description of Artificial Sequence: Synthetic oligonucleotide
gcccggcuggguggcccac

SEQ ID NO: 176521 - RNA, 19 nt, Artificial Sequence
  Description of Artificial Sequence: Synthetic oligonucleotide
ccgugguguccagcgugau

SEQ ID NO: 176522 - RNA, 19 nt, Artificial Sequence
  Description of Artificial Sequence: Synthetic oligonucleotide
ccuccgcgauguccccaau

SEQ ID NO: 176523 - RNA, 19 nt, Artificial Sequence
  Description of Artificial Sequence: Synthetic oligonucleotide
gcgugauggcaggguccuu

SEQ ID NO: 176524 - RNA, 19 nt, Artificial Sequence
  Description of Artificial Sequence: Synthetic oligonucleotide
cccggcuggguggcccacu

SEQ ID NO: 176525 - RNA, 19 nt, Artificial Sequence
  Description of Artificial Sequence: Synthetic oligonucleotide
ccgccggguucaggucgua

SEQ ID NO: 176526 - RNA, 19 nt, Artificial Sequence
  Description of Artificial Sequence: Synthetic oligonucleotide
uauugcuucaaacauauag

SEQ ID NO: 176527 - RNA, 19 nt, Artificial Sequence
  Description of Artificial Sequence: Synthetic oligonucleotide
ucugcuauaaauuugaaau

SEQ ID NO: 176528 - RNA, 19 nt, Artificial Sequence
  Description of Artificial Sequence: Synthetic oligonucleotide
aaacguaggggauaaauuc

SEQ ID NO: 176529 - RNA, 19 nt, Artificial Sequence
  Description of Artificial Sequence: Synthetic oligonucleotide
uuaucuucgaagaauuucg

SEQ ID NO: 176530 - RNA, 19 nt, Artificial Sequence
  Description of Artificial Sequence: Synthetic oligonucleotide
agaauuucgagggagaucc

SEQ ID NO: 176531 - RNA, 19 nt, Artificial Sequence
  Description of Artificial Sequence: Synthetic oligonucleotide
aaggacgagaaauaugagc

SEQ ID NO: 176532 - RNA, 19 nt, Artificial Sequence
  Description of Artificial Sequence: Synthetic oligonucleotide
aacaagaucacaagcagcc

SEQ ID NO: 176533 - RNA, 19 nt, Artificial Sequence
  Description of Artificial Sequence: Synthetic oligonucleotide
auuaucacaaaucugagau

SEQ ID NO: 176534 - RNA, 19 nt, Artificial Sequence
  Description of Artificial Sequence: Synthetic oligonucleotide
ucuucgaagaauuucgagg

SEQ ID NO: 176535 - RNA, 19 nt, Artificial Sequence
  Description of Artificial Sequence: Synthetic oligonucleotide
uuuauugcugauuacagac

SEQ ID NO: 176536 - RNA, 19 nt, Artificial Sequence
  Description of Artificial Sequence: Synthetic oligonucleotide
aaugccccauacuuaaugc

SEQ ID NO: 176537 - RNA, 19 nt, Artificial Sequence
  Description of Artificial Sequence: Synthetic oligonucleotide
ugaagaugcuuuuagauac

SEQ ID NO: 176538 - RNA, 19 nt, Artificial Sequence
  Description of Artificial Sequence: Synthetic oligonucleotide
caaguuaccaguuauguug

SEQ ID NO: 176539 - RNA, 19 nt, Artificial Sequence
  Description of Artificial Sequence: Synthetic oligonucleotide
ugaugaucaacacaaacac

SEQ ID NO: 176540 - RNA, 19 nt, Artificial Sequence
  Description of Artificial Sequence: Synthetic oligonucleotide
aaucucaacaaacggugcg

SEQ ID NO: 176541 - RNA, 19 nt, Artificial Sequence
  Description of Artificial Sequence: Synthetic oligonucleotide
uugaugaucaacacaaaca

SEQ ID NO: 176542 - RNA, 19 nt, Artificial Sequence
  Description of Artificial Sequence: Synthetic oligonucleotide
uuaccaguuauguugauga

SEQ ID NO: 176543 - RNA, 19 nt, Artificial Sequence
  Description of Artificial Sequence: Synthetic oligonucleotide
uuacuaacugccaacaacu

SEQ ID NO: 176544 - RNA, 19 nt, Artificial Sequence
  Description of Artificial Sequence: Synthetic oligonucleotide
auuugguuaugccaacugc

SEQ ID NO: 176545 - RNA, 19 nt, Artificial Sequence
  Description of Artificial Sequence: Synthetic oligonucleotide
uauagauaagcauauugcu

SEQ ID NO: 176546 - RNA, 19 nt, Artificial Sequence
  Description of Artificial Sequence: Synthetic oligonucleotide
cauucggugaguaauuugg

SEQ ID NO: 176547 - RNA, 19 nt, Artificial Sequence
  Description of Artificial Sequence: Synthetic oligonucleotide
aauaguacaaaggacgaga

SEQ ID NO: 176548 - RNA, 19 nt, Artificial Sequence
  Description of Artificial Sequence: Synthetic oligonucleotide
aacgagacaaguuaccagu

SEQ ID NO: 176549 - RNA, 19 nt, Artificial Sequence
  Description of Artificial Sequence: Synthetic oligonucleotide
uaguaucaauaucagagcc

SEQ ID NO: 176550 - RNA, 19 nt, Artificial Sequence
  Description of Artificial Sequence: Synthetic oligonucleotide
cuuguaaugcuaaugcccc

SEQ ID NO: 176551 - RNA, 19 nt, Artificial Sequence
  Description of Artificial Sequence: Synthetic oligonucleotide
agagguaugaaaauuguuc

SEQ ID NO: 176552 - RNA, 19 nt, Artificial Sequence
  Description of Artificial Sequence: Synthetic oligonucleotide
uuacuuaccaacaaaucau

SEQ ID NO: 176553 - RNA, 19 nt, Artificial Sequence
  Description of Artificial Sequence: Synthetic oligonucleotide
uuuguuagcagaaucucaa

SEQ ID NO: 176554 - RNA, 19 nt, Artificial Sequence
  Description of Artificial Sequence: Synthetic oligonucleotide
ugaucguuugcuuuggaug

SEQ ID NO: 176555 - RNA, 19 nt, Artificial Sequence
  Description of Artificial Sequence: Synthetic oligonucleotide
guuguaacuaguaaauucc

SEQ ID NO: 176556 - RNA, 19 nt, Artificial Sequence
  Description of Artificial Sequence: Synthetic oligonucleotide
agguuauucuuauagauaa

SEQ ID NO: 176557 - RNA, 19 nt, Artificial Sequence
  Description of Artificial Sequence: Synthetic oligonucleotide
cugagauuuuaaaagcucc

SEQ ID NO: 176558 - RNA, 19 nt, Artificial Sequence
  Description of Artificial Sequence: Synthetic oligonucleotide
auaguaaacagccuuucga

SEQ ID NO: 176559 - RNA, 19 nt, Artificial Sequence
  Description of Artificial Sequence: Synthetic oligonucleotide
ucaacuacgaaaugugcac

SEQ ID NO: 176560 - RNA, 19 nt, Artificial Sequence
  Description of Artificial Sequence: Synthetic oligonucleotide
agaguagggauauagggga

SEQ ID NO: 176561 - RNA, 19 nt, Artificial Sequence
  Description of Artificial Sequence: Synthetic oligonucleotide
uguguuugggcuuucgaug

SEQ ID NO: 176562 - RNA, 19 nt, Artificial Sequence
  Description of Artificial Sequence: Synthetic oligonucleotide
uguauuggucaacugacuc

SEQ ID NO: 176563 - RNA, 19 nt, Artificial Sequence
  Description of Artificial Sequence: Synthetic oligonucleotide
auaaccagagaagaugccg

SEQ ID NO: 176564 - RNA, 19 nt, Artificial Sequence
  Description of Artificial Sequence: Synthetic oligonucleotide
cacaugguuccuaagaaac

SEQ ID NO: 176565 - RNA, 19 nt, Artificial Sequence
  Description of Artificial Sequence: Synthetic oligonucleotide
uucaucguacuuuugugca

SEQ ID NO: 176566 - RNA, 19 nt, Artificial Sequence
  Description of Artificial Sequence: Synthetic oligonucleotide
cuaagaaugccugaaggag

SEQ ID NO: 176567 - RNA, 19 nt, Artificial Sequence
  Description of Artificial Sequence: Synthetic oligonucleotide
aacuacgaaaugugcacug

SEQ ID NO: 176568 - RNA, 19 nt, Artificial Sequence
  Description of Artificial Sequence: Synthetic oligonucleotide
gaguaauuugguuaugcca

SEQ ID NO: 176569 - RNA, 19 nt, Artificial Sequence
  Description of Artificial Sequence: Synthetic oligonucleotide
uuucgcaaaccgaagccag

SEQ ID NO: 176570 - RNA, 19 nt, Artificial Sequence
  Description of Artificial Sequence: Synthetic oligonucleotide
guuauguugaugaucaaca

SEQ ID NO: 176571 - RNA, 19 nt, Artificial Sequence
  Description of Artificial Sequence: Synthetic oligonucleotide
aaaacgaggcagguaccgc

SEQ ID NO: 176572 - RNA, 19 nt, Artificial Sequence
  Description of Artificial Sequence: Synthetic oligonucleotide
guaaguauggacaacaaua

SEQ ID NO: 176573 - RNA, 19 nt, Artificial Sequence
  Description of Artificial Sequence: Synthetic oligonucleotide
aggacgagaaauaugagcu

SEQ ID NO: 176574 - RNA, 19 nt, Artificial Sequence
  Description of Artificial Sequence: Synthetic oligonucleotide
aguaauuugguuaugccaa

SEQ ID NO: 176575 - RNA, 19 nt, Artificial Sequence
  Description of Artificial Sequence: Synthetic oligonucleotide
augacuaaucaagagagga

SEQ ID NO: 176576 - RNA, 19 nt, Artificial Sequence
  Description of Artificial Sequence: Synthetic oligonucleotide
aguuauuuacuauccucug

SEQ ID NO: 176577 - RNA, 19 nt, Artificial Sequence
  Description of Artificial Sequence: Synthetic oligonucleotide
uauugcugauuacagacuu

SEQ ID NO: 176578 - RNA, 19 nt, Artificial Sequence
  Description of Artificial Sequence: Synthetic oligonucleotide
agaguggcguuguuuggcc

SEQ ID NO: 176579 - RNA, 19 nt, Artificial Sequence
  Description of Artificial Sequence: Synthetic oligonucleotide
cucgaacaagaucacaagc

SEQ ID NO: 176580 - RNA, 19 nt, Artificial Sequence
  Description of Artificial Sequence: Synthetic oligonucleotide
ggcacaauaaccuuuucac

SEQ ID NO: 176581 - RNA, 19 nt, Artificial Sequence
  Description of Artificial Sequence: Synthetic oligonucleotide
uucgagagcgugugcagcg

SEQ ID NO: 176582 - RNA, 19 nt, Artificial Sequence
  Description of Artificial Sequence: Synthetic oligonucleotide
uuauguugaugaucaacac

SEQ ID NO: 176583 - RNA, 19 nt, Artificial Sequence
  Description of Artificial Sequence: Synthetic oligonucleotide
uuauugcugauuacagacu

SEQ ID NO: 176584 - RNA, 19 nt, Artificial Sequence
  Description of Artificial Sequence: Synthetic oligonucleotide
aaacgaggcagguaccgcu

SEQ ID NO: 176585 - RNA, 19 nt, Artificial Sequence
  Description of Artificial Sequence: Synthetic oligonucleotide
ucauugguggacauucggu

SEQ ID NO: 176586 - RNA, 19 nt, Artificial Sequence
  Description of Artificial Sequence: Synthetic oligonucleotide
uuucggguuauucaccauc

SEQ ID NO: 176587 - RNA, 19 nt, Artificial Sequence
  Description of Artificial Sequence: Synthetic oligonucleotide
cauugguggacauucggug

SEQ ID NO: 176588 - RNA, 19 nt, Artificial Sequence
  Description of Artificial Sequence: Synthetic oligonucleotide
agaugccggucacaggacc

SEQ ID NO: 176589 - RNA, 19 nt, Artificial Sequence
  Description of Artificial Sequence: Synthetic oligonucleotide
auucaguuagguugacaag

SEQ ID NO: 176590 - RNA, 19 nt, Artificial Sequence
  Description of Artificial Sequence: Synthetic oligonucleotide
uucggguuauucaccaucu

SEQ ID NO: 176591 - RNA, 19 nt, Artificial Sequence
  Description of Artificial Sequence: Synthetic oligonucleotide
acuacgaaaugugcacugc

SEQ ID NO: 176592 - RNA, 19 nt, Artificial Sequence
  Description of Artificial Sequence: Synthetic oligonucleotide
aguuagguugacaaguuca

SEQ ID NO: 176593 - RNA, 19 nt, Artificial Sequence
  Description of Artificial Sequence: Synthetic oligonucleotide
aaaugcuagcugugagaag

SEQ ID NO: 176594 - RNA, 19 nt, Artificial Sequence
  Description of Artificial Sequence: Synthetic oligonucleotide
ugcagguuauucuuauaga

SEQ ID NO: 176595 - RNA, 19 nt, Artificial Sequence
  Description of Artificial Sequence: Synthetic oligonucleotide
auuugcuuacagcaguuau

SEQ ID NO: 176596 - RNA, 19 nt, Artificial Sequence
  Description of Artificial Sequence: Synthetic oligonucleotide
ugaagacgggauaucauuu

SEQ ID NO: 176597 - RNA, 19 nt, Artificial Sequence
  Description of Artificial Sequence: Synthetic oligonucleotide
ugggcuuucgaugccaaag

SEQ ID NO: 176598 - RNA, 19 nt, Artificial Sequence
  Description of Artificial Sequence: Synthetic oligonucleotide
uugguuguaugccaucaaa

SEQ ID NO: 176599 - RNA, 19 nt, Artificial Sequence
  Description of Artificial Sequence: Synthetic oligonucleotide
aacguaggggauaaauucu

SEQ ID NO: 176600 - RNA, 19 nt, Artificial Sequence
  Description of Artificial Sequence: Synthetic oligonucleotide
aggagcuuauuauccaaug

SEQ ID NO: 176601 - RNA, 19 nt, Artificial Sequence
  Description of Artificial Sequence: Synthetic oligonucleotide
ugguuguaugccaucaaau

SEQ ID NO: 176602 - RNA, 19 nt, Artificial Sequence
  Description of Artificial Sequence: Synthetic oligonucleotide
aaaacguaggggauaaauu

SEQ ID NO: 176603 - RNA, 19 nt, Artificial Sequence
  Description of Artificial Sequence: Synthetic oligonucleotide
uaugaagacgggauaucau

SEQ ID NO: 176604 - RNA, 19 nt, Artificial Sequence
  Description of Artificial Sequence: Synthetic oligonucleotide
ucgagggagauccuaguaa

SEQ ID NO: 176605 - RNA, 19 nt, Artificial Sequence
  Description of Artificial Sequence: Synthetic oligonucleotide
uuguguuugggcuuucgau

SEQ ID NO: 176606 - RNA, 19 nt, Artificial Sequence
  Description of Artificial Sequence: Synthetic oligonucleotide
agggagauccuaguaaaag

SEQ ID NO: 176607 - RNA, 19 nt, Artificial Sequence
  Description of Artificial Sequence: Synthetic oligonucleotide
cacaacgagacaaguuacc

SEQ ID NO: 176608 - RNA, 19 nt, Artificial Sequence
  Description of Artificial Sequence: Synthetic oligonucleotide
auguuaggcacaauaaccu

SEQ ID NO: 176609 - RNA, 19 nt, Artificial Sequence
  Description of Artificial Sequence: Synthetic oligonucleotide
auaugaagacgggauauca

SEQ ID NO: 176610 - RNA, 19 nt, Artificial Sequence
  Description of Artificial Sequence: Synthetic oligonucleotide
auaagcauauugcuucaaa

SEQ ID NO: 176611 - RNA, 19 nt, Artificial Sequence
  Description of Artificial Sequence: Synthetic oligonucleotide
uaucagagccuuccaaauc

SEQ ID NO: 176612 - RNA, 19 nt, Artificial Sequence
  Description of Artificial Sequence: Synthetic oligonucleotide
aaccgugcaaaugcucaac

SEQ ID NO: 176613 - RNA, 19 nt, Artificial Sequence
  Description of Artificial Sequence: Synthetic oligonucleotide
caacgagacaaguuaccag

SEQ ID NO: 176614 - RNA, 19 nt, Artificial Sequence
  Description of Artificial Sequence: Synthetic oligonucleotide
gggauauaggggauuaugg

SEQ ID NO: 176615 - RNA, 19 nt, Artificial Sequence
  Description of Artificial Sequence: Synthetic oligonucleotide
augaagacgggauaucauu

SEQ ID NO: 176616 - RNA, 19 nt, Artificial Sequence
  Description of Artificial Sequence: Synthetic oligonucleotide
gagccucuuucuaagaaug

SEQ ID NO: 176617 - RNA, 19 nt, Artificial Sequence
  Description of Artificial Sequence: Synthetic oligonucleotide
caaaccgugcaaaugcuca

SEQ ID NO: 176618 - RNA, 19 nt, Artificial Sequence
  Description of Artificial Sequence: Synthetic oligonucleotide
ugccccauacuuaaugcaa

SEQ ID NO: 176619 - RNA, 19 nt, Artificial Sequence
  Description of Artificial Sequence: Synthetic oligonucleotide
guauuggucaacugacuca

SEQ ID NO: 176620 - RNA, 19 nt, Artificial Sequence
  Description of Artificial Sequence: Synthetic oligonucleotide
acaauaguacaaaggacga

SEQ ID NO: 176621 - RNA, 19 nt, Artificial Sequence
  Description of Artificial Sequence: Synthetic oligonucleotide
agcguaaguauggacaaca

SEQ ID NO: 176622 - RNA, 19 nt, Artificial Sequence
  Description of Artificial Sequence: Synthetic oligonucleotide
aaaucccuccuuauguacu

SEQ ID NO: 176623 - RNA, 19 nt, Artificial Sequence
  Description of Artificial Sequence: Synthetic oligonucleotide
uggccgugacaaaacgagg

SEQ ID NO: 176624 - RNA, 19 nt, Artificial Sequence
  Description of Artificial Sequence: Synthetic oligonucleotide
gaaauugaauugcauuacu

SEQ ID NO: 176625 - RNA, 19 nt, Artificial Sequence
  Description of Artificial Sequence: Synthetic oligonucleotide
augugacaagguaaauggc

SEQ ID NO: 176626 - RNA, 19 nt, Artificial Sequence
  Description of Artificial Sequence: Synthetic oligonucleotide
acauucggugaguaauuug

SEQ ID NO: 176627 - RNA, 19 nt, Artificial Sequence
  Description of Artificial Sequence: Synthetic oligonucleotide
auggccgugacaaaacgag

SEQ ID NO: 176628 - RNA, 19 nt, Artificial Sequence
  Description of Artificial Sequence: Synthetic oligonucleotide
agggauauaggggauuaug

SEQ ID NO: 176629 - RNA, 19 nt, Artificial Sequence
  Description of Artificial Sequence: Synthetic oligonucleotide
acaacgagacaaguuacca

SEQ ID NO: 176630 - RNA, 19 nt, Artificial Sequence
  Description of Artificial Sequence: Synthetic oligonucleotide
auagauaagcauauugcuu

SEQ ID NO: 176631 - RNA, 19 nt, Artificial Sequence
  Description of Artificial Sequence: Synthetic oligonucleotide
ugcgucuaguaucaauauc

SEQ ID NO: 176632 - RNA, 19 nt, Artificial Sequence
  Description of Artificial Sequence: Synthetic oligonucleotide
uccaaaccgugcaaaugcu

SEQ ID NO: 176633 - RNA, 19 nt, Artificial Sequence
  Description of Artificial Sequence: Synthetic oligonucleotide
uugugugauuccaugcuuu

SEQ ID NO: 176634 - RNA, 19 nt, Artificial Sequence
  Description of Artificial Sequence: Synthetic oligonucleotide
gguuauucaccaucugccc

SEQ ID NO: 176635 - RNA, 19 nt, Artificial Sequence
  Description of Artificial Sequence: Synthetic oligonucleotide
agucacgcuggcugccugc

SEQ ID NO: 176636 - RNA, 19 nt, Artificial Sequence
  Description of Artificial Sequence: Synthetic oligonucleotide
aaaccgugcaaaugcucaa

SEQ ID NO: 176637 - RNA, 19 nt, Artificial Sequence
  Description of Artificial Sequence: Synthetic oligonucleotide
uauaugaagacgggauauc

SEQ ID NO: 176638 - RNA, 19 nt, Artificial Sequence
  Description of Artificial Sequence: Synthetic oligonucleotide
guaauuugguuaugccaac

SEQ ID NO: 176639 - RNA, 19 nt, Artificial Sequence
  Description of Artificial Sequence: Synthetic oligonucleotide
guuaccaguuauguugaug

SEQ ID NO: 176640 - RNA, 19 nt, Artificial Sequence
  Description of Artificial Sequence: Synthetic oligonucleotide
ugcuaaugccccauacuua

SEQ ID NO: 176641 - RNA, 19 nt, Artificial Sequence
  Description of Artificial Sequence: Synthetic oligonucleotide
uaggagcuuauuauccaau

SEQ ID NO: 176642 - RNA, 19 nt, Artificial Sequence
  Description of Artificial Sequence: Synthetic oligonucleotide
uuaugccaacugcacaaau

SEQ ID NO: 176643 - RNA, 19 nt, Artificial Sequence
  Description of Artificial Sequence: Synthetic oligonucleotide
uuuugguacuugauuccua

SEQ ID NO: 176644 - RNA, 19 nt, Artificial Sequence
  Description of Artificial Sequence: Synthetic oligonucleotide
aaggugcucuuuugguacu

SEQ ID NO: 176645 - RNA, 19 nt, Artificial Sequence
  Description of Artificial Sequence: Synthetic oligonucleotide
ggagcauagaauuaacaua

SEQ ID NO: 176646 - RNA, 19 nt, Artificial Sequence
  Description of Artificial Sequence: Synthetic oligonucleotide
gacaaguuaccaguuaugu

SEQ ID NO: 176647 - RNA, 19 nt, Artificial Sequence
  Description of Artificial Sequence: Synthetic oligonucleotide
auauaggggauuauggcuu

SEQ ID NO: 176648 - RNA, 19 nt, Artificial Sequence
  Description of Artificial Sequence: Synthetic oligonucleotide
aggucugcuauaaauuuga

SEQ ID NO: 176649 - RNA, 19 nt, Artificial Sequence
  Description of Artificial Sequence: Synthetic oligonucleotide
gggauucuuacuaacugcc

SEQ ID NO: 176650 - RNA, 19 nt, Artificial Sequence
  Description of Artificial Sequence: Synthetic oligonucleotide
gggauuauggcuucuugca

SEQ ID NO: 176651 - RNA, 19 nt, Artificial Sequence
  Description of Artificial Sequence: Synthetic oligonucleotide
augugcucuauuaugcugu

SEQ ID NO: 176652 - RNA, 19 nt, Artificial Sequence
  Description of Artificial Sequence: Synthetic oligonucleotide
uacuugucccaugaagcca

SEQ ID NO: 176653 - RNA, 19 nt, Artificial Sequence
  Description of Artificial Sequence: Synthetic oligonucleotide
ccgcugaaauucuucaucg

SEQ ID NO: 176654 - RNA, 19 nt, Artificial Sequence
  Description of Artificial Sequence: Synthetic oligonucleotide
ucaugauagcuuucauaau

SEQ ID NO: 176655 - RNA, 19 nt, Artificial Sequence
  Description of Artificial Sequence: Synthetic oligonucleotide
gccgaugagagauuguaac

SEQ ID NO: 176656 - RNA, 19 nt, Artificial Sequence
  Description of Artificial Sequence: Synthetic oligonucleotide
gguucuuauaaugaggucu

SEQ ID NO: 176657 - RNA, 19 nt, Artificial Sequence
  Description of Artificial Sequence: Synthetic oligonucleotide
gagacaaguuaccaguuau

SEQ ID NO: 176658 - RNA, 19 nt, Artificial Sequence
  Description of Artificial Sequence: Synthetic oligonucleotide
ggaugcaauuagcuucugg

SEQ ID NO: 176659 - RNA, 19 nt, Artificial Sequence
  Description of Artificial Sequence: Synthetic oligonucleotide
gugauuccaugcuuuugug

SEQ ID NO: 176660 - RNA, 19 nt, Artificial Sequence
  Description of Artificial Sequence: Synthetic oligonucleotide
guuauuuacuauccucugu

SEQ ID NO: 176661 - RNA, 19 nt, Artificial Sequence
  Description of Artificial Sequence: Synthetic oligonucleotide
caaaugcuagcugugagaa

SEQ ID NO: 176662 - RNA, 19 nt, Artificial Sequence
  Description of Artificial Sequence: Synthetic oligonucleotide
aguccauagcuugguguac

SEQ ID NO: 176663 - RNA, 19 nt, Artificial Sequence
  Description of Artificial Sequence: Synthetic oligonucleotide
augccccauacuuaaugca

SEQ ID NO: 176664 - RNA, 19 nt, Artificial Sequence
  Description of Artificial Sequence: Synthetic oligonucleotide
uggugaucguuugcuuugg

SEQ ID NO: 176665 - RNA, 19 nt, Artificial Sequence
  Description of Artificial Sequence: Synthetic oligonucleotide
cauauuaucuucgaagaau

SEQ ID NO: 176666 - RNA, 19 nt, Artificial Sequence
  Description of Artificial Sequence: Synthetic oligonucleotide
aggucuuucgcaaaccgaa

SEQ ID NO: 176667 - RNA, 19 nt, Artificial Sequence
  Description of Artificial Sequence: Synthetic oligonucleotide
agacuucaacuacgaaaug

SEQ ID NO: 176668 - RNA, 19 nt, Artificial Sequence
  Description of Artificial Sequence: Synthetic oligonucleotide
agauccuaguaaaaguuua

SEQ ID NO: 176669 - RNA, 19 nt, Artificial Sequence
  Description of Artificial Sequence: Synthetic oligonucleotide
aaccgaagccagaaauuga

SEQ ID NO: 176670 - RNA, 19 nt, Artificial Sequence
  Description of Artificial Sequence: Synthetic oligonucleotide
gcuaaugccccauacuuaa

SEQ ID NO: 176671 - RNA, 19 nt, Artificial Sequence
  Description of Artificial Sequence: Synthetic oligonucleotide
gguuguaugccaucaaaua

SEQ ID NO: 176672 - RNA, 19 nt, Artificial Sequence
  Description of Artificial Sequence: Synthetic oligonucleotide
gauccuaguaaaaguuuaa

SEQ ID NO: 176673 - RNA, 19 nt, Artificial Sequence
  Description of Artificial Sequence: Synthetic oligonucleotide
ucggguuauucaccaucug

SEQ ID NO: 176674 - RNA, 19 nt, Artificial Sequence
  Description of Artificial Sequence: Synthetic oligonucleotide
cugcuauaaauuugaaaua

SEQ ID NO: 176675 - RNA, 19 nt, Artificial Sequence
  Description of Artificial Sequence: Synthetic oligonucleotide
gaagugugagagcuuugaa

SEQ ID NO: 176676 - RNA, 19 nt, Artificial Sequence
  Description of Artificial Sequence: Synthetic oligonucleotide
caggaaguaugugauucac

SEQ ID NO: 176677 - RNA, 19 nt, Artificial Sequence
  Description of Artificial Sequence: Synthetic oligonucleotide
ccauguuaggcacaauaac

SEQ ID NO: 176678 - RNA, 19 nt, Artificial Sequence
  Description of Artificial Sequence: Synthetic oligonucleotide
gcuauuguacuugagccuc

SEQ ID NO: 176679 - RNA, 19 nt, Artificial Sequence
  Description of Artificial Sequence: Synthetic oligonucleotide
gauggccgugacaaaacga

SEQ ID NO: 176680 - RNA, 19 nt, Artificial Sequence
  Description of Artificial Sequence: Synthetic oligonucleotide
gccacaacgagacaaguua

SEQ ID NO: 176681 - RNA, 19 nt, Artificial Sequence
  Description of Artificial Sequence: Synthetic oligonucleotide
uggccauaacauggcauug

SEQ ID NO: 176682 - RNA, 19 nt, Artificial Sequence
  Description of Artificial Sequence: Synthetic oligonucleotide
gaguggcguuguuuggccc

SEQ ID NO: 176683 - RNA, 19 nt, Artificial Sequence
  Description of Artificial Sequence: Synthetic oligonucleotide
caguuagguugacaaguuc

SEQ ID NO: 176684 - RNA, 19 nt, Artificial Sequence
  Description of Artificial Sequence: Synthetic oligonucleotide
cuuucgcaaaccgaagcca

SEQ ID NO: 176685 - RNA, 19 nt, Artificial Sequence
  Description of Artificial Sequence: Synthetic oligonucleotide
caacaaacggugcgauuuc

SEQ ID NO: 176686 - RNA, 19 nt, Artificial Sequence
  Description of Artificial Sequence: Synthetic oligonucleotide
cugaaggagccucacuaga

SEQ ID NO: 176687 - RNA, 19 nt, Artificial Sequence
  Description of Artificial Sequence: Synthetic oligonucleotide
cauuggcuugugugauucc

SEQ ID NO: 176688 - RNA, 19 nt, Artificial Sequence
  Description of Artificial Sequence: Synthetic oligonucleotide
gcauaauccucgaacaaga

SEQ ID NO: 176689 - RNA, 19 nt, Artificial Sequence
  Description of Artificial Sequence: Synthetic oligonucleotide
ggccgugacaaaacgaggc

SEQ ID NO: 176690 - RNA, 19 nt, Artificial Sequence
  Description of Artificial Sequence: Synthetic oligonucleotide
uuagguugacaaguucauu

SEQ ID NO: 176691 - RNA, 19 nt, Artificial Sequence
  Description of Artificial Sequence: Synthetic oligonucleotide
uuuucggguuauucaccau

SEQ ID NO: 176692 - RNA, 19 nt, Artificial Sequence
  Description of Artificial Sequence: Synthetic oligonucleotide
cuguaagauggaguuugug

SEQ ID NO: 176693 - RNA, 19 nt, Artificial Sequence
  Description of Artificial Sequence: Synthetic oligonucleotide
guuuggcccucucauagua

SEQ ID NO: 176694 - RNA, 19 nt, Artificial Sequence
  Description of Artificial Sequence: Synthetic oligonucleotide
uaccgcugaaauucuucau

SEQ ID NO: 176695 - RNA, 19 nt, Artificial Sequence
  Description of Artificial Sequence: Synthetic oligonucleotide
gaggucuuucgcaaaccga

SEQ ID NO: 176696 - RNA, 19 nt, Artificial Sequence
  Description of Artificial Sequence: Synthetic oligonucleotide
agauuucagugaacacuag

SEQ ID NO: 176697 - RNA, 19 nt, Artificial Sequence
  Description of Artificial Sequence: Synthetic oligonucleotide
ugagguuugcugggauucu

SEQ ID NO: 176698 - RNA, 19 nt, Artificial Sequence
  Description of Artificial Sequence: Synthetic oligonucleotide
auucggugaguaauuuggu

SEQ ID NO: 176699 - RNA, 19 nt, Artificial Sequence
  Description of Artificial Sequence: Synthetic oligonucleotide
gcagcucuaaauuccaugu

SEQ ID NO: 176700 - RNA, 19 nt, Artificial Sequence
  Description of Artificial Sequence: Synthetic oligonucleotide
ugacaaaacgaggcaggua

SEQ ID NO: 176701 - RNA, 19 nt, Artificial Sequence
  Description of Artificial Sequence: Synthetic oligonucleotide
agcgugugcagcguaagua

SEQ ID NO: 176702 - RNA, 19 nt, Artificial Sequence
  Description of Artificial Sequence: Synthetic oligonucleotide
ugcccuacaggaucauguu

SEQ ID NO: 176703 - RNA, 19 nt, Artificial Sequence
  Description of Artificial Sequence: Synthetic oligonucleotide
agauaccuuuugaaucucu

SEQ ID NO: 176704 - RNA, 19 nt, Artificial Sequence
  Description of Artificial Sequence: Synthetic oligonucleotide
aggagccucacuagagcag

SEQ ID NO: 176705 - RNA, 19 nt, Artificial Sequence
  Description of Artificial Sequence: Synthetic oligonucleotide
gaagacgggauaucauuuu

SEQ ID NO: 176706 - RNA, 19 nt, Artificial Sequence
  Description of Artificial Sequence: Synthetic oligonucleotide
cggguuauucaccaucugc

SEQ ID NO: 176707 - RNA, 19 nt, Artificial Sequence
  Description of Artificial Sequence: Synthetic oligonucleotide
agauggauuuucggguuau

SEQ ID NO: 176708 - RNA, 19 nt, Artificial Sequence
  Description of Artificial Sequence: Synthetic oligonucleotide
ggccauauaugaagacggg

SEQ ID NO: 176709 - RNA, 19 nt, Artificial Sequence
  Description of Artificial Sequence: Synthetic oligonucleotide
agcguauucugguccucaa

SEQ ID NO: 176710 - RNA, 19 nt, Artificial Sequence
  Description of Artificial Sequence: Synthetic oligonucleotide
gugcagcguaaguauggac

SEQ ID NO: 176711 - RNA, 19 nt, Artificial Sequence
  Description of Artificial Sequence: Synthetic oligonucleotide
agucaaggucugcuauaaa

SEQ ID NO: 176712 - RNA, 19 nt, Artificial Sequence
  Description of Artificial Sequence: Synthetic oligonucleotide
ggucuuucgcaaaccgaag

SEQ ID NO: 176713 - RNA, 19 nt, Artificial Sequence
  Description of Artificial Sequence: Synthetic oligonucleotide
gaagccuuggugaucguuu

SEQ ID NO: 176714 - RNA, 19 nt, Artificial Sequence
  Description of Artificial Sequence: Synthetic oligonucleotide
agcccugcgucuaguauca

SEQ ID NO: 176715 - RNA, 19 nt, Artificial Sequence
  Description of Artificial Sequence: Synthetic oligonucleotide
guuagguugacaaguucau

SEQ ID NO: 176716 - RNA, 19 nt, Artificial Sequence
  Description of Artificial Sequence: Synthetic oligonucleotide
ucggucuguaggagcuuau

SEQ ID NO: 176717 - RNA, 19 nt, Artificial Sequence
  Description of Artificial Sequence: Synthetic oligonucleotide
gagauccuaguaaaaguuu

SEQ ID NO: 176718 - RNA, 19 nt, Artificial Sequence
  Description of Artificial Sequence: Synthetic oligonucleotide
ccauauaugaagacgggau

SEQ ID NO: 176719 - RNA, 19 nt, Artificial Sequence
  Description of Artificial Sequence: Synthetic oligonucleotide
gggcuuucgaugccaaaga

SEQ ID NO: 176720 - RNA, 19 nt, Artificial Sequence
  Description of Artificial Sequence: Synthetic oligonucleotide
uucuuauaaugaggucuuu

SEQ ID NO: 176721 - RNA, 19 nt, Artificial Sequence
  Description of Artificial Sequence: Synthetic oligonucleotide
aguucacagcagagucacg

SEQ ID NO: 176722 - RNA, 19 nt, Artificial Sequence
  Description of Artificial Sequence: Synthetic oligonucleotide
acguaggggauaaauucuu

SEQ ID NO: 176723 - RNA, 19 nt, Artificial Sequence
  Description of Artificial Sequence: Synthetic oligonucleotide
ggugcgauuucugcagcug

SEQ ID NO: 176724 - RNA, 19 nt, Artificial Sequence
  Description of Artificial Sequence: Synthetic oligonucleotide
gccauauaugaagacggga

SEQ ID NO: 176725 - RNA, 19 nt, Artificial Sequence
  Description of Artificial Sequence: Synthetic oligonucleotide
gcauuacuuaccaacaaau

SEQ ID NO: 176726 - RNA, 19 nt, Artificial Sequence
  Description of Artificial Sequence: Synthetic oligonucleotide
ccgaugagagauuguaaca

SEQ ID NO: 176727 - RNA, 19 nt, Artificial Sequence
  Description of Artificial Sequence: Synthetic oligonucleotide
gugaucguuugcuuuggau

SEQ ID NO: 176728 - RNA, 19 nt, Artificial Sequence
  Description of Artificial Sequence: Synthetic oligonucleotide
cacaucauucuguaagauu

SEQ ID NO: 176729 - RNA, 19 nt, Artificial Sequence
  Description of Artificial Sequence: Synthetic oligonucleotide
ggcccucucauaguaaaca

SEQ ID NO: 176730 - RNA, 19 nt, Artificial Sequence
  Description of Artificial Sequence: Synthetic oligonucleotide
gagggagauccuaguaaaa

SEQ ID NO: 176731 - RNA, 19 nt, Artificial Sequence
  Description of Artificial Sequence: Synthetic oligonucleotide
guuaugccaacugcacaaa

SEQ ID NO: 176732 - RNA, 19 nt, Artificial Sequence
  Description of Artificial Sequence: Synthetic oligonucleotide
aaggccgaugagagauugu

SEQ ID NO: 176733 - RNA, 19 nt, Artificial Sequence
  Description of Artificial Sequence: Synthetic oligonucleotide
ggugucguccuccggcaac

SEQ ID NO: 176734 - RNA, 19 nt, Artificial Sequence
  Description of Artificial Sequence: Synthetic oligonucleotide
cuguauuggucaacugacu

SEQ ID NO: 176735 - RNA, 19 nt, Artificial Sequence
  Description of Artificial Sequence: Synthetic oligonucleotide
ggauucuuacuaacugcca

SEQ ID NO: 176736 - RNA, 19 nt, Artificial Sequence
  Description of Artificial Sequence: Synthetic oligonucleotide
gucagcguauucugguccu

SEQ ID NO: 176737 - RNA, 19 nt, Artificial Sequence
  Description of Artificial Sequence: Synthetic oligonucleotide
cauaauccucgaacaagau

SEQ ID NO: 176738 - RNA, 19 nt, Artificial Sequence
  Description of Artificial Sequence: Synthetic oligonucleotide
ccgugacaaaacgaggcag

SEQ ID NO: 176739 - RNA, 19 nt, Artificial Sequence
  Description of Artificial Sequence: Synthetic oligonucleotide
uggugucguccuccggcaa

SEQ ID NO: 176740 - RNA, 19 nt, Artificial Sequence
  Description of Artificial Sequence: Synthetic oligonucleotide
gccgugacaaaacgaggca

SEQ ID NO: 176741 - RNA, 19 nt, Artificial Sequence
  Description of Artificial Sequence: Synthetic oligonucleotide
aucggucuguaggagcuua

SEQ ID NO: 176742 - RNA, 19 nt, Artificial Sequence
  Description of Artificial Sequence: Synthetic oligonucleotide
gaugccggucacaggaccu

SEQ ID NO: 176743 - RNA, 19 nt, Artificial Sequence
  Description of Artificial Sequence: Synthetic oligonucleotide
cguaggggauaaauucuug

SEQ ID NO: 176744 - RNA, 19 nt, Artificial Sequence
  Description of Artificial Sequence: Synthetic oligonucleotide
ggaacagagccuccucaaa

SEQ ID NO: 176745 - RNA, 19 nt, Artificial Sequence
  Description of Artificial Sequence: Synthetic oligonucleotide
acgagacaaguuaccaguu

SEQ ID NO: 176746 - RNA, 19 nt, Artificial Sequence
  Description of Artificial Sequence: Synthetic oligonucleotide
gugacaaaacgaggcaggu

SEQ ID NO: 176747 - RNA, 19 nt, Artificial Sequence
  Description of Artificial Sequence: Synthetic oligonucleotide
cagcguaaguauggacaac

SEQ ID NO: 176748 - RNA, 19 nt, Artificial Sequence
  Description of Artificial Sequence: Synthetic oligonucleotide
ccuccuuauguacuccuca

SEQ ID NO: 176749 - RNA, 19 nt, Artificial Sequence
  Description of Artificial Sequence: Synthetic oligonucleotide
gacauucggugaguaauuu

SEQ ID NO: 176750 - RNA, 19 nt, Artificial Sequence
  Description of Artificial Sequence: Synthetic oligonucleotide
cauuugcuuacagcaguua

SEQ ID NO: 176751 - RNA, 19 nt, Artificial Sequence
  Description of Artificial Sequence: Synthetic oligonucleotide
caacuacgaaaugugcacu

SEQ ID NO: 176752 - RNA, 19 nt, Artificial Sequence
  Description of Artificial Sequence: Synthetic oligonucleotide
gagcgugugcagcguaagu

SEQ ID NO: 176753 - RNA, 19 nt, Artificial Sequence
  Description of Artificial Sequence: Synthetic oligonucleotide
cagcguauucugguccuca

SEQ ID NO: 176754 - RNA, 19 nt, Artificial Sequence
  Description of Artificial Sequence: Synthetic oligonucleotide
ggugaucguuugcuuugga

SEQ ID NO: 176755 - RNA, 19 nt, Artificial Sequence
  Description of Artificial Sequence: Synthetic oligonucleotide
cgaugagagauuguaacaa

SEQ ID NO: 176756 - RNA, 19 nt, Artificial Sequence
  Description of Artificial Sequence: Synthetic oligonucleotide
ccccggacaggcaguagac

SEQ ID NO: 176757 - RNA, 19 nt, Artificial Sequence
  Description of Artificial Sequence: Synthetic oligonucleotide
gcguuguuuggcccucuca

SEQ ID NO: 176758 - RNA, 19 nt, Artificial Sequence
  Description of Artificial Sequence: Synthetic oligonucleotide
guccuccggcaacucaaaa

SEQ ID NO: 176759 - RNA, 19 nt, Artificial Sequence
  Description of Artificial Sequence: Synthetic oligonucleotide
ugguacccugguguaucuu

SEQ ID NO: 176760 - RNA, 19 nt, Artificial Sequence
  Description of Artificial Sequence: Synthetic oligonucleotide
cccuccuuauguacuccuc

SEQ ID NO: 176761 - RNA, 19 nt, Artificial Sequence
  Description of Artificial Sequence: Synthetic oligonucleotide
ggcuuucgaugccaaagau

SEQ ID NO: 176762 - RNA, 19 nt, Artificial Sequence
  Description of Artificial Sequence: Synthetic oligonucleotide
cuaaugccccauacuuaau

SEQ ID NO: 176763 - RNA, 19 nt, Artificial Sequence
  Description of Artificial Sequence: Synthetic oligonucleotide
gaauuucgagggagauccu

SEQ ID NO: 176764 - RNA, 19 nt, Artificial Sequence
  Description of Artificial Sequence: Synthetic oligonucleotide
gccuuucgagagcgugugc

SEQ ID NO: 176765 - RNA, 19 nt, Artificial Sequence
  Description of Artificial Sequence: Synthetic oligonucleotide
guggcguuguuuggcccuc

SEQ ID NO: 176766 - RNA, 19 nt, Artificial Sequence
  Description of Artificial Sequence: Synthetic oligonucleotide
augccggucacaggaccuu

SEQ ID NO: 176767 - RNA, 19 nt, Artificial Sequence
  Description of Artificial Sequence: Synthetic oligonucleotide
gguggacauucggugagua

SEQ ID NO: 176768 - RNA, 19 nt, Artificial Sequence
  Description of Artificial Sequence: Synthetic oligonucleotide
gcguaaguauggacaacaa

SEQ ID NO: 176769 - RNA, 19 nt, Artificial Sequence
  Description of Artificial Sequence: Synthetic oligonucleotide
gccuuggugaucguuugcu

SEQ ID NO: 176770 - RNA, 19 nt, Artificial Sequence
  Description of Artificial Sequence: Synthetic oligonucleotide
ggccgaugagagauuguaa

SEQ ID NO: 176771 - RNA, 19 nt, Artificial Sequence
  Description of Artificial Sequence: Synthetic oligonucleotide
ggcguuguuuggcccucuc

SEQ ID NO: 176772 - RNA, 19 nt, Artificial Sequence
  Description of Artificial Sequence: Synthetic oligonucleotide
gcguugaggcuggugcuca

SEQ ID NO: 176773 - RNA, 19 nt, Artificial Sequence
  Description of Artificial Sequence: Synthetic oligonucleotide
ggcagguaccgcugaaauu

SEQ ID NO: 176774 - RNA, 19 nt, Artificial Sequence
  Description of Artificial Sequence: Synthetic oligonucleotide
ggacauucggugaguaauu

SEQ ID NO: 176775 - RNA, 19 nt, Artificial Sequence
  Description of Artificial Sequence: Synthetic oligonucleotide
cgagacaaguuaccaguua

SEQ ID NO: 176776 - RNA, 19 nt, Artificial Sequence
  Description of Artificial Sequence: Synthetic oligonucleotide
cggugaguaauuugguuau

SEQ ID NO: 176777 - RNA, 19 nt, Artificial Sequence
  Description of Artificial Sequence: Synthetic oligonucleotide
gccccauacuuaaugcaau

SEQ ID NO: 176778 - RNA, 19 nt, Artificial Sequence
  Description of Artificial Sequence: Synthetic oligonucleotide
cccggacaggcaguagaca

SEQ ID NO: 176779 - RNA, 19 nt, Artificial Sequence
  Description of Artificial Sequence: Synthetic oligonucleotide
cgcugaaauucuucaucgu

SEQ ID NO: 176780 - RNA, 19 nt, Artificial Sequence
  Description of Artificial Sequence: Synthetic oligonucleotide
cggugcgauuucugcagcu

SEQ ID NO: 176781 - RNA, 19 nt, Artificial Sequence
  Description of Artificial Sequence: Synthetic oligonucleotide
ccuccccggacaggcagua

SEQ ID NO: 176782 - RNA, 19 nt, Artificial Sequence
  Description of Artificial Sequence: Synthetic oligonucleotide
gcccugcgucuaguaucaa

SEQ ID NO: 176783 - RNA, 19 nt, Artificial Sequence
  Description of Artificial Sequence: Synthetic oligonucleotide
aaauauaagaucuaguuca

SEQ ID NO: 176784 - RNA, 19 nt, Artificial Sequence
  Description of Artificial Sequence: Synthetic oligonucleotide
ugaauuagcaauaaagggg

SEQ ID NO: 176785 - RNA, 19 nt, Artificial Sequence
  Description of Artificial Sequence: Synthetic oligonucleotide
aacuuaacuaacaagauag

SEQ ID NO: 176786 - RNA, 19 nt, Artificial Sequence
  Description of Artificial Sequence: Synthetic oligonucleotide
uuaacuaacaagauagagc

SEQ ID NO: 176787 - RNA, 19 nt, Artificial Sequence
  Description of Artificial Sequence: Synthetic oligonucleotide
ucauuuucgaccaugacca

SEQ ID NO: 176788 - RNA, 19 nt, Artificial Sequence
  Description of Artificial Sequence: Synthetic oligonucleotide
uaacuaacaagauagagcu

SEQ ID NO: 176789 - RNA, 19 nt, Artificial Sequence
  Description of Artificial Sequence: Synthetic oligonucleotide
aaugauuccuucuuauggg

SEQ ID NO: 176790 - RNA, 19 nt, Artificial Sequence
  Description of Artificial Sequence: Synthetic oligonucleotide
uucuaacaaaauaagaggc

SEQ ID NO: 176791 - RNA, 19 nt, Artificial Sequence
  Description of Artificial Sequence: Synthetic oligonucleotide
augaauuagcaauaaaggg

SEQ ID NO: 176792 - RNA, 19 nt, Artificial Sequence
  Description of Artificial Sequence: Synthetic oligonucleotide
uucaguaucagccagacuu

SEQ ID NO: 176793 - RNA, 19 nt, Artificial Sequence
  Description of Artificial Sequence: Synthetic oligonucleotide
uuccaagugacacagaaug

SEQ ID NO: 176794 - RNA, 19 nt, Artificial Sequence
  Description of Artificial Sequence: Synthetic oligonucleotide
ucgaccaugaccaaucggg

SEQ ID NO: 176795 - RNA, 19 nt, Artificial Sequence
  Description of Artificial Sequence: Synthetic oligonucleotide
auuuguggagaccucaggc

SEQ ID NO: 176796 - RNA, 19 nt, Artificial Sequence
  Description of Artificial Sequence: Synthetic oligonucleotide
acuaacaagauagagcugg

SEQ ID NO: 176797 - RNA, 19 nt, Artificial Sequence
  Description of Artificial Sequence: Synthetic oligonucleotide
uauuguuagaauugacugg

SEQ ID NO: 176798 - RNA, 19 nt, Artificial Sequence
  Description of Artificial Sequence: Synthetic oligonucleotide
uacgaaaucugcaucauca

SEQ ID NO: 176799 - RNA, 19 nt, Artificial Sequence
  Description of Artificial Sequence: Synthetic oligonucleotide
uuuguagggcaucugagag

SEQ ID NO: 176800 - RNA, 19 nt, Artificial Sequence
  Description of Artificial Sequence: Synthetic oligonucleotide
ucuguuaaccuucuuguug

SEQ ID NO: 176801 - RNA, 19 nt, Artificial Sequence
  Description of Artificial Sequence: Synthetic oligonucleotide
auagagcugggauuaauac

SEQ ID NO: 176802 - RNA, 19 nt, Artificial Sequence
  Description of Artificial Sequence: Synthetic oligonucleotide
caagucaaccuuuaaagag

SEQ ID NO: 176803 - RNA, 19 nt, Artificial Sequence
  Description of Artificial Sequence: Synthetic oligonucleotide
uuagaauugacuggaagcc

SEQ ID NO: 176804 - RNA, 19 nt, Artificial Sequence
  Description of Artificial Sequence: Synthetic oligonucleotide
cuccguauaaaucaggaag

SEQ ID NO: 176805 - RNA, 19 nt, Artificial Sequence
  Description of Artificial Sequence: Synthetic oligonucleotide
gaagggacagaauuccucg

SEQ ID NO: 176806 - RNA, 19 nt, Artificial Sequence
  Description of Artificial Sequence: Synthetic oligonucleotide
uauuccgggaaugaggugg

SEQ ID NO: 176807 - RNA, 19 nt, Artificial Sequence
  Description of Artificial Sequence: Synthetic oligonucleotide
cuagcaagggcuaacauuc

SEQ ID NO: 176808 - RNA, 19 nt, Artificial Sequence
  Description of Artificial Sequence: Synthetic oligonucleotide
aauacuucggccaggugac

SEQ ID NO: 176809 - RNA, 19 nt, Artificial Sequence
  Description of Artificial Sequence: Synthetic oligonucleotide
ucuucuaacuuaacuaaca

SEQ ID NO: 176810 - RNA, 19 nt, Artificial Sequence
  Description of Artificial Sequence: Synthetic oligonucleotide
aagucaaccuuuaaagagg

SEQ ID NO: 176811 - RNA, 19 nt, Artificial Sequence
  Description of Artificial Sequence: Synthetic oligonucleotide
aauacucaggaaaacccac

SEQ ID NO: 176812 - RNA, 19 nt, Artificial Sequence
  Description of Artificial Sequence: Synthetic oligonucleotide
aaggaguagguuuuauuug

SEQ ID NO: 176813 - RNA, 19 nt, Artificial Sequence
  Description of Artificial Sequence: Synthetic oligonucleotide
cuguuaaccuucuuguugg

SEQ ID NO: 176814 - RNA, 19 nt, Artificial Sequence
  Description of Artificial Sequence: Synthetic oligonucleotide
uuuacuucguuuacuucag

SEQ ID NO: 176815 - RNA, 19 nt, Artificial Sequence
  Description of Artificial Sequence: Synthetic oligonucleotide
ugcuauuccgggaaugagg

SEQ ID NO: 176816 - RNA, 19 nt, Artificial Sequence
  Description of Artificial Sequence: Synthetic oligonucleotide
aauuuugacuugguagugg

SEQ ID NO: 176817 - RNA, 19 nt, Artificial Sequence
  Description of Artificial Sequence: Synthetic oligonucleotide
uaaucacauaggcacaacc

SEQ ID NO: 176818 - RNA, 19 nt, Artificial Sequence
  Description of Artificial Sequence: Synthetic oligonucleotide
aguccuauuuauugggaac

SEQ ID NO: 176819 - RNA, 19 nt, Artificial Sequence
  Description of Artificial Sequence: Synthetic oligonucleotide
uguaagacgucuacgaaau

SEQ ID NO: 176820 - RNA, 19 nt, Artificial Sequence
  Description of Artificial Sequence: Synthetic oligonucleotide
aaugucaacauguccuacu

SEQ ID NO: 176821 - RNA, 19 nt, Artificial Sequence
  Description of Artificial Sequence: Synthetic oligonucleotide
agagcgagucuucagguac

SEQ ID NO: 176822 - RNA, 19 nt, Artificial Sequence
  Description of Artificial Sequence: Synthetic oligonucleotide
aucacaacgaaggucuugc

SEQ ID NO: 176823 - RNA, 19 nt, Artificial Sequence
  Description of Artificial Sequence: Synthetic oligonucleotide
caugccacaagaaaacuug

SEQ ID NO: 176824 - RNA, 19 nt, Artificial Sequence
  Description of Artificial Sequence: Synthetic oligonucleotide
uuuaaagaggggagggcag

SEQ ID NO: 176825 - RNA, 19 nt, Artificial Sequence
  Description of Artificial Sequence: Synthetic oligonucleotide
uuuacuuucaaugucugua

SEQ ID NO: 176826 - RNA, 19 nt, Artificial Sequence
  Description of Artificial Sequence: Synthetic oligonucleotide
gaagacaugccauuggcca

SEQ ID NO: 176827 - RNA, 19 nt, Artificial Sequence
  Description of Artificial Sequence: Synthetic oligonucleotide
gaauuagcaauaaagggga

SEQ ID NO: 176828 - RNA, 19 nt, Artificial Sequence
  Description of Artificial Sequence: Synthetic oligonucleotide
cuuaacuaacaagauagag

SEQ ID NO: 176829 - RNA, 19 nt, Artificial Sequence
  Description of Artificial Sequence: Synthetic oligonucleotide
ugggauaaaugucaacaug

SEQ ID NO: 176830 - RNA, 19 nt, Artificial Sequence
  Description of Artificial Sequence: Synthetic oligonucleotide
ucucauacauuccugucac

SEQ ID NO: 176831 - RNA, 19 nt, Artificial Sequence
  Description of Artificial Sequence: Synthetic oligonucleotide
uauuuguggagaccucagg

SEQ ID NO: 176832 - RNA, 19 nt, Artificial Sequence
  Description of Artificial Sequence: Synthetic oligonucleotide
aauggaucgcucaugggag

SEQ ID NO: 176833 - RNA, 19 nt, Artificial Sequence
  Description of Artificial Sequence: Synthetic oligonucleotide
auuguuagaauugacugga

SEQ ID NO: 176834 - RNA, 19 nt, Artificial Sequence
  Description of Artificial Sequence: Synthetic oligonucleotide
uaagacgucuacgaaaucu

SEQ ID NO: 176835 - RNA, 19 nt, Artificial Sequence
  Description of Artificial Sequence: Synthetic oligonucleotide
aacacugcggaguccuuuc

SEQ ID NO: 176836 - RNA, 19 nt, Artificial Sequence
  Description of Artificial Sequence: Synthetic oligonucleotide
uuaugggacaaaaggcacc

SEQ ID NO: 176837 - RNA, 19 nt, Artificial Sequence
  Description of Artificial Sequence: Synthetic oligonucleotide
caugggagcacuuuaccag

SEQ ID NO: 176838 - RNA, 19 nt, Artificial Sequence
  Description of Artificial Sequence: Synthetic oligonucleotide
aacccacuuucaaacaccc

SEQ ID NO: 176839 - RNA, 19 nt, Artificial Sequence
  Description of Artificial Sequence: Synthetic oligonucleotide
uaacuuaacuaacaagaua

SEQ ID NO: 176840 - RNA, 19 nt, Artificial Sequence
  Description of Artificial Sequence: Synthetic oligonucleotide
gaacuaguuacaaaggcca

SEQ ID NO: 176841 - RNA, 19 nt, Artificial Sequence
  Description of Artificial Sequence: Synthetic oligonucleotide
uguccuaaucacauaggca

SEQ ID NO: 176842 - RNA, 19 nt, Artificial Sequence
  Description of Artificial Sequence: Synthetic oligonucleotide
uuauugggaacaaaugauu

SEQ ID NO: 176843 - RNA, 19 nt, Artificial Sequence
  Description of Artificial Sequence: Synthetic oligonucleotide
aaguuugggcacccaacuc

SEQ ID NO: 176844 - RNA, 19 nt, Artificial Sequence
  Description of Artificial Sequence: Synthetic oligonucleotide
agguuuuauuuguggagac

SEQ ID NO: 176845 - RNA, 19 nt, Artificial Sequence
  Description of Artificial Sequence: Synthetic oligonucleotide
uggguagguguucagacac

SEQ ID NO: 176846 - RNA, 19 nt, Artificial Sequence
  Description of Artificial Sequence: Synthetic oligonucleotide
guauguaagacgucuacga

SEQ ID NO: 176847 - RNA, 19 nt, Artificial Sequence
  Description of Artificial Sequence: Synthetic oligonucleotide
uuaguauuugagccugucu

SEQ ID NO: 176848 - RNA, 19 nt, Artificial Sequence
  Description of Artificial Sequence: Synthetic oligonucleotide
ucucacucauuuucgacca

SEQ ID NO: 176849 - RNA, 19 nt, Artificial Sequence
  Description of Artificial Sequence: Synthetic oligonucleotide
aggaguagguuuuauuugu

SEQ ID NO: 176850 - RNA, 19 nt, Artificial Sequence
  Description of Artificial Sequence: Synthetic oligonucleotide
cacagaaugacagcuauac

SEQ ID NO: 176851 - RNA, 19 nt, Artificial Sequence
  Description of Artificial Sequence: Synthetic oligonucleotide
ugucaacauguccuacugg

SEQ ID NO: 176852 - RNA, 19 nt, Artificial Sequence
  Description of Artificial Sequence: Synthetic oligonucleotide
uuaccuuaccuuaccuucc

SEQ ID NO: 176853 - RNA, 19 nt, Artificial Sequence
  Description of Artificial Sequence: Synthetic oligonucleotide
ugggacaaaaggcaccaug

SEQ ID NO: 176854 - RNA, 19 nt, Artificial Sequence
  Description of Artificial Sequence: Synthetic oligonucleotide
aguuagacacagauucugc

SEQ ID NO: 176855 - RNA, 19 nt, Artificial Sequence
  Description of Artificial Sequence: Synthetic oligonucleotide
aguuugggcacccaacucu

SEQ ID NO: 176856 - RNA, 19 nt, Artificial Sequence
  Description of Artificial Sequence: Synthetic oligonucleotide
uccaguacgucccuugacu

SEQ ID NO: 176857 - RNA, 19 nt, Artificial Sequence
  Description of Artificial Sequence: Synthetic oligonucleotide
uuagccacguuuuaguauu

SEQ ID NO: 176858 - RNA, 19 nt, Artificial Sequence
  Description of Artificial Sequence: Synthetic oligonucleotide
agaaugacagcuauacuug

SEQ ID NO: 176859 - RNA, 19 nt, Artificial Sequence
  Description of Artificial Sequence: Synthetic oligonucleotide
gaucccaauacuucggcca

SEQ ID NO: 176860 - RNA, 19 nt, Artificial Sequence
  Description of Artificial Sequence: Synthetic oligonucleotide
uucuucuucuucuucuucu

SEQ ID NO: 176861 - RNA, 19 nt, Artificial Sequence
  Description of Artificial Sequence: Synthetic oligonucleotide
auuuugacuugguagugga

SEQ ID NO: 176862 - RNA, 19 nt, Artificial Sequence
  Description of Artificial Sequence: Synthetic oligonucleotide
aacaaaugauuccuucuua

SEQ ID NO: 176863 - RNA, 19 nt, Artificial Sequence
  Description of Artificial Sequence: Synthetic oligonucleotide
acaaagccggggcugcucc

SEQ ID NO: 176864 - RNA, 19 nt, Artificial Sequence
  Description of Artificial Sequence: Synthetic oligonucleotide
uauguaagacgucuacgaa

SEQ ID NO: 176865 - RNA, 19 nt, Artificial Sequence
  Description of Artificial Sequence: Synthetic oligonucleotide
gaugaaccuggccacauca

SEQ ID NO: 176866 - RNA, 19 nt, Artificial Sequence
  Description of Artificial Sequence: Synthetic oligonucleotide
acucaugccacaagaaaac

SEQ ID NO: 176867 - RNA, 19 nt, Artificial Sequence
  Description of Artificial Sequence: Synthetic oligonucleotide
accaugaccaaucggguca

SEQ ID NO: 176868 - RNA, 19 nt, Artificial Sequence
  Description of Artificial Sequence: Synthetic oligonucleotide
guuaggcccagcuggaucc

SEQ ID NO: 176869 - RNA, 19 nt, Artificial Sequence
  Description of Artificial Sequence: Synthetic oligonucleotide
uguggguagguguucagac

SEQ ID NO: 176870 - RNA, 19 nt, Artificial Sequence
  Description of Artificial Sequence: Synthetic oligonucleotide
uagguuuuauuuguggaga

SEQ ID NO: 176871 - RNA, 19 nt, Artificial Sequence
  Description of Artificial Sequence: Synthetic oligonucleotide
guugaaguggcaguuagac

SEQ ID NO: 176872 - RNA, 19 nt, Artificial Sequence
  Description of Artificial Sequence: Synthetic oligonucleotide
uuacuuucaaugucuguaa

SEQ ID NO: 176873 - RNA, 19 nt, Artificial Sequence
  Description of Artificial Sequence: Synthetic oligonucleotide
gaagagaugaauggaucgc

SEQ ID NO: 176874 - RNA, 19 nt, Artificial Sequence
  Description of Artificial Sequence: Synthetic oligonucleotide
caauacuucggccagguga

SEQ ID NO: 176875 - RNA, 19 nt, Artificial Sequence
  Description of Artificial Sequence: Synthetic oligonucleotide
ucccuagcacagaagauga

SEQ ID NO: 176876 - RNA, 19 nt, Artificial Sequence
  Description of Artificial Sequence: Synthetic oligonucleotide
cauagcacuucuuuaucac

SEQ ID NO: 176877 - RNA, 19 nt, Artificial Sequence
  Description of Artificial Sequence: Synthetic oligonucleotide
ucaugggagcacuuuacca

SEQ ID NO: 176878 - RNA, 19 nt, Artificial Sequence
  Description of Artificial Sequence: Synthetic oligonucleotide
cugagagcgagucuucagg

SEQ ID NO: 176879 - RNA, 19 nt, Artificial Sequence
  Description of Artificial Sequence: Synthetic oligonucleotide
uuucgaccaugaccaaucg

SEQ ID NO: 176880 - RNA, 19 nt, Artificial Sequence
  Description of Artificial Sequence: Synthetic oligonucleotide
agagaacuaguuacaaagg

SEQ ID NO: 176881 - RNA, 19 nt, Artificial Sequence
  Description of Artificial Sequence: Synthetic oligonucleotide
uaaaggggaugccagugac

SEQ ID NO: 176882 - RNA, 19 nt, Artificial Sequence
  Description of Artificial Sequence: Synthetic oligonucleotide
ugacucaugccacaagaaa

SEQ ID NO: 176883 - RNA, 19 nt, Artificial Sequence
  Description of Artificial Sequence: Synthetic oligonucleotide
acuucacaaacacugcgga

SEQ ID NO: 176884 - RNA, 19 nt, Artificial Sequence
  Description of Artificial Sequence: Synthetic oligonucleotide
uuugaugcgggaagacaug

SEQ ID NO: 176885 - RNA, 19 nt, Artificial Sequence
  Description of Artificial Sequence: Synthetic oligonucleotide
ggcacaaccacccuucucc

SEQ ID NO: 176886 - RNA, 19 nt, Artificial Sequence
  Description of Artificial Sequence: Synthetic oligonucleotide
aucuaguucauaaauaauu

SEQ ID NO: 176887 - RNA, 19 nt, Artificial Sequence
  Description of Artificial Sequence: Synthetic oligonucleotide
auauccggaacuacuacuc

SEQ ID NO: 176888 - RNA, 19 nt, Artificial Sequence
  Description of Artificial Sequence: Synthetic oligonucleotide
auaagaucuaguucauaaa

SEQ ID NO: 176889 - RNA, 19 nt, Artificial Sequence
  Description of Artificial Sequence: Synthetic oligonucleotide
gggauuaauacucaggaaa

SEQ ID NO: 176890 - RNA, 19 nt, Artificial Sequence
  Description of Artificial Sequence: Synthetic oligonucleotide
uucgaccaugaccaaucgg

SEQ ID NO: 176891 - RNA, 19 nt, Artificial Sequence
  Description of Artificial Sequence: Synthetic oligonucleotide
aagacgucuacgaaaucug

SEQ ID NO: 176892 - RNA, 19 nt, Artificial Sequence
  Description of Artificial Sequence: Synthetic oligonucleotide
gaccaaucgggucacagga

SEQ ID NO: 176893 - RNA, 19 nt, Artificial Sequence
  Description of Artificial Sequence: Synthetic oligonucleotide
agucaaccuuuaaagaggg

SEQ ID NO: 176894 - RNA, 19 nt, Artificial Sequence
  Description of Artificial Sequence: Synthetic oligonucleotide
acccgaaucuucucgauga

SEQ ID NO: 176895 - RNA, 19 nt, Artificial Sequence
  Description of Artificial Sequence: Synthetic oligonucleotide
caugagacuccucaccuug

SEQ ID NO: 176896 - RNA, 19 nt, Artificial Sequence
  Description of Artificial Sequence: Synthetic oligonucleotide
auggaucacaacgaagguc

SEQ ID NO: 176897 - RNA, 19 nt, Artificial Sequence
  Description of Artificial Sequence: Synthetic oligonucleotide
uguggaagugcgcggcggg

SEQ ID NO: 176898 - RNA, 19 nt, Artificial Sequence
  Description of Artificial Sequence: Synthetic oligonucleotide
gaugcgggaagacaugcca

SEQ ID NO: 176899 - RNA, 19 nt, Artificial Sequence
  Description of Artificial Sequence: Synthetic oligonucleotide
ugugccauacagagaaauc

SEQ ID NO: 176900 - RNA, 19 nt, Artificial Sequence
  Description of Artificial Sequence: Synthetic oligonucleotide
auuagccacguuuuaguau

SEQ ID NO: 176901 - RNA, 19 nt, Artificial Sequence
  Description of Artificial Sequence: Synthetic oligonucleotide
uaggaaucacucuuccacu

SEQ ID NO: 176902 - RNA, 19 nt, Artificial Sequence
  Description of Artificial Sequence: Synthetic oligonucleotide
ucugagagcgagucuucag

SEQ ID NO: 176903 - RNA, 19 nt, Artificial Sequence
  Description of Artificial Sequence: Synthetic oligonucleotide
cagauucugcuauuccggg

SEQ ID NO: 176904 - RNA, 19 nt, Artificial Sequence
  Description of Artificial Sequence: Synthetic oligonucleotide
gagaugaauggaucgcuca

SEQ ID NO: 176905 - RNA, 19 nt, Artificial Sequence
  Description of Artificial Sequence: Synthetic oligonucleotide
uucagacaccuacaguuuc

SEQ ID NO: 176906 - RNA, 19 nt, Artificial Sequence
  Description of Artificial Sequence: Synthetic oligonucleotide
gaauuuugacuugguagug

SEQ ID NO: 176907 - RNA, 19 nt, Artificial Sequence
  Description of Artificial Sequence: Synthetic oligonucleotide
aaucgggucacaggaagga

SEQ ID NO: 176908 - RNA, 19 nt, Artificial Sequence
  Description of Artificial Sequence: Synthetic oligonucleotide
gucuacgaaaucugcauca

SEQ ID NO: 176909 - RNA, 19 nt, Artificial Sequence
  Description of Artificial Sequence: Synthetic oligonucleotide
auaaaggggaugccaguga

SEQ ID NO: 176910 - RNA, 19 nt, Artificial Sequence
  Description of Artificial Sequence: Synthetic oligonucleotide
gaauguauguaagacgucu

SEQ ID NO: 176911 - RNA, 19 nt, Artificial Sequence
  Description of Artificial Sequence: Synthetic oligonucleotide
ugcaucgauucuuucugca

SEQ ID NO: 176912 - RNA, 19 nt, Artificial Sequence
  Description of Artificial Sequence: Synthetic oligonucleotide
gcauacucaaaguuaggcc

SEQ ID NO: 176913 - RNA, 19 nt, Artificial Sequence
  Description of Artificial Sequence: Synthetic oligonucleotide
ucaugccacaagaaaacuu

SEQ ID NO: 176914 - RNA, 19 nt, Artificial Sequence
  Description of Artificial Sequence: Synthetic oligonucleotide
cuggaucccaauacuucgg

SEQ ID NO: 176915 - RNA, 19 nt, Artificial Sequence
  Description of Artificial Sequence: Synthetic oligonucleotide
uggaucugacucaugccac

SEQ ID NO: 176916 - RNA, 19 nt, Artificial Sequence
  Description of Artificial Sequence: Synthetic oligonucleotide
agaauugacuggaagccug

SEQ ID NO: 176917 - RNA, 19 nt, Artificial Sequence
  Description of Artificial Sequence: Synthetic oligonucleotide
uguucaguaucagccagac

SEQ ID NO: 176918 - RNA, 19 nt, Artificial Sequence
  Description of Artificial Sequence: Synthetic oligonucleotide
aagacaugccauuggccau

SEQ ID NO: 176919 - RNA, 19 nt, Artificial Sequence
  Description of Artificial Sequence: Synthetic oligonucleotide
caaucgggucacaggaagg

SEQ ID NO: 176920 - RNA, 19 nt, Artificial Sequence
  Description of Artificial Sequence: Synthetic oligonucleotide
uucuucuucuucuucuuuu

SEQ ID NO: 176921 - RNA, 19 nt, Artificial Sequence
  Description of Artificial Sequence: Synthetic oligonucleotide
ucgggucacaggaaggagu

SEQ ID NO: 176922 - RNA, 19 nt, Artificial Sequence
  Description of Artificial Sequence: Synthetic oligonucleotide
aguuucacaguuuguguuu

SEQ ID NO: 176923 - RNA, 19 nt, Artificial Sequence
  Description of Artificial Sequence: Synthetic oligonucleotide
agggcuaacauuccagcau

SEQ ID NO: 176924 - RNA, 19 nt, Artificial Sequence
  Description of Artificial Sequence: Synthetic oligonucleotide
uggaagccugaugaaauca

SEQ ID NO: 176925 - RNA, 19 nt, Artificial Sequence
  Description of Artificial Sequence: Synthetic oligonucleotide
uccgaccagcugaaguagg

SEQ ID NO: 176926 - RNA, 19 nt, Artificial Sequence
  Description of Artificial Sequence: Synthetic oligonucleotide
uucacccgaaucuucucga

SEQ ID NO: 176927 - RNA, 19 nt, Artificial Sequence
  Description of Artificial Sequence: Synthetic oligonucleotide
aaacacccaaacaagggua

SEQ ID NO: 176928 - RNA, 19 nt, Artificial Sequence
  Description of Artificial Sequence: Synthetic oligonucleotide
acgucuacgaaaucugcau

SEQ ID NO: 176929 - RNA, 19 nt, Artificial Sequence
  Description of Artificial Sequence: Synthetic oligonucleotide
uauccggaacuacuacucu

SEQ ID NO: 176930 - RNA, 19 nt, Artificial Sequence
  Description of Artificial Sequence: Synthetic oligonucleotide
uccuacugguuucuggauc

SEQ ID NO: 176931 - RNA, 19 nt, Artificial Sequence
  Description of Artificial Sequence: Synthetic oligonucleotide
cucaugggagcacuuuacc

SEQ ID NO: 176932 - RNA, 19 nt, Artificial Sequence
  Description of Artificial Sequence: Synthetic oligonucleotide
agacgucuacgaaaucugc

SEQ ID NO: 176933 - RNA, 19 nt, Artificial Sequence
  Description of Artificial Sequence: Synthetic oligonucleotide
cucagucccagaaaaguga

SEQ ID NO: 176934 - RNA, 19 nt, Artificial Sequence
  Description of Artificial Sequence: Synthetic oligonucleotide
auccggaacuacuacucug

SEQ ID NO: 176935 - RNA, 19 nt, Artificial Sequence
  Description of Artificial Sequence: Synthetic oligonucleotide
uucguuuacuucagucuuc

SEQ ID NO: 176936 - RNA, 19 nt, Artificial Sequence
  Description of Artificial Sequence: Synthetic oligonucleotide
cacaacgaaggucuugcug

SEQ ID NO: 176937 - RNA, 19 nt, Artificial Sequence
  Description of Artificial Sequence: Synthetic oligonucleotide
uuuaguauuugagccuguc

SEQ ID NO: 176938 - RNA, 19 nt, Artificial Sequence
  Description of Artificial Sequence: Synthetic oligonucleotide
cuuuguagggcaucugaga

SEQ ID NO: 176939 - RNA, 19 nt, Artificial Sequence
  Description of Artificial Sequence: Synthetic oligonucleotide
caggagaaaggcgacuggg

SEQ ID NO: 176940 - RNA, 19 nt, Artificial Sequence
  Description of Artificial Sequence: Synthetic oligonucleotide
ucguuuacuucagucuuca

SEQ ID NO: 176941 - RNA, 19 nt, Artificial Sequence
  Description of Artificial Sequence: Synthetic oligonucleotide
agagaugaauggaucgcuc

SEQ ID NO: 176942 - RNA, 19 nt, Artificial Sequence
  Description of Artificial Sequence: Synthetic oligonucleotide
cagaaugacagcuauacuu

SEQ ID NO: 176943 - RNA, 19 nt, Artificial Sequence
  Description of Artificial Sequence: Synthetic oligonucleotide
gaggcggucaaacucugga

SEQ ID NO: 176944 - RNA, 19 nt, Artificial Sequence
  Description of Artificial Sequence: Synthetic oligonucleotide
ugguguagccagccgacac

SEQ ID NO: 176945 - RNA, 19 nt, Artificial Sequence
  Description of Artificial Sequence: Synthetic oligonucleotide
ucucgaugacaaagccggg

SEQ ID NO: 176946 - RNA, 19 nt, Artificial Sequence
  Description of Artificial Sequence: Synthetic oligonucleotide
ugaugcgggaagacaugcc

SEQ ID NO: 176947 - RNA, 19 nt, Artificial Sequence
  Description of Artificial Sequence: Synthetic oligonucleotide
gucaacauguccuacuggu

SEQ ID NO: 176948 - RNA, 19 nt, Artificial Sequence
  Description of Artificial Sequence: Synthetic oligonucleotide
ggacagaauuccucggagg

SEQ ID NO: 176949 - RNA, 19 nt, Artificial Sequence
  Description of Artificial Sequence: Synthetic oligonucleotide
agcacuuuaccagcugguc

SEQ ID NO: 176950 - RNA, 19 nt, Artificial Sequence
  Description of Artificial Sequence: Synthetic oligonucleotide
aguccgaccagcugaagua

SEQ ID NO: 176951 - RNA, 19 nt, Artificial Sequence
  Description of Artificial Sequence: Synthetic oligonucleotide
uucaauggugagagaacua

SEQ ID NO: 176952 - RNA, 19 nt, Artificial Sequence
  Description of Artificial Sequence: Synthetic oligonucleotide
uuccagcauauccggaacu

SEQ ID NO: 176953 - RNA, 19 nt, Artificial Sequence
  Description of Artificial Sequence: Synthetic oligonucleotide
aaagccggggcugcuccac

SEQ ID NO: 176954 - RNA, 19 nt, Artificial Sequence
  Description of Artificial Sequence: Synthetic oligonucleotide
agacuugucauggcacuuc

SEQ ID NO: 176955 - RNA, 19 nt, Artificial Sequence
  Description of Artificial Sequence: Synthetic oligonucleotide
aaucacucuuccacuugag

SEQ ID NO: 176956 - RNA, 19 nt, Artificial Sequence
  Description of Artificial Sequence: Synthetic oligonucleotide
cuucuaacuuaacuaacaa

SEQ ID NO: 176957 - RNA, 19 nt, Artificial Sequence
  Description of Artificial Sequence: Synthetic oligonucleotide
ucuccaguacgucccuuga

SEQ ID NO: 176958 - RNA, 19 nt, Artificial Sequence
  Description of Artificial Sequence: Synthetic oligonucleotide
uccuuagggcaaauuuacu

SEQ ID NO: 176959 - RNA, 19 nt, Artificial Sequence
  Description of Artificial Sequence: Synthetic oligonucleotide
uccugcuuucacccgaauc

SEQ ID NO: 176960 - RNA, 19 nt, Artificial Sequence
  Description of Artificial Sequence: Synthetic oligonucleotide
cacccuucuccuagcaagg

SEQ ID NO: 176961 - RNA, 19 nt, Artificial Sequence
  Description of Artificial Sequence: Synthetic oligonucleotide
aauguauguaagacgucua

SEQ ID NO: 176962 - RNA, 19 nt, Artificial Sequence
  Description of Artificial Sequence: Synthetic oligonucleotide
uaccccaagagguggacau

SEQ ID NO: 176963 - RNA, 19 nt, Artificial Sequence
  Description of Artificial Sequence: Synthetic oligonucleotide
ucucuucuucuucuucuuc

SEQ ID NO: 176964 - RNA, 19 nt, Artificial Sequence
  Description of Artificial Sequence: Synthetic oligonucleotide
guccuuagggcaaauuuac

SEQ ID NO: 176965 - RNA, 19 nt, Artificial Sequence
  Description of Artificial Sequence: Synthetic oligonucleotide
uaccuuaccuuaccuuccu

SEQ ID NO: 176966 - RNA, 19 nt, Artificial Sequence
  Description of Artificial Sequence: Synthetic oligonucleotide
agauucugcuauuccggga

SEQ ID NO: 176967 - RNA, 19 nt, Artificial Sequence
  Description of Artificial Sequence: Synthetic oligonucleotide
acugcggaguccuuucccu

SEQ ID NO: 176968 - RNA, 19 nt, Artificial Sequence
  Description of Artificial Sequence: Synthetic oligonucleotide
gaucacaacgaaggucuug

SEQ ID NO: 176969 - RNA, 19 nt, Artificial Sequence
  Description of Artificial Sequence: Synthetic oligonucleotide
aacuaacaagauagagcug

SEQ ID NO: 176970 - RNA, 19 nt, Artificial Sequence
  Description of Artificial Sequence: Synthetic oligonucleotide
uuccugucaccguccagcc

SEQ ID NO: 176971 - RNA, 19 nt, Artificial Sequence
  Description of Artificial Sequence: Synthetic oligonucleotide
gaacaaaugauuccuucuu

SEQ ID NO: 176972 - RNA, 19 nt, Artificial Sequence
  Description of Artificial Sequence: Synthetic oligonucleotide
gauagagcugggauuaaua

SEQ ID NO: 176973 - RNA, 19 nt, Artificial Sequence
  Description of Artificial Sequence: Synthetic oligonucleotide
ucccuuuccaagugacaca

SEQ ID NO: 176974 - RNA, 19 nt, Artificial Sequence
  Description of Artificial Sequence: Synthetic oligonucleotide
ucuucuucuucuucuucuu

SEQ ID NO: 176975 - RNA, 19 nt, Artificial Sequence
  Description of Artificial Sequence: Synthetic oligonucleotide
uggagcgcgguagagcgcc

SEQ ID NO: 176976 - RNA, 19 nt, Artificial Sequence
  Description of Artificial Sequence: Synthetic oligonucleotide
guaaaaucucuuccccguc

SEQ ID NO: 176977 - RNA, 19 nt, Artificial Sequence
  Description of Artificial Sequence: Synthetic oligonucleotide
acaaaauaagaggcccuca

SEQ ID NO: 176978 - RNA, 19 nt, Artificial Sequence
  Description of Artificial Sequence: Synthetic oligonucleotide
gacacagauucugcuauuc

SEQ ID NO: 176979 - RNA, 19 nt, Artificial Sequence
  Description of Artificial Sequence: Synthetic oligonucleotide
ugacuugguaguggaagac

SEQ ID NO: 176980 - RNA, 19 nt, Artificial Sequence
  Description of Artificial Sequence: Synthetic oligonucleotide
gccugaugaaaucagucac

SEQ ID NO: 176981 - RNA, 19 nt, Artificial Sequence
  Description of Artificial Sequence: Synthetic oligonucleotide
uacuucggccaggugaccc

SEQ ID NO: 176982 - RNA, 19 nt, Artificial Sequence
  Description of Artificial Sequence: Synthetic oligonucleotide
gcuauaccccaagaggugg

SEQ ID NO: 176983 - RNA, 19 nt, Artificial Sequence
  Description of Artificial Sequence: Synthetic oligonucleotide
caagauagagcugggauua

SEQ ID NO: 176984 - RNA, 19 nt, Artificial Sequence
  Description of Artificial Sequence: Synthetic oligonucleotide
agccgugucaucagggguc

SEQ ID NO: 176985 - RNA, 19 nt, Artificial Sequence
  Description of Artificial Sequence: Synthetic oligonucleotide
agcaauagccucuggcaua

SEQ ID NO: 176986 - RNA, 19 nt, Artificial Sequence
  Description of Artificial Sequence: Synthetic oligonucleotide
gacuugucauggcacuuca

SEQ ID NO: 176987 - RNA, 19 nt, Artificial Sequence
  Description of Artificial Sequence: Synthetic oligonucleotide
gagccugucuucuaacuua

SEQ ID NO: 176988 - RNA, 19 nt, Artificial Sequence
  Description of Artificial Sequence: Synthetic oligonucleotide
gcgccaaagggcuggagcg

SEQ ID NO: 176989 - RNA, 19 nt, Artificial Sequence
  Description of Artificial Sequence: Synthetic oligonucleotide
cuaacuuaacuaacaagau

SEQ ID NO: 176990 - RNA, 19 nt, Artificial Sequence
  Description of Artificial Sequence: Synthetic oligonucleotide
agcccacauuguugcaucg

SEQ ID NO: 176991 - RNA, 19 nt, Artificial Sequence
  Description of Artificial Sequence: Synthetic oligonucleotide
cuuugaugcgggaagacau

SEQ ID NO: 176992 - RNA, 19 nt, Artificial Sequence
  Description of Artificial Sequence: Synthetic oligonucleotide
gacgucuacgaaaucugca

SEQ ID NO: 176993 - RNA, 19 nt, Artificial Sequence
  Description of Artificial Sequence: Synthetic oligonucleotide
ggauccaagccagugauuc

SEQ ID NO: 176994 - RNA, 19 nt, Artificial Sequence
  Description of Artificial Sequence: Synthetic oligonucleotide
gggacagaauuccucggag

SEQ ID NO: 176995 - RNA, 19 nt, Artificial Sequence
  Description of Artificial Sequence: Synthetic oligonucleotide
ucuacgaaaucugcaucau

SEQ ID NO: 176996 - RNA, 19 nt, Artificial Sequence
  Description of Artificial Sequence: Synthetic oligonucleotide
acuuaacuaacaagauaga

SEQ ID NO: 176997 - RNA, 19 nt, Artificial Sequence
  Description of Artificial Sequence: Synthetic oligonucleotide
cuggauaguguugcugggc

SEQ ID NO: 176998 - RNA, 19 nt, Artificial Sequence
  Description of Artificial Sequence: Synthetic oligonucleotide
uuacuucguuuacuucagu

SEQ ID NO: 176999 - RNA, 19 nt, Artificial Sequence
  Description of Artificial Sequence: Synthetic oligonucleotide
cuucuucuucuucuucuuc

SEQ ID NO: 177000 - RNA, 19 nt, Artificial Sequence
  Description of Artificial Sequence: Synthetic oligonucleotide
ccuagcacagaagaugacc

SEQ ID NO: 177001 - RNA, 19 nt, Artificial Sequence
  Description of Artificial Sequence: Synthetic oligonucleotide
cacacgaauggcuucccca

SEQ ID NO: 177002 - RNA, 19 nt, Artificial Sequence
  Description of Artificial Sequence: Synthetic oligonucleotide
cuacgaaaucugcaucauc

SEQ ID NO: 177003 - RNA, 19 nt, Artificial Sequence
  Description of Artificial Sequence: Synthetic oligonucleotide
ggggauauucucacucucg

SEQ ID NO: 177004 - RNA, 19 nt, Artificial Sequence
  Description of Artificial Sequence: Synthetic oligonucleotide
cacccaaacaaggguauug

SEQ ID NO: 177005 - RNA, 19 nt, Artificial Sequence
  Description of Artificial Sequence: Synthetic oligonucleotide
uagcccacauuguugcauc

SEQ ID NO: 177006 - RNA, 19 nt, Artificial Sequence
  Description of Artificial Sequence: Synthetic oligonucleotide
cugggcccgauacagccag

SEQ ID NO: 177007 - RNA, 19 nt, Artificial Sequence
  Description of Artificial Sequence: Synthetic oligonucleotide
gcaucgauucuuucugcag

SEQ ID NO: 177008 - RNA, 19 nt, Artificial Sequence
  Description of Artificial Sequence: Synthetic oligonucleotide
cacucauuuucgaccauga

SEQ ID NO: 177009 - RNA, 19 nt, Artificial Sequence
  Description of Artificial Sequence: Synthetic oligonucleotide
agccuugcugggguuuucc

SEQ ID NO: 177010 - RNA, 19 nt, Artificial Sequence
  Description of Artificial Sequence: Synthetic oligonucleotide
accuccguauaaaucagga

SEQ ID NO: 177011 - RNA, 19 nt, Artificial Sequence
  Description of Artificial Sequence: Synthetic oligonucleotide
gguuuuauuuguggagacc

SEQ ID NO: 177012 - RNA, 19 nt, Artificial Sequence
  Description of Artificial Sequence: Synthetic oligonucleotide
gacuccucaccuuguauua

SEQ ID NO: 177013 - RNA, 19 nt, Artificial Sequence
  Description of Artificial Sequence: Synthetic oligonucleotide
gcaaggagucaaugaagag

SEQ ID NO: 177014 - RNA, 19 nt, Artificial Sequence
  Description of Artificial Sequence: Synthetic oligonucleotide
caguucuccgauguccacc

SEQ ID NO: 177015 - RNA, 19 nt, Artificial Sequence
  Description of Artificial Sequence: Synthetic oligonucleotide
acccaaacaaggguauugu

SEQ ID NO: 177016 - RNA, 19 nt, Artificial Sequence
  Description of Artificial Sequence: Synthetic oligonucleotide
aggcacaaccacccuucuc

SEQ ID NO: 177017 - RNA, 19 nt, Artificial Sequence
  Description of Artificial Sequence: Synthetic oligonucleotide
accuuaccuuaccuuccuc

SEQ ID NO: 177018 - RNA, 19 nt, Artificial Sequence
  Description of Artificial Sequence: Synthetic oligonucleotide
uccuagcaagggcuaacau

SEQ ID NO: 177019 - RNA, 19 nt, Artificial Sequence
  Description of Artificial Sequence: Synthetic oligonucleotide
ggaagccugaugaaaucag

SEQ ID NO: 177020 - RNA, 19 nt, Artificial Sequence
  Description of Artificial Sequence: Synthetic oligonucleotide
auuuucgaccaugaccaau

SEQ ID NO: 177021 - RNA, 19 nt, Artificial Sequence
  Description of Artificial Sequence: Synthetic oligonucleotide
acuacuacucugacacucu

SEQ ID NO: 177022 - RNA, 19 nt, Artificial Sequence
  Description of Artificial Sequence: Synthetic oligonucleotide
ccaaucgggucacaggaag

SEQ ID NO: 177023 - RNA, 19 nt, Artificial Sequence
  Description of Artificial Sequence: Synthetic oligonucleotide
gaauugacuggaagccuga

SEQ ID NO: 177024 - RNA, 19 nt, Artificial Sequence
  Description of Artificial Sequence: Synthetic oligonucleotide
uauaccccaagagguggac

SEQ ID NO: 177025 - RNA, 19 nt, Artificial Sequence
  Description of Artificial Sequence: Synthetic oligonucleotide
cauauccggaacuacuacu

SEQ ID NO: 177026 - RNA, 19 nt, Artificial Sequence
  Description of Artificial Sequence: Synthetic oligonucleotide
cuacuacucugacacucuc

SEQ ID NO: 177027 - RNA, 19 nt, Artificial Sequence
  Description of Artificial Sequence: Synthetic oligonucleotide
ugcggaguccuuucccuuc

SEQ ID NO: 177028 - RNA, 19 nt, Artificial Sequence
  Description of Artificial Sequence: Synthetic oligonucleotide
cacugcggaguccuuuccc

SEQ ID NO: 177029 - RNA, 19 nt, Artificial Sequence
  Description of Artificial Sequence: Synthetic oligonucleotide
uccagcauauccggaacua

SEQ ID NO: 177030 - RNA, 19 nt, Artificial Sequence
  Description of Artificial Sequence: Synthetic oligonucleotide
gcaauagccucuggcauag

SEQ ID NO: 177031 - RNA, 19 nt, Artificial Sequence
  Description of Artificial Sequence: Synthetic oligonucleotide
cacucucggccacugugcc

SEQ ID NO: 177032 - RNA, 19 nt, Artificial Sequence
  Description of Artificial Sequence: Synthetic oligonucleotide
ucacaacgaaggucuugcu

SEQ ID NO: 177033 - RNA, 19 nt, Artificial Sequence
  Description of Artificial Sequence: Synthetic oligonucleotide
gguagagcgccgcagggca

SEQ ID NO: 177034 - RNA, 19 nt, Artificial Sequence
  Description of Artificial Sequence: Synthetic oligonucleotide
agccauggaucacaacgaa

SEQ ID NO: 177035 - RNA, 19 nt, Artificial Sequence
  Description of Artificial Sequence: Synthetic oligonucleotide
ggauaaaugucaacauguc

SEQ ID NO: 177036 - RNA, 19 nt, Artificial Sequence
  Description of Artificial Sequence: Synthetic oligonucleotide
ggaucccaauacuucggcc

SEQ ID NO: 177037 - RNA, 19 nt, Artificial Sequence
  Description of Artificial Sequence: Synthetic oligonucleotide
accguccagccauggauca

SEQ ID NO: 177038 - RNA, 19 nt, Artificial Sequence
  Description of Artificial Sequence: Synthetic oligonucleotide
cucuucuucuucuucuucu

SEQ ID NO: 177039 - RNA, 19 nt, Artificial Sequence
  Description of Artificial Sequence: Synthetic oligonucleotide
gauguccaccuccguauaa

SEQ ID NO: 177040 - RNA, 19 nt, Artificial Sequence
  Description of Artificial Sequence: Synthetic oligonucleotide
cacccgaaucuucucgaug

SEQ ID NO: 177041 - RNA, 19 nt, Artificial Sequence
  Description of Artificial Sequence: Synthetic oligonucleotide
caccguccagccauggauc

SEQ ID NO: 177042 - RNA, 19 nt, Artificial Sequence
  Description of Artificial Sequence: Synthetic oligonucleotide
gaaguggcaguuagacaca

SEQ ID NO: 177043 - RNA, 19 nt, Artificial Sequence
  Description of Artificial Sequence: Synthetic oligonucleotide
agcauauccggaacuacua

SEQ ID NO: 177044 - RNA, 19 nt, Artificial Sequence
  Description of Artificial Sequence: Synthetic oligonucleotide
aguacgucccuugacucuu

SEQ ID NO: 177045 - RNA, 19 nt, Artificial Sequence
  Description of Artificial Sequence: Synthetic oligonucleotide
aucgggucacaggaaggag

SEQ ID NO: 177046 - RNA, 19 nt, Artificial Sequence
  Description of Artificial Sequence: Synthetic oligonucleotide
auacuucggccaggugacc

SEQ ID NO: 177047 - RNA, 19 nt, Artificial Sequence
  Description of Artificial Sequence: Synthetic oligonucleotide
gcauauccggaacuacuac

SEQ ID NO: 177048 - RNA, 19 nt, Artificial Sequence
  Description of Artificial Sequence: Synthetic oligonucleotide
cugacucaugccacaagaa

SEQ ID NO: 177049 - RNA, 19 nt, Artificial Sequence
  Description of Artificial Sequence: Synthetic oligonucleotide
cuguggaagugcgcggcgg

SEQ ID NO: 177050 - RNA, 19 nt, Artificial Sequence
  Description of Artificial Sequence: Synthetic oligonucleotide
cuauaccccaagaggugga

SEQ ID NO: 177051 - RNA, 19 nt, Artificial Sequence
  Description of Artificial Sequence: Synthetic oligonucleotide
agauagagcugggauuaau

SEQ ID NO: 177052 - RNA, 19 nt, Artificial Sequence
  Description of Artificial Sequence: Synthetic oligonucleotide
guuugggcacccaacucuc

SEQ ID NO: 177053 - RNA, 19 nt, Artificial Sequence
  Description of Artificial Sequence: Synthetic oligonucleotide
cuccaguacgucccuugac

SEQ ID NO: 177054 - RNA, 19 nt, Artificial Sequence
  Description of Artificial Sequence: Synthetic oligonucleotide
uccgggaaugagguggcaa

SEQ ID NO: 177055 - RNA, 19 nt, Artificial Sequence
  Description of Artificial Sequence: Synthetic oligonucleotide
caaccacccuucuccuagc

SEQ ID NO: 177056 - RNA, 19 nt, Artificial Sequence
  Description of Artificial Sequence: Synthetic oligonucleotide
ccuccauugggauaaaugu

SEQ ID NO: 177057 - RNA, 19 nt, Artificial Sequence
  Description of Artificial Sequence: Synthetic oligonucleotide
cucugacacucuccaguac

SEQ ID NO: 177058 - RNA, 19 nt, Artificial Sequence
  Description of Artificial Sequence: Synthetic oligonucleotide
gaaaucucaaaggccuggu

SEQ ID NO: 177059 - RNA, 19 nt, Artificial Sequence
  Description of Artificial Sequence: Synthetic oligonucleotide
cagccgacacuggauagug

SEQ ID NO: 177060 - RNA, 19 nt, Artificial Sequence
  Description of Artificial Sequence: Synthetic oligonucleotide
aagauagagcugggauuaa

SEQ ID NO: 177061 - RNA, 19 nt, Artificial Sequence
  Description of Artificial Sequence: Synthetic oligonucleotide
gggcaagucaaccuuuaaa

SEQ ID NO: 177062 - RNA, 19 nt, Artificial Sequence
  Description of Artificial Sequence: Synthetic oligonucleotide
ggaggcgccaaagggcugg

SEQ ID NO: 177063 - RNA, 19 nt, Artificial Sequence
  Description of Artificial Sequence: Synthetic oligonucleotide
uugguguagccagccgaca

SEQ ID NO: 177064 - RNA, 19 nt, Artificial Sequence
  Description of Artificial Sequence: Synthetic oligonucleotide
cauuccugucaccguccag

SEQ ID NO: 177065 - RNA, 19 nt, Artificial Sequence
  Description of Artificial Sequence: Synthetic oligonucleotide
augccacaagaaaacuuga

SEQ ID NO: 177066 - RNA, 19 nt, Artificial Sequence
  Description of Artificial Sequence: Synthetic oligonucleotide
guaagacgucuacgaaauc

SEQ ID NO: 177067 - RNA, 19 nt, Artificial Sequence
  Description of Artificial Sequence: Synthetic oligonucleotide
auguccaccuccguauaaa

SEQ ID NO: 177068 - RNA, 19 nt, Artificial Sequence
  Description of Artificial Sequence: Synthetic oligonucleotide
agccacguuuuaguauuug

SEQ ID NO: 177069 - RNA, 19 nt, Artificial Sequence
  Description of Artificial Sequence: Synthetic oligonucleotide
agggcaagucaaccuuuaa

SEQ ID NO: 177070 - RNA, 19 nt, Artificial Sequence
  Description of Artificial Sequence: Synthetic oligonucleotide
uggauccaagccagugauu

SEQ ID NO: 177071 - RNA, 19 nt, Artificial Sequence
  Description of Artificial Sequence: Synthetic oligonucleotide
auaccccaagagguggaca

SEQ ID NO: 177072 - RNA, 19 nt, Artificial Sequence
  Description of Artificial Sequence: Synthetic oligonucleotide
ggcuauaccccaagaggug

SEQ ID NO: 177073 - RNA, 19 nt, Artificial Sequence
  Description of Artificial Sequence: Synthetic oligonucleotide
ggcaauuguccucagccgu

SEQ ID NO: 177074 - RNA, 19 nt, Artificial Sequence
  Description of Artificial Sequence: Synthetic oligonucleotide
ggaucugacucaugccaca

SEQ ID NO: 177075 - RNA, 19 nt, Artificial Sequence
  Description of Artificial Sequence: Synthetic oligonucleotide
ggguaguuaaacucuuccu

SEQ ID NO: 177076 - RNA, 19 nt, Artificial Sequence
  Description of Artificial Sequence: Synthetic oligonucleotide
ccaguacgucccuugacuc

SEQ ID NO: 177077 - RNA, 19 nt, Artificial Sequence
  Description of Artificial Sequence: Synthetic oligonucleotide
gaagugcgcggcgggguug

SEQ ID NO: 177078 - RNA, 19 nt, Artificial Sequence
  Description of Artificial Sequence: Synthetic oligonucleotide
ugucuguggguagguguuc

SEQ ID NO: 177079 - RNA, 19 nt, Artificial Sequence
  Description of Artificial Sequence: Synthetic oligonucleotide
cauggaucacaacgaaggu

SEQ ID NO: 177080 - RNA, 19 nt, Artificial Sequence
  Description of Artificial Sequence: Synthetic oligonucleotide
gcuauuccgggaaugaggu

SEQ ID NO: 177081 - RNA, 19 nt, Artificial Sequence
  Description of Artificial Sequence: Synthetic oligonucleotide
aagugcgcggcgggguuga

SEQ ID NO: 177082 - RNA, 19 nt, Artificial Sequence
  Description of Artificial Sequence: Synthetic oligonucleotide
gguccuuagggcaaauuua

SEQ ID NO: 177083 - RNA, 19 nt, Artificial Sequence
  Description of Artificial Sequence: Synthetic oligonucleotide
cccgauacagccaguccac

SEQ ID NO: 177084 - RNA, 19 nt, Artificial Sequence
  Description of Artificial Sequence: Synthetic oligonucleotide
gagcgagucuucagguaca

SEQ ID NO: 177085 - RNA, 19 nt, Artificial Sequence
  Description of Artificial Sequence: Synthetic oligonucleotide
ccccaauguugcauccugg

SEQ ID NO: 177086 - RNA, 19 nt, Artificial Sequence
  Description of Artificial Sequence: Synthetic oligonucleotide
ggccaccccuccuugggag

SEQ ID NO: 177087 - RNA, 19 nt, Artificial Sequence
  Description of Artificial Sequence: Synthetic oligonucleotide
ccaagagguggacauuguc

SEQ ID NO: 177088 - RNA, 19 nt, Artificial Sequence
  Description of Artificial Sequence: Synthetic oligonucleotide
gggcuaacauuccagcaua

SEQ ID NO: 177089 - RNA, 19 nt, Artificial Sequence
  Description of Artificial Sequence: Synthetic oligonucleotide
agccugucuucuaacuuaa

SEQ ID NO: 177090 - RNA, 19 nt, Artificial Sequence
  Description of Artificial Sequence: Synthetic oligonucleotide
gcucaugggagcacuuuac

SEQ ID NO: 177091 - RNA, 19 nt, Artificial Sequence
  Description of Artificial Sequence: Synthetic oligonucleotide
cuccuagcaagggcuaaca

SEQ ID NO: 177092 - RNA, 19 nt, Artificial Sequence
  Description of Artificial Sequence: Synthetic oligonucleotide
cuugggaggcggucaaacu

SEQ ID NO: 177093 - RNA, 19 nt, Artificial Sequence
  Description of Artificial Sequence: Synthetic oligonucleotide
auuggccaugagacuccuc

SEQ ID NO: 177094 - RNA, 19 nt, Artificial Sequence
  Description of Artificial Sequence: Synthetic oligonucleotide
ccgacacuggauaguguug

SEQ ID NO: 177095 - RNA, 19 nt, Artificial Sequence
  Description of Artificial Sequence: Synthetic oligonucleotide
augcgggaagacaugccau

SEQ ID NO: 177096 - RNA, 19 nt, Artificial Sequence
  Description of Artificial Sequence: Synthetic oligonucleotide
gucaccguccagccaugga

SEQ ID NO: 177097 - RNA, 19 nt, Artificial Sequence
  Description of Artificial Sequence: Synthetic oligonucleotide
cuguggguagguguucaga

SEQ ID NO: 177098 - RNA, 19 nt, Artificial Sequence
  Description of Artificial Sequence: Synthetic oligonucleotide
auaguguugcugggcccga

SEQ ID NO: 177099 - RNA, 19 nt, Artificial Sequence
  Description of Artificial Sequence: Synthetic oligonucleotide
ggugacccucuggugaaug

SEQ ID NO: 177100 - RNA, 19 nt, Artificial Sequence
  Description of Artificial Sequence: Synthetic oligonucleotide
aguaucagccagacuucuu

SEQ ID NO: 177101 - RNA, 19 nt, Artificial Sequence
  Description of Artificial Sequence: Synthetic oligonucleotide
accccuccuugggaggcgg

SEQ ID NO: 177102 - RNA, 19 nt, Artificial Sequence
  Description of Artificial Sequence: Synthetic oligonucleotide
gagcacuuuaccagcuggu

SEQ ID NO: 177103 - RNA, 19 nt, Artificial Sequence
  Description of Artificial Sequence: Synthetic oligonucleotide
gaucgcucaugggagcacu

SEQ ID NO: 177104 - RNA, 19 nt, Artificial Sequence
  Description of Artificial Sequence: Synthetic oligonucleotide
caguccgaccagcugaagu

SEQ ID NO: 177105 - RNA, 19 nt, Artificial Sequence
  Description of Artificial Sequence: Synthetic oligonucleotide
cagcaauagccucuggcau

SEQ ID NO: 177106 - RNA, 19 nt, Artificial Sequence
  Description of Artificial Sequence: Synthetic oligonucleotide
ggguccuuagggcaaauuu

SEQ ID NO: 177107 - RNA, 19 nt, Artificial Sequence
  Description of Artificial Sequence: Synthetic oligonucleotide
gcgggaagacaugccauug

SEQ ID NO: 177108 - RNA, 19 nt, Artificial Sequence
  Description of Artificial Sequence: Synthetic oligonucleotide
cauuuucgaccaugaccaa

SEQ ID NO: 177109 - RNA, 19 nt, Artificial Sequence
  Description of Artificial Sequence: Synthetic oligonucleotide
ccuuagggcaaauuuacuu

SEQ ID NO: 177110 - RNA, 19 nt, Artificial Sequence
  Description of Artificial Sequence: Synthetic oligonucleotide
accaaucgggucacaggaa

SEQ ID NO: 177111 - RNA, 19 nt, Artificial Sequence
  Description of Artificial Sequence: Synthetic oligonucleotide
aguggcaguuagacacaga

SEQ ID NO: 177112 - RNA, 19 nt, Artificial Sequence
  Description of Artificial Sequence: Synthetic oligonucleotide
caguacgucccuugacucu

SEQ ID NO: 177113 - RNA, 19 nt, Artificial Sequence
  Description of Artificial Sequence: Synthetic oligonucleotide
caacgaaggucuugcugcu

SEQ ID NO: 177114 - RNA, 19 nt, Artificial Sequence
  Description of Artificial Sequence: Synthetic oligonucleotide
gguugaaguggcaguuaga

SEQ ID NO: 177115 - RNA, 19 nt, Artificial Sequence
  Description of Artificial Sequence: Synthetic oligonucleotide
cgucuacgaaaucugcauc

SEQ ID NO: 177116 - RNA, 19 nt, Artificial Sequence
  Description of Artificial Sequence: Synthetic oligonucleotide
caucauuucccaccagcuu

SEQ ID NO: 177117 - RNA, 19 nt, Artificial Sequence
  Description of Artificial Sequence: Synthetic oligonucleotide
acacccaaacaaggguauu

SEQ ID NO: 177118 - RNA, 19 nt, Artificial Sequence
  Description of Artificial Sequence: Synthetic oligonucleotide
ggguagguguucagacacc

SEQ ID NO: 177119 - RNA, 19 nt, Artificial Sequence
  Description of Artificial Sequence: Synthetic oligonucleotide
uuccgggaaugagguggca

SEQ ID NO: 177120 - RNA, 19 nt, Artificial Sequence
  Description of Artificial Sequence: Synthetic oligonucleotide
accuuguauuagccacguu

SEQ ID NO: 177121 - RNA, 19 nt, Artificial Sequence
  Description of Artificial Sequence: Synthetic oligonucleotide
ccuaaucacauaggcacaa

SEQ ID NO: 177122 - RNA, 19 nt, Artificial Sequence
  Description of Artificial Sequence: Synthetic oligonucleotide
ccguauaaaucaggaagga

SEQ ID NO: 177123 - RNA, 19 nt, Artificial Sequence
  Description of Artificial Sequence: Synthetic oligonucleotide
ccucaccuuguauuagcca

SEQ ID NO: 177124 - RNA, 19 nt, Artificial Sequence
  Description of Artificial Sequence: Synthetic oligonucleotide
ccggaacuacuacucugac

SEQ ID NO: 177125 - RNA, 19 nt, Artificial Sequence
  Description of Artificial Sequence: Synthetic oligonucleotide
gcaucugagagcgagucuu

SEQ ID NO: 177126 - RNA, 19 nt, Artificial Sequence
  Description of Artificial Sequence: Synthetic oligonucleotide
cuucuucuucuucuucuuu

SEQ ID NO: 177127 - RNA, 19 nt, Artificial Sequence
  Description of Artificial Sequence: Synthetic oligonucleotide
caauagccucuggcauagc

SEQ ID NO: 177128 - RNA, 19 nt, Artificial Sequence
  Description of Artificial Sequence: Synthetic oligonucleotide
gccgugucaucaggggucc

SEQ ID NO: 177129 - RNA, 19 nt, Artificial Sequence
  Description of Artificial Sequence: Synthetic oligonucleotide
ccuagcaagggcuaacauu

SEQ ID NO: 177130 - RNA, 19 nt, Artificial Sequence
  Description of Artificial Sequence: Synthetic oligonucleotide
ccuccguauaaaucaggaa

SEQ ID NO: 177131 - RNA, 19 nt, Artificial Sequence
  Description of Artificial Sequence: Synthetic oligonucleotide
gccgacacuggauaguguu

SEQ ID NO: 177132 - RNA, 19 nt, Artificial Sequence
  Description of Artificial Sequence: Synthetic oligonucleotide
gagacuugucauggcacuu

SEQ ID NO: 177133 - RNA, 19 nt, Artificial Sequence
  Description of Artificial Sequence: Synthetic oligonucleotide
ccuaucugcuguccuuuga

SEQ ID NO: 177134 - RNA, 19 nt, Artificial Sequence
  Description of Artificial Sequence: Synthetic oligonucleotide
cucucuucuucuucuucuu

SEQ ID NO: 177135 - RNA, 19 nt, Artificial Sequence
  Description of Artificial Sequence: Synthetic oligonucleotide
cuccuugggaggcggucaa

SEQ ID NO: 177136 - RNA, 19 nt, Artificial Sequence
  Description of Artificial Sequence: Synthetic oligonucleotide
cacaaccacccuucuccua

SEQ ID NO: 177137 - RNA, 19 nt, Artificial Sequence
  Description of Artificial Sequence: Synthetic oligonucleotide
ccgaccagcugaaguagga

SEQ ID NO: 177138 - RNA, 19 nt, Artificial Sequence
  Description of Artificial Sequence: Synthetic oligonucleotide
caguaucagccagacuucu

SEQ ID NO: 177139 - RNA, 19 nt, Artificial Sequence
  Description of Artificial Sequence: Synthetic oligonucleotide
cccuagcacagaagaugac

SEQ ID NO: 177140 - RNA, 19 nt, Artificial Sequence
  Description of Artificial Sequence: Synthetic oligonucleotide
caccuacaguuucacaguu

SEQ ID NO: 177141 - RNA, 19 nt, Artificial Sequence
  Description of Artificial Sequence: Synthetic oligonucleotide
agccgacacuggauagugu

SEQ ID NO: 177142 - RNA, 19 nt, Artificial Sequence
  Description of Artificial Sequence: Synthetic oligonucleotide
cagccgugucaucaggggu

SEQ ID NO: 177143 - RNA, 19 nt, Artificial Sequence
  Description of Artificial Sequence: Synthetic oligonucleotide
ccaauacuucggccaggug

SEQ ID NO: 177144 - RNA, 19 nt, Artificial Sequence
  Description of Artificial Sequence: Synthetic oligonucleotide
ggaucgcucaugggagcac

SEQ ID NO: 177145 - RNA, 19 nt, Artificial Sequence
  Description of Artificial Sequence: Synthetic oligonucleotide
ccgauacagccaguccacc

SEQ ID NO: 177146 - RNA, 19 nt, Artificial Sequence
  Description of Artificial Sequence: Synthetic oligonucleotide
ccuuuaccuuaccuuaccu

SEQ ID NO: 177147 - RNA, 19 nt, Artificial Sequence
  Description of Artificial Sequence: Synthetic oligonucleotide
gugcgcggcgggguugagc

SEQ ID NO: 177148 - RNA, 19 nt, Artificial Sequence
  Description of Artificial Sequence: Synthetic oligonucleotide
aucgcucaugggagcacuu

SEQ ID NO: 177149 - RNA, 19 nt, Artificial Sequence
  Description of Artificial Sequence: Synthetic oligonucleotide
guaagccuugcugggguuu

SEQ ID NO: 177150 - RNA, 19 nt, Artificial Sequence
  Description of Artificial Sequence: Synthetic oligonucleotide
ggcaucugagagcgagucu

SEQ ID NO: 177151 - RNA, 19 nt, Artificial Sequence
  Description of Artificial Sequence: Synthetic oligonucleotide
aggugacccucuggugaau

SEQ ID NO: 177152 - RNA, 19 nt, Artificial Sequence
  Description of Artificial Sequence: Synthetic oligonucleotide
caugaccaaucgggucaca

SEQ ID NO: 177153 - RNA, 19 nt, Artificial Sequence
  Description of Artificial Sequence: Synthetic oligonucleotide
gcgcgguagagcgccgcag

SEQ ID NO: 177154 - RNA, 19 nt, Artificial Sequence
  Description of Artificial Sequence: Synthetic oligonucleotide
ggagcgcgguagagcgccg

SEQ ID NO: 177155 - RNA, 19 nt, Artificial Sequence
  Description of Artificial Sequence: Synthetic oligonucleotide
agugcgcggcgggguugag

SEQ ID NO: 177156 - RNA, 19 nt, Artificial Sequence
  Description of Artificial Sequence: Synthetic oligonucleotide
agggguccuuagggcaaau

SEQ ID NO: 177157 - RNA, 19 nt, Artificial Sequence
  Description of Artificial Sequence: Synthetic oligonucleotide
cucacucauuuucgaccau

SEQ ID NO: 177158 - RNA, 19 nt, Artificial Sequence
  Description of Artificial Sequence: Synthetic oligonucleotide
cugcggaguccuuucccuu

SEQ ID NO: 177159 - RNA, 19 nt, Artificial Sequence
  Description of Artificial Sequence: Synthetic oligonucleotide
ggaagugcgcggcgggguu

SEQ ID NO: 177160 - RNA, 19 nt, Artificial Sequence
  Description of Artificial Sequence: Synthetic oligonucleotide
gggcguccuucugcuuugc

SEQ ID NO: 177161 - RNA, 19 nt, Artificial Sequence
  Description of Artificial Sequence: Synthetic oligonucleotide
ccaguccgaccagcugaag

SEQ ID NO: 177162 - RNA, 19 nt, Artificial Sequence
  Description of Artificial Sequence: Synthetic oligonucleotide
ccguccagccauggaucac

SEQ ID NO: 177163 - RNA, 19 nt, Artificial Sequence
  Description of Artificial Sequence: Synthetic oligonucleotide
cccaagagguggacauugu

SEQ ID NO: 177164 - RNA, 19 nt, Artificial Sequence
  Description of Artificial Sequence: Synthetic oligonucleotide
ccgcagggcaagucaaccu

SEQ ID NO: 177165 - RNA, 19 nt, Artificial Sequence
  Description of Artificial Sequence: Synthetic oligonucleotide
ccaugagacuccucaccuu

SEQ ID NO: 177166 - RNA, 19 nt, Artificial Sequence
  Description of Artificial Sequence: Synthetic oligonucleotide
ccagccgacacuggauagu

SEQ ID NO: 177167 - RNA, 19 nt, Artificial Sequence
  Description of Artificial Sequence: Synthetic oligonucleotide
cuccugcuuucacccgaau

SEQ ID NO: 177168 - RNA, 19 nt, Artificial Sequence
  Description of Artificial Sequence: Synthetic oligonucleotide
guacgucccuugacucuuu

SEQ ID NO: 177169 - RNA, 19 nt, Artificial Sequence
  Description of Artificial Sequence: Synthetic oligonucleotide
cgauguccaccuccguaua

SEQ ID NO: 177170 - RNA, 19 nt, Artificial Sequence
  Description of Artificial Sequence: Synthetic oligonucleotide
cggccaccccuccuuggga

SEQ ID NO: 177171 - RNA, 19 nt, Artificial Sequence
  Description of Artificial Sequence: Synthetic oligonucleotide
uguauuauuucacuuagcg

SEQ ID NO: 177172 - RNA, 19 nt, Artificial Sequence
  Description of Artificial Sequence: Synthetic oligonucleotide
guuaauaugauuuacagaa

SEQ ID NO: 177173 - RNA, 19 nt, Artificial Sequence
  Description of Artificial Sequence: Synthetic oligonucleotide
auauaauucguuuacaucu

SEQ ID NO: 177174 - RNA, 19 nt, Artificial Sequence
  Description of Artificial Sequence: Synthetic oligonucleotide
ucauaaaucagauugagau

SEQ ID NO: 177175 - RNA, 19 nt, Artificial Sequence
  Description of Artificial Sequence: Synthetic oligonucleotide
aucagauugagauuaauuc

SEQ ID NO: 177176 - RNA, 19 nt, Artificial Sequence
  Description of Artificial Sequence: Synthetic oligonucleotide
aaguuaauaugauuuacag

SEQ ID NO: 177177 - RNA, 19 nt, Artificial Sequence
  Description of Artificial Sequence: Synthetic oligonucleotide
uuguauaccagccucagag

SEQ ID NO: 177178 - RNA, 19 nt, Artificial Sequence
  Description of Artificial Sequence: Synthetic oligonucleotide
aguauuaaguuuugugucc

SEQ ID NO: 177179 - RNA, 19 nt, Artificial Sequence
  Description of Artificial Sequence: Synthetic oligonucleotide
acauauacgaucaauauuc

SEQ ID NO: 177180 - RNA, 19 nt, Artificial Sequence
  Description of Artificial Sequence: Synthetic oligonucleotide
uggaagauauuccuuaggg

SEQ ID NO: 177181 - RNA, 19 nt, Artificial Sequence
  Description of Artificial Sequence: Synthetic oligonucleotide
uugagauuaauucucagcu

SEQ ID NO: 177182 - RNA, 19 nt, Artificial Sequence
  Description of Artificial Sequence: Synthetic oligonucleotide
ucuugaaccaccaucaaac

SEQ ID NO: 177183 - RNA, 19 nt, Artificial Sequence
  Description of Artificial Sequence: Synthetic oligonucleotide
ugaacuucugguaauuagg

SEQ ID NO: 177184 - RNA, 19 nt, Artificial Sequence
  Description of Artificial Sequence: Synthetic oligonucleotide
ugguauauaaaucccagca

SEQ ID NO: 177185 - RNA, 19 nt, Artificial Sequence
  Description of Artificial Sequence: Synthetic oligonucleotide
uguaguauuaaguuuugug

SEQ ID NO: 177186 - RNA, 19 nt, Artificial Sequence
  Description of Artificial Sequence: Synthetic oligonucleotide
aaucaaagucauaaguccc

SEQ ID NO: 177187 - RNA, 19 nt, Artificial Sequence
  Description of Artificial Sequence: Synthetic oligonucleotide
aucgggaaaacacaagccc

SEQ ID NO: 177188 - RNA, 19 nt, Artificial Sequence
  Description of Artificial Sequence: Synthetic oligonucleotide
uagcuaaggagcuagaagc

SEQ ID NO: 177189 - RNA, 19 nt, Artificial Sequence
  Description of Artificial Sequence: Synthetic oligonucleotide
aaguugguguacuuucugc

SEQ ID NO: 177190 - RNA, 19 nt, Artificial Sequence
  Description of Artificial Sequence: Synthetic oligonucleotide
cauagcaucacauauacga

SEQ ID NO: 177191 - RNA, 19 nt, Artificial Sequence
  Description of Artificial Sequence: Synthetic oligonucleotide
uuuuagaugaccucgcaga

SEQ ID NO: 177192 - RNA, 19 nt, Artificial Sequence
  Description of Artificial Sequence: Synthetic oligonucleotide
uaccuuaggguuaugauca

SEQ ID NO: 177193 - RNA, 19 nt, Artificial Sequence
  Description of Artificial Sequence: Synthetic oligonucleotide
ugugaguccagaaaggcca

SEQ ID NO: 177194 - RNA, 19 nt, Artificial Sequence
  Description of Artificial Sequence: Synthetic oligonucleotide
uuuagucagucgaagcugg

SEQ ID NO: 177195 - RNA, 19 nt, Artificial Sequence
  Description of Artificial Sequence: Synthetic oligonucleotide
ugaaccaccaucaaacggu

SEQ ID NO: 177196 - RNA, 19 nt, Artificial Sequence
  Description of Artificial Sequence: Synthetic oligonucleotide
uggggaacaacuaugacaa

SEQ ID NO: 177197 - RNA, 19 nt, Artificial Sequence
  Description of Artificial Sequence: Synthetic oligonucleotide
uauaaaucccagcaucgag

SEQ ID NO: 177198 - RNA, 19 nt, Artificial Sequence
  Description of Artificial Sequence: Synthetic oligonucleotide
acauaaauaccagacugcc

SEQ ID NO: 177199 - RNA, 19 nt, Artificial Sequence
  Description of Artificial Sequence: Synthetic oligonucleotide
uuuacaucuaccaggagua

SEQ ID NO: 177200 - RNA, 19 nt, Artificial Sequence
  Description of Artificial Sequence: Synthetic oligonucleotide
guacacucaacauaaauac

SEQ ID NO: 177201 - RNA, 19 nt, Artificial Sequence
  Description of Artificial Sequence: Synthetic oligonucleotide
aggguuaugaucauaaauc

SEQ ID NO: 177202 - RNA, 19 nt, Artificial Sequence
  Description of Artificial Sequence: Synthetic oligonucleotide
auaccuuaggguuaugauc

SEQ ID NO: 177203 - RNA, 19 nt, Artificial Sequence
  Description of Artificial Sequence: Synthetic oligonucleotide
ucagauugagauuaauucu

SEQ ID NO: 177204 - RNA, 19 nt, Artificial Sequence
  Description of Artificial Sequence: Synthetic oligonucleotide
uguacacucaacauaaaua

SEQ ID NO: 177205 - RNA, 19 nt, Artificial Sequence
  Description of Artificial Sequence: Synthetic oligonucleotide
auaaauaccagacugccua

SEQ ID NO: 177206 - RNA, 19 nt, Artificial Sequence
  Description of Artificial Sequence: Synthetic oligonucleotide
agaaaugugauuccacuug

SEQ ID NO: 177207 - RNA, 19 nt, Artificial Sequence
  Description of Artificial Sequence: Synthetic oligonucleotide
caaacggugaaugagagac

SEQ ID NO: 177208 - RNA, 19 nt, Artificial Sequence
  Description of Artificial Sequence: Synthetic oligonucleotide
uuauauaauucguuuacau

SEQ ID NO: 177209 - RNA, 19 nt, Artificial Sequence
  Description of Artificial Sequence: Synthetic oligonucleotide
auacuuguauaccagccuc

SEQ ID NO: 177210 - RNA, 19 nt, Artificial Sequence
  Description of Artificial Sequence: Synthetic oligonucleotide
uugaaccaccaucaaacgg

SEQ ID NO: 177211 - RNA, 19 nt, Artificial Sequence
  Description of Artificial Sequence: Synthetic oligonucleotide
aauaugcuggcuaaaacga

SEQ ID NO: 177212 - RNA, 19 nt, Artificial Sequence
  Description of Artificial Sequence: Synthetic oligonucleotide
uuuaugaagguuuccacau

SEQ ID NO: 177213 - RNA, 19 nt, Artificial Sequence
  Description of Artificial Sequence: Synthetic oligonucleotide
aauaugauuuacagaaucu

SEQ ID NO: 177214 - RNA, 19 nt, Artificial Sequence
  Description of Artificial Sequence: Synthetic oligonucleotide
ugugaguauugacaggcag

SEQ ID NO: 177215 - RNA, 19 nt, Artificial Sequence
  Description of Artificial Sequence: Synthetic oligonucleotide
ucuuaaguguauuaagaaa

SEQ ID NO: 177216 - RNA, 19 nt, Artificial Sequence
  Description of Artificial Sequence: Synthetic oligonucleotide
auacaauacacuaugucag

SEQ ID NO: 177217 - RNA, 19 nt, Artificial Sequence
  Description of Artificial Sequence: Synthetic oligonucleotide
uuauggcgaaugaaugugg

SEQ ID NO: 177218 - RNA, 19 nt, Artificial Sequence
  Description of Artificial Sequence: Synthetic oligonucleotide
gguaagaaggcucagcugc

SEQ ID NO: 177219 - RNA, 19 nt, Artificial Sequence
  Description of Artificial Sequence: Synthetic oligonucleotide
ucggaccuaggacagacgg

SEQ ID NO: 177220 - RNA, 19 nt, Artificial Sequence
  Description of Artificial Sequence: Synthetic oligonucleotide
uuaugaucauaaaucagau

SEQ ID NO: 177221 - RNA, 19 nt, Artificial Sequence
  Description of Artificial Sequence: Synthetic oligonucleotide
agcuaucuugucuuuaguc

SEQ ID NO: 177222 - RNA, 19 nt, Artificial Sequence
  Description of Artificial Sequence: Synthetic oligonucleotide
ucauacaauacacuauguc

SEQ ID NO: 177223 - RNA, 19 nt, Artificial Sequence
  Description of Artificial Sequence: Synthetic oligonucleotide
ugugaaauacucaggucca

SEQ ID NO: 177224 - RNA, 19 nt, Artificial Sequence
  Description of Artificial Sequence: Synthetic oligonucleotide
uuuauggcgaaugaaugug

SEQ ID NO: 177225 - RNA, 19 nt, Artificial Sequence
  Description of Artificial Sequence: Synthetic oligonucleotide
aaaacgaagucugauagua

SEQ ID NO: 177226 - RNA, 19 nt, Artificial Sequence
  Description of Artificial Sequence: Synthetic oligonucleotide
aacuaugacaauccgugaa

SEQ ID NO: 177227 - RNA, 19 nt, Artificial Sequence
  Description of Artificial Sequence: Synthetic oligonucleotide
guuaugaucauaaaucaga

SEQ ID NO: 177228 - RNA, 19 nt, Artificial Sequence
  Description of Artificial Sequence: Synthetic oligonucleotide
cuaucuugucuuuagucag

SEQ ID NO: 177229 - RNA, 19 nt, Artificial Sequence
  Description of Artificial Sequence: Synthetic oligonucleotide
auaauucguuuacaucuac

SEQ ID NO: 177230 - RNA, 19 nt, Artificial Sequence
  Description of Artificial Sequence: Synthetic oligonucleotide
augcuauucacaguggaac

SEQ ID NO: 177231 - RNA, 19 nt, Artificial Sequence
  Description of Artificial Sequence: Synthetic oligonucleotide
uacacuaugucagcaaugc

SEQ ID NO: 177232 - RNA, 19 nt, Artificial Sequence
  Description of Artificial Sequence: Synthetic oligonucleotide
uuuaucucuuauaaaguuu

SEQ ID NO: 177233 - RNA, 19 nt, Artificial Sequence
  Description of Artificial Sequence: Synthetic oligonucleotide
cucauagcaucacauauac

SEQ ID NO: 177234 - RNA, 19 nt, Artificial Sequence
  Description of Artificial Sequence: Synthetic oligonucleotide
uuccccauacgaaacacug

SEQ ID NO: 177235 - RNA, 19 nt, Artificial Sequence
  Description of Artificial Sequence: Synthetic oligonucleotide
caugaggacuaaaucaaag

SEQ ID NO: 177236 - RNA, 19 nt, Artificial Sequence
  Description of Artificial Sequence: Synthetic oligonucleotide
aagcccugcugacucauac

SEQ ID NO: 177237 - RNA, 19 nt, Artificial Sequence
  Description of Artificial Sequence: Synthetic oligonucleotide
aacaaaucauucauuccag

SEQ ID NO: 177238 - RNA, 19 nt, Artificial Sequence
  Description of Artificial Sequence: Synthetic oligonucleotide
uaggguuaugaucauaaau

SEQ ID NO: 177239 - RNA, 19 nt, Artificial Sequence
  Description of Artificial Sequence: Synthetic oligonucleotide
cagauugagauuaauucuc

SEQ ID NO: 177240 - RNA, 19 nt, Artificial Sequence
  Description of Artificial Sequence: Synthetic oligonucleotide
auuaaguuuuguguccugg

SEQ ID NO: 177241 - RNA, 19 nt, Artificial Sequence
  Description of Artificial Sequence: Synthetic oligonucleotide
ucgggugaaaagaugccag

SEQ ID NO: 177242 - RNA, 19 nt, Artificial Sequence
  Description of Artificial Sequence: Synthetic oligonucleotide
gauugagauuaauucucag

SEQ ID NO: 177243 - RNA, 19 nt, Artificial Sequence
  Description of Artificial Sequence: Synthetic oligonucleotide
aacggugaaugagagacug

SEQ ID NO: 177244 - RNA, 19 nt, Artificial Sequence
  Description of Artificial Sequence: Synthetic oligonucleotide
cuagcuaaggagcuagaag

SEQ ID NO: 177245 - RNA, 19 nt, Artificial Sequence
  Description of Artificial Sequence: Synthetic oligonucleotide
guaguauuaaguuuugugu

SEQ ID NO: 177246 - RNA, 19 nt, Artificial Sequence
  Description of Artificial Sequence: Synthetic oligonucleotide
uacugugggaguaucugcc

SEQ ID NO: 177247 - RNA, 19 nt, Artificial Sequence
  Description of Artificial Sequence: Synthetic oligonucleotide
uucgaacuugcaucaaucc

SEQ ID NO: 177248 - RNA, 19 nt, Artificial Sequence
  Description of Artificial Sequence: Synthetic oligonucleotide
agagggaucauuuccuuga

SEQ ID NO: 177249 - RNA, 19 nt, Artificial Sequence
  Description of Artificial Sequence: Synthetic oligonucleotide
uucaacuugucaaugcuuu

SEQ ID NO: 177250 - RNA, 19 nt, Artificial Sequence
  Description of Artificial Sequence: Synthetic oligonucleotide
uuucgaacuugcaucaauc

SEQ ID NO: 177251 - RNA, 19 nt, Artificial Sequence
  Description of Artificial Sequence: Synthetic oligonucleotide
cuuaggguccuuuugcgac

SEQ ID NO: 177252 - RNA, 19 nt, Artificial Sequence
  Description of Artificial Sequence: Synthetic oligonucleotide
guaggaauccuucagagcu

SEQ ID NO: 177253 - RNA, 19 nt, Artificial Sequence
  Description of Artificial Sequence: Synthetic oligonucleotide
aguuuaggcauucugugaa

SEQ ID NO: 177254 - RNA, 19 nt, Artificial Sequence
  Description of Artificial Sequence: Synthetic oligonucleotide
guaauuaggcuccauuuuc

SEQ ID NO: 177255 - RNA, 19 nt, Artificial Sequence
  Description of Artificial Sequence: Synthetic oligonucleotide
cugguuucgaacuugcauc

SEQ ID NO: 177256 - RNA, 19 nt, Artificial Sequence
  Description of Artificial Sequence: Synthetic oligonucleotide
uucaagauagccuguacuu

SEQ ID NO: 177257 - RNA, 19 nt, Artificial Sequence
  Description of Artificial Sequence: Synthetic oligonucleotide
ccuaguacuagcuaaggag

SEQ ID NO: 177258 - RNA, 19 nt, Artificial Sequence
  Description of Artificial Sequence: Synthetic oligonucleotide
aguguauuaagaaauggaa

SEQ ID NO: 177259 - RNA, 19 nt, Artificial Sequence
  Description of Artificial Sequence: Synthetic oligonucleotide
cuugaaccaccaucaaacg

SEQ ID NO: 177260 - RNA, 19 nt, Artificial Sequence
  Description of Artificial Sequence: Synthetic oligonucleotide
aacaaccuccaaguuuccc

SEQ ID NO: 177261 - RNA, 19 nt, Artificial Sequence
  Description of Artificial Sequence: Synthetic oligonucleotide
ucgaacuugcaucaauccu

SEQ ID NO: 177262 - RNA, 19 nt, Artificial Sequence
  Description of Artificial Sequence: Synthetic oligonucleotide
agaagcaugaugaggagug

SEQ ID NO: 177263 - RNA, 19 nt, Artificial Sequence
  Description of Artificial Sequence: Synthetic oligonucleotide
ugacccuggacgaugggcc

SEQ ID NO: 177264 - RNA, 19 nt, Artificial Sequence
  Description of Artificial Sequence: Synthetic oligonucleotide
uacauagucuuugugacau

SEQ ID NO: 177265 - RNA, 19 nt, Artificial Sequence
  Description of Artificial Sequence: Synthetic oligonucleotide
uggcgaaugaauguggaug

SEQ ID NO: 177266 - RNA, 19 nt, Artificial Sequence
  Description of Artificial Sequence: Synthetic oligonucleotide
ucgggaaaacacaagcccu

SEQ ID NO: 177267 - RNA, 19 nt, Artificial Sequence
  Description of Artificial Sequence: Synthetic oligonucleotide
gaggacuaaaucaaaguca

SEQ ID NO: 177268 - RNA, 19 nt, Artificial Sequence
  Description of Artificial Sequence: Synthetic oligonucleotide
uuaauaugauuuacagaau

SEQ ID NO: 177269 - RNA, 19 nt, Artificial Sequence
  Description of Artificial Sequence: Synthetic oligonucleotide
uauaauucguuuacaucua

SEQ ID NO: 177270 - RNA, 19 nt, Artificial Sequence
  Description of Artificial Sequence: Synthetic oligonucleotide
gagaaagagcaccuucaag

SEQ ID NO: 177271 - RNA, 19 nt, Artificial Sequence
  Description of Artificial Sequence: Synthetic oligonucleotide
caucgggaaaacacaagcc

SEQ ID NO: 177272 - RNA, 19 nt, Artificial Sequence
  Description of Artificial Sequence: Synthetic oligonucleotide
cauaauccugagcauacug

SEQ ID NO: 177273 - RNA, 19 nt, Artificial Sequence
  Description of Artificial Sequence: Synthetic oligonucleotide
ugugauuccacuugacuuu

SEQ ID NO: 177274 - RNA, 19 nt, Artificial Sequence
  Description of Artificial Sequence: Synthetic oligonucleotide
gaaugaauguggaugucug

SEQ ID NO: 177275 - RNA, 19 nt, Artificial Sequence
  Description of Artificial Sequence: Synthetic oligonucleotide
ugcuuuaugaagguuucca

SEQ ID NO: 177276 - RNA, 19 nt, Artificial Sequence
  Description of Artificial Sequence: Synthetic oligonucleotide
ggaauuguaacauaaccaa

SEQ ID NO: 177277 - RNA, 19 nt, Artificial Sequence
  Description of Artificial Sequence: Synthetic oligonucleotide
aaacgaagucugauaguac

SEQ ID NO: 177278 - RNA, 19 nt, Artificial Sequence
  Description of Artificial Sequence: Synthetic oligonucleotide
uggugguauauaaauccca

SEQ ID NO: 177279 - RNA, 19 nt, Artificial Sequence
  Description of Artificial Sequence: Synthetic oligonucleotide
uucacacugguuucuauaa

SEQ ID NO: 177280 - RNA, 19 nt, Artificial Sequence
  Description of Artificial Sequence: Synthetic oligonucleotide
uucaaguacuugucuaugu

SEQ ID NO: 177281 - RNA, 19 nt, Artificial Sequence
  Description of Artificial Sequence: Synthetic oligonucleotide
uucacaugagaugugagua

SEQ ID NO: 177282 - RNA, 19 nt, Artificial Sequence
  Description of Artificial Sequence: Synthetic oligonucleotide
uauggcgaaugaaugugga

SEQ ID NO: 177283 - RNA, 19 nt, Artificial Sequence
  Description of Artificial Sequence: Synthetic oligonucleotide
cuuggaauuguaacauaac

SEQ ID NO: 177284 - RNA, 19 nt, Artificial Sequence
  Description of Artificial Sequence: Synthetic oligonucleotide
uuuagaugaccucgcagau

SEQ ID NO: 177285 - RNA, 19 nt, Artificial Sequence
  Description of Artificial Sequence: Synthetic oligonucleotide
guaauaugcuggcuaaaac

SEQ ID NO: 177286 - RNA, 19 nt, Artificial Sequence
  Description of Artificial Sequence: Synthetic oligonucleotide
uguaaaccggugaagggua

SEQ ID NO: 177287 - RNA, 19 nt, Artificial Sequence
  Description of Artificial Sequence: Synthetic oligonucleotide
uguauaccagccucagagc

SEQ ID NO: 177288 - RNA, 19 nt, Artificial Sequence
  Description of Artificial Sequence: Synthetic oligonucleotide
aacaacuaugacaauccgu

SEQ ID NO: 177289 - RNA, 19 nt, Artificial Sequence
  Description of Artificial Sequence: Synthetic oligonucleotide
caccgcuucuucauaaucc

SEQ ID NO: 177290 - RNA, 19 nt, Artificial Sequence
  Description of Artificial Sequence: Synthetic oligonucleotide
ggagcuagaagcaugauga

SEQ ID NO: 177291 - RNA, 19 nt, Artificial Sequence
  Description of Artificial Sequence: Synthetic oligonucleotide
gagucgggugaaaagaugc

SEQ ID NO: 177292 - RNA, 19 nt, Artificial Sequence
  Description of Artificial Sequence: Synthetic oligonucleotide
ucauaucguuucaaguacu

SEQ ID NO: 177293 - RNA, 19 nt, Artificial Sequence
  Description of Artificial Sequence: Synthetic oligonucleotide
auugacaggcaguacuugu

SEQ ID NO: 177294 - RNA, 19 nt, Artificial Sequence
  Description of Artificial Sequence: Synthetic oligonucleotide
ucuaagauggaagguuuca

SEQ ID NO: 177295 - RNA, 19 nt, Artificial Sequence
  Description of Artificial Sequence: Synthetic oligonucleotide
ccgaugaugaacaaccucc

SEQ ID NO: 177296 - RNA, 19 nt, Artificial Sequence
  Description of Artificial Sequence: Synthetic oligonucleotide
gacuauggcugccucacug

SEQ ID NO: 177297 - RNA, 19 nt, Artificial Sequence
  Description of Artificial Sequence: Synthetic oligonucleotide
uggaacucggaccuaggac

SEQ ID NO: 177298 - RNA, 19 nt, Artificial Sequence
  Description of Artificial Sequence: Synthetic oligonucleotide
agcuguaucaccguugacu

SEQ ID NO: 177299 - RNA, 19 nt, Artificial Sequence
  Description of Artificial Sequence: Synthetic oligonucleotide
uggagcuugcuucuugcgc

SEQ ID NO: 177300 - RNA, 19 nt, Artificial Sequence
  Description of Artificial Sequence: Synthetic oligonucleotide
guugguguacuuucugcag

SEQ ID NO: 177301 - RNA, 19 nt, Artificial Sequence
  Description of Artificial Sequence: Synthetic oligonucleotide
guuuacaucuaccaggagu

SEQ ID NO: 177302 - RNA, 19 nt, Artificial Sequence
  Description of Artificial Sequence: Synthetic oligonucleotide
agucagucgaagcugggca

SEQ ID NO: 177303 - RNA, 19 nt, Artificial Sequence
  Description of Artificial Sequence: Synthetic oligonucleotide
gaaggguacauagucuuug

SEQ ID NO: 177304 - RNA, 19 nt, Artificial Sequence
  Description of Artificial Sequence: Synthetic oligonucleotide
ucucauagcaucacauaua

SEQ ID NO: 177305 - RNA, 19 nt, Artificial Sequence
  Description of Artificial Sequence: Synthetic oligonucleotide
ugguuucgaacuugcauca

SEQ ID NO: 177306 - RNA, 19 nt, Artificial Sequence
  Description of Artificial Sequence: Synthetic oligonucleotide
uaugacaauccgugaaccu

SEQ ID NO: 177307 - RNA, 19 nt, Artificial Sequence
  Description of Artificial Sequence: Synthetic oligonucleotide
uacuuaagauguacacuca

SEQ ID NO: 177308 - RNA, 19 nt, Artificial Sequence
  Description of Artificial Sequence: Synthetic oligonucleotide
aaaacgcugaaagagccuu

SEQ ID NO: 177309 - RNA, 19 nt, Artificial Sequence
  Description of Artificial Sequence: Synthetic oligonucleotide
gguuguuuucuucacauga

SEQ ID NO: 177310 - RNA, 19 nt, Artificial Sequence
  Description of Artificial Sequence: Synthetic oligonucleotide
ucaaaucaaugaugaggcc

SEQ ID NO: 177311 - RNA, 19 nt, Artificial Sequence
  Description of Artificial Sequence: Synthetic oligonucleotide
uccuuauccacgugcaccu

SEQ ID NO: 177312 - RNA, 19 nt, Artificial Sequence
  Description of Artificial Sequence: Synthetic oligonucleotide
ucaaugcuuuguauuauuu

SEQ ID NO: 177313 - RNA, 19 nt, Artificial Sequence
  Description of Artificial Sequence: Synthetic oligonucleotide
auguacacucaacauaaau

SEQ ID NO: 177314 - RNA, 19 nt, Artificial Sequence
  Description of Artificial Sequence: Synthetic oligonucleotide
caauccgugaaccucuuuc

SEQ ID NO: 177315 - RNA, 19 nt, Artificial Sequence
  Description of Artificial Sequence: Synthetic oligonucleotide
ugucuuuagucagucgaag

SEQ ID NO: 177316 - RNA, 19 nt, Artificial Sequence
  Description of Artificial Sequence: Synthetic oligonucleotide
gguccgaugaugaacaacc

SEQ ID NO: 177317 - RNA, 19 nt, Artificial Sequence
  Description of Artificial Sequence: Synthetic oligonucleotide
ucggcuaccaugaggacua

SEQ ID NO: 177318 - RNA, 19 nt, Artificial Sequence
  Description of Artificial Sequence: Synthetic oligonucleotide
cugaaagagccuucucccg

SEQ ID NO: 177319 - RNA, 19 nt, Artificial Sequence
  Description of Artificial Sequence: Synthetic oligonucleotide
cuuguguggauugauguuc

SEQ ID NO: 177320 - RNA, 19 nt, Artificial Sequence
  Description of Artificial Sequence: Synthetic oligonucleotide
gauugauguucuccauugc

SEQ ID NO: 177321 - RNA, 19 nt, Artificial Sequence
  Description of Artificial Sequence: Synthetic oligonucleotide
uuauccacgugcaccugug

SEQ ID NO: 177322 - RNA, 19 nt, Artificial Sequence
  Description of Artificial Sequence: Synthetic oligonucleotide
agucccaagagaaugauua

SEQ ID NO: 177323 - RNA, 19 nt, Artificial Sequence
  Description of Artificial Sequence: Synthetic oligonucleotide
aggcuggcagcacuaauag

SEQ ID NO: 177324 - RNA, 19 nt, Artificial Sequence
  Description of Artificial Sequence: Synthetic oligonucleotide
acuuaagauguacacucaa

SEQ ID NO: 177325 - RNA, 19 nt, Artificial Sequence
  Description of Artificial Sequence: Synthetic oligonucleotide
uacucagguccacacuugc

SEQ ID NO: 177326 - RNA, 19 nt, Artificial Sequence
  Description of Artificial Sequence: Synthetic oligonucleotide
ugaaauacucagguccaca

SEQ ID NO: 177327 - RNA, 19 nt, Artificial Sequence
  Description of Artificial Sequence: Synthetic oligonucleotide
ugaaucugguugauacaac

SEQ ID NO: 177328 - RNA, 19 nt, Artificial Sequence
  Description of Artificial Sequence: Synthetic oligonucleotide
uugucuuuagucagucgaa

SEQ ID NO: 177329 - RNA, 19 nt, Artificial Sequence
  Description of Artificial Sequence: Synthetic oligonucleotide
uauuaaguuuuguguccug

SEQ ID NO: 177330 - RNA, 19 nt, Artificial Sequence
  Description of Artificial Sequence: Synthetic oligonucleotide
uuguguggauugauguucu

SEQ ID NO: 177331 - RNA, 19 nt, Artificial Sequence
  Description of Artificial Sequence: Synthetic oligonucleotide
uggacaaaugguccuccca

SEQ ID NO: 177332 - RNA, 19 nt, Artificial Sequence
  Description of Artificial Sequence: Synthetic oligonucleotide
cagacugccuaguacuagc

SEQ ID NO: 177333 - RNA, 19 nt, Artificial Sequence
  Description of Artificial Sequence: Synthetic oligonucleotide
caagguccgaugaugaaca

SEQ ID NO: 177334 - RNA, 19 nt, Artificial Sequence
  Description of Artificial Sequence: Synthetic oligonucleotide
ugacucauacaggugcucc

SEQ ID NO: 177335 - RNA, 19 nt, Artificial Sequence
  Description of Artificial Sequence: Synthetic oligonucleotide
gugguauauaaaucccagc

SEQ ID NO: 177336 - RNA, 19 nt, Artificial Sequence
  Description of Artificial Sequence: Synthetic oligonucleotide
uccgaugaugaacaaccuc

SEQ ID NO: 177337 - RNA, 19 nt, Artificial Sequence
  Description of Artificial Sequence: Synthetic oligonucleotide
ggaacucggaccuaggaca

SEQ ID NO: 177338 - RNA, 19 nt, Artificial Sequence
  Description of Artificial Sequence: Synthetic oligonucleotide
uuagcgccuccaaaagggc

SEQ ID NO: 177339 - RNA, 19 nt, Artificial Sequence
  Description of Artificial Sequence: Synthetic oligonucleotide
auaugauuuacagaaucua

SEQ ID NO: 177340 - RNA, 19 nt, Artificial Sequence
  Description of Artificial Sequence: Synthetic oligonucleotide
uacaucuaccaggaguagc

SEQ ID NO: 177341 - RNA, 19 nt, Artificial Sequence
  Description of Artificial Sequence: Synthetic oligonucleotide
agugaaucugguugauaca

SEQ ID NO: 177342 - RNA, 19 nt, Artificial Sequence
  Description of Artificial Sequence: Synthetic oligonucleotide
aagaccaagguccgaugau

SEQ ID NO: 177343 - RNA, 19 nt, Artificial Sequence
  Description of Artificial Sequence: Synthetic oligonucleotide
uaugaucauaaaucagauu

SEQ ID NO: 177344 - RNA, 19 nt, Artificial Sequence
  Description of Artificial Sequence: Synthetic oligonucleotide
accaccaucaaacgguuuu

SEQ ID NO: 177345 - RNA, 19 nt, Artificial Sequence
  Description of Artificial Sequence: Synthetic oligonucleotide
aggcagugaugcuauucac

SEQ ID NO: 177346 - RNA, 19 nt, Artificial Sequence
  Description of Artificial Sequence: Synthetic oligonucleotide
ugagauuaauucucagcuu

SEQ ID NO: 177347 - RNA, 19 nt, Artificial Sequence
  Description of Artificial Sequence: Synthetic oligonucleotide
cagucaaacggugaaugag

SEQ ID NO: 177348 - RNA, 19 nt, Artificial Sequence
  Description of Artificial Sequence: Synthetic oligonucleotide
uucuaagauggaagguuuc

SEQ ID NO: 177349 - RNA, 19 nt, Artificial Sequence
  Description of Artificial Sequence: Synthetic oligonucleotide
acaucuaccaggaguagca

SEQ ID NO: 177350 - RNA, 19 nt, Artificial Sequence
  Description of Artificial Sequence: Synthetic oligonucleotide
gcuagaagcaugaugagga

SEQ ID NO: 177351 - RNA, 19 nt, Artificial Sequence
  Description of Artificial Sequence: Synthetic oligonucleotide
acagucaaacggugaauga

SEQ ID NO: 177352 - RNA, 19 nt, Artificial Sequence
  Description of Artificial Sequence: Synthetic oligonucleotide
ucaagauagccuguacuuc

SEQ ID NO: 177353 - RNA, 19 nt, Artificial Sequence
  Description of Artificial Sequence: Synthetic oligonucleotide
cacagucaaacggugaaug

SEQ ID NO: 177354 - RNA, 19 nt, Artificial Sequence
  Description of Artificial Sequence: Synthetic oligonucleotide
gucaaacggugaaugagag

SEQ ID NO: 177355 - RNA, 19 nt, Artificial Sequence
  Description of Artificial Sequence: Synthetic oligonucleotide
uccgaaucugagccaagac

SEQ ID NO: 177356 - RNA, 19 nt, Artificial Sequence
  Description of Artificial Sequence: Synthetic oligonucleotide
ggugguauauaaaucccag

SEQ ID NO: 177357 - RNA, 19 nt, Artificial Sequence
  Description of Artificial Sequence: Synthetic oligonucleotide
uauccacgugcaccugugg

SEQ ID NO: 177358 - RNA, 19 nt, Artificial Sequence
  Description of Artificial Sequence: Synthetic oligonucleotide
ucuagcaagggcagcuauc

SEQ ID NO: 177359 - RNA, 19 nt, Artificial Sequence
  Description of Artificial Sequence: Synthetic oligonucleotide
aacgcugaaagagccuucu

SEQ ID NO: 177360 - RNA, 19 nt, Artificial Sequence
  Description of Artificial Sequence: Synthetic oligonucleotide
uguccagccacuuccgaau

SEQ ID NO: 177361 - RNA, 19 nt, Artificial Sequence
  Description of Artificial Sequence: Synthetic oligonucleotide
agucgggugaaaagaugcc

SEQ ID NO: 177362 - RNA, 19 nt, Artificial Sequence
  Description of Artificial Sequence: Synthetic oligonucleotide
agucaaacggugaaugaga

SEQ ID NO: 177363 - RNA, 19 nt, Artificial Sequence
  Description of Artificial Sequence: Synthetic oligonucleotide
gaccucgcagauauccugg

SEQ ID NO: 177364 - RNA, 19 nt, Artificial Sequence
  Description of Artificial Sequence: Synthetic oligonucleotide
uuuaggcauucugugaaau

SEQ ID NO: 177365 - RNA, 19 nt, Artificial Sequence
  Description of Artificial Sequence: Synthetic oligonucleotide
auauaaaucccagcaucga

SEQ ID NO: 177366 - RNA, 19 nt, Artificial Sequence
  Description of Artificial Sequence: Synthetic oligonucleotide
uccuaacaaaucauucauu

SEQ ID NO: 177367 - RNA, 19 nt, Artificial Sequence
  Description of Artificial Sequence: Synthetic oligonucleotide
ccauacgaaacacugauca

SEQ ID NO: 177368 - RNA, 19 nt, Artificial Sequence
  Description of Artificial Sequence: Synthetic oligonucleotide
gguuaugaucauaaaucag

SEQ ID NO: 177369 - RNA, 19 nt, Artificial Sequence
  Description of Artificial Sequence: Synthetic oligonucleotide
auauacgaucaauauucuu

SEQ ID NO: 177370 - RNA, 19 nt, Artificial Sequence
  Description of Artificial Sequence: Synthetic oligonucleotide
acugaucacccgguacugc

SEQ ID NO: 177371 - RNA, 19 nt, Artificial Sequence
  Description of Artificial Sequence: Synthetic oligonucleotide
uuccguagaauuucuccau

SEQ ID NO: 177372 - RNA, 19 nt, Artificial Sequence
  Description of Artificial Sequence: Synthetic oligonucleotide
caucagguguuccccauac

SEQ ID NO: 177373 - RNA, 19 nt, Artificial Sequence
  Description of Artificial Sequence: Synthetic oligonucleotide
uuaggguuaugaucauaaa

SEQ ID NO: 177374 - RNA, 19 nt, Artificial Sequence
  Description of Artificial Sequence: Synthetic oligonucleotide
ugauacaacuucagagcuu

SEQ ID NO: 177375 - RNA, 19 nt, Artificial Sequence
  Description of Artificial Sequence: Synthetic oligonucleotide
uuaggguccuuuugcgacu

SEQ ID NO: 177376 - RNA, 19 nt, Artificial Sequence
  Description of Artificial Sequence: Synthetic oligonucleotide
cagugaucucagaagggac

SEQ ID NO: 177377 - RNA, 19 nt, Artificial Sequence
  Description of Artificial Sequence: Synthetic oligonucleotide
cacuuagcgccuccaaaag

SEQ ID NO: 177378 - RNA, 19 nt, Artificial Sequence
  Description of Artificial Sequence: Synthetic oligonucleotide
agcuuucucaugcauucaa

SEQ ID NO: 177379 - RNA, 19 nt, Artificial Sequence
  Description of Artificial Sequence: Synthetic oligonucleotide
cuauguugaacuucuggua

SEQ ID NO: 177380 - RNA, 19 nt, Artificial Sequence
  Description of Artificial Sequence: Synthetic oligonucleotide
gucagucgaagcugggcag

SEQ ID NO: 177381 - RNA, 19 nt, Artificial Sequence
  Description of Artificial Sequence: Synthetic oligonucleotide
agauugagauuaauucuca

SEQ ID NO: 177382 - RNA, 19 nt, Artificial Sequence
  Description of Artificial Sequence: Synthetic oligonucleotide
uccccauacgaaacacuga

SEQ ID NO: 177383 - RNA, 19 nt, Artificial Sequence
  Description of Artificial Sequence: Synthetic oligonucleotide
uuaugaagguuuccacauu

SEQ ID NO: 177384 - RNA, 19 nt, Artificial Sequence
  Description of Artificial Sequence: Synthetic oligonucleotide
uuuugcgacuucucggcua

SEQ ID NO: 177385 - RNA, 19 nt, Artificial Sequence
  Description of Artificial Sequence: Synthetic oligonucleotide
auaaguuuguccagccacu

SEQ ID NO: 177386 - RNA, 19 nt, Artificial Sequence
  Description of Artificial Sequence: Synthetic oligonucleotide
guacuugucuauguugaac

SEQ ID NO: 177387 - RNA, 19 nt, Artificial Sequence
  Description of Artificial Sequence: Synthetic oligonucleotide
uauaccagccucagagcuu

SEQ ID NO: 177388 - RNA, 19 nt, Artificial Sequence
  Description of Artificial Sequence: Synthetic oligonucleotide
uguuccccauacgaaacac

SEQ ID NO: 177389 - RNA, 19 nt, Artificial Sequence
  Description of Artificial Sequence: Synthetic oligonucleotide
cagcaucgagaacaggggc

SEQ ID NO: 177390 - RNA, 19 nt, Artificial Sequence
  Description of Artificial Sequence: Synthetic oligonucleotide
ccuuuugcgacuucucggc

SEQ ID NO: 177391 - RNA, 19 nt, Artificial Sequence
  Description of Artificial Sequence: Synthetic oligonucleotide
uuacaucuaccaggaguag

SEQ ID NO: 177392 - RNA, 19 nt, Artificial Sequence
  Description of Artificial Sequence: Synthetic oligonucleotide
ccgaaucugagccaagacc

SEQ ID NO: 177393 - RNA, 19 nt, Artificial Sequence
  Description of Artificial Sequence: Synthetic oligonucleotide
agguccgaugaugaacaac

SEQ ID NO: 177394 - RNA, 19 nt, Artificial Sequence
  Description of Artificial Sequence: Synthetic oligonucleotide
uaggaauccuucagagcuc

SEQ ID NO: 177395 - RNA, 19 nt, Artificial Sequence
  Description of Artificial Sequence: Synthetic oligonucleotide
agaccagccuguaggaauc

SEQ ID NO: 177396 - RNA, 19 nt, Artificial Sequence
  Description of Artificial Sequence: Synthetic oligonucleotide
gcuucuugcgcucuugaac

SEQ ID NO: 177397 - RNA, 19 nt, Artificial Sequence
  Description of Artificial Sequence: Synthetic oligonucleotide
ucacacugguuucuauaau

SEQ ID NO: 177398 - RNA, 19 nt, Artificial Sequence
  Description of Artificial Sequence: Synthetic oligonucleotide
gaugcuauucacaguggaa

SEQ ID NO: 177399 - RNA, 19 nt, Artificial Sequence
  Description of Artificial Sequence: Synthetic oligonucleotide
uuccgaaucugagccaaga

SEQ ID NO: 177400 - RNA, 19 nt, Artificial Sequence
  Description of Artificial Sequence: Synthetic oligonucleotide
accgucacagaugaacuga

SEQ ID NO: 177401 - RNA, 19 nt, Artificial Sequence
  Description of Artificial Sequence: Synthetic oligonucleotide
guggagcuugcuucuugcg

SEQ ID NO: 177402 - RNA, 19 nt, Artificial Sequence
  Description of Artificial Sequence: Synthetic oligonucleotide
cagcuaugcauucacaucu

SEQ ID NO: 177403 - RNA, 19 nt, Artificial Sequence
  Description of Artificial Sequence: Synthetic oligonucleotide
auagccuguacuucaucuu

SEQ ID NO: 177404 - RNA, 19 nt, Artificial Sequence
  Description of Artificial Sequence: Synthetic oligonucleotide
cgaaacacugaucacccgg

SEQ ID NO: 177405 - RNA, 19 nt, Artificial Sequence
  Description of Artificial Sequence: Synthetic oligonucleotide
cagccuguaggaauccuuc

SEQ ID NO: 177406 - RNA, 19 nt, Artificial Sequence
  Description of Artificial Sequence: Synthetic oligonucleotide
aaaccggugaaggguacau

SEQ ID NO: 177407 - RNA, 19 nt, Artificial Sequence
  Description of Artificial Sequence: Synthetic oligonucleotide
ucagucgaagcugggcagc

SEQ ID NO: 177408 - RNA, 19 nt, Artificial Sequence
  Description of Artificial Sequence: Synthetic oligonucleotide
gacggcacugaacucugca

SEQ ID NO: 177409 - RNA, 19 nt, Artificial Sequence
  Description of Artificial Sequence: Synthetic oligonucleotide
gugaaaagaugccagcuau

SEQ ID NO: 177410 - RNA, 19 nt, Artificial Sequence
  Description of Artificial Sequence: Synthetic oligonucleotide
uucagagcucuuccauggu

SEQ ID NO: 177411 - RNA, 19 nt, Artificial Sequence
  Description of Artificial Sequence: Synthetic oligonucleotide
ucugccuugcgucgguuuu

SEQ ID NO: 177412 - RNA, 19 nt, Artificial Sequence
  Description of Artificial Sequence: Synthetic oligonucleotide
uccguagaauuucuccauu

SEQ ID NO: 177413 - RNA, 19 nt, Artificial Sequence
  Description of Artificial Sequence: Synthetic oligonucleotide
caauacacuaugucagcaa

SEQ ID NO: 177414 - RNA, 19 nt, Artificial Sequence
  Description of Artificial Sequence: Synthetic oligonucleotide
caugagaugugaguauuga

SEQ ID NO: 177415 - RNA, 19 nt, Artificial Sequence
  Description of Artificial Sequence: Synthetic oligonucleotide
uacuagcuaaggagcuaga

SEQ ID NO: 177416 - RNA, 19 nt, Artificial Sequence
  Description of Artificial Sequence: Synthetic oligonucleotide
uaagucccaagagaaugau

SEQ ID NO: 177417 - RNA, 19 nt, Artificial Sequence
  Description of Artificial Sequence: Synthetic oligonucleotide
caagaccaagguccgauga

SEQ ID NO: 177418 - RNA, 19 nt, Artificial Sequence
  Description of Artificial Sequence: Synthetic oligonucleotide
uggaguuacugugggagua

SEQ ID NO: 177419 - RNA, 19 nt, Artificial Sequence
  Description of Artificial Sequence: Synthetic oligonucleotide
cacuguaauaugcuggcua

SEQ ID NO: 177420 - RNA, 19 nt, Artificial Sequence
  Description of Artificial Sequence: Synthetic oligonucleotide
cuucaagauagccuguacu

SEQ ID NO: 177421 - RNA, 19 nt, Artificial Sequence
  Description of Artificial Sequence: Synthetic oligonucleotide
gcccugcugacucauacag

SEQ ID NO: 177422 - RNA, 19 nt, Artificial Sequence
  Description of Artificial Sequence: Synthetic oligonucleotide
aggaaagcgucuucuucaa

SEQ ID NO: 177423 - RNA, 19 nt, Artificial Sequence
  Description of Artificial Sequence: Synthetic oligonucleotide
cugaucacccgguacugca

SEQ ID NO: 177424 - RNA, 19 nt, Artificial Sequence
  Description of Artificial Sequence: Synthetic oligonucleotide
acuagcuaaggagcuagaa

SEQ ID NO: 177425 - RNA, 19 nt, Artificial Sequence
  Description of Artificial Sequence: Synthetic oligonucleotide
uaaaccggugaaggguaca

SEQ ID NO: 177426 - RNA, 19 nt, Artificial Sequence
  Description of Artificial Sequence: Synthetic oligonucleotide
gucgaagcugggcagccac

SEQ ID NO: 177427 - RNA, 19 nt, Artificial Sequence
  Description of Artificial Sequence: Synthetic oligonucleotide
acaugagaugugaguauug

SEQ ID NO: 177428 - RNA, 19 nt, Artificial Sequence
  Description of Artificial Sequence: Synthetic oligonucleotide
aaacggugaaugagagacu

SEQ ID NO: 177429 - RNA, 19 nt, Artificial Sequence
  Description of Artificial Sequence: Synthetic oligonucleotide
aaguuuccccucggcaucu

SEQ ID NO: 177430 - RNA, 19 nt, Artificial Sequence
  Description of Artificial Sequence: Synthetic oligonucleotide
acuuccgaaucugagccaa

SEQ ID NO: 177431 - RNA, 19 nt, Artificial Sequence
  Description of Artificial Sequence: Synthetic oligonucleotide
gaccaagguccgaugauga

SEQ ID NO: 177432 - RNA, 19 nt, Artificial Sequence
  Description of Artificial Sequence: Synthetic oligonucleotide
uuagaugaccucgcagaua

SEQ ID NO: 177433 - RNA, 19 nt, Artificial Sequence
  Description of Artificial Sequence: Synthetic oligonucleotide
ugcgacuucucggcuacca

SEQ ID NO: 177434 - RNA, 19 nt, Artificial Sequence
  Description of Artificial Sequence: Synthetic oligonucleotide
auggcgaaugaauguggau

SEQ ID NO: 177435 - RNA, 19 nt, Artificial Sequence
  Description of Artificial Sequence: Synthetic oligonucleotide
agccuguaggaauccuuca

SEQ ID NO: 177436 - RNA, 19 nt, Artificial Sequence
  Description of Artificial Sequence: Synthetic oligonucleotide
caccgucacagaugaacug

SEQ ID NO: 177437 - RNA, 19 nt, Artificial Sequence
  Description of Artificial Sequence: Synthetic oligonucleotide
cuuucucaugcauucaaau

SEQ ID NO: 177438 - RNA, 19 nt, Artificial Sequence
  Description of Artificial Sequence: Synthetic oligonucleotide
acgcugaaagagccuucuc

SEQ ID NO: 177439 - RNA, 19 nt, Artificial Sequence
  Description of Artificial Sequence: Synthetic oligonucleotide
gaauuguaacauaaccaau

SEQ ID NO: 177440 - RNA, 19 nt, Artificial Sequence
  Description of Artificial Sequence: Synthetic oligonucleotide
cucugcacucacaguauca

SEQ ID NO: 177441 - RNA, 19 nt, Artificial Sequence
  Description of Artificial Sequence: Synthetic oligonucleotide
ggaccuaggacagacggca

SEQ ID NO: 177442 - RNA, 19 nt, Artificial Sequence
  Description of Artificial Sequence: Synthetic oligonucleotide
aguuacugugggaguaucu

SEQ ID NO: 177443 - RNA, 19 nt, Artificial Sequence
  Description of Artificial Sequence: Synthetic oligonucleotide
auccagguaagaaggcuca

SEQ ID NO: 177444 - RNA, 19 nt, Artificial Sequence
  Description of Artificial Sequence: Synthetic oligonucleotide
ggacacucuuguaaaccgg

SEQ ID NO: 177445 - RNA, 19 nt, Artificial Sequence
  Description of Artificial Sequence: Synthetic oligonucleotide
cucuugaaccaccaucaaa

SEQ ID NO: 177446 - RNA, 19 nt, Artificial Sequence
  Description of Artificial Sequence: Synthetic oligonucleotide
uuauuucacuuagcgccuc

SEQ ID NO: 177447 - RNA, 19 nt, Artificial Sequence
  Description of Artificial Sequence: Synthetic oligonucleotide
guggaacucggaccuagga

SEQ ID NO: 177448 - RNA, 19 nt, Artificial Sequence
  Description of Artificial Sequence: Synthetic oligonucleotide
caguggaacucggaccuag

SEQ ID NO: 177449 - RNA, 19 nt, Artificial Sequence
  Description of Artificial Sequence: Synthetic oligonucleotide
caacuaugacaauccguga

SEQ ID NO: 177450 - RNA, 19 nt, Artificial Sequence
  Description of Artificial Sequence: Synthetic oligonucleotide
guauuaaguuuuguguccu

SEQ ID NO: 177451 - RNA, 19 nt, Artificial Sequence
  Description of Artificial Sequence: Synthetic oligonucleotide
aguggaacucggaccuagg

SEQ ID NO: 177452 - RNA, 19 nt, Artificial Sequence
  Description of Artificial Sequence: Synthetic oligonucleotide
cauaaauaccagacugccu

SEQ ID NO: 177453 - RNA, 19 nt, Artificial Sequence
  Description of Artificial Sequence: Synthetic oligonucleotide
cucgcagauauccuggagu

SEQ ID NO: 177454 - RNA, 19 nt, Artificial Sequence
  Description of Artificial Sequence: Synthetic oligonucleotide
cuguaucaccguugacuug

SEQ ID NO: 177455 - RNA, 19 nt, Artificial Sequence
  Description of Artificial Sequence: Synthetic oligonucleotide
gucgggugaaaagaugcca

SEQ ID NO: 177456 - RNA, 19 nt, Artificial Sequence
  Description of Artificial Sequence: Synthetic oligonucleotide
aagguccgaugaugaacaa

SEQ ID NO: 177457 - RNA, 19 nt, Artificial Sequence
  Description of Artificial Sequence: Synthetic oligonucleotide
cauauacgaucaauauucu

SEQ ID NO: 177458 - RNA, 19 nt, Artificial Sequence
  Description of Artificial Sequence: Synthetic oligonucleotide
cuuccgaaucugagccaag

SEQ ID NO: 177459 - RNA, 19 nt, Artificial Sequence
  Description of Artificial Sequence: Synthetic oligonucleotide
cugcuuuaugaagguuucc

SEQ ID NO: 177460 - RNA, 19 nt, Artificial Sequence
  Description of Artificial Sequence: Synthetic oligonucleotide
uccacgggauucucugauc

SEQ ID NO: 177461 - RNA, 19 nt, Artificial Sequence
  Description of Artificial Sequence: Synthetic oligonucleotide
caucuaccaggaguagcag

SEQ ID NO: 177462 - RNA, 19 nt, Artificial Sequence
  Description of Artificial Sequence: Synthetic oligonucleotide
ucacccgguacugcaguga

SEQ ID NO: 177463 - RNA, 19 nt, Artificial Sequence
  Description of Artificial Sequence: Synthetic oligonucleotide
acagaugaacugacauuca

SEQ ID NO: 177464 - RNA, 19 nt, Artificial Sequence
  Description of Artificial Sequence: Synthetic oligonucleotide
uaucaccguugacuugguc

SEQ ID NO: 177465 - RNA, 19 nt, Artificial Sequence
  Description of Artificial Sequence: Synthetic oligonucleotide
ccguagaauuucuccauug

SEQ ID NO: 177466 - RNA, 19 nt, Artificial Sequence
  Description of Artificial Sequence: Synthetic oligonucleotide
gacacucuuguaaaccggu

SEQ ID NO: 177467 - RNA, 19 nt, Artificial Sequence
  Description of Artificial Sequence: Synthetic oligonucleotide
ggcgaaugaauguggaugu

SEQ ID NO: 177468 - RNA, 19 nt, Artificial Sequence
  Description of Artificial Sequence: Synthetic oligonucleotide
auaugcuggcuaaaacgaa

SEQ ID NO: 177469 - RNA, 19 nt, Artificial Sequence
  Description of Artificial Sequence: Synthetic oligonucleotide
agcccugcugacucauaca

SEQ ID NO: 177470 - RNA, 19 nt, Artificial Sequence
  Description of Artificial Sequence: Synthetic oligonucleotide
gagcaccgcuucuucauaa

SEQ ID NO: 177471 - RNA, 19 nt, Artificial Sequence
  Description of Artificial Sequence: Synthetic oligonucleotide
gaagcaugaugaggaguga

SEQ ID NO: 177472 - RNA, 19 nt, Artificial Sequence
  Description of Artificial Sequence: Synthetic oligonucleotide
gcaucgagaacaggggcag

SEQ ID NO: 177473 - RNA, 19 nt, Artificial Sequence
  Description of Artificial Sequence: Synthetic oligonucleotide
agcuaugcauucacaucug

SEQ ID NO: 177474 - RNA, 19 nt, Artificial Sequence
  Description of Artificial Sequence: Synthetic oligonucleotide
guuucgaacuugcaucaau

SEQ ID NO: 177475 - RNA, 19 nt, Artificial Sequence
  Description of Artificial Sequence: Synthetic oligonucleotide
cuuguauaccagccucaga

SEQ ID NO: 177476 - RNA, 19 nt, Artificial Sequence
  Description of Artificial Sequence: Synthetic oligonucleotide
gagggaucauuuccuugaa

SEQ ID NO: 177477 - RNA, 19 nt, Artificial Sequence
  Description of Artificial Sequence: Synthetic oligonucleotide
cuagcaagggcagcuaucu

SEQ ID NO: 177478 - RNA, 19 nt, Artificial Sequence
  Description of Artificial Sequence: Synthetic oligonucleotide
cuaugucagcaaugcaaaa

SEQ ID NO: 177479 - RNA, 19 nt, Artificial Sequence
  Description of Artificial Sequence: Synthetic oligonucleotide
gaguuacugugggaguauc

SEQ ID NO: 177480 - RNA, 19 nt, Artificial Sequence
  Description of Artificial Sequence: Synthetic oligonucleotide
cagguguuccccauacgaa

SEQ ID NO: 177481 - RNA, 19 nt, Artificial Sequence
  Description of Artificial Sequence: Synthetic oligonucleotide
gguuucuauaauauccacu

SEQ ID NO: 177482 - RNA, 19 nt, Artificial Sequence
  Description of Artificial Sequence: Synthetic oligonucleotide
gggaaaacacaagcccugc

SEQ ID NO: 177483 - RNA, 19 nt, Artificial Sequence
  Description of Artificial Sequence: Synthetic oligonucleotide
gcuauucucauagcaucac

SEQ ID NO: 177484 - RNA, 19 nt, Artificial Sequence
  Description of Artificial Sequence: Synthetic oligonucleotide
acacuguaauaugcuggcu

SEQ ID NO: 177485 - RNA, 19 nt, Artificial Sequence
  Description of Artificial Sequence: Synthetic oligonucleotide
ucucggcuaccaugaggac

SEQ ID NO: 177486 - RNA, 19 nt, Artificial Sequence
  Description of Artificial Sequence: Synthetic oligonucleotide
ucugguaauuaggcuccau

SEQ ID NO: 177487 - RNA, 19 nt, Artificial Sequence
  Description of Artificial Sequence: Synthetic oligonucleotide
ugcgcucuugaaccaccau

SEQ ID NO: 177488 - RNA, 19 nt, Artificial Sequence
  Description of Artificial Sequence: Synthetic oligonucleotide
guaaaccggugaaggguac

SEQ ID NO: 177489 - RNA, 19 nt, Artificial Sequence
  Description of Artificial Sequence: Synthetic oligonucleotide
gaucaaucuuuggugguau

SEQ ID NO: 177490 - RNA, 19 nt, Artificial Sequence
  Description of Artificial Sequence: Synthetic oligonucleotide
aguuggagcaccgcuucuu

SEQ ID NO: 177491 - RNA, 19 nt, Artificial Sequence
  Description of Artificial Sequence: Synthetic oligonucleotide
gacccuggacgaugggcca

SEQ ID NO: 177492 - RNA, 19 nt, Artificial Sequence
  Description of Artificial Sequence: Synthetic oligonucleotide
cagucgaagcugggcagcc

SEQ ID NO: 177493 - RNA, 19 nt, Artificial Sequence
  Description of Artificial Sequence: Synthetic oligonucleotide
gccuaguacuagcuaagga

SEQ ID NO: 177494 - RNA, 19 nt, Artificial Sequence
  Description of Artificial Sequence: Synthetic oligonucleotide
gcgcucuugaaccaccauc

SEQ ID NO: 177495 - RNA, 19 nt, Artificial Sequence
  Description of Artificial Sequence: Synthetic oligonucleotide
ccugcugacucauacaggu

SEQ ID NO: 177496 - RNA, 19 nt, Artificial Sequence
  Description of Artificial Sequence: Synthetic oligonucleotide
cccgguacugcagugaauc

SEQ ID NO: 177497 - RNA, 19 nt, Artificial Sequence
  Description of Artificial Sequence: Synthetic oligonucleotide
acccuggacgaugggccac

SEQ ID NO: 177498 - RNA, 19 nt, Artificial Sequence
  Description of Artificial Sequence: Synthetic oligonucleotide
auacugcuccaggacuaug

SEQ ID NO: 177499 - RNA, 19 nt, Artificial Sequence
  Description of Artificial Sequence: Synthetic oligonucleotide
aacucggaccuaggacaga

SEQ ID NO: 177500 - RNA, 19 nt, Artificial Sequence
  Description of Artificial Sequence: Synthetic oligonucleotide
cugacucauacaggugcuc

SEQ ID NO: 177501 - RNA, 19 nt, Artificial Sequence
  Description of Artificial Sequence: Synthetic oligonucleotide
caggacuauggcugccuca

SEQ ID NO: 177502 - RNA, 19 nt, Artificial Sequence
  Description of Artificial Sequence: Synthetic oligonucleotide
augguuccacagccagaga

SEQ ID NO: 177503 - RNA, 19 nt, Artificial Sequence
  Description of Artificial Sequence: Synthetic oligonucleotide
aaccggugaaggguacaua

SEQ ID NO: 177504 - RNA, 19 nt, Artificial Sequence
  Description of Artificial Sequence: Synthetic oligonucleotide
aggguccuuuugcgacuuc

SEQ ID NO: 177505 - RNA, 19 nt, Artificial Sequence
  Description of Artificial Sequence: Synthetic oligonucleotide
ccauugcuauucucauagc

SEQ ID NO: 177506 - RNA, 19 nt, Artificial Sequence
  Description of Artificial Sequence: Synthetic oligonucleotide
gcauucugugaaauacuca

SEQ ID NO: 177507 - RNA, 19 nt, Artificial Sequence
  Description of Artificial Sequence: Synthetic oligonucleotide
acaauccgugaaccucuuu

SEQ ID NO: 177508 - RNA, 19 nt, Artificial Sequence
  Description of Artificial Sequence: Synthetic oligonucleotide
guauugacaggcaguacuu

SEQ ID NO: 177509 - RNA, 19 nt, Artificial Sequence
  Description of Artificial Sequence: Synthetic oligonucleotide
ccgucacagaugaacugac

SEQ ID NO: 177510 - RNA, 19 nt, Artificial Sequence
  Description of Artificial Sequence: Synthetic oligonucleotide
cacuuccgaaucugagcca

SEQ ID NO: 177511 - RNA, 19 nt, Artificial Sequence
  Description of Artificial Sequence: Synthetic oligonucleotide
ggccacgcugguuucgaac

SEQ ID NO: 177512 - RNA, 19 nt, Artificial Sequence
  Description of Artificial Sequence: Synthetic oligonucleotide
gaccuaggacagacggcac

SEQ ID NO: 177513 - RNA, 19 nt, Artificial Sequence
  Description of Artificial Sequence: Synthetic oligonucleotide
ccacgggauucucugauca

SEQ ID NO: 177514 - RNA, 19 nt, Artificial Sequence
  Description of Artificial Sequence: Synthetic oligonucleotide
uucucccgggccccacauc

SEQ ID NO: 177515 - RNA, 19 nt, Artificial Sequence
  Description of Artificial Sequence: Synthetic oligonucleotide
ccacgugcaccuguggagc

SEQ ID NO: 177516 - RNA, 19 nt, Artificial Sequence
  Description of Artificial Sequence: Synthetic oligonucleotide
cgacuucucggcuaccaug

SEQ ID NO: 177517 - RNA, 19 nt, Artificial Sequence
  Description of Artificial Sequence: Synthetic oligonucleotide
cccauacgaaacacugauc

SEQ ID NO: 177518 - RNA, 19 nt, Artificial Sequence
  Description of Artificial Sequence: Synthetic oligonucleotide
ccuccaaguuuccccucgg

SEQ ID NO: 177519 - RNA, 19 nt, Artificial Sequence
  Description of Artificial Sequence: Synthetic oligonucleotide
gggaccacagucaaacggu

SEQ ID NO: 177520 - RNA, 19 nt, Artificial Sequence
  Description of Artificial Sequence: Synthetic oligonucleotide
ccagacugccuaguacuag

SEQ ID NO: 177521 - RNA, 19 nt, Artificial Sequence
  Description of Artificial Sequence: Synthetic oligonucleotide
ccacaucgggaaaacacaa

SEQ ID NO: 177522 - RNA, 19 nt, Artificial Sequence
  Description of Artificial Sequence: Synthetic oligonucleotide
caguuccgggguuguuuuc

SEQ ID NO: 177523 - RNA, 19 nt, Artificial Sequence
  Description of Artificial Sequence: Synthetic oligonucleotide
cucggcuaccaugaggacu

SEQ ID NO: 177524 - RNA, 19 nt, Artificial Sequence
  Description of Artificial Sequence: Synthetic oligonucleotide
cgggauucucugaucaauc

SEQ ID NO: 177525 - RNA, 19 nt, Artificial Sequence
  Description of Artificial Sequence: Synthetic oligonucleotide
cacgggauucucugaucaa

SEQ ID NO: 177526 - RNA, 19 nt, Artificial Sequence
  Description of Artificial Sequence: Synthetic oligonucleotide
cagcuguaucaccguugac

SEQ ID NO: 177527 - RNA, 19 nt, Artificial Sequence
  Description of Artificial Sequence: Synthetic oligonucleotide
ccacucucggagaagaggu

SEQ ID NO: 177528 - RNA, 19 nt, Artificial Sequence
  Description of Artificial Sequence: Synthetic oligonucleotide
caguacuuguguggauuga

SEQ ID NO: 177529 - RNA, 19 nt, Artificial Sequence
  Description of Artificial Sequence: Synthetic oligonucleotide
ccuuaggguccuuuugcga

SEQ ID NO: 177530 - RNA, 19 nt, Artificial Sequence
  Description of Artificial Sequence: Synthetic oligonucleotide
cacccgguacugcagugaa

SEQ ID NO: 177531 - RNA, 19 nt, Artificial Sequence
  Description of Artificial Sequence: Synthetic oligonucleotide
cuaggacagacggcacuga

SEQ ID NO: 177532 - RNA, 19 nt, Artificial Sequence
  Description of Artificial Sequence: Synthetic oligonucleotide
gguguacuuucugcagcac

SEQ ID NO: 177533 - RNA, 19 nt, Artificial Sequence
  Description of Artificial Sequence: Synthetic oligonucleotide
gcuuucucaugcauucaaa

SEQ ID NO: 177534 - RNA, 19 nt, Artificial Sequence
  Description of Artificial Sequence: Synthetic oligonucleotide
gaaccaccaucaaacgguu

SEQ ID NO: 177535 - RNA, 19 nt, Artificial Sequence
  Description of Artificial Sequence: Synthetic oligonucleotide
guacucucaaaggccuucu

SEQ ID NO: 177536 - RNA, 19 nt, Artificial Sequence
  Description of Artificial Sequence: Synthetic oligonucleotide
caccguugacuuggucuug

SEQ ID NO: 177537 - RNA, 19 nt, Artificial Sequence
  Description of Artificial Sequence: Synthetic oligonucleotide
cuguaguauuaaguuuugu

SEQ ID NO: 177538 - RNA, 19 nt, Artificial Sequence
  Description of Artificial Sequence: Synthetic oligonucleotide
cucccgcaucagguguucc

SEQ ID NO: 177539 - RNA, 19 nt, Artificial Sequence
  Description of Artificial Sequence: Synthetic oligonucleotide
ggcuaaaacgaagucugau

SEQ ID NO: 177540 - RNA, 19 nt, Artificial Sequence
  Description of Artificial Sequence: Synthetic oligonucleotide
cagauauccuggaguuacu

SEQ ID NO: 177541 - RNA, 19 nt, Artificial Sequence
  Description of Artificial Sequence: Synthetic oligonucleotide
uugcgacuucucggcuacc

SEQ ID NO: 177542 - RNA, 19 nt, Artificial Sequence
  Description of Artificial Sequence: Synthetic oligonucleotide
cggugaaugagagacugca

SEQ ID NO: 177543 - RNA, 19 nt, Artificial Sequence
  Description of Artificial Sequence: Synthetic oligonucleotide
agccaagaccaagguccga

SEQ ID NO: 177544 - RNA, 19 nt, Artificial Sequence
  Description of Artificial Sequence: Synthetic oligonucleotide
ccccauacgaaacacugau

SEQ ID NO: 177545 - RNA, 19 nt, Artificial Sequence
  Description of Artificial Sequence: Synthetic oligonucleotide
guccgaugaugaacaaccu

SEQ ID NO: 177546 - RNA, 19 nt, Artificial Sequence
  Description of Artificial Sequence: Synthetic oligonucleotide
aggccacgcugguuucgaa

SEQ ID NO: 177547 - RNA, 19 nt, Artificial Sequence
  Description of Artificial Sequence: Synthetic oligonucleotide
ccaccgucacagaugaacu

SEQ ID NO: 177548 - RNA, 19 nt, Artificial Sequence
  Description of Artificial Sequence: Synthetic oligonucleotide
gcgaaugaauguggauguc

SEQ ID NO: 177549 - RNA, 19 nt, Artificial Sequence
  Description of Artificial Sequence: Synthetic oligonucleotide
gguuucgaacuugcaucaa

SEQ ID NO: 177550 - RNA, 19 nt, Artificial Sequence
  Description of Artificial Sequence: Synthetic oligonucleotide
ggacuaaaucaaagucaua

SEQ ID NO: 177551 - RNA, 19 nt, Artificial Sequence
  Description of Artificial Sequence: Synthetic oligonucleotide
acgugcaccuguggagcuu

SEQ ID NO: 177552 - RNA, 19 nt, Artificial Sequence
  Description of Artificial Sequence: Synthetic oligonucleotide
gcaucagguguuccccaua

SEQ ID NO: 177553 - RNA, 19 nt, Artificial Sequence
  Description of Artificial Sequence: Synthetic oligonucleotide
cgugcaccuguggagcuug

SEQ ID NO: 177554 - RNA, 19 nt, Artificial Sequence
  Description of Artificial Sequence: Synthetic oligonucleotide
gacaauccgugaaccucuu

SEQ ID NO: 177555 - RNA, 19 nt, Artificial Sequence
  Description of Artificial Sequence: Synthetic oligonucleotide
ggaaagcgucuucuucaau

SEQ ID NO: 177556 - RNA, 19 nt, Artificial Sequence
  Description of Artificial Sequence: Synthetic oligonucleotide
cccuggacgaugggccacc

SEQ ID NO: 177557 - RNA, 19 nt, Artificial Sequence
  Description of Artificial Sequence: Synthetic oligonucleotide
guaucaccguugacuuggu

SEQ ID NO: 177558 - RNA, 19 nt, Artificial Sequence
  Description of Artificial Sequence: Synthetic oligonucleotide
acccgguacugcagugaau

SEQ ID NO: 177559 - RNA, 19 nt, Artificial Sequence
  Description of Artificial Sequence: Synthetic oligonucleotide
ggaagguuucacacugguu

SEQ ID NO: 177560 - RNA, 19 nt, Artificial Sequence
  Description of Artificial Sequence: Synthetic oligonucleotide
cucugccuugcgucgguuu

SEQ ID NO: 177561 - RNA, 19 nt, Artificial Sequence
  Description of Artificial Sequence: Synthetic oligonucleotide
aggugcccaauggccuuuu

SEQ ID NO: 177562 - RNA, 19 nt, Artificial Sequence
  Description of Artificial Sequence: Synthetic oligonucleotide
ccguugacuuggucuugga

SEQ ID NO: 177563 - RNA, 19 nt, Artificial Sequence
  Description of Artificial Sequence: Synthetic oligonucleotide
ccaguuccgggguuguuuu

SEQ ID NO: 177564 - RNA, 19 nt, Artificial Sequence
  Description of Artificial Sequence: Synthetic oligonucleotide
gcgacuucucggcuaccau

SEQ ID NO: 177565 - RNA, 19 nt, Artificial Sequence
  Description of Artificial Sequence: Synthetic oligonucleotide
cccucggcaucuguaguau

SEQ ID NO: 177566 - RNA, 19 nt, Artificial Sequence
  Description of Artificial Sequence: Synthetic oligonucleotide
ccacgcugguuucgaacuu

SEQ ID NO: 177567 - RNA, 19 nt, Artificial Sequence
  Description of Artificial Sequence: Synthetic oligonucleotide
ccucggcaucuguaguauu

SEQ ID NO: 177568 - RNA, 19 nt, Artificial Sequence
  Description of Artificial Sequence: Synthetic oligonucleotide
gcucugccuugcgucgguu

SEQ ID NO: 177569 - RNA, 19 nt, Artificial Sequence
  Description of Artificial Sequence: Synthetic oligonucleotide
ucuaaguugaauauucugg

SEQ ID NO: 177570 - RNA, 19 nt, Artificial Sequence
  Description of Artificial Sequence: Synthetic oligonucleotide
aaaucagucaaauaccaca

SEQ ID NO: 177571 - RNA, 19 nt, Artificial Sequence
  Description of Artificial Sequence: Synthetic oligonucleotide
aagagauaauuccuguggc

SEQ ID NO: 177572 - RNA, 19 nt, Artificial Sequence
  Description of Artificial Sequence: Synthetic oligonucleotide
ugaggaauccuucauacac

SEQ ID NO: 177573 - RNA, 19 nt, Artificial Sequence
  Description of Artificial Sequence: Synthetic oligonucleotide
caagagauaauuccugugg

SEQ ID NO: 177574 - RNA, 19 nt, Artificial Sequence
  Description of Artificial Sequence: Synthetic oligonucleotide
uccguuguaauucugcccc

SEQ ID NO: 177575 - RNA, 19 nt, Artificial Sequence
  Description of Artificial Sequence: Synthetic oligonucleotide
gacuccaagagauaauucc

SEQ ID NO: 177576 - RNA, 19 nt, Artificial Sequence
  Description of Artificial Sequence: Synthetic oligonucleotide
uuugaggaauccuucauac

SEQ ID NO: 177577 - RNA, 19 nt, Artificial Sequence
  Description of Artificial Sequence: Synthetic oligonucleotide
aacaauucugggaugcuac

SEQ ID NO: 177578 - RNA, 19 nt, Artificial Sequence
  Description of Artificial Sequence: Synthetic oligonucleotide
uagcauaguacauagcuac

SEQ ID NO: 177579 - RNA, 19 nt, Artificial Sequence
  Description of Artificial Sequence: Synthetic oligonucleotide
gauagcauaguacauagcu

SEQ ID NO: 177580 - RNA, 19 nt, Artificial Sequence
  Description of Artificial Sequence: Synthetic oligonucleotide
gccgauuccaaauagaugc

SEQ ID NO: 177581 - RNA, 19 nt, Artificial Sequence
  Description of Artificial Sequence: Synthetic oligonucleotide
caagcuucggcccaauucg

SEQ ID NO: 177582 - RNA, 19 nt, Artificial Sequence
  Description of Artificial Sequence: Synthetic oligonucleotide
aggauagcauaguacauag

SEQ ID NO: 177583 - RNA, 19 nt, Artificial Sequence
  Description of Artificial Sequence: Synthetic oligonucleotide
agucguaggacauggguuc

SEQ ID NO: 177584 - RNA, 19 nt, Artificial Sequence
  Description of Artificial Sequence: Synthetic oligonucleotide
gauaguacucgcacaaccg

SEQ ID NO: 177585 - RNA, 19 nt, Artificial Sequence
  Description of Artificial Sequence: Synthetic oligonucleotide
auaguacauagcuacucuc

SEQ ID NO: 177586 - RNA, 19 nt, Artificial Sequence
  Description of Artificial Sequence: Synthetic oligonucleotide
aagccaaucugccgugagc

SEQ ID NO: 177587 - RNA, 19 nt, Artificial Sequence
  Description of Artificial Sequence: Synthetic oligonucleotide
uacauagcuacucuccuaa

SEQ ID NO: 177588 - RNA, 19 nt, Artificial Sequence
  Description of Artificial Sequence: Synthetic oligonucleotide
gagacuagggcugaugaag

SEQ ID NO: 177589 - RNA, 19 nt, Artificial Sequence
  Description of Artificial Sequence: Synthetic oligonucleotide
ugaauauucugggauggcc

SEQ ID NO: 177590 - RNA, 19 nt, Artificial Sequence
  Description of Artificial Sequence: Synthetic oligonucleotide
aacgcugaauuugugagga

SEQ ID NO: 177591 - RNA, 19 nt, Artificial Sequence
  Description of Artificial Sequence: Synthetic oligonucleotide
ggaucuuauggccagagug

SEQ ID NO: 177592 - RNA, 19 nt, Artificial Sequence
  Description of Artificial Sequence: Synthetic oligonucleotide
gaucuuauggccagagugc

SEQ ID NO: 177593 - RNA, 19 nt, Artificial Sequence
  Description of Artificial Sequence: Synthetic oligonucleotide
aggacguuaguccuugcag

SEQ ID NO: 177594 - RNA, 19 nt, Artificial Sequence
  Description of Artificial Sequence: Synthetic oligonucleotide
gacucauuugagcaaggug

SEQ ID NO: 177595 - RNA, 19 nt, Artificial Sequence
  Description of Artificial Sequence: Synthetic oligonucleotide
ggaaugggaaauugaaucc

SEQ ID NO: 177596 - RNA, 19 nt, Artificial Sequence
  Description of Artificial Sequence: Synthetic oligonucleotide
cuugggucguacaaaggag

SEQ ID NO: 177597 - RNA, 19 nt, Artificial Sequence
  Description of Artificial Sequence: Synthetic oligonucleotide
gguuagaaggggccgaugg

SEQ ID NO: 177598 - RNA, 19 nt, Artificial Sequence
  Description of Artificial Sequence: Synthetic oligonucleotide
uugggucguacaaaggaga

SEQ ID NO: 177599 - RNA, 19 nt, Artificial Sequence
  Description of Artificial Sequence: Synthetic oligonucleotide
gaagcucaggagaaacucg

SEQ ID NO: 177600 - RNA, 19 nt, Artificial Sequence
  Description of Artificial Sequence: Synthetic oligonucleotide
cucauuugagcaaggugag

SEQ ID NO: 177601 - RNA, 19 nt, Artificial Sequence
  Description of Artificial Sequence: Synthetic oligonucleotide
agagauaauuccuguggcu

SEQ ID NO: 177602 - RNA, 19 nt, Artificial Sequence
  Description of Artificial Sequence: Synthetic oligonucleotide
uccaagagauaauuccugu

SEQ ID NO: 177603 - RNA, 19 nt, Artificial Sequence
  Description of Artificial Sequence: Synthetic oligonucleotide
uuugagcaaggugagucag

SEQ ID NO: 177604 - RNA, 19 nt, Artificial Sequence
  Description of Artificial Sequence: Synthetic oligonucleotide
ggucguacaaaggagaagc

SEQ ID NO: 177605 - RNA, 19 nt, Artificial Sequence
  Description of Artificial Sequence: Synthetic oligonucleotide
aaggacguuaguccuugca

SEQ ID NO: 177606 - RNA, 19 nt, Artificial Sequence
  Description of Artificial Sequence: Synthetic oligonucleotide
aaacucgcccucuucggca

SEQ ID NO: 177607 - RNA, 19 nt, Artificial Sequence
  Description of Artificial Sequence: Synthetic oligonucleotide
cuaggcugacgacaaaccc

SEQ ID NO: 177608 - RNA, 19 nt, Artificial Sequence
  Description of Artificial Sequence: Synthetic oligonucleotide
auaguacucgcacaaccgu

SEQ ID NO: 177609 - RNA, 19 nt, Artificial Sequence
  Description of Artificial Sequence: Synthetic oligonucleotide
cuucuagggagcucaacug

SEQ ID NO: 177610 - RNA, 19 nt, Artificial Sequence
  Description of Artificial Sequence: Synthetic oligonucleotide
gagguuggcaagaccaggg

SEQ ID NO: 177611 - RNA, 19 nt, Artificial Sequence
  Description of Artificial Sequence: Synthetic oligonucleotide
cauucggcacaccugacug

SEQ ID NO: 177612 - RNA, 19 nt, Artificial Sequence
  Description of Artificial Sequence: Synthetic oligonucleotide
acgugagcucuucuggugg

SEQ ID NO: 177613 - RNA, 19 nt, Artificial Sequence
  Description of Artificial Sequence: Synthetic oligonucleotide
uuuugaccuagugugggca

SEQ ID NO: 177614 - RNA, 19 nt, Artificial Sequence
  Description of Artificial Sequence: Synthetic oligonucleotide
caaucugccgugagcagcc

SEQ ID NO: 177615 - RNA, 19 nt, Artificial Sequence
  Description of Artificial Sequence: Synthetic oligonucleotide
cugacgacaaacccaguug

SEQ ID NO: 177616 - RNA, 19 nt, Artificial Sequence
  Description of Artificial Sequence: Synthetic oligonucleotide
uccgcugcuuggcacagag

SEQ ID NO: 177617 - RNA, 19 nt, Artificial Sequence
  Description of Artificial Sequence: Synthetic oligonucleotide
agcuacucuccuaaaugcc

SEQ ID NO: 177618 - RNA, 19 nt, Artificial Sequence
  Description of Artificial Sequence: Synthetic oligonucleotide
gcaacgcugaauuugugag

SEQ ID NO: 177619 - RNA, 19 nt, Artificial Sequence
  Description of Artificial Sequence: Synthetic oligonucleotide
cuugucagaauauugcaua

SEQ ID NO: 177620 - RNA, 19 nt, Artificial Sequence
  Description of Artificial Sequence: Synthetic oligonucleotide
gucaagacccuucucggug

SEQ ID NO: 177621 - RNA, 19 nt, Artificial Sequence
  Description of Artificial Sequence: Synthetic oligonucleotide
uacucgcacaaccgugugg

SEQ ID NO: 177622 - RNA, 19 nt, Artificial Sequence
  Description of Artificial Sequence: Synthetic oligonucleotide
ucucuagacaugagaggca

SEQ ID NO: 177623 - RNA, 19 nt, Artificial Sequence
  Description of Artificial Sequence: Synthetic oligonucleotide
augaccuugcuaacaauuc

SEQ ID NO: 177624 - RNA, 19 nt, Artificial Sequence
  Description of Artificial Sequence: Synthetic oligonucleotide
gacuccuagagccauucuc

SEQ ID NO: 177625 - RNA, 19 nt, Artificial Sequence
  Description of Artificial Sequence: Synthetic oligonucleotide
agaccgggcgcuuugugag

SEQ ID NO: 177626 - RNA, 19 nt, Artificial Sequence
  Description of Artificial Sequence: Synthetic oligonucleotide
gaugcaugcgcuccacgug

SEQ ID NO: 177627 - RNA, 19 nt, Artificial Sequence
  Description of Artificial Sequence: Synthetic oligonucleotide
agaugcaugcgcuccacgu

SEQ ID NO: 177628 - RNA, 19 nt, Artificial Sequence
  Description of Artificial Sequence: Synthetic oligonucleotide
ggacguuaguccuugcagg

SEQ ID NO: 177629 - RNA, 19 nt, Artificial Sequence
  Description of Artificial Sequence: Synthetic oligonucleotide
ugaggauagcauaguacau

SEQ ID NO: 177630 - RNA, 19 nt, Artificial Sequence
  Description of Artificial Sequence: Synthetic oligonucleotide
uagugagagggucaagcuc

SEQ ID NO: 177631 - RNA, 19 nt, Artificial Sequence
  Description of Artificial Sequence: Synthetic oligonucleotide
ucuagccugcucuacccug

SEQ ID NO: 177632 - RNA, 19 nt, Artificial Sequence
  Description of Artificial Sequence: Synthetic oligonucleotide
gucagcaacgcugaauuug

SEQ ID NO: 177633 - RNA, 19 nt, Artificial Sequence
  Description of Artificial Sequence: Synthetic oligonucleotide
ugaacaugaccuugcuaac

SEQ ID NO: 177634 - RNA, 19 nt, Artificial Sequence
  Description of Artificial Sequence: Synthetic oligonucleotide
ucguacaaaggagaagcca

SEQ ID NO: 177635 - RNA, 19 nt, Artificial Sequence
  Description of Artificial Sequence: Synthetic oligonucleotide
aguucugcauucggcacac

SEQ ID NO: 177636 - RNA, 19 nt, Artificial Sequence
  Description of Artificial Sequence: Synthetic oligonucleotide
aguuuaggcugcaggauag

SEQ ID NO: 177637 - RNA, 19 nt, Artificial Sequence
  Description of Artificial Sequence: Synthetic oligonucleotide
gaagccaaucugccgugag

SEQ ID NO: 177638 - RNA, 19 nt, Artificial Sequence
  Description of Artificial Sequence: Synthetic oligonucleotide
uggccgacuuguaggagag

SEQ ID NO: 177639 - RNA, 19 nt, Artificial Sequence
  Description of Artificial Sequence: Synthetic oligonucleotide
gacguuaguccuugcagga

SEQ ID NO: 177640 - RNA, 19 nt, Artificial Sequence
  Description of Artificial Sequence: Synthetic oligonucleotide
uuuaugaacgcagggcuuu

SEQ ID NO: 177641 - RNA, 19 nt, Artificial Sequence
  Description of Artificial Sequence: Synthetic oligonucleotide
agaccagggacuuucugaa

SEQ ID NO: 177642 - RNA, 19 nt, Artificial Sequence
  Description of Artificial Sequence: Synthetic oligonucleotide
cucagccgauuccaaauag

SEQ ID NO: 177643 - RNA, 19 nt, Artificial Sequence
  Description of Artificial Sequence: Synthetic oligonucleotide
uguuccugcggaucuuaug

SEQ ID NO: 177644 - RNA, 19 nt, Artificial Sequence
  Description of Artificial Sequence: Synthetic oligonucleotide
uuugaccuagugugggcac

SEQ ID NO: 177645 - RNA, 19 nt, Artificial Sequence
  Description of Artificial Sequence: Synthetic oligonucleotide
aacggucuggacuccuaga

SEQ ID NO: 177646 - RNA, 19 nt, Artificial Sequence
  Description of Artificial Sequence: Synthetic oligonucleotide
gguacuguagcaggaagcc

SEQ ID NO: 177647 - RNA, 19 nt, Artificial Sequence
  Description of Artificial Sequence: Synthetic oligonucleotide
ugggucguacaaaggagaa

SEQ ID NO: 177648 - RNA, 19 nt, Artificial Sequence
  Description of Artificial Sequence: Synthetic oligonucleotide
agauggccgacuuguagga

SEQ ID NO: 177649 - RNA, 19 nt, Artificial Sequence
  Description of Artificial Sequence: Synthetic oligonucleotide
caaagggaaagaugauguc

SEQ ID NO: 177650 - RNA, 19 nt, Artificial Sequence
  Description of Artificial Sequence: Synthetic oligonucleotide
uaugaacgcagggcuuugg

SEQ ID NO: 177651 - RNA, 19 nt, Artificial Sequence
  Description of Artificial Sequence: Synthetic oligonucleotide
agccuuucuggugucuagc

SEQ ID NO: 177652 - RNA, 19 nt, Artificial Sequence
  Description of Artificial Sequence: Synthetic oligonucleotide
cucuagacaugagaggcac

SEQ ID NO: 177653 - RNA, 19 nt, Artificial Sequence
  Description of Artificial Sequence: Synthetic oligonucleotide
augcaugcgcuccacgugu

SEQ ID NO: 177654 - RNA, 19 nt, Artificial Sequence
  Description of Artificial Sequence: Synthetic oligonucleotide
ugcuaacaauucugggaug

SEQ ID NO: 177655 - RNA, 19 nt, Artificial Sequence
  Description of Artificial Sequence: Synthetic oligonucleotide
gauagcaggguuagcugac

SEQ ID NO: 177656 - RNA, 19 nt, Artificial Sequence
  Description of Artificial Sequence: Synthetic oligonucleotide
acaaggacguuaguccuug

SEQ ID NO: 177657 - RNA, 19 nt, Artificial Sequence
  Description of Artificial Sequence: Synthetic oligonucleotide
gaguuuaggcugcaggaua

SEQ ID NO: 177658 - RNA, 19 nt, Artificial Sequence
  Description of Artificial Sequence: Synthetic oligonucleotide
cuuggcacagaguuaaccu

SEQ ID NO: 177659 - RNA, 19 nt, Artificial Sequence
  Description of Artificial Sequence: Synthetic oligonucleotide
gaacaugaccuugcuaaca

SEQ ID NO: 177660 - RNA, 19 nt, Artificial Sequence
  Description of Artificial Sequence: Synthetic oligonucleotide
agucaagacccuucucggu

SEQ ID NO: 177661 - RNA, 19 nt, Artificial Sequence
  Description of Artificial Sequence: Synthetic oligonucleotide
aggagacuccaagagauaa

SEQ ID NO: 177662 - RNA, 19 nt, Artificial Sequence
  Description of Artificial Sequence: Synthetic oligonucleotide
gagccuuucuggugucuag

SEQ ID NO: 177663 - RNA, 19 nt, Artificial Sequence
  Description of Artificial Sequence: Synthetic oligonucleotide
uucggaccaggucucucca

SEQ ID NO: 177664 - RNA, 19 nt, Artificial Sequence
  Description of Artificial Sequence: Synthetic oligonucleotide
gcuugggucguacaaagga

SEQ ID NO: 177665 - RNA, 19 nt, Artificial Sequence
  Description of Artificial Sequence: Synthetic oligonucleotide
guagacaugcugggaggcg

SEQ ID NO: 177666 - RNA, 19 nt, Artificial Sequence
  Description of Artificial Sequence: Synthetic oligonucleotide
aagcuucggcccaauucgg

SEQ ID NO: 177667 - RNA, 19 nt, Artificial Sequence
  Description of Artificial Sequence: Synthetic oligonucleotide
gaggauagcauaguacaua

SEQ ID NO: 177668 - RNA, 19 nt, Artificial Sequence
  Description of Artificial Sequence: Synthetic oligonucleotide
ggcucuaaguugaauauuc

SEQ ID NO: 177669 - RNA, 19 nt, Artificial Sequence
  Description of Artificial Sequence: Synthetic oligonucleotide
cacgugagcucuucuggug

SEQ ID NO: 177670 - RNA, 19 nt, Artificial Sequence
  Description of Artificial Sequence: Synthetic oligonucleotide
ccuugcuaacaauucuggg

SEQ ID NO: 177671 - RNA, 19 nt, Artificial Sequence
  Description of Artificial Sequence: Synthetic oligonucleotide
cauaguacauagcuacucu

SEQ ID NO: 177672 - RNA, 19 nt, Artificial Sequence
  Description of Artificial Sequence: Synthetic oligonucleotide
auagcauaguacauagcua

SEQ ID NO: 177673 - RNA, 19 nt, Artificial Sequence
  Description of Artificial Sequence: Synthetic oligonucleotide
cugcauucggcacaccuga

SEQ ID NO: 177674 - RNA, 19 nt, Artificial Sequence
  Description of Artificial Sequence: Synthetic oligonucleotide
gcugauaguacucgcacaa

SEQ ID NO: 177675 - RNA, 19 nt, Artificial Sequence
  Description of Artificial Sequence: Synthetic oligonucleotide
agcuucggcccaauucggc

SEQ ID NO: 177676 - RNA, 19 nt, Artificial Sequence
  Description of Artificial Sequence: Synthetic oligonucleotide
aacucgcccucuucggcau

SEQ ID NO: 177677 - RNA, 19 nt, Artificial Sequence
  Description of Artificial Sequence: Synthetic oligonucleotide
gcgagaaggguuagaaggg

SEQ ID NO: 177678 - RNA, 19 nt, Artificial Sequence
  Description of Artificial Sequence: Synthetic oligonucleotide
agagccucuuaaggguaac

SEQ ID NO: 177679 - RNA, 19 nt, Artificial Sequence
  Description of Artificial Sequence: Synthetic oligonucleotide
ugaccuagugugggcacug

SEQ ID NO: 177680 - RNA, 19 nt, Artificial Sequence
  Description of Artificial Sequence: Synthetic oligonucleotide
auucggcacaccugacugu

SEQ ID NO: 177681 - RNA, 19 nt, Artificial Sequence
  Description of Artificial Sequence: Synthetic oligonucleotide
uguuccgcccacgggaccu

SEQ ID NO: 177682 - RNA, 19 nt, Artificial Sequence
  Description of Artificial Sequence: Synthetic oligonucleotide
ugaugcuuguagccaccaa

SEQ ID NO: 177683 - RNA, 19 nt, Artificial Sequence
  Description of Artificial Sequence: Synthetic oligonucleotide
ugguccgcugcuuggcaca

SEQ ID NO: 177684 - RNA, 19 nt, Artificial Sequence
  Description of Artificial Sequence: Synthetic oligonucleotide
acguguucauacagagagg

SEQ ID NO: 177685 - RNA, 19 nt, Artificial Sequence
  Description of Artificial Sequence: Synthetic oligonucleotide
uccgagugucacagccucc

SEQ ID NO: 177686 - RNA, 19 nt, Artificial Sequence
  Description of Artificial Sequence: Synthetic oligonucleotide
gucguacaaaggagaagcc

SEQ ID NO: 177687 - RNA, 19 nt, Artificial Sequence
  Description of Artificial Sequence: Synthetic oligonucleotide
ucuccacggacugguagga

SEQ ID NO: 177688 - RNA, 19 nt, Artificial Sequence
  Description of Artificial Sequence: Synthetic oligonucleotide
acggacugguaggagagga

SEQ ID NO: 177689 - RNA, 19 nt, Artificial Sequence
  Description of Artificial Sequence: Synthetic oligonucleotide
ggcgaacucaaucagggcu

SEQ ID NO: 177690 - RNA, 19 nt, Artificial Sequence
  Description of Artificial Sequence: Synthetic oligonucleotide
ccaauuggggucccagagg

SEQ ID NO: 177691 - RNA, 19 nt, Artificial Sequence
  Description of Artificial Sequence: Synthetic oligonucleotide
accuagugugggcacugcu

SEQ ID NO: 177692 - RNA, 19 nt, Artificial Sequence
  Description of Artificial Sequence: Synthetic oligonucleotide
gaccgggcgcuuugugagg

SEQ ID NO: 177693 - RNA, 19 nt, Artificial Sequence
  Description of Artificial Sequence: Synthetic oligonucleotide
gcuucggcccaauucggcc

SEQ ID NO: 177694 - RNA, 19 nt, Artificial Sequence
  Description of Artificial Sequence: Synthetic oligonucleotide
uucugguggcagguaaagu

SEQ ID NO: 177695 - RNA, 19 nt, Artificial Sequence
  Description of Artificial Sequence: Synthetic oligonucleotide
agcauaguacauagcuacu

SEQ ID NO: 177696 - RNA, 19 nt, Artificial Sequence
  Description of Artificial Sequence: Synthetic oligonucleotide
cugaagguuuaugaacgca

SEQ ID NO: 177697 - RNA, 19 nt, Artificial Sequence
  Description of Artificial Sequence: Synthetic oligonucleotide
guacucgcacaaccgugug

SEQ ID NO: 177698 - RNA, 19 nt, Artificial Sequence
  Description of Artificial Sequence: Synthetic oligonucleotide
ugcauucggcacaccugac

SEQ ID NO: 177699 - RNA, 19 nt, Artificial Sequence
  Description of Artificial Sequence: Synthetic oligonucleotide
aaggguaacccugcuucua

SEQ ID NO: 177700 - RNA, 19 nt, Artificial Sequence
  Description of Artificial Sequence: Synthetic oligonucleotide
gguagacaugcugggaggc

SEQ ID NO: 177701 - RNA, 19 nt, Artificial Sequence
  Description of Artificial Sequence: Synthetic oligonucleotide
guacauagcuacucuccua

SEQ ID NO: 177702 - RNA, 19 nt, Artificial Sequence
  Description of Artificial Sequence: Synthetic oligonucleotide
cuucggcccaauucggcca

SEQ ID NO: 177703 - RNA, 19 nt, Artificial Sequence
  Description of Artificial Sequence: Synthetic oligonucleotide
acaaccguguggguuccug

SEQ ID NO: 177704 - RNA, 19 nt, Artificial Sequence
  Description of Artificial Sequence: Synthetic oligonucleotide
aagagccucuuaaggguaa

SEQ ID NO: 177705 - RNA, 19 nt, Artificial Sequence
  Description of Artificial Sequence: Synthetic oligonucleotide
acgcugaauuugugaggag

SEQ ID NO: 177706 - RNA, 19 nt, Artificial Sequence
  Description of Artificial Sequence: Synthetic oligonucleotide
gcuucuagggagcucaacu

SEQ ID NO: 177707 - RNA, 19 nt, Artificial Sequence
  Description of Artificial Sequence: Synthetic oligonucleotide
guaaggagggcauggggau

SEQ ID NO: 177708 - RNA, 19 nt, Artificial Sequence
  Description of Artificial Sequence: Synthetic oligonucleotide
uucggcccaauucggccau

SEQ ID NO: 177709 - RNA, 19 nt, Artificial Sequence
  Description of Artificial Sequence: Synthetic oligonucleotide
ccacggacugguaggagag

SEQ ID NO: 177710 - RNA, 19 nt, Artificial Sequence
  Description of Artificial Sequence: Synthetic oligonucleotide
cucaacugggaacugcagu

SEQ ID NO: 177711 - RNA, 19 nt, Artificial Sequence
  Description of Artificial Sequence: Synthetic oligonucleotide
aggaaaccacaagcuucgg

SEQ ID NO: 177712 - RNA, 19 nt, Artificial Sequence
  Description of Artificial Sequence: Synthetic oligonucleotide
aucugccgugagcagccug

SEQ ID NO: 177713 - RNA, 19 nt, Artificial Sequence
  Description of Artificial Sequence: Synthetic oligonucleotide
uggcucuaaguugaauauu

SEQ ID NO: 177714 - RNA, 19 nt, Artificial Sequence
  Description of Artificial Sequence: Synthetic oligonucleotide
uucggcugaccacucccuu

SEQ ID NO: 177715 - RNA, 19 nt, Artificial Sequence
  Description of Artificial Sequence: Synthetic oligonucleotide
ggcacagaguuaaccuggg

SEQ ID NO: 177716 - RNA, 19 nt, Artificial Sequence
  Description of Artificial Sequence: Synthetic oligonucleotide
ccuucggcugaccacuccc

SEQ ID NO: 177717 - RNA, 19 nt, Artificial Sequence
  Description of Artificial Sequence: Synthetic oligonucleotide
caaggacguuaguccuugc

SEQ ID NO: 177718 - RNA, 19 nt, Artificial Sequence
  Description of Artificial Sequence: Synthetic oligonucleotide
uggguuccgucagaacggu

SEQ ID NO: 177719 - RNA, 19 nt, Artificial Sequence
  Description of Artificial Sequence: Synthetic oligonucleotide
aggagaaacucgcccucuu

SEQ ID NO: 177720 - RNA, 19 nt, Artificial Sequence
  Description of Artificial Sequence: Synthetic oligonucleotide
ggcugauaguacucgcaca

SEQ ID NO: 177721 - RNA, 19 nt, Artificial Sequence
  Description of Artificial Sequence: Synthetic oligonucleotide
ggauagcauaguacauagc

SEQ ID NO: 177722 - RNA, 19 nt, Artificial Sequence
  Description of Artificial Sequence: Synthetic oligonucleotide
cugccggcagaccgggcgc

SEQ ID NO: 177723 - RNA, 19 nt, Artificial Sequence
  Description of Artificial Sequence: Synthetic oligonucleotide
ggacaaggacguuaguccu

SEQ ID NO: 177724 - RNA, 19 nt, Artificial Sequence
  Description of Artificial Sequence: Synthetic oligonucleotide
caccaauuggggucccaga

SEQ ID NO: 177725 - RNA, 19 nt, Artificial Sequence
  Description of Artificial Sequence: Synthetic oligonucleotide
gguugauaaggggcugggc

SEQ ID NO: 177726 - RNA, 19 nt, Artificial Sequence
  Description of Artificial Sequence: Synthetic oligonucleotide
cacggacugguaggagagg

SEQ ID NO: 177727 - RNA, 19 nt, Artificial Sequence
  Description of Artificial Sequence: Synthetic oligonucleotide
gaccuagugugggcacugc

SEQ ID NO: 177728 - RNA, 19 nt, Artificial Sequence
  Description of Artificial Sequence: Synthetic oligonucleotide
ugcaugcgcuccacguguu

SEQ ID NO: 177729 - RNA, 19 nt, Artificial Sequence
  Description of Artificial Sequence: Synthetic oligonucleotide
aaucugccgugagcagccu

SEQ ID NO: 177730 - RNA, 19 nt, Artificial Sequence
  Description of Artificial Sequence: Synthetic oligonucleotide
acguuaguccuugcaggaa

SEQ ID NO: 177731 - RNA, 19 nt, Artificial Sequence
  Description of Artificial Sequence: Synthetic oligonucleotide
gcacagaguuaaccugggc

SEQ ID NO: 177732 - RNA, 19 nt, Artificial Sequence
  Description of Artificial Sequence: Synthetic oligonucleotide
accgggcgcuuugugaggu

SEQ ID NO: 177733 - RNA, 19 nt, Artificial Sequence
  Description of Artificial Sequence: Synthetic oligonucleotide
agcucugauggaagacagu

SEQ ID NO: 177734 - RNA, 19 nt, Artificial Sequence
  Description of Artificial Sequence: Synthetic oligonucleotide
ccgauggggcaucacugag

SEQ ID NO: 177735 - RNA, 19 nt, Artificial Sequence
  Description of Artificial Sequence: Synthetic oligonucleotide
cgugggcugauaguacucg

SEQ ID NO: 177736 - RNA, 19 nt, Artificial Sequence
  Description of Artificial Sequence: Synthetic oligonucleotide
cuugcgccggcgggcacag

SEQ ID NO: 177737 - RNA, 19 nt, Artificial Sequence
  Description of Artificial Sequence: Synthetic oligonucleotide
ccgacuuguaggagaguuc

SEQ ID NO: 177738 - RNA, 19 nt, Artificial Sequence
  Description of Artificial Sequence: Synthetic oligonucleotide
gcaaggugagucagcuuac

SEQ ID NO: 177739 - RNA, 19 nt, Artificial Sequence
  Description of Artificial Sequence: Synthetic oligonucleotide
guacuugcgccggcgggca

SEQ ID NO: 177740 - RNA, 19 nt, Artificial Sequence
  Description of Artificial Sequence: Synthetic oligonucleotide
uacuugcgccggcgggcac

SEQ ID NO: 177741 - RNA, 19 nt, Artificial Sequence
  Description of Artificial Sequence: Synthetic oligonucleotide
cccggcuccugccaaugag

SEQ ID NO: 177742 - RNA, 19 nt, Artificial Sequence
  Description of Artificial Sequence: Synthetic oligonucleotide
cgcccacgggaccugaagg

SEQ ID NO: 177743 - RNA, 19 nt, Artificial Sequence
  Description of Artificial Sequence: Synthetic oligonucleotide
cuucggcugaccacucccu

SEQ ID NO: 177744 - RNA, 19 nt, Artificial Sequence
  Description of Artificial Sequence: Synthetic oligonucleotide
cuccuuccguuguaauucu

SEQ ID NO: 177745 - RNA, 19 nt, Artificial Sequence
  Description of Artificial Sequence: Synthetic oligonucleotide
gagaccugucagagucauc

SEQ ID NO: 177746 - RNA, 19 nt, Artificial Sequence
  Description of Artificial Sequence: Synthetic oligonucleotide
gacaaggacguuaguccuu

SEQ ID NO: 177747 - RNA, 19 nt, Artificial Sequence
  Description of Artificial Sequence: Synthetic oligonucleotide
gcauucggcacaccugacu

SEQ ID NO: 177748 - RNA, 19 nt, Artificial Sequence
  Description of Artificial Sequence: Synthetic oligonucleotide
ggagcucaacugggaacug

SEQ ID NO: 177749 - RNA, 19 nt, Artificial Sequence
  Description of Artificial Sequence: Synthetic oligonucleotide
cugggaugaacuggcugua

SEQ ID NO: 177750 - RNA, 19 nt, Artificial Sequence
  Description of Artificial Sequence: Synthetic oligonucleotide
gcucuaaguugaauauucu

SEQ ID NO: 177751 - RNA, 19 nt, Artificial Sequence
  Description of Artificial Sequence: Synthetic oligonucleotide
ccgugggcugauaguacuc

SEQ ID NO: 177752 - RNA, 19 nt, Artificial Sequence
  Description of Artificial Sequence: Synthetic oligonucleotide
cuguggugucaaacucaaa

SEQ ID NO: 177753 - RNA, 19 nt, Artificial Sequence
  Description of Artificial Sequence: Synthetic oligonucleotide
gccuucggcugaccacucc

SEQ ID NO: 177754 - RNA, 19 nt, Artificial Sequence
  Description of Artificial Sequence: Synthetic oligonucleotide
ccgucagaacggucuggac

SEQ ID NO: 177755 - RNA, 19 nt, Artificial Sequence
  Description of Artificial Sequence: Synthetic oligonucleotide
gggccgauggggcaucacu

SEQ ID NO: 177756 - RNA, 19 nt, Artificial Sequence
  Description of Artificial Sequence: Synthetic oligonucleotide
ggagccuuucuggugucua

SEQ ID NO: 177757 - RNA, 19 nt, Artificial Sequence
  Description of Artificial Sequence: Synthetic oligonucleotide
gcgcuuugugaggucccag

SEQ ID NO: 177758 - RNA, 19 nt, Artificial Sequence
  Description of Artificial Sequence: Synthetic oligonucleotide
gggcgcuuugugagguccc

SEQ ID NO: 177759 - RNA, 19 nt, Artificial Sequence
  Description of Artificial Sequence: Synthetic oligonucleotide
ggcgcuuugugagguccca

SEQ ID NO: 177760 - RNA, 19 nt, Artificial Sequence
  Description of Artificial Sequence: Synthetic oligonucleotide
ggagacuccaagagauaau

SEQ ID NO: 177761 - RNA, 19 nt, Artificial Sequence
  Description of Artificial Sequence: Synthetic oligonucleotide
ccgauuccaaauagaugcu

SEQ ID NO: 177762 - RNA, 19 nt, Artificial Sequence
  Description of Artificial Sequence: Synthetic oligonucleotide
cgggcgcuuugugaggucc

SEQ ID NO: 177763 - RNA, 19 nt, Artificial Sequence
  Description of Artificial Sequence: Synthetic oligonucleotide
ccucagccgauuccaaaua

SEQ ID NO: 177764 - RNA, 19 nt, Artificial Sequence
  Description of Artificial Sequence: Synthetic oligonucleotide
ccguuguaauucugcccca

SEQ ID NO: 177765 - RNA, 19 nt, Artificial Sequence
  Description of Artificial Sequence: Synthetic oligonucleotide
cucgcacaaccgugugggu

SEQ ID NO: 177766 - RNA, 19 nt, Artificial Sequence
  Description of Artificial Sequence: Synthetic oligonucleotide
caucucgcagcagggccgu

SEQ ID NO: 177767 - RNA, 19 nt, Artificial Sequence
  Description of Artificial Sequence: Synthetic oligonucleotide
cucgcccucuucggcaucu

SEQ ID NO: 177768 - RNA, 19 nt, Artificial Sequence
  Description of Artificial Sequence: Synthetic oligonucleotide
ggcccaauucggccauacu

SEQ ID NO: 177769 - RNA, 19 nt, Artificial Sequence
  Description of Artificial Sequence: Synthetic oligonucleotide
ggguuccgucagaacgguc

SEQ ID NO: 177770 - RNA, 19 nt, Artificial Sequence
  Description of Artificial Sequence: Synthetic oligonucleotide
gagguucacgugagcucuu

SEQ ID NO: 177771 - RNA, 19 nt, Artificial Sequence
  Description of Artificial Sequence: Synthetic oligonucleotide
guccgcugcuuggcacaga

SEQ ID NO: 177772 - RNA, 19 nt, Artificial Sequence
  Description of Artificial Sequence: Synthetic oligonucleotide
cggcccaauucggccauac

SEQ ID NO: 177773 - RNA, 19 nt, Artificial Sequence
  Description of Artificial Sequence: Synthetic oligonucleotide
cggcagaccgggcgcuuug

SEQ ID NO: 177774 - RNA, 19 nt, Artificial Sequence
  Description of Artificial Sequence: Synthetic oligonucleotide
ggggccgauggggcaucac

SEQ ID NO: 177775 - RNA, 19 nt, Artificial Sequence
  Description of Artificial Sequence: Synthetic oligonucleotide
ccgggcgcuuugugagguc

SEQ ID NO: 177776 - RNA, 19 nt, Artificial Sequence
  Description of Artificial Sequence: Synthetic oligonucleotide
cuggaacguggaggucucu

SEQ ID NO: 177777 - RNA, 19 nt, Artificial Sequence
  Description of Artificial Sequence: Synthetic oligonucleotide
gccugccggcagaccgggc

SEQ ID NO: 177778 - RNA, 19 nt, Artificial Sequence
  Description of Artificial Sequence: Synthetic oligonucleotide
ggccgacuuguaggagagu

SEQ ID NO: 177779 - RNA, 19 nt, Artificial Sequence
  Description of Artificial Sequence: Synthetic oligonucleotide
accaaaacgauguaaauac

SEQ ID NO: 177780 - RNA, 19 nt, Artificial Sequence
  Description of Artificial Sequence: Synthetic oligonucleotide
aaccuaaucucucuuaagg

SEQ ID NO: 177781 - RNA, 19 nt, Artificial Sequence
  Description of Artificial Sequence: Synthetic oligonucleotide
aauuacucaacacaauaga

SEQ ID NO: 177782 - RNA, 19 nt, Artificial Sequence
  Description of Artificial Sequence: Synthetic oligonucleotide
uuuugaaccucaauuacug

SEQ ID NO: 177783 - RNA, 19 nt, Artificial Sequence
  Description of Artificial Sequence: Synthetic oligonucleotide
acuauuugaauuaugguuc

SEQ ID NO: 177784 - RNA, 19 nt, Artificial Sequence
  Description of Artificial Sequence: Synthetic oligonucleotide
augguaaauagguuauugc

SEQ ID NO: 177785 - RNA, 19 nt, Artificial Sequence
  Description of Artificial Sequence: Synthetic oligonucleotide
auacagucaauugagggcc

SEQ ID NO: 177786 - RNA, 19 nt, Artificial Sequence
  Description of Artificial Sequence: Synthetic oligonucleotide
aaauagguuauugcucucc

SEQ ID NO: 177787 - RNA, 19 nt, Artificial Sequence
  Description of Artificial Sequence: Synthetic oligonucleotide
uguacuaauuuuauucuga

SEQ ID NO: 177788 - RNA, 19 nt, Artificial Sequence
  Description of Artificial Sequence: Synthetic oligonucleotide
gugguaaagaaguuagugg

SEQ ID NO: 177789 - RNA, 19 nt, Artificial Sequence
  Description of Artificial Sequence: Synthetic oligonucleotide
uaggcuuaagugauuaaag

SEQ ID NO: 177790 - RNA, 19 nt, Artificial Sequence
  Description of Artificial Sequence: Synthetic oligonucleotide
uuaugguucaauuacucaa

SEQ ID NO: 177791 - RNA, 19 nt, Artificial Sequence
  Description of Artificial Sequence: Synthetic oligonucleotide
uguacaugauccucuaacc

SEQ ID NO: 177792 - RNA, 19 nt, Artificial Sequence
  Description of Artificial Sequence: Synthetic oligonucleotide
acucauuuaaggaccaugc

SEQ ID NO: 177793 - RNA, 19 nt, Artificial Sequence
  Description of Artificial Sequence: Synthetic oligonucleotide
ucucuuaaggggcugauuc

SEQ ID NO: 177794 - RNA, 19 nt, Artificial Sequence
  Description of Artificial Sequence: Synthetic oligonucleotide
uuuaccaguaacacaggca

SEQ ID NO: 177795 - RNA, 19 nt, Artificial Sequence
  Description of Artificial Sequence: Synthetic oligonucleotide
ugcagugccaauaagcuau

SEQ ID NO: 177796 - RNA, 19 nt, Artificial Sequence
  Description of Artificial Sequence: Synthetic oligonucleotide
aggcuuaagugauuaaagg

SEQ ID NO: 177797 - RNA, 19 nt, Artificial Sequence
  Description of Artificial Sequence: Synthetic oligonucleotide
caaugcagugccaauaagc

SEQ ID NO: 177798 - RNA, 19 nt, Artificial Sequence
  Description of Artificial Sequence: Synthetic oligonucleotide
aaugccacacaccuauucu

SEQ ID NO: 177799 - RNA, 19 nt, Artificial Sequence
  Description of Artificial Sequence: Synthetic oligonucleotide
aggucaaucggccauagcu

SEQ ID NO: 177800 - RNA, 19 nt, Artificial Sequence
  Description of Artificial Sequence: Synthetic oligonucleotide
aaaacuagcuucuuccauu

SEQ ID NO: 177801 - RNA, 19 nt, Artificial Sequence
  Description of Artificial Sequence: Synthetic oligonucleotide
gaucuuaucagccucugga

SEQ ID NO: 177802 - RNA, 19 nt, Artificial Sequence
  Description of Artificial Sequence: Synthetic oligonucleotide
uaugguucaauuacucaac

SEQ ID NO: 177803 - RNA, 19 nt, Artificial Sequence
  Description of Artificial Sequence: Synthetic oligonucleotide
uguaagaagcuucauugau

SEQ ID NO: 177804 - RNA, 19 nt, Artificial Sequence
  Description of Artificial Sequence: Synthetic oligonucleotide
gauaucauaguguccuaug

SEQ ID NO: 177805 - RNA, 19 nt, Artificial Sequence
  Description of Artificial Sequence: Synthetic oligonucleotide
uuagugaagcgguaugcag

SEQ ID NO: 177806 - RNA, 19 nt, Artificial Sequence
  Description of Artificial Sequence: Synthetic oligonucleotide
uuuaaguagagauccggaa

SEQ ID NO: 177807 - RNA, 19 nt, Artificial Sequence
  Description of Artificial Sequence: Synthetic oligonucleotide
auuagagucccuuucguau

SEQ ID NO: 177808 - RNA, 19 nt, Artificial Sequence
  Description of Artificial Sequence: Synthetic oligonucleotide
cuaaccggcuuucugauac

SEQ ID NO: 177809 - RNA, 19 nt, Artificial Sequence
  Description of Artificial Sequence: Synthetic oligonucleotide
uuagcuaaugagucacaag

SEQ ID NO: 177810 - RNA, 19 nt, Artificial Sequence
  Description of Artificial Sequence: Synthetic oligonucleotide
ucggcaaugaucuuggcuu

SEQ ID NO: 177811 - RNA, 19 nt, Artificial Sequence
  Description of Artificial Sequence: Synthetic oligonucleotide
cauuuaaguagagauccgg

SEQ ID NO: 177812 - RNA, 19 nt, Artificial Sequence
  Description of Artificial Sequence: Synthetic oligonucleotide
gagaacaguguccauuagc

SEQ ID NO: 177813 - RNA, 19 nt, Artificial Sequence
  Description of Artificial Sequence: Synthetic oligonucleotide
gauccucuaaccuaaucuc

SEQ ID NO: 177814 - RNA, 19 nt, Artificial Sequence
  Description of Artificial Sequence: Synthetic oligonucleotide
agugauuaaaggcaauuuu

SEQ ID NO: 177815 - RNA, 19 nt, Artificial Sequence
  Description of Artificial Sequence: Synthetic oligonucleotide
gagcaagugguaauuagag

SEQ ID NO: 177816 - RNA, 19 nt, Artificial Sequence
  Description of Artificial Sequence: Synthetic oligonucleotide
gaugcuggcgccacggucg

SEQ ID NO: 177817 - RNA, 19 nt, Artificial Sequence
  Description of Artificial Sequence: Synthetic oligonucleotide
ccuaaaaugcucauguaag

SEQ ID NO: 177818 - RNA, 19 nt, Artificial Sequence
  Description of Artificial Sequence: Synthetic oligonucleotide
gaacacuccuguucaaaag

SEQ ID NO: 177819 - RNA, 19 nt, Artificial Sequence
  Description of Artificial Sequence: Synthetic oligonucleotide
acaccuauucuuuuaugug

SEQ ID NO: 177820 - RNA, 19 nt, Artificial Sequence
  Description of Artificial Sequence: Synthetic oligonucleotide
acgugauuccuacuuuuac

SEQ ID NO: 177821 - RNA, 19 nt, Artificial Sequence
  Description of Artificial Sequence: Synthetic oligonucleotide
gcauacagucaauugaggg

SEQ ID NO: 177822 - RNA, 19 nt, Artificial Sequence
  Description of Artificial Sequence: Synthetic oligonucleotide
uaauuagagucccuuucgu

SEQ ID NO: 177823 - RNA, 19 nt, Artificial Sequence
  Description of Artificial Sequence: Synthetic oligonucleotide
ugauacacgugauuccuac

SEQ ID NO: 177824 - RNA, 19 nt, Artificial Sequence
  Description of Artificial Sequence: Synthetic oligonucleotide
ugaaccucaauuacuguuu

SEQ ID NO: 177825 - RNA, 19 nt, Artificial Sequence
  Description of Artificial Sequence: Synthetic oligonucleotide
agaacaguguccauuagcu

SEQ ID NO: 177826 - RNA, 19 nt, Artificial Sequence
  Description of Artificial Sequence: Synthetic oligonucleotide
ggugucauuccuaaaaugc

SEQ ID NO: 177827 - RNA, 19 nt, Artificial Sequence
  Description of Artificial Sequence: Synthetic oligonucleotide
aauuagagucccuuucgua

SEQ ID NO: 177828 - RNA, 19 nt, Artificial Sequence
  Description of Artificial Sequence: Synthetic oligonucleotide
ucuuaaggggcugauucag

SEQ ID NO: 177829 - RNA, 19 nt, Artificial Sequence
  Description of Artificial Sequence: Synthetic oligonucleotide
ugugcgcauaauuugccug

SEQ ID NO: 177830 - RNA, 19 nt, Artificial Sequence
  Description of Artificial Sequence: Synthetic oligonucleotide
uguuagugaagcgguaugc

SEQ ID NO: 177831 - RNA, 19 nt, Artificial Sequence
  Description of Artificial Sequence: Synthetic oligonucleotide
uuaggcuuaagugauuaaa

SEQ ID NO: 177832 - RNA, 19 nt, Artificial Sequence
  Description of Artificial Sequence: Synthetic oligonucleotide
ugacauaggcagcuguucu

SEQ ID NO: 177833 - RNA, 19 nt, Artificial Sequence
  Description of Artificial Sequence: Synthetic oligonucleotide
uacaugauccucuaaccua

SEQ ID NO: 177834 - RNA, 19 nt, Artificial Sequence
  Description of Artificial Sequence: Synthetic oligonucleotide
ugggguugaucuuaacacc

SEQ ID NO: 177835 - RNA, 19 nt, Artificial Sequence
  Description of Artificial Sequence: Synthetic oligonucleotide
uaccuaaccggcuuucuga

SEQ ID NO: 177836 - RNA, 19 nt, Artificial Sequence
  Description of Artificial Sequence: Synthetic oligonucleotide
caugguaaauagguuauug

SEQ ID NO: 177837 - RNA, 19 nt, Artificial Sequence
  Description of Artificial Sequence: Synthetic oligonucleotide
gucuaugugaaggucacgc

SEQ ID NO: 177838 - RNA, 19 nt, Artificial Sequence
  Description of Artificial Sequence: Synthetic oligonucleotide
aaggucaaucggccauagc

SEQ ID NO: 177839 - RNA, 19 nt, Artificial Sequence
  Description of Artificial Sequence: Synthetic oligonucleotide
cauguaaacuugugacagg

SEQ ID NO: 177840 - RNA, 19 nt, Artificial Sequence
  Description of Artificial Sequence: Synthetic oligonucleotide
aaugagucacaagaacaga

SEQ ID NO: 177841 - RNA, 19 nt, Artificial Sequence
  Description of Artificial Sequence: Synthetic oligonucleotide
cauugauaucauagugucc

SEQ ID NO: 177842 - RNA, 19 nt, Artificial Sequence
  Description of Artificial Sequence: Synthetic oligonucleotide
acacuccuguucaaaagcc

SEQ ID NO: 177843 - RNA, 19 nt, Artificial Sequence
  Description of Artificial Sequence: Synthetic oligonucleotide
uaacggauaccucccuugc

SEQ ID NO: 177844 - RNA, 19 nt, Artificial Sequence
  Description of Artificial Sequence: Synthetic oligonucleotide
agaaggggcauacagucaa

SEQ ID NO: 177845 - RNA, 19 nt, Artificial Sequence
  Description of Artificial Sequence: Synthetic oligonucleotide
aagguuaggcuuaagugau

SEQ ID NO: 177846 - RNA, 19 nt, Artificial Sequence
  Description of Artificial Sequence: Synthetic oligonucleotide
guaacggauaccucccuug

SEQ ID NO: 177847 - RNA, 19 nt, Artificial Sequence
  Description of Artificial Sequence: Synthetic oligonucleotide
gucaacuccaggcagucac

SEQ ID NO: 177848 - RNA, 19 nt, Artificial Sequence
  Description of Artificial Sequence: Synthetic oligonucleotide
guaaagaaguuagugguga

SEQ ID NO: 177849 - RNA, 19 nt, Artificial Sequence
  Description of Artificial Sequence: Synthetic oligonucleotide
caacacaauagaucuucag

SEQ ID NO: 177850 - RNA, 19 nt, Artificial Sequence
  Description of Artificial Sequence: Synthetic oligonucleotide
cguauuugaaggucaaucg

SEQ ID NO: 177851 - RNA, 19 nt, Artificial Sequence
  Description of Artificial Sequence: Synthetic oligonucleotide
uccuguucaaaagcccugg

SEQ ID NO: 177852 - RNA, 19 nt, Artificial Sequence
  Description of Artificial Sequence: Synthetic oligonucleotide
uccucuaaccuaaucucuc

SEQ ID NO: 177853 - RNA, 19 nt, Artificial Sequence
  Description of Artificial Sequence: Synthetic oligonucleotide
ugauccgcagaaugccgcg

SEQ ID NO: 177854 - RNA, 19 nt, Artificial Sequence
  Description of Artificial Sequence: Synthetic oligonucleotide
cagaaugccgcgcacccgg

SEQ ID NO: 177855 - RNA, 19 nt, Artificial Sequence
  Description of Artificial Sequence: Synthetic oligonucleotide
uuugaaccucaauuacugu

SEQ ID NO: 177856 - RNA, 19 nt, Artificial Sequence
  Description of Artificial Sequence: Synthetic oligonucleotide
aagugauuaaaggcaauuu

SEQ ID NO: 177857 - RNA, 19 nt, Artificial Sequence
  Description of Artificial Sequence: Synthetic oligonucleotide
agaggcacccgauauccug

SEQ ID NO: 177858 - RNA, 19 nt, Artificial Sequence
  Description of Artificial Sequence: Synthetic oligonucleotide
ucuuggaacucugcuguag

SEQ ID NO: 177859 - RNA, 19 nt, Artificial Sequence
  Description of Artificial Sequence: Synthetic oligonucleotide
caguaacacaggcaugugc

SEQ ID NO: 177860 - RNA, 19 nt, Artificial Sequence
  Description of Artificial Sequence: Synthetic oligonucleotide
gacaucucccgcucacccg

SEQ ID NO: 177861 - RNA, 19 nt, Artificial Sequence
  Description of Artificial Sequence: Synthetic oligonucleotide
augguucaauuacucaaca

SEQ ID NO: 177862 - RNA, 19 nt, Artificial Sequence
  Description of Artificial Sequence: Synthetic oligonucleotide
agugcaggcccacguuacc

SEQ ID NO: 177863 - RNA, 19 nt, Artificial Sequence
  Description of Artificial Sequence: Synthetic oligonucleotide
auuuaaguagagauccgga

SEQ ID NO: 177864 - RNA, 19 nt, Artificial Sequence
  Description of Artificial Sequence: Synthetic oligonucleotide
augauccgcagaaugccgc

SEQ ID NO: 177865 - RNA, 19 nt, Artificial Sequence
  Description of Artificial Sequence: Synthetic oligonucleotide
agcaagugguaauuagagu

SEQ ID NO: 177866 - RNA, 19 nt, Artificial Sequence
  Description of Artificial Sequence: Synthetic oligonucleotide
gcuaaugagucacaagaac

SEQ ID NO: 177867 - RNA, 19 nt, Artificial Sequence
  Description of Artificial Sequence: Synthetic oligonucleotide
uggcugugcgcauaauuug

SEQ ID NO: 177868 - RNA, 19 nt, Artificial Sequence
  Description of Artificial Sequence: Synthetic oligonucleotide
cuaugugaaggucacgcca

SEQ ID NO: 177869 - RNA, 19 nt, Artificial Sequence
  Description of Artificial Sequence: Synthetic oligonucleotide
aggggcauacagucaauug

SEQ ID NO: 177870 - RNA, 19 nt, Artificial Sequence
  Description of Artificial Sequence: Synthetic oligonucleotide
cagcauuuaaguagagauc

SEQ ID NO: 177871 - RNA, 19 nt, Artificial Sequence
  Description of Artificial Sequence: Synthetic oligonucleotide
gacugacuugcugagaaca

SEQ ID NO: 177872 - RNA, 19 nt, Artificial Sequence
  Description of Artificial Sequence: Synthetic oligonucleotide
gauauccugucuuggaacu

SEQ ID NO: 177873 - RNA, 19 nt, Artificial Sequence
  Description of Artificial Sequence: Synthetic oligonucleotide
aaguuaguggugaccuguc

SEQ ID NO: 177874 - RNA, 19 nt, Artificial Sequence
  Description of Artificial Sequence: Synthetic oligonucleotide
cacuauuugaauuaugguu

SEQ ID NO: 177875 - RNA, 19 nt, Artificial Sequence
  Description of Artificial Sequence: Synthetic oligonucleotide
aacggauaccucccuugca

SEQ ID NO: 177876 - RNA, 19 nt, Artificial Sequence
  Description of Artificial Sequence: Synthetic oligonucleotide
cauguacuaauuuuauucu

SEQ ID NO: 177877 - RNA, 19 nt, Artificial Sequence
  Description of Artificial Sequence: Synthetic oligonucleotide
cacguuaccaaaucccuga

SEQ ID NO: 177878 - RNA, 19 nt, Artificial Sequence
  Description of Artificial Sequence: Synthetic oligonucleotide
gugauuaaaggcaauuuua

SEQ ID NO: 177879 - RNA, 19 nt, Artificial Sequence
  Description of Artificial Sequence: Synthetic oligonucleotide
acugugcuacaaauucccc

SEQ ID NO: 177880 - RNA, 19 nt, Artificial Sequence
  Description of Artificial Sequence: Synthetic oligonucleotide
auuagcuaaugagucacaa

SEQ ID NO: 177881 - RNA, 19 nt, Artificial Sequence
  Description of Artificial Sequence: Synthetic oligonucleotide
auagguuauugcucucccu

SEQ ID NO: 177882 - RNA, 19 nt, Artificial Sequence
  Description of Artificial Sequence: Synthetic oligonucleotide
gagauccggaauaaccaug

SEQ ID NO: 177883 - RNA, 19 nt, Artificial Sequence
  Description of Artificial Sequence: Synthetic oligonucleotide
gucaaucggccauagcuga

SEQ ID NO: 177884 - RNA, 19 nt, Artificial Sequence
  Description of Artificial Sequence: Synthetic oligonucleotide
ucaccaaguuaaucaugca

SEQ ID NO: 177885 - RNA, 19 nt, Artificial Sequence
  Description of Artificial Sequence: Synthetic oligonucleotide
uguaacggauaccucccuu

SEQ ID NO: 177886 - RNA, 19 nt, Artificial Sequence
  Description of Artificial Sequence: Synthetic oligonucleotide
aauaccgucuggauuccau

SEQ ID NO: 177887 - RNA, 19 nt, Artificial Sequence
  Description of Artificial Sequence: Synthetic oligonucleotide
uguugggaagggccuagaa

SEQ ID NO: 177888 - RNA, 19 nt, Artificial Sequence
  Description of Artificial Sequence: Synthetic oligonucleotide
guaccuaaccggcuuucug

SEQ ID NO: 177889 - RNA, 19 nt, Artificial Sequence
  Description of Artificial Sequence: Synthetic oligonucleotide
ccuucggcaaugaucuugg

SEQ ID NO: 177890 - RNA, 19 nt, Artificial Sequence
  Description of Artificial Sequence: Synthetic oligonucleotide
gguaaagaaguuaguggug

SEQ ID NO: 177891 - RNA, 19 nt, Artificial Sequence
  Description of Artificial Sequence: Synthetic oligonucleotide
ugucuaugugaaggucacg

SEQ ID NO: 177892 - RNA, 19 nt, Artificial Sequence
  Description of Artificial Sequence: Synthetic oligonucleotide
uagugaaccuccgugugau

SEQ ID NO: 177893 - RNA, 19 nt, Artificial Sequence
  Description of Artificial Sequence: Synthetic oligonucleotide
gaaguuaguggugaccugu

SEQ ID NO: 177894 - RNA, 19 nt, Artificial Sequence
  Description of Artificial Sequence: Synthetic oligonucleotide
cacaccuauucuuuuaugu

SEQ ID NO: 177895 - RNA, 19 nt, Artificial Sequence
  Description of Artificial Sequence: Synthetic oligonucleotide
accgucuggauuccauaug

SEQ ID NO: 177896 - RNA, 19 nt, Artificial Sequence
  Description of Artificial Sequence: Synthetic oligonucleotide
guacaugauccucuaaccu

SEQ ID NO: 177897 - RNA, 19 nt, Artificial Sequence
  Description of Artificial Sequence: Synthetic oligonucleotide
uguugagcccgguagccuu

SEQ ID NO: 177898 - RNA, 19 nt, Artificial Sequence
  Description of Artificial Sequence: Synthetic oligonucleotide
guuagugaagcgguaugca

SEQ ID NO: 177899 - RNA, 19 nt, Artificial Sequence
  Description of Artificial Sequence: Synthetic oligonucleotide
auauccugucuuggaacuc

SEQ ID NO: 177900 - RNA, 19 nt, Artificial Sequence
  Description of Artificial Sequence: Synthetic oligonucleotide
uucucagaggcacccgaua

SEQ ID NO: 177901 - RNA, 19 nt, Artificial Sequence
  Description of Artificial Sequence: Synthetic oligonucleotide
aagcgguaugcagaaugca

SEQ ID NO: 177902 - RNA, 19 nt, Artificial Sequence
  Description of Artificial Sequence: Synthetic oligonucleotide
ucaauaccgucuggauucc

SEQ ID NO: 177903 - RNA, 19 nt, Artificial Sequence
  Description of Artificial Sequence: Synthetic oligonucleotide
uaaggaccaugccaccuuu

SEQ ID NO: 177904 - RNA, 19 nt, Artificial Sequence
  Description of Artificial Sequence: Synthetic oligonucleotide
gguaugcagaaugcaaagc

SEQ ID NO: 177905 - RNA, 19 nt, Artificial Sequence
  Description of Artificial Sequence: Synthetic oligonucleotide
aguuauaggugaagugggu

SEQ ID NO: 177906 - RNA, 19 nt, Artificial Sequence
  Description of Artificial Sequence: Synthetic oligonucleotide
caccuauucuuuuaugugu

SEQ ID NO: 177907 - RNA, 19 nt, Artificial Sequence
  Description of Artificial Sequence: Synthetic oligonucleotide
guaugucauuaaagaagcc

SEQ ID NO: 177908 - RNA, 19 nt, Artificial Sequence
  Description of Artificial Sequence: Synthetic oligonucleotide
acgauguaaauaccucaua

SEQ ID NO: 177909 - RNA, 19 nt, Artificial Sequence
  Description of Artificial Sequence: Synthetic oligonucleotide
gccaguagcagagaugcgc

SEQ ID NO: 177910 - RNA, 19 nt, Artificial Sequence
  Description of Artificial Sequence: Synthetic oligonucleotide
aauuugccuggcagaucuc

SEQ ID NO: 177911 - RNA, 19 nt, Artificial Sequence
  Description of Artificial Sequence: Synthetic oligonucleotide
ccgucuggauuccauaugc

SEQ ID NO: 177912 - RNA, 19 nt, Artificial Sequence
  Description of Artificial Sequence: Synthetic oligonucleotide
cucuuaaggggcugauuca

SEQ ID NO: 177913 - RNA, 19 nt, Artificial Sequence
  Description of Artificial Sequence: Synthetic oligonucleotide
accuaaccggcuuucugau

SEQ ID NO: 177914 - RNA, 19 nt, Artificial Sequence
  Description of Artificial Sequence: Synthetic oligonucleotide
gcauaggugucagcgaucc

SEQ ID NO: 177915 - RNA, 19 nt, Artificial Sequence
  Description of Artificial Sequence: Synthetic oligonucleotide
cacccgauauccugucuug

SEQ ID NO: 177916 - RNA, 19 nt, Artificial Sequence
  Description of Artificial Sequence: Synthetic oligonucleotide
cauaagagaaauagcuuuu

SEQ ID NO: 177917 - RNA, 19 nt, Artificial Sequence
  Description of Artificial Sequence: Synthetic oligonucleotide
ggcauacagucaauugagg

SEQ ID NO: 177918 - RNA, 19 nt, Artificial Sequence
  Description of Artificial Sequence: Synthetic oligonucleotide
acccgauauccugucuugg

SEQ ID NO: 177919 - RNA, 19 nt, Artificial Sequence
  Description of Artificial Sequence: Synthetic oligonucleotide
ugucagcgauccaggacau

SEQ ID NO: 177920 - RNA, 19 nt, Artificial Sequence
  Description of Artificial Sequence: Synthetic oligonucleotide
auaccgucuggauuccaua

SEQ ID NO: 177921 - RNA, 19 nt, Artificial Sequence
  Description of Artificial Sequence: Synthetic oligonucleotide
caccaaaacgauguaaaua

SEQ ID NO: 177922 - RNA, 19 nt, Artificial Sequence
  Description of Artificial Sequence: Synthetic oligonucleotide
uagagugcaggcccacguu

SEQ ID NO: 177923 - RNA, 19 nt, Artificial Sequence
  Description of Artificial Sequence: Synthetic oligonucleotide
cauuagcuaaugagucaca

SEQ ID NO: 177924 - RNA, 19 nt, Artificial Sequence
  Description of Artificial Sequence: Synthetic oligonucleotide
ggugucagcgauccaggac

SEQ ID NO: 177925 - RNA, 19 nt, Artificial Sequence
  Description of Artificial Sequence: Synthetic oligonucleotide
gcauuuaaguagagauccg

SEQ ID NO: 177926 - RNA, 19 nt, Artificial Sequence
  Description of Artificial Sequence: Synthetic oligonucleotide
ugaaccuccgugugaucuu

SEQ ID NO: 177927 - RNA, 19 nt, Artificial Sequence
  Description of Artificial Sequence: Synthetic oligonucleotide
uuccgcuuuugcuccucgc

SEQ ID NO: 177928 - RNA, 19 nt, Artificial Sequence
  Description of Artificial Sequence: Synthetic oligonucleotide
gcuguaacggauaccuccc

SEQ ID NO: 177929 - RNA, 19 nt, Artificial Sequence
  Description of Artificial Sequence: Synthetic oligonucleotide
uaaccggcuuucugauaca

SEQ ID NO: 177930 - RNA, 19 nt, Artificial Sequence
  Description of Artificial Sequence: Synthetic oligonucleotide
ggcacaucaaccacugcac

SEQ ID NO: 177931 - RNA, 19 nt, Artificial Sequence
  Description of Artificial Sequence: Synthetic oligonucleotide
cauaggaaguuaugaaaau

SEQ ID NO: 177932 - RNA, 19 nt, Artificial Sequence
  Description of Artificial Sequence: Synthetic oligonucleotide
agaugcgcccguggauacc

SEQ ID NO: 177933 - RNA, 19 nt, Artificial Sequence
  Description of Artificial Sequence: Synthetic oligonucleotide
gauacacgugauuccuacu

SEQ ID NO: 177934 - RNA, 19 nt, Artificial Sequence
  Description of Artificial Sequence: Synthetic oligonucleotide
aguaccuaaccggcuuucu

SEQ ID NO: 177935 - RNA, 19 nt, Artificial Sequence
  Description of Artificial Sequence: Synthetic oligonucleotide
ggcugugcgcauaauuugc

SEQ ID NO: 177936 - RNA, 19 nt, Artificial Sequence
  Description of Artificial Sequence: Synthetic oligonucleotide
ggucaacugcuucucgcug

SEQ ID NO: 177937 - RNA, 19 nt, Artificial Sequence
  Description of Artificial Sequence: Synthetic oligonucleotide
gauccgcagaaugccgcgc

SEQ ID NO: 177938 - RNA, 19 nt, Artificial Sequence
  Description of Artificial Sequence: Synthetic oligonucleotide
accggcuuucugauacacg

SEQ ID NO: 177939 - RNA, 19 nt, Artificial Sequence
  Description of Artificial Sequence: Synthetic oligonucleotide
agacacucauucucauaua

SEQ ID NO: 177940 - RNA, 19 nt, Artificial Sequence
  Description of Artificial Sequence: Synthetic oligonucleotide
acguuaccaaaucccugaa

SEQ ID NO: 177941 - RNA, 19 nt, Artificial Sequence
  Description of Artificial Sequence: Synthetic oligonucleotide
cacccgugcucaugucugg

SEQ ID NO: 177942 - RNA, 19 nt, Artificial Sequence
  Description of Artificial Sequence: Synthetic oligonucleotide
uguacaccuugaagacuuu

SEQ ID NO: 177943 - RNA, 19 nt, Artificial Sequence
  Description of Artificial Sequence: Synthetic oligonucleotide
cuucagaugggaggaacaa

SEQ ID NO: 177944 - RNA, 19 nt, Artificial Sequence
  Description of Artificial Sequence: Synthetic oligonucleotide
gcccacguuaccaaauccc

SEQ ID NO: 177945 - RNA, 19 nt, Artificial Sequence
  Description of Artificial Sequence: Synthetic oligonucleotide
gucgucgcgccggaugggg

SEQ ID NO: 177946 - RNA, 19 nt, Artificial Sequence
  Description of Artificial Sequence: Synthetic oligonucleotide
gccacggucgaagaagccc

SEQ ID NO: 177947 - RNA, 19 nt, Artificial Sequence
  Description of Artificial Sequence: Synthetic oligonucleotide
ggcccacguuaccaaaucc

SEQ ID NO: 177948 - RNA, 19 nt, Artificial Sequence
  Description of Artificial Sequence: Synthetic oligonucleotide
cacccgguuccgcuuuugc

SEQ ID NO: 177949 - RNA, 19 nt, Artificial Sequence
  Description of Artificial Sequence: Synthetic oligonucleotide
gguuaggcuuaagugauua

SEQ ID NO: 177950 - RNA, 19 nt, Artificial Sequence
  Description of Artificial Sequence: Synthetic oligonucleotide
gcugugcgcauaauuugcc

SEQ ID NO: 177951 - RNA, 19 nt, Artificial Sequence
  Description of Artificial Sequence: Synthetic oligonucleotide
ccuuucguauuugaagguc

SEQ ID NO: 177952 - RNA, 19 nt, Artificial Sequence
  Description of Artificial Sequence: Synthetic oligonucleotide
ccacguuaccaaaucccug

SEQ ID NO: 177953 - RNA, 19 nt, Artificial Sequence
  Description of Artificial Sequence: Synthetic oligonucleotide
ucgucgcgccggaugggga

SEQ ID NO: 177954 - RNA, 19 nt, Artificial Sequence
  Description of Artificial Sequence: Synthetic oligonucleotide
guuguacaccuugaagacu

SEQ ID NO: 177955 - RNA, 19 nt, Artificial Sequence
  Description of Artificial Sequence: Synthetic oligonucleotide
cugauugguuuaccaguaa

SEQ ID NO: 177956 - RNA, 19 nt, Artificial Sequence
  Description of Artificial Sequence: Synthetic oligonucleotide
gaugcgcccguggauaccu

SEQ ID NO: 177957 - RNA, 19 nt, Artificial Sequence
  Description of Artificial Sequence: Synthetic oligonucleotide
cuggugucauuccuaaaau

SEQ ID NO: 177958 - RNA, 19 nt, Artificial Sequence
  Description of Artificial Sequence: Synthetic oligonucleotide
ucgcgccggauggggaagg

SEQ ID NO: 177959 - RNA, 19 nt, Artificial Sequence
  Description of Artificial Sequence: Synthetic oligonucleotide
uagcagagaugcgcccgug

SEQ ID NO: 177960 - RNA, 19 nt, Artificial Sequence
  Description of Artificial Sequence: Synthetic oligonucleotide
cuguauaguucuugggguu

SEQ ID NO: 177961 - RNA, 19 nt, Artificial Sequence
  Description of Artificial Sequence: Synthetic oligonucleotide
agucaacuccaggcaguca

SEQ ID NO: 177962 - RNA, 19 nt, Artificial Sequence
  Description of Artificial Sequence: Synthetic oligonucleotide
auaggugaaguggguggua

SEQ ID NO: 177963 - RNA, 19 nt, Artificial Sequence
  Description of Artificial Sequence: Synthetic oligonucleotide
gggaagcccagaauugauc

SEQ ID NO: 177964 - RNA, 19 nt, Artificial Sequence
  Description of Artificial Sequence: Synthetic oligonucleotide
cacggucgaagaagcccuc

SEQ ID NO: 177965 - RNA, 19 nt, Artificial Sequence
  Description of Artificial Sequence: Synthetic oligonucleotide
gggguugaucuuaacaccu

SEQ ID NO: 177966 - RNA, 19 nt, Artificial Sequence
  Description of Artificial Sequence: Synthetic oligonucleotide
cugugcgcauaauuugccu

SEQ ID NO: 177967 - RNA, 19 nt, Artificial Sequence
  Description of Artificial Sequence: Synthetic oligonucleotide
cgcagaaugccgcgcaccc

SEQ ID NO: 177968 - RNA, 19 nt, Artificial Sequence
  Description of Artificial Sequence: Synthetic oligonucleotide
gcagaaugccgcgcacccg

SEQ ID NO: 177969 - RNA, 19 nt, Artificial Sequence
  Description of Artificial Sequence: Synthetic oligonucleotide
gauccggaauaaccaugau

SEQ ID NO: 177970 - RNA, 19 nt, Artificial Sequence
  Description of Artificial Sequence: Synthetic oligonucleotide
gccgucgucgcgccggaug

SEQ ID NO: 177971 - RNA, 19 nt, Artificial Sequence
  Description of Artificial Sequence: Synthetic oligonucleotide
gucgcgccggauggggaag

SEQ ID NO: 177972 - RNA, 19 nt, Artificial Sequence
  Description of Artificial Sequence: Synthetic oligonucleotide
gcgauccaggacaucuccc

SEQ ID NO: 177973 - RNA, 19 nt, Artificial Sequence
  Description of Artificial Sequence: Synthetic oligonucleotide
cauaggugucagcgaucca

SEQ ID NO: 177974 - RNA, 19 nt, Artificial Sequence
  Description of Artificial Sequence: Synthetic oligonucleotide
cccgauauccugucuugga

SEQ ID NO: 177975 - RNA, 19 nt, Artificial Sequence
  Description of Artificial Sequence: Synthetic oligonucleotide
ccuugcagggcgugcggug

SEQ ID NO: 177976 - RNA, 19 nt, Artificial Sequence
  Description of Artificial Sequence: Synthetic oligonucleotide
gcccguggauaccuccuug

SEQ ID NO: 177977 - RNA, 19 nt, Artificial Sequence
  Description of Artificial Sequence: Synthetic oligonucleotide
ccguggauaccuccuugac

SEQ ID NO: 177978 - RNA, 19 nt, Artificial Sequence
  Description of Artificial Sequence: Synthetic oligonucleotide
guccuauggugcuggcaua

SEQ ID NO: 177979 - RNA, 19 nt, Artificial Sequence
  Description of Artificial Sequence: Synthetic oligonucleotide
cuggcgccacggucgaaga

SEQ ID NO: 177980 - RNA, 19 nt, Artificial Sequence
  Description of Artificial Sequence: Synthetic oligonucleotide
agaaugccgcgcacccggu

SEQ ID NO: 177981 - RNA, 19 nt, Artificial Sequence
  Description of Artificial Sequence: Synthetic oligonucleotide
gcgccacggucgaagaagc

SEQ ID NO: 177982 - RNA, 19 nt, Artificial Sequence
  Description of Artificial Sequence: Synthetic oligonucleotide
gcgcauaauuugccuggca

SEQ ID NO: 177983 - RNA, 19 nt, Artificial Sequence
  Description of Artificial Sequence: Synthetic oligonucleotide
agguuaggcuuaagugauu

SEQ ID NO: 177984 - RNA, 19 nt, Artificial Sequence
  Description of Artificial Sequence: Synthetic oligonucleotide
cccguggauaccuccuuga

SEQ ID NO: 177985 - RNA, 19 nt, Artificial Sequence
  Description of Artificial Sequence: Synthetic oligonucleotide
gaaccuccgugugaucuuu

SEQ ID NO: 177986 - RNA, 19 nt, Artificial Sequence
  Description of Artificial Sequence: Synthetic oligonucleotide
ccucuaaccuaaucucucu

SEQ ID NO: 177987 - RNA, 19 nt, Artificial Sequence
  Description of Artificial Sequence: Synthetic oligonucleotide
caauaccgucuggauucca

SEQ ID NO: 177988 - RNA, 19 nt, Artificial Sequence
  Description of Artificial Sequence: Synthetic oligonucleotide
ccacggucgaagaagcccu

SEQ ID NO: 177989 - RNA, 19 nt, Artificial Sequence
  Description of Artificial Sequence: Synthetic oligonucleotide
cgccggauggggaaggaca

SEQ ID NO: 177990 - RNA, 19 nt, Artificial Sequence
  Description of Artificial Sequence: Synthetic oligonucleotide
cggcuuucugauacacgug

SEQ ID NO: 177991 - RNA, 19 nt, Artificial Sequence
  Description of Artificial Sequence: Synthetic oligonucleotide
gguccaaucccagguuaua

SEQ ID NO: 177992 - RNA, 19 nt, Artificial Sequence
  Description of Artificial Sequence: Synthetic oligonucleotide
ggccuagaacaaggcagca

SEQ ID NO: 177993 - RNA, 19 nt, Artificial Sequence
  Description of Artificial Sequence: Synthetic oligonucleotide
gucagcgauccaggacauc

SEQ ID NO: 177994 - RNA, 19 nt, Artificial Sequence
  Description of Artificial Sequence: Synthetic oligonucleotide
augcgcccguggauaccuc

SEQ ID NO: 177995 - RNA, 19 nt, Artificial Sequence
  Description of Artificial Sequence: Synthetic oligonucleotide
gaaugccgcgcacccgguu

SEQ ID NO: 177996 - RNA, 19 nt, Artificial Sequence
  Description of Artificial Sequence: Synthetic oligonucleotide
cccuuucguauuugaaggu

SEQ ID NO: 177997 - RNA, 19 nt, Artificial Sequence
  Description of Artificial Sequence: Synthetic oligonucleotide
ccacgaugcuggcgccacg

SEQ ID NO: 177998 - RNA, 19 nt, Artificial Sequence
  Description of Artificial Sequence: Synthetic oligonucleotide
cguggauaccuccuugacu

SEQ ID NO: 177999 - RNA, 19 nt, Artificial Sequence
  Description of Artificial Sequence: Synthetic oligonucleotide
cgccacggucgaagaagcc

SEQ ID NO: 178000 - RNA, 19 nt, Artificial Sequence
  Description of Artificial Sequence: Synthetic oligonucleotide
cucucuuaaggggcugauu

SEQ ID NO: 178001 - RNA, 19 nt, Artificial Sequence
  Description of Artificial Sequence: Synthetic oligonucleotide
ggggaagcccagaauugau

SEQ ID NO: 178002 - RNA, 19 nt, Artificial Sequence
  Description of Artificial Sequence: Synthetic oligonucleotide
ccuaaccggcuuucugaua

SEQ ID NO: 178003 - RNA, 19 nt, Artificial Sequence
  Description of Artificial Sequence: Synthetic oligonucleotide
cccagaauugauccauguu

SEQ ID NO: 178004 - RNA, 19 nt, Artificial Sequence
  Description of Artificial Sequence: Synthetic oligonucleotide
gcagugccaauaagcuaua

SEQ ID NO: 178005 - RNA, 19 nt, Artificial Sequence
  Description of Artificial Sequence: Synthetic oligonucleotide
ccgcucacccgugcucaug

SEQ ID NO: 178006 - RNA, 19 nt, Artificial Sequence
  Description of Artificial Sequence: Synthetic oligonucleotide
ccggaauaaccaugauguu

SEQ ID NO: 178007 - RNA, 19 nt, Artificial Sequence
  Description of Artificial Sequence: Synthetic oligonucleotide
cgucgucgcgccggauggg

SEQ ID NO: 178008 - RNA, 19 nt, Artificial Sequence
  Description of Artificial Sequence: Synthetic oligonucleotide
cgucgcgccggauggggaa

SEQ ID NO: 178009 - RNA, 19 nt, Artificial Sequence
  Description of Artificial Sequence: Synthetic oligonucleotide
agccgucgucgcgccggau

SEQ ID NO: 178010 - RNA, 19 nt, Artificial Sequence
  Description of Artificial Sequence: Synthetic oligonucleotide
cuccuucggcaaugaucuu

SEQ ID NO: 178011 - RNA, 19 nt, Artificial Sequence
  Description of Artificial Sequence: Synthetic oligonucleotide
uuuccuguaacucagagcu

SEQ ID NO: 178012 - RNA, 19 nt, Artificial Sequence
  Description of Artificial Sequence: Synthetic oligonucleotide
agugauauugaucaccggc

SEQ ID NO: 178013 - RNA, 19 nt, Artificial Sequence
  Description of Artificial Sequence: Synthetic oligonucleotide
ucuagauucuuucaugggg

SEQ ID NO: 178014 - RNA, 19 nt, Artificial Sequence
  Description of Artificial Sequence: Synthetic oligonucleotide
uaagugauauugaucaccg

SEQ ID NO: 178015 - RNA, 19 nt, Artificial Sequence
  Description of Artificial Sequence: Synthetic oligonucleotide
uuuauugagagaaaagagu

SEQ ID NO: 178016 - RNA, 19 nt, Artificial Sequence
  Description of Artificial Sequence: Synthetic oligonucleotide
ucguaagugauauugauca

SEQ ID NO: 178017 - RNA, 19 nt, Artificial Sequence
  Description of Artificial Sequence: Synthetic oligonucleotide
uuuagaaaagcuccgaaaa

SEQ ID NO: 178018 - RNA, 19 nt, Artificial Sequence
  Description of Artificial Sequence: Synthetic oligonucleotide
cuuccuaucaucaaguauc

SEQ ID NO: 178019 - RNA, 19 nt, Artificial Sequence
  Description of Artificial Sequence: Synthetic oligonucleotide
augacuucuaucugcaugg

SEQ ID NO: 178020 - RNA, 19 nt, Artificial Sequence
  Description of Artificial Sequence: Synthetic oligonucleotide
uacauguaaauuaaguguc

SEQ ID NO: 178021 - RNA, 19 nt, Artificial Sequence
  Description of Artificial Sequence: Synthetic oligonucleotide
auaaaacgacccaauaucc

SEQ ID NO: 178022 - RNA, 19 nt, Artificial Sequence
  Description of Artificial Sequence: Synthetic oligonucleotide
uauuuaguggaguaaacaa

SEQ ID NO: 178023 - RNA, 19 nt, Artificial Sequence
  Description of Artificial Sequence: Synthetic oligonucleotide
uauacagcaauacugcuua

SEQ ID NO: 178024 - RNA, 19 nt, Artificial Sequence
  Description of Artificial Sequence: Synthetic oligonucleotide
auauuuguugaauguuagc

SEQ ID NO: 178025 - RNA, 19 nt, Artificial Sequence
  Description of Artificial Sequence: Synthetic oligonucleotide
caguauauauaauaagcag

SEQ ID NO: 178026 - RNA, 19 nt, Artificial Sequence
  Description of Artificial Sequence: Synthetic oligonucleotide
uuaaguaagcagaggguag

SEQ ID NO: 178027 - RNA, 19 nt, Artificial Sequence
  Description of Artificial Sequence: Synthetic oligonucleotide
aguacaaucuaugcaagac

SEQ ID NO: 178028 - RNA, 19 nt, Artificial Sequence
  Description of Artificial Sequence: Synthetic oligonucleotide
acagucgacaaauucauca

SEQ ID NO: 178029 - RNA, 19 nt, Artificial Sequence
  Description of Artificial Sequence: Synthetic oligonucleotide
ccuauuugcacauucaagg

SEQ ID NO: 178030 - RNA, 19 nt, Artificial Sequence
  Description of Artificial Sequence: Synthetic oligonucleotide
uugagaacguacuauaguc

SEQ ID NO: 178031 - RNA, 19 nt, Artificial Sequence
  Description of Artificial Sequence: Synthetic oligonucleotide
aaagcuccgaaaaugcuuc

SEQ ID NO: 178032 - RNA, 19 nt, Artificial Sequence
  Description of Artificial Sequence: Synthetic oligonucleotide
uaugucagaggagagaucu

SEQ ID NO: 178033 - RNA, 19 nt, Artificial Sequence
  Description of Artificial Sequence: Synthetic oligonucleotide
agagaucuuaaguaagcag

SEQ ID NO: 178034 - RNA, 19 nt, Artificial Sequence
  Description of Artificial Sequence: Synthetic oligonucleotide
acauucaaggucuggcuac

SEQ ID NO: 178035 - RNA, 19 nt, Artificial Sequence
  Description of Artificial Sequence: Synthetic oligonucleotide
aggaguaucagcugagcuc

SEQ ID NO: 178036 - RNA, 19 nt, Artificial Sequence
  Description of Artificial Sequence: Synthetic oligonucleotide
uccuauuugcacauucaag

SEQ ID NO: 178037 - RNA, 19 nt, Artificial Sequence
  Description of Artificial Sequence: Synthetic oligonucleotide
ucuugagaacguacuauag

SEQ ID NO: 178038 - RNA, 19 nt, Artificial Sequence
  Description of Artificial Sequence: Synthetic oligonucleotide
acagucacgggguuaaauc

SEQ ID NO: 178039 - RNA, 19 nt, Artificial Sequence
  Description of Artificial Sequence: Synthetic oligonucleotide
guguucgugacuuacuucc

SEQ ID NO: 178040 - RNA, 19 nt, Artificial Sequence
  Description of Artificial Sequence: Synthetic oligonucleotide
agcaaaacgucuugagaac

SEQ ID NO: 178041 - RNA, 19 nt, Artificial Sequence
  Description of Artificial Sequence: Synthetic oligonucleotide
aaagaguugugcgccauuc

SEQ ID NO: 178042 - RNA, 19 nt, Artificial Sequence
  Description of Artificial Sequence: Synthetic oligonucleotide
auagaagcuauuuauuaau

SEQ ID NO: 178043 - RNA, 19 nt, Artificial Sequence
  Description of Artificial Sequence: Synthetic oligonucleotide
acuacuuauaucaauauuu

SEQ ID NO: 178044 - RNA, 19 nt, Artificial Sequence
  Description of Artificial Sequence: Synthetic oligonucleotide
ucuuucgucaacagugggc

SEQ ID NO: 178045 - RNA, 19 nt, Artificial Sequence
  Description of Artificial Sequence: Synthetic oligonucleotide
ucagugaccgcuccccucg

SEQ ID NO: 178046 - RNA, 19 nt, Artificial Sequence
  Description of Artificial Sequence: Synthetic oligonucleotide
acauaaaacgacccaauau

SEQ ID NO: 178047 - RNA, 19 nt, Artificial Sequence
  Description of Artificial Sequence: Synthetic oligonucleotide
ucagcguuaacacacccuc

SEQ ID NO: 178048 - RNA, 19 nt, Artificial Sequence
  Description of Artificial Sequence: Synthetic oligonucleotide
gagaaaagaguugugcgcc

SEQ ID NO: 178049 - RNA, 19 nt, Artificial Sequence
  Description of Artificial Sequence: Synthetic oligonucleotide
augaaguuuagcaucgggg

SEQ ID NO: 178050 - RNA, 19 nt, Artificial Sequence
  Description of Artificial Sequence: Synthetic oligonucleotide
auguuauuuggcacaaacc

SEQ ID NO: 178051 - RNA, 19 nt, Artificial Sequence
  Description of Artificial Sequence: Synthetic oligonucleotide
cauaauguuauuuggcaca

SEQ ID NO: 178052 - RNA, 19 nt, Artificial Sequence
  Description of Artificial Sequence: Synthetic oligonucleotide
aaucuaugcaagacuuuac

SEQ ID NO: 178053 - RNA, 19 nt, Artificial Sequence
  Description of Artificial Sequence: Synthetic oligonucleotide
ugagaacguacuauagucu

SEQ ID NO: 178054 - RNA, 19 nt, Artificial Sequence
  Description of Artificial Sequence: Synthetic oligonucleotide
agucgacaaauucaucagg

SEQ ID NO: 178055 - RNA, 19 nt, Artificial Sequence
  Description of Artificial Sequence: Synthetic oligonucleotide
uaaaacgacccaauauccu

SEQ ID NO: 178056 - RNA, 19 nt, Artificial Sequence
  Description of Artificial Sequence: Synthetic oligonucleotide
agauagaagcuauuuauua

SEQ ID NO: 178057 - RNA, 19 nt, Artificial Sequence
  Description of Artificial Sequence: Synthetic oligonucleotide
guaagugauauugaucacc

SEQ ID NO: 178058 - RNA, 19 nt, Artificial Sequence
  Description of Artificial Sequence: Synthetic oligonucleotide
agcguuaacacacccucuc

SEQ ID NO: 178059 - RNA, 19 nt, Artificial Sequence
  Description of Artificial Sequence: Synthetic oligonucleotide
aggcuauugacagucacgg

SEQ ID NO: 178060 - RNA, 19 nt, Artificial Sequence
  Description of Artificial Sequence: Synthetic oligonucleotide
aucaacugugucuuucguc

SEQ ID NO: 178061 - RNA, 19 nt, Artificial Sequence
  Description of Artificial Sequence: Synthetic oligonucleotide
cauuagguaugucagagga

SEQ ID NO: 178062 - RNA, 19 nt, Artificial Sequence
  Description of Artificial Sequence: Synthetic oligonucleotide
uuagccacggacucggcca

SEQ ID NO: 178063 - RNA, 19 nt, Artificial Sequence
  Description of Artificial Sequence: Synthetic oligonucleotide
gagaacguacuauagucuc

SEQ ID NO: 178064 - RNA, 19 nt, Artificial Sequence
  Description of Artificial Sequence: Synthetic oligonucleotide
ugcaucuagauaaucucuc

SEQ ID NO: 178065 - RNA, 19 nt, Artificial Sequence
  Description of Artificial Sequence: Synthetic oligonucleotide
auauuuaguggaguaaaca

SEQ ID NO: 178066 - RNA, 19 nt, Artificial Sequence
  Description of Artificial Sequence: Synthetic oligonucleotide
uaccgaacuggccaguuca

SEQ ID NO: 178067 - RNA, 19 nt, Artificial Sequence
  Description of Artificial Sequence: Synthetic oligonucleotide
uaaaccuaaggaugcugcc

SEQ ID NO: 178068 - RNA, 19 nt, Artificial Sequence
  Description of Artificial Sequence: Synthetic oligonucleotide
ucagaggagagaucuuaag

SEQ ID NO: 178069 - RNA, 19 nt, Artificial Sequence
  Description of Artificial Sequence: Synthetic oligonucleotide
acgggguuaaauccuuucg

SEQ ID NO: 178070 - RNA, 19 nt, Artificial Sequence
  Description of Artificial Sequence: Synthetic oligonucleotide
ucugcauggcgauugggca

SEQ ID NO: 178071 - RNA, 19 nt, Artificial Sequence
  Description of Artificial Sequence: Synthetic oligonucleotide
guuaacacacccucuccag

SEQ ID NO: 178072 - RNA, 19 nt, Artificial Sequence
  Description of Artificial Sequence: Synthetic oligonucleotide
guuaaauccuuucgucugc

SEQ ID NO: 178073 - RNA, 19 nt, Artificial Sequence
  Description of Artificial Sequence: Synthetic oligonucleotide
aaccucgggacguauggug

SEQ ID NO: 178074 - RNA, 19 nt, Artificial Sequence
  Description of Artificial Sequence: Synthetic oligonucleotide
uuugcccucagcguuaaca

SEQ ID NO: 178075 - RNA, 19 nt, Artificial Sequence
  Description of Artificial Sequence: Synthetic oligonucleotide
cauguaaauuaaguguccc

SEQ ID NO: 178076 - RNA, 19 nt, Artificial Sequence
  Description of Artificial Sequence: Synthetic oligonucleotide
ggaguaucagcugagcucg

SEQ ID NO: 178077 - RNA, 19 nt, Artificial Sequence
  Description of Artificial Sequence: Synthetic oligonucleotide
uuacuacuuauaucaauau

SEQ ID NO: 178078 - RNA, 19 nt, Artificial Sequence
  Description of Artificial Sequence: Synthetic oligonucleotide
agagucuccacuggcauuc

SEQ ID NO: 178079 - RNA, 19 nt, Artificial Sequence
  Description of Artificial Sequence: Synthetic oligonucleotide
ugugucuuucgucaacagu

SEQ ID NO: 178080 - RNA, 19 nt, Artificial Sequence
  Description of Artificial Sequence: Synthetic oligonucleotide
aaccuaaggaugcugccau

SEQ ID NO: 178081 - RNA, 19 nt, Artificial Sequence
  Description of Artificial Sequence: Synthetic oligonucleotide
aaacuucguccuucaggac

SEQ ID NO: 178082 - RNA, 19 nt, Artificial Sequence
  Description of Artificial Sequence: Synthetic oligonucleotide
ugauugugaguguucguga

SEQ ID NO: 178083 - RNA, 19 nt, Artificial Sequence
  Description of Artificial Sequence: Synthetic oligonucleotide
acuucuaucugcauggcga

SEQ ID NO: 178084 - RNA, 19 nt, Artificial Sequence
  Description of Artificial Sequence: Synthetic oligonucleotide
aucugcauggcgauugggc

SEQ ID NO: 178085 - RNA, 19 nt, Artificial Sequence
  Description of Artificial Sequence: Synthetic oligonucleotide
cagucacgggguuaaaucc

SEQ ID NO: 178086 - RNA, 19 nt, Artificial Sequence
  Description of Artificial Sequence: Synthetic oligonucleotide
uauaacugaggcuuuuauu

SEQ ID NO: 178087 - RNA, 19 nt, Artificial Sequence
  Description of Artificial Sequence: Synthetic oligonucleotide
auugcggaaccucgggacg

SEQ ID NO: 178088 - RNA, 19 nt, Artificial Sequence
  Description of Artificial Sequence: Synthetic oligonucleotide
aaacagucgacaaauucau

SEQ ID NO: 178089 - RNA, 19 nt, Artificial Sequence
  Description of Artificial Sequence: Synthetic oligonucleotide
gauugugaguguucgugac

SEQ ID NO: 178090 - RNA, 19 nt, Artificial Sequence
  Description of Artificial Sequence: Synthetic oligonucleotide
uuccuaucaucaaguaucu

SEQ ID NO: 178091 - RNA, 19 nt, Artificial Sequence
  Description of Artificial Sequence: Synthetic oligonucleotide
gcuguuacugaaugcauag

SEQ ID NO: 178092 - RNA, 19 nt, Artificial Sequence
  Description of Artificial Sequence: Synthetic oligonucleotide
uacuacuuauaucaauauu

SEQ ID NO: 178093 - RNA, 19 nt, Artificial Sequence
  Description of Artificial Sequence: Synthetic oligonucleotide
aaaccuaaggaugcugcca

SEQ ID NO: 178094 - RNA, 19 nt, Artificial Sequence
  Description of Artificial Sequence: Synthetic oligonucleotide
ucaguaccgaacuggccag

SEQ ID NO: 178095 - RNA, 19 nt, Artificial Sequence
  Description of Artificial Sequence: Synthetic oligonucleotide
auugaucaccggcacgcuc

SEQ ID NO: 178096 - RNA, 19 nt, Artificial Sequence
  Description of Artificial Sequence: Synthetic oligonucleotide
ugaucuucuccugacgucu

SEQ ID NO: 178097 - RNA, 19 nt, Artificial Sequence
  Description of Artificial Sequence: Synthetic oligonucleotide
ugacgggugacguuugcug

SEQ ID NO: 178098 - RNA, 19 nt, Artificial Sequence
  Description of Artificial Sequence: Synthetic oligonucleotide
aacgucuugagaacguacu

SEQ ID NO: 178099 - RNA, 19 nt, Artificial Sequence
  Description of Artificial Sequence: Synthetic oligonucleotide
cuguuucccgccuuuacug

SEQ ID NO: 178100 - RNA, 19 nt, Artificial Sequence
  Description of Artificial Sequence: Synthetic oligonucleotide
cauugcggaaccucgggac

SEQ ID NO: 178101 - RNA, 19 nt, Artificial Sequence
  Description of Artificial Sequence: Synthetic oligonucleotide
uggccagaagguugaaucc

SEQ ID NO: 178102 - RNA, 19 nt, Artificial Sequence
  Description of Artificial Sequence: Synthetic oligonucleotide
cugagcucggaccauacuc

SEQ ID NO: 178103 - RNA, 19 nt, Artificial Sequence
  Description of Artificial Sequence: Synthetic oligonucleotide
aagcagaauauaaacuaaa

SEQ ID NO: 178104 - RNA, 19 nt, Artificial Sequence
  Description of Artificial Sequence: Synthetic oligonucleotide
ugcgccauucaacacccca

SEQ ID NO: 178105 - RNA, 19 nt, Artificial Sequence
  Description of Artificial Sequence: Synthetic oligonucleotide
augagauagaagcuauuua

SEQ ID NO: 178106 - RNA, 19 nt, Artificial Sequence
  Description of Artificial Sequence: Synthetic oligonucleotide
uguucgugacuuacuuccc

SEQ ID NO: 178107 - RNA, 19 nt, Artificial Sequence
  Description of Artificial Sequence: Synthetic oligonucleotide
cacggacucggccagcugg

SEQ ID NO: 178108 - RNA, 19 nt, Artificial Sequence
  Description of Artificial Sequence: Synthetic oligonucleotide
ugcuguuacugaaugcaua

SEQ ID NO: 178109 - RNA, 19 nt, Artificial Sequence
  Description of Artificial Sequence: Synthetic oligonucleotide
gaccauacuccauccuuug

SEQ ID NO: 178110 - RNA, 19 nt, Artificial Sequence
  Description of Artificial Sequence: Synthetic oligonucleotide
ugcuguggagucguaagug

SEQ ID NO: 178111 - RNA, 19 nt, Artificial Sequence
  Description of Artificial Sequence: Synthetic oligonucleotide
uggaaugcucugagggcag

SEQ ID NO: 178112 - RNA, 19 nt, Artificial Sequence
  Description of Artificial Sequence: Synthetic oligonucleotide
uaaacaccaacgugggcua

SEQ ID NO: 178113 - RNA, 19 nt, Artificial Sequence
  Description of Artificial Sequence: Synthetic oligonucleotide
agaaaagaguugugcgcca

SEQ ID NO: 178114 - RNA, 19 nt, Artificial Sequence
  Description of Artificial Sequence: Synthetic oligonucleotide
gagagaucuuaaguaagca

SEQ ID NO: 178115 - RNA, 19 nt, Artificial Sequence
  Description of Artificial Sequence: Synthetic oligonucleotide
acguacuauagucuccuau

SEQ ID NO: 178116 - RNA, 19 nt, Artificial Sequence
  Description of Artificial Sequence: Synthetic oligonucleotide
acggugauuuggcuaaaga

SEQ ID NO: 178117 - RNA, 19 nt, Artificial Sequence
  Description of Artificial Sequence: Synthetic oligonucleotide
auugauugugaguguucgu

SEQ ID NO: 178118 - RNA, 19 nt, Artificial Sequence
  Description of Artificial Sequence: Synthetic oligonucleotide
ggugacguuugcuggaacc

SEQ ID NO: 178119 - RNA, 19 nt, Artificial Sequence
  Description of Artificial Sequence: Synthetic oligonucleotide
gucgacaaauucaucagga

SEQ ID NO: 178120 - RNA, 19 nt, Artificial Sequence
  Description of Artificial Sequence: Synthetic oligonucleotide
gcaaaacgucuugagaacg

SEQ ID NO: 178121 - RNA, 19 nt, Artificial Sequence
  Description of Artificial Sequence: Synthetic oligonucleotide
gucggcacgccccacuccg

SEQ ID NO: 178122 - RNA, 19 nt, Artificial Sequence
  Description of Artificial Sequence: Synthetic oligonucleotide
ugucagaggagagaucuua

SEQ ID NO: 178123 - RNA, 19 nt, Artificial Sequence
  Description of Artificial Sequence: Synthetic oligonucleotide
uguuucccgccuuuacugu

SEQ ID NO: 178124 - RNA, 19 nt, Artificial Sequence
  Description of Artificial Sequence: Synthetic oligonucleotide
gcggugacggggcagaagg

SEQ ID NO: 178125 - RNA, 19 nt, Artificial Sequence
  Description of Artificial Sequence: Synthetic oligonucleotide
uucauugauugugaguguu

SEQ ID NO: 178126 - RNA, 19 nt, Artificial Sequence
  Description of Artificial Sequence: Synthetic oligonucleotide
cuuugcuucuguauggugu

SEQ ID NO: 178127 - RNA, 19 nt, Artificial Sequence
  Description of Artificial Sequence: Synthetic oligonucleotide
gacccaauauccuuuuacu

SEQ ID NO: 178128 - RNA, 19 nt, Artificial Sequence
  Description of Artificial Sequence: Synthetic oligonucleotide
cuaaaacuucguccuucag

SEQ ID NO: 178129 - RNA, 19 nt, Artificial Sequence
  Description of Artificial Sequence: Synthetic oligonucleotide
auccgcagugaccgaauag

SEQ ID NO: 178130 - RNA, 19 nt, Artificial Sequence
  Description of Artificial Sequence: Synthetic oligonucleotide
ggagagaucuuaaguaagc

SEQ ID NO: 178131 - RNA, 19 nt, Artificial Sequence
  Description of Artificial Sequence: Synthetic oligonucleotide
ggucucacaauauccauaa

SEQ ID NO: 178132 - RNA, 19 nt, Artificial Sequence
  Description of Artificial Sequence: Synthetic oligonucleotide
aacgacccaauauccuuuu

SEQ ID NO: 178133 - RNA, 19 nt, Artificial Sequence
  Description of Artificial Sequence: Synthetic oligonucleotide
acugugucuuucgucaaca

SEQ ID NO: 178134 - RNA, 19 nt, Artificial Sequence
  Description of Artificial Sequence: Synthetic oligonucleotide
guacaaucuaugcaagacu

SEQ ID NO: 178135 - RNA, 19 nt, Artificial Sequence
  Description of Artificial Sequence: Synthetic oligonucleotide
gacuuucagccaagugucg

SEQ ID NO: 178136 - RNA, 19 nt, Artificial Sequence
  Description of Artificial Sequence: Synthetic oligonucleotide
ucugccguggcacguggaa

SEQ ID NO: 178137 - RNA, 19 nt, Artificial Sequence
  Description of Artificial Sequence: Synthetic oligonucleotide
cauuccgaacuuuccacca

SEQ ID NO: 178138 - RNA, 19 nt, Artificial Sequence
  Description of Artificial Sequence: Synthetic oligonucleotide
uccuuucgucugcagccag

SEQ ID NO: 178139 - RNA, 19 nt, Artificial Sequence
  Description of Artificial Sequence: Synthetic oligonucleotide
gucguaagugauauugauc

SEQ ID NO: 178140 - RNA, 19 nt, Artificial Sequence
  Description of Artificial Sequence: Synthetic oligonucleotide
aaacgacccaauauccuuu

SEQ ID NO: 178141 - RNA, 19 nt, Artificial Sequence
  Description of Artificial Sequence: Synthetic oligonucleotide
ucgugacuuacuucccacu

SEQ ID NO: 178142 - RNA, 19 nt, Artificial Sequence
  Description of Artificial Sequence: Synthetic oligonucleotide
ugacugagucaugacuucu

SEQ ID NO: 178143 - RNA, 19 nt, Artificial Sequence
  Description of Artificial Sequence: Synthetic oligonucleotide
ggagcaaaacgucuugaga

SEQ ID NO: 178144 - RNA, 19 nt, Artificial Sequence
  Description of Artificial Sequence: Synthetic oligonucleotide
cuauuugcacauucaaggu

SEQ ID NO: 178145 - RNA, 19 nt, Artificial Sequence
  Description of Artificial Sequence: Synthetic oligonucleotide
uucuaacauccaccugugu

SEQ ID NO: 178146 - RNA, 19 nt, Artificial Sequence
  Description of Artificial Sequence: Synthetic oligonucleotide
aagcuccgaaaaugcuuca

SEQ ID NO: 178147 - RNA, 19 nt, Artificial Sequence
  Description of Artificial Sequence: Synthetic oligonucleotide
cuugagaacguacuauagu

SEQ ID NO: 178148 - RNA, 19 nt, Artificial Sequence
  Description of Artificial Sequence: Synthetic oligonucleotide
ggcauuccgaacuuuccac

SEQ ID NO: 178149 - RNA, 19 nt, Artificial Sequence
  Description of Artificial Sequence: Synthetic oligonucleotide
acguauggugggaugaacu

SEQ ID NO: 178150 - RNA, 19 nt, Artificial Sequence
  Description of Artificial Sequence: Synthetic oligonucleotide
cugugucuuucgucaacag

SEQ ID NO: 178151 - RNA, 19 nt, Artificial Sequence
  Description of Artificial Sequence: Synthetic oligonucleotide
cugaggcuuuuauuaagca

SEQ ID NO: 178152 - RNA, 19 nt, Artificial Sequence
  Description of Artificial Sequence: Synthetic oligonucleotide
cuugccaugaagucauacu

SEQ ID NO: 178153 - RNA, 19 nt, Artificial Sequence
  Description of Artificial Sequence: Synthetic oligonucleotide
cacgggguuaaauccuuuc

SEQ ID NO: 178154 - RNA, 19 nt, Artificial Sequence
  Description of Artificial Sequence: Synthetic oligonucleotide
aagugucgcccagugacau

SEQ ID NO: 178155 - RNA, 19 nt, Artificial Sequence
  Description of Artificial Sequence: Synthetic oligonucleotide
agugucgcccagugacauc

SEQ ID NO: 178156 - RNA, 19 nt, Artificial Sequence
  Description of Artificial Sequence: Synthetic oligonucleotide
agacuccacucccgagucg

SEQ ID NO: 178157 - RNA, 19 nt, Artificial Sequence
  Description of Artificial Sequence: Synthetic oligonucleotide
gcauuccgaacuuuccacc

SEQ ID NO: 178158 - RNA, 19 nt, Artificial Sequence
  Description of Artificial Sequence: Synthetic oligonucleotide
gaacguacuauagucuccu

SEQ ID NO: 178159 - RNA, 19 nt, Artificial Sequence
  Description of Artificial Sequence: Synthetic oligonucleotide
gacgucuccucaugauuuc

SEQ ID NO: 178160 - RNA, 19 nt, Artificial Sequence
  Description of Artificial Sequence: Synthetic oligonucleotide
uucagugaccgcuccccuc

SEQ ID NO: 178161 - RNA, 19 nt, Artificial Sequence
  Description of Artificial Sequence: Synthetic oligonucleotide
ugggcuacuuuguuucauu

SEQ ID NO: 178162 - RNA, 19 nt, Artificial Sequence
  Description of Artificial Sequence: Synthetic oligonucleotide
uuguacagcucaugugauu

SEQ ID NO: 178163 - RNA, 19 nt, Artificial Sequence
  Description of Artificial Sequence: Synthetic oligonucleotide
agcuccgaaaaugcuucag

SEQ ID NO: 178164 - RNA, 19 nt, Artificial Sequence
  Description of Artificial Sequence: Synthetic oligonucleotide
agucacgggguuaaauccu

SEQ ID NO: 178165 - RNA, 19 nt, Artificial Sequence
  Description of Artificial Sequence: Synthetic oligonucleotide
ugacuucuaucugcauggc

SEQ ID NO: 178166 - RNA, 19 nt, Artificial Sequence
  Description of Artificial Sequence: Synthetic oligonucleotide
gacguauggugggaugaac

SEQ ID NO: 178167 - RNA, 19 nt, Artificial Sequence
  Description of Artificial Sequence: Synthetic oligonucleotide
caccauauuuaguggagua

SEQ ID NO: 178168 - RNA, 19 nt, Artificial Sequence
  Description of Artificial Sequence: Synthetic oligonucleotide
uugacgggugacguuugcu

SEQ ID NO: 178169 - RNA, 19 nt, Artificial Sequence
  Description of Artificial Sequence: Synthetic oligonucleotide
acgggugacguuugcugga

SEQ ID NO: 178170 - RNA, 19 nt, Artificial Sequence
  Description of Artificial Sequence: Synthetic oligonucleotide
aacguacuauagucuccua

SEQ ID NO: 178171 - RNA, 19 nt, Artificial Sequence
  Description of Artificial Sequence: Synthetic oligonucleotide
aaccagauccgaagcacuu

SEQ ID NO: 178172 - RNA, 19 nt, Artificial Sequence
  Description of Artificial Sequence: Synthetic oligonucleotide
uauugaucaccggcacgcu

SEQ ID NO: 178173 - RNA, 19 nt, Artificial Sequence
  Description of Artificial Sequence: Synthetic oligonucleotide
agugaccgcuccccucguc

SEQ ID NO: 178174 - RNA, 19 nt, Artificial Sequence
  Description of Artificial Sequence: Synthetic oligonucleotide
cccgccuuuacugucauug

SEQ ID NO: 178175 - RNA, 19 nt, Artificial Sequence
  Description of Artificial Sequence: Synthetic oligonucleotide
gauccgggcugccaccauc

SEQ ID NO: 178176 - RNA, 19 nt, Artificial Sequence
  Description of Artificial Sequence: Synthetic oligonucleotide
gagcucggaccauacucca

SEQ ID NO: 178177 - RNA, 19 nt, Artificial Sequence
  Description of Artificial Sequence: Synthetic oligonucleotide
gagauagaagcuauuuauu

SEQ ID NO: 178178 - RNA, 19 nt, Artificial Sequence
  Description of Artificial Sequence: Synthetic oligonucleotide
caaaacgucuugagaacgu

SEQ ID NO: 178179 - RNA, 19 nt, Artificial Sequence
  Description of Artificial Sequence: Synthetic oligonucleotide
ggguuaaauccuuucgucu

SEQ ID NO: 178180 - RNA, 19 nt, Artificial Sequence
  Description of Artificial Sequence: Synthetic oligonucleotide
gugaccgcuccccucguca

SEQ ID NO: 178181 - RNA, 19 nt, Artificial Sequence
  Description of Artificial Sequence: Synthetic oligonucleotide
uugcggaaccucgggacgu

SEQ ID NO: 178182 - RNA, 19 nt, Artificial Sequence
  Description of Artificial Sequence: Synthetic oligonucleotide
caagugucgcccagugaca

SEQ ID NO: 178183 - RNA, 19 nt, Artificial Sequence
  Description of Artificial Sequence: Synthetic oligonucleotide
gcguuaacacacccucucc

SEQ ID NO: 178184 - RNA, 19 nt, Artificial Sequence
  Description of Artificial Sequence: Synthetic oligonucleotide
ggcgauugggcauugacuu

SEQ ID NO: 178185 - RNA, 19 nt, Artificial Sequence
  Description of Artificial Sequence: Synthetic oligonucleotide
gucgauccgggcugccacc

SEQ ID NO: 178186 - RNA, 19 nt, Artificial Sequence
  Description of Artificial Sequence: Synthetic oligonucleotide
ugcauggcgauugggcauu

SEQ ID NO: 178187 - RNA, 19 nt, Artificial Sequence
  Description of Artificial Sequence: Synthetic oligonucleotide
guuuugacgggugacguuu

SEQ ID NO: 178188 - RNA, 19 nt, Artificial Sequence
  Description of Artificial Sequence: Synthetic oligonucleotide
gaguaucagcugagcucgg

SEQ ID NO: 178189 - RNA, 19 nt, Artificial Sequence
  Description of Artificial Sequence: Synthetic oligonucleotide
gugacuuacuucccacugu

SEQ ID NO: 178190 - RNA, 19 nt, Artificial Sequence
  Description of Artificial Sequence: Synthetic oligonucleotide
guaccgaacuggccaguuc

SEQ ID NO: 178191 - RNA, 19 nt, Artificial Sequence
  Description of Artificial Sequence: Synthetic oligonucleotide
ucacgggguuaaauccuuu

SEQ ID NO: 178192 - RNA, 19 nt, Artificial Sequence
  Description of Artificial Sequence: Synthetic oligonucleotide
cgacccaauauccuuuuac

SEQ ID NO: 178193 - RNA, 19 nt, Artificial Sequence
  Description of Artificial Sequence: Synthetic oligonucleotide
gaaccagauccgaagcacu

SEQ ID NO: 178194 - RNA, 19 nt, Artificial Sequence
  Description of Artificial Sequence: Synthetic oligonucleotide
ucgauccgggcugccacca

SEQ ID NO: 178195 - RNA, 19 nt, Artificial Sequence
  Description of Artificial Sequence: Synthetic oligonucleotide
gcuccccucgucaaaagac

SEQ ID NO: 178196 - RNA, 19 nt, Artificial Sequence
  Description of Artificial Sequence: Synthetic oligonucleotide
accgaacuggccaguucag

SEQ ID NO: 178197 - RNA, 19 nt, Artificial Sequence
  Description of Artificial Sequence: Synthetic oligonucleotide
uccuaucaucaaguaucuc

SEQ ID NO: 178198 - RNA, 19 nt, Artificial Sequence
  Description of Artificial Sequence: Synthetic oligonucleotide
cucagcguuaacacacccu

SEQ ID NO: 178199 - RNA, 19 nt, Artificial Sequence
  Description of Artificial Sequence: Synthetic oligonucleotide
cuucgguccacugggagcu

SEQ ID NO: 178200 - RNA, 19 nt, Artificial Sequence
  Description of Artificial Sequence: Synthetic oligonucleotide
ccgaacuuuccaccauugc

SEQ ID NO: 178201 - RNA, 19 nt, Artificial Sequence
  Description of Artificial Sequence: Synthetic oligonucleotide
aguaccgaacuggccaguu

SEQ ID NO: 178202 - RNA, 19 nt, Artificial Sequence
  Description of Artificial Sequence: Synthetic oligonucleotide
gcgauugggcauugacuug

SEQ ID NO: 178203 - RNA, 19 nt, Artificial Sequence
  Description of Artificial Sequence: Synthetic oligonucleotide
gaaaagaguugugcgccau

SEQ ID NO: 178204 - RNA, 19 nt, Artificial Sequence
  Description of Artificial Sequence: Synthetic oligonucleotide
gugacguuugcuggaaccu

SEQ ID NO: 178205 - RNA, 19 nt, Artificial Sequence
  Description of Artificial Sequence: Synthetic oligonucleotide
cuucuaucugcauggcgau

SEQ ID NO: 178206 - RNA, 19 nt, Artificial Sequence
  Description of Artificial Sequence: Synthetic oligonucleotide
ccucagcguuaacacaccc

SEQ ID NO: 178207 - RNA, 19 nt, Artificial Sequence
  Description of Artificial Sequence: Synthetic oligonucleotide
uucuaucugcauggcgauu

SEQ ID NO: 178208 - RNA, 19 nt, Artificial Sequence
  Description of Artificial Sequence: Synthetic oligonucleotide
gggacguauggugggauga

SEQ ID NO: 178209 - RNA, 19 nt, Artificial Sequence
  Description of Artificial Sequence: Synthetic oligonucleotide
cuccccucgucaaaagacu

SEQ ID NO: 178210 - RNA, 19 nt, Artificial Sequence
  Description of Artificial Sequence: Synthetic oligonucleotide
cugccguggcacguggaac

SEQ ID NO: 178211 - RNA, 19 nt, Artificial Sequence
  Description of Artificial Sequence: Synthetic oligonucleotide
ucgggacguauggugggau

SEQ ID NO: 178212 - RNA, 19 nt, Artificial Sequence
  Description of Artificial Sequence: Synthetic oligonucleotide
accgcuccccucgucaaaa

SEQ ID NO: 178213 - RNA, 19 nt, Artificial Sequence
  Description of Artificial Sequence: Synthetic oligonucleotide
gauugggcauugacuugaa

SEQ ID NO: 178214 - RNA, 19 nt, Artificial Sequence
  Description of Artificial Sequence: Synthetic oligonucleotide
gcucugccguggcacgugg

SEQ ID NO: 178215 - RNA, 19 nt, Artificial Sequence
  Description of Artificial Sequence: Synthetic oligonucleotide
acgacccaauauccuuuua

SEQ ID NO: 178216 - RNA, 19 nt, Artificial Sequence
  Description of Artificial Sequence: Synthetic oligonucleotide
cccucagcguuaacacacc

SEQ ID NO: 178217 - RNA, 19 nt, Artificial Sequence
  Description of Artificial Sequence: Synthetic oligonucleotide
cugacgucuccucaugauu

SEQ ID NO: 178218 - RNA, 19 nt, Artificial Sequence
  Description of Artificial Sequence: Synthetic oligonucleotide
ccagccauugcggaaccuc

SEQ ID NO: 178219 - RNA, 19 nt, Artificial Sequence
  Description of Artificial Sequence: Synthetic oligonucleotide
uccuugccaugaagucaua

SEQ ID NO: 178220 - RNA, 19 nt, Artificial Sequence
  Description of Artificial Sequence: Synthetic oligonucleotide
uccggccgcuucuucuguu

SEQ ID NO: 178221 - RNA, 19 nt, Artificial Sequence
  Description of Artificial Sequence: Synthetic oligonucleotide
gggucucacaauauccaua

SEQ ID NO: 178222 - RNA, 19 nt, Artificial Sequence
  Description of Artificial Sequence: Synthetic oligonucleotide
ggucggcacgccccacucc

SEQ ID NO: 178223 - RNA, 19 nt, Artificial Sequence
  Description of Artificial Sequence: Synthetic oligonucleotide
cugcauggcgauugggcau

SEQ ID NO: 178224 - RNA, 19 nt, Artificial Sequence
  Description of Artificial Sequence: Synthetic oligonucleotide
gaccgcuccccucgucaaa

SEQ ID NO: 178225 - RNA, 19 nt, Artificial Sequence
  Description of Artificial Sequence: Synthetic oligonucleotide
cauccgcagugaccgaaua

SEQ ID NO: 178226 - RNA, 19 nt, Artificial Sequence
  Description of Artificial Sequence: Synthetic oligonucleotide
cugggagcuguuuguacuu

SEQ ID NO: 178227 - RNA, 19 nt, Artificial Sequence
  Description of Artificial Sequence: Synthetic oligonucleotide
cucgggacguaugguggga

SEQ ID NO: 178228 - RNA, 19 nt, Artificial Sequence
  Description of Artificial Sequence: Synthetic oligonucleotide
agcucggaccauacuccau

SEQ ID NO: 178229 - RNA, 19 nt, Artificial Sequence
  Description of Artificial Sequence: Synthetic oligonucleotide
gggugacguuugcuggaac

SEQ ID NO: 178230 - RNA, 19 nt, Artificial Sequence
  Description of Artificial Sequence: Synthetic oligonucleotide
cucugccguggcacgugga

SEQ ID NO: 178231 - RNA, 19 nt, Artificial Sequence
  Description of Artificial Sequence: Synthetic oligonucleotide
gggucggcacgccccacuc

SEQ ID NO: 178232 - RNA, 19 nt, Artificial Sequence
  Description of Artificial Sequence: Synthetic oligonucleotide
ccaaggcuauugacaguca

SEQ ID NO: 178233 - RNA, 19 nt, Artificial Sequence
  Description of Artificial Sequence: Synthetic oligonucleotide
gucucacaauauccauaau

SEQ ID NO: 178234 - RNA, 19 nt, Artificial Sequence
  Description of Artificial Sequence: Synthetic oligonucleotide
gucacgggguuaaauccuu

SEQ ID NO: 178235 - RNA, 19 nt, Artificial Sequence
  Description of Artificial Sequence: Synthetic oligonucleotide
ccgagucgcuggcugccgc

SEQ ID NO: 178236 - RNA, 19 nt, Artificial Sequence
  Description of Artificial Sequence: Synthetic oligonucleotide
cauggcgauugggcauuga

SEQ ID NO: 178237 - RNA, 19 nt, Artificial Sequence
  Description of Artificial Sequence: Synthetic oligonucleotide
ccgccuuuacugucauuga

SEQ ID NO: 178238 - RNA, 19 nt, Artificial Sequence
  Description of Artificial Sequence: Synthetic oligonucleotide
cggaaccucgggacguaug

SEQ ID NO: 178239 - RNA, 19 nt, Artificial Sequence
  Description of Artificial Sequence: Synthetic oligonucleotide
caacgugggcuacuuuguu

SEQ ID NO: 178240 - RNA, 19 nt, Artificial Sequence
  Description of Artificial Sequence: Synthetic oligonucleotide
gggcuucgaggagcaaaac

SEQ ID NO: 178241 - RNA, 19 nt, Artificial Sequence
  Description of Artificial Sequence: Synthetic oligonucleotide
gugcgccauucaacacccc

SEQ ID NO: 178242 - RNA, 19 nt, Artificial Sequence
  Description of Artificial Sequence: Synthetic oligonucleotide
gcugagcucggaccauacu

SEQ ID NO: 178243 - RNA, 19 nt, Artificial Sequence
  Description of Artificial Sequence: Synthetic oligonucleotide
ccgcuccccucgucaaaag

SEQ ID NO: 178244 - RNA, 19 nt, Artificial Sequence
  Description of Artificial Sequence: Synthetic oligonucleotide
cccgagucgcuggcugccg

SEQ ID NO: 178245 - RNA, 19 nt, Artificial Sequence
  Description of Artificial Sequence: Synthetic oligonucleotide
gcauggcgauugggcauug

SEQ ID NO: 178246 - RNA, 19 nt, Artificial Sequence
  Description of Artificial Sequence: Synthetic oligonucleotide
ggaaugcucugagggcagu

SEQ ID NO: 178247 - RNA, 19 nt, Artificial Sequence
  Description of Artificial Sequence: Synthetic oligonucleotide
ccugucgauccgggcugcc

SEQ ID NO: 178248 - RNA, 19 nt, Artificial Sequence
  Description of Artificial Sequence: Synthetic oligonucleotide
cgucuugagaacguacuau

SEQ ID NO: 178249 - RNA, 19 nt, Artificial Sequence
  Description of Artificial Sequence: Synthetic oligonucleotide
cgcuccccucgucaaaaga

SEQ ID NO: 178250 - RNA, 19 nt, Artificial Sequence
  Description of Artificial Sequence: Synthetic oligonucleotide
caguaccgaacuggccagu

SEQ ID NO: 178251 - RNA, 19 nt, Artificial Sequence
  Description of Artificial Sequence: Synthetic oligonucleotide
cggaccauacuccauccuu

SEQ ID NO: 178252 - RNA, 19 nt, Artificial Sequence
  Description of Artificial Sequence: Synthetic oligonucleotide
cgcagugaccgaauaguuu

SEQ ID NO: 178253 - RNA, 19 nt, Artificial Sequence
  Description of Artificial Sequence: Synthetic oligonucleotide
cgagucgcuggcugccgca

SEQ ID NO: 178254 - RNA, 19 nt, Artificial Sequence
  Description of Artificial Sequence: Synthetic oligonucleotide
ggggaccggaacaggcgcu

SEQ ID NO: 178255 - RNA, 19 nt, Artificial Sequence
  Description of Artificial Sequence: Synthetic oligonucleotide
ccgcagugaccgaauaguu

SEQ ID NO: 178256 - RNA, 19 nt, Artificial Sequence
  Description of Artificial Sequence: Synthetic oligonucleotide
caccaacgugggcuacuuu

SEQ ID NO: 178257 - RNA, 19 nt, Artificial Sequence
  Description of Artificial Sequence: Synthetic oligonucleotide
cgauccgggcugccaccau

SEQ ID NO: 178258 - RNA, 19 nt, Artificial Sequence
  Description of Artificial Sequence: Synthetic oligonucleotide
aauuaauggguuuaccacc

SEQ ID NO: 178259 - RNA, 19 nt, Artificial Sequence
  Description of Artificial Sequence: Synthetic oligonucleotide
ugaacaagaagacugaugc

SEQ ID NO: 178260 - RNA, 19 nt, Artificial Sequence
  Description of Artificial Sequence: Synthetic oligonucleotide
uugagcaugacucuuaagg

SEQ ID NO: 178261 - RNA, 19 nt, Artificial Sequence
  Description of Artificial Sequence: Synthetic oligonucleotide
aaagccguaagugugaccc

SEQ ID NO: 178262 - RNA, 19 nt, Artificial Sequence
  Description of Artificial Sequence: Synthetic oligonucleotide
aaucgaguucuuuauaucg

SEQ ID NO: 178263 - RNA, 19 nt, Artificial Sequence
  Description of Artificial Sequence: Synthetic oligonucleotide
ucuauucuugauaauacgg

SEQ ID NO: 178264 - RNA, 19 nt, Artificial Sequence
  Description of Artificial Sequence: Synthetic oligonucleotide
ucaacuauuaccucaggcg

SEQ ID NO: 178265 - RNA, 19 nt, Artificial Sequence
  Description of Artificial Sequence: Synthetic oligonucleotide
aauacuaaaugguggauca

SEQ ID NO: 178266 - RNA, 19 nt, Artificial Sequence
  Description of Artificial Sequence: Synthetic oligonucleotide
aaagcuuacaauaaguaga

SEQ ID NO: 178267 - RNA, 19 nt, Artificial Sequence
  Description of Artificial Sequence: Synthetic oligonucleotide
acucuaguagaguaguacc

SEQ ID NO: 178268 - RNA, 19 nt, Artificial Sequence
  Description of Artificial Sequence: Synthetic oligonucleotide
aagccuguuagguuucucc

SEQ ID NO: 178269 - RNA, 19 nt, Artificial Sequence
  Description of Artificial Sequence: Synthetic oligonucleotide
aguaagauggacguagggc

SEQ ID NO: 178270 - RNA, 19 nt, Artificial Sequence
  Description of Artificial Sequence: Synthetic oligonucleotide
agggaagugaaucucugcc

SEQ ID NO: 178271 - RNA, 19 nt, Artificial Sequence
  Description of Artificial Sequence: Synthetic oligonucleotide
agaaugaacaagaagacug

SEQ ID NO: 178272 - RNA, 19 nt, Artificial Sequence
  Description of Artificial Sequence: Synthetic oligonucleotide
uuuauaucgagcaaacaua

SEQ ID NO: 178273 - RNA, 19 nt, Artificial Sequence
  Description of Artificial Sequence: Synthetic oligonucleotide
guagauacguuuuagcaug

SEQ ID NO: 178274 - RNA, 19 nt, Artificial Sequence
  Description of Artificial Sequence: Synthetic oligonucleotide
aacucuaguagaguaguac

SEQ ID NO: 178275 - RNA, 19 nt, Artificial Sequence
  Description of Artificial Sequence: Synthetic oligonucleotide
augacuguugcccuugucg

SEQ ID NO: 178276 - RNA, 19 nt, Artificial Sequence
  Description of Artificial Sequence: Synthetic oligonucleotide
ucuauaaagccguaagugu

SEQ ID NO: 178277 - RNA, 19 nt, Artificial Sequence
  Description of Artificial Sequence: Synthetic oligonucleotide
uuuaucaacaggguuacga

SEQ ID NO: 178278 - RNA, 19 nt, Artificial Sequence
  Description of Artificial Sequence: Synthetic oligonucleotide
uuauaucgagcaaacauaa

SEQ ID NO: 178279 - RNA, 19 nt, Artificial Sequence
  Description of Artificial Sequence: Synthetic oligonucleotide
aguaguaagauggacguag

SEQ ID NO: 178280 - RNA, 19 nt, Artificial Sequence
  Description of Artificial Sequence: Synthetic oligonucleotide
ucuuccaagagugaaaacu

SEQ ID NO: 178281 - RNA, 19 nt, Artificial Sequence
  Description of Artificial Sequence: Synthetic oligonucleotide
aguaguaccaaagcagcgc

SEQ ID NO: 178282 - RNA, 19 nt, Artificial Sequence
  Description of Artificial Sequence: Synthetic oligonucleotide
auacguuuuagcaugauug

SEQ ID NO: 178283 - RNA, 19 nt, Artificial Sequence
  Description of Artificial Sequence: Synthetic oligonucleotide
caacuauuaccucaggcgg

SEQ ID NO: 178284 - RNA, 19 nt, Artificial Sequence
  Description of Artificial Sequence: Synthetic oligonucleotide
caauuaauggguuuaccac

SEQ ID NO: 178285 - RNA, 19 nt, Artificial Sequence
  Description of Artificial Sequence: Synthetic oligonucleotide
uauucuugauaauacggac

SEQ ID NO: 178286 - RNA, 19 nt, Artificial Sequence
  Description of Artificial Sequence: Synthetic oligonucleotide
cuauaaagccguaagugug

SEQ ID NO: 178287 - RNA, 19 nt, Artificial Sequence
  Description of Artificial Sequence: Synthetic oligonucleotide
uuaaucgaguucuuuauau

SEQ ID NO: 178288 - RNA, 19 nt, Artificial Sequence
  Description of Artificial Sequence: Synthetic oligonucleotide
aguaaguuccugccaaggg

SEQ ID NO: 178289 - RNA, 19 nt, Artificial Sequence
  Description of Artificial Sequence: Synthetic oligonucleotide
aucaauacuaaauggugga

SEQ ID NO: 178290 - RNA, 19 nt, Artificial Sequence
  Description of Artificial Sequence: Synthetic oligonucleotide
uucguuucccaguagcuag

SEQ ID NO: 178291 - RNA, 19 nt, Artificial Sequence
  Description of Artificial Sequence: Synthetic oligonucleotide
aaaguuacuagcagcaaga

SEQ ID NO: 178292 - RNA, 19 nt, Artificial Sequence
  Description of Artificial Sequence: Synthetic oligonucleotide
aaagaaugcuccucuacau

SEQ ID NO: 178293 - RNA, 19 nt, Artificial Sequence
  Description of Artificial Sequence: Synthetic oligonucleotide
aaauccgaggaugaaaagu

SEQ ID NO: 178294 - RNA, 19 nt, Artificial Sequence
  Description of Artificial Sequence: Synthetic oligonucleotide
cuugauaauacggacguug

SEQ ID NO: 178295 - RNA, 19 nt, Artificial Sequence
  Description of Artificial Sequence: Synthetic oligonucleotide
aguuacuagcagcaagaac

SEQ ID NO: 178296 - RNA, 19 nt, Artificial Sequence
  Description of Artificial Sequence: Synthetic oligonucleotide
uaagugugacccauggggc

SEQ ID NO: 178297 - RNA, 19 nt, Artificial Sequence
  Description of Artificial Sequence: Synthetic oligonucleotide
acgguagauacguuuuagc

SEQ ID NO: 178298 - RNA, 19 nt, Artificial Sequence
  Description of Artificial Sequence: Synthetic oligonucleotide
ugaucuacaucacaguauu

SEQ ID NO: 178299 - RNA, 19 nt, Artificial Sequence
  Description of Artificial Sequence: Synthetic oligonucleotide
aggucuauaaagccguaag

SEQ ID NO: 178300 - RNA, 19 nt, Artificial Sequence
  Description of Artificial Sequence: Synthetic oligonucleotide
uccuacaaacucuaguaga

SEQ ID NO: 178301 - RNA, 19 nt, Artificial Sequence
  Description of Artificial Sequence: Synthetic oligonucleotide
agaaucauauauguagcag

SEQ ID NO: 178302 - RNA, 19 nt, Artificial Sequence
  Description of Artificial Sequence: Synthetic oligonucleotide
uaguaagauggacguaggg

SEQ ID NO: 178303 - RNA, 19 nt, Artificial Sequence
  Description of Artificial Sequence: Synthetic oligonucleotide
uauuaccucaggcggagug

SEQ ID NO: 178304 - RNA, 19 nt, Artificial Sequence
  Description of Artificial Sequence: Synthetic oligonucleotide
uugucgauuuguaucugag

SEQ ID NO: 178305 - RNA, 19 nt, Artificial Sequence
  Description of Artificial Sequence: Synthetic oligonucleotide
gucuauaaagccguaagug

SEQ ID NO: 178306 - RNA, 19 nt, Artificial Sequence
  Description of Artificial Sequence: Synthetic oligonucleotide
uuguuaucccgaaaauccc

SEQ ID NO: 178307 - RNA, 19 nt, Artificial Sequence
  Description of Artificial Sequence: Synthetic oligonucleotide
ucgaauaagccuguuaggu

SEQ ID NO: 178308 - RNA, 19 nt, Artificial Sequence
  Description of Artificial Sequence: Synthetic oligonucleotide
ucucuuucuauaucaagaa

SEQ ID NO: 178309 - RNA, 19 nt, Artificial Sequence
  Description of Artificial Sequence: Synthetic oligonucleotide
acuuuguuacuccucuguc

SEQ ID NO: 178310 - RNA, 19 nt, Artificial Sequence
  Description of Artificial Sequence: Synthetic oligonucleotide
caaagggagguccugaaug

SEQ ID NO: 178311 - RNA, 19 nt, Artificial Sequence
  Description of Artificial Sequence: Synthetic oligonucleotide
cuugcuccacgaaaggucc

SEQ ID NO: 178312 - RNA, 19 nt, Artificial Sequence
  Description of Artificial Sequence: Synthetic oligonucleotide
ugcuauuagugucaguguc

SEQ ID NO: 178313 - RNA, 19 nt, Artificial Sequence
  Description of Artificial Sequence: Synthetic oligonucleotide
cuuccaagagugaaaacuc

SEQ ID NO: 178314 - RNA, 19 nt, Artificial Sequence
  Description of Artificial Sequence: Synthetic oligonucleotide
acucaaucgaauaagccug

SEQ ID NO: 178315 - RNA, 19 nt, Artificial Sequence
  Description of Artificial Sequence: Synthetic oligonucleotide
ucgagagugaggaaaguau

SEQ ID NO: 178316 - RNA, 19 nt, Artificial Sequence
  Description of Artificial Sequence: Synthetic oligonucleotide
guagaguaguaccaaagca

SEQ ID NO: 178317 - RNA, 19 nt, Artificial Sequence
  Description of Artificial Sequence: Synthetic oligonucleotide
cuauucuugauaauacgga

SEQ ID NO: 178318 - RNA, 19 nt, Artificial Sequence
  Description of Artificial Sequence: Synthetic oligonucleotide
uccuaucucggaaauauuu

SEQ ID NO: 178319 - RNA, 19 nt, Artificial Sequence
  Description of Artificial Sequence: Synthetic oligonucleotide
aaaggcguuaagaaucucu

SEQ ID NO: 178320 - RNA, 19 nt, Artificial Sequence
  Description of Artificial Sequence: Synthetic oligonucleotide
uaguaaugcauguggucag

SEQ ID NO: 178321 - RNA, 19 nt, Artificial Sequence
  Description of Artificial Sequence: Synthetic oligonucleotide
uacaauaaguagaucuuuu

SEQ ID NO: 178322 - RNA, 19 nt, Artificial Sequence
  Description of Artificial Sequence: Synthetic oligonucleotide
agagugaaaacuccacgca

SEQ ID NO: 178323 - RNA, 19 nt, Artificial Sequence
  Description of Artificial Sequence: Synthetic oligonucleotide
aacgguagauacguuuuag

SEQ ID NO: 178324 - RNA, 19 nt, Artificial Sequence
  Description of Artificial Sequence: Synthetic oligonucleotide
cauuagaguucccugguug

SEQ ID NO: 178325 - RNA, 19 nt, Artificial Sequence
  Description of Artificial Sequence: Synthetic oligonucleotide
cauggaucauuagaguucc

SEQ ID NO: 178326 - RNA, 19 nt, Artificial Sequence
  Description of Artificial Sequence: Synthetic oligonucleotide
aguggaacgguagauacgu

SEQ ID NO: 178327 - RNA, 19 nt, Artificial Sequence
  Description of Artificial Sequence: Synthetic oligonucleotide
aauccaggauggcuauauc

SEQ ID NO: 178328 - RNA, 19 nt, Artificial Sequence
  Description of Artificial Sequence: Synthetic oligonucleotide
cucuucggaaaguaagccc

SEQ ID NO: 178329 - RNA, 19 nt, Artificial Sequence
  Description of Artificial Sequence: Synthetic oligonucleotide
caucucgggacauuuugcc

SEQ ID NO: 178330 - RNA, 19 nt, Artificial Sequence
  Description of Artificial Sequence: Synthetic oligonucleotide
gaaauccgaggaugaaaag

SEQ ID NO: 178331 - RNA, 19 nt, Artificial Sequence
  Description of Artificial Sequence: Synthetic oligonucleotide
guaagauggacguagggcu

SEQ ID NO: 178332 - RNA, 19 nt, Artificial Sequence
  Description of Artificial Sequence: Synthetic oligonucleotide
gcuuacaauaaguagaucu

SEQ ID NO: 178333 - RNA, 19 nt, Artificial Sequence
  Description of Artificial Sequence: Synthetic oligonucleotide
agcagaucggagaaucccc

SEQ ID NO: 178334 - RNA, 19 nt, Artificial Sequence
  Description of Artificial Sequence: Synthetic oligonucleotide
aagcuuacaauaaguagau

SEQ ID NO: 178335 - RNA, 19 nt, Artificial Sequence
  Description of Artificial Sequence: Synthetic oligonucleotide
cauggggccaguucuauuc

SEQ ID NO: 178336 - RNA, 19 nt, Artificial Sequence
  Description of Artificial Sequence: Synthetic oligonucleotide
auggguuuaccaccuuagg

SEQ ID NO: 178337 - RNA, 19 nt, Artificial Sequence
  Description of Artificial Sequence: Synthetic oligonucleotide
agguaugccaucagaaguc

SEQ ID NO: 178338 - RNA, 19 nt, Artificial Sequence
  Description of Artificial Sequence: Synthetic oligonucleotide
auagucguaaccuguguua

SEQ ID NO: 178339 - RNA, 19 nt, Artificial Sequence
  Description of Artificial Sequence: Synthetic oligonucleotide
ggucauaguaaguuccugc

SEQ ID NO: 178340 - RNA, 19 nt, Artificial Sequence
  Description of Artificial Sequence: Synthetic oligonucleotide
auaguaguagccaguagca

SEQ ID NO: 178341 - RNA, 19 nt, Artificial Sequence
  Description of Artificial Sequence: Synthetic oligonucleotide
ucgguaaguuucauuggac

SEQ ID NO: 178342 - RNA, 19 nt, Artificial Sequence
  Description of Artificial Sequence: Synthetic oligonucleotide
gaguaguaccaaagcagcg

SEQ ID NO: 178343 - RNA, 19 nt, Artificial Sequence
  Description of Artificial Sequence: Synthetic oligonucleotide
ucuaguagaguaguaccaa

SEQ ID NO: 178344 - RNA, 19 nt, Artificial Sequence
  Description of Artificial Sequence: Synthetic oligonucleotide
uuacaucguuugcaguacc

SEQ ID NO: 178345 - RNA, 19 nt, Artificial Sequence
  Description of Artificial Sequence: Synthetic oligonucleotide
ugggcuugguacauacuca

SEQ ID NO: 178346 - RNA, 19 nt, Artificial Sequence
  Description of Artificial Sequence: Synthetic oligonucleotide
uggaucauuagaguucccu

SEQ ID NO: 178347 - RNA, 19 nt, Artificial Sequence
  Description of Artificial Sequence: Synthetic oligonucleotide
uggacguagggcuccagca

SEQ ID NO: 178348 - RNA, 19 nt, Artificial Sequence
  Description of Artificial Sequence: Synthetic oligonucleotide
ugcaugucccuauuccuga

SEQ ID NO: 178349 - RNA, 19 nt, Artificial Sequence
  Description of Artificial Sequence: Synthetic oligonucleotide
aggagguuguguccugugg

SEQ ID NO: 178350 - RNA, 19 nt, Artificial Sequence
  Description of Artificial Sequence: Synthetic oligonucleotide
auaaagccguaagugugac

SEQ ID NO: 178351 - RNA, 19 nt, Artificial Sequence
  Description of Artificial Sequence: Synthetic oligonucleotide
caauacuaaaugguggauc

SEQ ID NO: 178352 - RNA, 19 nt, Artificial Sequence
  Description of Artificial Sequence: Synthetic oligonucleotide
ucguuucccaguagcuagg

SEQ ID NO: 178353 - RNA, 19 nt, Artificial Sequence
  Description of Artificial Sequence: Synthetic oligonucleotide
uaaucagugucuuguuauc

SEQ ID NO: 178354 - RNA, 19 nt, Artificial Sequence
  Description of Artificial Sequence: Synthetic oligonucleotide
ugggagucaaggucuauaa

SEQ ID NO: 178355 - RNA, 19 nt, Artificial Sequence
  Description of Artificial Sequence: Synthetic oligonucleotide
aaguccgaaaggcguuaag

SEQ ID NO: 178356 - RNA, 19 nt, Artificial Sequence
  Description of Artificial Sequence: Synthetic oligonucleotide
uagcagaucggagaauccc

SEQ ID NO: 178357 - RNA, 19 nt, Artificial Sequence
  Description of Artificial Sequence: Synthetic oligonucleotide
auaaucccuguuccacccg

SEQ ID NO: 178358 - RNA, 19 nt, Artificial Sequence
  Description of Artificial Sequence: Synthetic oligonucleotide
uggaacgguagauacguuu

SEQ ID NO: 178359 - RNA, 19 nt, Artificial Sequence
  Description of Artificial Sequence: Synthetic oligonucleotide
uccacgcagacauagccau

SEQ ID NO: 178360 - RNA, 19 nt, Artificial Sequence
  Description of Artificial Sequence: Synthetic oligonucleotide
aggguacugguauggaugu

SEQ ID NO: 178361 - RNA, 19 nt, Artificial Sequence
  Description of Artificial Sequence: Synthetic oligonucleotide
ccgaaaauccccagaaugc

SEQ ID NO: 178362 - RNA, 19 nt, Artificial Sequence
  Description of Artificial Sequence: Synthetic oligonucleotide
guuacgaucacugucaguu

SEQ ID NO: 178363 - RNA, 19 nt, Artificial Sequence
  Description of Artificial Sequence: Synthetic oligonucleotide
guaguaccaaagcagcgca

SEQ ID NO: 178364 - RNA, 19 nt, Artificial Sequence
  Description of Artificial Sequence: Synthetic oligonucleotide
cucuaguagaguaguacca

SEQ ID NO: 178365 - RNA, 19 nt, Artificial Sequence
  Description of Artificial Sequence: Synthetic oligonucleotide
ucggaaaguaagcccuucu

SEQ ID NO: 178366 - RNA, 19 nt, Artificial Sequence
  Description of Artificial Sequence: Synthetic oligonucleotide
ucucgggacauuuugccuu

SEQ ID NO: 178367 - RNA, 19 nt, Artificial Sequence
  Description of Artificial Sequence: Synthetic oligonucleotide
uauugggaaacugccuucu

SEQ ID NO: 178368 - RNA, 19 nt, Artificial Sequence
  Description of Artificial Sequence: Synthetic oligonucleotide
uguuccuuaucagcuggcc

SEQ ID NO: 178369 - RNA, 19 nt, Artificial Sequence
  Description of Artificial Sequence: Synthetic oligonucleotide
aucccgaaaauccccagaa

SEQ ID NO: 178370 - RNA, 19 nt, Artificial Sequence
  Description of Artificial Sequence: Synthetic oligonucleotide
augaacaagaagacugaug

SEQ ID NO: 178371 - RNA, 19 nt, Artificial Sequence
  Description of Artificial Sequence: Synthetic oligonucleotide
aauacggacguuggcagua

SEQ ID NO: 178372 - RNA, 19 nt, Artificial Sequence
  Description of Artificial Sequence: Synthetic oligonucleotide
guaguaagauggacguagg

SEQ ID NO: 178373 - RNA, 19 nt, Artificial Sequence
  Description of Artificial Sequence: Synthetic oligonucleotide
ucuccacucuuaaucgagu

SEQ ID NO: 178374 - RNA, 19 nt, Artificial Sequence
  Description of Artificial Sequence: Synthetic oligonucleotide
uaguaccaaagcagcgcag

SEQ ID NO: 178375 - RNA, 19 nt, Artificial Sequence
  Description of Artificial Sequence: Synthetic oligonucleotide
cuuacaucguuugcaguac

SEQ ID NO: 178376 - RNA, 19 nt, Artificial Sequence
  Description of Artificial Sequence: Synthetic oligonucleotide
guucuuuauaucgagcaaa

SEQ ID NO: 178377 - RNA, 19 nt, Artificial Sequence
  Description of Artificial Sequence: Synthetic oligonucleotide
cacucaaucgaauaagccu

SEQ ID NO: 178378 - RNA, 19 nt, Artificial Sequence
  Description of Artificial Sequence: Synthetic oligonucleotide
caguagcuagguuuacagc

SEQ ID NO: 178379 - RNA, 19 nt, Artificial Sequence
  Description of Artificial Sequence: Synthetic oligonucleotide
uaguaguagccaguagcag

SEQ ID NO: 178380 - RNA, 19 nt, Artificial Sequence
  Description of Artificial Sequence: Synthetic oligonucleotide
cacgcagacauagccauag

SEQ ID NO: 178381 - RNA, 19 nt, Artificial Sequence
  Description of Artificial Sequence: Synthetic oligonucleotide
aggguuacgaucacuguca

SEQ ID NO: 178382 - RNA, 19 nt, Artificial Sequence
  Description of Artificial Sequence: Synthetic oligonucleotide
caggguuacgaucacuguc

SEQ ID NO: 178383 - RNA, 19 nt, Artificial Sequence
  Description of Artificial Sequence: Synthetic oligonucleotide
cagaaucauauauguagca

SEQ ID NO: 178384 - RNA, 19 nt, Artificial Sequence
  Description of Artificial Sequence: Synthetic oligonucleotide
guaaucagugucuuguuau

SEQ ID NO: 178385 - RNA, 19 nt, Artificial Sequence
  Description of Artificial Sequence: Synthetic oligonucleotide
acauagccauagucguaac

SEQ ID NO: 178386 - RNA, 19 nt, Artificial Sequence
  Description of Artificial Sequence: Synthetic oligonucleotide
agcaaacauaacucuucga

SEQ ID NO: 178387 - RNA, 19 nt, Artificial Sequence
  Description of Artificial Sequence: Synthetic oligonucleotide
ucaauacuaaaugguggau

SEQ ID NO: 178388 - RNA, 19 nt, Artificial Sequence
  Description of Artificial Sequence: Synthetic oligonucleotide
ccaauuaauggguuuacca

SEQ ID NO: 178389 - RNA, 19 nt, Artificial Sequence
  Description of Artificial Sequence: Synthetic oligonucleotide
aaggcguuaagaaucucuu

SEQ ID NO: 178390 - RNA, 19 nt, Artificial Sequence
  Description of Artificial Sequence: Synthetic oligonucleotide
guuuugaccauagccaaaa

SEQ ID NO: 178391 - RNA, 19 nt, Artificial Sequence
  Description of Artificial Sequence: Synthetic oligonucleotide
gacguuggcaguaguaaga

SEQ ID NO: 178392 - RNA, 19 nt, Artificial Sequence
  Description of Artificial Sequence: Synthetic oligonucleotide
uaaagccguaagugugacc

SEQ ID NO: 178393 - RNA, 19 nt, Artificial Sequence
  Description of Artificial Sequence: Synthetic oligonucleotide
uaauacggacguuggcagu

SEQ ID NO: 178394 - RNA, 19 nt, Artificial Sequence
  Description of Artificial Sequence: Synthetic oligonucleotide
aaguuacuagcagcaagaa

SEQ ID NO: 178395 - RNA, 19 nt, Artificial Sequence
  Description of Artificial Sequence: Synthetic oligonucleotide
aucucgggacauuuugccu

SEQ ID NO: 178396 - RNA, 19 nt, Artificial Sequence
  Description of Artificial Sequence: Synthetic oligonucleotide
cuugagcaugacucuuaag

SEQ ID NO: 178397 - RNA, 19 nt, Artificial Sequence
  Description of Artificial Sequence: Synthetic oligonucleotide
guccgaaaggcguuaagaa

SEQ ID NO: 178398 - RNA, 19 nt, Artificial Sequence
  Description of Artificial Sequence: Synthetic oligonucleotide
uucgagagugaggaaagua

SEQ ID NO: 178399 - RNA, 19 nt, Artificial Sequence
  Description of Artificial Sequence: Synthetic oligonucleotide
caugucccuauuccugaag

SEQ ID NO: 178400 - RNA, 19 nt, Artificial Sequence
  Description of Artificial Sequence: Synthetic oligonucleotide
agaccaauuaauggguuua

SEQ ID NO: 178401 - RNA, 19 nt, Artificial Sequence
  Description of Artificial Sequence: Synthetic oligonucleotide
accaccuuagguggagggg

SEQ ID NO: 178402 - RNA, 19 nt, Artificial Sequence
  Description of Artificial Sequence: Synthetic oligonucleotide
acaggguuacgaucacugu

SEQ ID NO: 178403 - RNA, 19 nt, Artificial Sequence
  Description of Artificial Sequence: Synthetic oligonucleotide
guaagcccuucucuucgag

SEQ ID NO: 178404 - RNA, 19 nt, Artificial Sequence
  Description of Artificial Sequence: Synthetic oligonucleotide
ucugucucuucggaaagua

SEQ ID NO: 178405 - RNA, 19 nt, Artificial Sequence
  Description of Artificial Sequence: Synthetic oligonucleotide
caagaagacugaugcccac

SEQ ID NO: 178406 - RNA, 19 nt, Artificial Sequence
  Description of Artificial Sequence: Synthetic oligonucleotide
guaguagccaguagcagaa

SEQ ID NO: 178407 - RNA, 19 nt, Artificial Sequence
  Description of Artificial Sequence: Synthetic oligonucleotide
gaccaauuaauggguuuac

SEQ ID NO: 178408 - RNA, 19 nt, Artificial Sequence
  Description of Artificial Sequence: Synthetic oligonucleotide
uagucguaaccuguguuau

SEQ ID NO: 178409 - RNA, 19 nt, Artificial Sequence
  Description of Artificial Sequence: Synthetic oligonucleotide
ggaaauccgaggaugaaaa

SEQ ID NO: 178410 - RNA, 19 nt, Artificial Sequence
  Description of Artificial Sequence: Synthetic oligonucleotide
gauacguuuuagcaugauu

SEQ ID NO: 178411 - RNA, 19 nt, Artificial Sequence
  Description of Artificial Sequence: Synthetic oligonucleotide
ugauagucaccgugugguc

SEQ ID NO: 178412 - RNA, 19 nt, Artificial Sequence
  Description of Artificial Sequence: Synthetic oligonucleotide
aguaagcccuucucuucga

SEQ ID NO: 178413 - RNA, 19 nt, Artificial Sequence
  Description of Artificial Sequence: Synthetic oligonucleotide
agcuuacaauaaguagauc

SEQ ID NO: 178414 - RNA, 19 nt, Artificial Sequence
  Description of Artificial Sequence: Synthetic oligonucleotide
cagacauagccauagucgu

SEQ ID NO: 178415 - RNA, 19 nt, Artificial Sequence
  Description of Artificial Sequence: Synthetic oligonucleotide
aagccguaagugugaccca

SEQ ID NO: 178416 - RNA, 19 nt, Artificial Sequence
  Description of Artificial Sequence: Synthetic oligonucleotide
ucguaaccuguguuauacu

SEQ ID NO: 178417 - RNA, 19 nt, Artificial Sequence
  Description of Artificial Sequence: Synthetic oligonucleotide
cucgggacauuuugccuug

SEQ ID NO: 178418 - RNA, 19 nt, Artificial Sequence
  Description of Artificial Sequence: Synthetic oligonucleotide
ucccgaaaauccccagaau

SEQ ID NO: 178419 - RNA, 19 nt, Artificial Sequence
  Description of Artificial Sequence: Synthetic oligonucleotide
ugcccuugucgauuuguau

SEQ ID NO: 178420 - RNA, 19 nt, Artificial Sequence
  Description of Artificial Sequence: Synthetic oligonucleotide
caaagggaagugaaucucu

SEQ ID NO: 178421 - RNA, 19 nt, Artificial Sequence
  Description of Artificial Sequence: Synthetic oligonucleotide
gaugacuguugcccuuguc

SEQ ID NO: 178422 - RNA, 19 nt, Artificial Sequence
  Description of Artificial Sequence: Synthetic oligonucleotide
agugugacccauggggcca

SEQ ID NO: 178423 - RNA, 19 nt, Artificial Sequence
  Description of Artificial Sequence: Synthetic oligonucleotide
uuacgaucacugucaguuu

SEQ ID NO: 178424 - RNA, 19 nt, Artificial Sequence
  Description of Artificial Sequence: Synthetic oligonucleotide
gugaggaaaguaucuuucu

SEQ ID NO: 178425 - RNA, 19 nt, Artificial Sequence
  Description of Artificial Sequence: Synthetic oligonucleotide
aaacucuaguagaguagua

SEQ ID NO: 178426 - RNA, 19 nt, Artificial Sequence
  Description of Artificial Sequence: Synthetic oligonucleotide
caaacucuaguagaguagu

SEQ ID NO: 178427 - RNA, 19 nt, Artificial Sequence
  Description of Artificial Sequence: Synthetic oligonucleotide
gcuagguuuacagcuacca

SEQ ID NO: 178428 - RNA, 19 nt, Artificial Sequence
  Description of Artificial Sequence: Synthetic oligonucleotide
uucggaaaguaagcccuuc

SEQ ID NO: 178429 - RNA, 19 nt, Artificial Sequence
  Description of Artificial Sequence: Synthetic oligonucleotide
gcuggccuuacaucguuug

SEQ ID NO: 178430 - RNA, 19 nt, Artificial Sequence
  Description of Artificial Sequence: Synthetic oligonucleotide
cuccacgcagacauagcca

SEQ ID NO: 178431 - RNA, 19 nt, Artificial Sequence
  Description of Artificial Sequence: Synthetic oligonucleotide
agacugaugcccaccugug

SEQ ID NO: 178432 - RNA, 19 nt, Artificial Sequence
  Description of Artificial Sequence: Synthetic oligonucleotide
acguuggcaguaguaagau

SEQ ID NO: 178433 - RNA, 19 nt, Artificial Sequence
  Description of Artificial Sequence: Synthetic oligonucleotide
gagaccaauuaauggguuu

SEQ ID NO: 178434 - RNA, 19 nt, Artificial Sequence
  Description of Artificial Sequence: Synthetic oligonucleotide
uguuagcagaucggagaau

SEQ ID NO: 178435 - RNA, 19 nt, Artificial Sequence
  Description of Artificial Sequence: Synthetic oligonucleotide
agcaucucgguaaguuuca

SEQ ID NO: 178436 - RNA, 19 nt, Artificial Sequence
  Description of Artificial Sequence: Synthetic oligonucleotide
gcgaagcugcaccggaggg

SEQ ID NO: 178437 - RNA, 19 nt, Artificial Sequence
  Description of Artificial Sequence: Synthetic oligonucleotide
ccuuacaucguuugcagua

SEQ ID NO: 178438 - RNA, 19 nt, Artificial Sequence
  Description of Artificial Sequence: Synthetic oligonucleotide
uugcuccacgaaagguccu

SEQ ID NO: 178439 - RNA, 19 nt, Artificial Sequence
  Description of Artificial Sequence: Synthetic oligonucleotide
agucguaaccuguguuaua

SEQ ID NO: 178440 - RNA, 19 nt, Artificial Sequence
  Description of Artificial Sequence: Synthetic oligonucleotide
cgaguucuuuauaucgagc

SEQ ID NO: 178441 - RNA, 19 nt, Artificial Sequence
  Description of Artificial Sequence: Synthetic oligonucleotide
gcugaggauaggauaccag

SEQ ID NO: 178442 - RNA, 19 nt, Artificial Sequence
  Description of Artificial Sequence: Synthetic oligonucleotide
augggagucaaggucuaua

SEQ ID NO: 178443 - RNA, 19 nt, Artificial Sequence
  Description of Artificial Sequence: Synthetic oligonucleotide
cgguagauacguuuuagca

SEQ ID NO: 178444 - RNA, 19 nt, Artificial Sequence
  Description of Artificial Sequence: Synthetic oligonucleotide
agagaccaauuaauggguu

SEQ ID NO: 178445 - RNA, 19 nt, Artificial Sequence
  Description of Artificial Sequence: Synthetic oligonucleotide
ucuugauaauacggacguu

SEQ ID NO: 178446 - RNA, 19 nt, Artificial Sequence
  Description of Artificial Sequence: Synthetic oligonucleotide
guagcuagguuuacagcua

SEQ ID NO: 178447 - RNA, 19 nt, Artificial Sequence
  Description of Artificial Sequence: Synthetic oligonucleotide
ucaaucgaauaagccuguu

SEQ ID NO: 178448 - RNA, 19 nt, Artificial Sequence
  Description of Artificial Sequence: Synthetic oligonucleotide
caugcauccgauggcaucu

SEQ ID NO: 178449 - RNA, 19 nt, Artificial Sequence
  Description of Artificial Sequence: Synthetic oligonucleotide
guaaugcauguggucagaa

SEQ ID NO: 178450 - RNA, 19 nt, Artificial Sequence
  Description of Artificial Sequence: Synthetic oligonucleotide
agaaguccgaaaggcguua

SEQ ID NO: 178451 - RNA, 19 nt, Artificial Sequence
  Description of Artificial Sequence: Synthetic oligonucleotide
gccauagucguaaccugug

SEQ ID NO: 178452 - RNA, 19 nt, Artificial Sequence
  Description of Artificial Sequence: Synthetic oligonucleotide
cucaaucgaauaagccugu

SEQ ID NO: 178453 - RNA, 19 nt, Artificial Sequence
  Description of Artificial Sequence: Synthetic oligonucleotide
agauacguuuuagcaugau

SEQ ID NO: 178454 - RNA, 19 nt, Artificial Sequence
  Description of Artificial Sequence: Synthetic oligonucleotide
gggcuugguacauacucaa

SEQ ID NO: 178455 - RNA, 19 nt, Artificial Sequence
  Description of Artificial Sequence: Synthetic oligonucleotide
cauagucguaaccuguguu

SEQ ID NO: 178456 - RNA, 19 nt, Artificial Sequence
  Description of Artificial Sequence: Synthetic oligonucleotide
gugucuuguuaucccgaaa

SEQ ID NO: 178457 - RNA, 19 nt, Artificial Sequence
  Description of Artificial Sequence: Synthetic oligonucleotide
gugcgaagcugcaccggag

SEQ ID NO: 178458 - RNA, 19 nt, Artificial Sequence
  Description of Artificial Sequence: Synthetic oligonucleotide
gaaguccgaaaggcguuaa

SEQ ID NO: 178459 - RNA, 19 nt, Artificial Sequence
  Description of Artificial Sequence: Synthetic oligonucleotide
caccccacucaaucgaaua

SEQ ID NO: 178460 - RNA, 19 nt, Artificial Sequence
  Description of Artificial Sequence: Synthetic oligonucleotide
gggucauaguaaguuccug

SEQ ID NO: 178461 - RNA, 19 nt, Artificial Sequence
  Description of Artificial Sequence: Synthetic oligonucleotide
cucuucgaucguuuccucu

SEQ ID NO: 178462 - RNA, 19 nt, Artificial Sequence
  Description of Artificial Sequence: Synthetic oligonucleotide
cacccggggagccaaaccu

SEQ ID NO: 178463 - RNA, 19 nt, Artificial Sequence
  Description of Artificial Sequence: Synthetic oligonucleotide
uccacccggggagccaaac

SEQ ID NO: 178464 - RNA, 19 nt, Artificial Sequence
  Description of Artificial Sequence: Synthetic oligonucleotide
gacuguugcccuugucgau

SEQ ID NO: 178465 - RNA, 19 nt, Artificial Sequence
  Description of Artificial Sequence: Synthetic oligonucleotide
gggagucaaggucuauaaa

SEQ ID NO: 178466 - RNA, 19 nt, Artificial Sequence
  Description of Artificial Sequence: Synthetic oligonucleotide
cggaaaguaagcccuucuc

SEQ ID NO: 178467 - RNA, 19 nt, Artificial Sequence
  Description of Artificial Sequence: Synthetic oligonucleotide
ccuauuccugaaguccaac

SEQ ID NO: 178468 - RNA, 19 nt, Artificial Sequence
  Description of Artificial Sequence: Synthetic oligonucleotide
uaguagccaguagcagaau

SEQ ID NO: 178469 - RNA, 19 nt, Artificial Sequence
  Description of Artificial Sequence: Synthetic oligonucleotide
acggacguuggcaguagua

SEQ ID NO: 178470 - RNA, 19 nt, Artificial Sequence
  Description of Artificial Sequence: Synthetic oligonucleotide
aaccuguguuauacuccuu

SEQ ID NO: 178471 - RNA, 19 nt, Artificial Sequence
  Description of Artificial Sequence: Synthetic oligonucleotide
cuccacucuuaaucgaguu

SEQ ID NO: 178472 - RNA, 19 nt, Artificial Sequence
  Description of Artificial Sequence: Synthetic oligonucleotide
ccuaucucggaaauauuuu

SEQ ID NO: 178473 - RNA, 19 nt, Artificial Sequence
  Description of Artificial Sequence: Synthetic oligonucleotide
guacugguauggauguuuu

SEQ ID NO: 178474 - RNA, 19 nt, Artificial Sequence
  Description of Artificial Sequence: Synthetic oligonucleotide
ccacccggggagccaaacc

SEQ ID NO: 178475 - RNA, 19 nt, Artificial Sequence
  Description of Artificial Sequence: Synthetic oligonucleotide
ccuggcgugucucuccaga

SEQ ID NO: 178476 - RNA, 19 nt, Artificial Sequence
  Description of Artificial Sequence: Synthetic oligonucleotide
gcguuaagaaucucuucuu

SEQ ID NO: 178477 - RNA, 19 nt, Artificial Sequence
  Description of Artificial Sequence: Synthetic oligonucleotide
ggaggaggauaaucccugu

SEQ ID NO: 178478 - RNA, 19 nt, Artificial Sequence
  Description of Artificial Sequence: Synthetic oligonucleotide
cuugggccaguccuauaau

SEQ ID NO: 178479 - RNA, 19 nt, Artificial Sequence
  Description of Artificial Sequence: Synthetic oligonucleotide
acguagggcuccagcacuu

SEQ ID NO: 178480 - RNA, 19 nt, Artificial Sequence
  Description of Artificial Sequence: Synthetic oligonucleotide
gguuacgaucacugucagu

SEQ ID NO: 178481 - RNA, 19 nt, Artificial Sequence
  Description of Artificial Sequence: Synthetic oligonucleotide
caguaguaagauggacgua

SEQ ID NO: 178482 - RNA, 19 nt, Artificial Sequence
  Description of Artificial Sequence: Synthetic oligonucleotide
cuaauccaggauggcuaua

SEQ ID NO: 178483 - RNA, 19 nt, Artificial Sequence
  Description of Artificial Sequence: Synthetic oligonucleotide
cagaaugcaugucccuauu

SEQ ID NO: 178484 - RNA, 19 nt, Artificial Sequence
  Description of Artificial Sequence: Synthetic oligonucleotide
cuucgagagugaggaaagu

SEQ ID NO: 178485 - RNA, 19 nt, Artificial Sequence
  Description of Artificial Sequence: Synthetic oligonucleotide
cuccuaucucggaaauauu

SEQ ID NO: 178486 - RNA, 19 nt, Artificial Sequence
  Description of Artificial Sequence: Synthetic oligonucleotide
uccccucauccggccuuca

SEQ ID NO: 178487 - RNA, 19 nt, Artificial Sequence
  Description of Artificial Sequence: Synthetic oligonucleotide
ccuaauccaggauggcuau

SEQ ID NO: 178488 - RNA, 19 nt, Artificial Sequence
  Description of Artificial Sequence: Synthetic oligonucleotide
ccggggagccaaaccuuuc

SEQ ID NO: 178489 - RNA, 19 nt, Artificial Sequence
  Description of Artificial Sequence: Synthetic oligonucleotide
ggcaccccacucaaucgaa

SEQ ID NO: 178490 - RNA, 19 nt, Artificial Sequence
  Description of Artificial Sequence: Synthetic oligonucleotide
ccaaggggucauaguagua

SEQ ID NO: 178491 - RNA, 19 nt, Artificial Sequence
  Description of Artificial Sequence: Synthetic oligonucleotide
ccccucauccggccuucag

SEQ ID NO: 178492 - RNA, 19 nt, Artificial Sequence
  Description of Artificial Sequence: Synthetic oligonucleotide
cggacguuggcaguaguaa

SEQ ID NO: 178493 - RNA, 19 nt, Artificial Sequence
  Description of Artificial Sequence: Synthetic oligonucleotide
cguuaagaaucucuucuuu

SEQ ID NO: 178494 - RNA, 19 nt, Artificial Sequence
  Description of Artificial Sequence: Synthetic oligonucleotide
ggaugacuguugcccuugu

SEQ ID NO: 178495 - RNA, 19 nt, Artificial Sequence
  Description of Artificial Sequence: Synthetic oligonucleotide
cgaucguuuccucuuucuu

SEQ ID NO: 178496 - RNA, 19 nt, Artificial Sequence
  Description of Artificial Sequence: Synthetic oligonucleotide
gcaccccacucaaucgaau

SEQ ID NO: 178497 - RNA, 19 nt, Artificial Sequence
  Description of Artificial Sequence: Synthetic oligonucleotide
cccggggagccaaaccuuu

SEQ ID NO: 178498 - RNA, 19 nt, Artificial Sequence
  Description of Artificial Sequence: Synthetic oligonucleotide
aauauaacaucucagagug

SEQ ID NO: 178499 - RNA, 19 nt, Artificial Sequence
  Description of Artificial Sequence: Synthetic oligonucleotide
uguaauaugaaucaacucc

SEQ ID NO: 178500 - RNA, 19 nt, Artificial Sequence
  Description of Artificial Sequence: Synthetic oligonucleotide
aaaucaauagcagugaccc

SEQ ID NO: 178501 - RNA, 19 nt, Artificial Sequence
  Description of Artificial Sequence: Synthetic oligonucleotide
aagauuguauuuuauggcc

SEQ ID NO: 178502 - RNA, 19 nt, Artificial Sequence
  Description of Artificial Sequence: Synthetic oligonucleotide
ugaaaguugguaaauaacg

SEQ ID NO: 178503 - RNA, 19 nt, Artificial Sequence
  Description of Artificial Sequence: Synthetic oligonucleotide
auuuaagcaaguuagcgcc

SEQ ID NO: 178504 - RNA, 19 nt, Artificial Sequence
  Description of Artificial Sequence: Synthetic oligonucleotide
aaauauuguaauaugaauc

SEQ ID NO: 178505 - RNA, 19 nt, Artificial Sequence
  Description of Artificial Sequence: Synthetic oligonucleotide
uaaauaacggcuaaccucc

SEQ ID NO: 178506 - RNA, 19 nt, Artificial Sequence
  Description of Artificial Sequence: Synthetic oligonucleotide
aauggaguaagaauuacgg

SEQ ID NO: 178507 - RNA, 19 nt, Artificial Sequence
  Description of Artificial Sequence: Synthetic oligonucleotide
aaguuauuauuuguuaacc

SEQ ID NO: 178508 - RNA, 19 nt, Artificial Sequence
  Description of Artificial Sequence: Synthetic oligonucleotide
uauaugagacugaagacag

SEQ ID NO: 178509 - RNA, 19 nt, Artificial Sequence
  Description of Artificial Sequence: Synthetic oligonucleotide
aaauacuauacauucccag

SEQ ID NO: 178510 - RNA, 19 nt, Artificial Sequence
  Description of Artificial Sequence: Synthetic oligonucleotide
guaagaauuacggaaaugg

SEQ ID NO: 178511 - RNA, 19 nt, Artificial Sequence
  Description of Artificial Sequence: Synthetic oligonucleotide
caugcauucgucuauaaag

SEQ ID NO: 178512 - RNA, 19 nt, Artificial Sequence
  Description of Artificial Sequence: Synthetic oligonucleotide
uauuauguguucaugaaaa

SEQ ID NO: 178513 - RNA, 19 nt, Artificial Sequence
  Description of Artificial Sequence: Synthetic oligonucleotide
agauaguuauuucuucucc

SEQ ID NO: 178514 - RNA, 19 nt, Artificial Sequence
  Description of Artificial Sequence: Synthetic oligonucleotide
aauagcuagacccaucaga

SEQ ID NO: 178515 - RNA, 19 nt, Artificial Sequence
  Description of Artificial Sequence: Synthetic oligonucleotide
cugguuacgaucuuuaccc

SEQ ID NO: 178516 - RNA, 19 nt, Artificial Sequence
  Description of Artificial Sequence: Synthetic oligonucleotide
aauacuauacauucccaga

SEQ ID NO: 178517 - RNA, 19 nt, Artificial Sequence
  Description of Artificial Sequence: Synthetic oligonucleotide
aacaugugaaucaaauuac

SEQ ID NO: 178518 - RNA, 19 nt, Artificial Sequence
  Description of Artificial Sequence: Synthetic oligonucleotide
uaaaagauuagguucuuga

SEQ ID NO: 178519 - RNA, 19 nt, Artificial Sequence
  Description of Artificial Sequence: Synthetic oligonucleotide
ugcauuauuuuaaugguac

SEQ ID NO: 178520 - RNA, 19 nt, Artificial Sequence
  Description of Artificial Sequence: Synthetic oligonucleotide
agaacuucgguuuguacgg

SEQ ID NO: 178521 - RNA, 19 nt, Artificial Sequence
  Description of Artificial Sequence: Synthetic oligonucleotide
aucuagauaagauaaacaa

SEQ ID NO: 178522 - RNA, 19 nt, Artificial Sequence
  Description of Artificial Sequence: Synthetic oligonucleotide
ucugcauccaaauauaaua

SEQ ID NO: 178523 - RNA, 19 nt, Artificial Sequence
  Description of Artificial Sequence: Synthetic oligonucleotide
ugcuuaauagaaaauggac

SEQ ID NO: 178524 - RNA, 19 nt, Artificial Sequence
  Description of Artificial Sequence: Synthetic oligonucleotide
aguaccucaacuucugagg

SEQ ID NO: 178525 - RNA, 19 nt, Artificial Sequence
  Description of Artificial Sequence: Synthetic oligonucleotide
gucgcuaauauguacagag

SEQ ID NO: 178526 - RNA, 19 nt, Artificial Sequence
  Description of Artificial Sequence: Synthetic oligonucleotide
caaugcaggaaaauggucc

SEQ ID NO: 178527 - RNA, 19 nt, Artificial Sequence
  Description of Artificial Sequence: Synthetic oligonucleotide
aauuacgcaguuuagggua

SEQ ID NO: 178528 - RNA, 19 nt, Artificial Sequence
  Description of Artificial Sequence: Synthetic oligonucleotide
ugaauauuagcaccaugag

SEQ ID NO: 178529 - RNA, 19 nt, Artificial Sequence
  Description of Artificial Sequence: Synthetic oligonucleotide
uggaguaagaauuacggaa

SEQ ID NO: 178530 - RNA, 19 nt, Artificial Sequence
  Description of Artificial Sequence: Synthetic oligonucleotide
gagacuuuauaugagacug

SEQ ID NO: 178531 - RNA, 19 nt, Artificial Sequence
  Description of Artificial Sequence: Synthetic oligonucleotide
uaaugguacauugugacug

SEQ ID NO: 178532 - RNA, 19 nt, Artificial Sequence
  Description of Artificial Sequence: Synthetic oligonucleotide
cauuuaagcaaguuagcgc

SEQ ID NO: 178533 - RNA, 19 nt, Artificial Sequence
  Description of Artificial Sequence: Synthetic oligonucleotide
cagaacuucgguuuguacg

SEQ ID NO: 178534 - RNA, 19 nt, Artificial Sequence
  Description of Artificial Sequence: Synthetic oligonucleotide
auauauugcacuauaacca

SEQ ID NO: 178535 - RNA, 19 nt, Artificial Sequence
  Description of Artificial Sequence: Synthetic oligonucleotide
caucacacacauuucaggg

SEQ ID NO: 178536 - RNA, 19 nt, Artificial Sequence
  Description of Artificial Sequence: Synthetic oligonucleotide
ucugguuacgaucuuuacc

SEQ ID NO: 178537 - RNA, 19 nt, Artificial Sequence
  Description of Artificial Sequence: Synthetic oligonucleotide
uguucgggaaugaucgucg

SEQ ID NO: 178538 - RNA, 19 nt, Artificial Sequence
  Description of Artificial Sequence: Synthetic oligonucleotide
agagcaaucauuguaagga

SEQ ID NO: 178539 - RNA, 19 nt, Artificial Sequence
  Description of Artificial Sequence: Synthetic oligonucleotide
acaucuagauaagauaaac

SEQ ID NO: 178540 - RNA, 19 nt, Artificial Sequence
  Description of Artificial Sequence: Synthetic oligonucleotide
ugugcagguauccucaucu

SEQ ID NO: 178541 - RNA, 19 nt, Artificial Sequence
  Description of Artificial Sequence: Synthetic oligonucleotide
uucucguacaauaaacugu

SEQ ID NO: 178542 - RNA, 19 nt, Artificial Sequence
  Description of Artificial Sequence: Synthetic oligonucleotide
uuaggguacuccauucacg

SEQ ID NO: 178543 - RNA, 19 nt, Artificial Sequence
  Description of Artificial Sequence: Synthetic oligonucleotide
ggaauuacgcaguuuaggg

SEQ ID NO: 178544 - RNA, 19 nt, Artificial Sequence
  Description of Artificial Sequence: Synthetic oligonucleotide
uuaacauuuaguguuucca

SEQ ID NO: 178545 - RNA, 19 nt, Artificial Sequence
  Description of Artificial Sequence: Synthetic oligonucleotide
auaacuucggaauuacgca

SEQ ID NO: 178546 - RNA, 19 nt, Artificial Sequence
  Description of Artificial Sequence: Synthetic oligonucleotide
aauuuagcagaggaagauc

SEQ ID NO: 178547 - RNA, 19 nt, Artificial Sequence
  Description of Artificial Sequence: Synthetic oligonucleotide
uugcuuaauagaaaaugga

SEQ ID NO: 178548 - RNA, 19 nt, Artificial Sequence
  Description of Artificial Sequence: Synthetic oligonucleotide
uaaaguacuaauguuugac

SEQ ID NO: 178549 - RNA, 19 nt, Artificial Sequence
  Description of Artificial Sequence: Synthetic oligonucleotide
augugaaucaaauuacagu

SEQ ID NO: 178550 - RNA, 19 nt, Artificial Sequence
  Description of Artificial Sequence: Synthetic oligonucleotide
uauaacaucucagagugaa

SEQ ID NO: 178551 - RNA, 19 nt, Artificial Sequence
  Description of Artificial Sequence: Synthetic oligonucleotide
acccuacuaacuuucgacc

SEQ ID NO: 178552 - RNA, 19 nt, Artificial Sequence
  Description of Artificial Sequence: Synthetic oligonucleotide
aauuacggaaaugguagag

SEQ ID NO: 178553 - RNA, 19 nt, Artificial Sequence
  Description of Artificial Sequence: Synthetic oligonucleotide
uuauguguucaugaaaaug

SEQ ID NO: 178554 - RNA, 19 nt, Artificial Sequence
  Description of Artificial Sequence: Synthetic oligonucleotide
uuacggaaaugguagagga

SEQ ID NO: 178555 - RNA, 19 nt, Artificial Sequence
  Description of Artificial Sequence: Synthetic oligonucleotide
uuauuauguguucaugaaa

SEQ ID NO: 178556 - RNA, 19 nt, Artificial Sequence
  Description of Artificial Sequence: Synthetic oligonucleotide
ucuucucguacaauaaacu

SEQ ID NO: 178557 - RNA, 19 nt, Artificial Sequence
  Description of Artificial Sequence: Synthetic oligonucleotide
acaucacacacauuucagg

SEQ ID NO: 178558 - RNA, 19 nt, Artificial Sequence
  Description of Artificial Sequence: Synthetic oligonucleotide
uaacuucggaauuacgcag

SEQ ID NO: 178559 - RNA, 19 nt, Artificial Sequence
  Description of Artificial Sequence: Synthetic oligonucleotide
uaagaauuacggaaauggu

SEQ ID NO: 178560 - RNA, 19 nt, Artificial Sequence
  Description of Artificial Sequence: Synthetic oligonucleotide
uauauugcacuauaaccaa

SEQ ID NO: 178561 - RNA, 19 nt, Artificial Sequence
  Description of Artificial Sequence: Synthetic oligonucleotide
uguauuuuauggccaauau

SEQ ID NO: 178562 - RNA, 19 nt, Artificial Sequence
  Description of Artificial Sequence: Synthetic oligonucleotide
ucugcguauacauuagacu

SEQ ID NO: 178563 - RNA, 19 nt, Artificial Sequence
  Description of Artificial Sequence: Synthetic oligonucleotide
acugcuugcauacaaaaua

SEQ ID NO: 178564 - RNA, 19 nt, Artificial Sequence
  Description of Artificial Sequence: Synthetic oligonucleotide
ucgucuauaaaguacuaau

SEQ ID NO: 178565 - RNA, 19 nt, Artificial Sequence
  Description of Artificial Sequence: Synthetic oligonucleotide
aguuuaggguacuccauuc

SEQ ID NO: 178566 - RNA, 19 nt, Artificial Sequence
  Description of Artificial Sequence: Synthetic oligonucleotide
ugguaaauaacggcuaacc

SEQ ID NO: 178567 - RNA, 19 nt, Artificial Sequence
  Description of Artificial Sequence: Synthetic oligonucleotide
cugaguuauagcccaaugc

SEQ ID NO: 178568 - RNA, 19 nt, Artificial Sequence
  Description of Artificial Sequence: Synthetic oligonucleotide
uuuaggguacuccauucac

SEQ ID NO: 178569 - RNA, 19 nt, Artificial Sequence
  Description of Artificial Sequence: Synthetic oligonucleotide
ucguuaccauuuuauaugc

SEQ ID NO: 178570 - RNA, 19 nt, Artificial Sequence
  Description of Artificial Sequence: Synthetic oligonucleotide
uggauuacguguacgauua

SEQ ID NO: 178571 - RNA, 19 nt, Artificial Sequence
  Description of Artificial Sequence: Synthetic oligonucleotide
acgaucuuuacccgugcgc

SEQ ID NO: 178572 - RNA, 19 nt, Artificial Sequence
  Description of Artificial Sequence: Synthetic oligonucleotide
uuaaccaauccuaggucug

SEQ ID NO: 178573 - RNA, 19 nt, Artificial Sequence
  Description of Artificial Sequence: Synthetic oligonucleotide
uuuaaccugcuuucaaugu

SEQ ID NO: 178574 - RNA, 19 nt, Artificial Sequence
  Description of Artificial Sequence: Synthetic oligonucleotide
cuucucguacaauaaacug

SEQ ID NO: 178575 - RNA, 19 nt, Artificial Sequence
  Description of Artificial Sequence: Synthetic oligonucleotide
auuacggaaaugguagagg

SEQ ID NO: 178576 - RNA, 19 nt, Artificial Sequence
  Description of Artificial Sequence: Synthetic oligonucleotide
gacgugugaauuuccaaug

SEQ ID NO: 178577 - RNA, 19 nt, Artificial Sequence
  Description of Artificial Sequence: Synthetic oligonucleotide
uacguguacgauuaucugu

SEQ ID NO: 178578 - RNA, 19 nt, Artificial Sequence
  Description of Artificial Sequence: Synthetic oligonucleotide
aaugguacauugugacugu

SEQ ID NO: 178579 - RNA, 19 nt, Artificial Sequence
  Description of Artificial Sequence: Synthetic oligonucleotide
ugauccucuccauaaauau

SEQ ID NO: 178580 - RNA, 19 nt, Artificial Sequence
  Description of Artificial Sequence: Synthetic oligonucleotide
uaggguacuccauucacga

SEQ ID NO: 178581 - RNA, 19 nt, Artificial Sequence
  Description of Artificial Sequence: Synthetic oligonucleotide
uacccuacuaacuuucgac

SEQ ID NO: 178582 - RNA, 19 nt, Artificial Sequence
  Description of Artificial Sequence: Synthetic oligonucleotide
aagcaaguuagcgccuugc

SEQ ID NO: 178583 - RNA, 19 nt, Artificial Sequence
  Description of Artificial Sequence: Synthetic oligonucleotide
auuacguguacgauuaucu

SEQ ID NO: 178584 - RNA, 19 nt, Artificial Sequence
  Description of Artificial Sequence: Synthetic oligonucleotide
cacuauaaccaaacaaaug

SEQ ID NO: 178585 - RNA, 19 nt, Artificial Sequence
  Description of Artificial Sequence: Synthetic oligonucleotide
acggcuaaccuccuaugac

SEQ ID NO: 178586 - RNA, 19 nt, Artificial Sequence
  Description of Artificial Sequence: Synthetic oligonucleotide
auuuagcagaggaagauca

SEQ ID NO: 178587 - RNA, 19 nt, Artificial Sequence
  Description of Artificial Sequence: Synthetic oligonucleotide
acagauucagugguacccc

SEQ ID NO: 178588 - RNA, 19 nt, Artificial Sequence
  Description of Artificial Sequence: Synthetic oligonucleotide
uacugcugaguuauagccc

SEQ ID NO: 178589 - RNA, 19 nt, Artificial Sequence
  Description of Artificial Sequence: Synthetic oligonucleotide
ugacgugugaauuuccaau

SEQ ID NO: 178590 - RNA, 19 nt, Artificial Sequence
  Description of Artificial Sequence: Synthetic oligonucleotide
guguacgauuaucuguucg

SEQ ID NO: 178591 - RNA, 19 nt, Artificial Sequence
  Description of Artificial Sequence: Synthetic oligonucleotide
aggaugauuaccacaaaug

SEQ ID NO: 178592 - RNA, 19 nt, Artificial Sequence
  Description of Artificial Sequence: Synthetic oligonucleotide
agauaagauaaacaaucuu

SEQ ID NO: 178593 - RNA, 19 nt, Artificial Sequence
  Description of Artificial Sequence: Synthetic oligonucleotide
uuacguguacgauuaucug

SEQ ID NO: 178594 - RNA, 19 nt, Artificial Sequence
  Description of Artificial Sequence: Synthetic oligonucleotide
uacgaucuuuacccgugcg

SEQ ID NO: 178595 - RNA, 19 nt, Artificial Sequence
  Description of Artificial Sequence: Synthetic oligonucleotide
acgauuaucuguucgggaa

SEQ ID NO: 178596 - RNA, 19 nt, Artificial Sequence
  Description of Artificial Sequence: Synthetic oligonucleotide
agagugaagguccuucaca

SEQ ID NO: 178597 - RNA, 19 nt, Artificial Sequence
  Description of Artificial Sequence: Synthetic oligonucleotide
aacacuucuuauagauuuc

SEQ ID NO: 178598 - RNA, 19 nt, Artificial Sequence
  Description of Artificial Sequence: Synthetic oligonucleotide
ucagacaaaguaccucaac

SEQ ID NO: 178599 - RNA, 19 nt, Artificial Sequence
  Description of Artificial Sequence: Synthetic oligonucleotide
aucgucguuuccuuugaag

SEQ ID NO: 178600 - RNA, 19 nt, Artificial Sequence
  Description of Artificial Sequence: Synthetic oligonucleotide
auaacggcuaaccuccuau

SEQ ID NO: 178601 - RNA, 19 nt, Artificial Sequence
  Description of Artificial Sequence: Synthetic oligonucleotide
uguugucgcuaauauguac

SEQ ID NO: 178602 - RNA, 19 nt, Artificial Sequence
  Description of Artificial Sequence: Synthetic oligonucleotide
ucggaauuacgcaguuuag

SEQ ID NO: 178603 - RNA, 19 nt, Artificial Sequence
  Description of Artificial Sequence: Synthetic oligonucleotide
ugcguauacauuagacuuc

SEQ ID NO: 178604 - RNA, 19 nt, Artificial Sequence
  Description of Artificial Sequence: Synthetic oligonucleotide
uuuaagcaaguuagcgccu

SEQ ID NO: 178605 - RNA, 19 nt, Artificial Sequence
  Description of Artificial Sequence: Synthetic oligonucleotide
uuggauuacguguacgauu

SEQ ID NO: 178606 - RNA, 19 nt, Artificial Sequence
  Description of Artificial Sequence: Synthetic oligonucleotide
aucuuuacccgugcgcagc

SEQ ID NO: 178607 - RNA, 19 nt, Artificial Sequence
  Description of Artificial Sequence: Synthetic oligonucleotide
uugauccucuccauaaaua

SEQ ID NO: 178608 - RNA, 19 nt, Artificial Sequence
  Description of Artificial Sequence: Synthetic oligonucleotide
ugguaacaguuacauuuug

SEQ ID NO: 178609 - RNA, 19 nt, Artificial Sequence
  Description of Artificial Sequence: Synthetic oligonucleotide
uuuguacggcucuguacag

SEQ ID NO: 178610 - RNA, 19 nt, Artificial Sequence
  Description of Artificial Sequence: Synthetic oligonucleotide
cauacccuacuaacuuucg

SEQ ID NO: 178611 - RNA, 19 nt, Artificial Sequence
  Description of Artificial Sequence: Synthetic oligonucleotide
uguacggcucuguacagau

SEQ ID NO: 178612 - RNA, 19 nt, Artificial Sequence
  Description of Artificial Sequence: Synthetic oligonucleotide
augguagaggaaauauaac

SEQ ID NO: 178613 - RNA, 19 nt, Artificial Sequence
  Description of Artificial Sequence: Synthetic oligonucleotide
ugugacuguguaccauuug

SEQ ID NO: 178614 - RNA, 19 nt, Artificial Sequence
  Description of Artificial Sequence: Synthetic oligonucleotide
accccagguacuuuucuag

SEQ ID NO: 178615 - RNA, 19 nt, Artificial Sequence
  Description of Artificial Sequence: Synthetic oligonucleotide
ugguuacgaucuuuacccg

SEQ ID NO: 178616 - RNA, 19 nt, Artificial Sequence
  Description of Artificial Sequence: Synthetic oligonucleotide
auagcuagacccaucagau

SEQ ID NO: 178617 - RNA, 19 nt, Artificial Sequence
  Description of Artificial Sequence: Synthetic oligonucleotide
gacuuagugcauuauuuua

SEQ ID NO: 178618 - RNA, 19 nt, Artificial Sequence
  Description of Artificial Sequence: Synthetic oligonucleotide
cuuucgaccaggaagauuu

SEQ ID NO: 178619 - RNA, 19 nt, Artificial Sequence
  Description of Artificial Sequence: Synthetic oligonucleotide
guacgauuaucuguucggg

SEQ ID NO: 178620 - RNA, 19 nt, Artificial Sequence
  Description of Artificial Sequence: Synthetic oligonucleotide
cagccgguuaccuucacug

SEQ ID NO: 178621 - RNA, 19 nt, Artificial Sequence
  Description of Artificial Sequence: Synthetic oligonucleotide
guuauagcccaaugcagga

SEQ ID NO: 178622 - RNA, 19 nt, Artificial Sequence
  Description of Artificial Sequence: Synthetic oligonucleotide
ucgcuaauauguacagaga

SEQ ID NO: 178623 - RNA, 19 nt, Artificial Sequence
  Description of Artificial Sequence: Synthetic oligonucleotide
uaaccugcuuucaauguuu

SEQ ID NO: 178624 - RNA, 19 nt, Artificial Sequence
  Description of Artificial Sequence: Synthetic oligonucleotide
uuacgaucuuuacccgugc

SEQ ID NO: 178625 - RNA, 19 nt, Artificial Sequence
  Description of Artificial Sequence: Synthetic oligonucleotide
aacuucgguuuguacggcu

SEQ ID NO: 178626 - RNA, 19 nt, Artificial Sequence
  Description of Artificial Sequence: Synthetic oligonucleotide
gaucuuuacccgugcgcag

SEQ ID NO: 178627 - RNA, 19 nt, Artificial Sequence
  Description of Artificial Sequence: Synthetic oligonucleotide
ucucuaaguugaaauucau

SEQ ID NO: 178628 - RNA, 19 nt, Artificial Sequence
  Description of Artificial Sequence: Synthetic oligonucleotide
agacuuagugcauuauuuu

SEQ ID NO: 178629 - RNA, 19 nt, Artificial Sequence
  Description of Artificial Sequence: Synthetic oligonucleotide
cuaauuucugcguauacau

SEQ ID NO: 178630 - RNA, 19 nt, Artificial Sequence
  Description of Artificial Sequence: Synthetic oligonucleotide
aaggucauucuaccuuggu

SEQ ID NO: 178631 - RNA, 19 nt, Artificial Sequence
  Description of Artificial Sequence: Synthetic oligonucleotide
uggaaagcaugcauucguc

SEQ ID NO: 178632 - RNA, 19 nt, Artificial Sequence
  Description of Artificial Sequence: Synthetic oligonucleotide
ucuugccuacuacuugucu

SEQ ID NO: 178633 - RNA, 19 nt, Artificial Sequence
  Description of Artificial Sequence: Synthetic oligonucleotide
ugcagguauccucaucuaa

SEQ ID NO: 178634 - RNA, 19 nt, Artificial Sequence
  Description of Artificial Sequence: Synthetic oligonucleotide
ucuuuacccgugcgcagcc

SEQ ID NO: 178635 - RNA, 19 nt, Artificial Sequence
  Description of Artificial Sequence: Synthetic oligonucleotide
guuacgaucuuuacccgug

SEQ ID NO: 178636 - RNA, 19 nt, Artificial Sequence
  Description of Artificial Sequence: Synthetic oligonucleotide
agagacuuagugcauuauu

SEQ ID NO: 178637 - RNA, 19 nt, Artificial Sequence
  Description of Artificial Sequence: Synthetic oligonucleotide
ugaucgucguuuccuuuga

SEQ ID NO: 178638 - RNA, 19 nt, Artificial Sequence
  Description of Artificial Sequence: Synthetic oligonucleotide
gauuacguguacgauuauc

SEQ ID NO: 178639 - RNA, 19 nt, Artificial Sequence
  Description of Artificial Sequence: Synthetic oligonucleotide
cagagaucuaggaugauua

SEQ ID NO: 178640 - RNA, 19 nt, Artificial Sequence
  Description of Artificial Sequence: Synthetic oligonucleotide
gaauuacggaaaugguaga

SEQ ID NO: 178641 - RNA, 19 nt, Artificial Sequence
  Description of Artificial Sequence: Synthetic oligonucleotide
auuacgcaguuuaggguac

SEQ ID NO: 178642 - RNA, 19 nt, Artificial Sequence
  Description of Artificial Sequence: Synthetic oligonucleotide
auuucugcguauacauuag

SEQ ID NO: 178643 - RNA, 19 nt, Artificial Sequence
  Description of Artificial Sequence: Synthetic oligonucleotide
aguuacauuacaaggucau

SEQ ID NO: 178644 - RNA, 19 nt, Artificial Sequence
  Description of Artificial Sequence: Synthetic oligonucleotide
agaguaggcauacccuacu

SEQ ID NO: 178645 - RNA, 19 nt, Artificial Sequence
  Description of Artificial Sequence: Synthetic oligonucleotide
agauuguauuuuauggcca

SEQ ID NO: 178646 - RNA, 19 nt, Artificial Sequence
  Description of Artificial Sequence: Synthetic oligonucleotide
ugaguaccaauagcuagac

SEQ ID NO: 178647 - RNA, 19 nt, Artificial Sequence
  Description of Artificial Sequence: Synthetic oligonucleotide
caccaugaguaccaauagc

SEQ ID NO: 178648 - RNA, 19 nt, Artificial Sequence
  Description of Artificial Sequence: Synthetic oligonucleotide
acaggacaugaaauggcac

SEQ ID NO: 178649 - RNA, 19 nt, Artificial Sequence
  Description of Artificial Sequence: Synthetic oligonucleotide
uaaccuccuaugacgugug

SEQ ID NO: 178650 - RNA, 19 nt, Artificial Sequence
  Description of Artificial Sequence: Synthetic oligonucleotide
ugcauucgucuauaaagua

SEQ ID NO: 178651 - RNA, 19 nt, Artificial Sequence
  Description of Artificial Sequence: Synthetic oligonucleotide
augcauucgucuauaaagu

SEQ ID NO: 178652 - RNA, 19 nt, Artificial Sequence
  Description of Artificial Sequence: Synthetic oligonucleotide
ucgggaaugaucgucguuu

SEQ ID NO: 178653 - RNA, 19 nt, Artificial Sequence
  Description of Artificial Sequence: Synthetic oligonucleotide
gaauuacgcaguuuagggu

SEQ ID NO: 178654 - RNA, 19 nt, Artificial Sequence
  Description of Artificial Sequence: Synthetic oligonucleotide
uaagcaaguuagcgccuug

SEQ ID NO: 178655 - RNA, 19 nt, Artificial Sequence
  Description of Artificial Sequence: Synthetic oligonucleotide
uucgucuauaaaguacuaa

SEQ ID NO: 178656 - RNA, 19 nt, Artificial Sequence
  Description of Artificial Sequence: Synthetic oligonucleotide
gacuuuauaugagacugaa

SEQ ID NO: 178657 - RNA, 19 nt, Artificial Sequence
  Description of Artificial Sequence: Synthetic oligonucleotide
uacggaaaugguagaggaa

SEQ ID NO: 178658 - RNA, 19 nt, Artificial Sequence
  Description of Artificial Sequence: Synthetic oligonucleotide
aaccugcuuucaauguuuc

SEQ ID NO: 178659 - RNA, 19 nt, Artificial Sequence
  Description of Artificial Sequence: Synthetic oligonucleotide
aauaacggcuaaccuccua

SEQ ID NO: 178660 - RNA, 19 nt, Artificial Sequence
  Description of Artificial Sequence: Synthetic oligonucleotide
cuccugucuauacagaaaa

SEQ ID NO: 178661 - RNA, 19 nt, Artificial Sequence
  Description of Artificial Sequence: Synthetic oligonucleotide
guucguuaccauuuuauau

SEQ ID NO: 178662 - RNA, 19 nt, Artificial Sequence
  Description of Artificial Sequence: Synthetic oligonucleotide
auacccuacuaacuuucga

SEQ ID NO: 178663 - RNA, 19 nt, Artificial Sequence
  Description of Artificial Sequence: Synthetic oligonucleotide
ggguccacuaaaauacugg

SEQ ID NO: 178664 - RNA, 19 nt, Artificial Sequence
  Description of Artificial Sequence: Synthetic oligonucleotide
uugguaaauaacggcuaac

SEQ ID NO: 178665 - RNA, 19 nt, Artificial Sequence
  Description of Artificial Sequence: Synthetic oligonucleotide
uuucuaauuucugcguaua

SEQ ID NO: 178666 - RNA, 19 nt, Artificial Sequence
  Description of Artificial Sequence: Synthetic oligonucleotide
ggaugauuaccacaaaugu

SEQ ID NO: 178667 - RNA, 19 nt, Artificial Sequence
  Description of Artificial Sequence: Synthetic oligonucleotide
agccgguuaccuucacugg

SEQ ID NO: 178668 - RNA, 19 nt, Artificial Sequence
  Description of Artificial Sequence: Synthetic oligonucleotide
caaucauuguaaggauugc

SEQ ID NO: 178669 - RNA, 19 nt, Artificial Sequence
  Description of Artificial Sequence: Synthetic oligonucleotide
agcaaguuagcgccuugcu

SEQ ID NO: 178670 - RNA, 19 nt, Artificial Sequence
  Description of Artificial Sequence: Synthetic oligonucleotide
uuaaaccgaacagcuuaca

SEQ ID NO: 178671 - RNA, 19 nt, Artificial Sequence
  Description of Artificial Sequence: Synthetic oligonucleotide
ugcuugcauacaaaauaua

SEQ ID NO: 178672 - RNA, 19 nt, Artificial Sequence
  Description of Artificial Sequence: Synthetic oligonucleotide
agaaagacugaaacauacu

SEQ ID NO: 178673 - RNA, 19 nt, Artificial Sequence
  Description of Artificial Sequence: Synthetic oligonucleotide
aggucauucuaccuugguu

SEQ ID NO: 178674 - RNA, 19 nt, Artificial Sequence
  Description of Artificial Sequence: Synthetic oligonucleotide
gaggguuauuauguguuca

SEQ ID NO: 178675 - RNA, 19 nt, Artificial Sequence
  Description of Artificial Sequence: Synthetic oligonucleotide
aaguuagcgccuugcugaa

SEQ ID NO: 178676 - RNA, 19 nt, Artificial Sequence
  Description of Artificial Sequence: Synthetic oligonucleotide
uuaccuucacuggaggcau

SEQ ID NO: 178677 - RNA, 19 nt, Artificial Sequence
  Description of Artificial Sequence: Synthetic oligonucleotide
ugcugaauucagccuuugu

SEQ ID NO: 178678 - RNA, 19 nt, Artificial Sequence
  Description of Artificial Sequence: Synthetic oligonucleotide
aguaugcuucaaaauuuca

SEQ ID NO: 178679 - RNA, 19 nt, Artificial Sequence
  Description of Artificial Sequence: Synthetic oligonucleotide
uuucgaccaggaagauuug

SEQ ID NO: 178680 - RNA, 19 nt, Artificial Sequence
  Description of Artificial Sequence: Synthetic oligonucleotide
cagacaaaguaccucaacu

SEQ ID NO: 178681 - RNA, 19 nt, Artificial Sequence
  Description of Artificial Sequence: Synthetic oligonucleotide
uuauacugccuaagcugau

SEQ ID NO: 178682 - RNA, 19 nt, Artificial Sequence
  Description of Artificial Sequence: Synthetic oligonucleotide
caauagcuagacccaucag

SEQ ID NO: 178683 - RNA, 19 nt, Artificial Sequence
  Description of Artificial Sequence: Synthetic oligonucleotide
gguccacuaaaauacugga

SEQ ID NO: 178684 - RNA, 19 nt, Artificial Sequence
  Description of Artificial Sequence: Synthetic oligonucleotide
cugcguauacauuagacuu

SEQ ID NO: 178685 - RNA, 19 nt, Artificial Sequence
  Description of Artificial Sequence: Synthetic oligonucleotide
cacaucccuuccaauaaca

SEQ ID NO: 178686 - RNA, 19 nt, Artificial Sequence
  Description of Artificial Sequence: Synthetic oligonucleotide
uugugacuguguaccauuu

SEQ ID NO: 178687 - RNA, 19 nt, Artificial Sequence
  Description of Artificial Sequence: Synthetic oligonucleotide
aagagacuuagugcauuau

SEQ ID NO: 178688 - RNA, 19 nt, Artificial Sequence
  Description of Artificial Sequence: Synthetic oligonucleotide
cuuccuggagacuuuauau

SEQ ID NO: 178689 - RNA, 19 nt, Artificial Sequence
  Description of Artificial Sequence: Synthetic oligonucleotide
gcaccaugaguaccaauag

SEQ ID NO: 178690 - RNA, 19 nt, Artificial Sequence
  Description of Artificial Sequence: Synthetic oligonucleotide
agcuuacagaugaugugug

SEQ ID NO: 178691 - RNA, 19 nt, Artificial Sequence
  Description of Artificial Sequence: Synthetic oligonucleotide
guaccaauagcuagaccca

SEQ ID NO: 178692 - RNA, 19 nt, Artificial Sequence
  Description of Artificial Sequence: Synthetic oligonucleotide
aguugguaaauaacggcua

SEQ ID NO: 178693 - RNA, 19 nt, Artificial Sequence
  Description of Artificial Sequence: Synthetic oligonucleotide
ggaguaagaauuacggaaa

SEQ ID NO: 178694 - RNA, 19 nt, Artificial Sequence
  Description of Artificial Sequence: Synthetic oligonucleotide
acguguacgauuaucuguu

SEQ ID NO: 178695 - RNA, 19 nt, Artificial Sequence
  Description of Artificial Sequence: Synthetic oligonucleotide
uuaagcaaguuagcgccuu

SEQ ID NO: 178696 - RNA, 19 nt, Artificial Sequence
  Description of Artificial Sequence: Synthetic oligonucleotide
ucuguucgggaaugaucgu

SEQ ID NO: 178697 - RNA, 19 nt, Artificial Sequence
  Description of Artificial Sequence: Synthetic oligonucleotide
gcuuacagaugaugugugc

SEQ ID NO: 178698 - RNA, 19 nt, Artificial Sequence
  Description of Artificial Sequence: Synthetic oligonucleotide
uuaccacaaaugugauuua

SEQ ID NO: 178699 - RNA, 19 nt, Artificial Sequence
  Description of Artificial Sequence: Synthetic oligonucleotide
uuagcgccuugcugaauuc

SEQ ID NO: 178700 - RNA, 19 nt, Artificial Sequence
  Description of Artificial Sequence: Synthetic oligonucleotide
auucagugguaccccuacu

SEQ ID NO: 178701 - RNA, 19 nt, Artificial Sequence
  Description of Artificial Sequence: Synthetic oligonucleotide
gaguaagaauuacggaaau

SEQ ID NO: 178702 - RNA, 19 nt, Artificial Sequence
  Description of Artificial Sequence: Synthetic oligonucleotide
uucgguuuguacggcucug

SEQ ID NO: 178703 - RNA, 19 nt, Artificial Sequence
  Description of Artificial Sequence: Synthetic oligonucleotide
gugugaauuuccaauggua

SEQ ID NO: 178704 - RNA, 19 nt, Artificial Sequence
  Description of Artificial Sequence: Synthetic oligonucleotide
ucccuuccaauaacacuau

SEQ ID NO: 178705 - RNA, 19 nt, Artificial Sequence
  Description of Artificial Sequence: Synthetic oligonucleotide
uuguacggcucuguacaga

SEQ ID NO: 178706 - RNA, 19 nt, Artificial Sequence
  Description of Artificial Sequence: Synthetic oligonucleotide
cuguucgggaaugaucguc

SEQ ID NO: 178707 - RNA, 19 nt, Artificial Sequence
  Description of Artificial Sequence: Synthetic oligonucleotide
uuagccucccuuggauuac

SEQ ID NO: 178708 - RNA, 19 nt, Artificial Sequence
  Description of Artificial Sequence: Synthetic oligonucleotide
agacuuuauaugagacuga

SEQ ID NO: 178709 - RNA, 19 nt, Artificial Sequence
  Description of Artificial Sequence: Synthetic oligonucleotide
ucccuuggauuacguguac

SEQ ID NO: 178710 - RNA, 19 nt, Artificial Sequence
  Description of Artificial Sequence: Synthetic oligonucleotide
uagcuagacccaucagauc

SEQ ID NO: 178711 - RNA, 19 nt, Artificial Sequence
  Description of Artificial Sequence: Synthetic oligonucleotide
aaauaacggcuaaccuccu

SEQ ID NO: 178712 - RNA, 19 nt, Artificial Sequence
  Description of Artificial Sequence: Synthetic oligonucleotide
agcgccuugcugaauucag

SEQ ID NO: 178713 - RNA, 19 nt, Artificial Sequence
  Description of Artificial Sequence: Synthetic oligonucleotide
cucguacaauaaacuguuc

SEQ ID NO: 178714 - RNA, 19 nt, Artificial Sequence
  Description of Artificial Sequence: Synthetic oligonucleotide
aaccuccuaugacguguga

SEQ ID NO: 178715 - RNA, 19 nt, Artificial Sequence
  Description of Artificial Sequence: Synthetic oligonucleotide
uaccuugguuaauuaucua

SEQ ID NO: 178716 - RNA, 19 nt, Artificial Sequence
  Description of Artificial Sequence: Synthetic oligonucleotide
cggcuaaccuccuaugacg

SEQ ID NO: 178717 - RNA, 19 nt, Artificial Sequence
  Description of Artificial Sequence: Synthetic oligonucleotide
cuguguaccauuuguuggu

SEQ ID NO: 178718 - RNA, 19 nt, Artificial Sequence
  Description of Artificial Sequence: Synthetic oligonucleotide
uucgggaaugaucgucguu

SEQ ID NO: 178719 - RNA, 19 nt, Artificial Sequence
  Description of Artificial Sequence: Synthetic oligonucleotide
ugccuacuacuugucuuug

SEQ ID NO: 178720 - RNA, 19 nt, Artificial Sequence
  Description of Artificial Sequence: Synthetic oligonucleotide
accaauccuaggucuguuu

SEQ ID NO: 178721 - RNA, 19 nt, Artificial Sequence
  Description of Artificial Sequence: Synthetic oligonucleotide
ugguaccccuacucggagu

SEQ ID NO: 178722 - RNA, 19 nt, Artificial Sequence
  Description of Artificial Sequence: Synthetic oligonucleotide
caucccuuccaauaacacu

SEQ ID NO: 178723 - RNA, 19 nt, Artificial Sequence
  Description of Artificial Sequence: Synthetic oligonucleotide
uuacccgugcgcagccggu

SEQ ID NO: 178724 - RNA, 19 nt, Artificial Sequence
  Description of Artificial Sequence: Synthetic oligonucleotide
gagcaaucauuguaaggau

SEQ ID NO: 178725 - RNA, 19 nt, Artificial Sequence
  Description of Artificial Sequence: Synthetic oligonucleotide
uguguaccauuuguugguu

SEQ ID NO: 178726 - RNA, 19 nt, Artificial Sequence
  Description of Artificial Sequence: Synthetic oligonucleotide
ugccuaagcugauguuuau

SEQ ID NO: 178727 - RNA, 19 nt, Artificial Sequence
  Description of Artificial Sequence: Synthetic oligonucleotide
ugcugaauauuagcaccau

SEQ ID NO: 178728 - RNA, 19 nt, Artificial Sequence
  Description of Artificial Sequence: Synthetic oligonucleotide
gccuacuacuugucuuugg

SEQ ID NO: 178729 - RNA, 19 nt, Artificial Sequence
  Description of Artificial Sequence: Synthetic oligonucleotide
aaaguacaucagaggcaga

SEQ ID NO: 178730 - RNA, 19 nt, Artificial Sequence
  Description of Artificial Sequence: Synthetic oligonucleotide
uaccccuacucggaguuau

SEQ ID NO: 178731 - RNA, 19 nt, Artificial Sequence
  Description of Artificial Sequence: Synthetic oligonucleotide
uagcgccuugcugaauuca

SEQ ID NO: 178732 - RNA, 19 nt, Artificial Sequence
  Description of Artificial Sequence: Synthetic oligonucleotide
ccuuggauuacguguacga

SEQ ID NO: 178733 - RNA, 19 nt, Artificial Sequence
  Description of Artificial Sequence: Synthetic oligonucleotide
guuagcgccuugcugaauu

SEQ ID NO: 178734 - RNA, 19 nt, Artificial Sequence
  Description of Artificial Sequence: Synthetic oligonucleotide
aacuuucgaccaggaagau

SEQ ID NO: 178735 - RNA, 19 nt, Artificial Sequence
  Description of Artificial Sequence: Synthetic oligonucleotide
cggaauuacgcaguuuagg

SEQ ID NO: 178736 - RNA, 19 nt, Artificial Sequence
  Description of Artificial Sequence: Synthetic oligonucleotide
ccuaugacgugugaauuuc

SEQ ID NO: 178737 - RNA, 19 nt, Artificial Sequence
  Description of Artificial Sequence: Synthetic oligonucleotide
aaccaauccuaggucuguu

SEQ ID NO: 178738 - RNA, 19 nt, Artificial Sequence
  Description of Artificial Sequence: Synthetic oligonucleotide
cuugccuacuacuugucuu

SEQ ID NO: 178739 - RNA, 19 nt, Artificial Sequence
  Description of Artificial Sequence: Synthetic oligonucleotide
gcguauacauuagacuuca

SEQ ID NO: 178740 - RNA, 19 nt, Artificial Sequence
  Description of Artificial Sequence: Synthetic oligonucleotide
ucauucuaccuugguuaau

SEQ ID NO: 178741 - RNA, 19 nt, Artificial Sequence
  Description of Artificial Sequence: Synthetic oligonucleotide
uugaggcaagcugccuuga

SEQ ID NO: 178742 - RNA, 19 nt, Artificial Sequence
  Description of Artificial Sequence: Synthetic oligonucleotide
accuccuaugacgugugaa

SEQ ID NO: 178743 - RNA, 19 nt, Artificial Sequence
  Description of Artificial Sequence: Synthetic oligonucleotide
auaugagacugaagacaga

SEQ ID NO: 178744 - RNA, 19 nt, Artificial Sequence
  Description of Artificial Sequence: Synthetic oligonucleotide
cucagacaaaguaccucaa

SEQ ID NO: 178745 - RNA, 19 nt, Artificial Sequence
  Description of Artificial Sequence: Synthetic oligonucleotide
cuuuacccgugcgcagccg

SEQ ID NO: 178746 - RNA, 19 nt, Artificial Sequence
  Description of Artificial Sequence: Synthetic oligonucleotide
ggaaagcaugcauucgucu

SEQ ID NO: 178747 - RNA, 19 nt, Artificial Sequence
  Description of Artificial Sequence: Synthetic oligonucleotide
acuuucgaccaggaagauu

SEQ ID NO: 178748 - RNA, 19 nt, Artificial Sequence
  Description of Artificial Sequence: Synthetic oligonucleotide
gaucgucguuuccuuugaa

SEQ ID NO: 178749 - RNA, 19 nt, Artificial Sequence
  Description of Artificial Sequence: Synthetic oligonucleotide
gguuacgaucuuuacccgu

SEQ ID NO: 178750 - RNA, 19 nt, Artificial Sequence
  Description of Artificial Sequence: Synthetic oligonucleotide
gcaugcauucgucuauaaa

SEQ ID NO: 178751 - RNA, 19 nt, Artificial Sequence
  Description of Artificial Sequence: Synthetic oligonucleotide
aggauugcaucagcaucaa

SEQ ID NO: 178752 - RNA, 19 nt, Artificial Sequence
  Description of Artificial Sequence: Synthetic oligonucleotide
cacgagugguugcugccca

SEQ ID NO: 178753 - RNA, 19 nt, Artificial Sequence
  Description of Artificial Sequence: Synthetic oligonucleotide
uccugcccugaaguguuaa

SEQ ID NO: 178754 - RNA, 19 nt, Artificial Sequence
  Description of Artificial Sequence: Synthetic oligonucleotide
agauucagugguaccccua

SEQ ID NO: 178755 - RNA, 19 nt, Artificial Sequence
  Description of Artificial Sequence: Synthetic oligonucleotide
cuucgguuuguacggcucu

SEQ ID NO: 178756 - RNA, 19 nt, Artificial Sequence
  Description of Artificial Sequence: Synthetic oligonucleotide
cuuggauuacguguacgau

SEQ ID NO: 178757 - RNA, 19 nt, Artificial Sequence
  Description of Artificial Sequence: Synthetic oligonucleotide
cccuuggauuacguguacg

SEQ ID NO: 178758 - RNA, 19 nt, Artificial Sequence
  Description of Artificial Sequence: Synthetic oligonucleotide
cagauucagugguaccccu

SEQ ID NO: 178759 - RNA, 19 nt, Artificial Sequence
  Description of Artificial Sequence: Synthetic oligonucleotide
gugcagguauccucaucua

SEQ ID NO: 178760 - RNA, 19 nt, Artificial Sequence
  Description of Artificial Sequence: Synthetic oligonucleotide
gguaccccuacucggaguu

SEQ ID NO: 178761 - RNA, 19 nt, Artificial Sequence
  Description of Artificial Sequence: Synthetic oligonucleotide
cgaucuuuacccgugcgca

SEQ ID NO: 178762 - RNA, 19 nt, Artificial Sequence
  Description of Artificial Sequence: Synthetic oligonucleotide
aguuagcgccuugcugaau

SEQ ID NO: 178763 - RNA, 19 nt, Artificial Sequence
  Description of Artificial Sequence: Synthetic oligonucleotide
ccuccuaugacgugugaau

SEQ ID NO: 178764 - RNA, 19 nt, Artificial Sequence
  Description of Artificial Sequence: Synthetic oligonucleotide
gccguccgucuccucugcg

SEQ ID NO: 178765 - RNA, 19 nt, Artificial Sequence
  Description of Artificial Sequence: Synthetic oligonucleotide
cgggaaugaucgucguuuc

SEQ ID NO: 178766 - RNA, 19 nt, Artificial Sequence
  Description of Artificial Sequence: Synthetic oligonucleotide
cguguacgauuaucuguuc

SEQ ID NO: 178767 - RNA, 19 nt, Artificial Sequence
  Description of Artificial Sequence: Synthetic oligonucleotide
ccaauccuaggucuguuuu

SEQ ID NO: 178768 - RNA, 19 nt, Artificial Sequence
  Description of Artificial Sequence: Synthetic oligonucleotide
gcagccgguuaccuucacu

SEQ ID NO: 178769 - RNA, 19 nt, Artificial Sequence
  Description of Artificial Sequence: Synthetic oligonucleotide
guaccccuacucggaguua

SEQ ID NO: 178770 - RNA, 19 nt, Artificial Sequence
  Description of Artificial Sequence: Synthetic oligonucleotide
ggauuacguguacgauuau

SEQ ID NO: 178771 - RNA, 19 nt, Artificial Sequence
  Description of Artificial Sequence: Synthetic oligonucleotide
ccgugcgcagccgguuacc

SEQ ID NO: 178772 - RNA, 19 nt, Artificial Sequence
  Description of Artificial Sequence: Synthetic oligonucleotide
cccuacucggaguuauuuu

SEQ ID NO: 178773 - RNA, 19 nt, Artificial Sequence
  Description of Artificial Sequence: Synthetic oligonucleotide
cgccguccgucuccucugc

SEQ ID NO: 178774 - RNA, 19 nt, Artificial Sequence
  Description of Artificial Sequence: Synthetic oligonucleotide
ccaaucuguugucgcuaau

SEQ ID NO: 178775 - RNA, 19 nt, Artificial Sequence
  Description of Artificial Sequence: Synthetic oligonucleotide
uauauauauaaauauaugu

SEQ ID NO: 178776 - RNA, 19 nt, Artificial Sequence
  Description of Artificial Sequence: Synthetic oligonucleotide
uuuguuugcaguaaacugg

SEQ ID NO: 178777 - RNA, 19 nt, Artificial Sequence
  Description of Artificial Sequence: Synthetic oligonucleotide
uauauauauauauauauaa

SEQ ID NO: 178778 - RNA, 19 nt, Artificial Sequence
  Description of Artificial Sequence: Synthetic oligonucleotide
gauuaauugaacuaauagc

SEQ ID NO: 178779 - RNA, 19 nt, Artificial Sequence
  Description of Artificial Sequence: Synthetic oligonucleotide
uauauauauauaaauauau

SEQ ID NO: 178780 - RNA, 19 nt, Artificial Sequence
  Description of Artificial Sequence: Synthetic oligonucleotide
uuuauauauauauauauau

SEQ ID NO: 178781 - RNA, 19 nt, Artificial Sequence
  Description of Artificial Sequence: Synthetic oligonucleotide
aauuuugucuccuacagga

SEQ ID NO: 178782 - RNA, 19 nt, Artificial Sequence
  Description of Artificial Sequence: Synthetic oligonucleotide
uauauauauauauauauau

SEQ ID NO: 178783 - RNA, 19 nt, Artificial Sequence
  Description of Artificial Sequence: Synthetic oligonucleotide
uauauauauauauaaauau

SEQ ID NO: 178784 - RNA, 19 nt, Artificial Sequence
  Description of Artificial Sequence: Synthetic oligonucleotide
uauauauauauauauaaau

SEQ ID NO: 178785 - RNA, 19 nt, Artificial Sequence
  Description of Artificial Sequence: Synthetic oligonucleotide
agauuaauugaacuaauag

SEQ ID NO: 178786 - RNA, 19 nt, Artificial Sequence
  Description of Artificial Sequence: Synthetic oligonucleotide
acuaauagcugacuugucc

SEQ ID NO: 178787 - RNA, 19 nt, Artificial Sequence
  Description of Artificial Sequence: Synthetic oligonucleotide
uauagaguacuuaagugag

SEQ ID NO: 178788 - RNA, 19 nt, Artificial Sequence
  Description of Artificial Sequence: Synthetic oligonucleotide
uaauacaaaggccugacug

SEQ ID NO: 178789 - RNA, 19 nt, Artificial Sequence
  Description of Artificial Sequence: Synthetic oligonucleotide
gauguaaccauucccaucc

SEQ ID NO: 178790 - RNA, 19 nt, Artificial Sequence
  Description of Artificial Sequence: Synthetic oligonucleotide
aggguugaaugauagaugc

SEQ ID NO: 178791 - RNA, 19 nt, Artificial Sequence
  Description of Artificial Sequence: Synthetic oligonucleotide
aguacgaguauuuauacug

SEQ ID NO: 178792 - RNA, 19 nt, Artificial Sequence
  Description of Artificial Sequence: Synthetic oligonucleotide
accaccaaccaauacaugc

SEQ ID NO: 178793 - RNA, 19 nt, Artificial Sequence
  Description of Artificial Sequence: Synthetic oligonucleotide
uuauagaguacuuaaguga

SEQ ID NO: 178794 - RNA, 19 nt, Artificial Sequence
  Description of Artificial Sequence: Synthetic oligonucleotide
  modified_base (10)..(10): a, c, u, g, unknown or other
ugcuauaggnguuuaauga

SEQ ID NO: 178795 - RNA, 19 nt, Artificial Sequence
  Description of Artificial Sequence: Synthetic oligonucleotide
uuuauagaguacuuaagug

SEQ ID NO: 178796 - RNA, 19 nt, Artificial Sequence
  Description of Artificial Sequence: Synthetic oligonucleotide
aaugauagaugcuaucccu

SEQ ID NO: 178797 - RNA, 19 nt, Artificial Sequence
  Description of Artificial Sequence: Synthetic oligonucleotide
acuuuauauauauauauau

SEQ ID NO: 178798 - RNA, 19 nt, Artificial Sequence
  Description of Artificial Sequence: Synthetic oligonucleotide
aauggcuaagauuaauuga

SEQ ID NO: 178799 - RNA, 19 nt, Artificial Sequence
  Description of Artificial Sequence: Synthetic oligonucleotide
uuaucgaauagggagaaag

SEQ ID NO: 178800 - RNA, 19 nt, Artificial Sequence
  Description of Artificial Sequence: Synthetic oligonucleotide
uuggaauggacguaaauga

SEQ ID NO: 178801 - RNA, 19 nt, Artificial Sequence
  Description of Artificial Sequence: Synthetic oligonucleotide
ucacuuuauauauauauau

SEQ ID NO: 178802 - RNA, 19 nt, Artificial Sequence
  Description of Artificial Sequence: Synthetic oligonucleotide
gaguacuuaagugagggcg

SEQ ID NO: 178803 - RNA, 19 nt, Artificial Sequence
  Description of Artificial Sequence: Synthetic oligonucleotide
uuaauugaacuaauagcug

SEQ ID NO: 178804 - RNA, 19 nt, Artificial Sequence
  Description of Artificial Sequence: Synthetic oligonucleotide
ugugugauaguaacgcuag

SEQ ID NO: 178805 - RNA, 19 nt, Artificial Sequence
  Description of Artificial Sequence: Synthetic oligonucleotide
uuauauauauauauauaua

SEQ ID NO: 178806 - RNA, 19 nt, Artificial Sequence
  Description of Artificial Sequence: Synthetic oligonucleotide
guuuaaguugcucaaagac

SEQ ID NO: 178807 - RNA, 19 nt, Artificial Sequence
  Description of Artificial Sequence: Synthetic oligonucleotide
acaagacauagcuacugcc

SEQ ID NO: 178808 - RNA, 19 nt, Artificial Sequence
  Description of Artificial Sequence: Synthetic oligonucleotide
uaaguuugucaugacaugg

SEQ ID NO: 178809 - RNA, 19 nt, Artificial Sequence
  Description of Artificial Sequence: Synthetic oligonucleotide
aaacuugacggcuucacgu

SEQ ID NO: 178810 - RNA, 19 nt, Artificial Sequence
  Description of Artificial Sequence: Synthetic oligonucleotide
uaauggcuaagauuaauug

SEQ ID NO: 178811 - RNA, 19 nt, Artificial Sequence
  Description of Artificial Sequence: Synthetic oligonucleotide
ucaaucgucaagcugcaug

SEQ ID NO: 178812 - RNA, 19 nt, Artificial Sequence
  Description of Artificial Sequence: Synthetic oligonucleotide
caauaugguuacaaguugg

SEQ ID NO: 178813 - RNA, 19 nt, Artificial Sequence
  Description of Artificial Sequence: Synthetic oligonucleotide
ucuuuaucgaauagggaga

SEQ ID NO: 178814 - RNA, 19 nt, Artificial Sequence
  Description of Artificial Sequence: Synthetic oligonucleotide
uacgaauucuucauaguug

SEQ ID NO: 178815 - RNA, 19 nt, Artificial Sequence
  Description of Artificial Sequence: Synthetic oligonucleotide
aaagaugcucccuugguaa

SEQ ID NO: 178816 - RNA, 19 nt, Artificial Sequence
  Description of Artificial Sequence: Synthetic oligonucleotide
acaccuuuuaaguuuaaug

SEQ ID NO: 178817 - RNA, 19 nt, Artificial Sequence
  Description of Artificial Sequence: Synthetic oligonucleotide
accgcuccaaacuugacgg

SEQ ID NO: 178818 - RNA, 19 nt, Artificial Sequence
  Description of Artificial Sequence: Synthetic oligonucleotide
  modified_base (7)..(7): a, c, u, g, unknown or other
uauaggnguuuaaugacau

SEQ ID NO: 178819 - RNA, 19 nt, Artificial Sequence
  Description of Artificial Sequence: Synthetic oligonucleotide
ucgguuaagacacaacagu

SEQ ID NO: 178820 - RNA, 19 nt, Artificial Sequence
  Description of Artificial Sequence: Synthetic oligonucleotide
  modified_base (2)..(2): a, c, u, g, unknown or other
gnguuuaaugacauuguag

SEQ ID NO: 178821 - RNA, 19 nt, Artificial Sequence
  Description of Artificial Sequence: Synthetic oligonucleotide
aacuucaagggauauuuaa

SEQ ID NO: 178822 - RNA, 19 nt, Artificial Sequence
  Description of Artificial Sequence: Synthetic oligonucleotide
gaaugauagaugcuauccc

SEQ ID NO: 178823 - RNA, 19 nt, Artificial Sequence
  Description of Artificial Sequence: Synthetic oligonucleotide
gucaccaugggauuggagc

SEQ ID NO: 178824 - RNA, 19 nt, Artificial Sequence
  Description of Artificial Sequence: Synthetic oligonucleotide
ugauaguaacgcuaggccu

SEQ ID NO: 178825 - RNA, 19 nt, Artificial Sequence
  Description of Artificial Sequence: Synthetic oligonucleotide
auauauauauaaauauaug

SEQ ID NO: 178826 - RNA, 19 nt, Artificial Sequence
  Description of Artificial Sequence: Synthetic oligonucleotide
uaucgaauagggagaaagc

SEQ ID NO: 178827 - RNA, 19 nt, Artificial Sequence
  Description of Artificial Sequence: Synthetic oligonucleotide
aaaacucggaaugccucgc

SEQ ID NO: 178828 - RNA, 19 nt, Artificial Sequence
  Description of Artificial Sequence: Synthetic oligonucleotide
auauauauauauauaaaua

SEQ ID NO: 178829 - RNA, 19 nt, Artificial Sequence
  Description of Artificial Sequence: Synthetic oligonucleotide
caaucgucaagcugcaugc

SEQ ID NO: 178830 - RNA, 19 nt, Artificial Sequence
  Description of Artificial Sequence: Synthetic oligonucleotide
cuuggaauggacguaaaug

SEQ ID NO: 178831 - RNA, 19 nt, Artificial Sequence
  Description of Artificial Sequence: Synthetic oligonucleotide
uuuaauacaaaggccugac

SEQ ID NO: 178832 - RNA, 19 nt, Artificial Sequence
  Description of Artificial Sequence: Synthetic oligonucleotide
gaagguacguuugacauuc

SEQ ID NO: 178833 - RNA, 19 nt, Artificial Sequence
  Description of Artificial Sequence: Synthetic oligonucleotide
accuuuuaaguuuaauggu

SEQ ID NO: 178834 - RNA, 19 nt, Artificial Sequence
  Description of Artificial Sequence: Synthetic oligonucleotide
aguuucuuagggcaagucu

SEQ ID NO: 178835 - RNA, 19 nt, Artificial Sequence
  Description of Artificial Sequence: Synthetic oligonucleotide
ucuccuaaguuugucauga

SEQ ID NO: 178836 - RNA, 19 nt, Artificial Sequence
  Description of Artificial Sequence: Synthetic oligonucleotide
gaaacuaccaagagcucag

SEQ ID NO: 178837 - RNA, 19 nt, Artificial Sequence
  Description of Artificial Sequence: Synthetic oligonucleotide
uguuuaaguugcucaaaga

SEQ ID NO: 178838 - RNA, 19 nt, Artificial Sequence
  Description of Artificial Sequence: Synthetic oligonucleotide
uggacguaaaugauaauuu

SEQ ID NO: 178839 - RNA, 19 nt, Artificial Sequence
  Description of Artificial Sequence: Synthetic oligonucleotide
uccuaaguuugucaugaca

SEQ ID NO: 178840 - RNA, 19 nt, Artificial Sequence
  Description of Artificial Sequence: Synthetic oligonucleotide
aacucggaaugccucgcgg

SEQ ID NO: 178841 - RNA, 19 nt, Artificial Sequence
  Description of Artificial Sequence: Synthetic oligonucleotide
gaugcugaggguugaauga

SEQ ID NO: 178842 - RNA, 19 nt, Artificial Sequence
  Description of Artificial Sequence: Synthetic oligonucleotide
agcuucuacaaagacuugg

SEQ ID NO: 178843 - RNA, 19 nt, Artificial Sequence
  Description of Artificial Sequence: Synthetic oligonucleotide
cucagacuaacaccaaacc

SEQ ID NO: 178844 - RNA, 19 nt, Artificial Sequence
  Description of Artificial Sequence: Synthetic oligonucleotide
gaugcuaucccucuugugu

SEQ ID NO: 178845 - RNA, 19 nt, Artificial Sequence
  Description of Artificial Sequence: Synthetic oligonucleotide
caauucaaucccuuacaag

SEQ ID NO: 178846 - RNA, 19 nt, Artificial Sequence
  Description of Artificial Sequence: Synthetic oligonucleotide
auauauauauauauauaaa

SEQ ID NO: 178847 - RNA, 19 nt, Artificial Sequence
  Description of Artificial Sequence: Synthetic oligonucleotide
cuuuauauauauauauaua

SEQ ID NO: 178848 - RNA, 19 nt, Artificial Sequence
  Description of Artificial Sequence: Synthetic oligonucleotide
auauauauauauaaauaua

SEQ ID NO: 178849 - RNA, 19 nt, Artificial Sequence
  Description of Artificial Sequence: Synthetic oligonucleotide
auucaaucccuuacaagac

SEQ ID NO: 178850 - RNA, 19 nt, Artificial Sequence
  Description of Artificial Sequence: Synthetic oligonucleotide
aaacucggaaugccucgcg

SEQ ID NO: 178851 - RNA, 19 nt, Artificial Sequence
  Description of Artificial Sequence: Synthetic oligonucleotide
guaguacgaguauuuauac

SEQ ID NO: 178852 - RNA, 19 nt, Artificial Sequence
  Description of Artificial Sequence: Synthetic oligonucleotide
uugugugauaguaacgcua

SEQ ID NO: 178853 - RNA, 19 nt, Artificial Sequence
  Description of Artificial Sequence: Synthetic oligonucleotide
cuaauagcugacuugucca

SEQ ID NO: 178854 - RNA, 19 nt, Artificial Sequence
  Description of Artificial Sequence: Synthetic oligonucleotide
guaacgcuaggccuacugg

SEQ ID NO: 178855 - RNA, 19 nt, Artificial Sequence
  Description of Artificial Sequence: Synthetic oligonucleotide
gaauggacguaaaugauaa

SEQ ID NO: 178856 - RNA, 19 nt, Artificial Sequence
  Description of Artificial Sequence: Synthetic oligonucleotide
cuaagauuaauugaacuaa

SEQ ID NO: 178857 - RNA, 19 nt, Artificial Sequence
  Description of Artificial Sequence: Synthetic oligonucleotide
cuaaguuugucaugacaug

SEQ ID NO: 178858 - RNA, 19 nt, Artificial Sequence
  Description of Artificial Sequence: Synthetic oligonucleotide
ucgucaagcugcaugcaug

SEQ ID NO: 178859 - RNA, 19 nt, Artificial Sequence
  Description of Artificial Sequence: Synthetic oligonucleotide
aguaacgcuaggccuacug

SEQ ID NO: 178860 - RNA, 19 nt, Artificial Sequence
  Description of Artificial Sequence: Synthetic oligonucleotide
uaacgcuaggccuacugga

SEQ ID NO: 178861 - RNA, 19 nt, Artificial Sequence
  Description of Artificial Sequence: Synthetic oligonucleotide
aacgcuaggccuacuggac

SEQ ID NO: 178862 - RNA, 19 nt, Artificial Sequence
  Description of Artificial Sequence: Synthetic oligonucleotide
aucaucccgagguaaacca

SEQ ID NO: 178863 - RNA, 19 nt, Artificial Sequence
  Description of Artificial Sequence: Synthetic oligonucleotide
acguaaaugauaauuuccu

SEQ ID NO: 178864 - RNA, 19 nt, Artificial Sequence
  Description of Artificial Sequence: Synthetic oligonucleotide
agaguccaaagaugcuccc

SEQ ID NO: 178865 - RNA, 19 nt, Artificial Sequence
  Description of Artificial Sequence: Synthetic oligonucleotide
auauauauauauauauaua

SEQ ID NO: 178866 - RNA, 19 nt, Artificial Sequence
  Description of Artificial Sequence: Synthetic oligonucleotide
auggcuaagauuaauugaa

SEQ ID NO: 178867 - RNA, 19 nt, Artificial Sequence
  Description of Artificial Sequence: Synthetic oligonucleotide
  modified_base (8)..(8): a, c, u, g, unknown or other
cuauaggnguuuaaugaca

SEQ ID NO: 178868 - RNA, 19 nt, Artificial Sequence
  Description of Artificial Sequence: Synthetic oligonucleotide
ugcgaguaacggcaccgcg

SEQ ID NO: 178869 - RNA, 19 nt, Artificial Sequence
  Description of Artificial Sequence: Synthetic oligonucleotide
guaaacuggcuacugacaa

SEQ ID NO: 178870 - RNA, 19 nt, Artificial Sequence
  Description of Artificial Sequence: Synthetic oligonucleotide
auugucaccaugggauugg

SEQ ID NO: 178871 - RNA, 19 nt, Artificial Sequence
  Description of Artificial Sequence: Synthetic oligonucleotide
uugaaugauagaugcuauc

SEQ ID NO: 178872 - RNA, 19 nt, Artificial Sequence
  Description of Artificial Sequence: Synthetic oligonucleotide
agcgaaggaaggaagcgcg

SEQ ID NO: 178873 - RNA, 19 nt, Artificial Sequence
  Description of Artificial Sequence: Synthetic oligonucleotide
auggacguaaaugauaauu

SEQ ID NO: 178874 - RNA, 19 nt, Artificial Sequence
  Description of Artificial Sequence: Synthetic oligonucleotide
cagacuaacaccaaacccu

SEQ ID NO: 178875 - RNA, 19 nt, Artificial Sequence
  Description of Artificial Sequence: Synthetic oligonucleotide
cauagcuacugccauucac

SEQ ID NO: 178876 - RNA, 19 nt, Artificial Sequence
  Description of Artificial Sequence: Synthetic oligonucleotide
aacagacggagaacacagc

SEQ ID NO: 178877 - RNA, 19 nt, Artificial Sequence
  Description of Artificial Sequence: Synthetic oligonucleotide
uaguacgaguauuuauacu

SEQ ID NO: 178878 - RNA, 19 nt, Artificial Sequence
  Description of Artificial Sequence: Synthetic oligonucleotide
ugcuaacccgcuaccugcg

SEQ ID NO: 178879 - RNA, 19 nt, Artificial Sequence
  Description of Artificial Sequence: Synthetic oligonucleotide
acuugacggcuucacguuc

SEQ ID NO: 178880 - RNA, 19 nt, Artificial Sequence
  Description of Artificial Sequence: Synthetic oligonucleotide
uggcuaagauuaauugaac

SEQ ID NO: 178881 - RNA, 19 nt, Artificial Sequence
  Description of Artificial Sequence: Synthetic oligonucleotide
  modified_base (9)..(9): a, c, u, g, unknown or other
gcuauaggnguuuaaugac

SEQ ID NO: 178882 - RNA, 19 nt, Artificial Sequence
  Description of Artificial Sequence: Synthetic oligonucleotide
acugcgaguaacggcaccg

SEQ ID NO: 178883 - RNA, 19 nt, Artificial Sequence
  Description of Artificial Sequence: Synthetic oligonucleotide
auaguugacuuguccgucu

SEQ ID NO: 178884 - RNA, 19 nt, Artificial Sequence
  Description of Artificial Sequence: Synthetic oligonucleotide
aagauuaauugaacuaaua

SEQ ID NO: 178885 - RNA, 19 nt, Artificial Sequence
  Description of Artificial Sequence: Synthetic oligonucleotide
ugcgcugauguaaccauuc

SEQ ID NO: 178886 - RNA, 19 nt, Artificial Sequence
  Description of Artificial Sequence: Synthetic oligonucleotide
gaacuaauagcugacuugu

SEQ ID NO: 178887 - RNA, 19 nt, Artificial Sequence
  Description of Artificial Sequence: Synthetic oligonucleotide
aacuugacggcuucacguu

SEQ ID NO: 178888 - RNA, 19 nt, Artificial Sequence
  Description of Artificial Sequence: Synthetic oligonucleotide
ggucgguuaagacacaaca

SEQ ID NO: 178889 - RNA, 19 nt, Artificial Sequence
  Description of Artificial Sequence: Synthetic oligonucleotide
ucuaauggcuaagauuaau

SEQ ID NO: 178890 - RNA, 19 nt, Artificial Sequence
  Description of Artificial Sequence: Synthetic oligonucleotide
aaggaagcgcggagcaggc

SEQ ID NO: 178891 - RNA, 19 nt, Artificial Sequence
  Description of Artificial Sequence: Synthetic oligonucleotide
gucgguuaagacacaacag

SEQ ID NO: 178892 - RNA, 19 nt, Artificial Sequence
  Description of Artificial Sequence: Synthetic oligonucleotide
auaguaacgcuaggccuac

SEQ ID NO: 178893 - RNA, 19 nt, Artificial Sequence
  Description of Artificial Sequence: Synthetic oligonucleotide
uaaaagguaauaggaggua

SEQ ID NO: 178894 - RNA, 19 nt, Artificial Sequence
  Description of Artificial Sequence: Synthetic oligonucleotide
uagaugcuaucccucuugu

SEQ ID NO: 178895 - RNA, 19 nt, Artificial Sequence
  Description of Artificial Sequence: Synthetic oligonucleotide
gauaguaacgcuaggccua

SEQ ID NO: 178896 - RNA, 19 nt, Artificial Sequence
  Description of Artificial Sequence: Synthetic oligonucleotide
aacuaauagcugacuuguc

SEQ ID NO: 178897 - RNA, 19 nt, Artificial Sequence
  Description of Artificial Sequence: Synthetic oligonucleotide
auagcugacuuguccaaau

SEQ ID NO: 178898 - RNA, 19 nt, Artificial Sequence
  Description of Artificial Sequence: Synthetic oligonucleotide
auagaguacuuaagugagg

SEQ ID NO: 178899 - RNA, 19 nt, Artificial Sequence
  Description of Artificial Sequence: Synthetic oligonucleotide
agguaguacgaguauuuau

SEQ ID NO: 178900 - RNA, 19 nt, Artificial Sequence
  Description of Artificial Sequence: Synthetic oligonucleotide
gugaccgcaugacaguccc

SEQ ID NO: 178901 - RNA, 19 nt, Artificial Sequence
  Description of Artificial Sequence: Synthetic oligonucleotide
ugcaguaaacuggcuacug

SEQ ID NO: 178902 - RNA, 19 nt, Artificial Sequence
  Description of Artificial Sequence: Synthetic oligonucleotide
aauggacguaaaugauaau

SEQ ID NO: 178903 - RNA, 19 nt, Artificial Sequence
  Description of Artificial Sequence: Synthetic oligonucleotide
cacuuuauauauauauaua

SEQ ID NO: 178904 - RNA, 19 nt, Artificial Sequence
  Description of Artificial Sequence: Synthetic oligonucleotide
auaaaucugguugcugcca

SEQ ID NO: 178905 - RNA, 19 nt, Artificial Sequence
  Description of Artificial Sequence: Synthetic oligonucleotide
uacgaguauuuauacugua

SEQ ID NO: 178906 - RNA, 19 nt, Artificial Sequence
  Description of Artificial Sequence: Synthetic oligonucleotide
aaagacucggcaguuucuu

SEQ ID NO: 178907 - RNA, 19 nt, Artificial Sequence
  Description of Artificial Sequence: Synthetic oligonucleotide
aguacuuaagugagggcgu

SEQ ID NO: 178908 - RNA, 19 nt, Artificial Sequence
  Description of Artificial Sequence: Synthetic oligonucleotide
ucccucuagugcaaugcac

SEQ ID NO: 178909 - RNA, 19 nt, Artificial Sequence
  Description of Artificial Sequence: Synthetic oligonucleotide
acuuggaauggacguaaau

SEQ ID NO: 178910 - RNA, 19 nt, Artificial Sequence
  Description of Artificial Sequence: Synthetic oligonucleotide
uucuaauggcuaagauuaa

SEQ ID NO: 178911 - RNA, 19 nt, Artificial Sequence
  Description of Artificial Sequence: Synthetic oligonucleotide
caucaucccgagguaaacc

SEQ ID NO: 178912 - RNA, 19 nt, Artificial Sequence
  Description of Artificial Sequence: Synthetic oligonucleotide
uagagucuacccagcuucu

SEQ ID NO: 178913 - RNA, 19 nt, Artificial Sequence
  Description of Artificial Sequence: Synthetic oligonucleotide
uacguuugacauucaguuu

SEQ ID NO: 178914 - RNA, 19 nt, Artificial Sequence
  Description of Artificial Sequence: Synthetic oligonucleotide
uguccgucuccaucaauau

SEQ ID NO: 178915 - RNA, 19 nt, Artificial Sequence
  Description of Artificial Sequence: Synthetic oligonucleotide
cugaacuaucaaguuguug

SEQ ID NO: 178916 - RNA, 19 nt, Artificial Sequence
  Description of Artificial Sequence: Synthetic oligonucleotide
aucgucaagcugcaugcau

SEQ ID NO: 178917 - RNA, 19 nt, Artificial Sequence
  Description of Artificial Sequence: Synthetic oligonucleotide
ugccucgcggauuuccucu

SEQ ID NO: 178918 - RNA, 19 nt, Artificial Sequence
  Description of Artificial Sequence: Synthetic oligonucleotide
cuuuugggacaggcuaugg

SEQ ID NO: 178919 - RNA, 19 nt, Artificial Sequence
  Description of Artificial Sequence: Synthetic oligonucleotide
ccugaccacacaagaaucc

SEQ ID NO: 178920 - RNA, 19 nt, Artificial Sequence
  Description of Artificial Sequence: Synthetic oligonucleotide
ucauugucaccaugggauu

SEQ ID NO: 178921 - RNA, 19 nt, Artificial Sequence
  Description of Artificial Sequence: Synthetic oligonucleotide
uucuuagggcaagucucag

SEQ ID NO: 178922 - RNA, 19 nt, Artificial Sequence
  Description of Artificial Sequence: Synthetic oligonucleotide
gguaguacgaguauuuaua

SEQ ID NO: 178923 - RNA, 19 nt, Artificial Sequence
  Description of Artificial Sequence: Synthetic oligonucleotide
aaugccucgcggauuuccu

SEQ ID NO: 178924 - RNA, 19 nt, Artificial Sequence
  Description of Artificial Sequence: Synthetic oligonucleotide
agaagguacguuugacauu

SEQ ID NO: 178925 - RNA, 19 nt, Artificial Sequence
  Description of Artificial Sequence: Synthetic oligonucleotide
uuugugugauuuggugaca

SEQ ID NO: 178926 - RNA, 19 nt, Artificial Sequence
  Description of Artificial Sequence: Synthetic oligonucleotide
agcccaaacaguguauuau

SEQ ID NO: 178927 - RNA, 19 nt, Artificial Sequence
  Description of Artificial Sequence: Synthetic oligonucleotide
guacgaauucuucauaguu

SEQ ID NO: 178928 - RNA, 19 nt, Artificial Sequence
  Description of Artificial Sequence: Synthetic oligonucleotide
aagguaguacgaguauuua

SEQ ID NO: 178929 - RNA, 19 nt, Artificial Sequence
  Description of Artificial Sequence: Synthetic oligonucleotide
gucacuuuauauauauaua

SEQ ID NO: 178930 - RNA, 19 nt, Artificial Sequence
  Description of Artificial Sequence: Synthetic oligonucleotide
ccgagucaugguuugaaag

SEQ ID NO: 178931 - RNA, 19 nt, Artificial Sequence
  Description of Artificial Sequence: Synthetic oligonucleotide
aaggcgacugccagcugag

SEQ ID NO: 178932 - RNA, 19 nt, Artificial Sequence
  Description of Artificial Sequence: Synthetic oligonucleotide
cauugucaccaugggauug

SEQ ID NO: 178933 - RNA, 19 nt, Artificial Sequence
  Description of Artificial Sequence: Synthetic oligonucleotide
aagacucggcaguuucuua

SEQ ID NO: 178934 - RNA, 19 nt, Artificial Sequence
  Description of Artificial Sequence: Synthetic oligonucleotide
ugggcaauucaaucccuua

SEQ ID NO: 178935 - RNA, 19 nt, Artificial Sequence
  Description of Artificial Sequence: Synthetic oligonucleotide
uccgagucaugguuugaaa

SEQ ID NO: 178936 - RNA, 19 nt, Artificial Sequence
  Description of Artificial Sequence: Synthetic oligonucleotide
agggcguuuacagcaaagu

SEQ ID NO: 178937 - RNA, 19 nt, Artificial Sequence
  Description of Artificial Sequence: Synthetic oligonucleotide
gggcguuuacagcaaagug

SEQ ID NO: 178938 - RNA, 19 nt, Artificial Sequence
  Description of Artificial Sequence: Synthetic oligonucleotide
aaucgucaagcugcaugca

SEQ ID NO: 178939 - RNA, 19 nt, Artificial Sequence
  Description of Artificial Sequence: Synthetic oligonucleotide
gggcaauucaaucccuuac

SEQ ID NO: 178940 - RNA, 19 nt, Artificial Sequence
  Description of Artificial Sequence: Synthetic oligonucleotide
cuaauggcuaagauuaauu

SEQ ID NO: 178941 - RNA, 19 nt, Artificial Sequence
  Description of Artificial Sequence: Synthetic oligonucleotide
augccucgcggauuuccuc

SEQ ID NO: 178942 - RNA, 19 nt, Artificial Sequence
  Description of Artificial Sequence: Synthetic oligonucleotide
ucuuacucaaagggauaaa

SEQ ID NO: 178943 - RNA, 19 nt, Artificial Sequence
  Description of Artificial Sequence: Synthetic oligonucleotide
ugucuccuacaggacaacu

SEQ ID NO: 178944 - RNA, 19 nt, Artificial Sequence
  Description of Artificial Sequence: Synthetic oligonucleotide
uaacccgcuaccugcgcuc

SEQ ID NO: 178945 - RNA, 19 nt, Artificial Sequence
  Description of Artificial Sequence: Synthetic oligonucleotide
ggaacuuuaaggaguccac

SEQ ID NO: 178946 - RNA, 19 nt, Artificial Sequence
  Description of Artificial Sequence: Synthetic oligonucleotide
cuuuaucgaauagggagaa

SEQ ID NO: 178947 - RNA, 19 nt, Artificial Sequence
  Description of Artificial Sequence: Synthetic oligonucleotide
ggcuaagauuaauugaacu

SEQ ID NO: 178948 - RNA, 19 nt, Artificial Sequence
  Description of Artificial Sequence: Synthetic oligonucleotide
  modified_base (6)..(6): a, c, u, g, unknown or other
auaggnguuuaaugacauu

SEQ ID NO: 178949 - RNA, 19 nt, Artificial Sequence
  Description of Artificial Sequence: Synthetic oligonucleotide
cagcuaacuagucacuuua

SEQ ID NO: 178950 - RNA, 19 nt, Artificial Sequence
  Description of Artificial Sequence: Synthetic oligonucleotide
ggacaugcacuuauaaaga

SEQ ID NO: 178951 - RNA, 19 nt, Artificial Sequence
  Description of Artificial Sequence: Synthetic oligonucleotide
  modified_base (19)..(19): a, c, u, g, unknown or other
caccauccuugcuauaggn

SEQ ID NO: 178952 - RNA, 19 nt, Artificial Sequence
  Description of Artificial Sequence: Synthetic oligonucleotide
agacauagcuacugccauu

SEQ ID NO: 178953 - RNA, 19 nt, Artificial Sequence
  Description of Artificial Sequence: Synthetic oligonucleotide
acgcuaggccuacuggaca

SEQ ID NO: 178954 - RNA, 19 nt, Artificial Sequence
  Description of Artificial Sequence: Synthetic oligonucleotide
  modified_base (3)..(3): a, c, u, g, unknown or other
ggnguuuaaugacauugua

SEQ ID NO: 178955 - RNA, 19 nt, Artificial Sequence
  Description of Artificial Sequence: Synthetic oligonucleotide
uuuaucgaauagggagaaa

SEQ ID NO: 178956 - RNA, 19 nt, Artificial Sequence
  Description of Artificial Sequence: Synthetic oligonucleotide
gcaauucaaucccuuacaa

SEQ ID NO: 178957 - RNA, 19 nt, Artificial Sequence
  Description of Artificial Sequence: Synthetic oligonucleotide
ccuaaguuugucaugacau

SEQ ID NO: 178958 - RNA, 19 nt, Artificial Sequence
  Description of Artificial Sequence: Synthetic oligonucleotide
accgcaugacagucccaag

SEQ ID NO: 178959 - RNA, 19 nt, Artificial Sequence
  Description of Artificial Sequence: Synthetic oligonucleotide
ccgacugcgaguaacggca

SEQ ID NO: 178960 - RNA, 19 nt, Artificial Sequence
  Description of Artificial Sequence: Synthetic oligonucleotide
gaccgcaugacagucccaa

SEQ ID NO: 178961 - RNA, 19 nt, Artificial Sequence
  Description of Artificial Sequence: Synthetic oligonucleotide
gcgaguaacggcaccgcgg

SEQ ID NO: 178962 - RNA, 19 nt, Artificial Sequence
  Description of Artificial Sequence: Synthetic oligonucleotide
ggaaguuacuucuggggcu

SEQ ID NO: 178963 - RNA, 19 nt, Artificial Sequence
  Description of Artificial Sequence: Synthetic oligonucleotide
ugggucgguuaagacacaa

SEQ ID NO: 178964 - RNA, 19 nt, Artificial Sequence
  Description of Artificial Sequence: Synthetic oligonucleotide
cuugugugauaguaacgcu

SEQ ID NO: 178965 - RNA, 19 nt, Artificial Sequence
  Description of Artificial Sequence: Synthetic oligonucleotide
cugcugcuaacccgcuacc

SEQ ID NO: 178966 - RNA, 19 nt, Artificial Sequence
  Description of Artificial Sequence: Synthetic oligonucleotide
acuagucacuuuauauaua

SEQ ID NO: 178967 - RNA, 19 nt, Artificial Sequence
  Description of Artificial Sequence: Synthetic oligonucleotide
guugaaugauagaugcuau

SEQ ID NO: 178968 - RNA, 19 nt, Artificial Sequence
  Description of Artificial Sequence: Synthetic oligonucleotide
aguguaaccuucacccauu

SEQ ID NO: 178969 - RNA, 19 nt, Artificial Sequence
  Description of Artificial Sequence: Synthetic oligonucleotide
ggcuugaucuuuaggggac

SEQ ID NO: 178970 - RNA, 19 nt, Artificial Sequence
  Description of Artificial Sequence: Synthetic oligonucleotide
aaguaguguuuaggacaca

SEQ ID NO: 178971 - RNA, 19 nt, Artificial Sequence
  Description of Artificial Sequence: Synthetic oligonucleotide
caguuucuuagggcaaguc

SEQ ID NO: 178972 - RNA, 19 nt, Artificial Sequence
  Description of Artificial Sequence: Synthetic oligonucleotide
gcuaacuagucacuuuaua

SEQ ID NO: 178973 - RNA, 19 nt, Artificial Sequence
  Description of Artificial Sequence: Synthetic oligonucleotide
gauagaugcuaucccucuu

SEQ ID NO: 178974 - RNA, 19 nt, Artificial Sequence
  Description of Artificial Sequence: Synthetic oligonucleotide
aggacaacuucaagggaua

SEQ ID NO: 178975 - RNA, 19 nt, Artificial Sequence
  Description of Artificial Sequence: Synthetic oligonucleotide
ggcaccgcggacacgagac

SEQ ID NO: 178976 - RNA, 19 nt, Artificial Sequence
  Description of Artificial Sequence: Synthetic oligonucleotide
gucaagcugcaugcaugag

SEQ ID NO: 178977 - RNA, 19 nt, Artificial Sequence
  Description of Artificial Sequence: Synthetic oligonucleotide
aacccgcuaccugcgcucu

SEQ ID NO: 178978 - RNA, 19 nt, Artificial Sequence
  Description of Artificial Sequence: Synthetic oligonucleotide
cugcgaguaacggcaccgc

SEQ ID NO: 178979 - RNA, 19 nt, Artificial Sequence
  Description of Artificial Sequence: Synthetic oligonucleotide
agcuaacuagucacuuuau

SEQ ID NO: 178980 - RNA, 19 nt, Artificial Sequence
  Description of Artificial Sequence: Synthetic oligonucleotide
ugucgaugguugugcucaa

SEQ ID NO: 178981 - RNA, 19 nt, Artificial Sequence
  Description of Artificial Sequence: Synthetic oligonucleotide
ccgagguaaaccaauuuua

SEQ ID NO: 178982 - RNA, 19 nt, Artificial Sequence
  Description of Artificial Sequence: Synthetic oligonucleotide
gguacguuugacauucagu

SEQ ID NO: 178983 - RNA, 19 nt, Artificial Sequence
  Description of Artificial Sequence: Synthetic oligonucleotide
caaagacucggcaguuucu

SEQ ID NO: 178984 - RNA, 19 nt, Artificial Sequence
  Description of Artificial Sequence: Synthetic oligonucleotide
cucugaccgccgaggugcc

SEQ ID NO: 178985 - RNA, 19 nt, Artificial Sequence
  Description of Artificial Sequence: Synthetic oligonucleotide
gcgcugauguaaccauucc

SEQ ID NO: 178986 - RNA, 19 nt, Artificial Sequence
  Description of Artificial Sequence: Synthetic oligonucleotide
guagaacccaucugagguu

SEQ ID NO: 178987 - RNA, 19 nt, Artificial Sequence
  Description of Artificial Sequence: Synthetic oligonucleotide
acuagcgcaggggcucuga

SEQ ID NO: 178988 - RNA, 19 nt, Artificial Sequence
  Description of Artificial Sequence: Synthetic oligonucleotide
cuaaagcaggaugccagcu

SEQ ID NO: 178989 - RNA, 19 nt, Artificial Sequence
  Description of Artificial Sequence: Synthetic oligonucleotide
ccuggcaacagcacauuaa

SEQ ID NO: 178990 - RNA, 19 nt, Artificial Sequence
  Description of Artificial Sequence: Synthetic oligonucleotide
caucccgagguaaaccaau

SEQ ID NO: 178991 - RNA, 19 nt, Artificial Sequence
  Description of Artificial Sequence: Synthetic oligonucleotide
guaaggcgacugccagcug

SEQ ID NO: 178992 - RNA, 19 nt, Artificial Sequence
  Description of Artificial Sequence: Synthetic oligonucleotide
caaugucgaugguugugcu

SEQ ID NO: 178993 - RNA, 19 nt, Artificial Sequence
  Description of Artificial Sequence: Synthetic oligonucleotide
cuaacccgcuaccugcgcu

SEQ ID NO: 178994 - RNA, 19 nt, Artificial Sequence
  Description of Artificial Sequence: Synthetic oligonucleotide
ccgaacagacggagaacac

SEQ ID NO: 178995 - RNA, 19 nt, Artificial Sequence
  Description of Artificial Sequence: Synthetic oligonucleotide
gcuaacccgcuaccugcgc

SEQ ID NO: 178996 - RNA, 19 nt, Artificial Sequence
  Description of Artificial Sequence: Synthetic oligonucleotide
uggcgcaguucugcugcgc

SEQ ID NO: 178997 - RNA, 19 nt, Artificial Sequence
  Description of Artificial Sequence: Synthetic oligonucleotide
caguauaaaucugguugcu

SEQ ID NO: 178998 - RNA, 19 nt, Artificial Sequence
  Description of Artificial Sequence: Synthetic oligonucleotide
cugguucgaagguagccuu

SEQ ID NO: 178999 - RNA, 19 nt, Artificial Sequence
  Description of Artificial Sequence: Synthetic oligonucleotide
uaguaacgcuaggccuacu

SEQ ID NO: 179000 - RNA, 19 nt, Artificial Sequence
  Description of Artificial Sequence: Synthetic oligonucleotide
gcccgacugcgaguaacgg

SEQ ID NO: 179001 - RNA, 19 nt, Artificial Sequence
  Description of Artificial Sequence: Synthetic oligonucleotide
cgcccgacugcgaguaacg

SEQ ID NO: 179002 - RNA, 19 nt, Artificial Sequence
  Description of Artificial Sequence: Synthetic oligonucleotide
cccaccgcuccaaacuuga

SEQ ID NO: 179003 - RNA, 19 nt, Artificial Sequence
  Description of Artificial Sequence: Synthetic oligonucleotide
acccgcuaccugcgcucug

SEQ ID NO: 179004 - RNA, 19 nt, Artificial Sequence
  Description of Artificial Sequence: Synthetic oligonucleotide
ggaugccagcuaacuaguc

SEQ ID NO: 179005 - RNA, 19 nt, Artificial Sequence
  Description of Artificial Sequence: Synthetic oligonucleotide
ccgcuccaaacuugacggc

SEQ ID NO: 179006 - RNA, 19 nt, Artificial Sequence
  Description of Artificial Sequence: Synthetic oligonucleotide
gcucaaucgucaagcugca

SEQ ID NO: 179007 - RNA, 19 nt, Artificial Sequence
  Description of Artificial Sequence: Synthetic oligonucleotide
ccuacucuuuccccucaca

SEQ ID NO: 179008 - RNA, 19 nt, Artificial Sequence
  Description of Artificial Sequence: Synthetic oligonucleotide
cugcacuagcgcaggggcu

SEQ ID NO: 179009 - RNA, 19 nt, Artificial Sequence
  Description of Artificial Sequence: Synthetic oligonucleotide
  modified_base (13)..(13): a, c, u, g, unknown or other
ccuugcuauaggnguuuaa

SEQ ID NO: 179010 - RNA, 19 nt, Artificial Sequence
  Description of Artificial Sequence: Synthetic oligonucleotide
guacuuaagugagggcguu

SEQ ID NO: 179011 - RNA, 19 nt, Artificial Sequence
  Description of Artificial Sequence: Synthetic oligonucleotide
cugcugcugcugcugcuaa

SEQ ID NO: 179012 - RNA, 19 nt, Artificial Sequence
  Description of Artificial Sequence: Synthetic oligonucleotide
cccuuacaagacauagcua

SEQ ID NO: 179013 - RNA, 19 nt, Artificial Sequence
  Description of Artificial Sequence: Synthetic oligonucleotide
ccgcaugacagucccaagu

SEQ ID NO: 179014 - RNA, 19 nt, Artificial Sequence
  Description of Artificial Sequence: Synthetic oligonucleotide
ccgcuaccugcgcucugcg

SEQ ID NO: 179015 - RNA, 19 nt, Artificial Sequence
  Description of Artificial Sequence: Synthetic oligonucleotide
cacuagcgcaggggcucug

SEQ ID NO: 179016 - RNA, 19 nt, Artificial Sequence
  Description of Artificial Sequence: Synthetic oligonucleotide
cugcgcugauguaaccauu

SEQ ID NO: 179017 - RNA, 19 nt, Artificial Sequence
  Description of Artificial Sequence: Synthetic oligonucleotide
gugggucgguuaagacaca

SEQ ID NO: 179018 - RNA, 19 nt, Artificial Sequence
  Description of Artificial Sequence: Synthetic oligonucleotide
ccccgaacagacggagaac

SEQ ID NO: 179019 - RNA, 19 nt, Artificial Sequence
  Description of Artificial Sequence: Synthetic oligonucleotide
gcugcugcugcugcugcua

SEQ ID NO: 179020 - RNA, 19 nt, Artificial Sequence
  Description of Artificial Sequence: Synthetic oligonucleotide
cgacugcgaguaacggcac

SEQ ID NO: 179021 - RNA, 19 nt, Artificial Sequence
  Description of Artificial Sequence: Synthetic oligonucleotide
ccgcccgacugcgaguaac

SEQ ID NO: 179022 - RNA, 19 nt, Artificial Sequence
  Description of Artificial Sequence: Synthetic oligonucleotide
ggaaugccucgcggauuuc

SEQ ID NO: 179023 - RNA, 19 nt, Artificial Sequence
  Description of Artificial Sequence: Synthetic oligonucleotide
gggcaagucucaggcuaaa

SEQ ID NO: 179024 - RNA, 19 nt, Artificial Sequence
  Description of Artificial Sequence: Synthetic oligonucleotide
cggcugcugcugcugcugc

SEQ ID NO: 179025 - RNA, 19 nt, Artificial Sequence
  Description of Artificial Sequence: Synthetic oligonucleotide
ggcugcugcugcugcugcu

SEQ ID NO: 179026 - RNA, 19 nt, Artificial Sequence
  Description of Artificial Sequence: Synthetic oligonucleotide
cucaaucgucaagcugcau

SEQ ID NO: 179027 - RNA, 19 nt, Artificial Sequence
  Description of Artificial Sequence: Synthetic oligonucleotide
cgcggauuuccucuucgcu

SEQ ID NO: 179028 - RNA, 19 nt, Artificial Sequence
  Description of Artificial Sequence: Synthetic oligonucleotide
gccucgcggauuuccucuu

SEQ ID NO: 179029 - RNA, 19 nt, Artificial Sequence
  Description of Artificial Sequence: Synthetic oligonucleotide
gccgcccgacugcgaguaa

SEQ ID NO: 179030 - RNA, 19 nt, Artificial Sequence
  Description of Artificial Sequence: Synthetic oligonucleotide
aaaugaaagggacaaacgg

SEQ ID NO: 179031 - RNA, 19 nt, Artificial Sequence
  Description of Artificial Sequence: Synthetic oligonucleotide
gauauguucaugcagaacc

SEQ ID NO: 179032 - RNA, 19 nt, Artificial Sequence
  Description of Artificial Sequence: Synthetic oligonucleotide
aguacuacucucuacaugg

SEQ ID NO: 179033 - RNA, 19 nt, Artificial Sequence
  Description of Artificial Sequence: Synthetic oligonucleotide
uuaauaaacucuaccgcgg

SEQ ID NO: 179034 - RNA, 19 nt, Artificial Sequence
  Description of Artificial Sequence: Synthetic oligonucleotide
aaacgggaaauccaagaac

SEQ ID NO: 179035 - RNA, 19 nt, Artificial Sequence
  Description of Artificial Sequence: Synthetic oligonucleotide
gauacuaugucagagcucc

SEQ ID NO: 179036 - RNA, 19 nt, Artificial Sequence
  Description of Artificial Sequence: Synthetic oligonucleotide
agugguaaaguaucgauug

SEQ ID NO: 179037 - RNA, 19 nt, Artificial Sequence
  Description of Artificial Sequence: Synthetic oligonucleotide
agguaagcaauauacgggg

SEQ ID NO: 179038 - RNA, 19 nt, Artificial Sequence
  Description of Artificial Sequence: Synthetic oligonucleotide
ugugcauucaaugugaauc

SEQ ID NO: 179039 - RNA, 19 nt, Artificial Sequence
  Description of Artificial Sequence: Synthetic oligonucleotide
aaaguaucgauuggcuacc

SEQ ID NO: 179040 - RNA, 19 nt, Artificial Sequence
  Description of Artificial Sequence: Synthetic oligonucleotide
auauacggggcucuuuucc

SEQ ID NO: 179041 - RNA, 19 nt, Artificial Sequence
  Description of Artificial Sequence: Synthetic oligonucleotide
uccuagaagauucuguucu

SEQ ID NO: 179042 - RNA, 19 nt, Artificial Sequence
  Description of Artificial Sequence: Synthetic oligonucleotide
caaagcggcacacacaacg

SEQ ID NO: 179043 - RNA, 19 nt, Artificial Sequence
  Description of Artificial Sequence: Synthetic oligonucleotide
ugaaguugugccauuaagu

SEQ ID NO: 179044 - RNA, 19 nt, Artificial Sequence
  Description of Artificial Sequence: Synthetic oligonucleotide
ucuaaaugguauaggagcu

SEQ ID NO: 179045 - RNA, 19 nt, Artificial Sequence
  Description of Artificial Sequence: Synthetic oligonucleotide
aagacgugagaaccaaagg

SEQ ID NO: 179046 - RNA, 19 nt, Artificial Sequence
  Description of Artificial Sequence: Synthetic oligonucleotide
uuuaauggcauugcgauau

SEQ ID NO: 179047 - RNA, 19 nt, Artificial Sequence
  Description of Artificial Sequence: Synthetic oligonucleotide
uuagauaaucucuggauau

SEQ ID NO: 179048 - RNA, 19 nt, Artificial Sequence
  Description of Artificial Sequence: Synthetic oligonucleotide
ugcagaaucuugagggugg

SEQ ID NO: 179049 - RNA, 19 nt, Artificial Sequence
  Description of Artificial Sequence: Synthetic oligonucleotide
aauauacggggcucuuuuc

SEQ ID NO: 179050 - RNA, 19 nt, Artificial Sequence
  Description of Artificial Sequence: Synthetic oligonucleotide
aagauagaccucugguauc

SEQ ID NO: 179051 - RNA, 19 nt, Artificial Sequence
  Description of Artificial Sequence: Synthetic oligonucleotide
agacgugagaaccaaaggu

SEQ ID NO: 179052 - RNA, 19 nt, Artificial Sequence
  Description of Artificial Sequence: Synthetic oligonucleotide
aacgggaaauccaagaaca

SEQ ID NO: 179053 - RNA, 19 nt, Artificial Sequence
  Description of Artificial Sequence: Synthetic oligonucleotide
gaaagugugucuaugggac

SEQ ID NO: 179054 - RNA, 19 nt, Artificial Sequence
  Description of Artificial Sequence: Synthetic oligonucleotide
agcaaccgcacacagacag

SEQ ID NO: 179055 - RNA, 19 nt, Artificial Sequence
  Description of Artificial Sequence: Synthetic oligonucleotide
uggagaguaauaaacugaa

SEQ ID NO: 179056 - RNA, 19 nt, Artificial Sequence
  Description of Artificial Sequence: Synthetic oligonucleotide
ugcuuuuaagcucagcuua

SEQ ID NO: 179057 - RNA, 19 nt, Artificial Sequence
  Description of Artificial Sequence: Synthetic oligonucleotide
uguguggucgggcaauccg

SEQ ID NO: 179058 - RNA, 19 nt, Artificial Sequence
  Description of Artificial Sequence: Synthetic oligonucleotide
aguccuauugucaaagcgg

SEQ ID NO: 179059 - RNA, 19 nt, Artificial Sequence
  Description of Artificial Sequence: Synthetic oligonucleotide
aacgcaugguuucuugaag

SEQ ID NO: 179060 - RNA, 19 nt, Artificial Sequence
  Description of Artificial Sequence: Synthetic oligonucleotide
uaauaaacucuaccgcggc

SEQ ID NO: 179061 - RNA, 19 nt, Artificial Sequence
  Description of Artificial Sequence: Synthetic oligonucleotide
uuguccugauuucugacug

SEQ ID NO: 179062 - RNA, 19 nt, Artificial Sequence
  Description of Artificial Sequence: Synthetic oligonucleotide
uccguuuaauggcauugcg

SEQ ID NO: 179063 - RNA, 19 nt, Artificial Sequence
  Description of Artificial Sequence: Synthetic oligonucleotide
cacguggagaguaauaaac

SEQ ID NO: 179064 - RNA, 19 nt, Artificial Sequence
  Description of Artificial Sequence: Synthetic oligonucleotide
gaguccgcagagcaaagcg

SEQ ID NO: 179065 - RNA, 19 nt, Artificial Sequence
  Description of Artificial Sequence: Synthetic oligonucleotide
cuaggaucgcucaugggcc

SEQ ID NO: 179066 - RNA, 19 nt, Artificial Sequence
  Description of Artificial Sequence: Synthetic oligonucleotide
aaagcggcacacacaacgc

SEQ ID NO: 179067 - RNA, 19 nt, Artificial Sequence
  Description of Artificial Sequence: Synthetic oligonucleotide
acuuuagauaaucucugga

SEQ ID NO: 179068 - RNA, 19 nt, Artificial Sequence
  Description of Artificial Sequence: Synthetic oligonucleotide
agaucgucagcugagaugu

SEQ ID NO: 179069 - RNA, 19 nt, Artificial Sequence
  Description of Artificial Sequence: Synthetic oligonucleotide
aauaaacucuaccgcggcu

SEQ ID NO: 179070 - RNA, 19 nt, Artificial Sequence
  Description of Artificial Sequence: Synthetic oligonucleotide
gaaccagcguguuagcuug

SEQ ID NO: 179071 - RNA, 19 nt, Artificial Sequence
  Description of Artificial Sequence: Synthetic oligonucleotide
aucgaugguuuuaauaaac

SEQ ID NO: 179072 - RNA, 19 nt, Artificial Sequence
  Description of Artificial Sequence: Synthetic oligonucleotide
aacuaucucuguaagagaa

SEQ ID NO: 179073 - RNA, 19 nt, Artificial Sequence
  Description of Artificial Sequence: Synthetic oligonucleotide
uuauuguccugauuucuga

SEQ ID NO: 179074 - RNA, 19 nt, Artificial Sequence
  Description of Artificial Sequence: Synthetic oligonucleotide
aauagugcggcugaucaaa

SEQ ID NO: 179075 - RNA, 19 nt, Artificial Sequence
  Description of Artificial Sequence: Synthetic oligonucleotide
caguuaagacgugagaacc

SEQ ID NO: 179076 - RNA, 19 nt, Artificial Sequence
  Description of Artificial Sequence: Synthetic oligonucleotide
cuacucucuacauggagac

SEQ ID NO: 179077 - RNA, 19 nt, Artificial Sequence
  Description of Artificial Sequence: Synthetic oligonucleotide
agucgucugccccagggac

SEQ ID NO: 179078 - RNA, 19 nt, Artificial Sequence
  Description of Artificial Sequence: Synthetic oligonucleotide
gaaccuucggccuuacaac

SEQ ID NO: 179079 - RNA, 19 nt, Artificial Sequence
  Description of Artificial Sequence: Synthetic oligonucleotide
aaccuucggccuuacaaca

SEQ ID NO: 179080 - RNA, 19 nt, Artificial Sequence
  Description of Artificial Sequence: Synthetic oligonucleotide
acaaguccuauugucaaag

SEQ ID NO: 179081 - RNA, 19 nt, Artificial Sequence
  Description of Artificial Sequence: Synthetic oligonucleotide
aacacagggacgaagucgu

SEQ ID NO: 179082 - RNA, 19 nt, Artificial Sequence
  Description of Artificial Sequence: Synthetic oligonucleotide
cacuacuuuagauaaucuc

SEQ ID NO: 179083 - RNA, 19 nt, Artificial Sequence
  Description of Artificial Sequence: Synthetic oligonucleotide
gcuaggaucgcucaugggc

SEQ ID NO: 179084 - RNA, 19 nt, Artificial Sequence
  Description of Artificial Sequence: Synthetic oligonucleotide
aacugccccuguuuguuag

SEQ ID NO: 179085 - RNA, 19 nt, Artificial Sequence
  Description of Artificial Sequence: Synthetic oligonucleotide
gagaucgucagcugagaug

SEQ ID NO: 179086 - RNA, 19 nt, Artificial Sequence
  Description of Artificial Sequence: Synthetic oligonucleotide
aagauccgauucaucacac

SEQ ID NO: 179087 - RNA, 19 nt, Artificial Sequence
  Description of Artificial Sequence: Synthetic oligonucleotide
uccuacaaguccuauuguc

SEQ ID NO: 179088 - RNA, 19 nt, Artificial Sequence
  Description of Artificial Sequence: Synthetic oligonucleotide
aaccauuucacaagaggga

SEQ ID NO: 179089 - RNA, 19 nt, Artificial Sequence
  Description of Artificial Sequence: Synthetic oligonucleotide
aaucugucaggccccagau

SEQ ID NO: 179090 - RNA, 19 nt, Artificial Sequence
  Description of Artificial Sequence: Synthetic oligonucleotide
ucggccuuacaacagcaga

SEQ ID NO: 179091 - RNA, 19 nt, Artificial Sequence
  Description of Artificial Sequence: Synthetic oligonucleotide
acuaguuacagaaucuuaa

SEQ ID NO: 179092 - RNA, 19 nt, Artificial Sequence
  Description of Artificial Sequence: Synthetic oligonucleotide
uauuguccugauuucugac

SEQ ID NO: 179093 - RNA, 19 nt, Artificial Sequence
  Description of Artificial Sequence: Synthetic oligonucleotide
uuugcaguacuacucucua

SEQ ID NO: 179094 - RNA, 19 nt, Artificial Sequence
  Description of Artificial Sequence: Synthetic oligonucleotide
aucaguacagcagacaaua

SEQ ID NO: 179095 - RNA, 19 nt, Artificial Sequence
  Description of Artificial Sequence: Synthetic oligonucleotide
aguccuugucgacaacggg

SEQ ID NO: 179096 - RNA, 19 nt, Artificial Sequence
  Description of Artificial Sequence: Synthetic oligonucleotide
agaugcccauaucacauca

SEQ ID NO: 179097 - RNA, 19 nt, Artificial Sequence
  Description of Artificial Sequence: Synthetic oligonucleotide
uccguuccuugcuggaugg

SEQ ID NO: 179098 - RNA, 19 nt, Artificial Sequence
  Description of Artificial Sequence: Synthetic oligonucleotide
agggacagaguccucguug

SEQ ID NO: 179099 - RNA, 19 nt, Artificial Sequence
  Description of Artificial Sequence: Synthetic oligonucleotide
agagaaugcagaaucuuga

SEQ ID NO: 179100 - RNA, 19 nt, Artificial Sequence
  Description of Artificial Sequence: Synthetic oligonucleotide
gucacuacuuuagauaauc

SEQ ID NO: 179101 - RNA, 19 nt, Artificial Sequence
  Description of Artificial Sequence: Synthetic oligonucleotide
agugcggcugaucaaaaua

SEQ ID NO: 179102 - RNA, 19 nt, Artificial Sequence
  Description of Artificial Sequence: Synthetic oligonucleotide
gguauaggagcuuuaggca

SEQ ID NO: 179103 - RNA, 19 nt, Artificial Sequence
  Description of Artificial Sequence: Synthetic oligonucleotide
agggagcucaucauucccc

SEQ ID NO: 179104 - RNA, 19 nt, Artificial Sequence
  Description of Artificial Sequence: Synthetic oligonucleotide
cacgaagauagaccucugg

SEQ ID NO: 179105 - RNA, 19 nt, Artificial Sequence
  Description of Artificial Sequence: Synthetic oligonucleotide
uacugcacgguggacaaca

SEQ ID NO: 179106 - RNA, 19 nt, Artificial Sequence
  Description of Artificial Sequence: Synthetic oligonucleotide
cuggcauuuugccauauga

SEQ ID NO: 179107 - RNA, 19 nt, Artificial Sequence
  Description of Artificial Sequence: Synthetic oligonucleotide
cuaagaauagugcggcuga

SEQ ID NO: 179108 - RNA, 19 nt, Artificial Sequence
  Description of Artificial Sequence: Synthetic oligonucleotide
uaagcaauauacggggcuc

SEQ ID NO: 179109 - RNA, 19 nt, Artificial Sequence
  Description of Artificial Sequence: Synthetic oligonucleotide
guccuauugucaaagcggc

SEQ ID NO: 179110 - RNA, 19 nt, Artificial Sequence
  Description of Artificial Sequence: Synthetic oligonucleotide
cauugcgauauuuguccag

SEQ ID NO: 179111 - RNA, 19 nt, Artificial Sequence
  Description of Artificial Sequence: Synthetic oligonucleotide
ucucaagcagcaaccgcac

SEQ ID NO: 179112 - RNA, 19 nt, Artificial Sequence
  Description of Artificial Sequence: Synthetic oligonucleotide
ugucuaugggacacuguuc

SEQ ID NO: 179113 - RNA, 19 nt, Artificial Sequence
  Description of Artificial Sequence: Synthetic oligonucleotide
acgcaugguuucuugaagu

SEQ ID NO: 179114 - RNA, 19 nt, Artificial Sequence
  Description of Artificial Sequence: Synthetic oligonucleotide
gugcauucaaugugaauca

SEQ ID NO: 179115 - RNA, 19 nt, Artificial Sequence
  Description of Artificial Sequence: Synthetic oligonucleotide
aguccgcagagcaaagcgc

SEQ ID NO: 179116 - RNA, 19 nt, Artificial Sequence
  Description of Artificial Sequence: Synthetic oligonucleotide
auugcgauauuuguccaga

SEQ ID NO: 179117 - RNA, 19 nt, Artificial Sequence
  Description of Artificial Sequence: Synthetic oligonucleotide
acuacucucuacauggaga

SEQ ID NO: 179118 - RNA, 19 nt, Artificial Sequence
  Description of Artificial Sequence: Synthetic oligonucleotide
aaagagaaccagcguguua

SEQ ID NO: 179119 - RNA, 19 nt, Artificial Sequence
  Description of Artificial Sequence: Synthetic oligonucleotide
cagucacuacuuuagauaa

SEQ ID NO: 179120 - RNA, 19 nt, Artificial Sequence
  Description of Artificial Sequence: Synthetic oligonucleotide
uaggaucgcucaugggccg

SEQ ID NO: 179121 - RNA, 19 nt, Artificial Sequence
  Description of Artificial Sequence: Synthetic oligonucleotide
aucacggggagaaucauga

SEQ ID NO: 179122 - RNA, 19 nt, Artificial Sequence
  Description of Artificial Sequence: Synthetic oligonucleotide
acacuaguaaaaccuggau

SEQ ID NO: 179123 - RNA, 19 nt, Artificial Sequence
  Description of Artificial Sequence: Synthetic oligonucleotide
agagccauguggaaacguc

SEQ ID NO: 179124 - RNA, 19 nt, Artificial Sequence
  Description of Artificial Sequence: Synthetic oligonucleotide
uugucgacaacgggugagg

SEQ ID NO: 179125 - RNA, 19 nt, Artificial Sequence
  Description of Artificial Sequence: Synthetic oligonucleotide
acgugagaaccaaagguag

SEQ ID NO: 179126 - RNA, 19 nt, Artificial Sequence
  Description of Artificial Sequence: Synthetic oligonucleotide
uucggccuuacaacagcag

SEQ ID NO: 179127 - RNA, 19 nt, Artificial Sequence
  Description of Artificial Sequence: Synthetic oligonucleotide
uuuaggcauagcugacaca

SEQ ID NO: 179128 - RNA, 19 nt, Artificial Sequence
  Description of Artificial Sequence: Synthetic oligonucleotide
caucauuccccggacggcg

SEQ ID NO: 179129 - RNA, 19 nt, Artificial Sequence
  Description of Artificial Sequence: Synthetic oligonucleotide
uucgaggauuggaggaucu

SEQ ID NO: 179130 - RNA, 19 nt, Artificial Sequence
  Description of Artificial Sequence: Synthetic oligonucleotide
agaguccgcagagcaaagc

SEQ ID NO: 179131 - RNA, 19 nt, Artificial Sequence
  Description of Artificial Sequence: Synthetic oligonucleotide
guaaaaccuggaucaguac

SEQ ID NO: 179132 - RNA, 19 nt, Artificial Sequence
  Description of Artificial Sequence: Synthetic oligonucleotide
accgcacacagacaguggu

SEQ ID NO: 179133 - RNA, 19 nt, Artificial Sequence
  Description of Artificial Sequence: Synthetic oligonucleotide
caccuucgaggauuggagg

SEQ ID NO: 179134 - RNA, 19 nt, Artificial Sequence
  Description of Artificial Sequence: Synthetic oligonucleotide
guggagaguaauaaacuga

SEQ ID NO: 179135 - RNA, 19 nt, Artificial Sequence
  Description of Artificial Sequence: Synthetic oligonucleotide
cauugcgccuucacugggg

SEQ ID NO: 179136 - RNA, 19 nt, Artificial Sequence
  Description of Artificial Sequence: Synthetic oligonucleotide
uuccuacaaguccuauugu

SEQ ID NO: 179137 - RNA, 19 nt, Artificial Sequence
  Description of Artificial Sequence: Synthetic oligonucleotide
ggcguagugaaccuucggc

SEQ ID NO: 179138 - RNA, 19 nt, Artificial Sequence
  Description of Artificial Sequence: Synthetic oligonucleotide
ccuuacaacagcagaggcc

SEQ ID NO: 179139 - RNA, 19 nt, Artificial Sequence
  Description of Artificial Sequence: Synthetic oligonucleotide
gacgugagaaccaaaggua

SEQ ID NO: 179140 - RNA, 19 nt, Artificial Sequence
  Description of Artificial Sequence: Synthetic oligonucleotide
caguacagcagacaauaca

SEQ ID NO: 179141 - RNA, 19 nt, Artificial Sequence
  Description of Artificial Sequence: Synthetic oligonucleotide
ucugugcauucaaugugaa

SEQ ID NO: 179142 - RNA, 19 nt, Artificial Sequence
  Description of Artificial Sequence: Synthetic oligonucleotide
cuugucgacaacgggugag

SEQ ID NO: 179143 - RNA, 19 nt, Artificial Sequence
  Description of Artificial Sequence: Synthetic oligonucleotide
accauuucacaagagggaa

SEQ ID NO: 179144 - RNA, 19 nt, Artificial Sequence
  Description of Artificial Sequence: Synthetic oligonucleotide
ugguggcgugccuacauga

SEQ ID NO: 179145 - RNA, 19 nt, Artificial Sequence
  Description of Artificial Sequence: Synthetic oligonucleotide
aagcaauauacggggcucu

SEQ ID NO: 179146 - RNA, 19 nt, Artificial Sequence
  Description of Artificial Sequence: Synthetic oligonucleotide
uacaaguccuauugucaaa

SEQ ID NO: 179147 - RNA, 19 nt, Artificial Sequence
  Description of Artificial Sequence: Synthetic oligonucleotide
guaagcaauauacggggcu

SEQ ID NO: 179148 - RNA, 19 nt, Artificial Sequence
  Description of Artificial Sequence: Synthetic oligonucleotide
gcgauauuuguccagaaua

SEQ ID NO: 179149 - RNA, 19 nt, Artificial Sequence
  Description of Artificial Sequence: Synthetic oligonucleotide
aaccugagucugugcacug

SEQ ID NO: 179150 - RNA, 19 nt, Artificial Sequence
  Description of Artificial Sequence: Synthetic oligonucleotide
augcccauaucacaucaaa

SEQ ID NO: 179151 - RNA, 19 nt, Artificial Sequence
  Description of Artificial Sequence: Synthetic oligonucleotide
uccuauugucaaagcggca

SEQ ID NO: 179152 - RNA, 19 nt, Artificial Sequence
  Description of Artificial Sequence: Synthetic oligonucleotide
uacaugacuuccccaucaa

SEQ ID NO: 179153 - RNA, 19 nt, Artificial Sequence
  Description of Artificial Sequence: Synthetic oligonucleotide
aacgggugagguaagcaau

SEQ ID NO: 179154 - RNA, 19 nt, Artificial Sequence
  Description of Artificial Sequence: Synthetic oligonucleotide
aguuaagacgugagaacca

SEQ ID NO: 179155 - RNA, 19 nt, Artificial Sequence
  Description of Artificial Sequence: Synthetic oligonucleotide
gcguagugaaccuucggcc

SEQ ID NO: 179156 - RNA, 19 nt, Artificial Sequence
  Description of Artificial Sequence: Synthetic oligonucleotide
gacgaagucgucugcccca

SEQ ID NO: 179157 - RNA, 19 nt, Artificial Sequence
  Description of Artificial Sequence: Synthetic oligonucleotide
cacaacgcaugguuucuug

SEQ ID NO: 179158 - RNA, 19 nt, Artificial Sequence
  Description of Artificial Sequence: Synthetic oligonucleotide
auacggggcucuuuuccug

SEQ ID NO: 179159 - RNA, 19 nt, Artificial Sequence
  Description of Artificial Sequence: Synthetic oligonucleotide
acguggagaguaauaaacu

SEQ ID NO: 179160 - RNA, 19 nt, Artificial Sequence
  Description of Artificial Sequence: Synthetic oligonucleotide
caucacggggagaaucaug

SEQ ID NO: 179161 - RNA, 19 nt, Artificial Sequence
  Description of Artificial Sequence: Synthetic oligonucleotide
uggauggguuaggaacugg

SEQ ID NO: 179162 - RNA, 19 nt, Artificial Sequence
  Description of Artificial Sequence: Synthetic oligonucleotide
agcuaggaucgcucauggg

SEQ ID NO: 179163 - RNA, 19 nt, Artificial Sequence
  Description of Artificial Sequence: Synthetic oligonucleotide
aagcacuuauuguccugau

SEQ ID NO: 179164 - RNA, 19 nt, Artificial Sequence
  Description of Artificial Sequence: Synthetic oligonucleotide
cugggcucgucugugagug

SEQ ID NO: 179165 - RNA, 19 nt, Artificial Sequence
  Description of Artificial Sequence: Synthetic oligonucleotide
cuauugucaaagcggcaca

SEQ ID NO: 179166 - RNA, 19 nt, Artificial Sequence
  Description of Artificial Sequence: Synthetic oligonucleotide
gucacggaguauguccccg

SEQ ID NO: 179167 - RNA, 19 nt, Artificial Sequence
  Description of Artificial Sequence: Synthetic oligonucleotide
auugcaccauacaggaacu

SEQ ID NO: 179168 - RNA, 19 nt, Artificial Sequence
  Description of Artificial Sequence: Synthetic oligonucleotide
guuaagacgugagaaccaa

SEQ ID NO: 179169 - RNA, 19 nt, Artificial Sequence
  Description of Artificial Sequence: Synthetic oligonucleotide
gucugugcauucaauguga

SEQ ID NO: 179170 - RNA, 19 nt, Artificial Sequence
  Description of Artificial Sequence: Synthetic oligonucleotide
cagaagauacuaugucaga

SEQ ID NO: 179171 - RNA, 19 nt, Artificial Sequence
  Description of Artificial Sequence: Synthetic oligonucleotide
ggccuuacaacagcagagg

SEQ ID NO: 179172 - RNA, 19 nt, Artificial Sequence
  Description of Artificial Sequence: Synthetic oligonucleotide
gccauugcgccuucacugg

SEQ ID NO: 179173 - RNA, 19 nt, Artificial Sequence
  Description of Artificial Sequence: Synthetic oligonucleotide
gaauagugcggcugaucaa

SEQ ID NO: 179174 - RNA, 19 nt, Artificial Sequence
  Description of Artificial Sequence: Synthetic oligonucleotide
ccuacaaguccuauuguca

SEQ ID NO: 179175 - RNA, 19 nt, Artificial Sequence
  Description of Artificial Sequence: Synthetic oligonucleotide
caucgaugguuuuaauaaa

SEQ ID NO: 179176 - RNA, 19 nt, Artificial Sequence
  Description of Artificial Sequence: Synthetic oligonucleotide
gcugcgaaccagucucucg

SEQ ID NO: 179177 - RNA, 19 nt, Artificial Sequence
  Description of Artificial Sequence: Synthetic oligonucleotide
acgggaaauccaagaacag

SEQ ID NO: 179178 - RNA, 19 nt, Artificial Sequence
  Description of Artificial Sequence: Synthetic oligonucleotide
gaaccagucucucggggua

SEQ ID NO: 179179 - RNA, 19 nt, Artificial Sequence
  Description of Artificial Sequence: Synthetic oligonucleotide
guccguuuaauggcauugc

SEQ ID NO: 179180 - RNA, 19 nt, Artificial Sequence
  Description of Artificial Sequence: Synthetic oligonucleotide
uguggucgggcaauccguu

SEQ ID NO: 179181 - RNA, 19 nt, Artificial Sequence
  Description of Artificial Sequence: Synthetic oligonucleotide
gcacuuauuguccugauuu

SEQ ID NO: 179182 - RNA, 19 nt, Artificial Sequence
  Description of Artificial Sequence: Synthetic oligonucleotide
ccuaagaauagugcggcug

SEQ ID NO: 179183 - RNA, 19 nt, Artificial Sequence
  Description of Artificial Sequence: Synthetic oligonucleotide
ggccccaucaugugaagac

SEQ ID NO: 179184 - RNA, 19 nt, Artificial Sequence
  Description of Artificial Sequence: Synthetic oligonucleotide
caacgggugagguaagcaa

SEQ ID NO: 179185 - RNA, 19 nt, Artificial Sequence
  Description of Artificial Sequence: Synthetic oligonucleotide
guuuaauggcauugcgaua

SEQ ID NO: 179186 - RNA, 19 nt, Artificial Sequence
  Description of Artificial Sequence: Synthetic oligonucleotide
ugcauucaaugugaaucau

SEQ ID NO: 179187 - RNA, 19 nt, Artificial Sequence
  Description of Artificial Sequence: Synthetic oligonucleotide
acaauacaaauuaguuuua

SEQ ID NO: 179188 - RNA, 19 nt, Artificial Sequence
  Description of Artificial Sequence: Synthetic oligonucleotide
gcaccuucgaggauuggag

SEQ ID NO: 179189 - RNA, 19 nt, Artificial Sequence
  Description of Artificial Sequence: Synthetic oligonucleotide
ggacgaagucgucugcccc

SEQ ID NO: 179190 - RNA, 19 nt, Artificial Sequence
  Description of Artificial Sequence: Synthetic oligonucleotide
gguaagcaauauacggggc

SEQ ID NO: 179191 - RNA, 19 nt, Artificial Sequence
  Description of Artificial Sequence: Synthetic oligonucleotide
cuucggccuuacaacagca

SEQ ID NO: 179192 - RNA, 19 nt, Artificial Sequence
  Description of Artificial Sequence: Synthetic oligonucleotide
uugcuggauggguuaggaa

SEQ ID NO: 179193 - RNA, 19 nt, Artificial Sequence
  Description of Artificial Sequence: Synthetic oligonucleotide
gaaggccgggcguagugaa

SEQ ID NO: 179194 - RNA, 19 nt, Artificial Sequence
  Description of Artificial Sequence: Synthetic oligonucleotide
gugucuaugggacacuguu

SEQ ID NO: 179195 - RNA, 19 nt, Artificial Sequence
  Description of Artificial Sequence: Synthetic oligonucleotide
ucgaggauuggaggaucug

SEQ ID NO: 179196 - RNA, 19 nt, Artificial Sequence
  Description of Artificial Sequence: Synthetic oligonucleotide
ucauuccccggacggcggu

SEQ ID NO: 179197 - RNA, 19 nt, Artificial Sequence
  Description of Artificial Sequence: Synthetic oligonucleotide
ugucgacaacgggugaggu

SEQ ID NO: 179198 - RNA, 19 nt, Artificial Sequence
  Description of Artificial Sequence: Synthetic oligonucleotide
uagugcggcugaucaaaau

SEQ ID NO: 179199 - RNA, 19 nt, Artificial Sequence
  Description of Artificial Sequence: Synthetic oligonucleotide
uacucucuacauggagaca

SEQ ID NO: 179200 - RNA, 19 nt, Artificial Sequence
  Description of Artificial Sequence: Synthetic oligonucleotide
aucgauuggcuaccucuuu

SEQ ID NO: 179201 - RNA, 19 nt, Artificial Sequence
  Description of Artificial Sequence: Synthetic oligonucleotide
cacuccguucgauggccag

SEQ ID NO: 179202 - RNA, 19 nt, Artificial Sequence
  Description of Artificial Sequence: Synthetic oligonucleotide
gccaaggggccucacgaag

SEQ ID NO: 179203 - RNA, 19 nt, Artificial Sequence
  Description of Artificial Sequence: Synthetic oligonucleotide
agugaaccuucggccuuac

SEQ ID NO: 179204 - RNA, 19 nt, Artificial Sequence
  Description of Artificial Sequence: Synthetic oligonucleotide
gcgaaccagucucucgggg

SEQ ID NO: 179205 - RNA, 19 nt, Artificial Sequence
  Description of Artificial Sequence: Synthetic oligonucleotide
accuucggccuuacaacag

SEQ ID NO: 179206 - RNA, 19 nt, Artificial Sequence
  Description of Artificial Sequence: Synthetic oligonucleotide
ccuucggccuuacaacagc

SEQ ID NO: 179207 - RNA, 19 nt, Artificial Sequence
  Description of Artificial Sequence: Synthetic oligonucleotide
ucaucacggggagaaucau

SEQ ID NO: 179208 - RNA, 19 nt, Artificial Sequence
  Description of Artificial Sequence: Synthetic oligonucleotide
cagggacgaagucgucugc

SEQ ID NO: 179209 - RNA, 19 nt, Artificial Sequence
  Description of Artificial Sequence: Synthetic oligonucleotide
gaugcgaaggccgggcgua

SEQ ID NO: 179210 - RNA, 19 nt, Artificial Sequence
  Description of Artificial Sequence: Synthetic oligonucleotide
uggcuacagucugaugccu

SEQ ID NO: 179211 - RNA, 19 nt, Artificial Sequence
  Description of Artificial Sequence: Synthetic oligonucleotide
agugugucuaugggacacu

SEQ ID NO: 179212 - RNA, 19 nt, Artificial Sequence
  Description of Artificial Sequence: Synthetic oligonucleotide
ggacaaacgggaaauccaa

SEQ ID NO: 179213 - RNA, 19 nt, Artificial Sequence
  Description of Artificial Sequence: Synthetic oligonucleotide
uggccucauuuccucccac

SEQ ID NO: 179214 - RNA, 19 nt, Artificial Sequence
  Description of Artificial Sequence: Synthetic oligonucleotide
gccucacgaagauagaccu

SEQ ID NO: 179215 - RNA, 19 nt, Artificial Sequence
  Description of Artificial Sequence: Synthetic oligonucleotide
cggccuuacaacagcagag

SEQ ID NO: 179216 - RNA, 19 nt, Artificial Sequence
  Description of Artificial Sequence: Synthetic oligonucleotide
ugguccguuuaauggcauu

SEQ ID NO: 179217 - RNA, 19 nt, Artificial Sequence
  Description of Artificial Sequence: Synthetic oligonucleotide
ccguuuaauggcauugcga

SEQ ID NO: 179218 - RNA, 19 nt, Artificial Sequence
  Description of Artificial Sequence: Synthetic oligonucleotide
gggcguagugaaccuucgg

SEQ ID NO: 179219 - RNA, 19 nt, Artificial Sequence
  Description of Artificial Sequence: Synthetic oligonucleotide
cacggaguauguccccguc

SEQ ID NO: 179220 - RNA, 19 nt, Artificial Sequence
  Description of Artificial Sequence: Synthetic oligonucleotide
ggaaacgucuggaagcugu

SEQ ID NO: 179221 - RNA, 19 nt, Artificial Sequence
  Description of Artificial Sequence: Synthetic oligonucleotide
uagugaaccuucggccuua

SEQ ID NO: 179222 - RNA, 19 nt, Artificial Sequence
  Description of Artificial Sequence: Synthetic oligonucleotide
cagaggccccaucauguga

SEQ ID NO: 179223 - RNA, 19 nt, Artificial Sequence
  Description of Artificial Sequence: Synthetic oligonucleotide
gagaaccagcguguuagcu

SEQ ID NO: 179224 - RNA, 19 nt, Artificial Sequence
  Description of Artificial Sequence: Synthetic oligonucleotide
gcauugcgauauuugucca

SEQ ID NO: 179225 - RNA, 19 nt, Artificial Sequence
  Description of Artificial Sequence: Synthetic oligonucleotide
gacggcgguuccagcuagg

SEQ ID NO: 179226 - RNA, 19 nt, Artificial Sequence
  Description of Artificial Sequence: Synthetic oligonucleotide
gcguguuagcuuguuaauc

SEQ ID NO: 179227 - RNA, 19 nt, Artificial Sequence
  Description of Artificial Sequence: Synthetic oligonucleotide
gccgccgcacagaagauac

SEQ ID NO: 179228 - RNA, 19 nt, Artificial Sequence
  Description of Artificial Sequence: Synthetic oligonucleotide
agcaauauacggggcucuu

SEQ ID NO: 179229 - RNA, 19 nt, Artificial Sequence
  Description of Artificial Sequence: Synthetic oligonucleotide
auagugcggcugaucaaaa

SEQ ID NO: 179230 - RNA, 19 nt, Artificial Sequence
  Description of Artificial Sequence: Synthetic oligonucleotide
ccagcuaggaucgcucaug

SEQ ID NO: 179231 - RNA, 19 nt, Artificial Sequence
  Description of Artificial Sequence: Synthetic oligonucleotide
ccauugcgccuucacuggg

SEQ ID NO: 179232 - RNA, 19 nt, Artificial Sequence
  Description of Artificial Sequence: Synthetic oligonucleotide
guggucgggcaauccguuc

SEQ ID NO: 179233 - RNA, 19 nt, Artificial Sequence
  Description of Artificial Sequence: Synthetic oligonucleotide
guggcgugccuacaugacu

SEQ ID NO: 179234 - RNA, 19 nt, Artificial Sequence
  Description of Artificial Sequence: Synthetic oligonucleotide
ggguuuuguaagcacuuau

SEQ ID NO: 179235 - RNA, 19 nt, Artificial Sequence
  Description of Artificial Sequence: Synthetic oligonucleotide
ccuacaugacuuccccauc

SEQ ID NO: 179236 - RNA, 19 nt, Artificial Sequence
  Description of Artificial Sequence: Synthetic oligonucleotide
guagugaaccuucggccuu

SEQ ID NO: 179237 - RNA, 19 nt, Artificial Sequence
  Description of Artificial Sequence: Synthetic oligonucleotide
caaccugagucugugcacu

SEQ ID NO: 179238 - RNA, 19 nt, Artificial Sequence
  Description of Artificial Sequence: Synthetic oligonucleotide
gccuacaugacuuccccau

SEQ ID NO: 179239 - RNA, 19 nt, Artificial Sequence
  Description of Artificial Sequence: Synthetic oligonucleotide
gcgaaggccgggcguagug

SEQ ID NO: 179240 - RNA, 19 nt, Artificial Sequence
  Description of Artificial Sequence: Synthetic oligonucleotide
gucgucugccccagggaca

SEQ ID NO: 179241 - RNA, 19 nt, Artificial Sequence
  Description of Artificial Sequence: Synthetic oligonucleotide
augcgaaggccgggcguag

SEQ ID NO: 179242 - RNA, 19 nt, Artificial Sequence
  Description of Artificial Sequence: Synthetic oligonucleotide
ccgggcguagugaaccuuc

SEQ ID NO: 179243 - RNA, 19 nt, Artificial Sequence
  Description of Artificial Sequence: Synthetic oligonucleotide
acacaacgcaugguuucuu

SEQ ID NO: 179244 - RNA, 19 nt, Artificial Sequence
  Description of Artificial Sequence: Synthetic oligonucleotide
cuaaaugguauaggagcuu

SEQ ID NO: 179245 - RNA, 19 nt, Artificial Sequence
  Description of Artificial Sequence: Synthetic oligonucleotide
cacagggacgaagucgucu

SEQ ID NO: 179246 - RNA, 19 nt, Artificial Sequence
  Description of Artificial Sequence: Synthetic oligonucleotide
cacagccuacucucagcaa

SEQ ID NO: 179247 - RNA, 19 nt, Artificial Sequence
  Description of Artificial Sequence: Synthetic oligonucleotide
ccucacgaagauagaccuc

SEQ ID NO: 179248 - RNA, 19 nt, Artificial Sequence
  Description of Artificial Sequence: Synthetic oligonucleotide
gcggcacacacaacgcaug

SEQ ID NO: 179249 - RNA, 19 nt, Artificial Sequence
  Description of Artificial Sequence: Synthetic oligonucleotide
caugguggcgugccuacau

SEQ ID NO: 179250 - RNA, 19 nt, Artificial Sequence
  Description of Artificial Sequence: Synthetic oligonucleotide
gcaagcuugaagauccgau

SEQ ID NO: 179251 - RNA, 19 nt, Artificial Sequence
  Description of Artificial Sequence: Synthetic oligonucleotide
guguggucgggcaauccgu

SEQ ID NO: 179252 - RNA, 19 nt, Artificial Sequence
  Description of Artificial Sequence: Synthetic oligonucleotide
gcgugccuacaugacuucc

SEQ ID NO: 179253 - RNA, 19 nt, Artificial Sequence
  Description of Artificial Sequence: Synthetic oligonucleotide
gcggaugcgaaggccgggc

SEQ ID NO: 179254 - RNA, 19 nt, Artificial Sequence
  Description of Artificial Sequence: Synthetic oligonucleotide
acggggcucuuuuccugua

SEQ ID NO: 179255 - RNA, 19 nt, Artificial Sequence
  Description of Artificial Sequence: Synthetic oligonucleotide
gcaguacuacucucuacau

SEQ ID NO: 179256 - RNA, 19 nt, Artificial Sequence
  Description of Artificial Sequence: Synthetic oligonucleotide
ggcgugccuacaugacuuc

SEQ ID NO: 179257 - RNA, 19 nt, Artificial Sequence
  Description of Artificial Sequence: Synthetic oligonucleotide
ggaucgcucaugggccgcc

SEQ ID NO: 179258 - RNA, 19 nt, Artificial Sequence
  Description of Artificial Sequence: Synthetic oligonucleotide
cuccguucgauggccagcu

SEQ ID NO: 179259 - RNA, 19 nt, Artificial Sequence
  Description of Artificial Sequence: Synthetic oligonucleotide
guccaugguggcgugccua

SEQ ID NO: 179260 - RNA, 19 nt, Artificial Sequence
  Description of Artificial Sequence: Synthetic oligonucleotide
ggaaggcuacagaguccgc

SEQ ID NO: 179261 - RNA, 19 nt, Artificial Sequence
  Description of Artificial Sequence: Synthetic oligonucleotide
ggaugcgaaggccgggcgu

SEQ ID NO: 179262 - RNA, 19 nt, Artificial Sequence
  Description of Artificial Sequence: Synthetic oligonucleotide
gggguuuuguaagcacuua

SEQ ID NO: 179263 - RNA, 19 nt, Artificial Sequence
  Description of Artificial Sequence: Synthetic oligonucleotide
guauguccccguccugguu

SEQ ID NO: 179264 - RNA, 19 nt, Artificial Sequence
  Description of Artificial Sequence: Synthetic oligonucleotide
ggucgggcaauccguuccu

SEQ ID NO: 179265 - RNA, 19 nt, Artificial Sequence
  Description of Artificial Sequence: Synthetic oligonucleotide
gaaccuggucacggaguau

SEQ ID NO: 179266 - RNA, 19 nt, Artificial Sequence
  Description of Artificial Sequence: Synthetic oligonucleotide
cugguccguuuaauggcau

SEQ ID NO: 179267 - RNA, 19 nt, Artificial Sequence
  Description of Artificial Sequence: Synthetic oligonucleotide
cugcugcgaaccagucucu

SEQ ID NO: 179268 - RNA, 19 nt, Artificial Sequence
  Description of Artificial Sequence: Synthetic oligonucleotide
ccuugucgacaacggguga

SEQ ID NO: 179269 - RNA, 19 nt, Artificial Sequence
  Description of Artificial Sequence: Synthetic oligonucleotide
cgacaacgggugagguaag

SEQ ID NO: 179270 - RNA, 19 nt, Artificial Sequence
  Description of Artificial Sequence: Synthetic oligonucleotide
cgcggcugugaacugcauc

SEQ ID NO: 179271 - RNA, 19 nt, Artificial Sequence
  Description of Artificial Sequence: Synthetic oligonucleotide
ggacuccucuccagacaga

SEQ ID NO: 179272 - RNA, 19 nt, Artificial Sequence
  Description of Artificial Sequence: Synthetic oligonucleotide
gcaauauacggggcucuuu

SEQ ID NO: 179273 - RNA, 19 nt, Artificial Sequence
  Description of Artificial Sequence: Synthetic oligonucleotide
cccggacggcgguuccagc

SEQ ID NO: 179274 - RNA, 19 nt, Artificial Sequence
  Description of Artificial Sequence: Synthetic oligonucleotide
ccccggacggcgguuccag

SEQ ID NO: 179275 - RNA, 19 nt, Artificial Sequence
  Description of Artificial Sequence: Synthetic oligonucleotide
ccgcacacagacaguggua

SEQ ID NO: 179276 - RNA, 19 nt, Artificial Sequence
  Description of Artificial Sequence: Synthetic oligonucleotide
ggucagaugguggcuccau

SEQ ID NO: 179277 - RNA, 19 nt, Artificial Sequence
  Description of Artificial Sequence: Synthetic oligonucleotide
gccgcacagaagauacuau

SEQ ID NO: 179278 - RNA, 19 nt, Artificial Sequence
  Description of Artificial Sequence: Synthetic oligonucleotide
cccuaagaauagugcggcu

SEQ ID NO: 179279 - RNA, 19 nt, Artificial Sequence
  Description of Artificial Sequence: Synthetic oligonucleotide
cgccgcacagaagauacua

SEQ ID NO: 179280 - RNA, 19 nt, Artificial Sequence
  Description of Artificial Sequence: Synthetic oligonucleotide
gggcucgucugugaguguu

SEQ ID NO: 179281 - RNA, 19 nt, Artificial Sequence
  Description of Artificial Sequence: Synthetic oligonucleotide
cgaaggccgggcguaguga

SEQ ID NO: 179282 - RNA, 19 nt, Artificial Sequence
  Description of Artificial Sequence: Synthetic oligonucleotide
ccgauucaucacacuccgu

SEQ ID NO: 179283 - RNA, 19 nt, Artificial Sequence
  Description of Artificial Sequence: Synthetic oligonucleotide
cguccugguuaggguaaaa

SEQ ID NO: 179284 - RNA, 19 nt, Artificial Sequence
  Description of Artificial Sequence: Synthetic oligonucleotide
ccgccgcacagaagauacu

SEQ ID NO: 179285 - RNA, 19 nt, Artificial Sequence
  Description of Artificial Sequence: Synthetic oligonucleotide
gcgcaagccucagcuucuu

SEQ ID NO: 179286 - RNA, 19 nt, Artificial Sequence
  Description of Artificial Sequence: Synthetic oligonucleotide
cggcgguuccagcuaggau

SEQ ID NO: 179287 - RNA, 19 nt, Artificial Sequence
  Description of Artificial Sequence: Synthetic oligonucleotide
aaggcuauaaauuacuggc

SEQ ID NO: 179288 - RNA, 19 nt, Artificial Sequence
  Description of Artificial Sequence: Synthetic oligonucleotide
uucuauauaacauaaagca

SEQ ID NO: 179289 - RNA, 19 nt, Artificial Sequence
  Description of Artificial Sequence: Synthetic oligonucleotide
ucagauaagaccuugaggc

SEQ ID NO: 179290 - RNA, 19 nt, Artificial Sequence
  Description of Artificial Sequence: Synthetic oligonucleotide
uauagaacgagcauacagg

SEQ ID NO: 179291 - RNA, 19 nt, Artificial Sequence
  Description of Artificial Sequence: Synthetic oligonucleotide
uuaaccauaaaccuccaag

SEQ ID NO: 179292 - RNA, 19 nt, Artificial Sequence
  Description of Artificial Sequence: Synthetic oligonucleotide
auaauccaaagcucgaucc

SEQ ID NO: 179293 - RNA, 19 nt, Artificial Sequence
  Description of Artificial Sequence: Synthetic oligonucleotide
ucaaauucggcccacaucu

SEQ ID NO: 179294 - RNA, 19 nt, Artificial Sequence
  Description of Artificial Sequence: Synthetic oligonucleotide
aaaggcuauaaauuacugg

SEQ ID NO: 179295 - RNA, 19 nt, Artificial Sequence
  Description of Artificial Sequence: Synthetic oligonucleotide
ugagcauucagauaagacc

SEQ ID NO: 179296 - RNA, 19 nt, Artificial Sequence
  Description of Artificial Sequence: Synthetic oligonucleotide
ugcacgaauccuuauaugg

SEQ ID NO: 179297 - RNA, 19 nt, Artificial Sequence
  Description of Artificial Sequence: Synthetic oligonucleotide
gauguucuaaacaagcacg

SEQ ID NO: 179298 - RNA, 19 nt, Artificial Sequence
  Description of Artificial Sequence: Synthetic oligonucleotide
aauucggucuacaucaucg

SEQ ID NO: 179299 - RNA, 19 nt, Artificial Sequence
  Description of Artificial Sequence: Synthetic oligonucleotide
agaacgagcauacagguug

SEQ ID NO: 179300 - RNA, 19 nt, Artificial Sequence
  Description of Artificial Sequence: Synthetic oligonucleotide
auauagaacgagcauacag

SEQ ID NO: 179301 - RNA, 19 nt, Artificial Sequence
  Description of Artificial Sequence: Synthetic oligonucleotide
aaggauuagcaugacagac

SEQ ID NO: 179302 - RNA, 19 nt, Artificial Sequence
  Description of Artificial Sequence: Synthetic oligonucleotide
gaaccaacgcuacauagcg

SEQ ID NO: 179303 - RNA, 19 nt, Artificial Sequence
  Description of Artificial Sequence: Synthetic oligonucleotide
acagguugauuuuaucucc

SEQ ID NO: 179304 - RNA, 19 nt, Artificial Sequence
  Description of Artificial Sequence: Synthetic oligonucleotide
uguacuguuacauuccucu

SEQ ID NO: 179305 - RNA, 19 nt, Artificial Sequence
  Description of Artificial Sequence: Synthetic oligonucleotide
ucauguaucagcucaggag

SEQ ID NO: 179306 - RNA, 19 nt, Artificial Sequence
  Description of Artificial Sequence: Synthetic oligonucleotide
ucaguaauuggcuucuuag

SEQ ID NO: 179307 - RNA, 19 nt, Artificial Sequence
  Description of Artificial Sequence: Synthetic oligonucleotide
aaucauauugguguuaacu

SEQ ID NO: 179308 - RNA, 19 nt, Artificial Sequence
  Description of Artificial Sequence: Synthetic oligonucleotide
ucuaaacaagcacggauag

SEQ ID NO: 179309 - RNA, 19 nt, Artificial Sequence
  Description of Artificial Sequence: Synthetic oligonucleotide
agaccuuauauauuaguuc

SEQ ID NO: 179310 - RNA, 19 nt, Artificial Sequence
  Description of Artificial Sequence: Synthetic oligonucleotide
aacaagcacggauagcggg

SEQ ID NO: 179311 - RNA, 19 nt, Artificial Sequence
  Description of Artificial Sequence: Synthetic oligonucleotide
agauauguuguaaauaguc

SEQ ID NO: 179312 - RNA, 19 nt, Artificial Sequence
  Description of Artificial Sequence: Synthetic oligonucleotide
cauguaucagcucaggagc

SEQ ID NO: 179313 - RNA, 19 nt, Artificial Sequence
  Description of Artificial Sequence: Synthetic oligonucleotide
uuggaguccaauaagccca

SEQ ID NO: 179314 - RNA, 19 nt, Artificial Sequence
  Description of Artificial Sequence: Synthetic oligonucleotide
agauacagcgaaugaaacg

SEQ ID NO: 179315 - RNA, 19 nt, Artificial Sequence
  Description of Artificial Sequence: Synthetic oligonucleotide
gaccuuauauauuaguuca

SEQ ID NO: 179316 - RNA, 19 nt, Artificial Sequence
  Description of Artificial Sequence: Synthetic oligonucleotide
uucucagguugucaaagcg

SEQ ID NO: 179317 - RNA, 19 nt, Artificial Sequence
  Description of Artificial Sequence: Synthetic oligonucleotide
uuuacagccggacuagaug

SEQ ID NO: 179318 - RNA, 19 nt, Artificial Sequence
  Description of Artificial Sequence: Synthetic oligonucleotide
aaugaaacgggcccuuucu

SEQ ID NO: 179319 - RNA, 19 nt, Artificial Sequence
  Description of Artificial Sequence: Synthetic oligonucleotide
uguaaccaauuucugaacu

SEQ ID NO: 179320 - RNA, 19 nt, Artificial Sequence
  Description of Artificial Sequence: Synthetic oligonucleotide
uguuuauugugaaaauggu

SEQ ID NO: 179321 - RNA, 19 nt, Artificial Sequence
  Description of Artificial Sequence: Synthetic oligonucleotide
ugugacgauguucuaaaca

SEQ ID NO: 179322 - RNA, 19 nt, Artificial Sequence
  Description of Artificial Sequence: Synthetic oligonucleotide
uucugaaggauuagcauga

SEQ ID NO: 179323 - RNA, 19 nt, Artificial Sequence
  Description of Artificial Sequence: Synthetic oligonucleotide
aggaggaacccucuuaagg

SEQ ID NO: 179324 - RNA, 19 nt, Artificial Sequence
  Description of Artificial Sequence: Synthetic oligonucleotide
ucuugacagacuuaauagc

SEQ ID NO: 179325 - RNA, 19 nt, Artificial Sequence
  Description of Artificial Sequence: Synthetic oligonucleotide
ggaaauucggucuacauca

SEQ ID NO: 179326 - RNA, 19 nt, Artificial Sequence
  Description of Artificial Sequence: Synthetic oligonucleotide
auaucauacugauugacau

SEQ ID NO: 179327 - RNA, 19 nt, Artificial Sequence
  Description of Artificial Sequence: Synthetic oligonucleotide
uagcguaaugcaaucuugg

SEQ ID NO: 179328 - RNA, 19 nt, Artificial Sequence
  Description of Artificial Sequence: Synthetic oligonucleotide
aaaaucaugaggagcaaga

SEQ ID NO: 179329 - RNA, 19 nt, Artificial Sequence
  Description of Artificial Sequence: Synthetic oligonucleotide
guagcuaacucuaaugugc

SEQ ID NO: 179330 - RNA, 19 nt, Artificial Sequence
  Description of Artificial Sequence: Synthetic oligonucleotide
guagauugcuagaacagcg

SEQ ID NO: 179331 - RNA, 19 nt, Artificial Sequence
  Description of Artificial Sequence: Synthetic oligonucleotide
uuacagccggacuagauga

SEQ ID NO: 179332 - RNA, 19 nt, Artificial Sequence
  Description of Artificial Sequence: Synthetic oligonucleotide
agaguagcuaacucuaaug

SEQ ID NO: 179333 - RNA, 19 nt, Artificial Sequence
  Description of Artificial Sequence: Synthetic oligonucleotide
uuugcacgaauccuuauau

SEQ ID NO: 179334 - RNA, 19 nt, Artificial Sequence
  Description of Artificial Sequence: Synthetic oligonucleotide
cuggaaaucggacagagca

SEQ ID NO: 179335 - RNA, 19 nt, Artificial Sequence
  Description of Artificial Sequence: Synthetic oligonucleotide
agacuuaauagcauggaag

SEQ ID NO: 179336 - RNA, 19 nt, Artificial Sequence
  Description of Artificial Sequence: Synthetic oligonucleotide
agauaagaccuugaggcac

SEQ ID NO: 179337 - RNA, 19 nt, Artificial Sequence
  Description of Artificial Sequence: Synthetic oligonucleotide
uuauagacuagucuucuuu

SEQ ID NO: 179338 - RNA, 19 nt, Artificial Sequence
  Description of Artificial Sequence: Synthetic oligonucleotide
uaaaggugagcauucagau

SEQ ID NO: 179339 - RNA, 19 nt, Artificial Sequence
  Description of Artificial Sequence: Synthetic oligonucleotide
agcaacaaaggaguuuugc

SEQ ID NO: 179340 - RNA, 19 nt, Artificial Sequence
  Description of Artificial Sequence: Synthetic oligonucleotide
auagaacgagcauacaggu

SEQ ID NO: 179341 - RNA, 19 nt, Artificial Sequence
  Description of Artificial Sequence: Synthetic oligonucleotide
uucuaaacaagcacggaua

SEQ ID NO: 179342 - RNA, 19 nt, Artificial Sequence
  Description of Artificial Sequence: Synthetic oligonucleotide
ugccaugagcaacauagcc

SEQ ID NO: 179343 - RNA, 19 nt, Artificial Sequence
  Description of Artificial Sequence: Synthetic oligonucleotide
aguagcuaacucuaaugug

SEQ ID NO: 179344 - RNA, 19 nt, Artificial Sequence
  Description of Artificial Sequence: Synthetic oligonucleotide
gacagguugauuuuaucuc

SEQ ID NO: 179345 - RNA, 19 nt, Artificial Sequence
  Description of Artificial Sequence: Synthetic oligonucleotide
ugacagaccuuauauauua

SEQ ID NO: 179346 - RNA, 19 nt, Artificial Sequence
  Description of Artificial Sequence: Synthetic oligonucleotide
uuauauggccaguaacagc

SEQ ID NO: 179347 - RNA, 19 nt, Artificial Sequence
  Description of Artificial Sequence: Synthetic oligonucleotide
aacuauauugccaaagauu

SEQ ID NO: 179348 - RNA, 19 nt, Artificial Sequence
  Description of Artificial Sequence: Synthetic oligonucleotide
caguaaguuauagauacag

SEQ ID NO: 179349 - RNA, 19 nt, Artificial Sequence
  Description of Artificial Sequence: Synthetic oligonucleotide
ugacagacuuaauagcaug

SEQ ID NO: 179350 - RNA, 19 nt, Artificial Sequence
  Description of Artificial Sequence: Synthetic oligonucleotide
cacgaauccuuauauggcc

SEQ ID NO: 179351 - RNA, 19 nt, Artificial Sequence
  Description of Artificial Sequence: Synthetic oligonucleotide
caguaauuggcuucuuagg

SEQ ID NO: 179352 - RNA, 19 nt, Artificial Sequence
  Description of Artificial Sequence: Synthetic oligonucleotide
ugcaaaguaucacugguuu

SEQ ID NO: 179353 - RNA, 19 nt, Artificial Sequence
  Description of Artificial Sequence: Synthetic oligonucleotide
uggguauuacccauugcug

SEQ ID NO: 179354 - RNA, 19 nt, Artificial Sequence
  Description of Artificial Sequence: Synthetic oligonucleotide
uccuuauauggccaguaac

SEQ ID NO: 179355 - RNA, 19 nt, Artificial Sequence
  Description of Artificial Sequence: Synthetic oligonucleotide
ucgauaaaucuugacagac

SEQ ID NO: 179356 - RNA, 19 nt, Artificial Sequence
  Description of Artificial Sequence: Synthetic oligonucleotide
aaucauguaucagcucagg

SEQ ID NO: 179357 - RNA, 19 nt, Artificial Sequence
  Description of Artificial Sequence: Synthetic oligonucleotide
aggauuagcaugacagacc

SEQ ID NO: 179358 - RNA, 19 nt, Artificial Sequence
  Description of Artificial Sequence: Synthetic oligonucleotide
cuuauauggccaguaacag

SEQ ID NO: 179359 - RNA, 19 nt, Artificial Sequence
  Description of Artificial Sequence: Synthetic oligonucleotide
caacaaucagcauucucag

SEQ ID NO: 179360 - RNA, 19 nt, Artificial Sequence
  Description of Artificial Sequence: Synthetic oligonucleotide
gauaguguagauugcuaga

SEQ ID NO: 179361 - RNA, 19 nt, Artificial Sequence
  Description of Artificial Sequence: Synthetic oligonucleotide
uguacucaguacucuuagg

SEQ ID NO: 179362 - RNA, 19 nt, Artificial Sequence
  Description of Artificial Sequence: Synthetic oligonucleotide
uuaguugcaugaaggaaau

SEQ ID NO: 179363 - RNA, 19 nt, Artificial Sequence
  Description of Artificial Sequence: Synthetic oligonucleotide
agauguuggaguccaauaa

SEQ ID NO: 179364 - RNA, 19 nt, Artificial Sequence
  Description of Artificial Sequence: Synthetic oligonucleotide
aauccaaagcucgauccug

SEQ ID NO: 179365 - RNA, 19 nt, Artificial Sequence
  Description of Artificial Sequence: Synthetic oligonucleotide
auuagcaugacagaccuua

SEQ ID NO: 179366 - RNA, 19 nt, Artificial Sequence
  Description of Artificial Sequence: Synthetic oligonucleotide
gagcauacagguuggcugc

SEQ ID NO: 179367 - RNA, 19 nt, Artificial Sequence
  Description of Artificial Sequence: Synthetic oligonucleotide
uucggcccacaucugacgg

SEQ ID NO: 179368 - RNA, 19 nt, Artificial Sequence
  Description of Artificial Sequence: Synthetic oligonucleotide
uuucuacgcacuucuaagu

SEQ ID NO: 179369 - RNA, 19 nt, Artificial Sequence
  Description of Artificial Sequence: Synthetic oligonucleotide
cuugguaggucuagaacug

SEQ ID NO: 179370 - RNA, 19 nt, Artificial Sequence
  Description of Artificial Sequence: Synthetic oligonucleotide
ucuacgcacuucuaagucu

SEQ ID NO: 179371 - RNA, 19 nt, Artificial Sequence
  Description of Artificial Sequence: Synthetic oligonucleotide
agcguuucuccuaacauag

SEQ ID NO: 179372 - RNA, 19 nt, Artificial Sequence
  Description of Artificial Sequence: Synthetic oligonucleotide
guacucaguacucuuagga

SEQ ID NO: 179373 - RNA, 19 nt, Artificial Sequence
  Description of Artificial Sequence: Synthetic oligonucleotide
gugacgauguucuaaacaa

SEQ ID NO: 179374 - RNA, 19 nt, Artificial Sequence
  Description of Artificial Sequence: Synthetic oligonucleotide
gcuauaaauuacuggcugg

SEQ ID NO: 179375 - RNA, 19 nt, Artificial Sequence
  Description of Artificial Sequence: Synthetic oligonucleotide
uauucucccaggauccaca

SEQ ID NO: 179376 - RNA, 19 nt, Artificial Sequence
  Description of Artificial Sequence: Synthetic oligonucleotide
acuucuaagucugguguac

SEQ ID NO: 179377 - RNA, 19 nt, Artificial Sequence
  Description of Artificial Sequence: Synthetic oligonucleotide
uaauccaaagcucgauccu

SEQ ID NO: 179378 - RNA, 19 nt, Artificial Sequence
  Description of Artificial Sequence: Synthetic oligonucleotide
aaucaaucauauugguguu

SEQ ID NO: 179379 - RNA, 19 nt, Artificial Sequence
  Description of Artificial Sequence: Synthetic oligonucleotide
aaaucauguaucagcucag

SEQ ID NO: 179380 - RNA, 19 nt, Artificial Sequence
  Description of Artificial Sequence: Synthetic oligonucleotide
auguucuaaacaagcacgg

SEQ ID NO: 179381 - RNA, 19 nt, Artificial Sequence
  Description of Artificial Sequence: Synthetic oligonucleotide
ucaaucauauugguguuaa

SEQ ID NO: 179382 - RNA, 19 nt, Artificial Sequence
  Description of Artificial Sequence: Synthetic oligonucleotide
cuacaauugggaucucccc

SEQ ID NO: 179383 - RNA, 19 nt, Artificial Sequence
  Description of Artificial Sequence: Synthetic oligonucleotide
uucaaauucggcccacauc

SEQ ID NO: 179384 - RNA, 19 nt, Artificial Sequence
  Description of Artificial Sequence: Synthetic oligonucleotide
uagauugcuagaacagcgu

SEQ ID NO: 179385 - RNA, 19 nt, Artificial Sequence
  Description of Artificial Sequence: Synthetic oligonucleotide
ucuccuaacauagcuguga

SEQ ID NO: 179386 - RNA, 19 nt, Artificial Sequence
  Description of Artificial Sequence: Synthetic oligonucleotide
ucgauccugaucugcauga

SEQ ID NO: 179387 - RNA, 19 nt, Artificial Sequence
  Description of Artificial Sequence: Synthetic oligonucleotide
guuaguugcaugaaggaaa

SEQ ID NO: 179388 - RNA, 19 nt, Artificial Sequence
  Description of Artificial Sequence: Synthetic oligonucleotide
cauuuaccagaaaaucaug

SEQ ID NO: 179389 - RNA, 19 nt, Artificial Sequence
  Description of Artificial Sequence: Synthetic oligonucleotide
uccuaacauagcugugacg

SEQ ID NO: 179390 - RNA, 19 nt, Artificial Sequence
  Description of Artificial Sequence: Synthetic oligonucleotide
aaacaagcacggauagcgg

SEQ ID NO: 179391 - RNA, 19 nt, Artificial Sequence
  Description of Artificial Sequence: Synthetic oligonucleotide
gaguugucgguauuuguca

SEQ ID NO: 179392 - RNA, 19 nt, Artificial Sequence
  Description of Artificial Sequence: Synthetic oligonucleotide
cuacgcacuucuaagucug

SEQ ID NO: 179393 - RNA, 19 nt, Artificial Sequence
  Description of Artificial Sequence: Synthetic oligonucleotide
gcaguuaguugcaugaagg

SEQ ID NO: 179394 - RNA, 19 nt, Artificial Sequence
  Description of Artificial Sequence: Synthetic oligonucleotide
ucuuaggaagagaggauuu

SEQ ID NO: 179395 - RNA, 19 nt, Artificial Sequence
  Description of Artificial Sequence: Synthetic oligonucleotide
acaagcacggauagcgggc

SEQ ID NO: 179396 - RNA, 19 nt, Artificial Sequence
  Description of Artificial Sequence: Synthetic oligonucleotide
aagauauguuguaaauagu

SEQ ID NO: 179397 - RNA, 19 nt, Artificial Sequence
  Description of Artificial Sequence: Synthetic oligonucleotide
uuacccauugcugccaaca

SEQ ID NO: 179398 - RNA, 19 nt, Artificial Sequence
  Description of Artificial Sequence: Synthetic oligonucleotide
gaaggauuagcaugacaga

SEQ ID NO: 179399 - RNA, 19 nt, Artificial Sequence
  Description of Artificial Sequence: Synthetic oligonucleotide
uagaguagcuaacucuaau

SEQ ID NO: 179400 - RNA, 19 nt, Artificial Sequence
  Description of Artificial Sequence: Synthetic oligonucleotide
uugucgguauuugucagug

SEQ ID NO: 179401 - RNA, 19 nt, Artificial Sequence
  Description of Artificial Sequence: Synthetic oligonucleotide
caauaucauacugauugac

SEQ ID NO: 179402 - RNA, 19 nt, Artificial Sequence
  Description of Artificial Sequence: Synthetic oligonucleotide
accaacgcuacauagcgua

SEQ ID NO: 179403 - RNA, 19 nt, Artificial Sequence
  Description of Artificial Sequence: Synthetic oligonucleotide
uaguguagauugcuagaac

SEQ ID NO: 179404 - RNA, 19 nt, Artificial Sequence
  Description of Artificial Sequence: Synthetic oligonucleotide
agccggacuagaugauugc

SEQ ID NO: 179405 - RNA, 19 nt, Artificial Sequence
  Description of Artificial Sequence: Synthetic oligonucleotide
uacuguuacauuccucuuu

SEQ ID NO: 179406 - RNA, 19 nt, Artificial Sequence
  Description of Artificial Sequence: Synthetic oligonucleotide
ggguauuacccauugcugc

SEQ ID NO: 179407 - RNA, 19 nt, Artificial Sequence
  Description of Artificial Sequence: Synthetic oligonucleotide
ugagcaacauagccucagc

SEQ ID NO: 179408 - RNA, 19 nt, Artificial Sequence
  Description of Artificial Sequence: Synthetic oligonucleotide
acgcuacauagcguaaugc

SEQ ID NO: 179409 - RNA, 19 nt, Artificial Sequence
  Description of Artificial Sequence: Synthetic oligonucleotide
cuccuuaauauuaaaucaa

SEQ ID NO: 179410 - RNA, 19 nt, Artificial Sequence
  Description of Artificial Sequence: Synthetic oligonucleotide
uacauagcguaaugcaauc

SEQ ID NO: 179411 - RNA, 19 nt, Artificial Sequence
  Description of Artificial Sequence: Synthetic oligonucleotide
auucggcccacaucugacg

SEQ ID NO: 179412 - RNA, 19 nt, Artificial Sequence
  Description of Artificial Sequence: Synthetic oligonucleotide
cauuccuagaagagacaag

SEQ ID NO: 179413 - RNA, 19 nt, Artificial Sequence
  Description of Artificial Sequence: Synthetic oligonucleotide
uagaucuguuuauugugaa

SEQ ID NO: 179414 - RNA, 19 nt, Artificial Sequence
  Description of Artificial Sequence: Synthetic oligonucleotide
cacgaacaaacuccaagac

SEQ ID NO: 179415 - RNA, 19 nt, Artificial Sequence
  Description of Artificial Sequence: Synthetic oligonucleotide
agccauaucuggaaaucgg

SEQ ID NO: 179416 - RNA, 19 nt, Artificial Sequence
  Description of Artificial Sequence: Synthetic oligonucleotide
auagaucuguuuauuguga

SEQ ID NO: 179417 - RNA, 19 nt, Artificial Sequence
  Description of Artificial Sequence: Synthetic oligonucleotide
guaggucuagaacugcuga

SEQ ID NO: 179418 - RNA, 19 nt, Artificial Sequence
  Description of Artificial Sequence: Synthetic oligonucleotide
ugguaggucuagaacugcu

SEQ ID NO: 179419 - RNA, 19 nt, Artificial Sequence
  Description of Artificial Sequence: Synthetic oligonucleotide
aaagcucgauccugaucug

SEQ ID NO: 179420 - RNA, 19 nt, Artificial Sequence
  Description of Artificial Sequence: Synthetic oligonucleotide
auagcguaaugcaaucuug

SEQ ID NO: 179421 - RNA, 19 nt, Artificial Sequence
  Description of Artificial Sequence: Synthetic oligonucleotide
uugcacgaauccuuauaug

SEQ ID NO: 179422 - RNA, 19 nt, Artificial Sequence
  Description of Artificial Sequence: Synthetic oligonucleotide
cuguaaccaauuucugaac

SEQ ID NO: 179423 - RNA, 19 nt, Artificial Sequence
  Description of Artificial Sequence: Synthetic oligonucleotide
gacggacccguucaugagc

SEQ ID NO: 179424 - RNA, 19 nt, Artificial Sequence
  Description of Artificial Sequence: Synthetic oligonucleotide
aacgagcauacagguuggc

SEQ ID NO: 179425 - RNA, 19 nt, Artificial Sequence
  Description of Artificial Sequence: Synthetic oligonucleotide
cauaaagccacaguaccca

SEQ ID NO: 179426 - RNA, 19 nt, Artificial Sequence
  Description of Artificial Sequence: Synthetic oligonucleotide
agcguaaugcaaucuuggu

SEQ ID NO: 179427 - RNA, 19 nt, Artificial Sequence
  Description of Artificial Sequence: Synthetic oligonucleotide
gaacgagcauacagguugg

SEQ ID NO: 179428 - RNA, 19 nt, Artificial Sequence
  Description of Artificial Sequence: Synthetic oligonucleotide
acggaacucagcaucagug

SEQ ID NO: 179429 - RNA, 19 nt, Artificial Sequence
  Description of Artificial Sequence: Synthetic oligonucleotide
acauuccuagaagagacaa

SEQ ID NO: 179430 - RNA, 19 nt, Artificial Sequence
  Description of Artificial Sequence: Synthetic oligonucleotide
uucuccuaacauagcugug

SEQ ID NO: 179431 - RNA, 19 nt, Artificial Sequence
  Description of Artificial Sequence: Synthetic oligonucleotide
agaucuguuuauugugaaa

SEQ ID NO: 179432 - RNA, 19 nt, Artificial Sequence
  Description of Artificial Sequence: Synthetic oligonucleotide
augaaacgggcccuuucug

SEQ ID NO: 179433 - RNA, 19 nt, Artificial Sequence
  Description of Artificial Sequence: Synthetic oligonucleotide
uacgcacuucuaagucugg

SEQ ID NO: 179434 - RNA, 19 nt, Artificial Sequence
  Description of Artificial Sequence: Synthetic oligonucleotide
uagcgggcauuaaagguuc

SEQ ID NO: 179435 - RNA, 19 nt, Artificial Sequence
  Description of Artificial Sequence: Synthetic oligonucleotide
ucuuaaggguggucugucu

SEQ ID NO: 179436 - RNA, 19 nt, Artificial Sequence
  Description of Artificial Sequence: Synthetic oligonucleotide
uuaacucaccagcuucuuu

SEQ ID NO: 179437 - RNA, 19 nt, Artificial Sequence
  Description of Artificial Sequence: Synthetic oligonucleotide
cuaaugugcaguucugcaa

SEQ ID NO: 179438 - RNA, 19 nt, Artificial Sequence
  Description of Artificial Sequence: Synthetic oligonucleotide
aaccaauuucugaacuggu

SEQ ID NO: 179439 - RNA, 19 nt, Artificial Sequence
  Description of Artificial Sequence: Synthetic oligonucleotide
uuccuagaagagacaagau

SEQ ID NO: 179440 - RNA, 19 nt, Artificial Sequence
  Description of Artificial Sequence: Synthetic oligonucleotide
gauaagaccuugaggcaca

SEQ ID NO: 179441 - RNA, 19 nt, Artificial Sequence
  Description of Artificial Sequence: Synthetic oligonucleotide
guucuaaacaagcacggau

SEQ ID NO: 179442 - RNA, 19 nt, Artificial Sequence
  Description of Artificial Sequence: Synthetic oligonucleotide
ugggugaccuuguuaaguu

SEQ ID NO: 179443 - RNA, 19 nt, Artificial Sequence
  Description of Artificial Sequence: Synthetic oligonucleotide
cucagauucuauauaacau

SEQ ID NO: 179444 - RNA, 19 nt, Artificial Sequence
  Description of Artificial Sequence: Synthetic oligonucleotide
cuggguauuacccauugcu

SEQ ID NO: 179445 - RNA, 19 nt, Artificial Sequence
  Description of Artificial Sequence: Synthetic oligonucleotide
acauuagcuuuaauauuug

SEQ ID NO: 179446 - RNA, 19 nt, Artificial Sequence
  Description of Artificial Sequence: Synthetic oligonucleotide
cagccggacuagaugauug

SEQ ID NO: 179447 - RNA, 19 nt, Artificial Sequence
  Description of Artificial Sequence: Synthetic oligonucleotide
ccauaaagccacaguaccc

SEQ ID NO: 179448 - RNA, 19 nt, Artificial Sequence
  Description of Artificial Sequence: Synthetic oligonucleotide
agggaaauucggucuacau

SEQ ID NO: 179449 - RNA, 19 nt, Artificial Sequence
  Description of Artificial Sequence: Synthetic oligonucleotide
uugugaaaauggucuuggu

SEQ ID NO: 179450 - RNA, 19 nt, Artificial Sequence
  Description of Artificial Sequence: Synthetic oligonucleotide
cucgauaaaucuugacaga

SEQ ID NO: 179451 - RNA, 19 nt, Artificial Sequence
  Description of Artificial Sequence: Synthetic oligonucleotide
gggaaauucggucuacauc

SEQ ID NO: 179452 - RNA, 19 nt, Artificial Sequence
  Description of Artificial Sequence: Synthetic oligonucleotide
aguucgcacaaggaguugu

SEQ ID NO: 179453 - RNA, 19 nt, Artificial Sequence
  Description of Artificial Sequence: Synthetic oligonucleotide
acggauagcgggcauuaaa

SEQ ID NO: 179454 - RNA, 19 nt, Artificial Sequence
  Description of Artificial Sequence: Synthetic oligonucleotide
cccaaaugaaggauaguug

SEQ ID NO: 179455 - RNA, 19 nt, Artificial Sequence
  Description of Artificial Sequence: Synthetic oligonucleotide
acgauguucuaaacaagca

SEQ ID NO: 179456 - RNA, 19 nt, Artificial Sequence
  Description of Artificial Sequence: Synthetic oligonucleotide
uugguaggucuagaacugc

SEQ ID NO: 179457 - RNA, 19 nt, Artificial Sequence
  Description of Artificial Sequence: Synthetic oligonucleotide
auccuuauauggccaguaa

SEQ ID NO: 179458 - RNA, 19 nt, Artificial Sequence
  Description of Artificial Sequence: Synthetic oligonucleotide
ggggaaaggcuauaaauua

SEQ ID NO: 179459 - RNA, 19 nt, Artificial Sequence
  Description of Artificial Sequence: Synthetic oligonucleotide
uagaacgagcauacagguu

SEQ ID NO: 179460 - RNA, 19 nt, Artificial Sequence
  Description of Artificial Sequence: Synthetic oligonucleotide
aggcuauaaauuacuggcu

SEQ ID NO: 179461 - RNA, 19 nt, Artificial Sequence
  Description of Artificial Sequence: Synthetic oligonucleotide
caaucauauugguguuaac

SEQ ID NO: 179462 - RNA, 19 nt, Artificial Sequence
  Description of Artificial Sequence: Synthetic oligonucleotide
aguuauagauacagcgaau

SEQ ID NO: 179463 - RNA, 19 nt, Artificial Sequence
  Description of Artificial Sequence: Synthetic oligonucleotide
aacccucuuaagggugguc

SEQ ID NO: 179464 - RNA, 19 nt, Artificial Sequence
  Description of Artificial Sequence: Synthetic oligonucleotide
gcguaaugcaaucuugguc

SEQ ID NO: 179465 - RNA, 19 nt, Artificial Sequence
  Description of Artificial Sequence: Synthetic oligonucleotide
caaauucggcccacaucug

SEQ ID NO: 179466 - RNA, 19 nt, Artificial Sequence
  Description of Artificial Sequence: Synthetic oligonucleotide
ggaguugucgguauuuguc

SEQ ID NO: 179467 - RNA, 19 nt, Artificial Sequence
  Description of Artificial Sequence: Synthetic oligonucleotide
gucguggcaagggaagcag

SEQ ID NO: 179468 - RNA, 19 nt, Artificial Sequence
  Description of Artificial Sequence: Synthetic oligonucleotide
ucaaggccauucccugacu

SEQ ID NO: 179469 - RNA, 19 nt, Artificial Sequence
  Description of Artificial Sequence: Synthetic oligonucleotide
caaguugcaggcuggauau

SEQ ID NO: 179470 - RNA, 19 nt, Artificial Sequence
  Description of Artificial Sequence: Synthetic oligonucleotide
cgagcauacagguuggcug

SEQ ID NO: 179471 - RNA, 19 nt, Artificial Sequence
  Description of Artificial Sequence: Synthetic oligonucleotide
acgaauccuuauauggcca

SEQ ID NO: 179472 - RNA, 19 nt, Artificial Sequence
  Description of Artificial Sequence: Synthetic oligonucleotide
cuuugcacgaauccuuaua

SEQ ID NO: 179473 - RNA, 19 nt, Artificial Sequence
  Description of Artificial Sequence: Synthetic oligonucleotide
gaggaacccucuuaagggu

SEQ ID NO: 179474 - RNA, 19 nt, Artificial Sequence
  Description of Artificial Sequence: Synthetic oligonucleotide
gggaaaggcuauaaauuac

SEQ ID NO: 179475 - RNA, 19 nt, Artificial Sequence
  Description of Artificial Sequence: Synthetic oligonucleotide
ugacggaacucagcaucag

SEQ ID NO: 179476 - RNA, 19 nt, Artificial Sequence
  Description of Artificial Sequence: Synthetic oligonucleotide
ugucgguauuugucagugu

SEQ ID NO: 179477 - RNA, 19 nt, Artificial Sequence
  Description of Artificial Sequence: Synthetic oligonucleotide
cagaccuuauauauuaguu

SEQ ID NO: 179478 - RNA, 19 nt, Artificial Sequence
  Description of Artificial Sequence: Synthetic oligonucleotide
cggauagcgggcauuaaag

SEQ ID NO: 179479 - RNA, 19 nt, Artificial Sequence
  Description of Artificial Sequence: Synthetic oligonucleotide
uguaucagcucaggagcau

SEQ ID NO: 179480 - RNA, 19 nt, Artificial Sequence
  Description of Artificial Sequence: Synthetic oligonucleotide
aggaacccucuuaagggug

SEQ ID NO: 179481 - RNA, 19 nt, Artificial Sequence
  Description of Artificial Sequence: Synthetic oligonucleotide
cugugacgauguucuaaac

SEQ ID NO: 179482 - RNA, 19 nt, Artificial Sequence
  Description of Artificial Sequence: Synthetic oligonucleotide
gcacgaauccuuauauggc

SEQ ID NO: 179483 - RNA, 19 nt, Artificial Sequence
  Description of Artificial Sequence: Synthetic oligonucleotide
ggaacccucuuaagggugg

SEQ ID NO: 179484 - RNA, 19 nt, Artificial Sequence
  Description of Artificial Sequence: Synthetic oligonucleotide
acgagcauacagguuggcu

SEQ ID NO: 179485 - RNA, 19 nt, Artificial Sequence
  Description of Artificial Sequence: Synthetic oligonucleotide
ccuuuguacuacaguauuc

SEQ ID NO: 179486 - RNA, 19 nt, Artificial Sequence
  Description of Artificial Sequence: Synthetic oligonucleotide
ccggacuagaugauugcag

SEQ ID NO: 179487 - RNA, 19 nt, Artificial Sequence
  Description of Artificial Sequence: Synthetic oligonucleotide
uccaaagcucgauccugau

SEQ ID NO: 179488 - RNA, 19 nt, Artificial Sequence
  Description of Artificial Sequence: Synthetic oligonucleotide
gcacuugacagaguuacca

SEQ ID NO: 179489 - RNA, 19 nt, Artificial Sequence
  Description of Artificial Sequence: Synthetic oligonucleotide
gguaggucuagaacugcug

SEQ ID NO: 179490 - RNA, 19 nt, Artificial Sequence
  Description of Artificial Sequence: Synthetic oligonucleotide
uacagccggacuagaugau

SEQ ID NO: 179491 - RNA, 19 nt, Artificial Sequence
  Description of Artificial Sequence: Synthetic oligonucleotide
aucugacggaacucagcau

SEQ ID NO: 179492 - RNA, 19 nt, Artificial Sequence
  Description of Artificial Sequence: Synthetic oligonucleotide
uaucacugguuugguuuac

SEQ ID NO: 179493 - RNA, 19 nt, Artificial Sequence
  Description of Artificial Sequence: Synthetic oligonucleotide
aaccaacgcuacauagcgu

SEQ ID NO: 179494 - RNA, 19 nt, Artificial Sequence
  Description of Artificial Sequence: Synthetic oligonucleotide
uggguugcauagguaccca

SEQ ID NO: 179495 - RNA, 19 nt, Artificial Sequence
  Description of Artificial Sequence: Synthetic oligonucleotide
cagcguuucuccuaacaua

SEQ ID NO: 179496 - RNA, 19 nt, Artificial Sequence
  Description of Artificial Sequence: Synthetic oligonucleotide
guaucagcucaggagcauc

SEQ ID NO: 179497 - RNA, 19 nt, Artificial Sequence
  Description of Artificial Sequence: Synthetic oligonucleotide
aaucuuggucagagucgug

SEQ ID NO: 179498 - RNA, 19 nt, Artificial Sequence
  Description of Artificial Sequence: Synthetic oligonucleotide
uucuucgaguuuggcagau

SEQ ID NO: 179499 - RNA, 19 nt, Artificial Sequence
  Description of Artificial Sequence: Synthetic oligonucleotide
accuuauauauuaguucaa

SEQ ID NO: 179500 - RNA, 19 nt, Artificial Sequence
  Description of Artificial Sequence: Synthetic oligonucleotide
cuucuucgaguuuggcaga

SEQ ID NO: 179501 - RNA, 19 nt, Artificial Sequence
  Description of Artificial Sequence: Synthetic oligonucleotide
ucggcccacaucugacgga

SEQ ID NO: 179502 - RNA, 19 nt, Artificial Sequence
  Description of Artificial Sequence: Synthetic oligonucleotide
acggacccguucaugagca

SEQ ID NO: 179503 - RNA, 19 nt, Artificial Sequence
  Description of Artificial Sequence: Synthetic oligonucleotide
gaccugcggaccucaguca

SEQ ID NO: 179504 - RNA, 19 nt, Artificial Sequence
  Description of Artificial Sequence: Synthetic oligonucleotide
gacggaacucagcaucagu

SEQ ID NO: 179505 - RNA, 19 nt, Artificial Sequence
  Description of Artificial Sequence: Synthetic oligonucleotide
ccaauaagcccacaccuaa

SEQ ID NO: 179506 - RNA, 19 nt, Artificial Sequence
  Description of Artificial Sequence: Synthetic oligonucleotide
guugucgguauuugucagu

SEQ ID NO: 179507 - RNA, 19 nt, Artificial Sequence
  Description of Artificial Sequence: Synthetic oligonucleotide
ggacggacccguucaugag

SEQ ID NO: 179508 - RNA, 19 nt, Artificial Sequence
  Description of Artificial Sequence: Synthetic oligonucleotide
gaguucgcacaaggaguug

SEQ ID NO: 179509 - RNA, 19 nt, Artificial Sequence
  Description of Artificial Sequence: Synthetic oligonucleotide
aagcacggauagcgggcau

SEQ ID NO: 179510 - RNA, 19 nt, Artificial Sequence
  Description of Artificial Sequence: Synthetic oligonucleotide
cugcggaccucagucauca

SEQ ID NO: 179511 - RNA, 19 nt, Artificial Sequence
  Description of Artificial Sequence: Synthetic oligonucleotide
ccagauccuggacggaccc

SEQ ID NO: 179512 - RNA, 19 nt, Artificial Sequence
  Description of Artificial Sequence: Synthetic oligonucleotide
ugcaaguugcaggcuggau

SEQ ID NO: 179513 - RNA, 19 nt, Artificial Sequence
  Description of Artificial Sequence: Synthetic oligonucleotide
gcgcugaauggcuucacga

SEQ ID NO: 179514 - RNA, 19 nt, Artificial Sequence
  Description of Artificial Sequence: Synthetic oligonucleotide
acgcacuucuaagucuggu

SEQ ID NO: 179515 - RNA, 19 nt, Artificial Sequence
  Description of Artificial Sequence: Synthetic oligonucleotide
aggugagcauucagauaag

SEQ ID NO: 179516 - RNA, 19 nt, Artificial Sequence
  Description of Artificial Sequence: Synthetic oligonucleotide
cagauccuggacggacccg

SEQ ID NO: 179517 - RNA, 19 nt, Artificial Sequence
  Description of Artificial Sequence: Synthetic oligonucleotide
cugacauuugcaagugcau

SEQ ID NO: 179518 - RNA, 19 nt, Artificial Sequence
  Description of Artificial Sequence: Synthetic oligonucleotide
ccacaaugcuccucgauaa

SEQ ID NO: 179519 - RNA, 19 nt, Artificial Sequence
  Description of Artificial Sequence: Synthetic oligonucleotide
cgcuacauagcguaaugca

SEQ ID NO: 179520 - RNA, 19 nt, Artificial Sequence
  Description of Artificial Sequence: Synthetic oligonucleotide
cuucacgaacaaacuccaa

SEQ ID NO: 179521 - RNA, 19 nt, Artificial Sequence
  Description of Artificial Sequence: Synthetic oligonucleotide
cgcacuucuaagucuggug

SEQ ID NO: 179522 - RNA, 19 nt, Artificial Sequence
  Description of Artificial Sequence: Synthetic oligonucleotide
caagcacggauagcgggca

SEQ ID NO: 179523 - RNA, 19 nt, Artificial Sequence
  Description of Artificial Sequence: Synthetic oligonucleotide
ccaaagcucgauccugauc

SEQ ID NO: 179524 - RNA, 19 nt, Artificial Sequence
  Description of Artificial Sequence: Synthetic oligonucleotide
ucuucgaguuuggcagaua

SEQ ID NO: 179525 - RNA, 19 nt, Artificial Sequence
  Description of Artificial Sequence: Synthetic oligonucleotide
cagaguuaccaauguuccu

SEQ ID NO: 179526 - RNA, 19 nt, Artificial Sequence
  Description of Artificial Sequence: Synthetic oligonucleotide
cugggugaccuuguuaagu

SEQ ID NO: 179527 - RNA, 19 nt, Artificial Sequence
  Description of Artificial Sequence: Synthetic oligonucleotide
cuaacauagcugugacgau

SEQ ID NO: 179528 - RNA, 19 nt, Artificial Sequence
  Description of Artificial Sequence: Synthetic oligonucleotide
ccaaauauagaacgagcau

SEQ ID NO: 179529 - RNA, 19 nt, Artificial Sequence
  Description of Artificial Sequence: Synthetic oligonucleotide
gaaauucggucuacaucau

SEQ ID NO: 179530 - RNA, 19 nt, Artificial Sequence
  Description of Artificial Sequence: Synthetic oligonucleotide
cuuaggaagagaggauuuu

SEQ ID NO: 179531 - RNA, 19 nt, Artificial Sequence
  Description of Artificial Sequence: Synthetic oligonucleotide
aaguugcaggcuggauaua

SEQ ID NO: 179532 - RNA, 19 nt, Artificial Sequence
  Description of Artificial Sequence: Synthetic oligonucleotide
cuccugaaccaacgcuaca

SEQ ID NO: 179533 - RNA, 19 nt, Artificial Sequence
  Description of Artificial Sequence: Synthetic oligonucleotide
agcacggauagcgggcauu

SEQ ID NO: 179534 - RNA, 19 nt, Artificial Sequence
  Description of Artificial Sequence: Synthetic oligonucleotide
guacuguuacauuccucuu

SEQ ID NO: 179535 - RNA, 19 nt, Artificial Sequence
  Description of Artificial Sequence: Synthetic oligonucleotide
uagcugugacgauguucua

SEQ ID NO: 179536 - RNA, 19 nt, Artificial Sequence
  Description of Artificial Sequence: Synthetic oligonucleotide
cauccaggaggaacccucu

SEQ ID NO: 179537 - RNA, 19 nt, Artificial Sequence
  Description of Artificial Sequence: Synthetic oligonucleotide
ugcggaccucagucaucac

SEQ ID NO: 179538 - RNA, 19 nt, Artificial Sequence
  Description of Artificial Sequence: Synthetic oligonucleotide
ccccuagaguagcuaacuc

SEQ ID NO: 179539 - RNA, 19 nt, Artificial Sequence
  Description of Artificial Sequence: Synthetic oligonucleotide
gugcaaguugcaggcugga

SEQ ID NO: 179540 - RNA, 19 nt, Artificial Sequence
  Description of Artificial Sequence: Synthetic oligonucleotide
gccggacuagaugauugca

SEQ ID NO: 179541 - RNA, 19 nt, Artificial Sequence
  Description of Artificial Sequence: Synthetic oligonucleotide
gcguuucuccuaacauagc

SEQ ID NO: 179542 - RNA, 19 nt, Artificial Sequence
  Description of Artificial Sequence: Synthetic oligonucleotide
caacgcuacauagcguaau

SEQ ID NO: 179543 - RNA, 19 nt, Artificial Sequence
  Description of Artificial Sequence: Synthetic oligonucleotide
agcgggcauuaaagguucu

SEQ ID NO: 179544 - RNA, 19 nt, Artificial Sequence
  Description of Artificial Sequence: Synthetic oligonucleotide
gggugaccuuguuaaguuu

SEQ ID NO: 179545 - RNA, 19 nt, Artificial Sequence
  Description of Artificial Sequence: Synthetic oligonucleotide
cacggauagcgggcauuaa

SEQ ID NO: 179546 - RNA, 19 nt, Artificial Sequence
  Description of Artificial Sequence: Synthetic oligonucleotide
gcuaggggaucugcugccu

SEQ ID NO: 179547 - RNA, 19 nt, Artificial Sequence
  Description of Artificial Sequence: Synthetic oligonucleotide
cgguauuugucagugucuu

SEQ ID NO: 179548 - RNA, 19 nt, Artificial Sequence
  Description of Artificial Sequence: Synthetic oligonucleotide
cggcccacaucugacggaa

SEQ ID NO: 179549 - RNA, 19 nt, Artificial Sequence
  Description of Artificial Sequence: Synthetic oligonucleotide
ccuggacggacccguucau

SEQ ID NO: 179550 - RNA, 19 nt, Artificial Sequence
  Description of Artificial Sequence: Synthetic oligonucleotide
cgaaugaaacgggcccuuu

SEQ ID NO: 179551 - RNA, 19 nt, Artificial Sequence
  Description of Artificial Sequence: Synthetic oligonucleotide
gaugaugcauuucagaggc

SEQ ID NO: 179552 - RNA, 19 nt, Artificial Sequence
  Description of Artificial Sequence: Synthetic oligonucleotide
ucuaaaauccuucagccac

SEQ ID NO: 179553 - RNA, 19 nt, Artificial Sequence
  Description of Artificial Sequence: Synthetic oligonucleotide
ugaauagucaguuugucca

SEQ ID NO: 179554 - RNA, 19 nt, Artificial Sequence
  Description of Artificial Sequence: Synthetic oligonucleotide
uuuugaaggaagaaccaag

SEQ ID NO: 179555 - RNA, 19 nt, Artificial Sequence
  Description of Artificial Sequence: Synthetic oligonucleotide
ugcauaauuuucuaggaug

SEQ ID NO: 179556 - RNA, 19 nt, Artificial Sequence
  Description of Artificial Sequence: Synthetic oligonucleotide
uucucuaaaauccuucagc

SEQ ID NO: 179557 - RNA, 19 nt, Artificial Sequence
  Description of Artificial Sequence: Synthetic oligonucleotide
agauucguuucauggaucc

SEQ ID NO: 179558 - RNA, 19 nt, Artificial Sequence
  Description of Artificial Sequence: Synthetic oligonucleotide
aagaaccaagcugaaaggc

SEQ ID NO: 179559 - RNA, 19 nt, Artificial Sequence
  Description of Artificial Sequence: Synthetic oligonucleotide
uuugaaggaagaaccaagc

SEQ ID NO: 179560 - RNA, 19 nt, Artificial Sequence
  Description of Artificial Sequence: Synthetic oligonucleotide
uuuucaauguugauggcac

SEQ ID NO: 179561 - RNA, 19 nt, Artificial Sequence
  Description of Artificial Sequence: Synthetic oligonucleotide
aucacuuggucauacuggc

SEQ ID NO: 179562 - RNA, 19 nt, Artificial Sequence
  Description of Artificial Sequence: Synthetic oligonucleotide
ugguuuauguccuuggccc

SEQ ID NO: 179563 - RNA, 19 nt, Artificial Sequence
  Description of Artificial Sequence: Synthetic oligonucleotide
cuugaauuggugcagcugc

SEQ ID NO: 179564 - RNA, 19 nt, Artificial Sequence
  Description of Artificial Sequence: Synthetic oligonucleotide
ugaacuguagcauagccau

SEQ ID NO: 179565 - RNA, 19 nt, Artificial Sequence
  Description of Artificial Sequence: Synthetic oligonucleotide
uuuucggacaauguuaaug

SEQ ID NO: 179566 - RNA, 19 nt, Artificial Sequence
  Description of Artificial Sequence: Synthetic oligonucleotide
ugaacuuaaggguuccugc

SEQ ID NO: 179567 - RNA, 19 nt, Artificial Sequence
  Description of Artificial Sequence: Synthetic oligonucleotide
aaccauucgaucugggucu

SEQ ID NO: 179568 - RNA, 19 nt, Artificial Sequence
  Description of Artificial Sequence: Synthetic oligonucleotide
aagcccacaccauacuugg

SEQ ID NO: 179569 - RNA, 19 nt, Artificial Sequence
  Description of Artificial Sequence: Synthetic oligonucleotide
cagauuguugccaugcccg

SEQ ID NO: 179570 - RNA, 19 nt, Artificial Sequence
  Description of Artificial Sequence: Synthetic oligonucleotide
gacgauuguauucuucucc

SEQ ID NO: 179571 - RNA, 19 nt, Artificial Sequence
  Description of Artificial Sequence: Synthetic oligonucleotide
ugauauguggcuuuagcuc

SEQ ID NO: 179572 - RNA, 19 nt, Artificial Sequence
  Description of Artificial Sequence: Synthetic oligonucleotide
aaucaaacccacucugaug

SEQ ID NO: 179573 - RNA, 19 nt, Artificial Sequence
  Description of Artificial Sequence: Synthetic oligonucleotide
uuagggugcuugaugaugc

SEQ ID NO: 179574 - RNA, 19 nt, Artificial Sequence
  Description of Artificial Sequence: Synthetic oligonucleotide
uucgaucugggucucauug

SEQ ID NO: 179575 - RNA, 19 nt, Artificial Sequence
  Description of Artificial Sequence: Synthetic oligonucleotide
uugaauagucaguuugucc

SEQ ID NO: 179576 - RNA, 19 nt, Artificial Sequence
  Description of Artificial Sequence: Synthetic oligonucleotide
auguccacggaacuugagc

SEQ ID NO: 179577 - RNA, 19 nt, Artificial Sequence
  Description of Artificial Sequence: Synthetic oligonucleotide
cauguucccggcuugagcc

SEQ ID NO: 179578 - RNA, 19 nt, Artificial Sequence
  Description of Artificial Sequence: Synthetic oligonucleotide
ggugaaugauuccagaucc

SEQ ID NO: 179579 - RNA, 19 nt, Artificial Sequence
  Description of Artificial Sequence: Synthetic oligonucleotide
uaaggcgccauuuugugca

SEQ ID NO: 179580 - RNA, 19 nt, Artificial Sequence
  Description of Artificial Sequence: Synthetic oligonucleotide
uguccacggaacuugagcc

SEQ ID NO: 179581 - RNA, 19 nt, Artificial Sequence
  Description of Artificial Sequence: Synthetic oligonucleotide
uugauauguggcuuuagcu

SEQ ID NO: 179582 - RNA, 19 nt, Artificial Sequence
  Description of Artificial Sequence: Synthetic oligonucleotide
ugauuguaugggaacacug

SEQ ID NO: 179583 - RNA, 19 nt, Artificial Sequence
  Description of Artificial Sequence: Synthetic oligonucleotide
uggucgucaucucagagca

SEQ ID NO: 179584 - RNA, 19 nt, Artificial Sequence
  Description of Artificial Sequence: Synthetic oligonucleotide
ucuaggaugaucuggugaa

SEQ ID NO: 179585 - RNA, 19 nt, Artificial Sequence
  Description of Artificial Sequence: Synthetic oligonucleotide
cugggugacagcauuacgc

SEQ ID NO: 179586 - RNA, 19 nt, Artificial Sequence
  Description of Artificial Sequence: Synthetic oligonucleotide
uuggccaaaacaaugccuc

SEQ ID NO: 179587 - RNA, 19 nt, Artificial Sequence
  Description of Artificial Sequence: Synthetic oligonucleotide
ucaagaagucgguuucugg

SEQ ID NO: 179588 - RNA, 19 nt, Artificial Sequence
  Description of Artificial Sequence: Synthetic oligonucleotide
auggagucgacaccaggcc

SEQ ID NO: 179589 - RNA, 19 nt, Artificial Sequence
  Description of Artificial Sequence: Synthetic oligonucleotide
gaaccauucgaucuggguc

SEQ ID NO: 179590 - RNA, 19 nt, Artificial Sequence
  Description of Artificial Sequence: Synthetic oligonucleotide
aaagucugaucggggaagc

SEQ ID NO: 179591 - RNA, 19 nt, Artificial Sequence
  Description of Artificial Sequence: Synthetic oligonucleotide
auagccaucccgcucaaug

SEQ ID NO: 179592 - RNA, 19 nt, Artificial Sequence
  Description of Artificial Sequence: Synthetic oligonucleotide
aacuguagcauagccaucu

SEQ ID NO: 179593 - RNA, 19 nt, Artificial Sequence
  Description of Artificial Sequence: Synthetic oligonucleotide
ugagcagguuauuagagau

SEQ ID NO: 179594 - RNA, 19 nt, Artificial Sequence
  Description of Artificial Sequence: Synthetic oligonucleotide
ccguuuucaauguugaugg

SEQ ID NO: 179595 - RNA, 19 nt, Artificial Sequence
  Description of Artificial Sequence: Synthetic oligonucleotide
uuguaggaagugacgauug

SEQ ID NO: 179596 - RNA, 19 nt, Artificial Sequence
  Description of Artificial Sequence: Synthetic oligonucleotide
ugaucggggaagcucaucu

SEQ ID NO: 179597 - RNA, 19 nt, Artificial Sequence
  Description of Artificial Sequence: Synthetic oligonucleotide
agggguaaaagguccauug

SEQ ID NO: 179598 - RNA, 19 nt, Artificial Sequence
  Description of Artificial Sequence: Synthetic oligonucleotide
aaauacaggugcauggacu

SEQ ID NO: 179599 - RNA, 19 nt, Artificial Sequence
  Description of Artificial Sequence: Synthetic oligonucleotide
uguaaggcgccauuuugug

SEQ ID NO: 179600 - RNA, 19 nt, Artificial Sequence
  Description of Artificial Sequence: Synthetic oligonucleotide
agcucauugagguuaauuu

SEQ ID NO: 179601 - RNA, 19 nt, Artificial Sequence
  Description of Artificial Sequence: Synthetic oligonucleotide
gaaccaagcugaaaggcag

SEQ ID NO: 179602 - RNA, 19 nt, Artificial Sequence
  Description of Artificial Sequence: Synthetic oligonucleotide
uaaaagguccauugauaug

SEQ ID NO: 179603 - RNA, 19 nt, Artificial Sequence
  Description of Artificial Sequence: Synthetic oligonucleotide
guuucuuguaguaucgagc

SEQ ID NO: 179604 - RNA, 19 nt, Artificial Sequence
  Description of Artificial Sequence: Synthetic oligonucleotide
cuaaaauccuucagccacc

SEQ ID NO: 179605 - RNA, 19 nt, Artificial Sequence
  Description of Artificial Sequence: Synthetic oligonucleotide
cauccugugauuguauggg

SEQ ID NO: 179606 - RNA, 19 nt, Artificial Sequence
  Description of Artificial Sequence: Synthetic oligonucleotide
agucagggguaaaaggucc

SEQ ID NO: 179607 - RNA, 19 nt, Artificial Sequence
  Description of Artificial Sequence: Synthetic oligonucleotide
aagucagggguaaaagguc

SEQ ID NO: 179608 - RNA, 19 nt, Artificial Sequence
  Description of Artificial Sequence: Synthetic oligonucleotide
uaaggguuccugcaauggc

SEQ ID NO: 179609 - RNA, 19 nt, Artificial Sequence
  Description of Artificial Sequence: Synthetic oligonucleotide
uaguugauggcaccgcuac

SEQ ID NO: 179610 - RNA, 19 nt, Artificial Sequence
  Description of Artificial Sequence: Synthetic oligonucleotide
gucgacaccaggcccaugg

SEQ ID NO: 179611 - RNA, 19 nt, Artificial Sequence
  Description of Artificial Sequence: Synthetic oligonucleotide
cauguugcagauuguugcc

SEQ ID NO: 179612 - RNA, 19 nt, Artificial Sequence
  Description of Artificial Sequence: Synthetic oligonucleotide
cuucacgccaaucaccuug

SEQ ID NO: 179613 - RNA, 19 nt, Artificial Sequence
  Description of Artificial Sequence: Synthetic oligonucleotide
caaucacuuggucauacug

SEQ ID NO: 179614 - RNA, 19 nt, Artificial Sequence
  Description of Artificial Sequence: Synthetic oligonucleotide
cauagcuugaauuggugca

SEQ ID NO: 179615 - RNA, 19 nt, Artificial Sequence
  Description of Artificial Sequence: Synthetic oligonucleotide
ugcugaccgucccauaucc

SEQ ID NO: 179616 - RNA, 19 nt, Artificial Sequence
  Description of Artificial Sequence: Synthetic oligonucleotide
agggcucacgucuacccgc

SEQ ID NO: 179617 - RNA, 19 nt, Artificial Sequence
  Description of Artificial Sequence: Synthetic oligonucleotide
gcagguaugucuuuccccg

SEQ ID NO: 179618 - RNA, 19 nt, Artificial Sequence
  Description of Artificial Sequence: Synthetic oligonucleotide
cugguuuauguccuuggcc

SEQ ID NO: 179619 - RNA, 19 nt, Artificial Sequence
  Description of Artificial Sequence: Synthetic oligonucleotide
uaguucucgucuccaauca

SEQ ID NO: 179620 - RNA, 19 nt, Artificial Sequence
  Description of Artificial Sequence: Synthetic oligonucleotide
auuguaugggaacacugau

SEQ ID NO: 179621 - RNA, 19 nt, Artificial Sequence
  Description of Artificial Sequence: Synthetic oligonucleotide
uccagauguccauauacaa

SEQ ID NO: 179622 - RNA, 19 nt, Artificial Sequence
  Description of Artificial Sequence: Synthetic oligonucleotide
uuagggcacugccugcacg

SEQ ID NO: 179623 - RNA, 19 nt, Artificial Sequence
  Description of Artificial Sequence: Synthetic oligonucleotide
ucaaagucugaucggggaa

SEQ ID NO: 179624 - RNA, 19 nt, Artificial Sequence
  Description of Artificial Sequence: Synthetic oligonucleotide
gucgucaucucagagcagg

SEQ ID NO: 179625 - RNA, 19 nt, Artificial Sequence
  Description of Artificial Sequence: Synthetic oligonucleotide
uugaacuuaaggguuccug

SEQ ID NO: 179626 - RNA, 19 nt, Artificial Sequence
  Description of Artificial Sequence: Synthetic oligonucleotide
caggguuugcgucauugcg

SEQ ID NO: 179627 - RNA, 19 nt, Artificial Sequence
  Description of Artificial Sequence: Synthetic oligonucleotide
uuuagagggagugcuguca

SEQ ID NO: 179628 - RNA, 19 nt, Artificial Sequence
  Description of Artificial Sequence: Synthetic oligonucleotide
uuacgcacggaguuggccu

SEQ ID NO: 179629 - RNA, 19 nt, Artificial Sequence
  Description of Artificial Sequence: Synthetic oligonucleotide
gguucaaccguuuucggac

SEQ ID NO: 179630 - RNA, 19 nt, Artificial Sequence
  Description of Artificial Sequence: Synthetic oligonucleotide
uucagcuagacuggcaaug

SEQ ID NO: 179631 - RNA, 19 nt, Artificial Sequence
  Description of Artificial Sequence: Synthetic oligonucleotide
uuugugcacugacaaagau

SEQ ID NO: 179632 - RNA, 19 nt, Artificial Sequence
  Description of Artificial Sequence: Synthetic oligonucleotide
aucgagcagugucaggcac

SEQ ID NO: 179633 - RNA, 19 nt, Artificial Sequence
  Description of Artificial Sequence: Synthetic oligonucleotide
ugucuuuccccgcucaauc

SEQ ID NO: 179634 - RNA, 19 nt, Artificial Sequence
  Description of Artificial Sequence: Synthetic oligonucleotide
gaucugugcauagccaucc

SEQ ID NO: 179635 - RNA, 19 nt, Artificial Sequence
  Description of Artificial Sequence: Synthetic oligonucleotide
uucaugugcccuccaucgg

SEQ ID NO: 179636 - RNA, 19 nt, Artificial Sequence
  Description of Artificial Sequence: Synthetic oligonucleotide
auucguuucauggauccug

SEQ ID NO: 179637 - RNA, 19 nt, Artificial Sequence
  Description of Artificial Sequence: Synthetic oligonucleotide
cuguuuagggcacugccug

SEQ ID NO: 179638 - RNA, 19 nt, Artificial Sequence
  Description of Artificial Sequence: Synthetic oligonucleotide
uggguugaacuuaaggguu

SEQ ID NO: 179639 - RNA, 19 nt, Artificial Sequence
  Description of Artificial Sequence: Synthetic oligonucleotide
gaaauguggucgguggugc

SEQ ID NO: 179640 - RNA, 19 nt, Artificial Sequence
  Description of Artificial Sequence: Synthetic oligonucleotide
uagcggauguacucauugg

SEQ ID NO: 179641 - RNA, 19 nt, Artificial Sequence
  Description of Artificial Sequence: Synthetic oligonucleotide
ucaugugcccuccaucggu

SEQ ID NO: 179642 - RNA, 19 nt, Artificial Sequence
  Description of Artificial Sequence: Synthetic oligonucleotide
gauuguaugggaacacuga

SEQ ID NO: 179643 - RNA, 19 nt, Artificial Sequence
  Description of Artificial Sequence: Synthetic oligonucleotide
uccaucgguggucacucag

SEQ ID NO: 179644 - RNA, 19 nt, Artificial Sequence
  Description of Artificial Sequence: Synthetic oligonucleotide
cugccaaucaaacccacuc

SEQ ID NO: 179645 - RNA, 19 nt, Artificial Sequence
  Description of Artificial Sequence: Synthetic oligonucleotide
ggugacagcauuacgcacg

SEQ ID NO: 179646 - RNA, 19 nt, Artificial Sequence
  Description of Artificial Sequence: Synthetic oligonucleotide
uaggugauccuugaauucu

SEQ ID NO: 179647 - RNA, 19 nt, Artificial Sequence
  Description of Artificial Sequence: Synthetic oligonucleotide
uggaccuguacuucugaca

SEQ ID NO: 179648 - RNA, 19 nt, Artificial Sequence
  Description of Artificial Sequence: Synthetic oligonucleotide
uucuuguaguaucgagcag

SEQ ID NO: 179649 - RNA, 19 nt, Artificial Sequence
  Description of Artificial Sequence: Synthetic oligonucleotide
aauagucaguuuguccacu

SEQ ID NO: 179650 - RNA, 19 nt, Artificial Sequence
  Description of Artificial Sequence: Synthetic oligonucleotide
uagggcucacgucuacccg

SEQ ID NO: 179651 - RNA, 19 nt, Artificial Sequence
  Description of Artificial Sequence: Synthetic oligonucleotide
uggagucgacaccaggccc

SEQ ID NO: 179652 - RNA, 19 nt, Artificial Sequence
  Description of Artificial Sequence: Synthetic oligonucleotide
cuuaaggguuccugcaaug

SEQ ID NO: 179653 - RNA, 19 nt, Artificial Sequence
  Description of Artificial Sequence: Synthetic oligonucleotide
agaggggucagcaaaggug

SEQ ID NO: 179654 - RNA, 19 nt, Artificial Sequence
  Description of Artificial Sequence: Synthetic oligonucleotide
gucauugcggccugugaag

SEQ ID NO: 179655 - RNA, 19 nt, Artificial Sequence
  Description of Artificial Sequence: Synthetic oligonucleotide
uguaggaagugacgauugu

SEQ ID NO: 179656 - RNA, 19 nt, Artificial Sequence
  Description of Artificial Sequence: Synthetic oligonucleotide
uaggaugaucuggugaaug

SEQ ID NO: 179657 - RNA, 19 nt, Artificial Sequence
  Description of Artificial Sequence: Synthetic oligonucleotide
ugaccgucccauauccuca

SEQ ID NO: 179658 - RNA, 19 nt, Artificial Sequence
  Description of Artificial Sequence: Synthetic oligonucleotide
ugggagucagugccaauca

SEQ ID NO: 179659 - RNA, 19 nt, Artificial Sequence
  Description of Artificial Sequence: Synthetic oligonucleotide
cuucaggccuugaauaguc

SEQ ID NO: 179660 - RNA, 19 nt, Artificial Sequence
  Description of Artificial Sequence: Synthetic oligonucleotide
agucugaucggggaagcuc

SEQ ID NO: 179661 - RNA, 19 nt, Artificial Sequence
  Description of Artificial Sequence: Synthetic oligonucleotide
agccgggucaccaggaggc

SEQ ID NO: 179662 - RNA, 19 nt, Artificial Sequence
  Description of Artificial Sequence: Synthetic oligonucleotide
agaaauguggucgguggug

SEQ ID NO: 179663 - RNA, 19 nt, Artificial Sequence
  Description of Artificial Sequence: Synthetic oligonucleotide
guagggcucacgucuaccc

SEQ ID NO: 179664 - RNA, 19 nt, Artificial Sequence
  Description of Artificial Sequence: Synthetic oligonucleotide
uucugcuacugggugagcc

SEQ ID NO: 179665 - RNA, 19 nt, Artificial Sequence
  Description of Artificial Sequence: Synthetic oligonucleotide
augcauaauuuucuaggau

SEQ ID NO: 179666 - RNA, 19 nt, Artificial Sequence
  Description of Artificial Sequence: Synthetic oligonucleotide
aguaucgagcagugucagg

SEQ ID NO: 179667 - RNA, 19 nt, Artificial Sequence
  Description of Artificial Sequence: Synthetic oligonucleotide
aggguuugcgucauugcgg

SEQ ID NO: 179668 - RNA, 19 nt, Artificial Sequence
  Description of Artificial Sequence: Synthetic oligonucleotide
uagauucguuucauggauc

SEQ ID NO: 179669 - RNA, 19 nt, Artificial Sequence
  Description of Artificial Sequence: Synthetic oligonucleotide
gcacccauguugcagauug

SEQ ID NO: 179670 - RNA, 19 nt, Artificial Sequence
  Description of Artificial Sequence: Synthetic oligonucleotide
gaagucgguuucuggguug

SEQ ID NO: 179671 - RNA, 19 nt, Artificial Sequence
  Description of Artificial Sequence: Synthetic oligonucleotide
aaggcgccauuuugugcac

SEQ ID NO: 179672 - RNA, 19 nt, Artificial Sequence
  Description of Artificial Sequence: Synthetic oligonucleotide
accguuuucggacaauguu

SEQ ID NO: 179673 - RNA, 19 nt, Artificial Sequence
  Description of Artificial Sequence: Synthetic oligonucleotide
uguugcagauuguugccau

SEQ ID NO: 179674 - RNA, 19 nt, Artificial Sequence
  Description of Artificial Sequence: Synthetic oligonucleotide
ucuuugccgucccacuugu

SEQ ID NO: 179675 - RNA, 19 nt, Artificial Sequence
  Description of Artificial Sequence: Synthetic oligonucleotide
agugacgauuguauucuuc

SEQ ID NO: 179676 - RNA, 19 nt, Artificial Sequence
  Description of Artificial Sequence: Synthetic oligonucleotide
ccaagucagggguaaaagg

SEQ ID NO: 179677 - RNA, 19 nt, Artificial Sequence
  Description of Artificial Sequence: Synthetic oligonucleotide
guaaggcgccauuuugugc

SEQ ID NO: 179678 - RNA, 19 nt, Artificial Sequence
  Description of Artificial Sequence: Synthetic oligonucleotide
ugaugcauuucagaggcuu

SEQ ID NO: 179679 - RNA, 19 nt, Artificial Sequence
  Description of Artificial Sequence: Synthetic oligonucleotide
uaguaucgagcagugucag

SEQ ID NO: 179680 - RNA, 19 nt, Artificial Sequence
  Description of Artificial Sequence: Synthetic oligonucleotide
aucgguggucacucagugg

SEQ ID NO: 179681 - RNA, 19 nt, Artificial Sequence
  Description of Artificial Sequence: Synthetic oligonucleotide
cugaccgucccauauccuc

SEQ ID NO: 179682 - RNA, 19 nt, Artificial Sequence
  Description of Artificial Sequence: Synthetic oligonucleotide
cacuucaacucccagggga

SEQ ID NO: 179683 - RNA, 19 nt, Artificial Sequence
  Description of Artificial Sequence: Synthetic oligonucleotide
uuugcgucauugcggccug

SEQ ID NO: 179684 - RNA, 19 nt, Artificial Sequence
  Description of Artificial Sequence: Synthetic oligonucleotide
uccauugauauguggcuuu

SEQ ID NO: 179685 - RNA, 19 nt, Artificial Sequence
  Description of Artificial Sequence: Synthetic oligonucleotide
cuagacuggcaaugucugc

SEQ ID NO: 179686 - RNA, 19 nt, Artificial Sequence
  Description of Artificial Sequence: Synthetic oligonucleotide
ucgaucugggucucauuga

SEQ ID NO: 179687 - RNA, 19 nt, Artificial Sequence
  Description of Artificial Sequence: Synthetic oligonucleotide
uccaagagcugcaggcgcu

SEQ ID NO: 179688 - RNA, 19 nt, Artificial Sequence
  Description of Artificial Sequence: Synthetic oligonucleotide
acgucuacccgcugcccac

SEQ ID NO: 179689 - RNA, 19 nt, Artificial Sequence
  Description of Artificial Sequence: Synthetic oligonucleotide
accgcuaccuugggcagcc

SEQ ID NO: 179690 - RNA, 19 nt, Artificial Sequence
  Description of Artificial Sequence: Synthetic oligonucleotide
uaucgagcagugucaggca

SEQ ID NO: 179691 - RNA, 19 nt, Artificial Sequence
  Description of Artificial Sequence: Synthetic oligonucleotide
cagauguccacggaacuug

SEQ ID NO: 179692 - RNA, 19 nt, Artificial Sequence
  Description of Artificial Sequence: Synthetic oligonucleotide
ucaaucagauggucacagu

SEQ ID NO: 179693 - RNA, 19 nt, Artificial Sequence
  Description of Artificial Sequence: Synthetic oligonucleotide
auauccucauagcuugaau

SEQ ID NO: 179694 - RNA, 19 nt, Artificial Sequence
  Description of Artificial Sequence: Synthetic oligonucleotide
ugacgauuguauucuucuc

SEQ ID NO: 179695 - RNA, 19 nt, Artificial Sequence
  Description of Artificial Sequence: Synthetic oligonucleotide
ucgagcagugucaggcaca

SEQ ID NO: 179696 - RNA, 19 nt, Artificial Sequence
  Description of Artificial Sequence: Synthetic oligonucleotide
guaguaucgagcaguguca

SEQ ID NO: 179697 - RNA, 19 nt, Artificial Sequence
  Description of Artificial Sequence: Synthetic oligonucleotide
gugacgauuguauucuucu

SEQ ID NO: 179698 - RNA, 19 nt, Artificial Sequence
  Description of Artificial Sequence: Synthetic oligonucleotide
uucaggccuugaauaguca

SEQ ID NO: 179699 - RNA, 19 nt, Artificial Sequence
  Description of Artificial Sequence: Synthetic oligonucleotide
uggugcacuucccuuugac

SEQ ID NO: 179700 - RNA, 19 nt, Artificial Sequence
  Description of Artificial Sequence: Synthetic oligonucleotide
ucacuuggucauacuggca

SEQ ID NO: 179701 - RNA, 19 nt, Artificial Sequence
  Description of Artificial Sequence: Synthetic oligonucleotide
cuggguugaacuuaagggu

SEQ ID NO: 179702 - RNA, 19 nt, Artificial Sequence
  Description of Artificial Sequence: Synthetic oligonucleotide
cucuaaaauccuucagcca

SEQ ID NO: 179703 - RNA, 19 nt, Artificial Sequence
  Description of Artificial Sequence: Synthetic oligonucleotide
cacggaaccauucgaucug

SEQ ID NO: 179704 - RNA, 19 nt, Artificial Sequence
  Description of Artificial Sequence: Synthetic oligonucleotide
ggaacacugaugugguggc

SEQ ID NO: 179705 - RNA, 19 nt, Artificial Sequence
  Description of Artificial Sequence: Synthetic oligonucleotide
ucauagcggauguacucau

SEQ ID NO: 179706 - RNA, 19 nt, Artificial Sequence
  Description of Artificial Sequence: Synthetic oligonucleotide
gccaaucaaacccacucug

SEQ ID NO: 179707 - RNA, 19 nt, Artificial Sequence
  Description of Artificial Sequence: Synthetic oligonucleotide
gugcacuucccuuugaccu

SEQ ID NO: 179708 - RNA, 19 nt, Artificial Sequence
  Description of Artificial Sequence: Synthetic oligonucleotide
caucgguggucacucagug

SEQ ID NO: 179709 - RNA, 19 nt, Artificial Sequence
  Description of Artificial Sequence: Synthetic oligonucleotide
ggucacaguggauaguuga

SEQ ID NO: 179710 - RNA, 19 nt, Artificial Sequence
  Description of Artificial Sequence: Synthetic oligonucleotide
agauuguugccaugcccgu

SEQ ID NO: 179711 - RNA, 19 nt, Artificial Sequence
  Description of Artificial Sequence: Synthetic oligonucleotide
caccuugggacacuucaac

SEQ ID NO: 179712 - RNA, 19 nt, Artificial Sequence
  Description of Artificial Sequence: Synthetic oligonucleotide
gaauuggugcagcugccaa

SEQ ID NO: 179713 - RNA, 19 nt, Artificial Sequence
  Description of Artificial Sequence: Synthetic oligonucleotide
ucaccuugggacacuucaa

SEQ ID NO: 179714 - RNA, 19 nt, Artificial Sequence
  Description of Artificial Sequence: Synthetic oligonucleotide
gcagauuguugccaugccc

SEQ ID NO: 179715 - RNA, 19 nt, Artificial Sequence
  Description of Artificial Sequence: Synthetic oligonucleotide
cuggauagaccagcucugg

SEQ ID NO: 179716 - RNA, 19 nt, Artificial Sequence
  Description of Artificial Sequence: Synthetic oligonucleotide
aggaaauuauacacuuccu

SEQ ID NO: 179717 - RNA, 19 nt, Artificial Sequence
  Description of Artificial Sequence: Synthetic oligonucleotide
gccgguucaaccguuuucg

SEQ ID NO: 179718 - RNA, 19 nt, Artificial Sequence
  Description of Artificial Sequence: Synthetic oligonucleotide
uucaaccguuuucggacaa

SEQ ID NO: 179719 - RNA, 19 nt, Artificial Sequence
  Description of Artificial Sequence: Synthetic oligonucleotide
aggaagugacgauuguauu

SEQ ID NO: 179720 - RNA, 19 nt, Artificial Sequence
  Description of Artificial Sequence: Synthetic oligonucleotide
caaaaggcuccaagagcug

SEQ ID NO: 179721 - RNA, 19 nt, Artificial Sequence
  Description of Artificial Sequence: Synthetic oligonucleotide
agcauuacgcacggaguug

SEQ ID NO: 179722 - RNA, 19 nt, Artificial Sequence
  Description of Artificial Sequence: Synthetic oligonucleotide
ggugcacuucccuuugacc

SEQ ID NO: 179723 - RNA, 19 nt, Artificial Sequence
  Description of Artificial Sequence: Synthetic oligonucleotide
agacgcagguaugucuuuc

SEQ ID NO: 179724 - RNA, 19 nt, Artificial Sequence
  Description of Artificial Sequence: Synthetic oligonucleotide
caaccguuuucggacaaug

SEQ ID NO: 179725 - RNA, 19 nt, Artificial Sequence
  Description of Artificial Sequence: Synthetic oligonucleotide
auccugugauuguauggga

SEQ ID NO: 179726 - RNA, 19 nt, Artificial Sequence
  Description of Artificial Sequence: Synthetic oligonucleotide
guugcagauuguugccaug

SEQ ID NO: 179727 - RNA, 19 nt, Artificial Sequence
  Description of Artificial Sequence: Synthetic oligonucleotide
gugauggugaacugggacu

SEQ ID NO: 179728 - RNA, 19 nt, Artificial Sequence
  Description of Artificial Sequence: Synthetic oligonucleotide
caugugcccuccaucggug

SEQ ID NO: 179729 - RNA, 19 nt, Artificial Sequence
  Description of Artificial Sequence: Synthetic oligonucleotide
aaccguuuucggacaaugu

SEQ ID NO: 179730 - RNA, 19 nt, Artificial Sequence
  Description of Artificial Sequence: Synthetic oligonucleotide
uguugccaugcccgugcag

SEQ ID NO: 179731 - RNA, 19 nt, Artificial Sequence
  Description of Artificial Sequence: Synthetic oligonucleotide
agauguccauauacaaucu

SEQ ID NO: 179732 - RNA, 19 nt, Artificial Sequence
  Description of Artificial Sequence: Synthetic oligonucleotide
guagucagaggggucagca

SEQ ID NO: 179733 - RNA, 19 nt, Artificial Sequence
  Description of Artificial Sequence: Synthetic oligonucleotide
gauuguugccaugcccgug

SEQ ID NO: 179734 - RNA, 19 nt, Artificial Sequence
  Description of Artificial Sequence: Synthetic oligonucleotide
acuguagcauagccaucug

SEQ ID NO: 179735 - RNA, 19 nt, Artificial Sequence
  Description of Artificial Sequence: Synthetic oligonucleotide
gcauuacgcacggaguugg

SEQ ID NO: 179736 - RNA, 19 nt, Artificial Sequence
  Description of Artificial Sequence: Synthetic oligonucleotide
acggaaccauucgaucugg

SEQ ID NO: 179737 - RNA, 19 nt, Artificial Sequence
  Description of Artificial Sequence: Synthetic oligonucleotide
ccugugauuguaugggaac

SEQ ID NO: 179738 - RNA, 19 nt, Artificial Sequence
  Description of Artificial Sequence: Synthetic oligonucleotide
gucaagaagucgguuucug

SEQ ID NO: 179739 - RNA, 19 nt, Artificial Sequence
  Description of Artificial Sequence: Synthetic oligonucleotide
agcccuguuucuuuagauu

SEQ ID NO: 179740 - RNA, 19 nt, Artificial Sequence
  Description of Artificial Sequence: Synthetic oligonucleotide
uggccccaauuucugcacc

SEQ ID NO: 179741 - RNA, 19 nt, Artificial Sequence
  Description of Artificial Sequence: Synthetic oligonucleotide
aagucgguuucuggguuga

SEQ ID NO: 179742 - RNA, 19 nt, Artificial Sequence
  Description of Artificial Sequence: Synthetic oligonucleotide
gauguccacggaacuugag

SEQ ID NO: 179743 - RNA, 19 nt, Artificial Sequence
  Description of Artificial Sequence: Synthetic oligonucleotide
acccggucgggccguagac

SEQ ID NO: 179744 - RNA, 19 nt, Artificial Sequence
  Description of Artificial Sequence: Synthetic oligonucleotide
ugccugucaagaagucggu

SEQ ID NO: 179745 - RNA, 19 nt, Artificial Sequence
  Description of Artificial Sequence: Synthetic oligonucleotide
ucccgcucaaugguggcgc

SEQ ID NO: 179746 - RNA, 19 nt, Artificial Sequence
  Description of Artificial Sequence: Synthetic oligonucleotide
ugauggcaccaaugagcag

SEQ ID NO: 179747 - RNA, 19 nt, Artificial Sequence
  Description of Artificial Sequence: Synthetic oligonucleotide
guaugggaacacugaugug

SEQ ID NO: 179748 - RNA, 19 nt, Artificial Sequence
  Description of Artificial Sequence: Synthetic oligonucleotide
ucguuucauggauccuggc

SEQ ID NO: 179749 - RNA, 19 nt, Artificial Sequence
  Description of Artificial Sequence: Synthetic oligonucleotide
uucggacaauguuaauguu

SEQ ID NO: 179750 - RNA, 19 nt, Artificial Sequence
  Description of Artificial Sequence: Synthetic oligonucleotide
guucaaccguuuucggaca

SEQ ID NO: 179751 - RNA, 19 nt, Artificial Sequence
  Description of Artificial Sequence: Synthetic oligonucleotide
uagcucauugagguuaauu

SEQ ID NO: 179752 - RNA, 19 nt, Artificial Sequence
  Description of Artificial Sequence: Synthetic oligonucleotide
aagcaggucuggucgucau

SEQ ID NO: 179753 - RNA, 19 nt, Artificial Sequence
  Description of Artificial Sequence: Synthetic oligonucleotide
cauuacgcacggaguuggc

SEQ ID NO: 179754 - RNA, 19 nt, Artificial Sequence
  Description of Artificial Sequence: Synthetic oligonucleotide
aacuugagccaggggccag

SEQ ID NO: 179755 - RNA, 19 nt, Artificial Sequence
  Description of Artificial Sequence: Synthetic oligonucleotide
cacaucuuugggugagguc

SEQ ID NO: 179756 - RNA, 19 nt, Artificial Sequence
  Description of Artificial Sequence: Synthetic oligonucleotide
ucaacucccaggggauccc

SEQ ID NO: 179757 - RNA, 19 nt, Artificial Sequence
  Description of Artificial Sequence: Synthetic oligonucleotide
aagugacgauuguauucuu

SEQ ID NO: 179758 - RNA, 19 nt, Artificial Sequence
  Description of Artificial Sequence: Synthetic oligonucleotide
gguaaaagguccauugaua

SEQ ID NO: 179759 - RNA, 19 nt, Artificial Sequence
  Description of Artificial Sequence: Synthetic oligonucleotide
aagucugaucggggaagcu

SEQ ID NO: 179760 - RNA, 19 nt, Artificial Sequence
  Description of Artificial Sequence: Synthetic oligonucleotide
ucaaacccacucugauguc

SEQ ID NO: 179761 - RNA, 19 nt, Artificial Sequence
  Description of Artificial Sequence: Synthetic oligonucleotide
uuguugccaugcccgugca

SEQ ID NO: 179762 - RNA, 19 nt, Artificial Sequence
  Description of Artificial Sequence: Synthetic oligonucleotide
uuggcccguuggcacagga

SEQ ID NO: 179763 - RNA, 19 nt, Artificial Sequence
  Description of Artificial Sequence: Synthetic oligonucleotide
ggucuggucgucaucucag

SEQ ID NO: 179764 - RNA, 19 nt, Artificial Sequence
  Description of Artificial Sequence: Synthetic oligonucleotide
gguggcgcggaucugcuca

SEQ ID NO: 179765 - RNA, 19 nt, Artificial Sequence
  Description of Artificial Sequence: Synthetic oligonucleotide
gguugaacuuaaggguucc

SEQ ID NO: 179766 - RNA, 19 nt, Artificial Sequence
  Description of Artificial Sequence: Synthetic oligonucleotide
ugaggauuugcagguccuc

SEQ ID NO: 179767 - RNA, 19 nt, Artificial Sequence
  Description of Artificial Sequence: Synthetic oligonucleotide
gauggugaacugggacuug

SEQ ID NO: 179768 - RNA, 19 nt, Artificial Sequence
  Description of Artificial Sequence: Synthetic oligonucleotide
agaggccaaccuuccuucu

SEQ ID NO: 179769 - RNA, 19 nt, Artificial Sequence
  Description of Artificial Sequence: Synthetic oligonucleotide
gguggcgaggcuccagugc

SEQ ID NO: 179770 - RNA, 19 nt, Artificial Sequence
  Description of Artificial Sequence: Synthetic oligonucleotide
gccaagucagggguaaaag

SEQ ID NO: 179771 - RNA, 19 nt, Artificial Sequence
  Description of Artificial Sequence: Synthetic oligonucleotide
gauguccauauacaaucuu

SEQ ID NO: 179772 - RNA, 19 nt, Artificial Sequence
  Description of Artificial Sequence: Synthetic oligonucleotide
ggcccguuggcacaggaca

SEQ ID NO: 179773 - RNA, 19 nt, Artificial Sequence
  Description of Artificial Sequence: Synthetic oligonucleotide
caggcccaugguauucuac

SEQ ID NO: 179774 - RNA, 19 nt, Artificial Sequence
  Description of Artificial Sequence: Synthetic oligonucleotide
cuguaaggcgccauuuugu

SEQ ID NO: 179775 - RNA, 19 nt, Artificial Sequence
  Description of Artificial Sequence: Synthetic oligonucleotide
gccugcacggaaccauucg

SEQ ID NO: 179776 - RNA, 19 nt, Artificial Sequence
  Description of Artificial Sequence: Synthetic oligonucleotide
guaggaagugacgauugua

SEQ ID NO: 179777 - RNA, 19 nt, Artificial Sequence
  Description of Artificial Sequence: Synthetic oligonucleotide
ugguagggcucacgucuac

SEQ ID NO: 179778 - RNA, 19 nt, Artificial Sequence
  Description of Artificial Sequence: Synthetic oligonucleotide
cccauguugcagauuguug

SEQ ID NO: 179779 - RNA, 19 nt, Artificial Sequence
  Description of Artificial Sequence: Synthetic oligonucleotide
gcauguucccggcuugagc

SEQ ID NO: 179780 - RNA, 19 nt, Artificial Sequence
  Description of Artificial Sequence: Synthetic oligonucleotide
guccacggaacuugagcca

SEQ ID NO: 179781 - RNA, 19 nt, Artificial Sequence
  Description of Artificial Sequence: Synthetic oligonucleotide
guuugcgucauugcggccu

SEQ ID NO: 179782 - RNA, 19 nt, Artificial Sequence
  Description of Artificial Sequence: Synthetic oligonucleotide
gaacuugagccaggggcca

SEQ ID NO: 179783 - RNA, 19 nt, Artificial Sequence
  Description of Artificial Sequence: Synthetic oligonucleotide
gggagucagugccaaucag

SEQ ID NO: 179784 - RNA, 19 nt, Artificial Sequence
  Description of Artificial Sequence: Synthetic oligonucleotide
auguucccggcuugagccu

SEQ ID NO: 179785 - RNA, 19 nt, Artificial Sequence
  Description of Artificial Sequence: Synthetic oligonucleotide
ucaauggauuuggucuuuu

SEQ ID NO: 179786 - RNA, 19 nt, Artificial Sequence
  Description of Artificial Sequence: Synthetic oligonucleotide
gaagcaggucuggucguca

SEQ ID NO: 179787 - RNA, 19 nt, Artificial Sequence
  Description of Artificial Sequence: Synthetic oligonucleotide
accauucgaucugggucuc

SEQ ID NO: 179788 - RNA, 19 nt, Artificial Sequence
  Description of Artificial Sequence: Synthetic oligonucleotide
gcucacgucuacccgcugc

SEQ ID NO: 179789 - RNA, 19 nt, Artificial Sequence
  Description of Artificial Sequence: Synthetic oligonucleotide
ggcgccauuuugugcacug

SEQ ID NO: 179790 - RNA, 19 nt, Artificial Sequence
  Description of Artificial Sequence: Synthetic oligonucleotide
ggcacuaggugauccuuga

SEQ ID NO: 179791 - RNA, 19 nt, Artificial Sequence
  Description of Artificial Sequence: Synthetic oligonucleotide
gcuggauagaccagcucug

SEQ ID NO: 179792 - RNA, 19 nt, Artificial Sequence
  Description of Artificial Sequence: Synthetic oligonucleotide
uggcaccuguaccaccuuu

SEQ ID NO: 179793 - RNA, 19 nt, Artificial Sequence
  Description of Artificial Sequence: Synthetic oligonucleotide
ugcccgugcaggagaugga

SEQ ID NO: 179794 - RNA, 19 nt, Artificial Sequence
  Description of Artificial Sequence: Synthetic oligonucleotide
gucccauuagggugcuuga

SEQ ID NO: 179795 - RNA, 19 nt, Artificial Sequence
  Description of Artificial Sequence: Synthetic oligonucleotide
cacuugaguccaugggcca

SEQ ID NO: 179796 - RNA, 19 nt, Artificial Sequence
  Description of Artificial Sequence: Synthetic oligonucleotide
uacgcacggaguuggccuu

SEQ ID NO: 179797 - RNA, 19 nt, Artificial Sequence
  Description of Artificial Sequence: Synthetic oligonucleotide
acccauguugcagauuguu

SEQ ID NO: 179798 - RNA, 19 nt, Artificial Sequence
  Description of Artificial Sequence: Synthetic oligonucleotide
auaguugauggcaccgcua

SEQ ID NO: 179799 - RNA, 19 nt, Artificial Sequence
  Description of Artificial Sequence: Synthetic oligonucleotide
gacaaucucuggggaugug

SEQ ID NO: 179800 - RNA, 19 nt, Artificial Sequence
  Description of Artificial Sequence: Synthetic oligonucleotide
uacccgcugcccacugcug

SEQ ID NO: 179801 - RNA, 19 nt, Artificial Sequence
  Description of Artificial Sequence: Synthetic oligonucleotide
cugcugaccgucccauauc

SEQ ID NO: 179802 - RNA, 19 nt, Artificial Sequence
  Description of Artificial Sequence: Synthetic oligonucleotide
ucaaccguuuucggacaau

SEQ ID NO: 179803 - RNA, 19 nt, Artificial Sequence
  Description of Artificial Sequence: Synthetic oligonucleotide
agcccacaccauacuuggc

SEQ ID NO: 179804 - RNA, 19 nt, Artificial Sequence
  Description of Artificial Sequence: Synthetic oligonucleotide
ccaaucaaacccacucuga

SEQ ID NO: 179805 - RNA, 19 nt, Artificial Sequence
  Description of Artificial Sequence: Synthetic oligonucleotide
ggcgcggaucugcucagag

SEQ ID NO: 179806 - RNA, 19 nt, Artificial Sequence
  Description of Artificial Sequence: Synthetic oligonucleotide
gcugcauguucccggcuug

SEQ ID NO: 179807 - RNA, 19 nt, Artificial Sequence
  Description of Artificial Sequence: Synthetic oligonucleotide
ccggucgggccguagacgc

SEQ ID NO: 179808 - RNA, 19 nt, Artificial Sequence
  Description of Artificial Sequence: Synthetic oligonucleotide
cacgucuacccgcugccca

SEQ ID NO: 179809 - RNA, 19 nt, Artificial Sequence
  Description of Artificial Sequence: Synthetic oligonucleotide
ucgggccguagacgcaggu

SEQ ID NO: 179810 - RNA, 19 nt, Artificial Sequence
  Description of Artificial Sequence: Synthetic oligonucleotide
cuucaacucccaggggauc

SEQ ID NO: 179811 - RNA, 19 nt, Artificial Sequence
  Description of Artificial Sequence: Synthetic oligonucleotide
gugauuguaugggaacacu

SEQ ID NO: 179812 - RNA, 19 nt, Artificial Sequence
  Description of Artificial Sequence: Synthetic oligonucleotide
gucagggguaaaaggucca

SEQ ID NO: 179813 - RNA, 19 nt, Artificial Sequence
  Description of Artificial Sequence: Synthetic oligonucleotide
guggcgcggaucugcucag

SEQ ID NO: 179814 - RNA, 19 nt, Artificial Sequence
  Description of Artificial Sequence: Synthetic oligonucleotide
ggaaccauucgaucugggu

SEQ ID NO: 179815 - RNA, 19 nt, Artificial Sequence
  Description of Artificial Sequence: Synthetic oligonucleotide
cagaucccggccuccagaa

SEQ ID NO: 179816 - RNA, 19 nt, Artificial Sequence
  Description of Artificial Sequence: Synthetic oligonucleotide
ccguuuucggacaauguua

SEQ ID NO: 179817 - RNA, 19 nt, Artificial Sequence
  Description of Artificial Sequence: Synthetic oligonucleotide
gguagggcucacgucuacc

SEQ ID NO: 179818 - RNA, 19 nt, Artificial Sequence
  Description of Artificial Sequence: Synthetic oligonucleotide
ggguugaacuuaaggguuc

SEQ ID NO: 179819 - RNA, 19 nt, Artificial Sequence
  Description of Artificial Sequence: Synthetic oligonucleotide
gauucguuucauggauccu

SEQ ID NO: 179820 - RNA, 19 nt, Artificial Sequence
  Description of Artificial Sequence: Synthetic oligonucleotide
acaccauacuuggcaccug

SEQ ID NO: 179821 - RNA, 19 nt, Artificial Sequence
  Description of Artificial Sequence: Synthetic oligonucleotide
gucccacuggccaaugcaa

SEQ ID NO: 179822 - RNA, 19 nt, Artificial Sequence
  Description of Artificial Sequence: Synthetic oligonucleotide
gucuacccgcugcccacug

SEQ ID NO: 179823 - RNA, 19 nt, Artificial Sequence
  Description of Artificial Sequence: Synthetic oligonucleotide
ccgguucaaccguuuucgg

SEQ ID NO: 179824 - RNA, 19 nt, Artificial Sequence
  Description of Artificial Sequence: Synthetic oligonucleotide
ggccgguucaaccguuuuc

SEQ ID NO: 179825 - RNA, 19 nt, Artificial Sequence
  Description of Artificial Sequence: Synthetic oligonucleotide
uuagcucauugagguuaau

SEQ ID NO: 179826 - RNA, 19 nt, Artificial Sequence
  Description of Artificial Sequence: Synthetic oligonucleotide
cagcauuacgcacggaguu

SEQ ID NO: 179827 - RNA, 19 nt, Artificial Sequence
  Description of Artificial Sequence: Synthetic oligonucleotide
aggggucagcaaaggugag

SEQ ID NO: 179828 - RNA, 19 nt, Artificial Sequence
  Description of Artificial Sequence: Synthetic oligonucleotide
gcuaccuugggcagcccac

SEQ ID NO: 179829 - RNA, 19 nt, Artificial Sequence
  Description of Artificial Sequence: Synthetic oligonucleotide
aggcuguaaggcgccauuu

SEQ ID NO: 179830 - RNA, 19 nt, Artificial Sequence
  Description of Artificial Sequence: Synthetic oligonucleotide
guaccaccuuuuacuguca

SEQ ID NO: 179831 - RNA, 19 nt, Artificial Sequence
  Description of Artificial Sequence: Synthetic oligonucleotide
ggugcuugaugaugcauuu

SEQ ID NO: 179832 - RNA, 19 nt, Artificial Sequence
  Description of Artificial Sequence: Synthetic oligonucleotide
gccaaucaccuugggacac

SEQ ID NO: 179833 - RNA, 19 nt, Artificial Sequence
  Description of Artificial Sequence: Synthetic oligonucleotide
gcgcggaucugcucagagc

SEQ ID NO: 179834 - RNA, 19 nt, Artificial Sequence
  Description of Artificial Sequence: Synthetic oligonucleotide
cugaucggggaagcucauc

SEQ ID NO: 179835 - RNA, 19 nt, Artificial Sequence
  Description of Artificial Sequence: Synthetic oligonucleotide
augaugcauuucagaggcu

SEQ ID NO: 179836 - RNA, 19 nt, Artificial Sequence
  Description of Artificial Sequence: Synthetic oligonucleotide
cugcacggaaccauucgau

SEQ ID NO: 179837 - RNA, 19 nt, Artificial Sequence
  Description of Artificial Sequence: Synthetic oligonucleotide
aggccgguucaaccguuuu

SEQ ID NO: 179838 - RNA, 19 nt, Artificial Sequence
  Description of Artificial Sequence: Synthetic oligonucleotide
ggcagcccacugcuaauga

SEQ ID NO: 179839 - RNA, 19 nt, Artificial Sequence
  Description of Artificial Sequence: Synthetic oligonucleotide
cccuacuccaaugcagaug

SEQ ID NO: 179840 - RNA, 19 nt, Artificial Sequence
  Description of Artificial Sequence: Synthetic oligonucleotide
caccgcuaccuugggcagc

SEQ ID NO: 179841 - RNA, 19 nt, Artificial Sequence
  Description of Artificial Sequence: Synthetic oligonucleotide
cuucugcuacugggugagc

SEQ ID NO: 179842 - RNA, 19 nt, Artificial Sequence
  Description of Artificial Sequence: Synthetic oligonucleotide
gcaugggucucaggguuug

SEQ ID NO: 179843 - RNA, 19 nt, Artificial Sequence
  Description of Artificial Sequence: Synthetic oligonucleotide
gggccguagacgcagguau

SEQ ID NO: 179844 - RNA, 19 nt, Artificial Sequence
  Description of Artificial Sequence: Synthetic oligonucleotide
cauuagggugcuugaugau

SEQ ID NO: 179845 - RNA, 19 nt, Artificial Sequence
  Description of Artificial Sequence: Synthetic oligonucleotide
guugaacuuaaggguuccu

SEQ ID NO: 179846 - RNA, 19 nt, Artificial Sequence
  Description of Artificial Sequence: Synthetic oligonucleotide
uucccggcuugagccuuca

SEQ ID NO: 179847 - RNA, 19 nt, Artificial Sequence
  Description of Artificial Sequence: Synthetic oligonucleotide
ucccggccuccagaagccc

SEQ ID NO: 179848 - RNA, 19 nt, Artificial Sequence
  Description of Artificial Sequence: Synthetic oligonucleotide
cacucagugggcugaggau

SEQ ID NO: 179849 - RNA, 19 nt, Artificial Sequence
  Description of Artificial Sequence: Synthetic oligonucleotide
gcugcugaccgucccauau

SEQ ID NO: 179850 - RNA, 19 nt, Artificial Sequence
  Description of Artificial Sequence: Synthetic oligonucleotide
guccauugauauguggcuu

SEQ ID NO: 179851 - RNA, 19 nt, Artificial Sequence
  Description of Artificial Sequence: Synthetic oligonucleotide
gggcagcccacugcuaaug

SEQ ID NO: 179852 - RNA, 19 nt, Artificial Sequence
  Description of Artificial Sequence: Synthetic oligonucleotide
gaccgucccauauccucau

SEQ ID NO: 179853 - RNA, 19 nt, Artificial Sequence
  Description of Artificial Sequence: Synthetic oligonucleotide
agcaugggucucaggguuu

SEQ ID NO: 179854 - RNA, 19 nt, Artificial Sequence
  Description of Artificial Sequence: Synthetic oligonucleotide
ccagccgggaccuuccuua

SEQ ID NO: 179855 - RNA, 19 nt, Artificial Sequence
  Description of Artificial Sequence: Synthetic oligonucleotide
acgcacggaguuggccuug

SEQ ID NO: 179856 - RNA, 19 nt, Artificial Sequence
  Description of Artificial Sequence: Synthetic oligonucleotide
cauucgaucugggucucau

SEQ ID NO: 179857 - RNA, 19 nt, Artificial Sequence
  Description of Artificial Sequence: Synthetic oligonucleotide
ggccguagacgcagguaug

SEQ ID NO: 179858 - RNA, 19 nt, Artificial Sequence
  Description of Artificial Sequence: Synthetic oligonucleotide
gcgucauugcggccuguga

SEQ ID NO: 179859 - RNA, 19 nt, Artificial Sequence
  Description of Artificial Sequence: Synthetic oligonucleotide
ccgucccacuugucaaaag

SEQ ID NO: 179860 - RNA, 19 nt, Artificial Sequence
  Description of Artificial Sequence: Synthetic oligonucleotide
cgucauugcggccugugaa

SEQ ID NO: 179861 - RNA, 19 nt, Artificial Sequence
  Description of Artificial Sequence: Synthetic oligonucleotide
cccgcucaaugguggcgcg

SEQ ID NO: 179862 - RNA, 19 nt, Artificial Sequence
  Description of Artificial Sequence: Synthetic oligonucleotide
aggcgccauuuugugcacu

SEQ ID NO: 179863 - RNA, 19 nt, Artificial Sequence
  Description of Artificial Sequence: Synthetic oligonucleotide
cuugggcagcccacugcua

SEQ ID NO: 179864 - RNA, 19 nt, Artificial Sequence
  Description of Artificial Sequence: Synthetic oligonucleotide
cagaggccgguucaaccgu

SEQ ID NO: 179865 - RNA, 19 nt, Artificial Sequence
  Description of Artificial Sequence: Synthetic oligonucleotide
ccauaguucucgucuccaa

SEQ ID NO: 179866 - RNA, 19 nt, Artificial Sequence
  Description of Artificial Sequence: Synthetic oligonucleotide
agccgggaccuuccuuauu

SEQ ID NO: 179867 - RNA, 19 nt, Artificial Sequence
  Description of Artificial Sequence: Synthetic oligonucleotide
agaggccgguucaaccguu

SEQ ID NO: 179868 - RNA, 19 nt, Artificial Sequence
  Description of Artificial Sequence: Synthetic oligonucleotide
cauagcggauguacucauu

SEQ ID NO: 179869 - RNA, 19 nt, Artificial Sequence
  Description of Artificial Sequence: Synthetic oligonucleotide
ggucgguggugcacuuccc

SEQ ID NO: 179870 - RNA, 19 nt, Artificial Sequence
  Description of Artificial Sequence: Synthetic oligonucleotide
agucgacaccaggcccaug

SEQ ID NO: 179871 - RNA, 19 nt, Artificial Sequence
  Description of Artificial Sequence: Synthetic oligonucleotide
cccggucgggccguagacg

SEQ ID NO: 179872 - RNA, 19 nt, Artificial Sequence
  Description of Artificial Sequence: Synthetic oligonucleotide
gggccucaaucagaugguc

SEQ ID NO: 179873 - RNA, 19 nt, Artificial Sequence
  Description of Artificial Sequence: Synthetic oligonucleotide
agucgguuucuggguugaa

SEQ ID NO: 179874 - RNA, 19 nt, Artificial Sequence
  Description of Artificial Sequence: Synthetic oligonucleotide
uugcgucauugcggccugu

SEQ ID NO: 179875 - RNA, 19 nt, Artificial Sequence
  Description of Artificial Sequence: Synthetic oligonucleotide
ggacuucaugugcccucca

SEQ ID NO: 179876 - RNA, 19 nt, Artificial Sequence
  Description of Artificial Sequence: Synthetic oligonucleotide
cuugagccuucaccauagu

SEQ ID NO: 179877 - RNA, 19 nt, Artificial Sequence
  Description of Artificial Sequence: Synthetic oligonucleotide
guucccggcuugagccuuc

SEQ ID NO: 179878 - RNA, 19 nt, Artificial Sequence
  Description of Artificial Sequence: Synthetic oligonucleotide
ccaggggaucccagccaug

SEQ ID NO: 179879 - RNA, 19 nt, Artificial Sequence
  Description of Artificial Sequence: Synthetic oligonucleotide
gccguagacgcagguaugu

SEQ ID NO: 179880 - RNA, 19 nt, Artificial Sequence
  Description of Artificial Sequence: Synthetic oligonucleotide
ggguccagagugggacaug

SEQ ID NO: 179881 - RNA, 19 nt, Artificial Sequence
  Description of Artificial Sequence: Synthetic oligonucleotide
ccccaagguggcgaggcuc

SEQ ID NO: 179882 - RNA, 19 nt, Artificial Sequence
  Description of Artificial Sequence: Synthetic oligonucleotide
ggcucacgucuacccgcug

SEQ ID NO: 179883 - RNA, 19 nt, Artificial Sequence
  Description of Artificial Sequence: Synthetic oligonucleotide
cacccauguugcagauugu

SEQ ID NO: 179884 - RNA, 19 nt, Artificial Sequence
  Description of Artificial Sequence: Synthetic oligonucleotide
ccguagacgcagguauguc

SEQ ID NO: 179885 - RNA, 19 nt, Artificial Sequence
  Description of Artificial Sequence: Synthetic oligonucleotide
ccgcucaaugguggcgcgg

SEQ ID NO: 179886 - RNA, 19 nt, Artificial Sequence
  Description of Artificial Sequence: Synthetic oligonucleotide
ccaucgguggucacucagu

SEQ ID NO: 179887 - RNA, 19 nt, Artificial Sequence
  Description of Artificial Sequence: Synthetic oligonucleotide
gcugccaaucaaacccacu

SEQ ID NO: 179888 - RNA, 19 nt, Artificial Sequence
  Description of Artificial Sequence: Synthetic oligonucleotide
caggcacuaggugauccuu

SEQ ID NO: 179889 - RNA, 19 nt, Artificial Sequence
  Description of Artificial Sequence: Synthetic oligonucleotide
ggcccugcgcaggucuuuc

SEQ ID NO: 179890 - RNA, 19 nt, Artificial Sequence
  Description of Artificial Sequence: Synthetic oligonucleotide
ggcaccuguaccaccuuuu

SEQ ID NO: 179891 - RNA, 19 nt, Artificial Sequence
  Description of Artificial Sequence: Synthetic oligonucleotide
gccgucccacuugucaaaa

SEQ ID NO: 179892 - RNA, 19 nt, Artificial Sequence
  Description of Artificial Sequence: Synthetic oligonucleotide
ccaaugcagaugccuccua

SEQ ID NO: 179893 - RNA, 19 nt, Artificial Sequence
  Description of Artificial Sequence: Synthetic oligonucleotide
cgcucaaugguggcgcgga

SEQ ID NO: 179894 - RNA, 19 nt, Artificial Sequence
  Description of Artificial Sequence: Synthetic oligonucleotide
cgcuaccuugggcagccca

SEQ ID NO: 179895 - RNA, 19 nt, Artificial Sequence
  Description of Artificial Sequence: Synthetic oligonucleotide
cagccgggaccuuccuuau

SEQ ID NO: 179896 - RNA, 19 nt, Artificial Sequence
  Description of Artificial Sequence: Synthetic oligonucleotide
gggcucacgucuacccgcu

SEQ ID NO: 179897 - RNA, 19 nt, Artificial Sequence
  Description of Artificial Sequence: Synthetic oligonucleotide
gcugaccgucccauauccu

SEQ ID NO: 179898 - RNA, 19 nt, Artificial Sequence
  Description of Artificial Sequence: Synthetic oligonucleotide
gcucaaugguggcgcggau

SEQ ID NO: 179899 - RNA, 19 nt, Artificial Sequence
  Description of Artificial Sequence: Synthetic oligonucleotide
ccccaauuucugcacccau

SEQ ID NO: 179900 - RNA, 19 nt, Artificial Sequence
  Description of Artificial Sequence: Synthetic oligonucleotide
gcuucacgccaaucaccuu

SEQ ID NO: 179901 - RNA, 19 nt, Artificial Sequence
  Description of Artificial Sequence: Synthetic oligonucleotide
ccauucgaucugggucuca

SEQ ID NO: 179902 - RNA, 19 nt, Artificial Sequence
  Description of Artificial Sequence: Synthetic oligonucleotide
ccaugcccgugcaggagau

SEQ ID NO: 179903 - RNA, 19 nt, Artificial Sequence
  Description of Artificial Sequence: Synthetic oligonucleotide
gccugucaagaagucgguu

SEQ ID NO: 179904 - RNA, 19 nt, Artificial Sequence
  Description of Artificial Sequence: Synthetic oligonucleotide
gcccugcgcaggucuuucu

SEQ ID NO: 179905 - RNA, 19 nt, Artificial Sequence
  Description of Artificial Sequence: Synthetic oligonucleotide
cgguggugcacuucccuuu

SEQ ID NO: 179906 - RNA, 19 nt, Artificial Sequence
  Description of Artificial Sequence: Synthetic oligonucleotide
gccgggucaccaggaggcu

SEQ ID NO: 179907 - RNA, 19 nt, Artificial Sequence
  Description of Artificial Sequence: Synthetic oligonucleotide
ccgcuaccuugggcagccc

SEQ ID NO: 179908 - RNA, 19 nt, Artificial Sequence
  Description of Artificial Sequence: Synthetic oligonucleotide
cgggccguagacgcaggua

SEQ ID NO: 179909 - RNA, 19 nt, Artificial Sequence
  Description of Artificial Sequence: Synthetic oligonucleotide
cgucuacccgcugcccacu

SEQ ID NO: 179910 - RNA, 19 nt, Artificial Sequence
  Description of Artificial Sequence: Synthetic oligonucleotide
gccacccggucgggccgua

SEQ ID NO: 179911 - RNA, 19 nt, Artificial Sequence
  Description of Artificial Sequence: Synthetic oligonucleotide
aauuacuuuagucugaauc

SEQ ID NO: 179912 - RNA, 19 nt, Artificial Sequence
  Description of Artificial Sequence: Synthetic oligonucleotide
uacaaugugauccagauac

SEQ ID NO: 179913 - RNA, 19 nt, Artificial Sequence
  Description of Artificial Sequence: Synthetic oligonucleotide
uuuggauucacacacacga

SEQ ID NO: 179914 - RNA, 19 nt, Artificial Sequence
  Description of Artificial Sequence: Synthetic oligonucleotide
aaggcuuugaaagucauac

SEQ ID NO: 179915 - RNA, 19 nt, Artificial Sequence
  Description of Artificial Sequence: Synthetic oligonucleotide
gaugaguuagcuuugaauc

SEQ ID NO: 179916 - RNA, 19 nt, Artificial Sequence
  Description of Artificial Sequence: Synthetic oligonucleotide
ucuguuaagucgauaaccc

SEQ ID NO: 179917 - RNA, 19 nt, Artificial Sequence
  Description of Artificial Sequence: Synthetic oligonucleotide
aauacaaugugauccagau

SEQ ID NO: 179918 - RNA, 19 nt, Artificial Sequence
  Description of Artificial Sequence: Synthetic oligonucleotide
ucuggucuuauaaacauca

SEQ ID NO: 179919 - RNA, 19 nt, Artificial Sequence
  Description of Artificial Sequence: Synthetic oligonucleotide
ugaaucucgauacggaacc

SEQ ID NO: 179920 - RNA, 19 nt, Artificial Sequence
  Description of Artificial Sequence: Synthetic oligonucleotide
ucuacaucgguccauucag

SEQ ID NO: 179921 - RNA, 19 nt, Artificial Sequence
  Description of Artificial Sequence: Synthetic oligonucleotide
acgaguuuaaugcugaaca

SEQ ID NO: 179922 - RNA, 19 nt, Artificial Sequence
  Description of Artificial Sequence: Synthetic oligonucleotide
ggauucucuauucaaaugg

SEQ ID NO: 179923 - RNA, 19 nt, Artificial Sequence
  Description of Artificial Sequence: Synthetic oligonucleotide
acaacgaggaagcagaccu

SEQ ID NO: 179924 - RNA, 19 nt, Artificial Sequence
  Description of Artificial Sequence: Synthetic oligonucleotide
uuuagucugaaucucccca

SEQ ID NO: 179925 - RNA, 19 nt, Artificial Sequence
  Description of Artificial Sequence: Synthetic oligonucleotide
aggacuuccaugcauguuc

SEQ ID NO: 179926 - RNA, 19 nt, Artificial Sequence
  Description of Artificial Sequence: Synthetic oligonucleotide
aaaucucacucuuguacuc

SEQ ID NO: 179927 - RNA, 19 nt, Artificial Sequence
  Description of Artificial Sequence: Synthetic oligonucleotide
ugagcaauauuguuacuag

SEQ ID NO: 179928 - RNA, 19 nt, Artificial Sequence
  Description of Artificial Sequence: Synthetic oligonucleotide
auaugugaacaacagacca

SEQ ID NO: 179929 - RNA, 19 nt, Artificial Sequence
  Description of Artificial Sequence: Synthetic oligonucleotide
ggaugauucagauacugcg

SEQ ID NO: 179930 - RNA, 19 nt, Artificial Sequence
  Description of Artificial Sequence: Synthetic oligonucleotide
uuuuacuuuguccuggcuc

SEQ ID NO: 179931 - RNA, 19 nt, Artificial Sequence
  Description of Artificial Sequence: Synthetic oligonucleotide
uguuaagucgauaacccuc

SEQ ID NO: 179932 - RNA, 19 nt, Artificial Sequence
  Description of Artificial Sequence: Synthetic oligonucleotide
uccaaaaucucacucuugu

SEQ ID NO: 179933 - RNA, 19 nt, Artificial Sequence
  Description of Artificial Sequence: Synthetic oligonucleotide
uuaauaaggcuuugaaagu

SEQ ID NO: 179934 - RNA, 19 nt, Artificial Sequence
  Description of Artificial Sequence: Synthetic oligonucleotide
uucuguuaagucgauaacc

SEQ ID NO: 179935 - RNA, 19 nt, Artificial Sequence
  Description of Artificial Sequence: Synthetic oligonucleotide
agaucuaccagagacaacu

SEQ ID NO: 179936 - RNA, 19 nt, Artificial Sequence
  Description of Artificial Sequence: Synthetic oligonucleotide
uguagacucacuucaguca

SEQ ID NO: 179937 - RNA, 19 nt, Artificial Sequence
  Description of Artificial Sequence: Synthetic oligonucleotide
uaugugaacggcuggauuc

SEQ ID NO: 179938 - RNA, 19 nt, Artificial Sequence
  Description of Artificial Sequence: Synthetic oligonucleotide
ugaaucuccccaucggagg

SEQ ID NO: 179939 - RNA, 19 nt, Artificial Sequence
  Description of Artificial Sequence: Synthetic oligonucleotide
uguuacuagaaagaggcac

SEQ ID NO: 179940 - RNA, 19 nt, Artificial Sequence
  Description of Artificial Sequence: Synthetic oligonucleotide
uagcuuugaaucucgauac

SEQ ID NO: 179941 - RNA, 19 nt, Artificial Sequence
  Description of Artificial Sequence: Synthetic oligonucleotide
uguucuaagcgucaucagu

SEQ ID NO: 179942 - RNA, 19 nt, Artificial Sequence
  Description of Artificial Sequence: Synthetic oligonucleotide
cauaugugaacaacagacc

SEQ ID NO: 179943 - RNA, 19 nt, Artificial Sequence
  Description of Artificial Sequence: Synthetic oligonucleotide
cucacacuuagcuagcgcc

SEQ ID NO: 179944 - RNA, 19 nt, Artificial Sequence
  Description of Artificial Sequence: Synthetic oligonucleotide
uaacguuuugcuugaaaug

SEQ ID NO: 179945 - RNA, 19 nt, Artificial Sequence
  Description of Artificial Sequence: Synthetic oligonucleotide
ugucguacaggaauuggug

SEQ ID NO: 179946 - RNA, 19 nt, Artificial Sequence
  Description of Artificial Sequence: Synthetic oligonucleotide
ucugccguucuaauaaggc

SEQ ID NO: 179947 - RNA, 19 nt, Artificial Sequence
  Description of Artificial Sequence: Synthetic oligonucleotide
agaaaucaccaacacaaca

SEQ ID NO: 179948 - RNA, 19 nt, Artificial Sequence
  Description of Artificial Sequence: Synthetic oligonucleotide
gauccuaugcuguuaaaga

SEQ ID NO: 179949 - RNA, 19 nt, Artificial Sequence
  Description of Artificial Sequence: Synthetic oligonucleotide
guuuucgacuaccagucgg

SEQ ID NO: 179950 - RNA, 19 nt, Artificial Sequence
  Description of Artificial Sequence: Synthetic oligonucleotide
aacggagauaguuucugcu

SEQ ID NO: 179951 - RNA, 19 nt, Artificial Sequence
  Description of Artificial Sequence: Synthetic oligonucleotide
uuuucgacuaccagucggc

SEQ ID NO: 179952 - RNA, 19 nt, Artificial Sequence
  Description of Artificial Sequence: Synthetic oligonucleotide
ucguuuucgacuaccaguc

SEQ ID NO: 179953 - RNA, 19 nt, Artificial Sequence
  Description of Artificial Sequence: Synthetic oligonucleotide
ugauuaauguuaccagccu

SEQ ID NO: 179954 - RNA, 19 nt, Artificial Sequence
  Description of Artificial Sequence: Synthetic oligonucleotide
uugaaucucgauacggaac

SEQ ID NO: 179955 - RNA, 19 nt, Artificial Sequence
  Description of Artificial Sequence: Synthetic oligonucleotide
uaacuugcaagcuuucuuc

SEQ ID NO: 179956 - RNA, 19 nt, Artificial Sequence
  Description of Artificial Sequence: Synthetic oligonucleotide
accguuguauuacugacca

SEQ ID NO: 179957 - RNA, 19 nt, Artificial Sequence
  Description of Artificial Sequence: Synthetic oligonucleotide
uucuacgccuaucucacug

SEQ ID NO: 179958 - RNA, 19 nt, Artificial Sequence
  Description of Artificial Sequence: Synthetic oligonucleotide
cauaugucugguucucucg

SEQ ID NO: 179959 - RNA, 19 nt, Artificial Sequence
  Description of Artificial Sequence: Synthetic oligonucleotide
uaugaucuacccaucugcu

SEQ ID NO: 179960 - RNA, 19 nt, Artificial Sequence
  Description of Artificial Sequence: Synthetic oligonucleotide
aggucaucuaccaauggac

SEQ ID NO: 179961 - RNA, 19 nt, Artificial Sequence
  Description of Artificial Sequence: Synthetic oligonucleotide
gaugcucauauccgggucc

SEQ ID NO: 179962 - RNA, 19 nt, Artificial Sequence
  Description of Artificial Sequence: Synthetic oligonucleotide
cucccauuccgaaauacag

SEQ ID NO: 179963 - RNA, 19 nt, Artificial Sequence
  Description of Artificial Sequence: Synthetic oligonucleotide
acggagauaguuucugcuc

SEQ ID NO: 179964 - RNA, 19 nt, Artificial Sequence
  Description of Artificial Sequence: Synthetic oligonucleotide
augaguuagcuuugaaucu

SEQ ID NO: 179965 - RNA, 19 nt, Artificial Sequence
  Description of Artificial Sequence: Synthetic oligonucleotide
ugaucuucguuuucgacua

SEQ ID NO: 179966 - RNA, 19 nt, Artificial Sequence
  Description of Artificial Sequence: Synthetic oligonucleotide
uucugccguucuaauaagg

SEQ ID NO: 179967 - RNA, 19 nt, Artificial Sequence
  Description of Artificial Sequence: Synthetic oligonucleotide
ucgauacggaaccaucuug

SEQ ID NO: 179968 - RNA, 19 nt, Artificial Sequence
  Description of Artificial Sequence: Synthetic oligonucleotide
agaugaguuagcuuugaau

SEQ ID NO: 179969 - RNA, 19 nt, Artificial Sequence
  Description of Artificial Sequence: Synthetic oligonucleotide
ugccguucuaauaaggcau

SEQ ID NO: 179970 - RNA, 19 nt, Artificial Sequence
  Description of Artificial Sequence: Synthetic oligonucleotide
ucucgauacggaaccaucu

SEQ ID NO: 179971 - RNA, 19 nt, Artificial Sequence
  Description of Artificial Sequence: Synthetic oligonucleotide
cauuacuuggcguaggcga

SEQ ID NO: 179972 - RNA, 19 nt, Artificial Sequence
  Description of Artificial Sequence: Synthetic oligonucleotide
aaugaauacugagucuccu

SEQ ID NO: 179973 - RNA, 19 nt, Artificial Sequence
  Description of Artificial Sequence: Synthetic oligonucleotide
gguucagucacaauggccc

SEQ ID NO: 179974 - RNA, 19 nt, Artificial Sequence
  Description of Artificial Sequence: Synthetic oligonucleotide
ucagauacugcgucuggca

SEQ ID NO: 179975 - RNA, 19 nt, Artificial Sequence
  Description of Artificial Sequence: Synthetic oligonucleotide
ucguacaggaauuggugug

SEQ ID NO: 179976 - RNA, 19 nt, Artificial Sequence
  Description of Artificial Sequence: Synthetic oligonucleotide
aaaaguuugcauggaggca

SEQ ID NO: 179977 - RNA, 19 nt, Artificial Sequence
  Description of Artificial Sequence: Synthetic oligonucleotide
cuucugucugacacgauac

SEQ ID NO: 179978 - RNA, 19 nt, Artificial Sequence
  Description of Artificial Sequence: Synthetic oligonucleotide
cuuuggauucacacacacg

SEQ ID NO: 179979 - RNA, 19 nt, Artificial Sequence
  Description of Artificial Sequence: Synthetic oligonucleotide
ucuauaucgucucccuggu

SEQ ID NO: 179980 - RNA, 19 nt, Artificial Sequence
  Description of Artificial Sequence: Synthetic oligonucleotide
uggacgaguuuaaugcuga

SEQ ID NO: 179981 - RNA, 19 nt, Artificial Sequence
  Description of Artificial Sequence: Synthetic oligonucleotide
guagacucacuucagucac

SEQ ID NO: 179982 - RNA, 19 nt, Artificial Sequence
  Description of Artificial Sequence: Synthetic oligonucleotide
ucgauaacccucaggagua

SEQ ID NO: 179983 - RNA, 19 nt, Artificial Sequence
  Description of Artificial Sequence: Synthetic oligonucleotide
ugugagugccaaauaccug

SEQ ID NO: 179984 - RNA, 19 nt, Artificial Sequence
  Description of Artificial Sequence: Synthetic oligonucleotide
gauacugcgucuggcacag

SEQ ID NO: 179985 - RNA, 19 nt, Artificial Sequence
  Description of Artificial Sequence: Synthetic oligonucleotide
ugaacggagauaguuucug

SEQ ID NO: 179986 - RNA, 19 nt, Artificial Sequence
  Description of Artificial Sequence: Synthetic oligonucleotide
ucgacuaccagucggcgau

SEQ ID NO: 179987 - RNA, 19 nt, Artificial Sequence
  Description of Artificial Sequence: Synthetic oligonucleotide
cucgccuucugucugacac

SEQ ID NO: 179988 - RNA, 19 nt, Artificial Sequence
  Description of Artificial Sequence: Synthetic oligonucleotide
ucauuacuuggcguaggcg

SEQ ID NO: 179989 - RNA, 19 nt, Artificial Sequence
  Description of Artificial Sequence: Synthetic oligonucleotide
aggaugauucagauacugc

SEQ ID NO: 179990 - RNA, 19 nt, Artificial Sequence
  Description of Artificial Sequence: Synthetic oligonucleotide
auggguguuagcaauacgu

SEQ ID NO: 179991 - RNA, 19 nt, Artificial Sequence
  Description of Artificial Sequence: Synthetic oligonucleotide
cauuucaucgauguuucug

SEQ ID NO: 179992 - RNA, 19 nt, Artificial Sequence
  Description of Artificial Sequence: Synthetic oligonucleotide
uacugagucuccuuauagu

SEQ ID NO: 179993 - RNA, 19 nt, Artificial Sequence
  Description of Artificial Sequence: Synthetic oligonucleotide
auauccgggucccaguuga

SEQ ID NO: 179994 - RNA, 19 nt, Artificial Sequence
  Description of Artificial Sequence: Synthetic oligonucleotide
cuguagacucacuucaguc

SEQ ID NO: 179995 - RNA, 19 nt, Artificial Sequence
  Description of Artificial Sequence: Synthetic oligonucleotide
gacacgauacauguuuuac

SEQ ID NO: 179996 - RNA, 19 nt, Artificial Sequence
  Description of Artificial Sequence: Synthetic oligonucleotide
ucuaagcgucaucagugac

SEQ ID NO: 179997 - RNA, 19 nt, Artificial Sequence
  Description of Artificial Sequence: Synthetic oligonucleotide
uuaagcuccucagucauua

SEQ ID NO: 179998 - RNA, 19 nt, Artificial Sequence
  Description of Artificial Sequence: Synthetic oligonucleotide
uugucuacuggucucgcua

SEQ ID NO: 179999 - RNA, 19 nt, Artificial Sequence
  Description of Artificial Sequence: Synthetic oligonucleotide
ucucacacuuagcuagcgc

SEQ ID NO: 180000 - RNA, 19 nt, Artificial Sequence
  Description of Artificial Sequence: Synthetic oligonucleotide
acgccuaucucacugcuga

SEQ ID NO: 180001 - RNA, 19 nt, Artificial Sequence
  Description of Artificial Sequence: Synthetic oligonucleotide
gcuugaaaugauccuaugc

SEQ ID NO: 180002 - RNA, 19 nt, Artificial Sequence
  Description of Artificial Sequence: Synthetic oligonucleotide
agcuuugaaucucgauacg

SEQ ID NO: 180003 - RNA, 19 nt, Artificial Sequence
  Description of Artificial Sequence: Synthetic oligonucleotide
uucuaagcgucaucaguga

SEQ ID NO: 180004 - RNA, 19 nt, Artificial Sequence
  Description of Artificial Sequence: Synthetic oligonucleotide
auauucagaacaguuggaa

SEQ ID NO: 180005 - RNA, 19 nt, Artificial Sequence
  Description of Artificial Sequence: Synthetic oligonucleotide
uugcuugaaaugauccuau

SEQ ID NO: 180006 - RNA, 19 nt, Artificial Sequence
  Description of Artificial Sequence: Synthetic oligonucleotide
ucuacgccuaucucacugc

SEQ ID NO: 180007 - RNA, 19 nt, Artificial Sequence
  Description of Artificial Sequence: Synthetic oligonucleotide
uuucugccguucuaauaag

SEQ ID NO: 180008 - RNA, 19 nt, Artificial Sequence
  Description of Artificial Sequence: Synthetic oligonucleotide
uggguguuagcaauacguc

SEQ ID NO: 180009 - RNA, 19 nt, Artificial Sequence
  Description of Artificial Sequence: Synthetic oligonucleotide
aucuuguuaguuccauaug

SEQ ID NO: 180010 - RNA, 19 nt, Artificial Sequence
  Description of Artificial Sequence: Synthetic oligonucleotide
gaacggagauaguuucugc

SEQ ID NO: 180011 - RNA, 19 nt, Artificial Sequence
  Description of Artificial Sequence: Synthetic oligonucleotide
ugaguuagcuuugaaucuc

SEQ ID NO: 180012 - RNA, 19 nt, Artificial Sequence
  Description of Artificial Sequence: Synthetic oligonucleotide
acacacgaucauccgcacc

SEQ ID NO: 180013 - RNA, 19 nt, Artificial Sequence
  Description of Artificial Sequence: Synthetic oligonucleotide
gauccagauacauucuucu

SEQ ID NO: 180014 - RNA, 19 nt, Artificial Sequence
  Description of Artificial Sequence: Synthetic oligonucleotide
agucgauaacccucaggag

SEQ ID NO: 180015 - RNA, 19 nt, Artificial Sequence
  Description of Artificial Sequence: Synthetic oligonucleotide
auagaucgugguuguuuuc

SEQ ID NO: 180016 - RNA, 19 nt, Artificial Sequence
  Description of Artificial Sequence: Synthetic oligonucleotide
uuagucugaaucuccccau

SEQ ID NO: 180017 - RNA, 19 nt, Artificial Sequence
  Description of Artificial Sequence: Synthetic oligonucleotide
acugucucaguuugcacau

SEQ ID NO: 180018 - RNA, 19 nt, Artificial Sequence
  Description of Artificial Sequence: Synthetic oligonucleotide
guuagagcgccuguguagc

SEQ ID NO: 180019 - RNA, 19 nt, Artificial Sequence
  Description of Artificial Sequence: Synthetic oligonucleotide
ucgaaggacuuccaugcau

SEQ ID NO: 180020 - RNA, 19 nt, Artificial Sequence
  Description of Artificial Sequence: Synthetic oligonucleotide
uaccagucggcgauucuug

SEQ ID NO: 180021 - RNA, 19 nt, Artificial Sequence
  Description of Artificial Sequence: Synthetic oligonucleotide
gucgauaacccucaggagu

SEQ ID NO: 180022 - RNA, 19 nt, Artificial Sequence
  Description of Artificial Sequence: Synthetic oligonucleotide
cuacccaucugcucccugc

SEQ ID NO: 180023 - RNA, 19 nt, Artificial Sequence
  Description of Artificial Sequence: Synthetic oligonucleotide
gucauuacuuggcguaggc

SEQ ID NO: 180024 - RNA, 19 nt, Artificial Sequence
  Description of Artificial Sequence: Synthetic oligonucleotide
guuaagucgauaacccuca

SEQ ID NO: 180025 - RNA, 19 nt, Artificial Sequence
  Description of Artificial Sequence: Synthetic oligonucleotide
guaccaucugguugggcag

SEQ ID NO: 180026 - RNA, 19 nt, Artificial Sequence
  Description of Artificial Sequence: Synthetic oligonucleotide
agggacauguggcugcaug

SEQ ID NO: 180027 - RNA, 19 nt, Artificial Sequence
  Description of Artificial Sequence: Synthetic oligonucleotide
augaugcucauauccgggu

SEQ ID NO: 180028 - RNA, 19 nt, Artificial Sequence
  Description of Artificial Sequence: Synthetic oligonucleotide
uuccgaaauacaggaagcu

SEQ ID NO: 180029 - RNA, 19 nt, Artificial Sequence
  Description of Artificial Sequence: Synthetic oligonucleotide
caaaguuucgaucagcuuu

SEQ ID NO: 180030 - RNA, 19 nt, Artificial Sequence
  Description of Artificial Sequence: Synthetic oligonucleotide
gcagauugcguuuaucuuc

SEQ ID NO: 180031 - RNA, 19 nt, Artificial Sequence
  Description of Artificial Sequence: Synthetic oligonucleotide
caccguuguauuacugacc

SEQ ID NO: 180032 - RNA, 19 nt, Artificial Sequence
  Description of Artificial Sequence: Synthetic oligonucleotide
uucucacacuuagcuagcg

SEQ ID NO: 180033 - RNA, 19 nt, Artificial Sequence
  Description of Artificial Sequence: Synthetic oligonucleotide
acuuagcuagcgccuuuuc

SEQ ID NO: 180034 - RNA, 19 nt, Artificial Sequence
  Description of Artificial Sequence: Synthetic oligonucleotide
ugcuugaaaugauccuaug

SEQ ID NO: 180035 - RNA, 19 nt, Artificial Sequence
  Description of Artificial Sequence: Synthetic oligonucleotide
uuaauguuaccagccucac

SEQ ID NO: 180036 - RNA, 19 nt, Artificial Sequence
  Description of Artificial Sequence: Synthetic oligonucleotide
cuucucacacuuagcuagc

SEQ ID NO: 180037 - RNA, 19 nt, Artificial Sequence
  Description of Artificial Sequence: Synthetic oligonucleotide
aagaucuaccagagacaac

SEQ ID NO: 180038 - RNA, 19 nt, Artificial Sequence
  Description of Artificial Sequence: Synthetic oligonucleotide
augcucauauccggguccc

SEQ ID NO: 180039 - RNA, 19 nt, Artificial Sequence
  Description of Artificial Sequence: Synthetic oligonucleotide
auccgcaccuucccuuccc

SEQ ID NO: 180040 - RNA, 19 nt, Artificial Sequence
  Description of Artificial Sequence: Synthetic oligonucleotide
agucauuacuuggcguagg

SEQ ID NO: 180041 - RNA, 19 nt, Artificial Sequence
  Description of Artificial Sequence: Synthetic oligonucleotide
auacggaaccaucuuguua

SEQ ID NO: 180042 - RNA, 19 nt, Artificial Sequence
  Description of Artificial Sequence: Synthetic oligonucleotide
uucgacuaccagucggcga

SEQ ID NO: 180043 - RNA, 19 nt, Artificial Sequence
  Description of Artificial Sequence: Synthetic oligonucleotide
ugaguugcuggccguugga

SEQ ID NO: 180044 - RNA, 19 nt, Artificial Sequence
  Description of Artificial Sequence: Synthetic oligonucleotide
aaucucgauacggaaccau

SEQ ID NO: 180045 - RNA, 19 nt, Artificial Sequence
  Description of Artificial Sequence: Synthetic oligonucleotide
ucauauccgggucccaguu

SEQ ID NO: 180046 - RNA, 19 nt, Artificial Sequence
  Description of Artificial Sequence: Synthetic oligonucleotide
accuuguuucuacaucggu

SEQ ID NO: 180047 - RNA, 19 nt, Artificial Sequence
  Description of Artificial Sequence: Synthetic oligonucleotide
cuagcgccuuuucauuugc

SEQ ID NO: 180048 - RNA, 19 nt, Artificial Sequence
  Description of Artificial Sequence: Synthetic oligonucleotide
cuuucgcuuagguugugca

SEQ ID NO: 180049 - RNA, 19 nt, Artificial Sequence
  Description of Artificial Sequence: Synthetic oligonucleotide
aaguuucgaucagcuuugg

SEQ ID NO: 180050 - RNA, 19 nt, Artificial Sequence
  Description of Artificial Sequence: Synthetic oligonucleotide
acguaaucuguucccuucu

SEQ ID NO: 180051 - RNA, 19 nt, Artificial Sequence
  Description of Artificial Sequence: Synthetic oligonucleotide
gagaaaucaccaacacaac

SEQ ID NO: 180052 - RNA, 19 nt, Artificial Sequence
  Description of Artificial Sequence: Synthetic oligonucleotide
augaauacugagucuccuu

SEQ ID NO: 180053 - RNA, 19 nt, Artificial Sequence
  Description of Artificial Sequence: Synthetic oligonucleotide
ucuuucgcuuagguugugc

SEQ ID NO: 180054 - RNA, 19 nt, Artificial Sequence
  Description of Artificial Sequence: Synthetic oligonucleotide
acgcuaugugaacggcugg

SEQ ID NO: 180055 - RNA, 19 nt, Artificial Sequence
  Description of Artificial Sequence: Synthetic oligonucleotide
gcugaacggagauaguuuc

SEQ ID NO: 180056 - RNA, 19 nt, Artificial Sequence
  Description of Artificial Sequence: Synthetic oligonucleotide
uacgccuaucucacugcug

SEQ ID NO: 180057 - RNA, 19 nt, Artificial Sequence
  Description of Artificial Sequence: Synthetic oligonucleotide
agacucacuucagucacca

SEQ ID NO: 180058 - RNA, 19 nt, Artificial Sequence
  Description of Artificial Sequence: Synthetic oligonucleotide
ugacugucucaguuugcac

SEQ ID NO: 180059 - RNA, 19 nt, Artificial Sequence
  Description of Artificial Sequence: Synthetic oligonucleotide
aucuaccaauggacuagcc

SEQ ID NO: 180060 - RNA, 19 nt, Artificial Sequence
  Description of Artificial Sequence: Synthetic oligonucleotide
aguuucgaucagcuuugga

SEQ ID NO: 180061 - RNA, 19 nt, Artificial Sequence
  Description of Artificial Sequence: Synthetic oligonucleotide
cugccguucuaauaaggca

SEQ ID NO: 180062 - RNA, 19 nt, Artificial Sequence
  Description of Artificial Sequence: Synthetic oligonucleotide
gcaggcuuaugaucuaccc

SEQ ID NO: 180063 - RNA, 19 nt, Artificial Sequence
  Description of Artificial Sequence: Synthetic oligonucleotide
acaacucagugggcgcacc

SEQ ID NO: 180064 - RNA, 19 nt, Artificial Sequence
  Description of Artificial Sequence: Synthetic oligonucleotide
ucugagcaauauuguuacu

SEQ ID NO: 180065 - RNA, 19 nt, Artificial Sequence
  Description of Artificial Sequence: Synthetic oligonucleotide
gcuuuaguccgguugguuc

SEQ ID NO: 180066 - RNA, 19 nt, Artificial Sequence
  Description of Artificial Sequence: Synthetic oligonucleotide
cugagcaauauuguuacua

SEQ ID NO: 180067 - RNA, 19 nt, Artificial Sequence
  Description of Artificial Sequence: Synthetic oligonucleotide
caugagggacauguggcug

SEQ ID NO: 180068 - RNA, 19 nt, Artificial Sequence
  Description of Artificial Sequence: Synthetic oligonucleotide
ccgacguucacauuccuuc

SEQ ID NO: 180069 - RNA, 19 nt, Artificial Sequence
  Description of Artificial Sequence: Synthetic oligonucleotide
agaccgaucucugaaugau

SEQ ID NO: 180070 - RNA, 19 nt, Artificial Sequence
  Description of Artificial Sequence: Synthetic oligonucleotide
ugcaagaguuagagcgccu

SEQ ID NO: 180071 - RNA, 19 nt, Artificial Sequence
  Description of Artificial Sequence: Synthetic oligonucleotide
gugguuggcucaugaguug

SEQ ID NO: 180072 - RNA, 19 nt, Artificial Sequence
  Description of Artificial Sequence: Synthetic oligonucleotide
aguauggagcugcaccguu

SEQ ID NO: 180073 - RNA, 19 nt, Artificial Sequence
  Description of Artificial Sequence: Synthetic oligonucleotide
cccauuccgaaauacagga

SEQ ID NO: 180074 - RNA, 19 nt, Artificial Sequence
  Description of Artificial Sequence: Synthetic oligonucleotide
accgaucucugaaugauuu

SEQ ID NO: 180075 - RNA, 19 nt, Artificial Sequence
  Description of Artificial Sequence: Synthetic oligonucleotide
guccgguugguucuuucac

SEQ ID NO: 180076 - RNA, 19 nt, Artificial Sequence
  Description of Artificial Sequence: Synthetic oligonucleotide
uuagagcgccuguguagcu

SEQ ID NO: 180077 - RNA, 19 nt, Artificial Sequence
  Description of Artificial Sequence: Synthetic oligonucleotide
cacauuagaggcaggcuua

SEQ ID NO: 180078 - RNA, 19 nt, Artificial Sequence
  Description of Artificial Sequence: Synthetic oligonucleotide
uagagcgccuguguagcug

SEQ ID NO: 180079 - RNA, 19 nt, Artificial Sequence
  Description of Artificial Sequence: Synthetic oligonucleotide
ucggcgauucuuguuuuaa

SEQ ID NO: 180080 - RNA, 19 nt, Artificial Sequence
  Description of Artificial Sequence: Synthetic oligonucleotide
cuacuggucucgcuacuuc

SEQ ID NO: 180081 - RNA, 19 nt, Artificial Sequence
  Description of Artificial Sequence: Synthetic oligonucleotide
cagucauuacuuggcguag

SEQ ID NO: 180082 - RNA, 19 nt, Artificial Sequence
  Description of Artificial Sequence: Synthetic oligonucleotide
uauccgggucccaguugag

SEQ ID NO: 180083 - RNA, 19 nt, Artificial Sequence
  Description of Artificial Sequence: Synthetic oligonucleotide
ggcuuaugguaauuuguuc

SEQ ID NO: 180084 - RNA, 19 nt, Artificial Sequence
  Description of Artificial Sequence: Synthetic oligonucleotide
uccgcaccuucccuucccc

SEQ ID NO: 180085 - RNA, 19 nt, Artificial Sequence
  Description of Artificial Sequence: Synthetic oligonucleotide
gaguuagagcgccugugua

SEQ ID NO: 180086 - RNA, 19 nt, Artificial Sequence
  Description of Artificial Sequence: Synthetic oligonucleotide
auuacuuggcguaggcgau

SEQ ID NO: 180087 - RNA, 19 nt, Artificial Sequence
  Description of Artificial Sequence: Synthetic oligonucleotide
aaucuccccaucggaggcu

SEQ ID NO: 180088 - RNA, 19 nt, Artificial Sequence
  Description of Artificial Sequence: Synthetic oligonucleotide
ggagagaccgaucucugaa

SEQ ID NO: 180089 - RNA, 19 nt, Artificial Sequence
  Description of Artificial Sequence: Synthetic oligonucleotide
uucaacuucuuggguuacu

SEQ ID NO: 180090 - RNA, 19 nt, Artificial Sequence
  Description of Artificial Sequence: Synthetic oligonucleotide
augugaacggcuggauucu

SEQ ID NO: 180091 - RNA, 19 nt, Artificial Sequence
  Description of Artificial Sequence: Synthetic oligonucleotide
ccucacguaaucuguuccc

SEQ ID NO: 180092 - RNA, 19 nt, Artificial Sequence
  Description of Artificial Sequence: Synthetic oligonucleotide
gccucacguaaucuguucc

SEQ ID NO: 180093 - RNA, 19 nt, Artificial Sequence
  Description of Artificial Sequence: Synthetic oligonucleotide
uagcuagcgccuuuucauu

SEQ ID NO: 180094 - RNA, 19 nt, Artificial Sequence
  Description of Artificial Sequence: Synthetic oligonucleotide
uggugucaagccacauauc

SEQ ID NO: 180095 - RNA, 19 nt, Artificial Sequence
  Description of Artificial Sequence: Synthetic oligonucleotide
ucuacuggucucgcuacuu

SEQ ID NO: 180096 - RNA, 19 nt, Artificial Sequence
  Description of Artificial Sequence: Synthetic oligonucleotide
cuugcaaccuggguucuca

SEQ ID NO: 180097 - RNA, 19 nt, Artificial Sequence
  Description of Artificial Sequence: Synthetic oligonucleotide
ggcagguuucuauaucguc

SEQ ID NO: 180098 - RNA, 19 nt, Artificial Sequence
  Description of Artificial Sequence: Synthetic oligonucleotide
ggccguuggaaaucugagc

SEQ ID NO: 180099 - RNA, 19 nt, Artificial Sequence
  Description of Artificial Sequence: Synthetic oligonucleotide
cuugcaagagaggugacau

SEQ ID NO: 180100 - RNA, 19 nt, Artificial Sequence
  Description of Artificial Sequence: Synthetic oligonucleotide
guuagcuuugaaucucgau

SEQ ID NO: 180101 - RNA, 19 nt, Artificial Sequence
  Description of Artificial Sequence: Synthetic oligonucleotide
caacgaggaagcagaccuc

SEQ ID NO: 180102 - RNA, 19 nt, Artificial Sequence
  Description of Artificial Sequence: Synthetic oligonucleotide
gaaucucgauacggaacca

SEQ ID NO: 180103 - RNA, 19 nt, Artificial Sequence
  Description of Artificial Sequence: Synthetic oligonucleotide
gcuaguuccugguggguca

SEQ ID NO: 180104 - RNA, 19 nt, Artificial Sequence
  Description of Artificial Sequence: Synthetic oligonucleotide
gguucuuauccuugcuaga

SEQ ID NO: 180105 - RNA, 19 nt, Artificial Sequence
  Description of Artificial Sequence: Synthetic oligonucleotide
guugcuggccguuggaaau

SEQ ID NO: 180106 - RNA, 19 nt, Artificial Sequence
  Description of Artificial Sequence: Synthetic oligonucleotide
cugcaccguuguauuacug

SEQ ID NO: 180107 - RNA, 19 nt, Artificial Sequence
  Description of Artificial Sequence: Synthetic oligonucleotide
agcgccuguguagcugugg

SEQ ID NO: 180108 - RNA, 19 nt, Artificial Sequence
  Description of Artificial Sequence: Synthetic oligonucleotide
cauagaucgugguuguuuu

SEQ ID NO: 180109 - RNA, 19 nt, Artificial Sequence
  Description of Artificial Sequence: Synthetic oligonucleotide
gaccauucuugccaugaau

SEQ ID NO: 180110 - RNA, 19 nt, Artificial Sequence
  Description of Artificial Sequence: Synthetic oligonucleotide
caguugagauccugcucuc

SEQ ID NO: 180111 - RNA, 19 nt, Artificial Sequence
  Description of Artificial Sequence: Synthetic oligonucleotide
uugcaagagaggugacauu

SEQ ID NO: 180112 - RNA, 19 nt, Artificial Sequence
  Description of Artificial Sequence: Synthetic oligonucleotide
cugugucguacaggaauug

SEQ ID NO: 180113 - RNA, 19 nt, Artificial Sequence
  Description of Artificial Sequence: Synthetic oligonucleotide
uaucaggucaaggcuucuu

SEQ ID NO: 180114 - RNA, 19 nt, Artificial Sequence
  Description of Artificial Sequence: Synthetic oligonucleotide
gcgauucuuguuuuaaagu

SEQ ID NO: 180115 - RNA, 19 nt, Artificial Sequence
  Description of Artificial Sequence: Synthetic oligonucleotide
gacaacucagugggcgcac

SEQ ID NO: 180116 - RNA, 19 nt, Artificial Sequence
  Description of Artificial Sequence: Synthetic oligonucleotide
aguuagcuuugaaucucga

SEQ ID NO: 180117 - RNA, 19 nt, Artificial Sequence
  Description of Artificial Sequence: Synthetic oligonucleotide
cacaggcgaaggagagacc

SEQ ID NO: 180118 - RNA, 19 nt, Artificial Sequence
  Description of Artificial Sequence: Synthetic oligonucleotide
cuguuaagucgauaacccu

SEQ ID NO: 180119 - RNA, 19 nt, Artificial Sequence
  Description of Artificial Sequence: Synthetic oligonucleotide
acgaggaagcagaccuccg

SEQ ID NO: 180120 - RNA, 19 nt, Artificial Sequence
  Description of Artificial Sequence: Synthetic oligonucleotide
accaauggacuagccacaa

SEQ ID NO: 180121 - RNA, 19 nt, Artificial Sequence
  Description of Artificial Sequence: Synthetic oligonucleotide
gauacggaaccaucuuguu

SEQ ID NO: 180122 - RNA, 19 nt, Artificial Sequence
  Description of Artificial Sequence: Synthetic oligonucleotide
acggaaccaucuuguuagu

SEQ ID NO: 180123 - RNA, 19 nt, Artificial Sequence
  Description of Artificial Sequence: Synthetic oligonucleotide
agucggcgauucuuguuuu

SEQ ID NO: 180124 - RNA, 19 nt, Artificial Sequence
  Description of Artificial Sequence: Synthetic oligonucleotide
ugcuuuaguccgguugguu

SEQ ID NO: 180125 - RNA, 19 nt, Artificial Sequence
  Description of Artificial Sequence: Synthetic oligonucleotide
auguuaccagccucacgua

SEQ ID NO: 180126 - RNA, 19 nt, Artificial Sequence
  Description of Artificial Sequence: Synthetic oligonucleotide
uuuaguccgguugguucuu

SEQ ID NO: 180127 - RNA, 19 nt, Artificial Sequence
  Description of Artificial Sequence: Synthetic oligonucleotide
gcucauauccgggucccag

SEQ ID NO: 180128 - RNA, 19 nt, Artificial Sequence
  Description of Artificial Sequence: Synthetic oligonucleotide
cauccgcaccuucccuucc

SEQ ID NO: 180129 - RNA, 19 nt, Artificial Sequence
  Description of Artificial Sequence: Synthetic oligonucleotide
augcauguucuaagcguca

SEQ ID NO: 180130 - RNA, 19 nt, Artificial Sequence
  Description of Artificial Sequence: Synthetic oligonucleotide
ugugaacggcuggauucuc

SEQ ID NO: 180131 - RNA, 19 nt, Artificial Sequence
  Description of Artificial Sequence: Synthetic oligonucleotide
ggaccuucugugucguaca

SEQ ID NO: 180132 - RNA, 19 nt, Artificial Sequence
  Description of Artificial Sequence: Synthetic oligonucleotide
uccggacccuggagaaccu

SEQ ID NO: 180133 - RNA, 19 nt, Artificial Sequence
  Description of Artificial Sequence: Synthetic oligonucleotide
gugucguacaggaauuggu

SEQ ID NO: 180134 - RNA, 19 nt, Artificial Sequence
  Description of Artificial Sequence: Synthetic oligonucleotide
cuguaggaugauucagaua

SEQ ID NO: 180135 - RNA, 19 nt, Artificial Sequence
  Description of Artificial Sequence: Synthetic oligonucleotide
uugcaaccuggguucucau

SEQ ID NO: 180136 - RNA, 19 nt, Artificial Sequence
  Description of Artificial Sequence: Synthetic oligonucleotide
accugucauugugugaguu

SEQ ID NO: 180137 - RNA, 19 nt, Artificial Sequence
  Description of Artificial Sequence: Synthetic oligonucleotide
uucuuucgcuuagguugug

SEQ ID NO: 180138 - RNA, 19 nt, Artificial Sequence
  Description of Artificial Sequence: Synthetic oligonucleotide
acugaacaccuuguuucua

SEQ ID NO: 180139 - RNA, 19 nt, Artificial Sequence
  Description of Artificial Sequence: Synthetic oligonucleotide
cucgaaggacuuccaugca

SEQ ID NO: 180140 - RNA, 19 nt, Artificial Sequence
  Description of Artificial Sequence: Synthetic oligonucleotide
gcuaucaggucaaggcuuc

SEQ ID NO: 180141 - RNA, 19 nt, Artificial Sequence
  Description of Artificial Sequence: Synthetic oligonucleotide
ggcaggcuuaugaucuacc

SEQ ID NO: 180142 - RNA, 19 nt, Artificial Sequence
  Description of Artificial Sequence: Synthetic oligonucleotide
cagucguucuauuucugau

SEQ ID NO: 180143 - RNA, 19 nt, Artificial Sequence
  Description of Artificial Sequence: Synthetic oligonucleotide
cugaacggagauaguuucu

SEQ ID NO: 180144 - RNA, 19 nt, Artificial Sequence
  Description of Artificial Sequence: Synthetic oligonucleotide
cagaugaguuagcuuugaa

SEQ ID NO: 180145 - RNA, 19 nt, Artificial Sequence
  Description of Artificial Sequence: Synthetic oligonucleotide
ugcugaauguagggaccau

SEQ ID NO: 180146 - RNA, 19 nt, Artificial Sequence
  Description of Artificial Sequence: Synthetic oligonucleotide
ccaugcauguucuaagcgu

SEQ ID NO: 180147 - RNA, 19 nt, Artificial Sequence
  Description of Artificial Sequence: Synthetic oligonucleotide
caagaguuagagcgccugu

SEQ ID NO: 180148 - RNA, 19 nt, Artificial Sequence
  Description of Artificial Sequence: Synthetic oligonucleotide
cucauauccgggucccagu

SEQ ID NO: 180149 - RNA, 19 nt, Artificial Sequence
  Description of Artificial Sequence: Synthetic oligonucleotide
acccgacguucacauuccu

SEQ ID NO: 180150 - RNA, 19 nt, Artificial Sequence
  Description of Artificial Sequence: Synthetic oligonucleotide
ggucaaggcuucuuucgcu

SEQ ID NO: 180151 - RNA, 19 nt, Artificial Sequence
  Description of Artificial Sequence: Synthetic oligonucleotide
ggucaucuaccaauggacu

SEQ ID NO: 180152 - RNA, 19 nt, Artificial Sequence
  Description of Artificial Sequence: Synthetic oligonucleotide
cuaugugaacggcuggauu

SEQ ID NO: 180153 - RNA, 19 nt, Artificial Sequence
  Description of Artificial Sequence: Synthetic oligonucleotide
gaacggcuggauucucuau

SEQ ID NO: 180154 - RNA, 19 nt, Artificial Sequence
  Description of Artificial Sequence: Synthetic oligonucleotide
cagucggcgauucuuguuu

SEQ ID NO: 180155 - RNA, 19 nt, Artificial Sequence
  Description of Artificial Sequence: Synthetic oligonucleotide
cguuuucgacuaccagucg

SEQ ID NO: 180156 - RNA, 19 nt, Artificial Sequence
  Description of Artificial Sequence: Synthetic oligonucleotide
cguuguauuacugaccacu

SEQ ID NO: 180157 - RNA, 19 nt, Artificial Sequence
  Description of Artificial Sequence: Synthetic oligonucleotide
cucaugaguugcuggccgu

SEQ ID NO: 180158 - RNA, 19 nt, Artificial Sequence
  Description of Artificial Sequence: Synthetic oligonucleotide
cuacgccuaucucacugcu

SEQ ID NO: 180159 - RNA, 19 nt, Artificial Sequence
  Description of Artificial Sequence: Synthetic oligonucleotide
ggucucgcuacuucaacuu

SEQ ID NO: 180160 - RNA, 19 nt, Artificial Sequence
  Description of Artificial Sequence: Synthetic oligonucleotide
gccguucuaauaaggcauc

SEQ ID NO: 180161 - RNA, 19 nt, Artificial Sequence
  Description of Artificial Sequence: Synthetic oligonucleotide
cucgauacggaaccaucuu

SEQ ID NO: 180162 - RNA, 19 nt, Artificial Sequence
  Description of Artificial Sequence: Synthetic oligonucleotide
gcaugagggacauguggcu

SEQ ID NO: 180163 - RNA, 19 nt, Artificial Sequence
  Description of Artificial Sequence: Synthetic oligonucleotide
auacugcgucuggcacagc

SEQ ID NO: 180164 - RNA, 19 nt, Artificial Sequence
  Description of Artificial Sequence: Synthetic oligonucleotide
ccaccucuggucuuauaaa

SEQ ID NO: 180165 - RNA, 19 nt, Artificial Sequence
  Description of Artificial Sequence: Synthetic oligonucleotide
ccuugucuacuggucucgc

SEQ ID NO: 180166 - RNA, 19 nt, Artificial Sequence
  Description of Artificial Sequence: Synthetic oligonucleotide
ccuugcaagagaggugaca

SEQ ID NO: 180167 - RNA, 19 nt, Artificial Sequence
  Description of Artificial Sequence: Synthetic oligonucleotide
ccguuguauuacugaccac

SEQ ID NO: 180168 - RNA, 19 nt, Artificial Sequence
  Description of Artificial Sequence: Synthetic oligonucleotide
cuucuacgccuaucucacu

SEQ ID NO: 180169 - RNA, 19 nt, Artificial Sequence
  Description of Artificial Sequence: Synthetic oligonucleotide
gaccgaucucugaaugauu

SEQ ID NO: 180170 - RNA, 19 nt, Artificial Sequence
  Description of Artificial Sequence: Synthetic oligonucleotide
ccguuggaaaucugagcaa

SEQ ID NO: 180171 - RNA, 19 nt, Artificial Sequence
  Description of Artificial Sequence: Synthetic oligonucleotide
cugccacccgacguucaca

SEQ ID NO: 180172 - RNA, 19 nt, Artificial Sequence
  Description of Artificial Sequence: Synthetic oligonucleotide
ggcgaaggagagaccgauc

SEQ ID NO: 180173 - RNA, 19 nt, Artificial Sequence
  Description of Artificial Sequence: Synthetic oligonucleotide
ccguucuaauaaggcauca

SEQ ID NO: 180174 - RNA, 19 nt, Artificial Sequence
  Description of Artificial Sequence: Synthetic oligonucleotide
cccgaggcagguuucuaua

SEQ ID NO: 180175 - RNA, 19 nt, Artificial Sequence
  Description of Artificial Sequence: Synthetic oligonucleotide
cuaucaggucaaggcuucu

SEQ ID NO: 180176 - RNA, 19 nt, Artificial Sequence
  Description of Artificial Sequence: Synthetic oligonucleotide
cagccucacguaaucuguu

SEQ ID NO: 180177 - RNA, 19 nt, Artificial Sequence
  Description of Artificial Sequence: Synthetic oligonucleotide
cgcuaugugaacggcugga

SEQ ID NO: 180178 - RNA, 19 nt, Artificial Sequence
  Description of Artificial Sequence: Synthetic oligonucleotide
cugcuuuaguccgguuggu

SEQ ID NO: 180179 - RNA, 19 nt, Artificial Sequence
  Description of Artificial Sequence: Synthetic oligonucleotide
gcuggccguuggaaaucug

SEQ ID NO: 180180 - RNA, 19 nt, Artificial Sequence
  Description of Artificial Sequence: Synthetic oligonucleotide
ccgguugguucuuucacuu

SEQ ID NO: 180181 - RNA, 19 nt, Artificial Sequence
  Description of Artificial Sequence: Synthetic oligonucleotide
ccaucggaggcuaguuccu

SEQ ID NO: 180182 - RNA, 19 nt, Artificial Sequence
  Description of Artificial Sequence: Synthetic oligonucleotide
gucugacacgauacauguu

SEQ ID NO: 180183 - RNA, 19 nt, Artificial Sequence
  Description of Artificial Sequence: Synthetic oligonucleotide
cguacaggaauuggugugu

SEQ ID NO: 180184 - RNA, 19 nt, Artificial Sequence
  Description of Artificial Sequence: Synthetic oligonucleotide
cgccuucugucugacacga

SEQ ID NO: 180185 - RNA, 19 nt, Artificial Sequence
  Description of Artificial Sequence: Synthetic oligonucleotide
ccgaggcagguuucuauau

SEQ ID NO: 180186 - RNA, 19 nt, Artificial Sequence
  Description of Artificial Sequence: Synthetic oligonucleotide
cgacguucacauuccuucu

SEQ ID NO: 180187 - RNA, 19 nt, Artificial Sequence
  Description of Artificial Sequence: Synthetic oligonucleotide
gccgccccgaggcagguuu

SEQ ID NO: 180188 - RNA, 19 nt, Artificial Sequence
  Description of Artificial Sequence: Synthetic oligonucleotide
ccgcaccuucccuucccca

SEQ ID NO: 180189 - RNA, 19 nt, Artificial Sequence
  Description of Artificial Sequence: Synthetic oligonucleotide
cccucgccuucugucugac

SEQ ID NO: 180190 - RNA, 19 nt, Artificial Sequence
  Description of Artificial Sequence: Synthetic oligonucleotide
ccucgccuucugucugaca

SEQ ID NO: 180191 - RNA, 19 nt, Artificial Sequence
  Description of Artificial Sequence: Synthetic oligonucleotide
ccccgaggcagguuucuau

SEQ ID NO: 180192 - RNA, 19 nt, Artificial Sequence
  Description of Artificial Sequence: Synthetic oligonucleotide
cccgacguucacauuccuu

SEQ ID NO: 180193 - RNA, 19 nt, Artificial Sequence
  Description of Artificial Sequence: Synthetic oligonucleotide
ccgccccgaggcagguuuc

SEQ ID NO: 180194 - RNA, 19 nt, Artificial Sequence
  Description of Artificial Sequence: Synthetic oligonucleotide
gccccgaggcagguuucua

SEQ ID NO: 180195 - RNA, 19 nt, Artificial Sequence
  Description of Artificial Sequence: Synthetic oligonucleotide
cguaggcgaugucguuucu

SEQ ID NO: 180196 - RNA, 19 nt, Artificial Sequence
  Description of Artificial Sequence: Synthetic oligonucleotide
gccuucugucugacacgau

SEQ ID NO: 180197 - RNA, 19 nt, Artificial Sequence
  Description of Artificial Sequence: Synthetic oligonucleotide
cgauaacccucaggaguau

SEQ ID NO: 180198 - RNA, 19 nt, Artificial Sequence
  Description of Artificial Sequence: Synthetic oligonucleotide
uaauauuuaagccugagcu

SEQ ID NO: 180199 - RNA, 19 nt, Artificial Sequence
  Description of Artificial Sequence: Synthetic oligonucleotide
gaauaagcuacauagaaag

SEQ ID NO: 180200 - RNA, 19 nt, Artificial Sequence
  Description of Artificial Sequence: Synthetic oligonucleotide
uauaaaacgagcuugauua

SEQ ID NO: 180201 - RNA, 19 nt, Artificial Sequence
  Description of Artificial Sequence: Synthetic oligonucleotide
uuaaguaacauacaauagc

SEQ ID NO: 180202 - RNA, 19 nt, Artificial Sequence
  Description of Artificial Sequence: Synthetic oligonucleotide
ucugauauuauuuacguac

SEQ ID NO: 180203 - RNA, 19 nt, Artificial Sequence
  Description of Artificial Sequence: Synthetic oligonucleotide
uuauuuacguacuucacgg

SEQ ID NO: 180204 - RNA, 19 nt, Artificial Sequence
  Description of Artificial Sequence: Synthetic oligonucleotide
gaauuuuggucuuaggugg

SEQ ID NO: 180205 - RNA, 19 nt, Artificial Sequence
  Description of Artificial Sequence: Synthetic oligonucleotide
uuugauuggcuuaaaagcc

SEQ ID NO: 180206 - RNA, 19 nt, Artificial Sequence
  Description of Artificial Sequence: Synthetic oligonucleotide
uaaguaacauacaauagca

SEQ ID NO: 180207 - RNA, 19 nt, Artificial Sequence
  Description of Artificial Sequence: Synthetic oligonucleotide
uucgaaagguaucauaagg

SEQ ID NO: 180208 - RNA, 19 nt, Artificial Sequence
  Description of Artificial Sequence: Synthetic oligonucleotide
auuauuuacguacuucacg

SEQ ID NO: 180209 - RNA, 19 nt, Artificial Sequence
  Description of Artificial Sequence: Synthetic oligonucleotide
gaauguaccauucagguuc

SEQ ID NO: 180210 - RNA, 19 nt, Artificial Sequence
  Description of Artificial Sequence: Synthetic oligonucleotide
uggaguaguaucuaguggg

SEQ ID NO: 180211 - RNA, 19 nt, Artificial Sequence
  Description of Artificial Sequence: Synthetic oligonucleotide
uucuuuguaagucugaguc

SEQ ID NO: 180212 - RNA, 19 nt, Artificial Sequence
  Description of Artificial Sequence: Synthetic oligonucleotide
acugagaucauggagacac

SEQ ID NO: 180213 - RNA, 19 nt, Artificial Sequence
  Description of Artificial Sequence: Synthetic oligonucleotide
aacguuuucacucuuaauu

SEQ ID NO: 180214 - RNA, 19 nt, Artificial Sequence
  Description of Artificial Sequence: Synthetic oligonucleotide
uggaauuuagaauagcuac

SEQ ID NO: 180215 - RNA, 19 nt, Artificial Sequence
  Description of Artificial Sequence: Synthetic oligonucleotide
auaagcuacauagaaagac

SEQ ID NO: 180216 - RNA, 19 nt, Artificial Sequence
  Description of Artificial Sequence: Synthetic oligonucleotide
ugaaagucgguccagauuc

SEQ ID NO: 180217 - RNA, 19 nt, Artificial Sequence
  Description of Artificial Sequence: Synthetic oligonucleotide
uuuaguaugcuuucgacaa

SEQ ID NO: 180218 - RNA, 19 nt, Artificial Sequence
  Description of Artificial Sequence: Synthetic oligonucleotide
uuuuaagcuuccuaguucc

SEQ ID NO: 180219 - RNA, 19 nt, Artificial Sequence
  Description of Artificial Sequence: Synthetic oligonucleotide
uuuuacaggaucugaauca

SEQ ID NO: 180220 - RNA, 19 nt, Artificial Sequence
  Description of Artificial Sequence: Synthetic oligonucleotide
uaagcaaccuacaugguca

SEQ ID NO: 180221 - RNA, 19 nt, Artificial Sequence
  Description of Artificial Sequence: Synthetic oligonucleotide
uacuucacggauaucaaag

SEQ ID NO: 180222 - RNA, 19 nt, Artificial Sequence
  Description of Artificial Sequence: Synthetic oligonucleotide
uauuugauaggcuucuuug

SEQ ID NO: 180223 - RNA, 19 nt, Artificial Sequence
  Description of Artificial Sequence: Synthetic oligonucleotide
ugaguccacguucugaugg

SEQ ID NO: 180224 - RNA, 19 nt, Artificial Sequence
  Description of Artificial Sequence: Synthetic oligonucleotide
ugaauuuggcuuuuguugc

SEQ ID NO: 180225 - RNA, 19 nt, Artificial Sequence
  Description of Artificial Sequence: Synthetic oligonucleotide
ucaguaccauucaacaugg

SEQ ID NO: 180226 - RNA, 19 nt, Artificial Sequence
  Description of Artificial Sequence: Synthetic oligonucleotide
aauuuagaauagcuacuuc

SEQ ID NO: 180227 - RNA, 19 nt, Artificial Sequence
  Description of Artificial Sequence: Synthetic oligonucleotide
uucuuaauccauaauauuu

SEQ ID NO: 180228 - RNA, 19 nt, Artificial Sequence
  Description of Artificial Sequence: Synthetic oligonucleotide
agacuucagacauuugugc

SEQ ID NO: 180229 - RNA, 19 nt, Artificial Sequence
  Description of Artificial Sequence: Synthetic oligonucleotide
uguuaacuggauuugggcc

SEQ ID NO: 180230 - RNA, 19 nt, Artificial Sequence
  Description of Artificial Sequence: Synthetic oligonucleotide
uguucgaaagguaucauaa

SEQ ID NO: 180231 - RNA, 19 nt, Artificial Sequence
  Description of Artificial Sequence: Synthetic oligonucleotide
aaaacgagcuugauuauuc

SEQ ID NO: 180232 - RNA, 19 nt, Artificial Sequence
  Description of Artificial Sequence: Synthetic oligonucleotide
cauaaggaaagucaggaug

SEQ ID NO: 180233 - RNA, 19 nt, Artificial Sequence
  Description of Artificial Sequence: Synthetic oligonucleotide
aauaauaggaauguaccau

SEQ ID NO: 180234 - RNA, 19 nt, Artificial Sequence
  Description of Artificial Sequence: Synthetic oligonucleotide
ucgucugauauuauuuacg

SEQ ID NO: 180235 - RNA, 19 nt, Artificial Sequence
  Description of Artificial Sequence: Synthetic oligonucleotide
uggaauaagcuacauagaa

SEQ ID NO: 180236 - RNA, 19 nt, Artificial Sequence
  Description of Artificial Sequence: Synthetic oligonucleotide
aacaauacucuccccauca

SEQ ID NO: 180237 - RNA, 19 nt, Artificial Sequence
  Description of Artificial Sequence: Synthetic oligonucleotide
uaggaauguaccauucagg

SEQ ID NO: 180238 - RNA, 19 nt, Artificial Sequence
  Description of Artificial Sequence: Synthetic oligonucleotide
uuuuggggaauuuuggucu

SEQ ID NO: 180239 - RNA, 19 nt, Artificial Sequence
  Description of Artificial Sequence: Synthetic oligonucleotide
uuucaucuaaguccacucg

SEQ ID NO: 180240 - RNA, 19 nt, Artificial Sequence
  Description of Artificial Sequence: Synthetic oligonucleotide
uaucauaaggaaagucagg

SEQ ID NO: 180241 - RNA, 19 nt, Artificial Sequence
  Description of Artificial Sequence: Synthetic oligonucleotide
agcgccauuuaucagcacc

SEQ ID NO: 180242 - RNA, 19 nt, Artificial Sequence
  Description of Artificial Sequence: Synthetic oligonucleotide
agguucaacacgcugauug

SEQ ID NO: 180243 - RNA, 19 nt, Artificial Sequence
  Description of Artificial Sequence: Synthetic oligonucleotide
ugauaggcuucuuugcucg

SEQ ID NO: 180244 - RNA, 19 nt, Artificial Sequence
  Description of Artificial Sequence: Synthetic oligonucleotide
gaaauaacaaccgaacuga

SEQ ID NO: 180245 - RNA, 19 nt, Artificial Sequence
  Description of Artificial Sequence: Synthetic oligonucleotide
aacauuacuuucauuacug

SEQ ID NO: 180246 - RNA, 19 nt, Artificial Sequence
  Description of Artificial Sequence: Synthetic oligonucleotide
aacuuggguaggcaugggc

SEQ ID NO: 180247 - RNA, 19 nt, Artificial Sequence
  Description of Artificial Sequence: Synthetic oligonucleotide
ucuuaauccauaauauuua

SEQ ID NO: 180248 - RNA, 19 nt, Artificial Sequence
  Description of Artificial Sequence: Synthetic oligonucleotide
aauaacaaccgaacugaac

SEQ ID NO: 180249 - RNA, 19 nt, Artificial Sequence
  Description of Artificial Sequence: Synthetic oligonucleotide
uguucuuuaauguguugag

SEQ ID NO: 180250 - RNA, 19 nt, Artificial Sequence
  Description of Artificial Sequence: Synthetic oligonucleotide
cagcacuuaaguaacauac

SEQ ID NO: 180251 - RNA, 19 nt, Artificial Sequence
  Description of Artificial Sequence: Synthetic oligonucleotide
aguuuugucaggaccaccc

SEQ ID NO: 180252 - RNA, 19 nt, Artificial Sequence
  Description of Artificial Sequence: Synthetic oligonucleotide
auaacagcacuuaaguaac

SEQ ID NO: 180253 - RNA, 19 nt, Artificial Sequence
  Description of Artificial Sequence: Synthetic oligonucleotide
accaagcauucccagaagc

SEQ ID NO: 180254 - RNA, 19 nt, Artificial Sequence
  Description of Artificial Sequence: Synthetic oligonucleotide
uaaacuucacccaguuuag

SEQ ID NO: 180255 - RNA, 19 nt, Artificial Sequence
  Description of Artificial Sequence: Synthetic oligonucleotide
aaaacaauacucuccccau

SEQ ID NO: 180256 - RNA, 19 nt, Artificial Sequence
  Description of Artificial Sequence: Synthetic oligonucleotide
acauuacuuucauuacugc

SEQ ID NO: 180257 - RNA, 19 nt, Artificial Sequence
  Description of Artificial Sequence: Synthetic oligonucleotide
aguuugaagacuuugugua

SEQ ID NO: 180258 - RNA, 19 nt, Artificial Sequence
  Description of Artificial Sequence: Synthetic oligonucleotide
cucaguaccauucaacaug

SEQ ID NO: 180259 - RNA, 19 nt, Artificial Sequence
  Description of Artificial Sequence: Synthetic oligonucleotide
uacaauagcacagaaugcu

SEQ ID NO: 180260 - RNA, 19 nt, Artificial Sequence
  Description of Artificial Sequence: Synthetic oligonucleotide
gaauauccaacacaguguc

SEQ ID NO: 180261 - RNA, 19 nt, Artificial Sequence
  Description of Artificial Sequence: Synthetic oligonucleotide
uguaacuuggguaggcaug

SEQ ID NO: 180262 - RNA, 19 nt, Artificial Sequence
  Description of Artificial Sequence: Synthetic oligonucleotide
aaaucugauggacucuugu

SEQ ID NO: 180263 - RNA, 19 nt, Artificial Sequence
  Description of Artificial Sequence: Synthetic oligonucleotide
aggaauguaccauucaggu

SEQ ID NO: 180264 - RNA, 19 nt, Artificial Sequence
  Description of Artificial Sequence: Synthetic oligonucleotide
auaccaaaggggcauauca

SEQ ID NO: 180265 - RNA, 19 nt, Artificial Sequence
  Description of Artificial Sequence: Synthetic oligonucleotide
ggaaauaacaaccgaacug

SEQ ID NO: 180266 - RNA, 19 nt, Artificial Sequence
  Description of Artificial Sequence: Synthetic oligonucleotide
aaacaauacucuccccauc

SEQ ID NO: 180267 - RNA, 19 nt, Artificial Sequence
  Description of Artificial Sequence: Synthetic oligonucleotide
uuuuccgugaggagaaggc

SEQ ID NO: 180268 - RNA, 19 nt, Artificial Sequence
  Description of Artificial Sequence: Synthetic oligonucleotide
uuaagcaaccuacaugguc

SEQ ID NO: 180269 - RNA, 19 nt, Artificial Sequence
  Description of Artificial Sequence: Synthetic oligonucleotide
uuuaagccugagcucaaag

SEQ ID NO: 180270 - RNA, 19 nt, Artificial Sequence
  Description of Artificial Sequence: Synthetic oligonucleotide
uccauuaaucacauacuga

SEQ ID NO: 180271 - RNA, 19 nt, Artificial Sequence
  Description of Artificial Sequence: Synthetic oligonucleotide
aaggggcauaucaagaagg

SEQ ID NO: 180272 - RNA, 19 nt, Artificial Sequence
  Description of Artificial Sequence: Synthetic oligonucleotide
uuguuaacuggauuugggc

SEQ ID NO: 180273 - RNA, 19 nt, Artificial Sequence
  Description of Artificial Sequence: Synthetic oligonucleotide
aauagcuacuucuccauua

SEQ ID NO: 180274 - RNA, 19 nt, Artificial Sequence
  Description of Artificial Sequence: Synthetic oligonucleotide
aacgagcuugauuauucag

SEQ ID NO: 180275 - RNA, 19 nt, Artificial Sequence
  Description of Artificial Sequence: Synthetic oligonucleotide
uuugguacagcucucuuuu

SEQ ID NO: 180276 - RNA, 19 nt, Artificial Sequence
  Description of Artificial Sequence: Synthetic oligonucleotide
ucgacaauaccacagccaa

SEQ ID NO: 180277 - RNA, 19 nt, Artificial Sequence
  Description of Artificial Sequence: Synthetic oligonucleotide
cuagucugcaguuugaaga

SEQ ID NO: 180278 - RNA, 19 nt, Artificial Sequence
  Description of Artificial Sequence: Synthetic oligonucleotide
agugagacuagucugcagu

SEQ ID NO: 180279 - RNA, 19 nt, Artificial Sequence
  Description of Artificial Sequence: Synthetic oligonucleotide
acaaaacacauugauaaca

SEQ ID NO: 180280 - RNA, 19 nt, Artificial Sequence
  Description of Artificial Sequence: Synthetic oligonucleotide
gguaauugaaagucggucc

SEQ ID NO: 180281 - RNA, 19 nt, Artificial Sequence
  Description of Artificial Sequence: Synthetic oligonucleotide
acugauuagaagccagcuc

SEQ ID NO: 180282 - RNA, 19 nt, Artificial Sequence
  Description of Artificial Sequence: Synthetic oligonucleotide
aacaaccgaacugaacacg

SEQ ID NO: 180283 - RNA, 19 nt, Artificial Sequence
  Description of Artificial Sequence: Synthetic oligonucleotide
auugauaacagcacuuaag

SEQ ID NO: 180284 - RNA, 19 nt, Artificial Sequence
  Description of Artificial Sequence: Synthetic oligonucleotide
aguaccauucaacaugggu

SEQ ID NO: 180285 - RNA, 19 nt, Artificial Sequence
  Description of Artificial Sequence: Synthetic oligonucleotide
uuucgacaauaccacagcc

SEQ ID NO: 180286 - RNA, 19 nt, Artificial Sequence
  Description of Artificial Sequence: Synthetic oligonucleotide
uugauuggcuuaaaagcca

SEQ ID NO: 180287 - RNA, 19 nt, Artificial Sequence
  Description of Artificial Sequence: Synthetic oligonucleotide
cacauacugauuagaagcc

SEQ ID NO: 180288 - RNA, 19 nt, Artificial Sequence
  Description of Artificial Sequence: Synthetic oligonucleotide
agaaccuguucuuuguaag

SEQ ID NO: 180289 - RNA, 19 nt, Artificial Sequence
  Description of Artificial Sequence: Synthetic oligonucleotide
cuuaaaagccaauguaguc

SEQ ID NO: 180290 - RNA, 19 nt, Artificial Sequence
  Description of Artificial Sequence: Synthetic oligonucleotide
uguaagucugagcacuucu

SEQ ID NO: 180291 - RNA, 19 nt, Artificial Sequence
  Description of Artificial Sequence: Synthetic oligonucleotide
gcuaaaacaauacucuccc

SEQ ID NO: 180292 - RNA, 19 nt, Artificial Sequence
  Description of Artificial Sequence: Synthetic oligonucleotide
guaucauaaggaaagucag

SEQ ID NO: 180293 - RNA, 19 nt, Artificial Sequence
  Description of Artificial Sequence: Synthetic oligonucleotide
gauauuauuuacguacuuc

SEQ ID NO: 180294 - RNA, 19 nt, Artificial Sequence
  Description of Artificial Sequence: Synthetic oligonucleotide
acuuuaaugugugaucauc

SEQ ID NO: 180295 - RNA, 19 nt, Artificial Sequence
  Description of Artificial Sequence: Synthetic oligonucleotide
ucuuugcucguccagauuu

SEQ ID NO: 180296 - RNA, 19 nt, Artificial Sequence
  Description of Artificial Sequence: Synthetic oligonucleotide
aucauaaggaaagucagga

SEQ ID NO: 180297 - RNA, 19 nt, Artificial Sequence
  Description of Artificial Sequence: Synthetic oligonucleotide
aaccuguucuuuguaaguc

SEQ ID NO: 180298 - RNA, 19 nt, Artificial Sequence
  Description of Artificial Sequence: Synthetic oligonucleotide
uuaagccugagcucaaaga

SEQ ID NO: 180299 - RNA, 19 nt, Artificial Sequence
  Description of Artificial Sequence: Synthetic oligonucleotide
uguugcagcucuucguggg

SEQ ID NO: 180300 - RNA, 19 nt, Artificial Sequence
  Description of Artificial Sequence: Synthetic oligonucleotide
aacugccaaauccuccuuc

SEQ ID NO: 180301 - RNA, 19 nt, Artificial Sequence
  Description of Artificial Sequence: Synthetic oligonucleotide
  modified_base (9)..(9): a, c, u, g, unknown or other
uucccguunauucuguuau

SEQ ID NO: 180302 - RNA, 19 nt, Artificial Sequence
  Description of Artificial Sequence: Synthetic oligonucleotide
uuugcucgaggaaccauag

SEQ ID NO: 180303 - RNA, 19 nt, Artificial Sequence
  Description of Artificial Sequence: Synthetic oligonucleotide
auuagaacuuuaauuagcu

SEQ ID NO: 180304 - RNA, 19 nt, Artificial Sequence
  Description of Artificial Sequence: Synthetic oligonucleotide
accauugcuaaaacaauac

SEQ ID NO: 180305 - RNA, 19 nt, Artificial Sequence
  Description of Artificial Sequence: Synthetic oligonucleotide
uucgacaauaccacagcca

SEQ ID NO: 180306 - RNA, 19 nt, Artificial Sequence
  Description of Artificial Sequence: Synthetic oligonucleotide
guaccauucagguucaaca

SEQ ID NO: 180307 - RNA, 19 nt, Artificial Sequence
  Description of Artificial Sequence: Synthetic oligonucleotide
agguaauugaaagucgguc

SEQ ID NO: 180308 - RNA, 19 nt, Artificial Sequence
  Description of Artificial Sequence: Synthetic oligonucleotide
uccuacuuguucaucuugc

SEQ ID NO: 180309 - RNA, 19 nt, Artificial Sequence
  Description of Artificial Sequence: Synthetic oligonucleotide
ugauuauuuugccaucuau

SEQ ID NO: 180310 - RNA, 19 nt, Artificial Sequence
  Description of Artificial Sequence: Synthetic oligonucleotide
ugagcaugcagauguaagu

SEQ ID NO: 180311 - RNA, 19 nt, Artificial Sequence
  Description of Artificial Sequence: Synthetic oligonucleotide
acaaccgaacugaacacgc

SEQ ID NO: 180312 - RNA, 19 nt, Artificial Sequence
  Description of Artificial Sequence: Synthetic oligonucleotide
uuuaacuguucagugucag

SEQ ID NO: 180313 - RNA, 19 nt, Artificial Sequence
  Description of Artificial Sequence: Synthetic oligonucleotide
gagacuagucugcaguuug

SEQ ID NO: 180314 - RNA, 19 nt, Artificial Sequence
  Description of Artificial Sequence: Synthetic oligonucleotide
acuuaauugacauguugau

SEQ ID NO: 180315 - RNA, 19 nt, Artificial Sequence
  Description of Artificial Sequence: Synthetic oligonucleotide
auaguuucaucuaagucca

SEQ ID NO: 180316 - RNA, 19 nt, Artificial Sequence
  Description of Artificial Sequence: Synthetic oligonucleotide
uaauaggaauguaccauuc

SEQ ID NO: 180317 - RNA, 19 nt, Artificial Sequence
  Description of Artificial Sequence: Synthetic oligonucleotide
aguuggggaguuuugucag

SEQ ID NO: 180318 - RNA, 19 nt, Artificial Sequence
  Description of Artificial Sequence: Synthetic oligonucleotide
cauaaccagacuaacucuc

SEQ ID NO: 180319 - RNA, 19 nt, Artificial Sequence
  Description of Artificial Sequence: Synthetic oligonucleotide
cacucggaaauccugauuc

SEQ ID NO: 180320 - RNA, 19 nt, Artificial Sequence
  Description of Artificial Sequence: Synthetic oligonucleotide
auaauaggaauguaccauu

SEQ ID NO: 180321 - RNA, 19 nt, Artificial Sequence
  Description of Artificial Sequence: Synthetic oligonucleotide
cuuucgacaauaccacagc

SEQ ID NO: 180322 - RNA, 19 nt, Artificial Sequence
  Description of Artificial Sequence: Synthetic oligonucleotide
uugacauguugauccaaag

SEQ ID NO: 180323 - RNA, 19 nt, Artificial Sequence
  Description of Artificial Sequence: Synthetic oligonucleotide
aaucacauacugauuagaa

SEQ ID NO: 180324 - RNA, 19 nt, Artificial Sequence
  Description of Artificial Sequence: Synthetic oligonucleotide
cacuuaauugacauguuga

SEQ ID NO: 180325 - RNA, 19 nt, Artificial Sequence
  Description of Artificial Sequence: Synthetic oligonucleotide
auuuacguacuucacggau

SEQ ID NO: 180326 - RNA, 19 nt, Artificial Sequence
  Description of Artificial Sequence: Synthetic oligonucleotide
caauaccacagccaauugc

SEQ ID NO: 180327 - RNA, 19 nt, Artificial Sequence
  Description of Artificial Sequence: Synthetic oligonucleotide
guaacuuggguaggcaugg

SEQ ID NO: 180328 - RNA, 19 nt, Artificial Sequence
  Description of Artificial Sequence: Synthetic oligonucleotide
ucguggagggacaucaaca

SEQ ID NO: 180329 - RNA, 19 nt, Artificial Sequence
  Description of Artificial Sequence: Synthetic oligonucleotide
uuagauaccaaaggggcau

SEQ ID NO: 180330 - RNA, 19 nt, Artificial Sequence
  Description of Artificial Sequence: Synthetic oligonucleotide
guuuaguaugcuuucgaca

SEQ ID NO: 180331 - RNA, 19 nt, Artificial Sequence
  Description of Artificial Sequence: Synthetic oligonucleotide
uuuguuugcacaguucauc

SEQ ID NO: 180332 - RNA, 19 nt, Artificial Sequence
  Description of Artificial Sequence: Synthetic oligonucleotide
auuagaagccagcucuuca

SEQ ID NO: 180333 - RNA, 19 nt, Artificial Sequence
  Description of Artificial Sequence: Synthetic oligonucleotide
uuacguacuucacggauau

SEQ ID NO: 180334 - RNA, 19 nt, Artificial Sequence
  Description of Artificial Sequence: Synthetic oligonucleotide
auuggcuuaaaagccaaug

SEQ ID NO: 180335 - RNA, 19 nt, Artificial Sequence
  Description of Artificial Sequence: Synthetic oligonucleotide
gguuagauaccaaaggggc

SEQ ID NO: 180336 - RNA, 19 nt, Artificial Sequence
  Description of Artificial Sequence: Synthetic oligonucleotide
uuuacguacuucacggaua

SEQ ID NO: 180337 - RNA, 19 nt, Artificial Sequence
  Description of Artificial Sequence: Synthetic oligonucleotide
aaacgagcuugauuauuca

SEQ ID NO: 180338 - RNA, 19 nt, Artificial Sequence
  Description of Artificial Sequence: Synthetic oligonucleotide
acguacuucacggauauca

SEQ ID NO: 180339 - RNA, 19 nt, Artificial Sequence
  Description of Artificial Sequence: Synthetic oligonucleotide
auuuaucagcaccauggga

SEQ ID NO: 180340 - RNA, 19 nt, Artificial Sequence
  Description of Artificial Sequence: Synthetic oligonucleotide
aacgggcucaguaaaacca

SEQ ID NO: 180341 - RNA, 19 nt, Artificial Sequence
  Description of Artificial Sequence: Synthetic oligonucleotide
auagaaagacauauuaaau

SEQ ID NO: 180342 - RNA, 19 nt, Artificial Sequence
  Description of Artificial Sequence: Synthetic oligonucleotide
uucguggguccuuuucucg

SEQ ID NO: 180343 - RNA, 19 nt, Artificial Sequence
  Description of Artificial Sequence: Synthetic oligonucleotide
uuuggaagauggcuuuaac

SEQ ID NO: 180344 - RNA, 19 nt, Artificial Sequence
  Description of Artificial Sequence: Synthetic oligonucleotide
uggcuuuuguugcagcucu

SEQ ID NO: 180345 - RNA, 19 nt, Artificial Sequence
  Description of Artificial Sequence: Synthetic oligonucleotide
auacugauuagaagccagc

SEQ ID NO: 180346 - RNA, 19 nt, Artificial Sequence
  Description of Artificial Sequence: Synthetic oligonucleotide
uuagaauauccaacacagu

SEQ ID NO: 180347 - RNA, 19 nt, Artificial Sequence
  Description of Artificial Sequence: Synthetic oligonucleotide
aauaagcuacauagaaaga

SEQ ID NO: 180348 - RNA, 19 nt, Artificial Sequence
  Description of Artificial Sequence: Synthetic oligonucleotide
augcuuucgacaauaccac

SEQ ID NO: 180349 - RNA, 19 nt, Artificial Sequence
  Description of Artificial Sequence: Synthetic oligonucleotide
uuaacuguucagugucagc

SEQ ID NO: 180350 - RNA, 19 nt, Artificial Sequence
  Description of Artificial Sequence: Synthetic oligonucleotide
guuucaucuaaguccacuc

SEQ ID NO: 180351 - RNA, 19 nt, Artificial Sequence
  Description of Artificial Sequence: Synthetic oligonucleotide
uaacaaccgaacugaacac

SEQ ID NO: 180352 - RNA, 19 nt, Artificial Sequence
  Description of Artificial Sequence: Synthetic oligonucleotide
uuagaacuuuaauuagcuc

SEQ ID NO: 180353 - RNA, 19 nt, Artificial Sequence
  Description of Artificial Sequence: Synthetic oligonucleotide
auauccaacacagugucau

SEQ ID NO: 180354 - RNA, 19 nt, Artificial Sequence
  Description of Artificial Sequence: Synthetic oligonucleotide
guucgaaagguaucauaag

SEQ ID NO: 180355 - RNA, 19 nt, Artificial Sequence
  Description of Artificial Sequence: Synthetic oligonucleotide
uuggcguucacaaguugga

SEQ ID NO: 180356 - RNA, 19 nt, Artificial Sequence
  Description of Artificial Sequence: Synthetic oligonucleotide
ugauaacagcacuuaagua

SEQ ID NO: 180357 - RNA, 19 nt, Artificial Sequence
  Description of Artificial Sequence: Synthetic oligonucleotide
aauugcagcuuugaugaau

SEQ ID NO: 180358 - RNA, 19 nt, Artificial Sequence
  Description of Artificial Sequence: Synthetic oligonucleotide
aguggugucugugugauau

SEQ ID NO: 180359 - RNA, 19 nt, Artificial Sequence
  Description of Artificial Sequence: Synthetic oligonucleotide
agguaucauaaggaaaguc

SEQ ID NO: 180360 - RNA, 19 nt, Artificial Sequence
  Description of Artificial Sequence: Synthetic oligonucleotide
guggaaauaacaaccgaac

SEQ ID NO: 180361 - RNA, 19 nt, Artificial Sequence
  Description of Artificial Sequence: Synthetic oligonucleotide
agcaugcagauguaagucu

SEQ ID NO: 180362 - RNA, 19 nt, Artificial Sequence
  Description of Artificial Sequence: Synthetic oligonucleotide
uauuuacguacuucacgga

SEQ ID NO: 180363 - RNA, 19 nt, Artificial Sequence
  Description of Artificial Sequence: Synthetic oligonucleotide
ugauauuauuuacguacuu

SEQ ID NO: 180364 - RNA, 19 nt, Artificial Sequence
  Description of Artificial Sequence: Synthetic oligonucleotide
cugauuagaagccagcucu

SEQ ID NO: 180365 - RNA, 19 nt, Artificial Sequence
  Description of Artificial Sequence: Synthetic oligonucleotide
guaugcuuucgacaauacc

SEQ ID NO: 180366 - RNA, 19 nt, Artificial Sequence
  Description of Artificial Sequence: Synthetic oligonucleotide
cucgaggaaccauaguuuc

SEQ ID NO: 180367 - RNA, 19 nt, Artificial Sequence
  Description of Artificial Sequence: Synthetic oligonucleotide
aaaccauugcuaaaacaau

SEQ ID NO: 180368 - RNA, 19 nt, Artificial Sequence
  Description of Artificial Sequence: Synthetic oligonucleotide
cuuaauccauaauauuuaa

SEQ ID NO: 180369 - RNA, 19 nt, Artificial Sequence
  Description of Artificial Sequence: Synthetic oligonucleotide
agggacaucaacauuacuu

SEQ ID NO: 180370 - RNA, 19 nt, Artificial Sequence
  Description of Artificial Sequence: Synthetic oligonucleotide
uuuuggcguucacaaguug

SEQ ID NO: 180371 - RNA, 19 nt, Artificial Sequence
  Description of Artificial Sequence: Synthetic oligonucleotide
uaauugaaagucgguccag

SEQ ID NO: 180372 - RNA, 19 nt, Artificial Sequence
  Description of Artificial Sequence: Synthetic oligonucleotide
uuuguaacuuggguaggca

SEQ ID NO: 180373 - RNA, 19 nt, Artificial Sequence
  Description of Artificial Sequence: Synthetic oligonucleotide
gggaauaauaggaauguac

SEQ ID NO: 180374 - RNA, 19 nt, Artificial Sequence
  Description of Artificial Sequence: Synthetic oligonucleotide
uuuaagcuuccuaguucca

SEQ ID NO: 180375 - RNA, 19 nt, Artificial Sequence
  Description of Artificial Sequence: Synthetic oligonucleotide
ucauaaggaaagucaggau

SEQ ID NO: 180376 - RNA, 19 nt, Artificial Sequence
  Description of Artificial Sequence: Synthetic oligonucleotide
uugaaagucgguccagauu

SEQ ID NO: 180377 - RNA, 19 nt, Artificial Sequence
  Description of Artificial Sequence: Synthetic oligonucleotide
uuuacaggaucugaaucau

SEQ ID NO: 180378 - RNA, 19 nt, Artificial Sequence
  Description of Artificial Sequence: Synthetic oligonucleotide
gaguccacguucugauggg

SEQ ID NO: 180379 - RNA, 19 nt, Artificial Sequence
  Description of Artificial Sequence: Synthetic oligonucleotide
uugcaauggaccacauuuc

SEQ ID NO: 180380 - RNA, 19 nt, Artificial Sequence
  Description of Artificial Sequence: Synthetic oligonucleotide
uuccgugaggagaaggcaa

SEQ ID NO: 180381 - RNA, 19 nt, Artificial Sequence
  Description of Artificial Sequence: Synthetic oligonucleotide
auagcuacuucuccauuaa

SEQ ID NO: 180382 - RNA, 19 nt, Artificial Sequence
  Description of Artificial Sequence: Synthetic oligonucleotide
cucauguucgaaagguauc

SEQ ID NO: 180383 - RNA, 19 nt, Artificial Sequence
  Description of Artificial Sequence: Synthetic oligonucleotide
aaccauugcuaaaacaaua

SEQ ID NO: 180384 - RNA, 19 nt, Artificial Sequence
  Description of Artificial Sequence: Synthetic oligonucleotide
  modified_base (3)..(3): a, c, u, g, unknown or other
uunauucuguuauguuuua

SEQ ID NO: 180385 - RNA, 19 nt, Artificial Sequence
  Description of Artificial Sequence: Synthetic oligonucleotide
ccuauagucuguuauaaga

SEQ ID NO: 180386 - RNA, 19 nt, Artificial Sequence
  Description of Artificial Sequence: Synthetic oligonucleotide
gucgucugauauuauuuac

SEQ ID NO: 180387 - RNA, 19 nt, Artificial Sequence
  Description of Artificial Sequence: Synthetic oligonucleotide
agggccaugagcauucaag

SEQ ID NO: 180388 - RNA, 19 nt, Artificial Sequence
  Description of Artificial Sequence: Synthetic oligonucleotide
gaaucauauccucucugaa

SEQ ID NO: 180389 - RNA, 19 nt, Artificial Sequence
  Description of Artificial Sequence: Synthetic oligonucleotide
ucucaguaccauucaacau

SEQ ID NO: 180390 - RNA, 19 nt, Artificial Sequence
  Description of Artificial Sequence: Synthetic oligonucleotide
gggccaugagcauucaagg

SEQ ID NO: 180391 - RNA, 19 nt, Artificial Sequence
  Description of Artificial Sequence: Synthetic oligonucleotide
uuguaacuuggguaggcau

SEQ ID NO: 180392 - RNA, 19 nt, Artificial Sequence
  Description of Artificial Sequence: Synthetic oligonucleotide
cacgcuguuguuucaauca

SEQ ID NO: 180393 - RNA, 19 nt, Artificial Sequence
  Description of Artificial Sequence: Synthetic oligonucleotide
uccuaguuccagaccauuc

SEQ ID NO: 180394 - RNA, 19 nt, Artificial Sequence
  Description of Artificial Sequence: Synthetic oligonucleotide
aguaugcuuucgacaauac

SEQ ID NO: 180395 - RNA, 19 nt, Artificial Sequence
  Description of Artificial Sequence: Synthetic oligonucleotide
aagguaauugaaagucggu

SEQ ID NO: 180396 - RNA, 19 nt, Artificial Sequence
  Description of Artificial Sequence: Synthetic oligonucleotide
aaccagucgucugauauua

SEQ ID NO: 180397 - RNA, 19 nt, Artificial Sequence
  Description of Artificial Sequence: Synthetic oligonucleotide
agucgucugauauuauuua

SEQ ID NO: 180398 - RNA, 19 nt, Artificial Sequence
  Description of Artificial Sequence: Synthetic oligonucleotide
caacgggcucaguaaaacc

SEQ ID NO: 180399 - RNA, 19 nt, Artificial Sequence
  Description of Artificial Sequence: Synthetic oligonucleotide
ucucugaauuagaacuuua

SEQ ID NO: 180400 - RNA, 19 nt, Artificial Sequence
  Description of Artificial Sequence: Synthetic oligonucleotide
acaauaccacagccaauug

SEQ ID NO: 180401 - RNA, 19 nt, Artificial Sequence
  Description of Artificial Sequence: Synthetic oligonucleotide
  modified_base (2)..(2): a, c, u, g, unknown or other
unauucuguuauguuuuac

SEQ ID NO: 180402 - RNA, 19 nt, Artificial Sequence
  Description of Artificial Sequence: Synthetic oligonucleotide
uugcucguccagauuuugc

SEQ ID NO: 180403 - RNA, 19 nt, Artificial Sequence
  Description of Artificial Sequence: Synthetic oligonucleotide
uuguggaauuuagaauagc

SEQ ID NO: 180404 - RNA, 19 nt, Artificial Sequence
  Description of Artificial Sequence: Synthetic oligonucleotide
gucacuuggggaauaacuc

SEQ ID NO: 180405 - RNA, 19 nt, Artificial Sequence
  Description of Artificial Sequence: Synthetic oligonucleotide
ucccuauagucuguuauaa

SEQ ID NO: 180406 - RNA, 19 nt, Artificial Sequence
  Description of Artificial Sequence: Synthetic oligonucleotide
gagcaugcagauguaaguc

SEQ ID NO: 180407 - RNA, 19 nt, Artificial Sequence
  Description of Artificial Sequence: Synthetic oligonucleotide
uuuugcggcuguucuuggc

SEQ ID NO: 180408 - RNA, 19 nt, Artificial Sequence
  Description of Artificial Sequence: Synthetic oligonucleotide
ugggaccuuuugcugagcu

SEQ ID NO: 180409 - RNA, 19 nt, Artificial Sequence
  Description of Artificial Sequence: Synthetic oligonucleotide
uggucuuagguggaguagu

SEQ ID NO: 180410 - RNA, 19 nt, Artificial Sequence
  Description of Artificial Sequence: Synthetic oligonucleotide
acgagcuugauuauucagu

SEQ ID NO: 180411 - RNA, 19 nt, Artificial Sequence
  Description of Artificial Sequence: Synthetic oligonucleotide
uaguaugcuuucgacaaua

SEQ ID NO: 180412 - RNA, 19 nt, Artificial Sequence
  Description of Artificial Sequence: Synthetic oligonucleotide
uauuuaagccugagcucaa

SEQ ID NO: 180413 - RNA, 19 nt, Artificial Sequence
  Description of Artificial Sequence: Synthetic oligonucleotide
aauguaccauucagguuca

SEQ ID NO: 180414 - RNA, 19 nt, Artificial Sequence
  Description of Artificial Sequence: Synthetic oligonucleotide
uuaguaugcuuucgacaau

SEQ ID NO: 180415 - RNA, 19 nt, Artificial Sequence
  Description of Artificial Sequence: Synthetic oligonucleotide
  modified_base (4)..(4): a, c, u, g, unknown or other
guunauucuguuauguuuu

SEQ ID NO: 180416 - RNA, 19 nt, Artificial Sequence
  Description of Artificial Sequence: Synthetic oligonucleotide
uggggaauuuuggucuuag

SEQ ID NO: 180417 - RNA, 19 nt, Artificial Sequence
  Description of Artificial Sequence: Synthetic oligonucleotide
agguauuugauaggcuucu

SEQ ID NO: 180418 - RNA, 19 nt, Artificial Sequence
  Description of Artificial Sequence: Synthetic oligonucleotide
ugcuuucgacaauaccaca

SEQ ID NO: 180419 - RNA, 19 nt, Artificial Sequence
  Description of Artificial Sequence: Synthetic oligonucleotide
cauagaguugcaagugaga

SEQ ID NO: 180420 - RNA, 19 nt, Artificial Sequence
  Description of Artificial Sequence: Synthetic oligonucleotide
aaauaacaaccgaacugaa

SEQ ID NO: 180421 - RNA, 19 nt, Artificial Sequence
  Description of Artificial Sequence: Synthetic oligonucleotide
auguucgaaagguaucaua

SEQ ID NO: 180422 - RNA, 19 nt, Artificial Sequence
  Description of Artificial Sequence: Synthetic oligonucleotide
gcuuucgacaauaccacag

SEQ ID NO: 180423 - RNA, 19 nt, Artificial Sequence
  Description of Artificial Sequence: Synthetic oligonucleotide
auuguuggaauaagcuaca

SEQ ID NO: 180424 - RNA, 19 nt, Artificial Sequence
  Description of Artificial Sequence: Synthetic oligonucleotide
ggcucaguaaaaccauugc

SEQ ID NO: 180425 - RNA, 19 nt, Artificial Sequence
  Description of Artificial Sequence: Synthetic oligonucleotide
cuuuugcggcuguucuugg

SEQ ID NO: 180426 - RNA, 19 nt, Artificial Sequence
  Description of Artificial Sequence: Synthetic oligonucleotide
uuugcucguccagauuuug

SEQ ID NO: 180427 - RNA, 19 nt, Artificial Sequence
  Description of Artificial Sequence: Synthetic oligonucleotide
ucauauccucucugaauua

SEQ ID NO: 180428 - RNA, 19 nt, Artificial Sequence
  Description of Artificial Sequence: Synthetic oligonucleotide
caucagaaccugagaaauc

SEQ ID NO: 180429 - RNA, 19 nt, Artificial Sequence
  Description of Artificial Sequence: Synthetic oligonucleotide
guuagauaccaaaggggca

SEQ ID NO: 180430 - RNA, 19 nt, Artificial Sequence
  Description of Artificial Sequence: Synthetic oligonucleotide
agugcccucaacguuuuca

SEQ ID NO: 180431 - RNA, 19 nt, Artificial Sequence
  Description of Artificial Sequence: Synthetic oligonucleotide
gggcauaucaagaagguaa

SEQ ID NO: 180432 - RNA, 19 nt, Artificial Sequence
  Description of Artificial Sequence: Synthetic oligonucleotide
guccuacuuguucaucuug

SEQ ID NO: 180433 - RNA, 19 nt, Artificial Sequence
  Description of Artificial Sequence: Synthetic oligonucleotide
acauacugauuagaagcca

SEQ ID NO: 180434 - RNA, 19 nt, Artificial Sequence
  Description of Artificial Sequence: Synthetic oligonucleotide
ucccucagcgccauuuauc

SEQ ID NO: 180435 - RNA, 19 nt, Artificial Sequence
  Description of Artificial Sequence: Synthetic oligonucleotide
gaauuuagaauagcuacuu

SEQ ID NO: 180436 - RNA, 19 nt, Artificial Sequence
  Description of Artificial Sequence: Synthetic oligonucleotide
  modified_base (15)..(15): a, c, u, g, unknown or other
ggguaguucccguunauuc

SEQ ID NO: 180437 - RNA, 19 nt, Artificial Sequence
  Description of Artificial Sequence: Synthetic oligonucleotide
gggaauuuuggucuuaggu

SEQ ID NO: 180438 - RNA, 19 nt, Artificial Sequence
  Description of Artificial Sequence: Synthetic oligonucleotide
  modified_base (14)..(14): a, c, u, g, unknown or other
gguaguucccguunauucu

SEQ ID NO: 180439 - RNA, 19 nt, Artificial Sequence
  Description of Artificial Sequence: Synthetic oligonucleotide
caccauagaguugcaagug

SEQ ID NO: 180440 - RNA, 19 nt, Artificial Sequence
  Description of Artificial Sequence: Synthetic oligonucleotide
gauuagaagccagcucuuc

SEQ ID NO: 180441 - RNA, 19 nt, Artificial Sequence
  Description of Artificial Sequence: Synthetic oligonucleotide
auguaagucugagcacuuc

SEQ ID NO: 180442 - RNA, 19 nt, Artificial Sequence
  Description of Artificial Sequence: Synthetic oligonucleotide
uuaauguguugagcucuug

SEQ ID NO: 180443 - RNA, 19 nt, Artificial Sequence
  Description of Artificial Sequence: Synthetic oligonucleotide
caaaucugauggacucuug

SEQ ID NO: 180444 - RNA, 19 nt, Artificial Sequence
  Description of Artificial Sequence: Synthetic oligonucleotide
aguugcaagugagacuagu

SEQ ID NO: 180445 - RNA, 19 nt, Artificial Sequence
  Description of Artificial Sequence: Synthetic oligonucleotide
uccaacgggcucaguaaaa

SEQ ID NO: 180446 - RNA, 19 nt, Artificial Sequence
  Description of Artificial Sequence: Synthetic oligonucleotide
uuacugcucauaucugauu

SEQ ID NO: 180447 - RNA, 19 nt, Artificial Sequence
  Description of Artificial Sequence: Synthetic oligonucleotide
  modified_base (12)..(12): a, c, u, g, unknown or other
uaguucccguunauucugu

SEQ ID NO: 180448 - RNA, 19 nt, Artificial Sequence
  Description of Artificial Sequence: Synthetic oligonucleotide
caagaagguaauugaaagu

SEQ ID NO: 180449 - RNA, 19 nt, Artificial Sequence
  Description of Artificial Sequence: Synthetic oligonucleotide
  modified_base (8)..(8): a, c, u, g, unknown or other
ucccguunauucuguuaug

SEQ ID NO: 180450 - RNA, 19 nt, Artificial Sequence
  Description of Artificial Sequence: Synthetic oligonucleotide
cuucguggguccuuuucuc

SEQ ID NO: 180451 - RNA, 19 nt, Artificial Sequence
  Description of Artificial Sequence: Synthetic oligonucleotide
cagaccauucucaguagga

SEQ ID NO: 180452 - RNA, 19 nt, Artificial Sequence
  Description of Artificial Sequence: Synthetic oligonucleotide
agcacuuaaguaacauaca

SEQ ID NO: 180453 - RNA, 19 nt, Artificial Sequence
  Description of Artificial Sequence: Synthetic oligonucleotide
auccaacacagugucauau

SEQ ID NO: 180454 - RNA, 19 nt, Artificial Sequence
  Description of Artificial Sequence: Synthetic oligonucleotide
auaucaaaguuggggaguu

SEQ ID NO: 180455 - RNA, 19 nt, Artificial Sequence
  Description of Artificial Sequence: Synthetic oligonucleotide
uuuggggaauuuuggucuu

SEQ ID NO: 180456 - RNA, 19 nt, Artificial Sequence
  Description of Artificial Sequence: Synthetic oligonucleotide
acuuucauuacugcucaua

SEQ ID NO: 180457 - RNA, 19 nt, Artificial Sequence
  Description of Artificial Sequence: Synthetic oligonucleotide
ggcguucacaaguuggaac

SEQ ID NO: 180458 - RNA, 19 nt, Artificial Sequence
  Description of Artificial Sequence: Synthetic oligonucleotide
uccaacacagugucauauu

SEQ ID NO: 180459 - RNA, 19 nt, Artificial Sequence
  Description of Artificial Sequence: Synthetic oligonucleotide
caauacucuccccaucaga

SEQ ID NO: 180460 - RNA, 19 nt, Artificial Sequence
  Description of Artificial Sequence: Synthetic oligonucleotide
gauaccaaaggggcauauc

SEQ ID NO: 180461 - RNA, 19 nt, Artificial Sequence
  Description of Artificial Sequence: Synthetic oligonucleotide
guggaauuuagaauagcua

SEQ ID NO: 180462 - RNA, 19 nt, Artificial Sequence
  Description of Artificial Sequence: Synthetic oligonucleotide
uuucacaauugagcaugca

SEQ ID NO: 180463 - RNA, 19 nt, Artificial Sequence
  Description of Artificial Sequence: Synthetic oligonucleotide
agucaggaugccacauaac

SEQ ID NO: 180464 - RNA, 19 nt, Artificial Sequence
  Description of Artificial Sequence: Synthetic oligonucleotide
ggaccuuuugcugagcuuc

SEQ ID NO: 180465 - RNA, 19 nt, Artificial Sequence
  Description of Artificial Sequence: Synthetic oligonucleotide
uuagguggaguaguaucua

SEQ ID NO: 180466 - RNA, 19 nt, Artificial Sequence
  Description of Artificial Sequence: Synthetic oligonucleotide
acccgguaccaauucccuc

SEQ ID NO: 180467 - RNA, 19 nt, Artificial Sequence
  Description of Artificial Sequence: Synthetic oligonucleotide
caacauuacuuucauuacu

SEQ ID NO: 180468 - RNA, 19 nt, Artificial Sequence
  Description of Artificial Sequence: Synthetic oligonucleotide
cccugugaucucauguucg

SEQ ID NO: 180469 - RNA, 19 nt, Artificial Sequence
  Description of Artificial Sequence: Synthetic oligonucleotide
acacagucaagaugacuuu

SEQ ID NO: 180470 - RNA, 19 nt, Artificial Sequence
  Description of Artificial Sequence: Synthetic oligonucleotide
aggaccacccgguaccaau

SEQ ID NO: 180471 - RNA, 19 nt, Artificial Sequence
  Description of Artificial Sequence: Synthetic oligonucleotide
uaacuuggguaggcauggg

SEQ ID NO: 180472 - RNA, 19 nt, Artificial Sequence
  Description of Artificial Sequence: Synthetic oligonucleotide
ucguccagauuuugcucga

SEQ ID NO: 180473 - RNA, 19 nt, Artificial Sequence
  Description of Artificial Sequence: Synthetic oligonucleotide
ggaaccauaguuucaucua

SEQ ID NO: 180474 - RNA, 19 nt, Artificial Sequence
  Description of Artificial Sequence: Synthetic oligonucleotide
acgcuguuguuucaaucau

SEQ ID NO: 180475 - RNA, 19 nt, Artificial Sequence
  Description of Artificial Sequence: Synthetic oligonucleotide
guuggaacucuguacacuu

SEQ ID NO: 180476 - RNA, 19 nt, Artificial Sequence
  Description of Artificial Sequence: Synthetic oligonucleotide
cugaacauucuuguuaacu

SEQ ID NO: 180477 - RNA, 19 nt, Artificial Sequence
  Description of Artificial Sequence: Synthetic oligonucleotide
gcuuuuggcguucacaagu

SEQ ID NO: 180478 - RNA, 19 nt, Artificial Sequence
  Description of Artificial Sequence: Synthetic oligonucleotide
uauccaacacagugucaua

SEQ ID NO: 180479 - RNA, 19 nt, Artificial Sequence
  Description of Artificial Sequence: Synthetic oligonucleotide
caugcagauguaagucuga

SEQ ID NO: 180480 - RNA, 19 nt, Artificial Sequence
  Description of Artificial Sequence: Synthetic oligonucleotide
guaggagugcccucaacgu

SEQ ID NO: 180481 - RNA, 19 nt, Artificial Sequence
  Description of Artificial Sequence: Synthetic oligonucleotide
aguccuacuuguucaucuu

SEQ ID NO: 180482 - RNA, 19 nt, Artificial Sequence
  Description of Artificial Sequence: Synthetic oligonucleotide
ggggaauuuuggucuuagg

SEQ ID NO: 180483 - RNA, 19 nt, Artificial Sequence
  Description of Artificial Sequence: Synthetic oligonucleotide
acccaguuuaguaugcuuu

SEQ ID NO: 180484 - RNA, 19 nt, Artificial Sequence
  Description of Artificial Sequence: Synthetic oligonucleotide
uggagacuacuuucucaaa

SEQ ID NO: 180485 - RNA, 19 nt, Artificial Sequence
  Description of Artificial Sequence: Synthetic oligonucleotide
aggggcauaucaagaaggu

SEQ ID NO: 180486 - RNA, 19 nt, Artificial Sequence
  Description of Artificial Sequence: Synthetic oligonucleotide
cucaguaggagugcccuca

SEQ ID NO: 180487 - RNA, 19 nt, Artificial Sequence
  Description of Artificial Sequence: Synthetic oligonucleotide
gcaugcagauguaagucug

SEQ ID NO: 180488 - RNA, 19 nt, Artificial Sequence
  Description of Artificial Sequence: Synthetic oligonucleotide
gucuguuuggaagauggcu

SEQ ID NO: 180489 - RNA, 19 nt, Artificial Sequence
  Description of Artificial Sequence: Synthetic oligonucleotide
cacaauugagcaugcagau

SEQ ID NO: 180490 - RNA, 19 nt, Artificial Sequence
  Description of Artificial Sequence: Synthetic oligonucleotide
ccagaccauucucaguagg

SEQ ID NO: 180491 - RNA, 19 nt, Artificial Sequence
  Description of Artificial Sequence: Synthetic oligonucleotide
ggguucuagaaccuguucu

SEQ ID NO: 180492 - RNA, 19 nt, Artificial Sequence
  Description of Artificial Sequence: Synthetic oligonucleotide
ucucaguaggagugcccuc

SEQ ID NO: 180493 - RNA, 19 nt, Artificial Sequence
  Description of Artificial Sequence: Synthetic oligonucleotide
aauugagcaugcagaugua

SEQ ID NO: 180494 - RNA, 19 nt, Artificial Sequence
  Description of Artificial Sequence: Synthetic oligonucleotide
cauggguucuagaaccugu

SEQ ID NO: 180495 - RNA, 19 nt, Artificial Sequence
  Description of Artificial Sequence: Synthetic oligonucleotide
ggaauuuagaauagcuacu

SEQ ID NO: 180496 - RNA, 19 nt, Artificial Sequence
  Description of Artificial Sequence: Synthetic oligonucleotide
aucagaccagggguuucuc

SEQ ID NO: 180497 - RNA, 19 nt, Artificial Sequence
  Description of Artificial Sequence: Synthetic oligonucleotide
ccacccgguaccaauuccc

SEQ ID NO: 180498 - RNA, 19 nt, Artificial Sequence
  Description of Artificial Sequence: Synthetic oligonucleotide
agaccagggguuucucuuu

SEQ ID NO: 180499 - RNA, 19 nt, Artificial Sequence
  Description of Artificial Sequence: Synthetic oligonucleotide
gcaaccuacauggucaaaa

SEQ ID NO: 180500 - RNA, 19 nt, Artificial Sequence
  Description of Artificial Sequence: Synthetic oligonucleotide
gcguucacaaguuggaacu

SEQ ID NO: 180501 - RNA, 19 nt, Artificial Sequence
  Description of Artificial Sequence: Synthetic oligonucleotide
gaccacccgguaccaauuc

SEQ ID NO: 180502 - RNA, 19 nt, Artificial Sequence
  Description of Artificial Sequence: Synthetic oligonucleotide
aggagugcccucaacguuu

SEQ ID NO: 180503 - RNA, 19 nt, Artificial Sequence
  Description of Artificial Sequence: Synthetic oligonucleotide
cccuauagucuguuauaag

SEQ ID NO: 180504 - RNA, 19 nt, Artificial Sequence
  Description of Artificial Sequence: Synthetic oligonucleotide
gggcucaguaaaaccauug

SEQ ID NO: 180505 - RNA, 19 nt, Artificial Sequence
  Description of Artificial Sequence: Synthetic oligonucleotide
gggacaucaacauuacuuu

SEQ ID NO: 180506 - RNA, 19 nt, Artificial Sequence
  Description of Artificial Sequence: Synthetic oligonucleotide
auucaaggcugaaucugau

SEQ ID NO: 180507 - RNA, 19 nt, Artificial Sequence
  Description of Artificial Sequence: Synthetic oligonucleotide
ccuuuugcggcuguucuug

SEQ ID NO: 180508 - RNA, 19 nt, Artificial Sequence
  Description of Artificial Sequence: Synthetic oligonucleotide
agauaccaaaggggcauau

SEQ ID NO: 180509 - RNA, 19 nt, Artificial Sequence
  Description of Artificial Sequence: Synthetic oligonucleotide
uggucacuuggggaauaac

SEQ ID NO: 180510 - RNA, 19 nt, Artificial Sequence
  Description of Artificial Sequence: Synthetic oligonucleotide
uuccuaguuccagaccauu

SEQ ID NO: 180511 - RNA, 19 nt, Artificial Sequence
  Description of Artificial Sequence: Synthetic oligonucleotide
aucgugaauuuggcuuuug

SEQ ID NO: 180512 - RNA, 19 nt, Artificial Sequence
  Description of Artificial Sequence: Synthetic oligonucleotide
gagucacuguuuucauugu

SEQ ID NO: 180513 - RNA, 19 nt, Artificial Sequence
  Description of Artificial Sequence: Synthetic oligonucleotide
  modified_base (11)..(11): a, c, u, g, unknown or other
aguucccguunauucuguu

SEQ ID NO: 180514 - RNA, 19 nt, Artificial Sequence
  Description of Artificial Sequence: Synthetic oligonucleotide
ggguccuuuucucguggag

SEQ ID NO: 180515 - RNA, 19 nt, Artificial Sequence
  Description of Artificial Sequence: Synthetic oligonucleotide
caugagcauucaaggcuga

SEQ ID NO: 180516 - RNA, 19 nt, Artificial Sequence
  Description of Artificial Sequence: Synthetic oligonucleotide
ggucacuuggggaauaacu

SEQ ID NO: 180517 - RNA, 19 nt, Artificial Sequence
  Description of Artificial Sequence: Synthetic oligonucleotide
cucaacguuuucacucuua

SEQ ID NO: 180518 - RNA, 19 nt, Artificial Sequence
  Description of Artificial Sequence: Synthetic oligonucleotide
uagauaccaaaggggcaua

SEQ ID NO: 180519 - RNA, 19 nt, Artificial Sequence
  Description of Artificial Sequence: Synthetic oligonucleotide
gcaauggaccacauuucac

SEQ ID NO: 180520 - RNA, 19 nt, Artificial Sequence
  Description of Artificial Sequence: Synthetic oligonucleotide
ggaguaguaucuaguggga

SEQ ID NO: 180521 - RNA, 19 nt, Artificial Sequence
  Description of Artificial Sequence: Synthetic oligonucleotide
cuucacggauaucaaaguu

SEQ ID NO: 180522 - RNA, 19 nt, Artificial Sequence
  Description of Artificial Sequence: Synthetic oligonucleotide
cccgguaccaauucccuca

SEQ ID NO: 180523 - RNA, 19 nt, Artificial Sequence
  Description of Artificial Sequence: Synthetic oligonucleotide
aguccacguucugauggga

SEQ ID NO: 180524 - RNA, 19 nt, Artificial Sequence
  Description of Artificial Sequence: Synthetic oligonucleotide
cuccaacgggcucaguaaa

SEQ ID NO: 180525 - RNA, 19 nt, Artificial Sequence
  Description of Artificial Sequence: Synthetic oligonucleotide
cugagaucauggagacaca

SEQ ID NO: 180526 - RNA, 19 nt, Artificial Sequence
  Description of Artificial Sequence: Synthetic oligonucleotide
ccaacgggcucaguaaaac

SEQ ID NO: 180527 - RNA, 19 nt, Artificial Sequence
  Description of Artificial Sequence: Synthetic oligonucleotide
gauaggcuucuuugcucgu

SEQ ID NO: 180528 - RNA, 19 nt, Artificial Sequence
  Description of Artificial Sequence: Synthetic oligonucleotide
gguucaacacgcugauugu

SEQ ID NO: 180529 - RNA, 19 nt, Artificial Sequence
  Description of Artificial Sequence: Synthetic oligonucleotide
cuuuuggcguucacaaguu

SEQ ID NO: 180530 - RNA, 19 nt, Artificial Sequence
  Description of Artificial Sequence: Synthetic oligonucleotide
cagaaucagaccagggguu

SEQ ID NO: 180531 - RNA, 19 nt, Artificial Sequence
  Description of Artificial Sequence: Synthetic oligonucleotide
uuggggaauuuuggucuua

SEQ ID NO: 180532 - RNA, 19 nt, Artificial Sequence
  Description of Artificial Sequence: Synthetic oligonucleotide
cuggcacacuguccuuuuc

SEQ ID NO: 180533 - RNA, 19 nt, Artificial Sequence
  Description of Artificial Sequence: Synthetic oligonucleotide
cagccaauugcagcuuuga

SEQ ID NO: 180534 - RNA, 19 nt, Artificial Sequence
  Description of Artificial Sequence: Synthetic oligonucleotide
  modified_base (5)..(5): a, c, u, g, unknown or other
cguunauucuguuauguuu

SEQ ID NO: 180535 - RNA, 19 nt, Artificial Sequence
  Description of Artificial Sequence: Synthetic oligonucleotide
gcgccauuuaucagcacca

SEQ ID NO: 180536 - RNA, 19 nt, Artificial Sequence
  Description of Artificial Sequence: Synthetic oligonucleotide
cuuaaacuucacccaguuu

SEQ ID NO: 180537 - RNA, 19 nt, Artificial Sequence
  Description of Artificial Sequence: Synthetic oligonucleotide
ggccuguaaagucauguuu

SEQ ID NO: 180538 - RNA, 19 nt, Artificial Sequence
  Description of Artificial Sequence: Synthetic oligonucleotide
cucccugugaucucauguu

SEQ ID NO: 180539 - RNA, 19 nt, Artificial Sequence
  Description of Artificial Sequence: Synthetic oligonucleotide
guccacguucugaugggaa

SEQ ID NO: 180540 - RNA, 19 nt, Artificial Sequence
  Description of Artificial Sequence: Synthetic oligonucleotide
caauugcagcuuugaugaa

SEQ ID NO: 180541 - RNA, 19 nt, Artificial Sequence
  Description of Artificial Sequence: Synthetic oligonucleotide
gggaagcucugagauuuca

SEQ ID NO: 180542 - RNA, 19 nt, Artificial Sequence
  Description of Artificial Sequence: Synthetic oligonucleotide
caacguuuucacucuuaau

SEQ ID NO: 180543 - RNA, 19 nt, Artificial Sequence
  Description of Artificial Sequence: Synthetic oligonucleotide
agcauucccagaagccauu

SEQ ID NO: 180544 - RNA, 19 nt, Artificial Sequence
  Description of Artificial Sequence: Synthetic oligonucleotide
uacguacuucacggauauc

SEQ ID NO: 180545 - RNA, 19 nt, Artificial Sequence
  Description of Artificial Sequence: Synthetic oligonucleotide
cugugaucucauguucgaa

SEQ ID NO: 180546 - RNA, 19 nt, Artificial Sequence
  Description of Artificial Sequence: Synthetic oligonucleotide
cugggaccuuuugcugagc

SEQ ID NO: 180547 - RNA, 19 nt, Artificial Sequence
  Description of Artificial Sequence: Synthetic oligonucleotide
ggcauaucaagaagguaau

SEQ ID NO: 180548 - RNA, 19 nt, Artificial Sequence
  Description of Artificial Sequence: Synthetic oligonucleotide
  modified_base (7)..(7): a, c, u, g, unknown or other
cccguunauucuguuaugu

SEQ ID NO: 180549 - RNA, 19 nt, Artificial Sequence
  Description of Artificial Sequence: Synthetic oligonucleotide
ccgguaccaauucccucag

SEQ ID NO: 180550 - RNA, 19 nt, Artificial Sequence
  Description of Artificial Sequence: Synthetic oligonucleotide
cuuccuaguuccagaccau

SEQ ID NO: 180551 - RNA, 19 nt, Artificial Sequence
  Description of Artificial Sequence: Synthetic oligonucleotide
agcaaccuacauggucaaa

SEQ ID NO: 180552 - RNA, 19 nt, Artificial Sequence
  Description of Artificial Sequence: Synthetic oligonucleotide
caaccagucgucugauauu

SEQ ID NO: 180553 - RNA, 19 nt, Artificial Sequence
  Description of Artificial Sequence: Synthetic oligonucleotide
cuuugcucguccagauuuu

SEQ ID NO: 180554 - RNA, 19 nt, Artificial Sequence
  Description of Artificial Sequence: Synthetic oligonucleotide
cacccgguaccaauucccu

SEQ ID NO: 180555 - RNA, 19 nt, Artificial Sequence
  Description of Artificial Sequence: Synthetic oligonucleotide
cagcgccauuuaucagcac

SEQ ID NO: 180556 - RNA, 19 nt, Artificial Sequence
  Description of Artificial Sequence: Synthetic oligonucleotide
cguggguccuuuucucgug

SEQ ID NO: 180557 - RNA, 19 nt, Artificial Sequence
  Description of Artificial Sequence: Synthetic oligonucleotide
accagucgucugauauuau

SEQ ID NO: 180558 - RNA, 19 nt, Artificial Sequence
  Description of Artificial Sequence: Synthetic oligonucleotide
cauggucacuuggggaaua

SEQ ID NO: 180559 - RNA, 19 nt, Artificial Sequence
  Description of Artificial Sequence: Synthetic oligonucleotide
ggucuuagguggaguagua

SEQ ID NO: 180560 - RNA, 19 nt, Artificial Sequence
  Description of Artificial Sequence: Synthetic oligonucleotide
ccuacuuguucaucuugcu

SEQ ID NO: 180561 - RNA, 19 nt, Artificial Sequence
  Description of Artificial Sequence: Synthetic oligonucleotide
ccucccugugaucucaugu

SEQ ID NO: 180562 - RNA, 19 nt, Artificial Sequence
  Description of Artificial Sequence: Synthetic oligonucleotide
ccuuaaacuucacccaguu

SEQ ID NO: 180563 - RNA, 19 nt, Artificial Sequence
  Description of Artificial Sequence: Synthetic oligonucleotide
cagggccaugagcauucaa

SEQ ID NO: 180564 - RNA, 19 nt, Artificial Sequence
  Description of Artificial Sequence: Synthetic oligonucleotide
cguucacaaguuggaacuc

SEQ ID NO: 180565 - RNA, 19 nt, Artificial Sequence
  Description of Artificial Sequence: Synthetic oligonucleotide
ccagucgucugauauuauu

SEQ ID NO: 180566 - RNA, 19 nt, Artificial Sequence
  Description of Artificial Sequence: Synthetic oligonucleotide
gccuuaaacuucacccagu

SEQ ID NO: 180567 - RNA, 19 nt, Artificial Sequence
  Description of Artificial Sequence: Synthetic oligonucleotide
caccagacauggcacucuu

SEQ ID NO: 180568 - RNA, 19 nt, Artificial Sequence
  Description of Artificial Sequence: Synthetic oligonucleotide
  modified_base (6)..(6): a, c, u, g, unknown or other
ccguunauucuguuauguu

SEQ ID NO: 180569 - RNA, 19 nt, Artificial Sequence
  Description of Artificial Sequence: Synthetic oligonucleotide
ggaccacccgguaccaauu

SEQ ID NO: 180570 - RNA, 19 nt, Artificial Sequence
  Description of Artificial Sequence: Synthetic oligonucleotide
ggagugcccucaacguuuu

SEQ ID NO: 180571 - RNA, 19 nt, Artificial Sequence
  Description of Artificial Sequence: Synthetic oligonucleotide
ccacucggaaauccugauu

SEQ ID NO: 180572 - RNA, 19 nt, Artificial Sequence
  Description of Artificial Sequence: Synthetic oligonucleotide
cagguucaacacgcugauu

SEQ ID NO: 180573 - RNA, 19 nt, Artificial Sequence
  Description of Artificial Sequence: Synthetic oligonucleotide
cgacaauaccacagccaau

SEQ ID NO: 180574 - RNA, 19 nt, Artificial Sequence
  Description of Artificial Sequence: Synthetic oligonucleotide
uuugauaucauucauaagu

SEQ ID NO: 180575 - RNA, 19 nt, Artificial Sequence
  Description of Artificial Sequence: Synthetic oligonucleotide
auucguuggaaucagauuc

SEQ ID NO: 180576 - RNA, 19 nt, Artificial Sequence
  Description of Artificial Sequence: Synthetic oligonucleotide
uuuaagacaagagugauug

SEQ ID NO: 180577 - RNA, 19 nt, Artificial Sequence
  Description of Artificial Sequence: Synthetic oligonucleotide
ucaauguuuaagcugaggc

SEQ ID NO: 180578 - RNA, 19 nt, Artificial Sequence
  Description of Artificial Sequence: Synthetic oligonucleotide
aauuucacauucccucucc

SEQ ID NO: 180579 - RNA, 19 nt, Artificial Sequence
  Description of Artificial Sequence: Synthetic oligonucleotide
auaauauugauuugaaggu

SEQ ID NO: 180580 - RNA, 19 nt, Artificial Sequence
  Description of Artificial Sequence: Synthetic oligonucleotide
agguaaauaaccucauagc

SEQ ID NO: 180581 - RNA, 19 nt, Artificial Sequence
  Description of Artificial Sequence: Synthetic oligonucleotide
guggauauaagccaugggg

SEQ ID NO: 180582 - RNA, 19 nt, Artificial Sequence
  Description of Artificial Sequence: Synthetic oligonucleotide
ugugagguaaauaaccuca

SEQ ID NO: 180583 - RNA, 19 nt, Artificial Sequence
  Description of Artificial Sequence: Synthetic oligonucleotide
gauaucauucauaaguucc

SEQ ID NO: 180584 - RNA, 19 nt, Artificial Sequence
  Description of Artificial Sequence: Synthetic oligonucleotide
ucaguuagugagaugagcc

SEQ ID NO: 180585 - RNA, 19 nt, Artificial Sequence
  Description of Artificial Sequence: Synthetic oligonucleotide
ugcauaguaauuuguagag

SEQ ID NO: 180586 - RNA, 19 nt, Artificial Sequence
  Description of Artificial Sequence: Synthetic oligonucleotide
ucuaaacuaguaaugucag

SEQ ID NO: 180587 - RNA, 19 nt, Artificial Sequence
  Description of Artificial Sequence: Synthetic oligonucleotide
auuugagugguccucaauc

SEQ ID NO: 180588 - RNA, 19 nt, Artificial Sequence
  Description of Artificial Sequence: Synthetic oligonucleotide
cugaaugcaguauucaucc

SEQ ID NO: 180589 - RNA, 19 nt, Artificial Sequence
  Description of Artificial Sequence: Synthetic oligonucleotide
uuuuauacacaugacaaga

SEQ ID NO: 180590 - RNA, 19 nt, Artificial Sequence
  Description of Artificial Sequence: Synthetic oligonucleotide
aaucccaacauuuuacagu

SEQ ID NO: 180591 - RNA, 19 nt, Artificial Sequence
  Description of Artificial Sequence: Synthetic oligonucleotide
aucugugacgcguuuaacc

SEQ ID NO: 180592 - RNA, 19 nt, Artificial Sequence
  Description of Artificial Sequence: Synthetic oligonucleotide
aagauuuuacaccaauagu

SEQ ID NO: 180593 - RNA, 19 nt, Artificial Sequence
  Description of Artificial Sequence: Synthetic oligonucleotide
auauaaucgcucuucuugg

SEQ ID NO: 180594 - RNA, 19 nt, Artificial Sequence
  Description of Artificial Sequence: Synthetic oligonucleotide
gaauacucggcgcacauag

SEQ ID NO: 180595 - RNA, 19 nt, Artificial Sequence
  Description of Artificial Sequence: Synthetic oligonucleotide
ugaggaauguuaaacaaaa

SEQ ID NO: 180596 - RNA, 19 nt, Artificial Sequence
  Description of Artificial Sequence: Synthetic oligonucleotide
ugagaauacuuucugacaa

SEQ ID NO: 180597 - RNA, 19 nt, Artificial Sequence
  Description of Artificial Sequence: Synthetic oligonucleotide
ccaauagucaguuaaauag

SEQ ID NO: 180598 - RNA, 19 nt, Artificial Sequence
  Description of Artificial Sequence: Synthetic oligonucleotide
ugagugaugagaagacugg

SEQ ID NO: 180599 - RNA, 19 nt, Artificial Sequence
  Description of Artificial Sequence: Synthetic oligonucleotide
uugagugaugagaagacug

SEQ ID NO: 180600 - RNA, 19 nt, Artificial Sequence
  Description of Artificial Sequence: Synthetic oligonucleotide
ugggauuaauuucaaaugu

SEQ ID NO: 180601 - RNA, 19 nt, Artificial Sequence
  Description of Artificial Sequence: Synthetic oligonucleotide
aaaguaucauuguacuucu

SEQ ID NO: 180602 - RNA, 19 nt, Artificial Sequence
  Description of Artificial Sequence: Synthetic oligonucleotide
augauaaguuucaucaucc

SEQ ID NO: 180603 - RNA, 19 nt, Artificial Sequence
  Description of Artificial Sequence: Synthetic oligonucleotide
uacaccaauagucaguuaa

SEQ ID NO: 180604 - RNA, 19 nt, Artificial Sequence
  Description of Artificial Sequence: Synthetic oligonucleotide
aaacuaguaaugucaguug

SEQ ID NO: 180605 - RNA, 19 nt, Artificial Sequence
  Description of Artificial Sequence: Synthetic oligonucleotide
agcaauuacagagaauucg

SEQ ID NO: 180606 - RNA, 19 nt, Artificial Sequence
  Description of Artificial Sequence: Synthetic oligonucleotide
gaaaguaucauuguacuuc

SEQ ID NO: 180607 - RNA, 19 nt, Artificial Sequence
  Description of Artificial Sequence: Synthetic oligonucleotide
uaauuuguagagauguccu

SEQ ID NO: 180608 - RNA, 19 nt, Artificial Sequence
  Description of Artificial Sequence: Synthetic oligonucleotide
aguuuuacggacgagcuuc

SEQ ID NO: 180609 - RNA, 19 nt, Artificial Sequence
  Description of Artificial Sequence: Synthetic oligonucleotide
aacgacuuuaaaauuucac

SEQ ID NO: 180610 - RNA, 19 nt, Artificial Sequence
  Description of Artificial Sequence: Synthetic oligonucleotide
aggagauuccgugagacgc

SEQ ID NO: 180611 - RNA, 19 nt, Artificial Sequence
  Description of Artificial Sequence: Synthetic oligonucleotide
ucagcaauuacagagaauu

SEQ ID NO: 180612 - RNA, 19 nt, Artificial Sequence
  Description of Artificial Sequence: Synthetic oligonucleotide
aauggagaagauucggccu

SEQ ID NO: 180613 - RNA, 19 nt, Artificial Sequence
  Description of Artificial Sequence: Synthetic oligonucleotide
caucaaacagaccacgagg

SEQ ID NO: 180614 - RNA, 19 nt, Artificial Sequence
  Description of Artificial Sequence: Synthetic oligonucleotide
uaugcuugugccuucauaa

SEQ ID NO: 180615 - RNA, 19 nt, Artificial Sequence
  Description of Artificial Sequence: Synthetic oligonucleotide
uggauauaagccauggggu

SEQ ID NO: 180616 - RNA, 19 nt, Artificial Sequence
  Description of Artificial Sequence: Synthetic oligonucleotide
ucugugacgcguuuaaccc

SEQ ID NO: 180617 - RNA, 19 nt, Artificial Sequence
  Description of Artificial Sequence: Synthetic oligonucleotide
caguaaaguggauauaagc

SEQ ID NO: 180618 - RNA, 19 nt, Artificial Sequence
  Description of Artificial Sequence: Synthetic oligonucleotide
uguaccauccacaucgacu

SEQ ID NO: 180619 - RNA, 19 nt, Artificial Sequence
  Description of Artificial Sequence: Synthetic oligonucleotide
gaugauaaguuucaucauc

SEQ ID NO: 180620 - RNA, 19 nt, Artificial Sequence
  Description of Artificial Sequence: Synthetic oligonucleotide
ucaucaaacagaccacgag

SEQ ID NO: 180621 - RNA, 19 nt, Artificial Sequence
  Description of Artificial Sequence: Synthetic oligonucleotide
acgacuuuaaaauuucaca

SEQ ID NO: 180622 - RNA, 19 nt, Artificial Sequence
  Description of Artificial Sequence: Synthetic oligonucleotide
cuaagcaugucucugauca

SEQ ID NO: 180623 - RNA, 19 nt, Artificial Sequence
  Description of Artificial Sequence: Synthetic oligonucleotide
auaucauucauaaguuccc

SEQ ID NO: 180624 - RNA, 19 nt, Artificial Sequence
  Description of Artificial Sequence: Synthetic oligonucleotide
ucuuaauuguguccaauuc

SEQ ID NO: 180625 - RNA, 19 nt, Artificial Sequence
  Description of Artificial Sequence: Synthetic oligonucleotide
aagaauugaugauaaguuu

SEQ ID NO: 180626 - RNA, 19 nt, Artificial Sequence
  Description of Artificial Sequence: Synthetic oligonucleotide
aagauauccugaccgaagu

SEQ ID NO: 180627 - RNA, 19 nt, Artificial Sequence
  Description of Artificial Sequence: Synthetic oligonucleotide
aucccaacauuuuacagug

SEQ ID NO: 180628 - RNA, 19 nt, Artificial Sequence
  Description of Artificial Sequence: Synthetic oligonucleotide
aagagugauuguugucccc

SEQ ID NO: 180629 - RNA, 19 nt, Artificial Sequence
  Description of Artificial Sequence: Synthetic oligonucleotide
uaaacuaguaaugucaguu

SEQ ID NO: 180630 - RNA, 19 nt, Artificial Sequence
  Description of Artificial Sequence: Synthetic oligonucleotide
uuacggacgagcuucuucc

SEQ ID NO: 180631 - RNA, 19 nt, Artificial Sequence
  Description of Artificial Sequence: Synthetic oligonucleotide
uguacaaagaauugaugau

SEQ ID NO: 180632 - RNA, 19 nt, Artificial Sequence
  Description of Artificial Sequence: Synthetic oligonucleotide
auuuuacaccaauagucag

SEQ ID NO: 180633 - RNA, 19 nt, Artificial Sequence
  Description of Artificial Sequence: Synthetic oligonucleotide
ucugcaguaaaguggauau

SEQ ID NO: 180634 - RNA, 19 nt, Artificial Sequence
  Description of Artificial Sequence: Synthetic oligonucleotide
cuuaauauaaucgcucuuc

SEQ ID NO: 180635 - RNA, 19 nt, Artificial Sequence
  Description of Artificial Sequence: Synthetic oligonucleotide
guaaaguggauauaagcca

SEQ ID NO: 180636 - RNA, 19 nt, Artificial Sequence
  Description of Artificial Sequence: Synthetic oligonucleotide
cuaacaaacccgaagguca

SEQ ID NO: 180637 - RNA, 19 nt, Artificial Sequence
  Description of Artificial Sequence: Synthetic oligonucleotide
ucauaaguucccaauccca

SEQ ID NO: 180638 - RNA, 19 nt, Artificial Sequence
  Description of Artificial Sequence: Synthetic oligonucleotide
ugauuuguagaaagcuuug

SEQ ID NO: 180639 - RNA, 19 nt, Artificial Sequence
  Description of Artificial Sequence: Synthetic oligonucleotide
auugauuugaaggugacuu

SEQ ID NO: 180640 - RNA, 19 nt, Artificial Sequence
  Description of Artificial Sequence: Synthetic oligonucleotide
acgcugagauaccacagcc

SEQ ID NO: 180641 - RNA, 19 nt, Artificial Sequence
  Description of Artificial Sequence: Synthetic oligonucleotide
uaaguucccaaucccaaac

SEQ ID NO: 180642 - RNA, 19 nt, Artificial Sequence
  Description of Artificial Sequence: Synthetic oligonucleotide
ucucacgggaaacauuaag

SEQ ID NO: 180643 - RNA, 19 nt, Artificial Sequence
  Description of Artificial Sequence: Synthetic oligonucleotide
ucuccauaugccuuggugu

SEQ ID NO: 180644 - RNA, 19 nt, Artificial Sequence
  Description of Artificial Sequence: Synthetic oligonucleotide
aucaguuagugagaugagc

SEQ ID NO: 180645 - RNA, 19 nt, Artificial Sequence
  Description of Artificial Sequence: Synthetic oligonucleotide
uuuauacacaugacaagau

SEQ ID NO: 180646 - RNA, 19 nt, Artificial Sequence
  Description of Artificial Sequence: Synthetic oligonucleotide
uccuguaacccacaauccc

SEQ ID NO: 180647 - RNA, 19 nt, Artificial Sequence
  Description of Artificial Sequence: Synthetic oligonucleotide
agcucuaacaaacccgaag

SEQ ID NO: 180648 - RNA, 19 nt, Artificial Sequence
  Description of Artificial Sequence: Synthetic oligonucleotide
uucgucgucagcucuaaca

SEQ ID NO: 180649 - RNA, 19 nt, Artificial Sequence
  Description of Artificial Sequence: Synthetic oligonucleotide
acuggucuaaacuaguaau

SEQ ID NO: 180650 - RNA, 19 nt, Artificial Sequence
  Description of Artificial Sequence: Synthetic oligonucleotide
uuuaagcugaggcgaagca

SEQ ID NO: 180651 - RNA, 19 nt, Artificial Sequence
  Description of Artificial Sequence: Synthetic oligonucleotide
auacucggcgcacauagag

SEQ ID NO: 180652 - RNA, 19 nt, Artificial Sequence
  Description of Artificial Sequence: Synthetic oligonucleotide
cucgggaagagccugaaug

SEQ ID NO: 180653 - RNA, 19 nt, Artificial Sequence
  Description of Artificial Sequence: Synthetic oligonucleotide
ugugacaugcagcagguuu

SEQ ID NO: 180654 - RNA, 19 nt, Artificial Sequence
  Description of Artificial Sequence: Synthetic oligonucleotide
ugaaaucaguucucucagg

SEQ ID NO: 180655 - RNA, 19 nt, Artificial Sequence
  Description of Artificial Sequence: Synthetic oligonucleotide
uucguuggaaucagauucc

SEQ ID NO: 180656 - RNA, 19 nt, Artificial Sequence
  Description of Artificial Sequence: Synthetic oligonucleotide
acgcguuuaacccauccag

SEQ ID NO: 180657 - RNA, 19 nt, Artificial Sequence
  Description of Artificial Sequence: Synthetic oligonucleotide
uuauacacaugacaagauu

SEQ ID NO: 180658 - RNA, 19 nt, Artificial Sequence
  Description of Artificial Sequence: Synthetic oligonucleotide
gagaauacuuucugacaag

SEQ ID NO: 180659 - RNA, 19 nt, Artificial Sequence
  Description of Artificial Sequence: Synthetic oligonucleotide
aacuacagcaagauccaag

SEQ ID NO: 180660 - RNA, 19 nt, Artificial Sequence
  Description of Artificial Sequence: Synthetic oligonucleotide
guuuaacccauccagcuga

SEQ ID NO: 180661 - RNA, 19 nt, Artificial Sequence
  Description of Artificial Sequence: Synthetic oligonucleotide
aaugaccuuaucugcuaca

SEQ ID NO: 180662 - RNA, 19 nt, Artificial Sequence
  Description of Artificial Sequence: Synthetic oligonucleotide
cauggggucaucacuuucc

SEQ ID NO: 180663 - RNA, 19 nt, Artificial Sequence
  Description of Artificial Sequence: Synthetic oligonucleotide
uuaucugugacgcguuuaa

SEQ ID NO: 180664 - RNA, 19 nt, Artificial Sequence
  Description of Artificial Sequence: Synthetic oligonucleotide
aguggauauaagccauggg

SEQ ID NO: 180665 - RNA, 19 nt, Artificial Sequence
  Description of Artificial Sequence: Synthetic oligonucleotide
uuacagagaauucguugga

SEQ ID NO: 180666 - RNA, 19 nt, Artificial Sequence
  Description of Artificial Sequence: Synthetic oligonucleotide
uuccgugagacgcugagau

SEQ ID NO: 180667 - RNA, 19 nt, Artificial Sequence
  Description of Artificial Sequence: Synthetic oligonucleotide
ugacuugcauaguaauuug

SEQ ID NO: 180668 - RNA, 19 nt, Artificial Sequence
  Description of Artificial Sequence: Synthetic oligonucleotide
uuccuguaacccacaaucc

SEQ ID NO: 180669 - RNA, 19 nt, Artificial Sequence
  Description of Artificial Sequence: Synthetic oligonucleotide
agaaguuuagcaagccgcg

SEQ ID NO: 180670 - RNA, 19 nt, Artificial Sequence
  Description of Artificial Sequence: Synthetic oligonucleotide
ugaucagcggaugucuggg

SEQ ID NO: 180671 - RNA, 19 nt, Artificial Sequence
  Description of Artificial Sequence: Synthetic oligonucleotide
gauccauacucaucaaaca

SEQ ID NO: 180672 - RNA, 19 nt, Artificial Sequence
  Description of Artificial Sequence: Synthetic oligonucleotide
uuuacggacgagcuucuuc

SEQ ID NO: 180673 - RNA, 19 nt, Artificial Sequence
  Description of Artificial Sequence: Synthetic oligonucleotide
uguguccaauucaagguaa

SEQ ID NO: 180674 - RNA, 19 nt, Artificial Sequence
  Description of Artificial Sequence: Synthetic oligonucleotide
agagaauucguuggaauca

SEQ ID NO: 180675 - RNA, 19 nt, Artificial Sequence
  Description of Artificial Sequence: Synthetic oligonucleotide
accgaaguguugcuguuuc

SEQ ID NO: 180676 - RNA, 19 nt, Artificial Sequence
  Description of Artificial Sequence: Synthetic oligonucleotide
cuugcugcuccacacguag

SEQ ID NO: 180677 - RNA, 19 nt, Artificial Sequence
  Description of Artificial Sequence: Synthetic oligonucleotide
ucguuguuguguuuugaug

SEQ ID NO: 180678 - RNA, 19 nt, Artificial Sequence
  Description of Artificial Sequence: Synthetic oligonucleotide
uuccuuugaaaaugauuug

SEQ ID NO: 180679 - RNA, 19 nt, Artificial Sequence
  Description of Artificial Sequence: Synthetic oligonucleotide
gaaacgacuuuaaaauuuc

SEQ ID NO: 180680 - RNA, 19 nt, Artificial Sequence
  Description of Artificial Sequence: Synthetic oligonucleotide
gauuccgugagacgcugag

SEQ ID NO: 180681 - RNA, 19 nt, Artificial Sequence
  Description of Artificial Sequence: Synthetic oligonucleotide
uacuggucuaaacuaguaa

SEQ ID NO: 180682 - RNA, 19 nt, Artificial Sequence
  Description of Artificial Sequence: Synthetic oligonucleotide
uggaaccuaagaaguuuag

SEQ ID NO: 180683 - RNA, 19 nt, Artificial Sequence
  Description of Artificial Sequence: Synthetic oligonucleotide
uaguguguuuccucuuggg

SEQ ID NO: 180684 - RNA, 19 nt, Artificial Sequence
  Description of Artificial Sequence: Synthetic oligonucleotide
ucuucuucuucuucuucug

SEQ ID NO: 180685 - RNA, 19 nt, Artificial Sequence
  Description of Artificial Sequence: Synthetic oligonucleotide
agcucucuuaucugugacg

SEQ ID NO: 180686 - RNA, 19 nt, Artificial Sequence
  Description of Artificial Sequence: Synthetic oligonucleotide
aaaacucgcucguuccaga

SEQ ID NO: 180687 - RNA, 19 nt, Artificial Sequence
  Description of Artificial Sequence: Synthetic oligonucleotide
agacaagagugauuguugu

SEQ ID NO: 180688 - RNA, 19 nt, Artificial Sequence
  Description of Artificial Sequence: Synthetic oligonucleotide
uagaagauauccugaccga

SEQ ID NO: 180689 - RNA, 19 nt, Artificial Sequence
  Description of Artificial Sequence: Synthetic oligonucleotide
cagaguuuuacggacgagc

SEQ ID NO: 180690 - RNA, 19 nt, Artificial Sequence
  Description of Artificial Sequence: Synthetic oligonucleotide
cagagaauucguuggaauc

SEQ ID NO: 180691 - RNA, 19 nt, Artificial Sequence
  Description of Artificial Sequence: Synthetic oligonucleotide
acucggcgcacauagagcu

SEQ ID NO: 180692 - RNA, 19 nt, Artificial Sequence
  Description of Artificial Sequence: Synthetic oligonucleotide
guuggugccaaacucuuuc

SEQ ID NO: 180693 - RNA, 19 nt, Artificial Sequence
  Description of Artificial Sequence: Synthetic oligonucleotide
ucgucgucagcucuaacaa

SEQ ID NO: 180694 - RNA, 19 nt, Artificial Sequence
  Description of Artificial Sequence: Synthetic oligonucleotide
uuaacccuccuaagcaugu

SEQ ID NO: 180695 - RNA, 19 nt, Artificial Sequence
  Description of Artificial Sequence: Synthetic oligonucleotide
uccagaguuuuacggacga

SEQ ID NO: 180696 - RNA, 19 nt, Artificial Sequence
  Description of Artificial Sequence: Synthetic oligonucleotide
cuuaacccuccuaagcaug

SEQ ID NO: 180697 - RNA, 19 nt, Artificial Sequence
  Description of Artificial Sequence: Synthetic oligonucleotide
uggggagcauccaaacaag

SEQ ID NO: 180698 - RNA, 19 nt, Artificial Sequence
  Description of Artificial Sequence: Synthetic oligonucleotide
ucugaauccacaacaccuu

SEQ ID NO: 180699 - RNA, 19 nt, Artificial Sequence
  Description of Artificial Sequence: Synthetic oligonucleotide
ucccaucaaacucgggaag

SEQ ID NO: 180700 - RNA, 19 nt, Artificial Sequence
  Description of Artificial Sequence: Synthetic oligonucleotide
ugauaaguuucaucauccu

SEQ ID NO: 180701 - RNA, 19 nt, Artificial Sequence
  Description of Artificial Sequence: Synthetic oligonucleotide
agaauacuuucugacaaga

SEQ ID NO: 180702 - RNA, 19 nt, Artificial Sequence
  Description of Artificial Sequence: Synthetic oligonucleotide
aaccaacuccucucugguc

SEQ ID NO: 180703 - RNA, 19 nt, Artificial Sequence
  Description of Artificial Sequence: Synthetic oligonucleotide
guagaugggaaaguugaug

SEQ ID NO: 180704 - RNA, 19 nt, Artificial Sequence
  Description of Artificial Sequence: Synthetic oligonucleotide
agaaacgacuuuaaaauuu

SEQ ID NO: 180705 - RNA, 19 nt, Artificial Sequence
  Description of Artificial Sequence: Synthetic oligonucleotide
agucaucggugaugaauac

SEQ ID NO: 180706 - RNA, 19 nt, Artificial Sequence
  Description of Artificial Sequence: Synthetic oligonucleotide
gauauaagccaugggguca

SEQ ID NO: 180707 - RNA, 19 nt, Artificial Sequence
  Description of Artificial Sequence: Synthetic oligonucleotide
guugccagaccauccauac

SEQ ID NO: 180708 - RNA, 19 nt, Artificial Sequence
  Description of Artificial Sequence: Synthetic oligonucleotide
gagaauucguuggaaucag

SEQ ID NO: 180709 - RNA, 19 nt, Artificial Sequence
  Description of Artificial Sequence: Synthetic oligonucleotide
uuugguaugcuugugccuu

SEQ ID NO: 180710 - RNA, 19 nt, Artificial Sequence
  Description of Artificial Sequence: Synthetic oligonucleotide
agagcuuaauauaaucgcu

SEQ ID NO: 180711 - RNA, 19 nt, Artificial Sequence
  Description of Artificial Sequence: Synthetic oligonucleotide
aggcaaacuuuucagacuu

SEQ ID NO: 180712 - RNA, 19 nt, Artificial Sequence
  Description of Artificial Sequence: Synthetic oligonucleotide
gacgcugagauaccacagc

SEQ ID NO: 180713 - RNA, 19 nt, Artificial Sequence
  Description of Artificial Sequence: Synthetic oligonucleotide
auacuggcuggccacaaga

SEQ ID NO: 180714 - RNA, 19 nt, Artificial Sequence
  Description of Artificial Sequence: Synthetic oligonucleotide
ugacgcguuuaacccaucc

SEQ ID NO: 180715 - RNA, 19 nt, Artificial Sequence
  Description of Artificial Sequence: Synthetic oligonucleotide
aagucaucggugaugaaua

SEQ ID NO: 180716 - RNA, 19 nt, Artificial Sequence
  Description of Artificial Sequence: Synthetic oligonucleotide
cagaaguugacugaccauc

SEQ ID NO: 180717 - RNA, 19 nt, Artificial Sequence
  Description of Artificial Sequence: Synthetic oligonucleotide
gagcuuaauauaaucgcuc

SEQ ID NO: 180718 - RNA, 19 nt, Artificial Sequence
  Description of Artificial Sequence: Synthetic oligonucleotide
uccacauacuggucuaaac

SEQ ID NO: 180719 - RNA, 19 nt, Artificial Sequence
  Description of Artificial Sequence: Synthetic oligonucleotide
cugaucagcggaugucugg

SEQ ID NO: 180720 - RNA, 19 nt, Artificial Sequence
  Description of Artificial Sequence: Synthetic oligonucleotide
uugauuugaaggugacuuc

SEQ ID NO: 180721 - RNA, 19 nt, Artificial Sequence
  Description of Artificial Sequence: Synthetic oligonucleotide
uugaugaacugagaauacu

SEQ ID NO: 180722 - RNA, 19 nt, Artificial Sequence
  Description of Artificial Sequence: Synthetic oligonucleotide
acuaguaaugucaguugag

SEQ ID NO: 180723 - RNA, 19 nt, Artificial Sequence
  Description of Artificial Sequence: Synthetic oligonucleotide
gagacgcugagauaccaca

SEQ ID NO: 180724 - RNA, 19 nt, Artificial Sequence
  Description of Artificial Sequence: Synthetic oligonucleotide
gaugugcuggguaucguug

SEQ ID NO: 180725 - RNA, 19 nt, Artificial Sequence
  Description of Artificial Sequence: Synthetic oligonucleotide
uuccagaaaguaucauugu

SEQ ID NO: 180726 - RNA, 19 nt, Artificial Sequence
  Description of Artificial Sequence: Synthetic oligonucleotide
cuuccuuaacccuccuaag

SEQ ID NO: 180727 - RNA, 19 nt, Artificial Sequence
  Description of Artificial Sequence: Synthetic oligonucleotide
agauauccugaccgaagug

SEQ ID NO: 180728 - RNA, 19 nt, Artificial Sequence
  Description of Artificial Sequence: Synthetic oligonucleotide
ucgucagcucuaacaaacc

SEQ ID NO: 180729 - RNA, 19 nt, Artificial Sequence
  Description of Artificial Sequence: Synthetic oligonucleotide
caucggugaugaauacucg

SEQ ID NO: 180730 - RNA, 19 nt, Artificial Sequence
  Description of Artificial Sequence: Synthetic oligonucleotide
ccuaagaaguuuagcaagc

SEQ ID NO: 180731 - RNA, 19 nt, Artificial Sequence
  Description of Artificial Sequence: Synthetic oligonucleotide
aagagucucacgggaaaca

SEQ ID NO: 180732 - RNA, 19 nt, Artificial Sequence
  Description of Artificial Sequence: Synthetic oligonucleotide
ugagauaccacagccuuuu

SEQ ID NO: 180733 - RNA, 19 nt, Artificial Sequence
  Description of Artificial Sequence: Synthetic oligonucleotide
ucauggugcgcggacggcg

SEQ ID NO: 180734 - RNA, 19 nt, Artificial Sequence
  Description of Artificial Sequence: Synthetic oligonucleotide
uaagcaugucucugaucag

SEQ ID NO: 180735 - RNA, 19 nt, Artificial Sequence
  Description of Artificial Sequence: Synthetic oligonucleotide
agaaaguaucauuguacuu

SEQ ID NO: 180736 - RNA, 19 nt, Artificial Sequence
  Description of Artificial Sequence: Synthetic oligonucleotide
ggugaugaauacucggcgc

SEQ ID NO: 180737 - RNA, 19 nt, Artificial Sequence
  Description of Artificial Sequence: Synthetic oligonucleotide
uuacauucaugaggaaugu

SEQ ID NO: 180738 - RNA, 19 nt, Artificial Sequence
  Description of Artificial Sequence: Synthetic oligonucleotide
gucgucagcucuaacaaac

SEQ ID NO: 180739 - RNA, 19 nt, Artificial Sequence
  Description of Artificial Sequence: Synthetic oligonucleotide
agaguuuuacggacgagcu

SEQ ID NO: 180740 - RNA, 19 nt, Artificial Sequence
  Description of Artificial Sequence: Synthetic oligonucleotide
auaaucgcucuucuuggau

SEQ ID NO: 180741 - RNA, 19 nt, Artificial Sequence
  Description of Artificial Sequence: Synthetic oligonucleotide
aaggugacuuccccuucug

SEQ ID NO: 180742 - RNA, 19 nt, Artificial Sequence
  Description of Artificial Sequence: Synthetic oligonucleotide
uuggugccaaacucuuucc

SEQ ID NO: 180743 - RNA, 19 nt, Artificial Sequence
  Description of Artificial Sequence: Synthetic oligonucleotide
agagccugaaugcaguauu

SEQ ID NO: 180744 - RNA, 19 nt, Artificial Sequence
  Description of Artificial Sequence: Synthetic oligonucleotide
ugagguaaauaaccucaua

SEQ ID NO: 180745 - RNA, 19 nt, Artificial Sequence
  Description of Artificial Sequence: Synthetic oligonucleotide
uguugcuucccgguuuucc

SEQ ID NO: 180746 - RNA, 19 nt, Artificial Sequence
  Description of Artificial Sequence: Synthetic oligonucleotide
auauugguuugauaucauu

SEQ ID NO: 180747 - RNA, 19 nt, Artificial Sequence
  Description of Artificial Sequence: Synthetic oligonucleotide
gagaucaucugaauccaca

SEQ ID NO: 180748 - RNA, 19 nt, Artificial Sequence
  Description of Artificial Sequence: Synthetic oligonucleotide
cauaaguucccaaucccaa

SEQ ID NO: 180749 - RNA, 19 nt, Artificial Sequence
  Description of Artificial Sequence: Synthetic oligonucleotide
aaacgacuuuaaaauuuca

SEQ ID NO: 180750 - RNA, 19 nt, Artificial Sequence
  Description of Artificial Sequence: Synthetic oligonucleotide
gauauccugaccgaagugu

SEQ ID NO: 180751 - RNA, 19 nt, Artificial Sequence
  Description of Artificial Sequence: Synthetic oligonucleotide
ggauccauacucaucaaac

SEQ ID NO: 180752 - RNA, 19 nt, Artificial Sequence
  Description of Artificial Sequence: Synthetic oligonucleotide
uggugccaaacucuuucca

SEQ ID NO: 180753 - RNA, 19 nt, Artificial Sequence
  Description of Artificial Sequence: Synthetic oligonucleotide
ugaggcgaagcauucucuc

SEQ ID NO: 180754 - RNA, 19 nt, Artificial Sequence
  Description of Artificial Sequence: Synthetic oligonucleotide
gacaagagugauuguuguc

SEQ ID NO: 180755 - RNA, 19 nt, Artificial Sequence
  Description of Artificial Sequence: Synthetic oligonucleotide
ugagacgcugagauaccac

SEQ ID NO: 180756 - RNA, 19 nt, Artificial Sequence
  Description of Artificial Sequence: Synthetic oligonucleotide
aucguuguuguguuuugau

SEQ ID NO: 180757 - RNA, 19 nt, Artificial Sequence
  Description of Artificial Sequence: Synthetic oligonucleotide
uguuuaagcugaggcgaag

SEQ ID NO: 180758 - RNA, 19 nt, Artificial Sequence
  Description of Artificial Sequence: Synthetic oligonucleotide
cacgaggagcagauguggg

SEQ ID NO: 180759 - RNA, 19 nt, Artificial Sequence
  Description of Artificial Sequence: Synthetic oligonucleotide
uuaagcugaggcgaagcau

SEQ ID NO: 180760 - RNA, 19 nt, Artificial Sequence
  Description of Artificial Sequence: Synthetic oligonucleotide
cagaugugggcacaaauaa

SEQ ID NO: 180761 - RNA, 19 nt, Artificial Sequence
  Description of Artificial Sequence: Synthetic oligonucleotide
uaugccuuggugucuggua

SEQ ID NO: 180762 - RNA, 19 nt, Artificial Sequence
  Description of Artificial Sequence: Synthetic oligonucleotide
agucucacgggaaacauua

SEQ ID NO: 180763 - RNA, 19 nt, Artificial Sequence
  Description of Artificial Sequence: Synthetic oligonucleotide
gccgcguccgauuugagug

SEQ ID NO: 180764 - RNA, 19 nt, Artificial Sequence
  Description of Artificial Sequence: Synthetic oligonucleotide
uccuaagcaugucucugau

SEQ ID NO: 180765 - RNA, 19 nt, Artificial Sequence
  Description of Artificial Sequence: Synthetic oligonucleotide
aaacccacuucuuccugua

SEQ ID NO: 180766 - RNA, 19 nt, Artificial Sequence
  Description of Artificial Sequence: Synthetic oligonucleotide
gucaguugagugaugagaa

SEQ ID NO: 180767 - RNA, 19 nt, Artificial Sequence
  Description of Artificial Sequence: Synthetic oligonucleotide
guaucguuguuguguuuug

SEQ ID NO: 180768 - RNA, 19 nt, Artificial Sequence
  Description of Artificial Sequence: Synthetic oligonucleotide
caccccgagccucaggucc

SEQ ID NO: 180769 - RNA, 19 nt, Artificial Sequence
  Description of Artificial Sequence: Synthetic oligonucleotide
gaagagucucacgggaaac

SEQ ID NO: 180770 - RNA, 19 nt, Artificial Sequence
  Description of Artificial Sequence: Synthetic oligonucleotide
aagcugaggcgaagcauuc

SEQ ID NO: 180771 - RNA, 19 nt, Artificial Sequence
  Description of Artificial Sequence: Synthetic oligonucleotide
gacgcguuuaacccaucca

SEQ ID NO: 180772 - RNA, 19 nt, Artificial Sequence
  Description of Artificial Sequence: Synthetic oligonucleotide
gauguuggugccaaacucu

SEQ ID NO: 180773 - RNA, 19 nt, Artificial Sequence
  Description of Artificial Sequence: Synthetic oligonucleotide
uaucguuguuguguuuuga

SEQ ID NO: 180774 - RNA, 19 nt, Artificial Sequence
  Description of Artificial Sequence: Synthetic oligonucleotide
ucuugacuguuaacucuuc

SEQ ID NO: 180775 - RNA, 19 nt, Artificial Sequence
  Description of Artificial Sequence: Synthetic oligonucleotide
uguccaauucaagguaauc

SEQ ID NO: 180776 - RNA, 19 nt, Artificial Sequence
  Description of Artificial Sequence: Synthetic oligonucleotide
ucgcucguuccagauuugg

SEQ ID NO: 180777 - RNA, 19 nt, Artificial Sequence
  Description of Artificial Sequence: Synthetic oligonucleotide
cagcaauuacagagaauuc

SEQ ID NO: 180778 - RNA, 19 nt, Artificial Sequence
  Description of Artificial Sequence: Synthetic oligonucleotide
gggucaauguuuaagcuga

SEQ ID NO: 180779 - RNA, 19 nt, Artificial Sequence
  Description of Artificial Sequence: Synthetic oligonucleotide
cauccuguuaacuucugcu

SEQ ID NO: 180780 - RNA, 19 nt, Artificial Sequence
  Description of Artificial Sequence: Synthetic oligonucleotide
gcucucuuaucugugacgc

SEQ ID NO: 180781 - RNA, 19 nt, Artificial Sequence
  Description of Artificial Sequence: Synthetic oligonucleotide
gaccacgaggagcagaugu

SEQ ID NO: 180782 - RNA, 19 nt, Artificial Sequence
  Description of Artificial Sequence: Synthetic oligonucleotide
gcuugacccagccaugaag

SEQ ID NO: 180783 - RNA, 19 nt, Artificial Sequence
  Description of Artificial Sequence: Synthetic oligonucleotide
cuguagauuccuuugcugu

SEQ ID NO: 180784 - RNA, 19 nt, Artificial Sequence
  Description of Artificial Sequence: Synthetic oligonucleotide
guuuagcaagccgcguccg

SEQ ID NO: 180785 - RNA, 19 nt, Artificial Sequence
  Description of Artificial Sequence: Synthetic oligonucleotide
acuugcauaguaauuugua

SEQ ID NO: 180786 - RNA, 19 nt, Artificial Sequence
  Description of Artificial Sequence: Synthetic oligonucleotide
ggaaccuaagaaguuuagc

SEQ ID NO: 180787 - RNA, 19 nt, Artificial Sequence
  Description of Artificial Sequence: Synthetic oligonucleotide
uguccuuaagggccuuguc

SEQ ID NO: 180788 - RNA, 19 nt, Artificial Sequence
  Description of Artificial Sequence: Synthetic oligonucleotide
ugcuacaaggaaggcagaa

SEQ ID NO: 180789 - RNA, 19 nt, Artificial Sequence
  Description of Artificial Sequence: Synthetic oligonucleotide
acccucauggugcgcggac

SEQ ID NO: 180790 - RNA, 19 nt, Artificial Sequence
  Description of Artificial Sequence: Synthetic oligonucleotide
uccauguugccagaccauc

SEQ ID NO: 180791 - RNA, 19 nt, Artificial Sequence
  Description of Artificial Sequence: Synthetic oligonucleotide
aucagcggaugucugggau

SEQ ID NO: 180792 - RNA, 19 nt, Artificial Sequence
  Description of Artificial Sequence: Synthetic oligonucleotide
guaccauccacaucgacuu

SEQ ID NO: 180793 - RNA, 19 nt, Artificial Sequence
  Description of Artificial Sequence: Synthetic oligonucleotide
accuuaucugcuacaagga

SEQ ID NO: 180794 - RNA, 19 nt, Artificial Sequence
  Description of Artificial Sequence: Synthetic oligonucleotide
uccgauuugagugguccuc

SEQ ID NO: 180795 - RNA, 19 nt, Artificial Sequence
  Description of Artificial Sequence: Synthetic oligonucleotide
uggguaucguuguuguguu

SEQ ID NO: 180796 - RNA, 19 nt, Artificial Sequence
  Description of Artificial Sequence: Synthetic oligonucleotide
cuugacuguuaacucuuca

SEQ ID NO: 180797 - RNA, 19 nt, Artificial Sequence
  Description of Artificial Sequence: Synthetic oligonucleotide
gaauucguuggaaucagau

SEQ ID NO: 180798 - RNA, 19 nt, Artificial Sequence
  Description of Artificial Sequence: Synthetic oligonucleotide
ucccaacauuuuacagugc

SEQ ID NO: 180799 - RNA, 19 nt, Artificial Sequence
  Description of Artificial Sequence: Synthetic oligonucleotide
cuucugacuugcauaguaa

SEQ ID NO: 180800 - RNA, 19 nt, Artificial Sequence
  Description of Artificial Sequence: Synthetic oligonucleotide
uuagcaagccgcguccgau

SEQ ID NO: 180801 - RNA, 19 nt, Artificial Sequence
  Description of Artificial Sequence: Synthetic oligonucleotide
ucgacuucgucgucagcuc

SEQ ID NO: 180802 - RNA, 19 nt, Artificial Sequence
  Description of Artificial Sequence: Synthetic oligonucleotide
gagauuccgugagacgcug

SEQ ID NO: 180803 - RNA, 19 nt, Artificial Sequence
  Description of Artificial Sequence: Synthetic oligonucleotide
aggcgaagcauucucucua

SEQ ID NO: 180804 - RNA, 19 nt, Artificial Sequence
  Description of Artificial Sequence: Synthetic oligonucleotide
ucguuccagauuuggcuau

SEQ ID NO: 180805 - RNA, 19 nt, Artificial Sequence
  Description of Artificial Sequence: Synthetic oligonucleotide
auccaguugagcaggggcu

SEQ ID NO: 180806 - RNA, 19 nt, Artificial Sequence
  Description of Artificial Sequence: Synthetic oligonucleotide
uuguccuuaagggccuugu

SEQ ID NO: 180807 - RNA, 19 nt, Artificial Sequence
  Description of Artificial Sequence: Synthetic oligonucleotide
agauguccuugcccguuug

SEQ ID NO: 180808 - RNA, 19 nt, Artificial Sequence
  Description of Artificial Sequence: Synthetic oligonucleotide
cuacaccagugucugugac

SEQ ID NO: 180809 - RNA, 19 nt, Artificial Sequence
  Description of Artificial Sequence: Synthetic oligonucleotide
acccuccuaagcaugucuc

SEQ ID NO: 180810 - RNA, 19 nt, Artificial Sequence
  Description of Artificial Sequence: Synthetic oligonucleotide
auauaagccauggggucau

SEQ ID NO: 180811 - RNA, 19 nt, Artificial Sequence
  Description of Artificial Sequence: Synthetic oligonucleotide
uugccagaccauccauacu

SEQ ID NO: 180812 - RNA, 19 nt, Artificial Sequence
  Description of Artificial Sequence: Synthetic oligonucleotide
aauacucggcgcacauaga

SEQ ID NO: 180813 - RNA, 19 nt, Artificial Sequence
  Description of Artificial Sequence: Synthetic oligonucleotide
ucagcggaugucugggauu

SEQ ID NO: 180814 - RNA, 19 nt, Artificial Sequence
  Description of Artificial Sequence: Synthetic oligonucleotide
ugccuuggugucugguaga

SEQ ID NO: 180815 - RNA, 19 nt, Artificial Sequence
  Description of Artificial Sequence: Synthetic oligonucleotide
cauccauacuggcuggcca

SEQ ID NO: 180816 - RNA, 19 nt, Artificial Sequence
  Description of Artificial Sequence: Synthetic oligonucleotide
cuaguaaugucaguugagu

SEQ ID NO: 180817 - RNA, 19 nt, Artificial Sequence
  Description of Artificial Sequence: Synthetic oligonucleotide
cauaugccuuggugucugg

SEQ ID NO: 180818 - RNA, 19 nt, Artificial Sequence
  Description of Artificial Sequence: Synthetic oligonucleotide
agagucucacgggaaacau

SEQ ID NO: 180819 - RNA, 19 nt, Artificial Sequence
  Description of Artificial Sequence: Synthetic oligonucleotide
cucuucuucuucuucuucu

SEQ ID NO: 180820 - RNA, 19 nt, Artificial Sequence
  Description of Artificial Sequence: Synthetic oligonucleotide
gcaguaaaguggauauaag

SEQ ID NO: 180821 - RNA, 19 nt, Artificial Sequence
  Description of Artificial Sequence: Synthetic oligonucleotide
uaucugugacgcguuuaac

SEQ ID NO: 180822 - RNA, 19 nt, Artificial Sequence
  Description of Artificial Sequence: Synthetic oligonucleotide
gggcaucauaucauggaag

SEQ ID NO: 180823 - RNA, 19 nt, Artificial Sequence
  Description of Artificial Sequence: Synthetic oligonucleotide
ccgugagacgcugagauac

SEQ ID NO: 180824 - RNA, 19 nt, Artificial Sequence
  Description of Artificial Sequence: Synthetic oligonucleotide
cauacuggucuaaacuagu

SEQ ID NO: 180825 - RNA, 19 nt, Artificial Sequence
  Description of Artificial Sequence: Synthetic oligonucleotide
ccauauugguuugauauca

SEQ ID NO: 180826 - RNA, 19 nt, Artificial Sequence
  Description of Artificial Sequence: Synthetic oligonucleotide
ccauguugccagaccaucc

SEQ ID NO: 180827 - RNA, 19 nt, Artificial Sequence
  Description of Artificial Sequence: Synthetic oligonucleotide
uguuggugccaaacucuuu

SEQ ID NO: 180828 - RNA, 19 nt, Artificial Sequence
  Description of Artificial Sequence: Synthetic oligonucleotide
ucccgguuuuccuucguuu

SEQ ID NO: 180829 - RNA, 19 nt, Artificial Sequence
  Description of Artificial Sequence: Synthetic oligonucleotide
gauuuggcuaugguaccaa

SEQ ID NO: 180830 - RNA, 19 nt, Artificial Sequence
  Description of Artificial Sequence: Synthetic oligonucleotide
augugggcacaaauaauau

SEQ ID NO: 180831 - RNA, 19 nt, Artificial Sequence
  Description of Artificial Sequence: Synthetic oligonucleotide
uuccacauacuggucuaaa

SEQ ID NO: 180832 - RNA, 19 nt, Artificial Sequence
  Description of Artificial Sequence: Synthetic oligonucleotide
agaugugggcacaaauaau

SEQ ID NO: 180833 - RNA, 19 nt, Artificial Sequence
  Description of Artificial Sequence: Synthetic oligonucleotide
gagccugaaugcaguauuc

SEQ ID NO: 180834 - RNA, 19 nt, Artificial Sequence
  Description of Artificial Sequence: Synthetic oligonucleotide
uugguaugcuugugccuuc

SEQ ID NO: 180835 - RNA, 19 nt, Artificial Sequence
  Description of Artificial Sequence: Synthetic oligonucleotide
guaugcuugugccuucaua

SEQ ID NO: 180836 - RNA, 19 nt, Artificial Sequence
  Description of Artificial Sequence: Synthetic oligonucleotide
acaccaauagucaguuaaa

SEQ ID NO: 180837 - RNA, 19 nt, Artificial Sequence
  Description of Artificial Sequence: Synthetic oligonucleotide
uacggacgagcuucuuccu

SEQ ID NO: 180838 - RNA, 19 nt, Artificial Sequence
  Description of Artificial Sequence: Synthetic oligonucleotide
cccaacauuuuacagugca

SEQ ID NO: 180839 - RNA, 19 nt, Artificial Sequence
  Description of Artificial Sequence: Synthetic oligonucleotide
agccgcguccgauuugagu

SEQ ID NO: 180840 - RNA, 19 nt, Artificial Sequence
  Description of Artificial Sequence: Synthetic oligonucleotide
ucggcgcacauagagcuua

SEQ ID NO: 180841 - RNA, 19 nt, Artificial Sequence
  Description of Artificial Sequence: Synthetic oligonucleotide
cucuugggucagcaauuac

SEQ ID NO: 180842 - RNA, 19 nt, Artificial Sequence
  Description of Artificial Sequence: Synthetic oligonucleotide
gaucagcggaugucuggga

SEQ ID NO: 180843 - RNA, 19 nt, Artificial Sequence
  Description of Artificial Sequence: Synthetic oligonucleotide
auauccugaccgaaguguu

SEQ ID NO: 180844 - RNA, 19 nt, Artificial Sequence
  Description of Artificial Sequence: Synthetic oligonucleotide
ggccgaucaguucagaagu

SEQ ID NO: 180845 - RNA, 19 nt, Artificial Sequence
  Description of Artificial Sequence: Synthetic oligonucleotide
agcaagccgcguccgauuu

SEQ ID NO: 180846 - RNA, 19 nt, Artificial Sequence
  Description of Artificial Sequence: Synthetic oligonucleotide
cuccacacguagaugggaa

SEQ ID NO: 180847 - RNA, 19 nt, Artificial Sequence
  Description of Artificial Sequence: Synthetic oligonucleotide
gaggcgaagcauucucucu

SEQ ID NO: 180848 - RNA, 19 nt, Artificial Sequence
  Description of Artificial Sequence: Synthetic oligonucleotide
cuaaacuaguaaugucagu

SEQ ID NO: 180849 - RNA, 19 nt, Artificial Sequence
  Description of Artificial Sequence: Synthetic oligonucleotide
guuagugagaugagccuua

SEQ ID NO: 180850 - RNA, 19 nt, Artificial Sequence
  Description of Artificial Sequence: Synthetic oligonucleotide
gacuugcauaguaauuugu

SEQ ID NO: 180851 - RNA, 19 nt, Artificial Sequence
  Description of Artificial Sequence: Synthetic oligonucleotide
cacacuuaaucuugacugu

SEQ ID NO: 180852 - RNA, 19 nt, Artificial Sequence
  Description of Artificial Sequence: Synthetic oligonucleotide
ccguuugguaugcuugugc

SEQ ID NO: 180853 - RNA, 19 nt, Artificial Sequence
  Description of Artificial Sequence: Synthetic oligonucleotide
uugaugugacaaugaccuu

SEQ ID NO: 180854 - RNA, 19 nt, Artificial Sequence
  Description of Artificial Sequence: Synthetic oligonucleotide
auacuggucuaaacuagua

SEQ ID NO: 180855 - RNA, 19 nt, Artificial Sequence
  Description of Artificial Sequence: Synthetic oligonucleotide
uucccgguuuuccuucguu

SEQ ID NO: 180856 - RNA, 19 nt, Artificial Sequence
  Description of Artificial Sequence: Synthetic oligonucleotide
cugaccgaaguguugcugu

SEQ ID NO: 180857 - RNA, 19 nt, Artificial Sequence
  Description of Artificial Sequence: Synthetic oligonucleotide
ugaccgaaguguugcuguu

SEQ ID NO: 180858 - RNA, 19 nt, Artificial Sequence
  Description of Artificial Sequence: Synthetic oligonucleotide
uuacaccaauagucaguua

SEQ ID NO: 180859 - RNA, 19 nt, Artificial Sequence
  Description of Artificial Sequence: Synthetic oligonucleotide
agaauucguuggaaucaga

SEQ ID NO: 180860 - RNA, 19 nt, Artificial Sequence
  Description of Artificial Sequence: Synthetic oligonucleotide
caguuagugagaugagccu

SEQ ID NO: 180861 - RNA, 19 nt, Artificial Sequence
  Description of Artificial Sequence: Synthetic oligonucleotide
cucuaacaaacccgaaggu

SEQ ID NO: 180862 - RNA, 19 nt, Artificial Sequence
  Description of Artificial Sequence: Synthetic oligonucleotide
cacaucgacuucgucguca

SEQ ID NO: 180863 - RNA, 19 nt, Artificial Sequence
  Description of Artificial Sequence: Synthetic oligonucleotide
caccuugagcaguuuaugu

SEQ ID NO: 180864 - RNA, 19 nt, Artificial Sequence
  Description of Artificial Sequence: Synthetic oligonucleotide
auuccgugagacgcugaga

SEQ ID NO: 180865 - RNA, 19 nt, Artificial Sequence
  Description of Artificial Sequence: Synthetic oligonucleotide
auguuuaagcugaggcgaa

SEQ ID NO: 180866 - RNA, 19 nt, Artificial Sequence
  Description of Artificial Sequence: Synthetic oligonucleotide
guugagugaugagaagacu

SEQ ID NO: 180867 - RNA, 19 nt, Artificial Sequence
  Description of Artificial Sequence: Synthetic oligonucleotide
uccgugagacgcugagaua

SEQ ID NO: 180868 - RNA, 19 nt, Artificial Sequence
  Description of Artificial Sequence: Synthetic oligonucleotide
gaaguuuagcaagccgcgu

SEQ ID NO: 180869 - RNA, 19 nt, Artificial Sequence
  Description of Artificial Sequence: Synthetic oligonucleotide
cgcguuuaacccauccagc

SEQ ID NO: 180870 - RNA, 19 nt, Artificial Sequence
  Description of Artificial Sequence: Synthetic oligonucleotide
gugagacgcugagauacca

SEQ ID NO: 180871 - RNA, 19 nt, Artificial Sequence
  Description of Artificial Sequence: Synthetic oligonucleotide
uagcaagccgcguccgauu

SEQ ID NO: 180872 - RNA, 19 nt, Artificial Sequence
  Description of Artificial Sequence: Synthetic oligonucleotide
caagccgcguccgauuuga

SEQ ID NO: 180873 - RNA, 19 nt, Artificial Sequence
  Description of Artificial Sequence: Synthetic oligonucleotide
gcauaguaauuuguagaga

SEQ ID NO: 180874 - RNA, 19 nt, Artificial Sequence
  Description of Artificial Sequence: Synthetic oligonucleotide
caauuacagagaauucguu

SEQ ID NO: 180875 - RNA, 19 nt, Artificial Sequence
  Description of Artificial Sequence: Synthetic oligonucleotide
cauggugcgcggacggcga

SEQ ID NO: 180876 - RNA, 19 nt, Artificial Sequence
  Description of Artificial Sequence: Synthetic oligonucleotide
gcguuuaacccauccagcu

SEQ ID NO: 180877 - RNA, 19 nt, Artificial Sequence
  Description of Artificial Sequence: Synthetic oligonucleotide
auggugcgcggacggcgag

SEQ ID NO: 180878 - RNA, 19 nt, Artificial Sequence
  Description of Artificial Sequence: Synthetic oligonucleotide
gucgcaaguccucuucggu

SEQ ID NO: 180879 - RNA, 19 nt, Artificial Sequence
  Description of Artificial Sequence: Synthetic oligonucleotide
cuucguuuucucgcucuca

SEQ ID NO: 180880 - RNA, 19 nt, Artificial Sequence
  Description of Artificial Sequence: Synthetic oligonucleotide
cucgucuuguucugugucu

SEQ ID NO: 180881 - RNA, 19 nt, Artificial Sequence
  Description of Artificial Sequence: Synthetic oligonucleotide
ccacauacuggucuaaacu

SEQ ID NO: 180882 - RNA, 19 nt, Artificial Sequence
  Description of Artificial Sequence: Synthetic oligonucleotide
cucgcucguuccagauuug

SEQ ID NO: 180883 - RNA, 19 nt, Artificial Sequence
  Description of Artificial Sequence: Synthetic oligonucleotide
uuaacccauccagcugaau

SEQ ID NO: 180884 - RNA, 19 nt, Artificial Sequence
  Description of Artificial Sequence: Synthetic oligonucleotide
cguuuaacccauccagcug

SEQ ID NO: 180885 - RNA, 19 nt, Artificial Sequence
  Description of Artificial Sequence: Synthetic oligonucleotide
uggggucaucacuuuccuu

SEQ ID NO: 180886 - RNA, 19 nt, Artificial Sequence
  Description of Artificial Sequence: Synthetic oligonucleotide
cuguuaacuucugcuugga

SEQ ID NO: 180887 - RNA, 19 nt, Artificial Sequence
  Description of Artificial Sequence: Synthetic oligonucleotide
cuucuucuucuucuucugu

SEQ ID NO: 180888 - RNA, 19 nt, Artificial Sequence
  Description of Artificial Sequence: Synthetic oligonucleotide
acuucgucgucagcucuaa

SEQ ID NO: 180889 - RNA, 19 nt, Artificial Sequence
  Description of Artificial Sequence: Synthetic oligonucleotide
gaguuuuacggacgagcuu

SEQ ID NO: 180890 - RNA, 19 nt, Artificial Sequence
  Description of Artificial Sequence: Synthetic oligonucleotide
agcugaggcgaagcauucu

SEQ ID NO: 180891 - RNA, 19 nt, Artificial Sequence
  Description of Artificial Sequence: Synthetic oligonucleotide
cguccgauuugaguggucc

SEQ ID NO: 180892 - RNA, 19 nt, Artificial Sequence
  Description of Artificial Sequence: Synthetic oligonucleotide
uggcaacauucuggaaccu

SEQ ID NO: 180893 - RNA, 19 nt, Artificial Sequence
  Description of Artificial Sequence: Synthetic oligonucleotide
cgaucaguucagaaguuga

SEQ ID NO: 180894 - RNA, 19 nt, Artificial Sequence
  Description of Artificial Sequence: Synthetic oligonucleotide
uuuuacggacgagcuucuu

SEQ ID NO: 180895 - RNA, 19 nt, Artificial Sequence
  Description of Artificial Sequence: Synthetic oligonucleotide
ccauaugccuuggugucug

SEQ ID NO: 180896 - RNA, 19 nt, Artificial Sequence
  Description of Artificial Sequence: Synthetic oligonucleotide
cugcuugacccagccauga

SEQ ID NO: 180897 - RNA, 19 nt, Artificial Sequence
  Description of Artificial Sequence: Synthetic oligonucleotide
gucaucggugaugaauacu

SEQ ID NO: 180898 - RNA, 19 nt, Artificial Sequence
  Description of Artificial Sequence: Synthetic oligonucleotide
gguaucguuguuguguuuu

SEQ ID NO: 180899 - RNA, 19 nt, Artificial Sequence
  Description of Artificial Sequence: Synthetic oligonucleotide
gacuucgucgucagcucua

SEQ ID NO: 180900 - RNA, 19 nt, Artificial Sequence
  Description of Artificial Sequence: Synthetic oligonucleotide
ccgcguccgauuugagugg

SEQ ID NO: 180901 - RNA, 19 nt, Artificial Sequence
  Description of Artificial Sequence: Synthetic oligonucleotide
gugacaugcagcagguuuu

SEQ ID NO: 180902 - RNA, 19 nt, Artificial Sequence
  Description of Artificial Sequence: Synthetic oligonucleotide
cugccauauugguuugaua

SEQ ID NO: 180903 - RNA, 19 nt, Artificial Sequence
  Description of Artificial Sequence: Synthetic oligonucleotide
gggauuaauuucaaauguu

SEQ ID NO: 180904 - RNA, 19 nt, Artificial Sequence
  Description of Artificial Sequence: Synthetic oligonucleotide
ccucuucuucuucuucuuc

SEQ ID NO: 180905 - RNA, 19 nt, Artificial Sequence
  Description of Artificial Sequence: Synthetic oligonucleotide
cuucagggucaauguuuaa

SEQ ID NO: 180906 - RNA, 19 nt, Artificial Sequence
  Description of Artificial Sequence: Synthetic oligonucleotide
aagccgcguccgauuugag

SEQ ID NO: 180907 - RNA, 19 nt, Artificial Sequence
  Description of Artificial Sequence: Synthetic oligonucleotide
caccaauagucaguuaaau

SEQ ID NO: 180908 - RNA, 19 nt, Artificial Sequence
  Description of Artificial Sequence: Synthetic oligonucleotide
gugagguaaauaaccucau

SEQ ID NO: 180909 - RNA, 19 nt, Artificial Sequence
  Description of Artificial Sequence: Synthetic oligonucleotide
agauuccgugagacgcuga

SEQ ID NO: 180910 - RNA, 19 nt, Artificial Sequence
  Description of Artificial Sequence: Synthetic oligonucleotide
cgugagacgcugagauacc

SEQ ID NO: 180911 - RNA, 19 nt, Artificial Sequence
  Description of Artificial Sequence: Synthetic oligonucleotide
gcuuaauauaaucgcucuu

SEQ ID NO: 180912 - RNA, 19 nt, Artificial Sequence
  Description of Artificial Sequence: Synthetic oligonucleotide
gcggacggcgagucgcaag

SEQ ID NO: 180913 - RNA, 19 nt, Artificial Sequence
  Description of Artificial Sequence: Synthetic oligonucleotide
guuuuacggacgagcuucu

SEQ ID NO: 180914 - RNA, 19 nt, Artificial Sequence
  Description of Artificial Sequence: Synthetic oligonucleotide
cauggaagucaucggugau

SEQ ID NO: 180915 - RNA, 19 nt, Artificial Sequence
  Description of Artificial Sequence: Synthetic oligonucleotide
ccagaguuuuacggacgag

SEQ ID NO: 180916 - RNA, 19 nt, Artificial Sequence
  Description of Artificial Sequence: Synthetic oligonucleotide
gcaagccgcguccgauuug

SEQ ID NO: 180917 - RNA, 19 nt, Artificial Sequence
  Description of Artificial Sequence: Synthetic oligonucleotide
cagcucuaacaaacccgaa

SEQ ID NO: 180918 - RNA, 19 nt, Artificial Sequence
  Description of Artificial Sequence: Synthetic oligonucleotide
cccaaucccaaacaguuuu

SEQ ID NO: 180919 - RNA, 19 nt, Artificial Sequence
  Description of Artificial Sequence: Synthetic oligonucleotide
cucuuaucugugacgcguu

SEQ ID NO: 180920 - RNA, 19 nt, Artificial Sequence
  Description of Artificial Sequence: Synthetic oligonucleotide
gcuccacacguagauggga

SEQ ID NO: 180921 - RNA, 19 nt, Artificial Sequence
  Description of Artificial Sequence: Synthetic oligonucleotide
ccgguucuucuucuaccug

SEQ ID NO: 180922 - RNA, 19 nt, Artificial Sequence
  Description of Artificial Sequence: Synthetic oligonucleotide
cccucauggugcgcggacg

SEQ ID NO: 180923 - RNA, 19 nt, Artificial Sequence
  Description of Artificial Sequence: Synthetic oligonucleotide
gucucacgggaaacauuaa

SEQ ID NO: 180924 - RNA, 19 nt, Artificial Sequence
  Description of Artificial Sequence: Synthetic oligonucleotide
ggagauuccgugagacgcu

SEQ ID NO: 180925 - RNA, 19 nt, Artificial Sequence
  Description of Artificial Sequence: Synthetic oligonucleotide
guguccaauucaagguaau

SEQ ID NO: 180926 - RNA, 19 nt, Artificial Sequence
  Description of Artificial Sequence: Synthetic oligonucleotide
ggcgaagcauucucucuau

SEQ ID NO: 180927 - RNA, 19 nt, Artificial Sequence
  Description of Artificial Sequence: Synthetic oligonucleotide
gaccgaaguguugcuguuu

SEQ ID NO: 180928 - RNA, 19 nt, Artificial Sequence
  Description of Artificial Sequence: Synthetic oligonucleotide
gcccguuugguaugcuugu

SEQ ID NO: 180929 - RNA, 19 nt, Artificial Sequence
  Description of Artificial Sequence: Synthetic oligonucleotide
ccgaaguguugcuguuuca

SEQ ID NO: 180930 - RNA, 19 nt, Artificial Sequence
  Description of Artificial Sequence: Synthetic oligonucleotide
cccguuugguaugcuugug

SEQ ID NO: 180931 - RNA, 19 nt, Artificial Sequence
  Description of Artificial Sequence: Synthetic oligonucleotide
caguugagcaggggcucaa

SEQ ID NO: 180932 - RNA, 19 nt, Artificial Sequence
  Description of Artificial Sequence: Synthetic oligonucleotide
ggggagcauccaaacaagu

SEQ ID NO: 180933 - RNA, 19 nt, Artificial Sequence
  Description of Artificial Sequence: Synthetic oligonucleotide
cagcaagauccaagacagu

SEQ ID NO: 180934 - RNA, 19 nt, Artificial Sequence
  Description of Artificial Sequence: Synthetic oligonucleotide
ggacgagcuucuuccuuau

SEQ ID NO: 180935 - RNA, 19 nt, Artificial Sequence
  Description of Artificial Sequence: Synthetic oligonucleotide
gugacgcguuuaacccauc

SEQ ID NO: 180936 - RNA, 19 nt, Artificial Sequence
  Description of Artificial Sequence: Synthetic oligonucleotide
cggacgagcuucuuccuua

SEQ ID NO: 180937 - RNA, 19 nt, Artificial Sequence
  Description of Artificial Sequence: Synthetic oligonucleotide
ggcgagucgcaaguccucu

SEQ ID NO: 180938 - RNA, 19 nt, Artificial Sequence
  Description of Artificial Sequence: Synthetic oligonucleotide
ggacggcgagucgcaaguc

SEQ ID NO: 180939 - RNA, 19 nt, Artificial Sequence
  Description of Artificial Sequence: Synthetic oligonucleotide
cgucgucagcucuaacaaa

SEQ ID NO: 180940 - RNA, 19 nt, Artificial Sequence
  Description of Artificial Sequence: Synthetic oligonucleotide
ccacaucgacuucgucguc

SEQ ID NO: 180941 - RNA, 19 nt, Artificial Sequence
  Description of Artificial Sequence: Synthetic oligonucleotide
cccgguuuuccuucguuuu

SEQ ID NO: 180942 - RNA, 19 nt, Artificial Sequence
  Description of Artificial Sequence: Synthetic oligonucleotide
ccucuugggucagcaauua

SEQ ID NO: 180943 - RNA, 19 nt, Artificial Sequence
  Description of Artificial Sequence: Synthetic oligonucleotide
ccuuccuaguguguuuccu

SEQ ID NO: 180944 - RNA, 19 nt, Artificial Sequence
  Description of Artificial Sequence: Synthetic oligonucleotide
gcggaugucugggauuaau

SEQ ID NO: 180945 - RNA, 19 nt, Artificial Sequence
  Description of Artificial Sequence: Synthetic oligonucleotide
cucggcgcacauagagcuu

SEQ ID NO: 180946 - RNA, 19 nt, Artificial Sequence
  Description of Artificial Sequence: Synthetic oligonucleotide
cggcgagucgcaaguccuc

SEQ ID NO: 180947 - RNA, 19 nt, Artificial Sequence
  Description of Artificial Sequence: Synthetic oligonucleotide
cuugcccguuugguaugcu

SEQ ID NO: 180948 - RNA, 19 nt, Artificial Sequence
  Description of Artificial Sequence: Synthetic oligonucleotide
gcgaagcauucucucuauu

SEQ ID NO: 180949 - RNA, 19 nt, Artificial Sequence
  Description of Artificial Sequence: Synthetic oligonucleotide
ggguaucguuguuguguuu

SEQ ID NO: 180950 - RNA, 19 nt, Artificial Sequence
  Description of Artificial Sequence: Synthetic oligonucleotide
cggacggcgagucgcaagu

SEQ ID NO: 180951 - RNA, 19 nt, Artificial Sequence
  Description of Artificial Sequence: Synthetic oligonucleotide
gcguccgauuugagugguc

SEQ ID NO: 180952 - RNA, 19 nt, Artificial Sequence
  Description of Artificial Sequence: Synthetic oligonucleotide
gcgagucgcaaguccucuu

SEQ ID NO: 180953 - RNA, 19 nt, Artificial Sequence
  Description of Artificial Sequence: Synthetic oligonucleotide
cccgagccucagguccuca

SEQ ID NO: 180954 - RNA, 19 nt, Artificial Sequence
  Description of Artificial Sequence: Synthetic oligonucleotide
cgcguccgauuugaguggu

SEQ ID NO: 180955 - RNA, 19 nt, Artificial Sequence
  Description of Artificial Sequence: Synthetic oligonucleotide
uuaauuaaucuuccuaccg

SEQ ID NO: 180956 - RNA, 19 nt, Artificial Sequence
  Description of Artificial Sequence: Synthetic oligonucleotide
ucguuaauaaaucacgucc

SEQ ID NO: 180957 - RNA, 19 nt, Artificial Sequence
  Description of Artificial Sequence: Synthetic oligonucleotide
aauacaguaacgguaacuc

SEQ ID NO: 180958 - RNA, 19 nt, Artificial Sequence
  Description of Artificial Sequence: Synthetic oligonucleotide
uucacaaccauuuauggug

SEQ ID NO: 180959 - RNA, 19 nt, Artificial Sequence
  Description of Artificial Sequence: Synthetic oligonucleotide
ugauacaaaucuaauagga

SEQ ID NO: 180960 - RNA, 19 nt, Artificial Sequence
  Description of Artificial Sequence: Synthetic oligonucleotide
cauugcgccacuaugaacc

SEQ ID NO: 180961 - RNA, 19 nt, Artificial Sequence
  Description of Artificial Sequence: Synthetic oligonucleotide
ugaugcaacacucuagagc

SEQ ID NO: 180962 - RNA, 19 nt, Artificial Sequence
  Description of Artificial Sequence: Synthetic oligonucleotide
uguggcaccauugagcucg

SEQ ID NO: 180963 - RNA, 19 nt, Artificial Sequence
  Description of Artificial Sequence: Synthetic oligonucleotide
uguaccuauacaaaggcuc

SEQ ID NO: 180964 - RNA, 19 nt, Artificial Sequence
  Description of Artificial Sequence: Synthetic oligonucleotide
aaagggacuagucuugaug

SEQ ID NO: 180965 - RNA, 19 nt, Artificial Sequence
  Description of Artificial Sequence: Synthetic oligonucleotide
ugcaacaucagugaugucc

SEQ ID NO: 180966 - RNA, 19 nt, Artificial Sequence
  Description of Artificial Sequence: Synthetic oligonucleotide
auccuauacauguagaugu

SEQ ID NO: 180967 - RNA, 19 nt, Artificial Sequence
  Description of Artificial Sequence: Synthetic oligonucleotide
aguuucgcaagcuuucugg

SEQ ID NO: 180968 - RNA, 19 nt, Artificial Sequence
  Description of Artificial Sequence: Synthetic oligonucleotide
cuaugaacccgauauaaac

SEQ ID NO: 180969 - RNA, 19 nt, Artificial Sequence
  Description of Artificial Sequence: Synthetic oligonucleotide
acccgauauaaacacgucc

SEQ ID NO: 180970 - RNA, 19 nt, Artificial Sequence
  Description of Artificial Sequence: Synthetic oligonucleotide
aaucgcugucgcuugacuc

SEQ ID NO: 180971 - RNA, 19 nt, Artificial Sequence
  Description of Artificial Sequence: Synthetic oligonucleotide
cacgaucacacgaagagcc

SEQ ID NO: 180972 - RNA, 19 nt, Artificial Sequence
  Description of Artificial Sequence: Synthetic oligonucleotide
cuuccuaccgguaaaggag

SEQ ID NO: 180973 - RNA, 19 nt, Artificial Sequence
  Description of Artificial Sequence: Synthetic oligonucleotide
aaauaugacgcugaaucca

SEQ ID NO: 180974 - RNA, 19 nt, Artificial Sequence
  Description of Artificial Sequence: Synthetic oligonucleotide
uggugcaucuuucaauggg

SEQ ID NO: 180975 - RNA, 19 nt, Artificial Sequence
  Description of Artificial Sequence: Synthetic oligonucleotide
aguaacgaagaauucuuug

SEQ ID NO: 180976 - RNA, 19 nt, Artificial Sequence
  Description of Artificial Sequence: Synthetic oligonucleotide
aaaccgaugaggcccagug

SEQ ID NO: 180977 - RNA, 19 nt, Artificial Sequence
  Description of Artificial Sequence: Synthetic oligonucleotide
caaccauuuauggugaugg

SEQ ID NO: 180978 - RNA, 19 nt, Artificial Sequence
  Description of Artificial Sequence: Synthetic oligonucleotide
aauccuauacauguagaug

SEQ ID NO: 180979 - RNA, 19 nt, Artificial Sequence
  Description of Artificial Sequence: Synthetic oligonucleotide
acacucuagagcaaguugc

SEQ ID NO: 180980 - RNA, 19 nt, Artificial Sequence
  Description of Artificial Sequence: Synthetic oligonucleotide
ucuugaugcaacacucuag

SEQ ID NO: 180981 - RNA, 19 nt, Artificial Sequence
  Description of Artificial Sequence: Synthetic oligonucleotide
ugcacugaacgcuaaaugu

SEQ ID NO: 180982 - RNA, 19 nt, Artificial Sequence
  Description of Artificial Sequence: Synthetic oligonucleotide
uauuaauagucagagcucu

SEQ ID NO: 180983 - RNA, 19 nt, Artificial Sequence
  Description of Artificial Sequence: Synthetic oligonucleotide
acacgaagagccuugaacu

SEQ ID NO: 180984 - RNA, 19 nt, Artificial Sequence
  Description of Artificial Sequence: Synthetic oligonucleotide
ucccgaugcaaccucacgg

SEQ ID NO: 180985 - RNA, 19 nt, Artificial Sequence
  Description of Artificial Sequence: Synthetic oligonucleotide
uguauguggcaccauugag

SEQ ID NO: 180986 - RNA, 19 nt, Artificial Sequence
  Description of Artificial Sequence: Synthetic oligonucleotide
ugucgcuugacucugugcu

SEQ ID NO: 180987 - RNA, 19 nt, Artificial Sequence
  Description of Artificial Sequence: Synthetic oligonucleotide
aagggccauuucuuuaucg

SEQ ID NO: 180988 - RNA, 19 nt, Artificial Sequence
  Description of Artificial Sequence: Synthetic oligonucleotide
cucacgaucacacgaagag

SEQ ID NO: 180989 - RNA, 19 nt, Artificial Sequence
  Description of Artificial Sequence: Synthetic oligonucleotide
acucgugcacaucaagagc

SEQ ID NO: 180990 - RNA, 19 nt, Artificial Sequence
  Description of Artificial Sequence: Synthetic oligonucleotide
gaugcuuguucacuguacc

SEQ ID NO: 180991 - RNA, 19 nt, Artificial Sequence
  Description of Artificial Sequence: Synthetic oligonucleotide
ggaauguaccuauacaaag

SEQ ID NO: 180992 - RNA, 19 nt, Artificial Sequence
  Description of Artificial Sequence: Synthetic oligonucleotide
aacuuaggggaacucgcag

SEQ ID NO: 180993 - RNA, 19 nt, Artificial Sequence
  Description of Artificial Sequence: Synthetic oligonucleotide
  modified_base (7)..(7): a, c, u, g, unknown or other
uuguuunuuuguuaaccaa

SEQ ID NO: 180994 - RNA, 19 nt, Artificial Sequence
  Description of Artificial Sequence: Synthetic oligonucleotide
gacucgugcacaucaagag

SEQ ID NO: 180995 - RNA, 19 nt, Artificial Sequence
  Description of Artificial Sequence: Synthetic oligonucleotide
ugaacccgauauaaacacg

SEQ ID NO: 180996 - RNA, 19 nt, Artificial Sequence
  Description of Artificial Sequence: Synthetic oligonucleotide
ucuaccagaccaccucugg

SEQ ID NO: 180997 - RNA, 19 nt, Artificial Sequence
  Description of Artificial Sequence: Synthetic oligonucleotide
uuccuaccgguaaaggagg

SEQ ID NO: 180998 - RNA, 19 nt, Artificial Sequence
  Description of Artificial Sequence: Synthetic oligonucleotide
uccuucuuaguucaucugu

SEQ ID NO: 180999 - RNA, 19 nt, Artificial Sequence
  Description of Artificial Sequence: Synthetic oligonucleotide
aacaccuuuucauggauuu

SEQ ID NO: 181000 - RNA, 19 nt, Artificial Sequence
  Description of Artificial Sequence: Synthetic oligonucleotide
aacgguaacucacacuaaa

SEQ ID NO: 181001 - RNA, 19 nt, Artificial Sequence
  Description of Artificial Sequence: Synthetic oligonucleotide
uuugcacgcccagagaccg

SEQ ID NO: 181002 - RNA, 19 nt, Artificial Sequence
  Description of Artificial Sequence: Synthetic oligonucleotide
aguuugcgugcauugcgcc

SEQ ID NO: 181003 - RNA, 19 nt, Artificial Sequence
  Description of Artificial Sequence: Synthetic oligonucleotide
ucuuccuaccgguaaagga

SEQ ID NO: 181004 - RNA, 19 nt, Artificial Sequence
  Description of Artificial Sequence: Synthetic oligonucleotide
uugugagucaccgggaugc

SEQ ID NO: 181005 - RNA, 19 nt, Artificial Sequence
  Description of Artificial Sequence: Synthetic oligonucleotide
agcuucaucgguucacaac

SEQ ID NO: 181006 - RNA, 19 nt, Artificial Sequence
  Description of Artificial Sequence: Synthetic oligonucleotide
gauggaacccucgucuugg

SEQ ID NO: 181007 - RNA, 19 nt, Artificial Sequence
  Description of Artificial Sequence: Synthetic oligonucleotide
aaguuggucguuaauaaau

SEQ ID NO: 181008 - RNA, 19 nt, Artificial Sequence
  Description of Artificial Sequence: Synthetic oligonucleotide
uaaacacguccacaaauuc

SEQ ID NO: 181009 - RNA, 19 nt, Artificial Sequence
  Description of Artificial Sequence: Synthetic oligonucleotide
gaacccucgucuugggucg

SEQ ID NO: 181010 - RNA, 19 nt, Artificial Sequence
  Description of Artificial Sequence: Synthetic oligonucleotide
guuccgccgauacagauug

SEQ ID NO: 181011 - RNA, 19 nt, Artificial Sequence
  Description of Artificial Sequence: Synthetic oligonucleotide
gggucauaaaauaugacgc

SEQ ID NO: 181012 - RNA, 19 nt, Artificial Sequence
  Description of Artificial Sequence: Synthetic oligonucleotide
auugcuugcuggucgauga

SEQ ID NO: 181013 - RNA, 19 nt, Artificial Sequence
  Description of Artificial Sequence: Synthetic oligonucleotide
gcuucaucgguucacaacc

SEQ ID NO: 181014 - RNA, 19 nt, Artificial Sequence
  Description of Artificial Sequence: Synthetic oligonucleotide
gguaacucacacuaaaaca

SEQ ID NO: 181015 - RNA, 19 nt, Artificial Sequence
  Description of Artificial Sequence: Synthetic oligonucleotide
agaccaaagggacuagucu

SEQ ID NO: 181016 - RNA, 19 nt, Artificial Sequence
  Description of Artificial Sequence: Synthetic oligonucleotide
ucaucuaccagaccaccuc

SEQ ID NO: 181017 - RNA, 19 nt, Artificial Sequence
  Description of Artificial Sequence: Synthetic oligonucleotide
ucaauggguuaucuugucu

SEQ ID NO: 181018 - RNA, 19 nt, Artificial Sequence
  Description of Artificial Sequence: Synthetic oligonucleotide
guuucgcaagcuuucuggg

SEQ ID NO: 181019 - RNA, 19 nt, Artificial Sequence
  Description of Artificial Sequence: Synthetic oligonucleotide
auugcgccacuaugaaccc

SEQ ID NO: 181020 - RNA, 19 nt, Artificial Sequence
  Description of Artificial Sequence: Synthetic oligonucleotide
uucgcaagcuuucugggau

SEQ ID NO: 181021 - RNA, 19 nt, Artificial Sequence
  Description of Artificial Sequence: Synthetic oligonucleotide
ucgaacuugcaacucucug

SEQ ID NO: 181022 - RNA, 19 nt, Artificial Sequence
  Description of Artificial Sequence: Synthetic oligonucleotide
ucacggaucuguuccacgc

SEQ ID NO: 181023 - RNA, 19 nt, Artificial Sequence
  Description of Artificial Sequence: Synthetic oligonucleotide
ugaacgcuaaauguccacc

SEQ ID NO: 181024 - RNA, 19 nt, Artificial Sequence
  Description of Artificial Sequence: Synthetic oligonucleotide
auaaaauagcugaggaucu

SEQ ID NO: 181025 - RNA, 19 nt, Artificial Sequence
  Description of Artificial Sequence: Synthetic oligonucleotide
guuggggugcucucgauug

SEQ ID NO: 181026 - RNA, 19 nt, Artificial Sequence
  Description of Artificial Sequence: Synthetic oligonucleotide
guauguggcaccauugagc

SEQ ID NO: 181027 - RNA, 19 nt, Artificial Sequence
  Description of Artificial Sequence: Synthetic oligonucleotide
acaaauacaguaacgguaa

SEQ ID NO: 181028 - RNA, 19 nt, Artificial Sequence
  Description of Artificial Sequence: Synthetic oligonucleotide
cacgguacagucucugccg

SEQ ID NO: 181029 - RNA, 19 nt, Artificial Sequence
  Description of Artificial Sequence: Synthetic oligonucleotide
ugcaacacucuagagcaag

SEQ ID NO: 181030 - RNA, 19 nt, Artificial Sequence
  Description of Artificial Sequence: Synthetic oligonucleotide
aguuggucguuaauaaauc

SEQ ID NO: 181031 - RNA, 19 nt, Artificial Sequence
  Description of Artificial Sequence: Synthetic oligonucleotide
auaaggaaaugcaacauua

SEQ ID NO: 181032 - RNA, 19 nt, Artificial Sequence
  Description of Artificial Sequence: Synthetic oligonucleotide
uguaacuagcugauacaaa

SEQ ID NO: 181033 - RNA, 19 nt, Artificial Sequence
  Description of Artificial Sequence: Synthetic oligonucleotide
uuaugcucauucagauugc

SEQ ID NO: 181034 - RNA, 19 nt, Artificial Sequence
  Description of Artificial Sequence: Synthetic oligonucleotide
gaugcaaccucacggaucu

SEQ ID NO: 181035 - RNA, 19 nt, Artificial Sequence
  Description of Artificial Sequence: Synthetic oligonucleotide
ucuagugaugcuuguucac

SEQ ID NO: 181036 - RNA, 19 nt, Artificial Sequence
  Description of Artificial Sequence: Synthetic oligonucleotide
ggauuuguuaaaaucaguc

SEQ ID NO: 181037 - RNA, 19 nt, Artificial Sequence
  Description of Artificial Sequence: Synthetic oligonucleotide
aguaacgguaacucacacu

SEQ ID NO: 181038 - RNA, 19 nt, Artificial Sequence
  Description of Artificial Sequence: Synthetic oligonucleotide
uaucgaacuugcaacucuc

SEQ ID NO: 181039 - RNA, 19 nt, Artificial Sequence
  Description of Artificial Sequence: Synthetic oligonucleotide
ucucacgaucacacgaaga

SEQ ID NO: 181040 - RNA, 19 nt, Artificial Sequence
  Description of Artificial Sequence: Synthetic oligonucleotide
aauaugacgcugaauccaa

SEQ ID NO: 181041 - RNA, 19 nt, Artificial Sequence
  Description of Artificial Sequence: Synthetic oligonucleotide
uucucacgaucacacgaag

SEQ ID NO: 181042 - RNA, 19 nt, Artificial Sequence
  Description of Artificial Sequence: Synthetic oligonucleotide
uaggggaacucgcaggagu

SEQ ID NO: 181043 - RNA, 19 nt, Artificial Sequence
  Description of Artificial Sequence: Synthetic oligonucleotide
ugcgccacuaugaacccga

SEQ ID NO: 181044 - RNA, 19 nt, Artificial Sequence
  Description of Artificial Sequence: Synthetic oligonucleotide
ggaguuugcgugcauugcg

SEQ ID NO: 181045 - RNA, 19 nt, Artificial Sequence
  Description of Artificial Sequence: Synthetic oligonucleotide
caaauucuacagcucacuc

SEQ ID NO: 181046 - RNA, 19 nt, Artificial Sequence
  Description of Artificial Sequence: Synthetic oligonucleotide
guaacgaagaauucuuugu

SEQ ID NO: 181047 - RNA, 19 nt, Artificial Sequence
  Description of Artificial Sequence: Synthetic oligonucleotide
uuguccccguguuuugugg

SEQ ID NO: 181048 - RNA, 19 nt, Artificial Sequence
  Description of Artificial Sequence: Synthetic oligonucleotide
uguccaagacuuuccacuc

SEQ ID NO: 181049 - RNA, 19 nt, Artificial Sequence
  Description of Artificial Sequence: Synthetic oligonucleotide
aaauucuguccaaucgcug

SEQ ID NO: 181050 - RNA, 19 nt, Artificial Sequence
  Description of Artificial Sequence: Synthetic oligonucleotide
gucuuaauuaaucuuccua

SEQ ID NO: 181051 - RNA, 19 nt, Artificial Sequence
  Description of Artificial Sequence: Synthetic oligonucleotide
uguccccguguuuuguggg

SEQ ID NO: 181052 - RNA, 19 nt, Artificial Sequence
  Description of Artificial Sequence: Synthetic oligonucleotide
acgcucugaacccgugugc

SEQ ID NO: 181053 - RNA, 19 nt, Artificial Sequence
  Description of Artificial Sequence: Synthetic oligonucleotide
aucgcugucgcuugacucu

SEQ ID NO: 181054 - RNA, 19 nt, Artificial Sequence
  Description of Artificial Sequence: Synthetic oligonucleotide
acaaauucuacagcucacu

SEQ ID NO: 181055 - RNA, 19 nt, Artificial Sequence
  Description of Artificial Sequence: Synthetic oligonucleotide
cacaaauucuacagcucac

SEQ ID NO: 181056 - RNA, 19 nt, Artificial Sequence
  Description of Artificial Sequence: Synthetic oligonucleotide
acuucugauaguccauuau

SEQ ID NO: 181057 - RNA, 19 nt, Artificial Sequence
  Description of Artificial Sequence: Synthetic oligonucleotide
guguagacccuuugcacgc

SEQ ID NO: 181058 - RNA, 19 nt, Artificial Sequence
  Description of Artificial Sequence: Synthetic oligonucleotide
ugcauugcgccacuaugaa

SEQ ID NO: 181059 - RNA, 19 nt, Artificial Sequence
  Description of Artificial Sequence: Synthetic oligonucleotide
acaucuaauagcacaucug

SEQ ID NO: 181060 - RNA, 19 nt, Artificial Sequence
  Description of Artificial Sequence: Synthetic oligonucleotide
cauguaacuagcugauaca

SEQ ID NO: 181061 - RNA, 19 nt, Artificial Sequence
  Description of Artificial Sequence: Synthetic oligonucleotide
gaauccaaaggccuuggcu

SEQ ID NO: 181062 - RNA, 19 nt, Artificial Sequence
  Description of Artificial Sequence: Synthetic oligonucleotide
cugaaguaacgaagaauuc

SEQ ID NO: 181063 - RNA, 19 nt, Artificial Sequence
  Description of Artificial Sequence: Synthetic oligonucleotide
agggcggauaccuucacaa

SEQ ID NO: 181064 - RNA, 19 nt, Artificial Sequence
  Description of Artificial Sequence: Synthetic oligonucleotide
agggccauuucuuuaucga

SEQ ID NO: 181065 - RNA, 19 nt, Artificial Sequence
  Description of Artificial Sequence: Synthetic oligonucleotide
uuaaccaacuuugccugcu

SEQ ID NO: 181066 - RNA, 19 nt, Artificial Sequence
  Description of Artificial Sequence: Synthetic oligonucleotide
gagacauaaggaaaugcaa

SEQ ID NO: 181067 - RNA, 19 nt, Artificial Sequence
  Description of Artificial Sequence: Synthetic oligonucleotide
uguaaguaggggucauaaa

SEQ ID NO: 181068 - RNA, 19 nt, Artificial Sequence
  Description of Artificial Sequence: Synthetic oligonucleotide
ucuaucccauccuguaagu

SEQ ID NO: 181069 - RNA, 19 nt, Artificial Sequence
  Description of Artificial Sequence: Synthetic oligonucleotide
cugcacugaacgcuaaaug

SEQ ID NO: 181070 - RNA, 19 nt, Artificial Sequence
  Description of Artificial Sequence: Synthetic oligonucleotide
uccuauacauguagauguc

SEQ ID NO: 181071 - RNA, 19 nt, Artificial Sequence
  Description of Artificial Sequence: Synthetic oligonucleotide
ugcuggucgaugacugacc

SEQ ID NO: 181072 - RNA, 19 nt, Artificial Sequence
  Description of Artificial Sequence: Synthetic oligonucleotide
auguaacuagcugauacaa

SEQ ID NO: 181073 - RNA, 19 nt, Artificial Sequence
  Description of Artificial Sequence: Synthetic oligonucleotide
uccgccgauacagauugag

SEQ ID NO: 181074 - RNA, 19 nt, Artificial Sequence
  Description of Artificial Sequence: Synthetic oligonucleotide
aacgcuaaauguccaccuu

SEQ ID NO: 181075 - RNA, 19 nt, Artificial Sequence
  Description of Artificial Sequence: Synthetic oligonucleotide
caguauucaaucuuuugua

SEQ ID NO: 181076 - RNA, 19 nt, Artificial Sequence
  Description of Artificial Sequence: Synthetic oligonucleotide
uuugcgugcauugcgccac

SEQ ID NO: 181077 - RNA, 19 nt, Artificial Sequence
  Description of Artificial Sequence: Synthetic oligonucleotide
gaugagauuuggugcaucu

SEQ ID NO: 181078 - RNA, 19 nt, Artificial Sequence
  Description of Artificial Sequence: Synthetic oligonucleotide
aaaagggcgcccacccggg

SEQ ID NO: 181079 - RNA, 19 nt, Artificial Sequence
  Description of Artificial Sequence: Synthetic oligonucleotide
gaugaauugcuugcugguc

SEQ ID NO: 181080 - RNA, 19 nt, Artificial Sequence
  Description of Artificial Sequence: Synthetic oligonucleotide
gaucacacgaagagccuug

SEQ ID NO: 181081 - RNA, 19 nt, Artificial Sequence
  Description of Artificial Sequence: Synthetic oligonucleotide
gaguuugcgugcauugcgc

SEQ ID NO: 181082 - RNA, 19 nt, Artificial Sequence
  Description of Artificial Sequence: Synthetic oligonucleotide
aacucgcaggaguuugcgu

SEQ ID NO: 181083 - RNA, 19 nt, Artificial Sequence
  Description of Artificial Sequence: Synthetic oligonucleotide
gguacagucucugccgucg

SEQ ID NO: 181084 - RNA, 19 nt, Artificial Sequence
  Description of Artificial Sequence: Synthetic oligonucleotide
auuguccccguguuuugug

SEQ ID NO: 181085 - RNA, 19 nt, Artificial Sequence
  Description of Artificial Sequence: Synthetic oligonucleotide
agggugauagugugguaca

SEQ ID NO: 181086 - RNA, 19 nt, Artificial Sequence
  Description of Artificial Sequence: Synthetic oligonucleotide
cuaccagaccaccucuggc

SEQ ID NO: 181087 - RNA, 19 nt, Artificial Sequence
  Description of Artificial Sequence: Synthetic oligonucleotide
ucaucgguucacaaccauu

SEQ ID NO: 181088 - RNA, 19 nt, Artificial Sequence
  Description of Artificial Sequence: Synthetic oligonucleotide
auaucacgugaagaaaaga

SEQ ID NO: 181089 - RNA, 19 nt, Artificial Sequence
  Description of Artificial Sequence: Synthetic oligonucleotide
gaccugugauugcucggcg

SEQ ID NO: 181090 - RNA, 19 nt, Artificial Sequence
  Description of Artificial Sequence: Synthetic oligonucleotide
uguguuccgccgauacaga

SEQ ID NO: 181091 - RNA, 19 nt, Artificial Sequence
  Description of Artificial Sequence: Synthetic oligonucleotide
ugcaaccucacggaucugu

SEQ ID NO: 181092 - RNA, 19 nt, Artificial Sequence
  Description of Artificial Sequence: Synthetic oligonucleotide
ucaaugggcccugagcaaa

SEQ ID NO: 181093 - RNA, 19 nt, Artificial Sequence
  Description of Artificial Sequence: Synthetic oligonucleotide
uugcucaggaccugccgug

SEQ ID NO: 181094 - RNA, 19 nt, Artificial Sequence
  Description of Artificial Sequence: Synthetic oligonucleotide
cugaacgcuaaauguccac

SEQ ID NO: 181095 - RNA, 19 nt, Artificial Sequence
  Description of Artificial Sequence: Synthetic oligonucleotide
cucuagugaugcuuguuca

SEQ ID NO: 181096 - RNA, 19 nt, Artificial Sequence
  Description of Artificial Sequence: Synthetic oligonucleotide
uucaucgguucacaaccau

SEQ ID NO: 181097 - RNA, 19 nt, Artificial Sequence
  Description of Artificial Sequence: Synthetic oligonucleotide
acucaauggguuaucuugu

SEQ ID NO: 181098 - RNA, 19 nt, Artificial Sequence
  Description of Artificial Sequence: Synthetic oligonucleotide
cucggcggaucucaguggc

SEQ ID NO: 181099 - RNA, 19 nt, Artificial Sequence
  Description of Artificial Sequence: Synthetic oligonucleotide
uucaaugggcccugagcaa

SEQ ID NO: 181100 - RNA, 19 nt, Artificial Sequence
  Description of Artificial Sequence: Synthetic oligonucleotide
gaacccgauauaaacacgu

SEQ ID NO: 181101 - RNA, 19 nt, Artificial Sequence
  Description of Artificial Sequence: Synthetic oligonucleotide
cuuuaucgaacuugcaacu

SEQ ID NO: 181102 - RNA, 19 nt, Artificial Sequence
  Description of Artificial Sequence: Synthetic oligonucleotide
acaaccauuuauggugaug

SEQ ID NO: 181103 - RNA, 19 nt, Artificial Sequence
  Description of Artificial Sequence: Synthetic oligonucleotide
gcguccacggaaaagggcg

SEQ ID NO: 181104 - RNA, 19 nt, Artificial Sequence
  Description of Artificial Sequence: Synthetic oligonucleotide
uccuaccgguaaaggaggc

SEQ ID NO: 181105 - RNA, 19 nt, Artificial Sequence
  Description of Artificial Sequence: Synthetic oligonucleotide
auagaacauguaacuagcu

SEQ ID NO: 181106 - RNA, 19 nt, Artificial Sequence
  Description of Artificial Sequence: Synthetic oligonucleotide
guugugagucaccgggaug

SEQ ID NO: 181107 - RNA, 19 nt, Artificial Sequence
  Description of Artificial Sequence: Synthetic oligonucleotide
guaccuauacaaaggcuca

SEQ ID NO: 181108 - RNA, 19 nt, Artificial Sequence
  Description of Artificial Sequence: Synthetic oligonucleotide
acagcaaucccgagcucac

SEQ ID NO: 181109 - RNA, 19 nt, Artificial Sequence
  Description of Artificial Sequence: Synthetic oligonucleotide
uguuccgccgauacagauu

SEQ ID NO: 181110 - RNA, 19 nt, Artificial Sequence
  Description of Artificial Sequence: Synthetic oligonucleotide
cuauugcucguuggggugc

SEQ ID NO: 181111 - RNA, 19 nt, Artificial Sequence
  Description of Artificial Sequence: Synthetic oligonucleotide
ugggaugcgaccugugauu

SEQ ID NO: 181112 - RNA, 19 nt, Artificial Sequence
  Description of Artificial Sequence: Synthetic oligonucleotide
gacuuuccacucaauaaaa

SEQ ID NO: 181113 - RNA, 19 nt, Artificial Sequence
  Description of Artificial Sequence: Synthetic oligonucleotide
caaauucuguccaaucgcu

SEQ ID NO: 181114 - RNA, 19 nt, Artificial Sequence
  Description of Artificial Sequence: Synthetic oligonucleotide
aacugcacugaacgcuaaa

SEQ ID NO: 181115 - RNA, 19 nt, Artificial Sequence
  Description of Artificial Sequence: Synthetic oligonucleotide
ggaacccucgucuuggguc

SEQ ID NO: 181116 - RNA, 19 nt, Artificial Sequence
  Description of Artificial Sequence: Synthetic oligonucleotide
cacgcucugaacccgugug

SEQ ID NO: 181117 - RNA, 19 nt, Artificial Sequence
  Description of Artificial Sequence: Synthetic oligonucleotide
acgcuaaauguccaccuuu

SEQ ID NO: 181118 - RNA, 19 nt, Artificial Sequence
  Description of Artificial Sequence: Synthetic oligonucleotide
uaacgguaacucacacuaa

SEQ ID NO: 181119 - RNA, 19 nt, Artificial Sequence
  Description of Artificial Sequence: Synthetic oligonucleotide
agacucgugcacaucaaga

SEQ ID NO: 181120 - RNA, 19 nt, Artificial Sequence
  Description of Artificial Sequence: Synthetic oligonucleotide
cacuaugaacccgauauaa

SEQ ID NO: 181121 - RNA, 19 nt, Artificial Sequence
  Description of Artificial Sequence: Synthetic oligonucleotide
guucacaaccauuuauggu

SEQ ID NO: 181122 - RNA, 19 nt, Artificial Sequence
  Description of Artificial Sequence: Synthetic oligonucleotide
aaguaacgaagaauucuuu

SEQ ID NO: 181123 - RNA, 19 nt, Artificial Sequence
  Description of Artificial Sequence: Synthetic oligonucleotide
uaaccaacuuugccugcuc

SEQ ID NO: 181124 - RNA, 19 nt, Artificial Sequence
  Description of Artificial Sequence: Synthetic oligonucleotide
cccgauauaaacacgucca

SEQ ID NO: 181125 - RNA, 19 nt, Artificial Sequence
  Description of Artificial Sequence: Synthetic oligonucleotide
caguaacgguaacucacac

SEQ ID NO: 181126 - RNA, 19 nt, Artificial Sequence
  Description of Artificial Sequence: Synthetic oligonucleotide
acuaugaacccgauauaaa

SEQ ID NO: 181127 - RNA, 19 nt, Artificial Sequence
  Description of Artificial Sequence: Synthetic oligonucleotide
auaccuguauguggcacca

SEQ ID NO: 181128 - RNA, 19 nt, Artificial Sequence
  Description of Artificial Sequence: Synthetic oligonucleotide
aaggcucaaaauaggccau

SEQ ID NO: 181129 - RNA, 19 nt, Artificial Sequence
  Description of Artificial Sequence: Synthetic oligonucleotide
cugucgcuugacucugugc

SEQ ID NO: 181130 - RNA, 19 nt, Artificial Sequence
  Description of Artificial Sequence: Synthetic oligonucleotide
uuaggggaacucgcaggag

SEQ ID NO: 181131 - RNA, 19 nt, Artificial Sequence
  Description of Artificial Sequence: Synthetic oligonucleotide
auggaacccucgucuuggg

SEQ ID NO: 181132 - RNA, 19 nt, Artificial Sequence
  Description of Artificial Sequence: Synthetic oligonucleotide
gaacuuaggggaacucgca

SEQ ID NO: 181133 - RNA, 19 nt, Artificial Sequence
  Description of Artificial Sequence: Synthetic oligonucleotide
ucgcaagcuuucugggaug

SEQ ID NO: 181134 - RNA, 19 nt, Artificial Sequence
  Description of Artificial Sequence: Synthetic oligonucleotide
auguaccuauacaaaggcu

SEQ ID NO: 181135 - RNA, 19 nt, Artificial Sequence
  Description of Artificial Sequence: Synthetic oligonucleotide
ugugauugcucggcggauc

SEQ ID NO: 181136 - RNA, 19 nt, Artificial Sequence
  Description of Artificial Sequence: Synthetic oligonucleotide
ccgcuaagaacuuagggga

SEQ ID NO: 181137 - RNA, 19 nt, Artificial Sequence
  Description of Artificial Sequence: Synthetic oligonucleotide
uagacccuuugcacgccca

SEQ ID NO: 181138 - RNA, 19 nt, Artificial Sequence
  Description of Artificial Sequence: Synthetic oligonucleotide
gcuauugcucguuggggug

SEQ ID NO: 181139 - RNA, 19 nt, Artificial Sequence
  Description of Artificial Sequence: Synthetic oligonucleotide
agaugggauguugcaaaca

SEQ ID NO: 181140 - RNA, 19 nt, Artificial Sequence
  Description of Artificial Sequence: Synthetic oligonucleotide
gggacugauaaaggaaagc

SEQ ID NO: 181141 - RNA, 19 nt, Artificial Sequence
  Description of Artificial Sequence: Synthetic oligonucleotide
ggaccugccgugcccaagg

SEQ ID NO: 181142 - RNA, 19 nt, Artificial Sequence
  Description of Artificial Sequence: Synthetic oligonucleotide
uccaaucgcugucgcuuga

SEQ ID NO: 181143 - RNA, 19 nt, Artificial Sequence
  Description of Artificial Sequence: Synthetic oligonucleotide
auucucacgaucacacgaa

SEQ ID NO: 181144 - RNA, 19 nt, Artificial Sequence
  Description of Artificial Sequence: Synthetic oligonucleotide
ccugccgugcccaagggac

SEQ ID NO: 181145 - RNA, 19 nt, Artificial Sequence
  Description of Artificial Sequence: Synthetic oligonucleotide
uuccacgguacagucucug

SEQ ID NO: 181146 - RNA, 19 nt, Artificial Sequence
  Description of Artificial Sequence: Synthetic oligonucleotide
guagacccuuugcacgccc

SEQ ID NO: 181147 - RNA, 19 nt, Artificial Sequence
  Description of Artificial Sequence: Synthetic oligonucleotide
uggaacccucgucuugggu

SEQ ID NO: 181148 - RNA, 19 nt, Artificial Sequence
  Description of Artificial Sequence: Synthetic oligonucleotide
uguagacccuuugcacgcc

SEQ ID NO: 181149 - RNA, 19 nt, Artificial Sequence
  Description of Artificial Sequence: Synthetic oligonucleotide
gcugaaguaacgaagaauu

SEQ ID NO: 181150 - RNA, 19 nt, Artificial Sequence
  Description of Artificial Sequence: Synthetic oligonucleotide
acgguacagucucugccgu

SEQ ID NO: 181151 - RNA, 19 nt, Artificial Sequence
  Description of Artificial Sequence: Synthetic oligonucleotide
ugaccacggagcugaagua

SEQ ID NO: 181152 - RNA, 19 nt, Artificial Sequence
  Description of Artificial Sequence: Synthetic oligonucleotide
guccaaucgcugucgcuug

SEQ ID NO: 181153 - RNA, 19 nt, Artificial Sequence
  Description of Artificial Sequence: Synthetic oligonucleotide
caguuucgcaagcuuucug

SEQ ID NO: 181154 - RNA, 19 nt, Artificial Sequence
  Description of Artificial Sequence: Synthetic oligonucleotide
cuagagcaaguugcucagg

SEQ ID NO: 181155 - RNA, 19 nt, Artificial Sequence
  Description of Artificial Sequence: Synthetic oligonucleotide
gugcauugcgccacuauga

SEQ ID NO: 181156 - RNA, 19 nt, Artificial Sequence
  Description of Artificial Sequence: Synthetic oligonucleotide
gaugcgaccugugauugcu

SEQ ID NO: 181157 - RNA, 19 nt, Artificial Sequence
  Description of Artificial Sequence: Synthetic oligonucleotide
guuugcgugcauugcgcca

SEQ ID NO: 181158 - RNA, 19 nt, Artificial Sequence
  Description of Artificial Sequence: Synthetic oligonucleotide
ugaguagacugugcaucac

SEQ ID NO: 181159 - RNA, 19 nt, Artificial Sequence
  Description of Artificial Sequence: Synthetic oligonucleotide
gagucaccgggaugccucc

SEQ ID NO: 181160 - RNA, 19 nt, Artificial Sequence
  Description of Artificial Sequence: Synthetic oligonucleotide
cuguaaguaggggucauaa

SEQ ID NO: 181161 - RNA, 19 nt, Artificial Sequence
  Description of Artificial Sequence: Synthetic oligonucleotide
ucacacgaagagccuugaa

SEQ ID NO: 181162 - RNA, 19 nt, Artificial Sequence
  Description of Artificial Sequence: Synthetic oligonucleotide
ugagggcggauaccuucac

SEQ ID NO: 181163 - RNA, 19 nt, Artificial Sequence
  Description of Artificial Sequence: Synthetic oligonucleotide
gaccugccgugcccaaggg

SEQ ID NO: 181164 - RNA, 19 nt, Artificial Sequence
  Description of Artificial Sequence: Synthetic oligonucleotide
aacccucgucuugggucgc

SEQ ID NO: 181165 - RNA, 19 nt, Artificial Sequence
  Description of Artificial Sequence: Synthetic oligonucleotide
uaccuauacaaaggcucaa

SEQ ID NO: 181166 - RNA, 19 nt, Artificial Sequence
  Description of Artificial Sequence: Synthetic oligonucleotide
uugcgccacuaugaacccg

SEQ ID NO: 181167 - RNA, 19 nt, Artificial Sequence
  Description of Artificial Sequence: Synthetic oligonucleotide
ugcacgcccagagaccgcu

SEQ ID NO: 181168 - RNA, 19 nt, Artificial Sequence
  Description of Artificial Sequence: Synthetic oligonucleotide
cucuugaugcaacacucua

SEQ ID NO: 181169 - RNA, 19 nt, Artificial Sequence
  Description of Artificial Sequence: Synthetic oligonucleotide
ggucuugcaggguguagac

SEQ ID NO: 181170 - RNA, 19 nt, Artificial Sequence
  Description of Artificial Sequence: Synthetic oligonucleotide
ugugagucaccgggaugcc

SEQ ID NO: 181171 - RNA, 19 nt, Artificial Sequence
  Description of Artificial Sequence: Synthetic oligonucleotide
uggagaccaaagggacuag

SEQ ID NO: 181172 - RNA, 19 nt, Artificial Sequence
  Description of Artificial Sequence: Synthetic oligonucleotide
ggaaagcucuauuuauucu

SEQ ID NO: 181173 - RNA, 19 nt, Artificial Sequence
  Description of Artificial Sequence: Synthetic oligonucleotide
ccacgguacagucucugcc

SEQ ID NO: 181174 - RNA, 19 nt, Artificial Sequence
  Description of Artificial Sequence: Synthetic oligonucleotide
aaagggcgcccacccggga

SEQ ID NO: 181175 - RNA, 19 nt, Artificial Sequence
  Description of Artificial Sequence: Synthetic oligonucleotide
gaagcccuccuggagccac

SEQ ID NO: 181176 - RNA, 19 nt, Artificial Sequence
  Description of Artificial Sequence: Synthetic oligonucleotide
cgaugacugaccacggagc

SEQ ID NO: 181177 - RNA, 19 nt, Artificial Sequence
  Description of Artificial Sequence: Synthetic oligonucleotide
guccccguguuuugugggc

SEQ ID NO: 181178 - RNA, 19 nt, Artificial Sequence
  Description of Artificial Sequence: Synthetic oligonucleotide
caucuucaguauucaaucu

SEQ ID NO: 181179 - RNA, 19 nt, Artificial Sequence
  Description of Artificial Sequence: Synthetic oligonucleotide
ccauguguuccgccgauac

SEQ ID NO: 181180 - RNA, 19 nt, Artificial Sequence
  Description of Artificial Sequence: Synthetic oligonucleotide
uauugcucguuggggugcu

SEQ ID NO: 181181 - RNA, 19 nt, Artificial Sequence
  Description of Artificial Sequence: Synthetic oligonucleotide
guucacaaggaaugcuccu

SEQ ID NO: 181182 - RNA, 19 nt, Artificial Sequence
  Description of Artificial Sequence: Synthetic oligonucleotide
acgguaacucacacuaaaa

SEQ ID NO: 181183 - RNA, 19 nt, Artificial Sequence
  Description of Artificial Sequence: Synthetic oligonucleotide
ucgcugucgcuugacucug

SEQ ID NO: 181184 - RNA, 19 nt, Artificial Sequence
  Description of Artificial Sequence: Synthetic oligonucleotide
guccaagacuuuccacuca

SEQ ID NO: 181185 - RNA, 19 nt, Artificial Sequence
  Description of Artificial Sequence: Synthetic oligonucleotide
ccgauauaaacacguccac

SEQ ID NO: 181186 - RNA, 19 nt, Artificial Sequence
  Description of Artificial Sequence: Synthetic oligonucleotide
aucuaccagaccaccucug

SEQ ID NO: 181187 - RNA, 19 nt, Artificial Sequence
  Description of Artificial Sequence: Synthetic oligonucleotide
cauguguuccgccgauaca

SEQ ID NO: 181188 - RNA, 19 nt, Artificial Sequence
  Description of Artificial Sequence: Synthetic oligonucleotide
gggugcucucgauuguccc

SEQ ID NO: 181189 - RNA, 19 nt, Artificial Sequence
  Description of Artificial Sequence: Synthetic oligonucleotide
gggaacucgcaggaguuug

SEQ ID NO: 181190 - RNA, 19 nt, Artificial Sequence
  Description of Artificial Sequence: Synthetic oligonucleotide
cgugcgaccaaaaccgaug

SEQ ID NO: 181191 - RNA, 19 nt, Artificial Sequence
  Description of Artificial Sequence: Synthetic oligonucleotide
cagagaccgcucuauccca

SEQ ID NO: 181192 - RNA, 19 nt, Artificial Sequence
  Description of Artificial Sequence: Synthetic oligonucleotide
gaacugcaacugccugccc

SEQ ID NO: 181193 - RNA, 19 nt, Artificial Sequence
  Description of Artificial Sequence: Synthetic oligonucleotide
gucgaugacugaccacgga

SEQ ID NO: 181194 - RNA, 19 nt, Artificial Sequence
  Description of Artificial Sequence: Synthetic oligonucleotide
uccccguguuuugugggcu

SEQ ID NO: 181195 - RNA, 19 nt, Artificial Sequence
  Description of Artificial Sequence: Synthetic oligonucleotide
ccgccgauacagauugagg

SEQ ID NO: 181196 - RNA, 19 nt, Artificial Sequence
  Description of Artificial Sequence: Synthetic oligonucleotide
ggucgaugacugaccacgg

SEQ ID NO: 181197 - RNA, 19 nt, Artificial Sequence
  Description of Artificial Sequence: Synthetic oligonucleotide
caaccagccccuggagacc

SEQ ID NO: 181198 - RNA, 19 nt, Artificial Sequence
  Description of Artificial Sequence: Synthetic oligonucleotide
gcgaccugugauugcucgg

SEQ ID NO: 181199 - RNA, 19 nt, Artificial Sequence
  Description of Artificial Sequence: Synthetic oligonucleotide
uugcacgcccagagaccgc

SEQ ID NO: 181200 - RNA, 19 nt, Artificial Sequence
  Description of Artificial Sequence: Synthetic oligonucleotide
ucgccggcguccacggaaa

SEQ ID NO: 181201 - RNA, 19 nt, Artificial Sequence
  Description of Artificial Sequence: Synthetic oligonucleotide
gcguucacaaggaaugcuc

SEQ ID NO: 181202 - RNA, 19 nt, Artificial Sequence
  Description of Artificial Sequence: Synthetic oligonucleotide
cucaucuaccagaccaccu

SEQ ID NO: 181203 - RNA, 19 nt, Artificial Sequence
  Description of Artificial Sequence: Synthetic oligonucleotide
ggucguuaauaaaucacgu

SEQ ID NO: 181204 - RNA, 19 nt, Artificial Sequence
  Description of Artificial Sequence: Synthetic oligonucleotide
acgaucacacgaagagccu

SEQ ID NO: 181205 - RNA, 19 nt, Artificial Sequence
  Description of Artificial Sequence: Synthetic oligonucleotide
gucgccggcguccacggaa

SEQ ID NO: 181206 - RNA, 19 nt, Artificial Sequence
  Description of Artificial Sequence: Synthetic oligonucleotide
gcauugcgccacuaugaac

SEQ ID NO: 181207 - RNA, 19 nt, Artificial Sequence
  Description of Artificial Sequence: Synthetic oligonucleotide
cucguuggggugcucucga

SEQ ID NO: 181208 - RNA, 19 nt, Artificial Sequence
  Description of Artificial Sequence: Synthetic oligonucleotide
ggcggauaccuucacaaau

SEQ ID NO: 181209 - RNA, 19 nt, Artificial Sequence
  Description of Artificial Sequence: Synthetic oligonucleotide
gauuguccccguguuuugu

SEQ ID NO: 181210 - RNA, 19 nt, Artificial Sequence
  Description of Artificial Sequence: Synthetic oligonucleotide
gcucguuggggugcucucg

SEQ ID NO: 181211 - RNA, 19 nt, Artificial Sequence
  Description of Artificial Sequence: Synthetic oligonucleotide
augcgaccugugauugcuc

SEQ ID NO: 181212 - RNA, 19 nt, Artificial Sequence
  Description of Artificial Sequence: Synthetic oligonucleotide
auaugacgcugaauccaaa

SEQ ID NO: 181213 - RNA, 19 nt, Artificial Sequence
  Description of Artificial Sequence: Synthetic oligonucleotide
uuccgccgauacagauuga

SEQ ID NO: 181214 - RNA, 19 nt, Artificial Sequence
  Description of Artificial Sequence: Synthetic oligonucleotide
aggaccugccgugcccaag

SEQ ID NO: 181215 - RNA, 19 nt, Artificial Sequence
  Description of Artificial Sequence: Synthetic oligonucleotide
ucguuggggugcucucgau

SEQ ID NO: 181216 - RNA, 19 nt, Artificial Sequence
  Description of Artificial Sequence: Synthetic oligonucleotide
gagcucgggaugaauugcu

SEQ ID NO: 181217 - RNA, 19 nt, Artificial Sequence
  Description of Artificial Sequence: Synthetic oligonucleotide
gggucgccggcguccacgg

SEQ ID NO: 181218 - RNA, 19 nt, Artificial Sequence
  Description of Artificial Sequence: Synthetic oligonucleotide
cccgaugcaaccucacgga

SEQ ID NO: 181219 - RNA, 19 nt, Artificial Sequence
  Description of Artificial Sequence: Synthetic oligonucleotide
ggggugcucucgauugucc

SEQ ID NO: 181220 - RNA, 19 nt, Artificial Sequence
  Description of Artificial Sequence: Synthetic oligonucleotide
cuucucguagggccuggua

SEQ ID NO: 181221 - RNA, 19 nt, Artificial Sequence
  Description of Artificial Sequence: Synthetic oligonucleotide
ggauaccuucacaaauucu

SEQ ID NO: 181222 - RNA, 19 nt, Artificial Sequence
  Description of Artificial Sequence: Synthetic oligonucleotide
caaucgcugucgcuugacu

SEQ ID NO: 181223 - RNA, 19 nt, Artificial Sequence
  Description of Artificial Sequence: Synthetic oligonucleotide
cgcucugaacccgugugcc

SEQ ID NO: 181224 - RNA, 19 nt, Artificial Sequence
  Description of Artificial Sequence: Synthetic oligonucleotide
cugcaacaucagugauguc

SEQ ID NO: 181225 - RNA, 19 nt, Artificial Sequence
  Description of Artificial Sequence: Synthetic oligonucleotide
acgcccagagaccgcucua

SEQ ID NO: 181226 - RNA, 19 nt, Artificial Sequence
  Description of Artificial Sequence: Synthetic oligonucleotide
agucaccgggaugccuccu

SEQ ID NO: 181227 - RNA, 19 nt, Artificial Sequence
  Description of Artificial Sequence: Synthetic oligonucleotide
cacggaucuguuccacgcu

SEQ ID NO: 181228 - RNA, 19 nt, Artificial Sequence
  Description of Artificial Sequence: Synthetic oligonucleotide
uugggucgccggcguccac

SEQ ID NO: 181229 - RNA, 19 nt, Artificial Sequence
  Description of Artificial Sequence: Synthetic oligonucleotide
gcgcccacccgggaggcgg

SEQ ID NO: 181230 - RNA, 19 nt, Artificial Sequence
  Description of Artificial Sequence: Synthetic oligonucleotide
ugcgugcauugcgccacua

SEQ ID NO: 181231 - RNA, 19 nt, Artificial Sequence
  Description of Artificial Sequence: Synthetic oligonucleotide
ggcgugcagaugagauuug

SEQ ID NO: 181232 - RNA, 19 nt, Artificial Sequence
  Description of Artificial Sequence: Synthetic oligonucleotide
cucguauccuucccucuuu

SEQ ID NO: 181233 - RNA, 19 nt, Artificial Sequence
  Description of Artificial Sequence: Synthetic oligonucleotide
cacgcccagagaccgcucu

SEQ ID NO: 181234 - RNA, 19 nt, Artificial Sequence
  Description of Artificial Sequence: Synthetic oligonucleotide
ggagaccaaagggacuagu

SEQ ID NO: 181235 - RNA, 19 nt, Artificial Sequence
  Description of Artificial Sequence: Synthetic oligonucleotide
ccccguguuuugugggcug

SEQ ID NO: 181236 - RNA, 19 nt, Artificial Sequence
  Description of Artificial Sequence: Synthetic oligonucleotide
gcggauaccuucacaaauu

SEQ ID NO: 181237 - RNA, 19 nt, Artificial Sequence
  Description of Artificial Sequence: Synthetic oligonucleotide
ccacuaugaacccgauaua

SEQ ID NO: 181238 - RNA, 19 nt, Artificial Sequence
  Description of Artificial Sequence: Synthetic oligonucleotide
ccuaccgguaaaggaggca

SEQ ID NO: 181239 - RNA, 19 nt, Artificial Sequence
  Description of Artificial Sequence: Synthetic oligonucleotide
cugccgugcccaagggacu

SEQ ID NO: 181240 - RNA, 19 nt, Artificial Sequence
  Description of Artificial Sequence: Synthetic oligonucleotide
cugccccgugcgaccaaaa

SEQ ID NO: 181241 - RNA, 19 nt, Artificial Sequence
  Description of Artificial Sequence: Synthetic oligonucleotide
gcggcggcggcggcggcgg

SEQ ID NO: 181242 - RNA, 19 nt, Artificial Sequence
  Description of Artificial Sequence: Synthetic oligonucleotide
ggcggcggcggcggcggcg

SEQ ID NO: 181243 - RNA, 19 nt, Artificial Sequence
  Description of Artificial Sequence: Synthetic oligonucleotide
cgguacagucucugccguc

SEQ ID NO: 181244 - RNA, 19 nt, Artificial Sequence
  Description of Artificial Sequence: Synthetic oligonucleotide
cccgugcgaccaaaaccga

SEQ ID NO: 181245 - RNA, 19 nt, Artificial Sequence
  Description of Artificial Sequence: Synthetic oligonucleotide
cugaacccgugugccuucu

SEQ ID NO: 181246 - RNA, 19 nt, Artificial Sequence
  Description of Artificial Sequence: Synthetic oligonucleotide
gcgugcauugcgccacuau

SEQ ID NO: 181247 - RNA, 19 nt, Artificial Sequence
  Description of Artificial Sequence: Synthetic oligonucleotide
ccggcggcggcggcggcgg

SEQ ID NO: 181248 - RNA, 19 nt, Artificial Sequence
  Description of Artificial Sequence: Synthetic oligonucleotide
ccaagacuuuccacucaau

SEQ ID NO: 181249 - RNA, 19 nt, Artificial Sequence
  Description of Artificial Sequence: Synthetic oligonucleotide
ccgaugcaaccucacggau

SEQ ID NO: 181250 - RNA, 19 nt, Artificial Sequence
  Description of Artificial Sequence: Synthetic oligonucleotide
ggcggcggcggcggcggug

SEQ ID NO: 181251 - RNA, 19 nt, Artificial Sequence
  Description of Artificial Sequence: Synthetic oligonucleotide
ccgugcgaccaaaaccgau

SEQ ID NO: 181252 - RNA, 19 nt, Artificial Sequence
  Description of Artificial Sequence: Synthetic oligonucleotide
ccccucggauccgggcagc

SEQ ID NO: 181253 - RNA, 19 nt, Artificial Sequence
  Description of Artificial Sequence: Synthetic oligonucleotide
ggggaacucgcaggaguuu

SEQ ID NO: 181254 - RNA, 19 nt, Artificial Sequence
  Description of Artificial Sequence: Synthetic oligonucleotide
cccggcggcggcggcggcg

SEQ ID NO: 181255 - RNA, 19 nt, Artificial Sequence
  Description of Artificial Sequence: Synthetic oligonucleotide
gcacgcccagagaccgcuc

SEQ ID NO: 181256 - RNA, 19 nt, Artificial Sequence
  Description of Artificial Sequence: Synthetic oligonucleotide
cgccacuaugaacccgaua

SEQ ID NO: 181257 - RNA, 19 nt, Artificial Sequence
  Description of Artificial Sequence: Synthetic oligonucleotide
gcgccacuaugaacccgau

SEQ ID NO: 181258 - RNA, 19 nt, Artificial Sequence
  Description of Artificial Sequence: Synthetic oligonucleotide
cggcggcggcggcggcggc

SEQ ID NO: 181259 - RNA, 19 nt, Artificial Sequence
  Description of Artificial Sequence: Synthetic oligonucleotide
cggcggcggcggcggcggu

SEQ ID NO: 181260 - RNA, 19 nt, Artificial Sequence
  Description of Artificial Sequence: Synthetic oligonucleotide
agauauuuaacuuugcucc

SEQ ID NO: 181261 - RNA, 19 nt, Artificial Sequence
  Description of Artificial Sequence: Synthetic oligonucleotide
agaaagaggguauauaagc

SEQ ID NO: 181262 - RNA, 19 nt, Artificial Sequence
  Description of Artificial Sequence: Synthetic oligonucleotide
uacacuuauaacaaugucc

SEQ ID NO: 181263 - RNA, 19 nt, Artificial Sequence
  Description of Artificial Sequence: Synthetic oligonucleotide
uaaauuggagugcaaaugc

SEQ ID NO: 181264 - RNA, 19 nt, Artificial Sequence
  Description of Artificial Sequence: Synthetic oligonucleotide
ugucaaaugaguuacaaua

SEQ ID NO: 181265 - RNA, 19 nt, Artificial Sequence
  Description of Artificial Sequence: Synthetic oligonucleotide
uauauuguaauuagauaca

SEQ ID NO: 181266 - RNA, 19 nt, Artificial Sequence
  Description of Artificial Sequence: Synthetic oligonucleotide
aaacuauucacaaagugca

SEQ ID NO: 181267 - RNA, 19 nt, Artificial Sequence
  Description of Artificial Sequence: Synthetic oligonucleotide
aacguaaacugucuucagg

SEQ ID NO: 181268 - RNA, 19 nt, Artificial Sequence
  Description of Artificial Sequence: Synthetic oligonucleotide
aaacaugagcgccaaguuc

SEQ ID NO: 181269 - RNA, 19 nt, Artificial Sequence
  Description of Artificial Sequence: Synthetic oligonucleotide
acagcuaugugucaaauga

SEQ ID NO: 181270 - RNA, 19 nt, Artificial Sequence
  Description of Artificial Sequence: Synthetic oligonucleotide
auaaacguaaacugucuuc

SEQ ID NO: 181271 - RNA, 19 nt, Artificial Sequence
  Description of Artificial Sequence: Synthetic oligonucleotide
uaaucaacugaucuaaauc

SEQ ID NO: 181272 - RNA, 19 nt, Artificial Sequence
  Description of Artificial Sequence: Synthetic oligonucleotide
aucguaaacagcuaugugu

SEQ ID NO: 181273 - RNA, 19 nt, Artificial Sequence
  Description of Artificial Sequence: Synthetic oligonucleotide
uagaaauguacauggauga

SEQ ID NO: 181274 - RNA, 19 nt, Artificial Sequence
  Description of Artificial Sequence: Synthetic oligonucleotide
aauguagauauuguuuauc

SEQ ID NO: 181275 - RNA, 19 nt, Artificial Sequence
  Description of Artificial Sequence: Synthetic oligonucleotide
gacgcaacuguauagauuc

SEQ ID NO: 181276 - RNA, 19 nt, Artificial Sequence
  Description of Artificial Sequence: Synthetic oligonucleotide
ugcuauuuguucaagcaca

SEQ ID NO: 181277 - RNA, 19 nt, Artificial Sequence
  Description of Artificial Sequence: Synthetic oligonucleotide
guaagagaaacauucgaug

SEQ ID NO: 181278 - RNA, 19 nt, Artificial Sequence
  Description of Artificial Sequence: Synthetic oligonucleotide
augaugaagucuaagguac

SEQ ID NO: 181279 - RNA, 19 nt, Artificial Sequence
  Description of Artificial Sequence: Synthetic oligonucleotide
uaacuuugcuccaugccgg

SEQ ID NO: 181280 - RNA, 19 nt, Artificial Sequence
  Description of Artificial Sequence: Synthetic oligonucleotide
acuguacagguguuggucc

SEQ ID NO: 181281 - RNA, 19 nt, Artificial Sequence
  Description of Artificial Sequence: Synthetic oligonucleotide
auaccaacaauccauuugu

SEQ ID NO: 181282 - RNA, 19 nt, Artificial Sequence
  Description of Artificial Sequence: Synthetic oligonucleotide
ucuacacuuauaacaaugu

SEQ ID NO: 181283 - RNA, 19 nt, Artificial Sequence
  Description of Artificial Sequence: Synthetic oligonucleotide
uagauaaacguaaacuguc

SEQ ID NO: 181284 - RNA, 19 nt, Artificial Sequence
  Description of Artificial Sequence: Synthetic oligonucleotide
ugaaucggcauuuggacca

SEQ ID NO: 181285 - RNA, 19 nt, Artificial Sequence
  Description of Artificial Sequence: Synthetic oligonucleotide
aguuguaucaacauuuuca

SEQ ID NO: 181286 - RNA, 19 nt, Artificial Sequence
  Description of Artificial Sequence: Synthetic oligonucleotide
uaaacguaaacugucuuca

SEQ ID NO: 181287 - RNA, 19 nt, Artificial Sequence
  Description of Artificial Sequence: Synthetic oligonucleotide
uguuacauuagagauauuu

SEQ ID NO: 181288 - RNA, 19 nt, Artificial Sequence
  Description of Artificial Sequence: Synthetic oligonucleotide
auuagagauauuuaacuuu

SEQ ID NO: 181289 - RNA, 19 nt, Artificial Sequence
  Description of Artificial Sequence: Synthetic oligonucleotide
guuacgagaaacauguggc

SEQ ID NO: 181290 - RNA, 19 nt, Artificial Sequence
  Description of Artificial Sequence: Synthetic oligonucleotide
caauggaucacuacuguac

SEQ ID NO: 181291 - RNA, 19 nt, Artificial Sequence
  Description of Artificial Sequence: Synthetic oligonucleotide
gguuacgagaaacaugugg

SEQ ID NO: 181292 - RNA, 19 nt, Artificial Sequence
  Description of Artificial Sequence: Synthetic oligonucleotide
ugaagacgcaacuguauag

SEQ ID NO: 181293 - RNA, 19 nt, Artificial Sequence
  Description of Artificial Sequence: Synthetic oligonucleotide
aaacaguagaacauccaag

SEQ ID NO: 181294 - RNA, 19 nt, Artificial Sequence
  Description of Artificial Sequence: Synthetic oligonucleotide
ucuauccacgcauauguca

SEQ ID NO: 181295 - RNA, 19 nt, Artificial Sequence
  Description of Artificial Sequence: Synthetic oligonucleotide
ugaagucuaagguacuugu

SEQ ID NO: 181296 - RNA, 19 nt, Artificial Sequence
  Description of Artificial Sequence: Synthetic oligonucleotide
uguagcucaggguaagacc

SEQ ID NO: 181297 - RNA, 19 nt, Artificial Sequence
  Description of Artificial Sequence: Synthetic oligonucleotide
ucguaagagaaacauucga

SEQ ID NO: 181298 - RNA, 19 nt, Artificial Sequence
  Description of Artificial Sequence: Synthetic oligonucleotide
aaagaggguauauaagcuu

SEQ ID NO: 181299 - RNA, 19 nt, Artificial Sequence
  Description of Artificial Sequence: Synthetic oligonucleotide
acauacaauggaucacuac

SEQ ID NO: 181300 - RNA, 19 nt, Artificial Sequence
  Description of Artificial Sequence: Synthetic oligonucleotide
uuaaucaacugaucuaaau

SEQ ID NO: 181301 - RNA, 19 nt, Artificial Sequence
  Description of Artificial Sequence: Synthetic oligonucleotide
acacuuauaacaaugucca

SEQ ID NO: 181302 - RNA, 19 nt, Artificial Sequence
  Description of Artificial Sequence: Synthetic oligonucleotide
cuaccuguaucccagaguc

SEQ ID NO: 181303 - RNA, 19 nt, Artificial Sequence
  Description of Artificial Sequence: Synthetic oligonucleotide
acguaaacugucuucagga

SEQ ID NO: 181304 - RNA, 19 nt, Artificial Sequence
  Description of Artificial Sequence: Synthetic oligonucleotide
cugccugacacgcagagcc

SEQ ID NO: 181305 - RNA, 19 nt, Artificial Sequence
  Description of Artificial Sequence: Synthetic oligonucleotide
aacuuugcuccaugccggc

SEQ ID NO: 181306 - RNA, 19 nt, Artificial Sequence
  Description of Artificial Sequence: Synthetic oligonucleotide
ugcuccaaauacaaccuug

SEQ ID NO: 181307 - RNA, 19 nt, Artificial Sequence
  Description of Artificial Sequence: Synthetic oligonucleotide
aaacguaaacugucuucag

SEQ ID NO: 181308 - RNA, 19 nt, Artificial Sequence
  Description of Artificial Sequence: Synthetic oligonucleotide
cauaauucuacauacuugu

SEQ ID NO: 181309 - RNA, 19 nt, Artificial Sequence
  Description of Artificial Sequence: Synthetic oligonucleotide
cuuggaguugcacauuaag

SEQ ID NO: 181310 - RNA, 19 nt, Artificial Sequence
  Description of Artificial Sequence: Synthetic oligonucleotide
gagaucagaaugaauggug

SEQ ID NO: 181311 - RNA, 19 nt, Artificial Sequence
  Description of Artificial Sequence: Synthetic oligonucleotide
uuugaaggagaaucagaca

SEQ ID NO: 181312 - RNA, 19 nt, Artificial Sequence
  Description of Artificial Sequence: Synthetic oligonucleotide
ugaacggguaguuucuucu

SEQ ID NO: 181313 - RNA, 19 nt, Artificial Sequence
  Description of Artificial Sequence: Synthetic oligonucleotide
gguuguccaguacugaugg

SEQ ID NO: 181314 - RNA, 19 nt, Artificial Sequence
  Description of Artificial Sequence: Synthetic oligonucleotide
ugucuagauagguuuaaaa

SEQ ID NO: 181315 - RNA, 19 nt, Artificial Sequence
  Description of Artificial Sequence: Synthetic oligonucleotide
cucguaagagaaacauucg

SEQ ID NO: 181316 - RNA, 19 nt, Artificial Sequence
  Description of Artificial Sequence: Synthetic oligonucleotide
aaucugaaguuggaccagg

SEQ ID NO: 181317 - RNA, 19 nt, Artificial Sequence
  Description of Artificial Sequence: Synthetic oligonucleotide
uacaauggaucacuacugu

SEQ ID NO: 181318 - RNA, 19 nt, Artificial Sequence
  Description of Artificial Sequence: Synthetic oligonucleotide
uguuuaucaaugugagggu

SEQ ID NO: 181319 - RNA, 19 nt, Artificial Sequence
  Description of Artificial Sequence: Synthetic oligonucleotide
agacaucgaucauggaugg

SEQ ID NO: 181320 - RNA, 19 nt, Artificial Sequence
  Description of Artificial Sequence: Synthetic oligonucleotide
augagcgccaaguucaaca

SEQ ID NO: 181321 - RNA, 19 nt, Artificial Sequence
  Description of Artificial Sequence: Synthetic oligonucleotide
accaacaauccauuugucu

SEQ ID NO: 181322 - RNA, 19 nt, Artificial Sequence
  Description of Artificial Sequence: Synthetic oligonucleotide
uacgagaaacauguggcag

SEQ ID NO: 181323 - RNA, 19 nt, Artificial Sequence
  Description of Artificial Sequence: Synthetic oligonucleotide
aauacuuguagagggccca

SEQ ID NO: 181324 - RNA, 19 nt, Artificial Sequence
  Description of Artificial Sequence: Synthetic oligonucleotide
gucuucucggcuuaagggc

SEQ ID NO: 181325 - RNA, 19 nt, Artificial Sequence
  Description of Artificial Sequence: Synthetic oligonucleotide
uuacgagaaacauguggca

SEQ ID NO: 181326 - RNA, 19 nt, Artificial Sequence
  Description of Artificial Sequence: Synthetic oligonucleotide
ucuucucggcuuaagggcu

SEQ ID NO: 181327 - RNA, 19 nt, Artificial Sequence
  Description of Artificial Sequence: Synthetic oligonucleotide
ucccgaauaaccugugucu

SEQ ID NO: 181328 - RNA, 19 nt, Artificial Sequence
  Description of Artificial Sequence: Synthetic oligonucleotide
uguguaaacuauucacaaa

SEQ ID NO: 181329 - RNA, 19 nt, Artificial Sequence
  Description of Artificial Sequence: Synthetic oligonucleotide
agcagcuaaauuggagugc

SEQ ID NO: 181330 - RNA, 19 nt, Artificial Sequence
  Description of Artificial Sequence: Synthetic oligonucleotide
auacuuguaacaauuucca

SEQ ID NO: 181331 - RNA, 19 nt, Artificial Sequence
  Description of Artificial Sequence: Synthetic oligonucleotide
ucggcauuuggaccaaggc

SEQ ID NO: 181332 - RNA, 19 nt, Artificial Sequence
  Description of Artificial Sequence: Synthetic oligonucleotide
ucggugaaucggcauuugg

SEQ ID NO: 181333 - RNA, 19 nt, Artificial Sequence
  Description of Artificial Sequence: Synthetic oligonucleotide
cuggagccgaaacacaacc

SEQ ID NO: 181334 - RNA, 19 nt, Artificial Sequence
  Description of Artificial Sequence: Synthetic oligonucleotide
gaccaucuaagguaugaac

SEQ ID NO: 181335 - RNA, 19 nt, Artificial Sequence
  Description of Artificial Sequence: Synthetic oligonucleotide
cugucuacuggacggaccc

SEQ ID NO: 181336 - RNA, 19 nt, Artificial Sequence
  Description of Artificial Sequence: Synthetic oligonucleotide
ucuacuggacggacccugg

SEQ ID NO: 181337 - RNA, 19 nt, Artificial Sequence
  Description of Artificial Sequence: Synthetic oligonucleotide
gguaugaacggguaguuuc

SEQ ID NO: 181338 - RNA, 19 nt, Artificial Sequence
  Description of Artificial Sequence: Synthetic oligonucleotide
cauacaauggaucacuacu

SEQ ID NO: 181339 - RNA, 19 nt, Artificial Sequence
  Description of Artificial Sequence: Synthetic oligonucleotide
auacaauggaucacuacug

SEQ ID NO: 181340 - RNA, 19 nt, Artificial Sequence
  Description of Artificial Sequence: Synthetic oligonucleotide
ucggcuuaagggcuguugu

SEQ ID NO: 181341 - RNA, 19 nt, Artificial Sequence
  Description of Artificial Sequence: Synthetic oligonucleotide
agaucguaaacagcuaugu

SEQ ID NO: 181342 - RNA, 19 nt, Artificial Sequence
  Description of Artificial Sequence: Synthetic oligonucleotide
ccaucuaagguaugaacgg

SEQ ID NO: 181343 - RNA, 19 nt, Artificial Sequence
  Description of Artificial Sequence: Synthetic oligonucleotide
agaccaguucggugaaucg

SEQ ID NO: 181344 - RNA, 19 nt, Artificial Sequence
  Description of Artificial Sequence: Synthetic oligonucleotide
ggucaugaauaucaucuag

SEQ ID NO: 181345 - RNA, 19 nt, Artificial Sequence
  Description of Artificial Sequence: Synthetic oligonucleotide
agcacagaucguaaacagc

SEQ ID NO: 181346 - RNA, 19 nt, Artificial Sequence
  Description of Artificial Sequence: Synthetic oligonucleotide
caagaaccgaugaaaucug

SEQ ID NO: 181347 - RNA, 19 nt, Artificial Sequence
  Description of Artificial Sequence: Synthetic oligonucleotide
acuggacggacccugguca

SEQ ID NO: 181348 - RNA, 19 nt, Artificial Sequence
  Description of Artificial Sequence: Synthetic oligonucleotide
aaaugcacacuguguggga

SEQ ID NO: 181349 - RNA, 19 nt, Artificial Sequence
  Description of Artificial Sequence: Synthetic oligonucleotide
uguucgucuaguggggucc

SEQ ID NO: 181350 - RNA, 19 nt, Artificial Sequence
  Description of Artificial Sequence: Synthetic oligonucleotide
caucuaagguaugaacggg

SEQ ID NO: 181351 - RNA, 19 nt, Artificial Sequence
  Description of Artificial Sequence: Synthetic oligonucleotide
gaccaguucggugaaucgg

SEQ ID NO: 181352 - RNA, 19 nt, Artificial Sequence
  Description of Artificial Sequence: Synthetic oligonucleotide
caguauggaauaaugcgca

SEQ ID NO: 181353 - RNA, 19 nt, Artificial Sequence
  Description of Artificial Sequence: Synthetic oligonucleotide
ugcugcuauuuguucaagc

SEQ ID NO: 181354 - RNA, 19 nt, Artificial Sequence
  Description of Artificial Sequence: Synthetic oligonucleotide
acgagaaacauguggcagu

SEQ ID NO: 181355 - RNA, 19 nt, Artificial Sequence
  Description of Artificial Sequence: Synthetic oligonucleotide
agcucaagaugccuuucag

SEQ ID NO: 181356 - RNA, 19 nt, Artificial Sequence
  Description of Artificial Sequence: Synthetic oligonucleotide
uucuuggaguugcacauua

SEQ ID NO: 181357 - RNA, 19 nt, Artificial Sequence
  Description of Artificial Sequence: Synthetic oligonucleotide
accgaugaaaucugaaguu

SEQ ID NO: 181358 - RNA, 19 nt, Artificial Sequence
  Description of Artificial Sequence: Synthetic oligonucleotide
cuacgcugggaagugaugc

SEQ ID NO: 181359 - RNA, 19 nt, Artificial Sequence
  Description of Artificial Sequence: Synthetic oligonucleotide
caucgaucauggaugguug

SEQ ID NO: 181360 - RNA, 19 nt, Artificial Sequence
  Description of Artificial Sequence: Synthetic oligonucleotide
uaguuguaucaacauuuuc

SEQ ID NO: 181361 - RNA, 19 nt, Artificial Sequence
  Description of Artificial Sequence: Synthetic oligonucleotide
gaagacgcaacuguauaga

SEQ ID NO: 181362 - RNA, 19 nt, Artificial Sequence
  Description of Artificial Sequence: Synthetic oligonucleotide
cauggugugcugucuacug

SEQ ID NO: 181363 - RNA, 19 nt, Artificial Sequence
  Description of Artificial Sequence: Synthetic oligonucleotide
cagaucguaaacagcuaug

SEQ ID NO: 181364 - RNA, 19 nt, Artificial Sequence
  Description of Artificial Sequence: Synthetic oligonucleotide
ugugggauccgggagcgcc

SEQ ID NO: 181365 - RNA, 19 nt, Artificial Sequence
  Description of Artificial Sequence: Synthetic oligonucleotide
cagcagcuaaauuggagug

SEQ ID NO: 181366 - RNA, 19 nt, Artificial Sequence
  Description of Artificial Sequence: Synthetic oligonucleotide
aggaacaccugauuauaaa

SEQ ID NO: 181367 - RNA, 19 nt, Artificial Sequence
  Description of Artificial Sequence: Synthetic oligonucleotide
aacaauccauuugucuaga

SEQ ID NO: 181368 - RNA, 19 nt, Artificial Sequence
  Description of Artificial Sequence: Synthetic oligonucleotide
ucuacgcugggaagugaug

SEQ ID NO: 181369 - RNA, 19 nt, Artificial Sequence
  Description of Artificial Sequence: Synthetic oligonucleotide
agcuaugugucaaaugagu

SEQ ID NO: 181370 - RNA, 19 nt, Artificial Sequence
  Description of Artificial Sequence: Synthetic oligonucleotide
uuugucuagauagguuuaa

SEQ ID NO: 181371 - RNA, 19 nt, Artificial Sequence
  Description of Artificial Sequence: Synthetic oligonucleotide
aacggguaguuucuucuua

SEQ ID NO: 181372 - RNA, 19 nt, Artificial Sequence
  Description of Artificial Sequence: Synthetic oligonucleotide
gaaagaggguauauaagcu

SEQ ID NO: 181373 - RNA, 19 nt, Artificial Sequence
  Description of Artificial Sequence: Synthetic oligonucleotide
ucuagcucaagaugccuuu

SEQ ID NO: 181374 - RNA, 19 nt, Artificial Sequence
  Description of Artificial Sequence: Synthetic oligonucleotide
augaagucuaagguacuug

SEQ ID NO: 181375 - RNA, 19 nt, Artificial Sequence
  Description of Artificial Sequence: Synthetic oligonucleotide
acggacccuggucacugcc

SEQ ID NO: 181376 - RNA, 19 nt, Artificial Sequence
  Description of Artificial Sequence: Synthetic oligonucleotide
acaucgaucauggaugguu

SEQ ID NO: 181377 - RNA, 19 nt, Artificial Sequence
  Description of Artificial Sequence: Synthetic oligonucleotide
ggagccgaaacacaaccug

SEQ ID NO: 181378 - RNA, 19 nt, Artificial Sequence
  Description of Artificial Sequence: Synthetic oligonucleotide
ugcuuuaggacaggcuuga

SEQ ID NO: 181379 - RNA, 19 nt, Artificial Sequence
  Description of Artificial Sequence: Synthetic oligonucleotide
uggagccgaaacacaaccu

SEQ ID NO: 181380 - RNA, 19 nt, Artificial Sequence
  Description of Artificial Sequence: Synthetic oligonucleotide
aguucggugaaucggcauu

SEQ ID NO: 181381 - RNA, 19 nt, Artificial Sequence
  Description of Artificial Sequence: Synthetic oligonucleotide
guugacauccaagaaccga

SEQ ID NO: 181382 - RNA, 19 nt, Artificial Sequence
  Description of Artificial Sequence: Synthetic oligonucleotide
acaauggaucacuacugua

SEQ ID NO: 181383 - RNA, 19 nt, Artificial Sequence
  Description of Artificial Sequence: Synthetic oligonucleotide
agcuucacucguaagagaa

SEQ ID NO: 181384 - RNA, 19 nt, Artificial Sequence
  Description of Artificial Sequence: Synthetic oligonucleotide
ugacacgcagagcccucgg

SEQ ID NO: 181385 - RNA, 19 nt, Artificial Sequence
  Description of Artificial Sequence: Synthetic oligonucleotide
aguauggaauaaugcgcau

SEQ ID NO: 181386 - RNA, 19 nt, Artificial Sequence
  Description of Artificial Sequence: Synthetic oligonucleotide
augaucuauccacgcauau

SEQ ID NO: 181387 - RNA, 19 nt, Artificial Sequence
  Description of Artificial Sequence: Synthetic oligonucleotide
aucuaagguaugaacgggu

SEQ ID NO: 181388 - RNA, 19 nt, Artificial Sequence
  Description of Artificial Sequence: Synthetic oligonucleotide
uucucuacgcugggaagug

SEQ ID NO: 181389 - RNA, 19 nt, Artificial Sequence
  Description of Artificial Sequence: Synthetic oligonucleotide
uguguacuguugacaucca

SEQ ID NO: 181390 - RNA, 19 nt, Artificial Sequence
  Description of Artificial Sequence: Synthetic oligonucleotide
gauaaacguaaacugucuu

SEQ ID NO: 181391 - RNA, 19 nt, Artificial Sequence
  Description of Artificial Sequence: Synthetic oligonucleotide
ucgaucauggaugguugac

SEQ ID NO: 181392 - RNA, 19 nt, Artificial Sequence
  Description of Artificial Sequence: Synthetic oligonucleotide
cccuguacugugaagaauc

SEQ ID NO: 181393 - RNA, 19 nt, Artificial Sequence
  Description of Artificial Sequence: Synthetic oligonucleotide
uucagaccaguucggugaa

SEQ ID NO: 181394 - RNA, 19 nt, Artificial Sequence
  Description of Artificial Sequence: Synthetic oligonucleotide
auguaguuguguaaacuau

SEQ ID NO: 181395 - RNA, 19 nt, Artificial Sequence
  Description of Artificial Sequence: Synthetic oligonucleotide
cacuuauaacaauguccac

SEQ ID NO: 181396 - RNA, 19 nt, Artificial Sequence
  Description of Artificial Sequence: Synthetic oligonucleotide
aucgaucauggaugguuga

SEQ ID NO: 181397 - RNA, 19 nt, Artificial Sequence
  Description of Artificial Sequence: Synthetic oligonucleotide
ggaguugcacauuaagaaa

SEQ ID NO: 181398 - RNA, 19 nt, Artificial Sequence
  Description of Artificial Sequence: Synthetic oligonucleotide
gcaaacgguagaaauguac

SEQ ID NO: 181399 - RNA, 19 nt, Artificial Sequence
  Description of Artificial Sequence: Synthetic oligonucleotide
gcucaagaugccuuucagc

SEQ ID NO: 181400 - RNA, 19 nt, Artificial Sequence
  Description of Artificial Sequence: Synthetic oligonucleotide
cacgcauaugucaccacca

SEQ ID NO: 181401 - RNA, 19 nt, Artificial Sequence
  Description of Artificial Sequence: Synthetic oligonucleotide
ugacagugccagagauucc

SEQ ID NO: 181402 - RNA, 19 nt, Artificial Sequence
  Description of Artificial Sequence: Synthetic oligonucleotide
auuuggaccaaggccaauu

SEQ ID NO: 181403 - RNA, 19 nt, Artificial Sequence
  Description of Artificial Sequence: Synthetic oligonucleotide
ggaaaagauccucuacaga

SEQ ID NO: 181404 - RNA, 19 nt, Artificial Sequence
  Description of Artificial Sequence: Synthetic oligonucleotide
uugacuugccagccauuau

SEQ ID NO: 181405 - RNA, 19 nt, Artificial Sequence
  Description of Artificial Sequence: Synthetic oligonucleotide
cacgggaccuuguagcuca

SEQ ID NO: 181406 - RNA, 19 nt, Artificial Sequence
  Description of Artificial Sequence: Synthetic oligonucleotide
uuguucgucuagugggguc

SEQ ID NO: 181407 - RNA, 19 nt, Artificial Sequence
  Description of Artificial Sequence: Synthetic oligonucleotide
ugguuacgagaaacaugug

SEQ ID NO: 181408 - RNA, 19 nt, Artificial Sequence
  Description of Artificial Sequence: Synthetic oligonucleotide
gacacgcagagcccucggc

SEQ ID NO: 181409 - RNA, 19 nt, Artificial Sequence
  Description of Artificial Sequence: Synthetic oligonucleotide
aaaccuuauuuaacauaau

SEQ ID NO: 181410 - RNA, 19 nt, Artificial Sequence
  Description of Artificial Sequence: Synthetic oligonucleotide
accaaccugaaaucucuuu

SEQ ID NO: 181411 - RNA, 19 nt, Artificial Sequence
  Description of Artificial Sequence: Synthetic oligonucleotide
ugcaugagcuucacucgua

SEQ ID NO: 181412 - RNA, 19 nt, Artificial Sequence
  Description of Artificial Sequence: Synthetic oligonucleotide
gguccugucuaccuguauc

SEQ ID NO: 181413 - RNA, 19 nt, Artificial Sequence
  Description of Artificial Sequence: Synthetic oligonucleotide
uacauggugucuccaccuu

SEQ ID NO: 181414 - RNA, 19 nt, Artificial Sequence
  Description of Artificial Sequence: Synthetic oligonucleotide
ucaggcggcuucuuaggua

SEQ ID NO: 181415 - RNA, 19 nt, Artificial Sequence
  Description of Artificial Sequence: Synthetic oligonucleotide
uucuugguguuuccacaua

SEQ ID NO: 181416 - RNA, 19 nt, Artificial Sequence
  Description of Artificial Sequence: Synthetic oligonucleotide
cagaccaguucggugaauc

SEQ ID NO: 181417 - RNA, 19 nt, Artificial Sequence
  Description of Artificial Sequence: Synthetic oligonucleotide
agcugaccuuuucucucag

SEQ ID NO: 181418 - RNA, 19 nt, Artificial Sequence
  Description of Artificial Sequence: Synthetic oligonucleotide
gucuacuggacggacccug

SEQ ID NO: 181419 - RNA, 19 nt, Artificial Sequence
  Description of Artificial Sequence: Synthetic oligonucleotide
aggccacgggaccuuguag

SEQ ID NO: 181420 - RNA, 19 nt, Artificial Sequence
  Description of Artificial Sequence: Synthetic oligonucleotide
cugaagacgcaacuguaua

SEQ ID NO: 181421 - RNA, 19 nt, Artificial Sequence
  Description of Artificial Sequence: Synthetic oligonucleotide
cuucucggcuuaagggcug

SEQ ID NO: 181422 - RNA, 19 nt, Artificial Sequence
  Description of Artificial Sequence: Synthetic oligonucleotide
gcauuguccacuacugaug

SEQ ID NO: 181423 - RNA, 19 nt, Artificial Sequence
  Description of Artificial Sequence: Synthetic oligonucleotide
acgcaacuguauagauucc

SEQ ID NO: 181424 - RNA, 19 nt, Artificial Sequence
  Description of Artificial Sequence: Synthetic oligonucleotide
cugcaaacgguagaaaugu

SEQ ID NO: 181425 - RNA, 19 nt, Artificial Sequence
  Description of Artificial Sequence: Synthetic oligonucleotide
ggaacaccugauuauaaau

SEQ ID NO: 181426 - RNA, 19 nt, Artificial Sequence
  Description of Artificial Sequence: Synthetic oligonucleotide
guaagaccaucuaagguau

SEQ ID NO: 181427 - RNA, 19 nt, Artificial Sequence
  Description of Artificial Sequence: Synthetic oligonucleotide
ucgucuagugggguccugu

SEQ ID NO: 181428 - RNA, 19 nt, Artificial Sequence
  Description of Artificial Sequence: Synthetic oligonucleotide
agaccaucuaagguaugaa

SEQ ID NO: 181429 - RNA, 19 nt, Artificial Sequence
  Description of Artificial Sequence: Synthetic oligonucleotide
cuacugaugaugcacuuuu

SEQ ID NO: 181430 - RNA, 19 nt, Artificial Sequence
  Description of Artificial Sequence: Synthetic oligonucleotide
gcagcuaaauuggagugca

SEQ ID NO: 181431 - RNA, 19 nt, Artificial Sequence
  Description of Artificial Sequence: Synthetic oligonucleotide
cucggcuuaagggcuguug

SEQ ID NO: 181432 - RNA, 19 nt, Artificial Sequence
  Description of Artificial Sequence: Synthetic oligonucleotide
uaugaacggguaguuucuu

SEQ ID NO: 181433 - RNA, 19 nt, Artificial Sequence
  Description of Artificial Sequence: Synthetic oligonucleotide
gccgaaacacaaccuggcc

SEQ ID NO: 181434 - RNA, 19 nt, Artificial Sequence
  Description of Artificial Sequence: Synthetic oligonucleotide
ugcugucuacuggacggac

SEQ ID NO: 181435 - RNA, 19 nt, Artificial Sequence
  Description of Artificial Sequence: Synthetic oligonucleotide
gaagaauccuggucaugau

SEQ ID NO: 181436 - RNA, 19 nt, Artificial Sequence
  Description of Artificial Sequence: Synthetic oligonucleotide
guaugaacggguaguuucu

SEQ ID NO: 181437 - RNA, 19 nt, Artificial Sequence
  Description of Artificial Sequence: Synthetic oligonucleotide
gugucaaaugaguuacaau

SEQ ID NO: 181438 - RNA, 19 nt, Artificial Sequence
  Description of Artificial Sequence: Synthetic oligonucleotide
cagcauuagccagcucacc

SEQ ID NO: 181439 - RNA, 19 nt, Artificial Sequence
  Description of Artificial Sequence: Synthetic oligonucleotide
ccgaaacacaaccuggcca

SEQ ID NO: 181440 - RNA, 19 nt, Artificial Sequence
  Description of Artificial Sequence: Synthetic oligonucleotide
gacggacccuggucacugc

SEQ ID NO: 181441 - RNA, 19 nt, Artificial Sequence
  Description of Artificial Sequence: Synthetic oligonucleotide
acgcagagcccucggcaca

SEQ ID NO: 181442 - RNA, 19 nt, Artificial Sequence
  Description of Artificial Sequence: Synthetic oligonucleotide
ggauagcgcuguccuacug

SEQ ID NO: 181443 - RNA, 19 nt, Artificial Sequence
  Description of Artificial Sequence: Synthetic oligonucleotide
cacagaucguaaacagcua

SEQ ID NO: 181444 - RNA, 19 nt, Artificial Sequence
  Description of Artificial Sequence: Synthetic oligonucleotide
uucucggcuuaagggcugu

SEQ ID NO: 181445 - RNA, 19 nt, Artificial Sequence
  Description of Artificial Sequence: Synthetic oligonucleotide
gugcaugagcuucacucgu

SEQ ID NO: 181446 - RNA, 19 nt, Artificial Sequence
  Description of Artificial Sequence: Synthetic oligonucleotide
agguaugaacggguaguuu

SEQ ID NO: 181447 - RNA, 19 nt, Artificial Sequence
  Description of Artificial Sequence: Synthetic oligonucleotide
caggcggcuucuuagguau

SEQ ID NO: 181448 - RNA, 19 nt, Artificial Sequence
  Description of Artificial Sequence: Synthetic oligonucleotide
gucuagugggguccugucu

SEQ ID NO: 181449 - RNA, 19 nt, Artificial Sequence
  Description of Artificial Sequence: Synthetic oligonucleotide
gcugucuacuggacggacc

SEQ ID NO: 181450 - RNA, 19 nt, Artificial Sequence
  Description of Artificial Sequence: Synthetic oligonucleotide
gaacggguaguuucuucuu

SEQ ID NO: 181451 - RNA, 19 nt, Artificial Sequence
  Description of Artificial Sequence: Synthetic oligonucleotide
cuuguagcucaggguaaga

SEQ ID NO: 181452 - RNA, 19 nt, Artificial Sequence
  Description of Artificial Sequence: Synthetic oligonucleotide
uggacggacccuggucacu

SEQ ID NO: 181453 - RNA, 19 nt, Artificial Sequence
  Description of Artificial Sequence: Synthetic oligonucleotide
gcaugagcuucacucguaa

SEQ ID NO: 181454 - RNA, 19 nt, Artificial Sequence
  Description of Artificial Sequence: Synthetic oligonucleotide
gguuucccgaauaaccugu

SEQ ID NO: 181455 - RNA, 19 nt, Artificial Sequence
  Description of Artificial Sequence: Synthetic oligonucleotide
cccgaauaaccugugucuc

SEQ ID NO: 181456 - RNA, 19 nt, Artificial Sequence
  Description of Artificial Sequence: Synthetic oligonucleotide
gagcgccaaguucaacacu

SEQ ID NO: 181457 - RNA, 19 nt, Artificial Sequence
  Description of Artificial Sequence: Synthetic oligonucleotide
ccgaauaaccugugucuca

SEQ ID NO: 181458 - RNA, 19 nt, Artificial Sequence
  Description of Artificial Sequence: Synthetic oligonucleotide
cggugaaucggcauuugga

SEQ ID NO: 181459 - RNA, 19 nt, Artificial Sequence
  Description of Artificial Sequence: Synthetic oligonucleotide
cuuucacaaagcugaccuu

SEQ ID NO: 181460 - RNA, 19 nt, Artificial Sequence
  Description of Artificial Sequence: Synthetic oligonucleotide
acaugagcgccaaguucaa

SEQ ID NO: 181461 - RNA, 19 nt, Artificial Sequence
  Description of Artificial Sequence: Synthetic oligonucleotide
caucuagcucaagaugccu

SEQ ID NO: 181462 - RNA, 19 nt, Artificial Sequence
  Description of Artificial Sequence: Synthetic oligonucleotide
gacaucgaucauggauggu

SEQ ID NO: 181463 - RNA, 19 nt, Artificial Sequence
  Description of Artificial Sequence: Synthetic oligonucleotide
caggccacgggaccuugua

SEQ ID NO: 181464 - RNA, 19 nt, Artificial Sequence
  Description of Artificial Sequence: Synthetic oligonucleotide
caguucggugaaucggcau

SEQ ID NO: 181465 - RNA, 19 nt, Artificial Sequence
  Description of Artificial Sequence: Synthetic oligonucleotide
cuacuggacggacccuggu

SEQ ID NO: 181466 - RNA, 19 nt, Artificial Sequence
  Description of Artificial Sequence: Synthetic oligonucleotide
cgcaacuguauagauucca

SEQ ID NO: 181467 - RNA, 19 nt, Artificial Sequence
  Description of Artificial Sequence: Synthetic oligonucleotide
gcauuuggaccaaggccaa

SEQ ID NO: 181468 - RNA, 19 nt, Artificial Sequence
  Description of Artificial Sequence: Synthetic oligonucleotide
ucucggcuuaagggcuguu

SEQ ID NO: 181469 - RNA, 19 nt, Artificial Sequence
  Description of Artificial Sequence: Synthetic oligonucleotide
gauccgggagcgccugguu

SEQ ID NO: 181470 - RNA, 19 nt, Artificial Sequence
  Description of Artificial Sequence: Synthetic oligonucleotide
guucgucuagugggguccu

SEQ ID NO: 181471 - RNA, 19 nt, Artificial Sequence
  Description of Artificial Sequence: Synthetic oligonucleotide
gcgccugguuguccaguac

SEQ ID NO: 181472 - RNA, 19 nt, Artificial Sequence
  Description of Artificial Sequence: Synthetic oligonucleotide
gugggauccgggagcgccu

SEQ ID NO: 181473 - RNA, 19 nt, Artificial Sequence
  Description of Artificial Sequence: Synthetic oligonucleotide
cgggaccuuguagcucagg

SEQ ID NO: 181474 - RNA, 19 nt, Artificial Sequence
  Description of Artificial Sequence: Synthetic oligonucleotide
gcccuguacugugaagaau

SEQ ID NO: 181475 - RNA, 19 nt, Artificial Sequence
  Description of Artificial Sequence: Synthetic oligonucleotide
ccauggugugcugucuacu

SEQ ID NO: 181476 - RNA, 19 nt, Artificial Sequence
  Description of Artificial Sequence: Synthetic oligonucleotide
ccgggagcgccugguuguc

SEQ ID NO: 181477 - RNA, 19 nt, Artificial Sequence
  Description of Artificial Sequence: Synthetic oligonucleotide
aauaauguaaagcagaagg

SEQ ID NO: 181478 - RNA, 19 nt, Artificial Sequence
  Description of Artificial Sequence: Synthetic oligonucleotide
auaaauugugaccagaacc

SEQ ID NO: 181479 - RNA, 19 nt, Artificial Sequence
  Description of Artificial Sequence: Synthetic oligonucleotide
aauacauugagucacaaca

SEQ ID NO: 181480 - RNA, 19 nt, Artificial Sequence
  Description of Artificial Sequence: Synthetic oligonucleotide
aauaagagugcuuuccacc

SEQ ID NO: 181481 - RNA, 19 nt, Artificial Sequence
  Description of Artificial Sequence: Synthetic oligonucleotide
uguaauaagagaaucacga

SEQ ID NO: 181482 - RNA, 19 nt, Artificial Sequence
  Description of Artificial Sequence: Synthetic oligonucleotide
aaaaugaaagcagagacuc

SEQ ID NO: 181483 - RNA, 19 nt, Artificial Sequence
  Description of Artificial Sequence: Synthetic oligonucleotide
agaguauaagucuuuagcc

SEQ ID NO: 181484 - RNA, 19 nt, Artificial Sequence
  Description of Artificial Sequence: Synthetic oligonucleotide
aacaacauacaccuuaguc

SEQ ID NO: 181485 - RNA, 19 nt, Artificial Sequence
  Description of Artificial Sequence: Synthetic oligonucleotide
ucuucuaucacaaaaguau

SEQ ID NO: 181486 - RNA, 19 nt, Artificial Sequence
  Description of Artificial Sequence: Synthetic oligonucleotide
uuaaaucauaacaucauga

SEQ ID NO: 181487 - RNA, 19 nt, Artificial Sequence
  Description of Artificial Sequence: Synthetic oligonucleotide
aaaguauuauacauacucc

SEQ ID NO: 181488 - RNA, 19 nt, Artificial Sequence
  Description of Artificial Sequence: Synthetic oligonucleotide
aagaauaagagugcuuucc

SEQ ID NO: 181489 - RNA, 19 nt, Artificial Sequence
  Description of Artificial Sequence: Synthetic oligonucleotide
uuuaccucuaacaaggcca

SEQ ID NO: 181490 - RNA, 19 nt, Artificial Sequence
  Description of Artificial Sequence: Synthetic oligonucleotide
aauuauaucuuaugaauaa

SEQ ID NO: 181491 - RNA, 19 nt, Artificial Sequence
  Description of Artificial Sequence: Synthetic oligonucleotide
uaaauugugaccagaacca

SEQ ID NO: 181492 - RNA, 19 nt, Artificial Sequence
  Description of Artificial Sequence: Synthetic oligonucleotide
aagccucaaauuucuaucc

SEQ ID NO: 181493 - RNA, 19 nt, Artificial Sequence
  Description of Artificial Sequence: Synthetic oligonucleotide
aaguauuauacauacucca

SEQ ID NO: 181494 - RNA, 19 nt, Artificial Sequence
  Description of Artificial Sequence: Synthetic oligonucleotide
agagguaagggauuccucc

SEQ ID NO: 181495 - RNA, 19 nt, Artificial Sequence
  Description of Artificial Sequence: Synthetic oligonucleotide
aaaucugcggcucaggacu

SEQ ID NO: 181496 - RNA, 19 nt, Artificial Sequence
  Description of Artificial Sequence: Synthetic oligonucleotide
uuagcuguaggacauaaac

SEQ ID NO: 181497 - RNA, 19 nt, Artificial Sequence
  Description of Artificial Sequence: Synthetic oligonucleotide
aauuaucugagcaugaagu

SEQ ID NO: 181498 - RNA, 19 nt, Artificial Sequence
  Description of Artificial Sequence: Synthetic oligonucleotide
aaucagcauaaauugugac

SEQ ID NO: 181499 - RNA, 19 nt, Artificial Sequence
  Description of Artificial Sequence: Synthetic oligonucleotide
aaauggauuauuacgauca

SEQ ID NO: 181500 - RNA, 19 nt, Artificial Sequence
  Description of Artificial Sequence: Synthetic oligonucleotide
aauaaaacgagcugugcau

SEQ ID NO: 181501 - RNA, 19 nt, Artificial Sequence
  Description of Artificial Sequence: Synthetic oligonucleotide
uuuaucugacuaauaauga

SEQ ID NO: 181502 - RNA, 19 nt, Artificial Sequence
  Description of Artificial Sequence: Synthetic oligonucleotide
uguguagcaagaaaggaac

SEQ ID NO: 181503 - RNA, 19 nt, Artificial Sequence
  Description of Artificial Sequence: Synthetic oligonucleotide
cauuucaguagcauuagcc

SEQ ID NO: 181504 - RNA, 19 nt, Artificial Sequence
  Description of Artificial Sequence: Synthetic oligonucleotide
ucuaauuauaucuuaugaa

SEQ ID NO: 181505 - RNA, 19 nt, Artificial Sequence
  Description of Artificial Sequence: Synthetic oligonucleotide
uggaaaucuuucaugaggc

SEQ ID NO: 181506 - RNA, 19 nt, Artificial Sequence
  Description of Artificial Sequence: Synthetic oligonucleotide
cauauucuggcccaaagcc

SEQ ID NO: 181507 - RNA, 19 nt, Artificial Sequence
  Description of Artificial Sequence: Synthetic oligonucleotide
ugaauuugucaaacaaagg

SEQ ID NO: 181508 - RNA, 19 nt, Artificial Sequence
  Description of Artificial Sequence: Synthetic oligonucleotide
acaguguagacuaacaacg

SEQ ID NO: 181509 - RNA, 19 nt, Artificial Sequence
  Description of Artificial Sequence: Synthetic oligonucleotide
uaauaagagaaucacgaau

SEQ ID NO: 181510 - RNA, 19 nt, Artificial Sequence
  Description of Artificial Sequence: Synthetic oligonucleotide
aggauguacugucaguugc

SEQ ID NO: 181511 - RNA, 19 nt, Artificial Sequence
  Description of Artificial Sequence: Synthetic oligonucleotide
ugcuuugugucuuucaaag

SEQ ID NO: 181512 - RNA, 19 nt, Artificial Sequence
  Description of Artificial Sequence: Synthetic oligonucleotide
aagucaauacucuuugcca

SEQ ID NO: 181513 - RNA, 19 nt, Artificial Sequence
  Description of Artificial Sequence: Synthetic oligonucleotide
cauaacaucaugaagguaa

SEQ ID NO: 181514 - RNA, 19 nt, Artificial Sequence
  Description of Artificial Sequence: Synthetic oligonucleotide
uguaggacauaaacaaugc

SEQ ID NO: 181515 - RNA, 19 nt, Artificial Sequence
  Description of Artificial Sequence: Synthetic oligonucleotide
aaucuggucuaauuauauc

SEQ ID NO: 181516 - RNA, 19 nt, Artificial Sequence
  Description of Artificial Sequence: Synthetic oligonucleotide
acuaacaacguccauuuca

SEQ ID NO: 181517 - RNA, 19 nt, Artificial Sequence
  Description of Artificial Sequence: Synthetic oligonucleotide
uuagcuugaucaaagcaga

SEQ ID NO: 181518 - RNA, 19 nt, Artificial Sequence
  Description of Artificial Sequence: Synthetic oligonucleotide
aucuggucuaauuauaucu

SEQ ID NO: 181519 - RNA, 19 nt, Artificial Sequence
  Description of Artificial Sequence: Synthetic oligonucleotide
aaacgagcugugcauugcc

SEQ ID NO: 181520 - RNA, 19 nt, Artificial Sequence
  Description of Artificial Sequence: Synthetic oligonucleotide
ugugaauagugccacguug

SEQ ID NO: 181521 - RNA, 19 nt, Artificial Sequence
  Description of Artificial Sequence: Synthetic oligonucleotide
uaagucuuuagccauccca

SEQ ID NO: 181522 - RNA, 19 nt, Artificial Sequence
  Description of Artificial Sequence: Synthetic oligonucleotide
aagacugacaaaaggcuac

SEQ ID NO: 181523 - RNA, 19 nt, Artificial Sequence
  Description of Artificial Sequence: Synthetic oligonucleotide
cuuggcaaaagcaucggcc

SEQ ID NO: 181524 - RNA, 19 nt, Artificial Sequence
  Description of Artificial Sequence: Synthetic oligonucleotide
aaguuaaaucauaacauca

SEQ ID NO: 181525 - RNA, 19 nt, Artificial Sequence
  Description of Artificial Sequence: Synthetic oligonucleotide
uauucuggcccaaagccag

SEQ ID NO: 181526 - RNA, 19 nt, Artificial Sequence
  Description of Artificial Sequence: Synthetic oligonucleotide
aauaagagaaucacgaaua

SEQ ID NO: 181527 - RNA, 19 nt, Artificial Sequence
  Description of Artificial Sequence: Synthetic oligonucleotide
aaaccaauguuagauaaga

SEQ ID NO: 181528 - RNA, 19 nt, Artificial Sequence
  Description of Artificial Sequence: Synthetic oligonucleotide
aagcuuugugacuacaaca

SEQ ID NO: 181529 - RNA, 19 nt, Artificial Sequence
  Description of Artificial Sequence: Synthetic oligonucleotide
agaaugaaugaucucauau

SEQ ID NO: 181530 - RNA, 19 nt, Artificial Sequence
  Description of Artificial Sequence: Synthetic oligonucleotide
auaaaaguaagcauugcug

SEQ ID NO: 181531 - RNA, 19 nt, Artificial Sequence
  Description of Artificial Sequence: Synthetic oligonucleotide
agaaucacgaauaucccac

SEQ ID NO: 181532 - RNA, 19 nt, Artificial Sequence
  Description of Artificial Sequence: Synthetic oligonucleotide
ugugaauuugucaaacaaa

SEQ ID NO: 181533 - RNA, 19 nt, Artificial Sequence
  Description of Artificial Sequence: Synthetic oligonucleotide
aaagguaagugcuaccaaa

SEQ ID NO: 181534 - RNA, 19 nt, Artificial Sequence
  Description of Artificial Sequence: Synthetic oligonucleotide
gggaagagcgcuuagaucc

SEQ ID NO: 181535 - RNA, 19 nt, Artificial Sequence
  Description of Artificial Sequence: Synthetic oligonucleotide
acaacguccauuucaguag

SEQ ID NO: 181536 - RNA, 19 nt, Artificial Sequence
  Description of Artificial Sequence: Synthetic oligonucleotide
cuaacaacguccauuucag

SEQ ID NO: 181537 - RNA, 19 nt, Artificial Sequence
  Description of Artificial Sequence: Synthetic oligonucleotide
uccaccacugaauagaguc

SEQ ID NO: 181538 - RNA, 19 nt, Artificial Sequence
  Description of Artificial Sequence: Synthetic oligonucleotide
ucuaguagagugucaaaca

SEQ ID NO: 181539 - RNA, 19 nt, Artificial Sequence
  Description of Artificial Sequence: Synthetic oligonucleotide
agcgcuuagauccuucaac

SEQ ID NO: 181540 - RNA, 19 nt, Artificial Sequence
  Description of Artificial Sequence: Synthetic oligonucleotide
aauguuagauaagacuaug

SEQ ID NO: 181541 - RNA, 19 nt, Artificial Sequence
  Description of Artificial Sequence: Synthetic oligonucleotide
guuaaaucauaacaucaug

SEQ ID NO: 181542 - RNA, 19 nt, Artificial Sequence
  Description of Artificial Sequence: Synthetic oligonucleotide
acgaauaucccaccuuuac

SEQ ID NO: 181543 - RNA, 19 nt, Artificial Sequence
  Description of Artificial Sequence: Synthetic oligonucleotide
uaaaccaauguuagauaag

SEQ ID NO: 181544 - RNA, 19 nt, Artificial Sequence
  Description of Artificial Sequence: Synthetic oligonucleotide
gauuggccaaguuaaauca

SEQ ID NO: 181545 - RNA, 19 nt, Artificial Sequence
  Description of Artificial Sequence: Synthetic oligonucleotide
acagauauaaccggaagug

SEQ ID NO: 181546 - RNA, 19 nt, Artificial Sequence
  Description of Artificial Sequence: Synthetic oligonucleotide
agagcuggaacaugcugcc

SEQ ID NO: 181547 - RNA, 19 nt, Artificial Sequence
  Description of Artificial Sequence: Synthetic oligonucleotide
aaaacgagcugugcauugc

SEQ ID NO: 181548 - RNA, 19 nt, Artificial Sequence
  Description of Artificial Sequence: Synthetic oligonucleotide
gaagucauagggaaggaug

SEQ ID NO: 181549 - RNA, 19 nt, Artificial Sequence
  Description of Artificial Sequence: Synthetic oligonucleotide
agguaagugcuaccaaacc

SEQ ID NO: 181550 - RNA, 19 nt, Artificial Sequence
  Description of Artificial Sequence: Synthetic oligonucleotide
uuaacaucgggaaugugua

SEQ ID NO: 181551 - RNA, 19 nt, Artificial Sequence
  Description of Artificial Sequence: Synthetic oligonucleotide
uaucugacuaauaaugaua

SEQ ID NO: 181552 - RNA, 19 nt, Artificial Sequence
  Description of Artificial Sequence: Synthetic oligonucleotide
uguagacuaacaacgucca

SEQ ID NO: 181553 - RNA, 19 nt, Artificial Sequence
  Description of Artificial Sequence: Synthetic oligonucleotide
aacaccgccccgaagauuc

SEQ ID NO: 181554 - RNA, 19 nt, Artificial Sequence
  Description of Artificial Sequence: Synthetic oligonucleotide
uauugugugucccaacuuc

SEQ ID NO: 181555 - RNA, 19 nt, Artificial Sequence
  Description of Artificial Sequence: Synthetic oligonucleotide
guaaucagcauaaauugug

SEQ ID NO: 181556 - RNA, 19 nt, Artificial Sequence
  Description of Artificial Sequence: Synthetic oligonucleotide
aguguagacuaacaacguc

SEQ ID NO: 181557 - RNA, 19 nt, Artificial Sequence
  Description of Artificial Sequence: Synthetic oligonucleotide
cuuguuuaagcuuucccuc

SEQ ID NO: 181558 - RNA, 19 nt, Artificial Sequence
  Description of Artificial Sequence: Synthetic oligonucleotide
gucuaauuauaucuuauga

SEQ ID NO: 181559 - RNA, 19 nt, Artificial Sequence
  Description of Artificial Sequence: Synthetic oligonucleotide
aggaaauaaaacgagcugu

SEQ ID NO: 181560 - RNA, 19 nt, Artificial Sequence
  Description of Artificial Sequence: Synthetic oligonucleotide
auauuaagccucaaauuuc

SEQ ID NO: 181561 - RNA, 19 nt, Artificial Sequence
  Description of Artificial Sequence: Synthetic oligonucleotide
auaagagugcuuuccacca

SEQ ID NO: 181562 - RNA, 19 nt, Artificial Sequence
  Description of Artificial Sequence: Synthetic oligonucleotide
aaauaucugccugccuacc

SEQ ID NO: 181563 - RNA, 19 nt, Artificial Sequence
  Description of Artificial Sequence: Synthetic oligonucleotide
cagaggaaagucaauacuc

SEQ ID NO: 181564 - RNA, 19 nt, Artificial Sequence
  Description of Artificial Sequence: Synthetic oligonucleotide
ugauuggccaaguuaaauc

SEQ ID NO: 181565 - RNA, 19 nt, Artificial Sequence
  Description of Artificial Sequence: Synthetic oligonucleotide
ucauuguaaggugagaaaa

SEQ ID NO: 181566 - RNA, 19 nt, Artificial Sequence
  Description of Artificial Sequence: Synthetic oligonucleotide
uuuacaaacugaugguaaa

SEQ ID NO: 181567 - RNA, 19 nt, Artificial Sequence
  Description of Artificial Sequence: Synthetic oligonucleotide
acuaaugugaacagccagg

SEQ ID NO: 181568 - RNA, 19 nt, Artificial Sequence
  Description of Artificial Sequence: Synthetic oligonucleotide
auggacaggcauuugaagu

SEQ ID NO: 181569 - RNA, 19 nt, Artificial Sequence
  Description of Artificial Sequence: Synthetic oligonucleotide
cagaguauucuucuaguag

SEQ ID NO: 181570 - RNA, 19 nt, Artificial Sequence
  Description of Artificial Sequence: Synthetic oligonucleotide
cuacuuuaccucuaacaag

SEQ ID NO: 181571 - RNA, 19 nt, Artificial Sequence
  Description of Artificial Sequence: Synthetic oligonucleotide
uuaccucuaacaaggccag

SEQ ID NO: 181572 - RNA, 19 nt, Artificial Sequence
  Description of Artificial Sequence: Synthetic oligonucleotide
ucgagauuucucaaaugug

SEQ ID NO: 181573 - RNA, 19 nt, Artificial Sequence
  Description of Artificial Sequence: Synthetic oligonucleotide
gaaauggauuauuacgauc

SEQ ID NO: 181574 - RNA, 19 nt, Artificial Sequence
  Description of Artificial Sequence: Synthetic oligonucleotide
uguagaguguggccaacag

SEQ ID NO: 181575 - RNA, 19 nt, Artificial Sequence
  Description of Artificial Sequence: Synthetic oligonucleotide
aaagaugaucaagagucca

SEQ ID NO: 181576 - RNA, 19 nt, Artificial Sequence
  Description of Artificial Sequence: Synthetic oligonucleotide
gaauguguacaacauggca

SEQ ID NO: 181577 - RNA, 19 nt, Artificial Sequence
  Description of Artificial Sequence: Synthetic oligonucleotide
uguuuaagcuuucccucag

SEQ ID NO: 181578 - RNA, 19 nt, Artificial Sequence
  Description of Artificial Sequence: Synthetic oligonucleotide
cauagaaaccaaaggcggc

SEQ ID NO: 181579 - RNA, 19 nt, Artificial Sequence
  Description of Artificial Sequence: Synthetic oligonucleotide
auugugaccagaaccagag

SEQ ID NO: 181580 - RNA, 19 nt, Artificial Sequence
  Description of Artificial Sequence: Synthetic oligonucleotide
auugagucacaacaaauuu

SEQ ID NO: 181581 - RNA, 19 nt, Artificial Sequence
  Description of Artificial Sequence: Synthetic oligonucleotide
agccugaauacccuauacg

SEQ ID NO: 181582 - RNA, 19 nt, Artificial Sequence
  Description of Artificial Sequence: Synthetic oligonucleotide
uucuaguagagugucaaac

SEQ ID NO: 181583 - RNA, 19 nt, Artificial Sequence
  Description of Artificial Sequence: Synthetic oligonucleotide
auacagucgagauuucuca

SEQ ID NO: 181584 - RNA, 19 nt, Artificial Sequence
  Description of Artificial Sequence: Synthetic oligonucleotide
uagcuguaggacauaaaca

SEQ ID NO: 181585 - RNA, 19 nt, Artificial Sequence
  Description of Artificial Sequence: Synthetic oligonucleotide
uguaaagcagaagggaaga

SEQ ID NO: 181586 - RNA, 19 nt, Artificial Sequence
  Description of Artificial Sequence: Synthetic oligonucleotide
ucaaaucugcggcucagga

SEQ ID NO: 181587 - RNA, 19 nt, Artificial Sequence
  Description of Artificial Sequence: Synthetic oligonucleotide
uuaagccucaaauuucuau

SEQ ID NO: 181588 - RNA, 19 nt, Artificial Sequence
  Description of Artificial Sequence: Synthetic oligonucleotide
aaggauguacugucaguug

SEQ ID NO: 181589 - RNA, 19 nt, Artificial Sequence
  Description of Artificial Sequence: Synthetic oligonucleotide
caccuuuacaucuuuucag

SEQ ID NO: 181590 - RNA, 19 nt, Artificial Sequence
  Description of Artificial Sequence: Synthetic oligonucleotide
caguaaggaaauaaaacga

SEQ ID NO: 181591 - RNA, 19 nt, Artificial Sequence
  Description of Artificial Sequence: Synthetic oligonucleotide
guguagacuaacaacgucc

SEQ ID NO: 181592 - RNA, 19 nt, Artificial Sequence
  Description of Artificial Sequence: Synthetic oligonucleotide
uccauguagguacaagcac

SEQ ID NO: 181593 - RNA, 19 nt, Artificial Sequence
  Description of Artificial Sequence: Synthetic oligonucleotide
acaaaaccucauuguaagg

SEQ ID NO: 181594 - RNA, 19 nt, Artificial Sequence
  Description of Artificial Sequence: Synthetic oligonucleotide
cuaauuauaucuuaugaau

SEQ ID NO: 181595 - RNA, 19 nt, Artificial Sequence
  Description of Artificial Sequence: Synthetic oligonucleotide
agagaaucacgaauauccc

SEQ ID NO: 181596 - RNA, 19 nt, Artificial Sequence
  Description of Artificial Sequence: Synthetic oligonucleotide
aucauugcgggguuccagg

SEQ ID NO: 181597 - RNA, 19 nt, Artificial Sequence
  Description of Artificial Sequence: Synthetic oligonucleotide
cuauacgcagacuccacag

SEQ ID NO: 181598 - RNA, 19 nt, Artificial Sequence
  Description of Artificial Sequence: Synthetic oligonucleotide
aaaggauguacugucaguu

SEQ ID NO: 181599 - RNA, 19 nt, Artificial Sequence
  Description of Artificial Sequence: Synthetic oligonucleotide
cauuguaaggugagaaaac

SEQ ID NO: 181600 - RNA, 19 nt, Artificial Sequence
  Description of Artificial Sequence: Synthetic oligonucleotide
gaaauaucugccugccuac

SEQ ID NO: 181601 - RNA, 19 nt, Artificial Sequence
  Description of Artificial Sequence: Synthetic oligonucleotide
uacaacaguacaguguaga

SEQ ID NO: 181602 - RNA, 19 nt, Artificial Sequence
  Description of Artificial Sequence: Synthetic oligonucleotide
ucuuuagccaucccaaguu

SEQ ID NO: 181603 - RNA, 19 nt, Artificial Sequence
  Description of Artificial Sequence: Synthetic oligonucleotide
agcaacaccgccccgaaga

SEQ ID NO: 181604 - RNA, 19 nt, Artificial Sequence
  Description of Artificial Sequence: Synthetic oligonucleotide
aguggucaagcacacaccu

SEQ ID NO: 181605 - RNA, 19 nt, Artificial Sequence
  Description of Artificial Sequence: Synthetic oligonucleotide
gccaaguuaaaucauaaca

SEQ ID NO: 181606 - RNA, 19 nt, Artificial Sequence
  Description of Artificial Sequence: Synthetic oligonucleotide
aacaucgggaauguguaca

SEQ ID NO: 181607 - RNA, 19 nt, Artificial Sequence
  Description of Artificial Sequence: Synthetic oligonucleotide
caauuaucugagcaugaag

SEQ ID NO: 181608 - RNA, 19 nt, Artificial Sequence
  Description of Artificial Sequence: Synthetic oligonucleotide
uuguuuaagcuuucccuca

SEQ ID NO: 181609 - RNA, 19 nt, Artificial Sequence
  Description of Artificial Sequence: Synthetic oligonucleotide
cuaaugugaacagccaggc

SEQ ID NO: 181610 - RNA, 19 nt, Artificial Sequence
  Description of Artificial Sequence: Synthetic oligonucleotide
aaauugugaccagaaccag

SEQ ID NO: 181611 - RNA, 19 nt, Artificial Sequence
  Description of Artificial Sequence: Synthetic oligonucleotide
cuuuaccucuaacaaggcc

SEQ ID NO: 181612 - RNA, 19 nt, Artificial Sequence
  Description of Artificial Sequence: Synthetic oligonucleotide
uucuucuaucacaaaagua

SEQ ID NO: 181613 - RNA, 19 nt, Artificial Sequence
  Description of Artificial Sequence: Synthetic oligonucleotide
uuagccaucccaaguuucu

SEQ ID NO: 181614 - RNA, 19 nt, Artificial Sequence
  Description of Artificial Sequence: Synthetic oligonucleotide
ugaucaaagcagaguauaa

SEQ ID NO: 181615 - RNA, 19 nt, Artificial Sequence
  Description of Artificial Sequence: Synthetic oligonucleotide
gagacucuguccuugaaaa

SEQ ID NO: 181616 - RNA, 19 nt, Artificial Sequence
  Description of Artificial Sequence: Synthetic oligonucleotide
cacagacccguccagaaag

SEQ ID NO: 181617 - RNA, 19 nt, Artificial Sequence
  Description of Artificial Sequence: Synthetic oligonucleotide
agguaagguaaaccucagc

SEQ ID NO: 181618 - RNA, 19 nt, Artificial Sequence
  Description of Artificial Sequence: Synthetic oligonucleotide
gaaagucaauacucuuugc

SEQ ID NO: 181619 - RNA, 19 nt, Artificial Sequence
  Description of Artificial Sequence: Synthetic oligonucleotide
ugugcuaggaaggucuccc

SEQ ID NO: 181620 - RNA, 19 nt, Artificial Sequence
  Description of Artificial Sequence: Synthetic oligonucleotide
auuagccucacuaauuugu

SEQ ID NO: 181621 - RNA, 19 nt, Artificial Sequence
  Description of Artificial Sequence: Synthetic oligonucleotide
agucaauacucuuugccau

SEQ ID NO: 181622 - RNA, 19 nt, Artificial Sequence
  Description of Artificial Sequence: Synthetic oligonucleotide
aaauguguccgaauccaug

SEQ ID NO: 181623 - RNA, 19 nt, Artificial Sequence
  Description of Artificial Sequence: Synthetic oligonucleotide
gucaaacaaaacuauucuc

SEQ ID NO: 181624 - RNA, 19 nt, Artificial Sequence
  Description of Artificial Sequence: Synthetic oligonucleotide
agacuaacaacguccauuu

SEQ ID NO: 181625 - RNA, 19 nt, Artificial Sequence
  Description of Artificial Sequence: Synthetic oligonucleotide
accaauuaacacagcaaac

SEQ ID NO: 181626 - RNA, 19 nt, Artificial Sequence
  Description of Artificial Sequence: Synthetic oligonucleotide
aaagaaugaaugaucucau

SEQ ID NO: 181627 - RNA, 19 nt, Artificial Sequence
  Description of Artificial Sequence: Synthetic oligonucleotide
gaauaucccaccuuuacau

SEQ ID NO: 181628 - RNA, 19 nt, Artificial Sequence
  Description of Artificial Sequence: Synthetic oligonucleotide
acguugaaaacaaccaguc

SEQ ID NO: 181629 - RNA, 19 nt, Artificial Sequence
  Description of Artificial Sequence: Synthetic oligonucleotide
aaacugaugguaaaccaau

SEQ ID NO: 181630 - RNA, 19 nt, Artificial Sequence
  Description of Artificial Sequence: Synthetic oligonucleotide
auugcugugggaagagcgc

SEQ ID NO: 181631 - RNA, 19 nt, Artificial Sequence
  Description of Artificial Sequence: Synthetic oligonucleotide
ucucacuugugcagaacug

SEQ ID NO: 181632 - RNA, 19 nt, Artificial Sequence
  Description of Artificial Sequence: Synthetic oligonucleotide
gagaaucacgaauauccca

SEQ ID NO: 181633 - RNA, 19 nt, Artificial Sequence
  Description of Artificial Sequence: Synthetic oligonucleotide
uauaaccggaagugugucc

SEQ ID NO: 181634 - RNA, 19 nt, Artificial Sequence
  Description of Artificial Sequence: Synthetic oligonucleotide
agaaauggauuauuacgau

SEQ ID NO: 181635 - RNA, 19 nt, Artificial Sequence
  Description of Artificial Sequence: Synthetic oligonucleotide
cuuagucagaggaaaguca

SEQ ID NO: 181636 - RNA, 19 nt, Artificial Sequence
  Description of Artificial Sequence: Synthetic oligonucleotide
uugugacuacaacaguaca

SEQ ID NO: 181637 - RNA, 19 nt, Artificial Sequence
  Description of Artificial Sequence: Synthetic oligonucleotide
auaagagaaucacgaauau

SEQ ID NO: 181638 - RNA, 19 nt, Artificial Sequence
  Description of Artificial Sequence: Synthetic oligonucleotide
ucacgaauaucccaccuuu

SEQ ID NO: 181639 - RNA, 19 nt, Artificial Sequence
  Description of Artificial Sequence: Synthetic oligonucleotide
aggaaaagagcaacaccgc

SEQ ID NO: 181640 - RNA, 19 nt, Artificial Sequence
  Description of Artificial Sequence: Synthetic oligonucleotide
uucuccgcagggaaguccc

SEQ ID NO: 181641 - RNA, 19 nt, Artificial Sequence
  Description of Artificial Sequence: Synthetic oligonucleotide
uccuauucugccauauuua

SEQ ID NO: 181642 - RNA, 19 nt, Artificial Sequence
  Description of Artificial Sequence: Synthetic oligonucleotide
uccaaucagaguggguugg

SEQ ID NO: 181643 - RNA, 19 nt, Artificial Sequence
  Description of Artificial Sequence: Synthetic oligonucleotide
uaaagguaagugcuaccaa

SEQ ID NO: 181644 - RNA, 19 nt, Artificial Sequence
  Description of Artificial Sequence: Synthetic oligonucleotide
auugccuuaaguaauuuua

SEQ ID NO: 181645 - RNA, 19 nt, Artificial Sequence
  Description of Artificial Sequence: Synthetic oligonucleotide
gaaucacgaauaucccacc

SEQ ID NO: 181646 - RNA, 19 nt, Artificial Sequence
  Description of Artificial Sequence: Synthetic oligonucleotide
gauacagucgagauuucuc

SEQ ID NO: 181647 - RNA, 19 nt, Artificial Sequence
  Description of Artificial Sequence: Synthetic oligonucleotide
aaagcagaguauaagucuu

SEQ ID NO: 181648 - RNA, 19 nt, Artificial Sequence
  Description of Artificial Sequence: Synthetic oligonucleotide
cuugaagaaacuaccugga

SEQ ID NO: 181649 - RNA, 19 nt, Artificial Sequence
  Description of Artificial Sequence: Synthetic oligonucleotide
aagauucgcuucuccgcag

SEQ ID NO: 181650 - RNA, 19 nt, Artificial Sequence
  Description of Artificial Sequence: Synthetic oligonucleotide
gacauggacaggcauuuga

SEQ ID NO: 181651 - RNA, 19 nt, Artificial Sequence
  Description of Artificial Sequence: Synthetic oligonucleotide
auguaaagcagaagggaag

SEQ ID NO: 181652 - RNA, 19 nt, Artificial Sequence
  Description of Artificial Sequence: Synthetic oligonucleotide
gaagaauaagagugcuuuc

SEQ ID NO: 181653 - RNA, 19 nt, Artificial Sequence
  Description of Artificial Sequence: Synthetic oligonucleotide
cauggacaggcauuugaag

SEQ ID NO: 181654 - RNA, 19 nt, Artificial Sequence
  Description of Artificial Sequence: Synthetic oligonucleotide
auauaaccggaaguguguc

SEQ ID NO: 181655 - RNA, 19 nt, Artificial Sequence
  Description of Artificial Sequence: Synthetic oligonucleotide
aagucuuuagccaucccaa

SEQ ID NO: 181656 - RNA, 19 nt, Artificial Sequence
  Description of Artificial Sequence: Synthetic oligonucleotide
uauacgcagacuccacagu

SEQ ID NO: 181657 - RNA, 19 nt, Artificial Sequence
  Description of Artificial Sequence: Synthetic oligonucleotide
auagaaaccaaaggcggca

SEQ ID NO: 181658 - RNA, 19 nt, Artificial Sequence
  Description of Artificial Sequence: Synthetic oligonucleotide
guugauacagucgagauuu

SEQ ID NO: 181659 - RNA, 19 nt, Artificial Sequence
  Description of Artificial Sequence: Synthetic oligonucleotide
agagaagaauaagagugcu

SEQ ID NO: 181660 - RNA, 19 nt, Artificial Sequence
  Description of Artificial Sequence: Synthetic oligonucleotide
ucugccugccuaccaaggc

SEQ ID NO: 181661 - RNA, 19 nt, Artificial Sequence
  Description of Artificial Sequence: Synthetic oligonucleotide
ggucuaauuauaucuuaug

SEQ ID NO: 181662 - RNA, 19 nt, Artificial Sequence
  Description of Artificial Sequence: Synthetic oligonucleotide
uacaccuuagucagaggaa

SEQ ID NO: 181663 - RNA, 19 nt, Artificial Sequence
  Description of Artificial Sequence: Synthetic oligonucleotide
aaaccucauuguaagguga

SEQ ID NO: 181664 - RNA, 19 nt, Artificial Sequence
  Description of Artificial Sequence: Synthetic oligonucleotide
auaaccggaagugugucca

SEQ ID NO: 181665 - RNA, 19 nt, Artificial Sequence
  Description of Artificial Sequence: Synthetic oligonucleotide
gacagauauaaccggaagu

SEQ ID NO: 181666 - RNA, 19 nt, Artificial Sequence
  Description of Artificial Sequence: Synthetic oligonucleotide
ugccgcugugcuaggaagg

SEQ ID NO: 181667 - RNA, 19 nt, Artificial Sequence
  Description of Artificial Sequence: Synthetic oligonucleotide
ggaaaagagcaacaccgcc

SEQ ID NO: 181668 - RNA, 19 nt, Artificial Sequence
  Description of Artificial Sequence: Synthetic oligonucleotide
gaaucacagacccguccag

SEQ ID NO: 181669 - RNA, 19 nt, Artificial Sequence
  Description of Artificial Sequence: Synthetic oligonucleotide
gugugaauuugucaaacaa

SEQ ID NO: 181670 - RNA, 19 nt, Artificial Sequence
  Description of Artificial Sequence: Synthetic oligonucleotide
agauucgcuucuccgcagg

SEQ ID NO: 181671 - RNA, 19 nt, Artificial Sequence
  Description of Artificial Sequence: Synthetic oligonucleotide
auguacuuuuauccaguug

SEQ ID NO: 181672 - RNA, 19 nt, Artificial Sequence
  Description of Artificial Sequence: Synthetic oligonucleotide
ucgggaauguguacaacau

SEQ ID NO: 181673 - RNA, 19 nt, Artificial Sequence
  Description of Artificial Sequence: Synthetic oligonucleotide
aguaaucaccuccaauuuu

SEQ ID NO: 181674 - RNA, 19 nt, Artificial Sequence
  Description of Artificial Sequence: Synthetic oligonucleotide
auuauaucuuaugaauaaa

SEQ ID NO: 181675 - RNA, 19 nt, Artificial Sequence
  Description of Artificial Sequence: Synthetic oligonucleotide
gucgagauuucucaaaugu

SEQ ID NO: 181676 - RNA, 19 nt, Artificial Sequence
  Description of Artificial Sequence: Synthetic oligonucleotide
gauucgcuucuccgcaggg

SEQ ID NO: 181677 - RNA, 19 nt, Artificial Sequence
  Description of Artificial Sequence: Synthetic oligonucleotide
uuuuacauccuuguuucuu

SEQ ID NO: 181678 - RNA, 19 nt, Artificial Sequence
  Description of Artificial Sequence: Synthetic oligonucleotide
ugaauagugccacguugaa

SEQ ID NO: 181679 - RNA, 19 nt, Artificial Sequence
  Description of Artificial Sequence: Synthetic oligonucleotide
uuauguacuuaaucauuuu

SEQ ID NO: 181680 - RNA, 19 nt, Artificial Sequence
  Description of Artificial Sequence: Synthetic oligonucleotide
gaauacccuauacgcagac

SEQ ID NO: 181681 - RNA, 19 nt, Artificial Sequence
  Description of Artificial Sequence: Synthetic oligonucleotide
aaccucauuguaaggugag

SEQ ID NO: 181682 - RNA, 19 nt, Artificial Sequence
  Description of Artificial Sequence: Synthetic oligonucleotide
acaaccagucagaaacugg

SEQ ID NO: 181683 - RNA, 19 nt, Artificial Sequence
  Description of Artificial Sequence: Synthetic oligonucleotide
gcuacuuuaccucuaacaa

SEQ ID NO: 181684 - RNA, 19 nt, Artificial Sequence
  Description of Artificial Sequence: Synthetic oligonucleotide
ugugucuuucaaagccuga

SEQ ID NO: 181685 - RNA, 19 nt, Artificial Sequence
  Description of Artificial Sequence: Synthetic oligonucleotide
uuagauccuucaacaacau

SEQ ID NO: 181686 - RNA, 19 nt, Artificial Sequence
  Description of Artificial Sequence: Synthetic oligonucleotide
agucgagauuucucaaaug

SEQ ID NO: 181687 - RNA, 19 nt, Artificial Sequence
  Description of Artificial Sequence: Synthetic oligonucleotide
agccauaaaaguaagcauu

SEQ ID NO: 181688 - RNA, 19 nt, Artificial Sequence
  Description of Artificial Sequence: Synthetic oligonucleotide
uccgaauccaugaucuguu

SEQ ID NO: 181689 - RNA, 19 nt, Artificial Sequence
  Description of Artificial Sequence: Synthetic oligonucleotide
ggacauaaacaaugcagug

SEQ ID NO: 181690 - RNA, 19 nt, Artificial Sequence
  Description of Artificial Sequence: Synthetic oligonucleotide
auuuuacaaacugauggua

SEQ ID NO: 181691 - RNA, 19 nt, Artificial Sequence
  Description of Artificial Sequence: Synthetic oligonucleotide
cuaagugaaaggauguacu

SEQ ID NO: 181692 - RNA, 19 nt, Artificial Sequence
  Description of Artificial Sequence: Synthetic oligonucleotide
cuaguagagugucaaacaa

SEQ ID NO: 181693 - RNA, 19 nt, Artificial Sequence
  Description of Artificial Sequence: Synthetic oligonucleotide
aaggcuacuuuaccucuaa

SEQ ID NO: 181694 - RNA, 19 nt, Artificial Sequence
  Description of Artificial Sequence: Synthetic oligonucleotide
acacugauuggccaaguua

SEQ ID NO: 181695 - RNA, 19 nt, Artificial Sequence
  Description of Artificial Sequence: Synthetic oligonucleotide
aguauuauacauacuccau

SEQ ID NO: 181696 - RNA, 19 nt, Artificial Sequence
  Description of Artificial Sequence: Synthetic oligonucleotide
gaaaggcaauuaucugagc

SEQ ID NO: 181697 - RNA, 19 nt, Artificial Sequence
  Description of Artificial Sequence: Synthetic oligonucleotide
caaacugaugguaaaccaa

SEQ ID NO: 181698 - RNA, 19 nt, Artificial Sequence
  Description of Artificial Sequence: Synthetic oligonucleotide
uuauugugugucccaacuu

SEQ ID NO: 181699 - RNA, 19 nt, Artificial Sequence
  Description of Artificial Sequence: Synthetic oligonucleotide
aggcaauuaucugagcaug

SEQ ID NO: 181700 - RNA, 19 nt, Artificial Sequence
  Description of Artificial Sequence: Synthetic oligonucleotide
ucuaguaguggagggugug

SEQ ID NO: 181701 - RNA, 19 nt, Artificial Sequence
  Description of Artificial Sequence: Synthetic oligonucleotide
aagagcaacaccgccccga

SEQ ID NO: 181702 - RNA, 19 nt, Artificial Sequence
  Description of Artificial Sequence: Synthetic oligonucleotide
acuuuaccucuaacaaggc

SEQ ID NO: 181703 - RNA, 19 nt, Artificial Sequence
  Description of Artificial Sequence: Synthetic oligonucleotide
accaaaccuggcuuaaaau

SEQ ID NO: 181704 - RNA, 19 nt, Artificial Sequence
  Description of Artificial Sequence: Synthetic oligonucleotide
aagaugaucaagaguccaa

SEQ ID NO: 181705 - RNA, 19 nt, Artificial Sequence
  Description of Artificial Sequence: Synthetic oligonucleotide
aaucacagacccguccaga

SEQ ID NO: 181706 - RNA, 19 nt, Artificial Sequence
  Description of Artificial Sequence: Synthetic oligonucleotide
guaggacauaaacaaugca

SEQ ID NO: 181707 - RNA, 19 nt, Artificial Sequence
  Description of Artificial Sequence: Synthetic oligonucleotide
cauggccaaguacagccag

SEQ ID NO: 181708 - RNA, 19 nt, Artificial Sequence
  Description of Artificial Sequence: Synthetic oligonucleotide
aaacaaccagucagaaacu

SEQ ID NO: 181709 - RNA, 19 nt, Artificial Sequence
  Description of Artificial Sequence: Synthetic oligonucleotide
cuccauguagguacaagca

SEQ ID NO: 181710 - RNA, 19 nt, Artificial Sequence
  Description of Artificial Sequence: Synthetic oligonucleotide
auacgcagacuccacagua

SEQ ID NO: 181711 - RNA, 19 nt, Artificial Sequence
  Description of Artificial Sequence: Synthetic oligonucleotide
ugccuaccaaggcuuauaa

SEQ ID NO: 181712 - RNA, 19 nt, Artificial Sequence
  Description of Artificial Sequence: Synthetic oligonucleotide
ggacagauauaaccggaag

SEQ ID NO: 181713 - RNA, 19 nt, Artificial Sequence
  Description of Artificial Sequence: Synthetic oligonucleotide
cauuugaaguggucaagca

SEQ ID NO: 181714 - RNA, 19 nt, Artificial Sequence
  Description of Artificial Sequence: Synthetic oligonucleotide
agccaucccaaguuucuug

SEQ ID NO: 181715 - RNA, 19 nt, Artificial Sequence
  Description of Artificial Sequence: Synthetic oligonucleotide
uagauaagacuauguuuua

SEQ ID NO: 181716 - RNA, 19 nt, Artificial Sequence
  Description of Artificial Sequence: Synthetic oligonucleotide
uacagucgagauuucucaa

SEQ ID NO: 181717 - RNA, 19 nt, Artificial Sequence
  Description of Artificial Sequence: Synthetic oligonucleotide
aauacccuauacgcagacu

SEQ ID NO: 181718 - RNA, 19 nt, Artificial Sequence
  Description of Artificial Sequence: Synthetic oligonucleotide
auaucugccugccuaccaa

SEQ ID NO: 181719 - RNA, 19 nt, Artificial Sequence
  Description of Artificial Sequence: Synthetic oligonucleotide
auguuagauaagacuaugu

SEQ ID NO: 181720 - RNA, 19 nt, Artificial Sequence
  Description of Artificial Sequence: Synthetic oligonucleotide
gaaagucuccagagguaag

SEQ ID NO: 181721 - RNA, 19 nt, Artificial Sequence
  Description of Artificial Sequence: Synthetic oligonucleotide
auauucuggcccaaagcca

SEQ ID NO: 181722 - RNA, 19 nt, Artificial Sequence
  Description of Artificial Sequence: Synthetic oligonucleotide
aagagcgcuuagauccuuc

SEQ ID NO: 181723 - RNA, 19 nt, Artificial Sequence
  Description of Artificial Sequence: Synthetic oligonucleotide
agccucaaauuucuaucca

SEQ ID NO: 181724 - RNA, 19 nt, Artificial Sequence
  Description of Artificial Sequence: Synthetic oligonucleotide
agauaagacuauguuuuaa

SEQ ID NO: 181725 - RNA, 19 nt, Artificial Sequence
  Description of Artificial Sequence: Synthetic oligonucleotide
gugaauagugccacguuga

SEQ ID NO: 181726 - RNA, 19 nt, Artificial Sequence
  Description of Artificial Sequence: Synthetic oligonucleotide
uaccaaggcuuauaauuua

SEQ ID NO: 181727 - RNA, 19 nt, Artificial Sequence
  Description of Artificial Sequence: Synthetic oligonucleotide
uagccucacuaauuuguac

SEQ ID NO: 181728 - RNA, 19 nt, Artificial Sequence
  Description of Artificial Sequence: Synthetic oligonucleotide
uggcaacuucugcuaagug

SEQ ID NO: 181729 - RNA, 19 nt, Artificial Sequence
  Description of Artificial Sequence: Synthetic oligonucleotide
cauagcguccaccgaugcc

SEQ ID NO: 181730 - RNA, 19 nt, Artificial Sequence
  Description of Artificial Sequence: Synthetic oligonucleotide
uaacaucgggaauguguac

SEQ ID NO: 181731 - RNA, 19 nt, Artificial Sequence
  Description of Artificial Sequence: Synthetic oligonucleotide
cucugcuuagcuguaggac

SEQ ID NO: 181732 - RNA, 19 nt, Artificial Sequence
  Description of Artificial Sequence: Synthetic oligonucleotide
aguauucuucuaguagagu

SEQ ID NO: 181733 - RNA, 19 nt, Artificial Sequence
  Description of Artificial Sequence: Synthetic oligonucleotide
aggcuacuuuaccucuaac

SEQ ID NO: 181734 - RNA, 19 nt, Artificial Sequence
  Description of Artificial Sequence: Synthetic oligonucleotide
gacccguccagaaagucuc

SEQ ID NO: 181735 - RNA, 19 nt, Artificial Sequence
  Description of Artificial Sequence: Synthetic oligonucleotide
aucacgaauaucccaccuu

SEQ ID NO: 181736 - RNA, 19 nt, Artificial Sequence
  Description of Artificial Sequence: Synthetic oligonucleotide
agaugaucaagaguccaau

SEQ ID NO: 181737 - RNA, 19 nt, Artificial Sequence
  Description of Artificial Sequence: Synthetic oligonucleotide
agagcgcuuagauccuuca

SEQ ID NO: 181738 - RNA, 19 nt, Artificial Sequence
  Description of Artificial Sequence: Synthetic oligonucleotide
aaaccucagcucacagauc

SEQ ID NO: 181739 - RNA, 19 nt, Artificial Sequence
  Description of Artificial Sequence: Synthetic oligonucleotide
cauguagguacaagcacaa

SEQ ID NO: 181740 - RNA, 19 nt, Artificial Sequence
  Description of Artificial Sequence: Synthetic oligonucleotide
acaucgggaauguguacaa

SEQ ID NO: 181741 - RNA, 19 nt, Artificial Sequence
  Description of Artificial Sequence: Synthetic oligonucleotide
guagaguguggccaacaga

SEQ ID NO: 181742 - RNA, 19 nt, Artificial Sequence
  Description of Artificial Sequence: Synthetic oligonucleotide
auaaucuggucuaauuaua

SEQ ID NO: 181743 - RNA, 19 nt, Artificial Sequence
  Description of Artificial Sequence: Synthetic oligonucleotide
acaccuuagucagaggaaa

SEQ ID NO: 181744 - RNA, 19 nt, Artificial Sequence
  Description of Artificial Sequence: Synthetic oligonucleotide
uguccgaauccaugaucug

SEQ ID NO: 181745 - RNA, 19 nt, Artificial Sequence
  Description of Artificial Sequence: Synthetic oligonucleotide
cucauuguaaggugagaaa

SEQ ID NO: 181746 - RNA, 19 nt, Artificial Sequence
  Description of Artificial Sequence: Synthetic oligonucleotide
gcuaagugaaaggauguac

SEQ ID NO: 181747 - RNA, 19 nt, Artificial Sequence
  Description of Artificial Sequence: Synthetic oligonucleotide
cacguugaaaacaaccagu

SEQ ID NO: 181748 - RNA, 19 nt, Artificial Sequence
  Description of Artificial Sequence: Synthetic oligonucleotide
caagacugacaaaaggcua

SEQ ID NO: 181749 - RNA, 19 nt, Artificial Sequence
  Description of Artificial Sequence: Synthetic oligonucleotide
agaaaccgugggcugcucu

SEQ ID NO: 181750 - RNA, 19 nt, Artificial Sequence
  Description of Artificial Sequence: Synthetic oligonucleotide
cauugagucacaacaaauu

SEQ ID NO: 181751 - RNA, 19 nt, Artificial Sequence
  Description of Artificial Sequence: Synthetic oligonucleotide
gcauuugaaguggucaagc

SEQ ID NO: 181752 - RNA, 19 nt, Artificial Sequence
  Description of Artificial Sequence: Synthetic oligonucleotide
uaacaacguccauuucagu

SEQ ID NO: 181753 - RNA, 19 nt, Artificial Sequence
  Description of Artificial Sequence: Synthetic oligonucleotide
uugugaccagaaccagaga

SEQ ID NO: 181754 - RNA, 19 nt, Artificial Sequence
  Description of Artificial Sequence: Synthetic oligonucleotide
ggagaggauuccugauugg

SEQ ID NO: 181755 - RNA, 19 nt, Artificial Sequence
  Description of Artificial Sequence: Synthetic oligonucleotide
ggacaggcauuugaagugg

SEQ ID NO: 181756 - RNA, 19 nt, Artificial Sequence
  Description of Artificial Sequence: Synthetic oligonucleotide
gucacccaauuccaccagc

SEQ ID NO: 181757 - RNA, 19 nt, Artificial Sequence
  Description of Artificial Sequence: Synthetic oligonucleotide
uagucagaggaaagucaau

SEQ ID NO: 181758 - RNA, 19 nt, Artificial Sequence
  Description of Artificial Sequence: Synthetic oligonucleotide
agaaagcuuugugacuaca

SEQ ID NO: 181759 - RNA, 19 nt, Artificial Sequence
  Description of Artificial Sequence: Synthetic oligonucleotide
aguaguggagggugugaau

SEQ ID NO: 181760 - RNA, 19 nt, Artificial Sequence
  Description of Artificial Sequence: Synthetic oligonucleotide
augagauaguaaauguauu

SEQ ID NO: 181761 - RNA, 19 nt, Artificial Sequence
  Description of Artificial Sequence: Synthetic oligonucleotide
guaguggagggugugaaua

SEQ ID NO: 181762 - RNA, 19 nt, Artificial Sequence
  Description of Artificial Sequence: Synthetic oligonucleotide
ucauaacaucaugaaggua

SEQ ID NO: 181763 - RNA, 19 nt, Artificial Sequence
  Description of Artificial Sequence: Synthetic oligonucleotide
cacuaauuuguacuuuucu

SEQ ID NO: 181764 - RNA, 19 nt, Artificial Sequence
  Description of Artificial Sequence: Synthetic oligonucleotide
cuccaauuuuaauaaugua

SEQ ID NO: 181765 - RNA, 19 nt, Artificial Sequence
  Description of Artificial Sequence: Synthetic oligonucleotide
cgaagauucgcuucuccgc

SEQ ID NO: 181766 - RNA, 19 nt, Artificial Sequence
  Description of Artificial Sequence: Synthetic oligonucleotide
ucuccuauucugccauauu

SEQ ID NO: 181767 - RNA, 19 nt, Artificial Sequence
  Description of Artificial Sequence: Synthetic oligonucleotide
caucauugcgggguuccag

SEQ ID NO: 181768 - RNA, 19 nt, Artificial Sequence
  Description of Artificial Sequence: Synthetic oligonucleotide
agcauuagccucacuaauu

SEQ ID NO: 181769 - RNA, 19 nt, Artificial Sequence
  Description of Artificial Sequence: Synthetic oligonucleotide
gucaaacaaaggggcaaug

SEQ ID NO: 181770 - RNA, 19 nt, Artificial Sequence
  Description of Artificial Sequence: Synthetic oligonucleotide
aaccggaaguguguccaga

SEQ ID NO: 181771 - RNA, 19 nt, Artificial Sequence
  Description of Artificial Sequence: Synthetic oligonucleotide
cucagcucacagauccauc

SEQ ID NO: 181772 - RNA, 19 nt, Artificial Sequence
  Description of Artificial Sequence: Synthetic oligonucleotide
agacugacaaaaggcuacu

SEQ ID NO: 181773 - RNA, 19 nt, Artificial Sequence
  Description of Artificial Sequence: Synthetic oligonucleotide
ccauguagguacaagcaca

SEQ ID NO: 181774 - RNA, 19 nt, Artificial Sequence
  Description of Artificial Sequence: Synthetic oligonucleotide
cuaccaaggcuuauaauuu

SEQ ID NO: 181775 - RNA, 19 nt, Artificial Sequence
  Description of Artificial Sequence: Synthetic oligonucleotide
gcgcuuagauccuucaaca

SEQ ID NO: 181776 - RNA, 19 nt, Artificial Sequence
  Description of Artificial Sequence: Synthetic oligonucleotide
uugauacagucgagauuuc

SEQ ID NO: 181777 - RNA, 19 nt, Artificial Sequence
  Description of Artificial Sequence: Synthetic oligonucleotide
aacauacaccuuagucaga

SEQ ID NO: 181778 - RNA, 19 nt, Artificial Sequence
  Description of Artificial Sequence: Synthetic oligonucleotide
agcaccucuugaccaauua

SEQ ID NO: 181779 - RNA, 19 nt, Artificial Sequence
  Description of Artificial Sequence: Synthetic oligonucleotide
ggccaaguuaaaucauaac

SEQ ID NO: 181780 - RNA, 19 nt, Artificial Sequence
  Description of Artificial Sequence: Synthetic oligonucleotide
agguacaagcacaaugauu

SEQ ID NO: 181781 - RNA, 19 nt, Artificial Sequence
  Description of Artificial Sequence: Synthetic oligonucleotide
agagaaaccgugggcugcu

SEQ ID NO: 181782 - RNA, 19 nt, Artificial Sequence
  Description of Artificial Sequence: Synthetic oligonucleotide
gacuaacaacguccauuuc

SEQ ID NO: 181783 - RNA, 19 nt, Artificial Sequence
  Description of Artificial Sequence: Synthetic oligonucleotide
accaaggcuuauaauuuaa

SEQ ID NO: 181784 - RNA, 19 nt, Artificial Sequence
  Description of Artificial Sequence: Synthetic oligonucleotide
aaaggcuacuuuaccucua

SEQ ID NO: 181785 - RNA, 19 nt, Artificial Sequence
  Description of Artificial Sequence: Synthetic oligonucleotide
caauguuagauaagacuau

SEQ ID NO: 181786 - RNA, 19 nt, Artificial Sequence
  Description of Artificial Sequence: Synthetic oligonucleotide
agagcaacaccgccccgaa

SEQ ID NO: 181787 - RNA, 19 nt, Artificial Sequence
  Description of Artificial Sequence: Synthetic oligonucleotide
gauugguguguagcaagaa

SEQ ID NO: 181788 - RNA, 19 nt, Artificial Sequence
  Description of Artificial Sequence: Synthetic oligonucleotide
gugaaaggauguacuguca

SEQ ID NO: 181789 - RNA, 19 nt, Artificial Sequence
  Description of Artificial Sequence: Synthetic oligonucleotide
agcagaguauaagucuuua

SEQ ID NO: 181790 - RNA, 19 nt, Artificial Sequence
  Description of Artificial Sequence: Synthetic oligonucleotide
ccuaccaaggcuuauaauu

SEQ ID NO: 181791 - RNA, 19 nt, Artificial Sequence
  Description of Artificial Sequence: Synthetic oligonucleotide
ccuucgccaucauugcggg

SEQ ID NO: 181792 - RNA, 19 nt, Artificial Sequence
  Description of Artificial Sequence: Synthetic oligonucleotide
ccaaagaaugaaugaucuc

SEQ ID NO: 181793 - RNA, 19 nt, Artificial Sequence
  Description of Artificial Sequence: Synthetic oligonucleotide
aaacuaccuggaggugaug

SEQ ID NO: 181794 - RNA, 19 nt, Artificial Sequence
  Description of Artificial Sequence: Synthetic oligonucleotide
aagcagaguauaagucuuu

SEQ ID NO: 181795 - RNA, 19 nt, Artificial Sequence
  Description of Artificial Sequence: Synthetic oligonucleotide
auacacgguccaggaaaag

SEQ ID NO: 181796 - RNA, 19 nt, Artificial Sequence
  Description of Artificial Sequence: Synthetic oligonucleotide
cuugaucaaagcagaguau

SEQ ID NO: 181797 - RNA, 19 nt, Artificial Sequence
  Description of Artificial Sequence: Synthetic oligonucleotide
cugugcuaggaaggucucc

SEQ ID NO: 181798 - RNA, 19 nt, Artificial Sequence
  Description of Artificial Sequence: Synthetic oligonucleotide
agccagucagagcacugua

SEQ ID NO: 181799 - RNA, 19 nt, Artificial Sequence
  Description of Artificial Sequence: Synthetic oligonucleotide
gauuccugauuggugugua

SEQ ID NO: 181800 - RNA, 19 nt, Artificial Sequence
  Description of Artificial Sequence: Synthetic oligonucleotide
uugcgggguuccaggccag

SEQ ID NO: 181801 - RNA, 19 nt, Artificial Sequence
  Description of Artificial Sequence: Synthetic oligonucleotide
ccauuucaguagcauuagc

SEQ ID NO: 181802 - RNA, 19 nt, Artificial Sequence
  Description of Artificial Sequence: Synthetic oligonucleotide
gagcgcuuagauccuucaa

SEQ ID NO: 181803 - RNA, 19 nt, Artificial Sequence
  Description of Artificial Sequence: Synthetic oligonucleotide
caguguagacuaacaacgu

SEQ ID NO: 181804 - RNA, 19 nt, Artificial Sequence
  Description of Artificial Sequence: Synthetic oligonucleotide
agcguccaccgaugcccac

SEQ ID NO: 181805 - RNA, 19 nt, Artificial Sequence
  Description of Artificial Sequence: Synthetic oligonucleotide
auuaagccucaaauuucua

SEQ ID NO: 181806 - RNA, 19 nt, Artificial Sequence
  Description of Artificial Sequence: Synthetic oligonucleotide
ugguacccgaguuguuguu

SEQ ID NO: 181807 - RNA, 19 nt, Artificial Sequence
  Description of Artificial Sequence: Synthetic oligonucleotide
guccgaauccaugaucugu

SEQ ID NO: 181808 - RNA, 19 nt, Artificial Sequence
  Description of Artificial Sequence: Synthetic oligonucleotide
cagauauaaccggaagugu

SEQ ID NO: 181809 - RNA, 19 nt, Artificial Sequence
  Description of Artificial Sequence: Synthetic oligonucleotide
ucugcggcucaggacuguc

SEQ ID NO: 181810 - RNA, 19 nt, Artificial Sequence
  Description of Artificial Sequence: Synthetic oligonucleotide
gccaucauugcgggguucc

SEQ ID NO: 181811 - RNA, 19 nt, Artificial Sequence
  Description of Artificial Sequence: Synthetic oligonucleotide
cacgaauaucccaccuuua

SEQ ID NO: 181812 - RNA, 19 nt, Artificial Sequence
  Description of Artificial Sequence: Synthetic oligonucleotide
aucccaccuuuacaucuuu

SEQ ID NO: 181813 - RNA, 19 nt, Artificial Sequence
  Description of Artificial Sequence: Synthetic oligonucleotide
ggugugaauagugccacgu

SEQ ID NO: 181814 - RNA, 19 nt, Artificial Sequence
  Description of Artificial Sequence: Synthetic oligonucleotide
cugcuuagcuguaggacau

SEQ ID NO: 181815 - RNA, 19 nt, Artificial Sequence
  Description of Artificial Sequence: Synthetic oligonucleotide
ccucauuguaaggugagaa

SEQ ID NO: 181816 - RNA, 19 nt, Artificial Sequence
  Description of Artificial Sequence: Synthetic oligonucleotide
cugguacccgaguuguugu

SEQ ID NO: 181817 - RNA, 19 nt, Artificial Sequence
  Description of Artificial Sequence: Synthetic oligonucleotide
ggugauugaagccguguuu

SEQ ID NO: 181818 - RNA, 19 nt, Artificial Sequence
  Description of Artificial Sequence: Synthetic oligonucleotide
gagcugugcauugccuuaa

SEQ ID NO: 181819 - RNA, 19 nt, Artificial Sequence
  Description of Artificial Sequence: Synthetic oligonucleotide
gcaccucuugaccaauuaa

SEQ ID NO: 181820 - RNA, 19 nt, Artificial Sequence
  Description of Artificial Sequence: Synthetic oligonucleotide
ccuauacgcagacuccaca

SEQ ID NO: 181821 - RNA, 19 nt, Artificial Sequence
  Description of Artificial Sequence: Synthetic oligonucleotide
cagauacacgguccaggaa

SEQ ID NO: 181822 - RNA, 19 nt, Artificial Sequence
  Description of Artificial Sequence: Synthetic oligonucleotide
cuggaacaugcugccagga

SEQ ID NO: 181823 - RNA, 19 nt, Artificial Sequence
  Description of Artificial Sequence: Synthetic oligonucleotide
gcggcucaggacugucagg

SEQ ID NO: 181824 - RNA, 19 nt, Artificial Sequence
  Description of Artificial Sequence: Synthetic oligonucleotide
cugccugccuaccaaggcu

SEQ ID NO: 181825 - RNA, 19 nt, Artificial Sequence
  Description of Artificial Sequence: Synthetic oligonucleotide
guguacaacauggcaacuu

SEQ ID NO: 181826 - RNA, 19 nt, Artificial Sequence
  Description of Artificial Sequence: Synthetic oligonucleotide
cucuaguaguggagggugu

SEQ ID NO: 181827 - RNA, 19 nt, Artificial Sequence
  Description of Artificial Sequence: Synthetic oligonucleotide
gcuuagcuguaggacauaa

SEQ ID NO: 181828 - RNA, 19 nt, Artificial Sequence
  Description of Artificial Sequence: Synthetic oligonucleotide
guacccgaguuguuguuuu

SEQ ID NO: 181829 - RNA, 19 nt, Artificial Sequence
  Description of Artificial Sequence: Synthetic oligonucleotide
gucccaguucauggccaag

SEQ ID NO: 181830 - RNA, 19 nt, Artificial Sequence
  Description of Artificial Sequence: Synthetic oligonucleotide
guagacuaacaacguccau

SEQ ID NO: 181831 - RNA, 19 nt, Artificial Sequence
  Description of Artificial Sequence: Synthetic oligonucleotide
cggccugaaacucaaaucu

SEQ ID NO: 181832 - RNA, 19 nt, Artificial Sequence
  Description of Artificial Sequence: Synthetic oligonucleotide
accgccccgaagauucgcu

SEQ ID NO: 181833 - RNA, 19 nt, Artificial Sequence
  Description of Artificial Sequence: Synthetic oligonucleotide
ccccuucgccaucauugcg

SEQ ID NO: 181834 - RNA, 19 nt, Artificial Sequence
  Description of Artificial Sequence: Synthetic oligonucleotide
uccugaccagaagcugaau

SEQ ID NO: 181835 - RNA, 19 nt, Artificial Sequence
  Description of Artificial Sequence: Synthetic oligonucleotide
ccgaauccaugaucuguuc

SEQ ID NO: 181836 - RNA, 19 nt, Artificial Sequence
  Description of Artificial Sequence: Synthetic oligonucleotide
caccgccccgaagauucgc

SEQ ID NO: 181837 - RNA, 19 nt, Artificial Sequence
  Description of Artificial Sequence: Synthetic oligonucleotide
ccaaucagaguggguuggc

SEQ ID NO: 181838 - RNA, 19 nt, Artificial Sequence
  Description of Artificial Sequence: Synthetic oligonucleotide
acaccgccccgaagauucg

SEQ ID NO: 181839 - RNA, 19 nt, Artificial Sequence
  Description of Artificial Sequence: Synthetic oligonucleotide
cccuaaacacacagccuga

SEQ ID NO: 181840 - RNA, 19 nt, Artificial Sequence
  Description of Artificial Sequence: Synthetic oligonucleotide
cuggugauugaagccgugu

SEQ ID NO: 181841 - RNA, 19 nt, Artificial Sequence
  Description of Artificial Sequence: Synthetic oligonucleotide
gagaaaccgugggcugcuc

SEQ ID NO: 181842 - RNA, 19 nt, Artificial Sequence
  Description of Artificial Sequence: Synthetic oligonucleotide
cugccuaccaaggcuuaua

SEQ ID NO: 181843 - RNA, 19 nt, Artificial Sequence
  Description of Artificial Sequence: Synthetic oligonucleotide
ccacagauacacgguccag

SEQ ID NO: 181844 - RNA, 19 nt, Artificial Sequence
  Description of Artificial Sequence: Synthetic oligonucleotide
gccucacuaauuuguacuu

SEQ ID NO: 181845 - RNA, 19 nt, Artificial Sequence
  Description of Artificial Sequence: Synthetic oligonucleotide
gcugugcauugccuuaagu

SEQ ID NO: 181846 - RNA, 19 nt, Artificial Sequence
  Description of Artificial Sequence: Synthetic oligonucleotide
gggaaggaugcuggagaga

SEQ ID NO: 181847 - RNA, 19 nt, Artificial Sequence
  Description of Artificial Sequence: Synthetic oligonucleotide
gugucccaacuuccagugu

SEQ ID NO: 181848 - RNA, 19 nt, Artificial Sequence
  Description of Artificial Sequence: Synthetic oligonucleotide
ccggaaguguguccagaca

SEQ ID NO: 181849 - RNA, 19 nt, Artificial Sequence
  Description of Artificial Sequence: Synthetic oligonucleotide
cccaacuuccaguguccca

SEQ ID NO: 181850 - RNA, 19 nt, Artificial Sequence
  Description of Artificial Sequence: Synthetic oligonucleotide
caucggccugaaacucaaa

SEQ ID NO: 181851 - RNA, 19 nt, Artificial Sequence
  Description of Artificial Sequence: Synthetic oligonucleotide
gcguccaccgaugcccaca

SEQ ID NO: 181852 - RNA, 19 nt, Artificial Sequence
  Description of Artificial Sequence: Synthetic oligonucleotide
cucugccgcugugcuagga

SEQ ID NO: 181853 - RNA, 19 nt, Artificial Sequence
  Description of Artificial Sequence: Synthetic oligonucleotide
gcaacaccgccccgaagau

SEQ ID NO: 181854 - RNA, 19 nt, Artificial Sequence
  Description of Artificial Sequence: Synthetic oligonucleotide
gguacccgaguuguuguuu

SEQ ID NO: 181855 - RNA, 19 nt, Artificial Sequence
  Description of Artificial Sequence: Synthetic oligonucleotide
gcuuucccucagggagagg

SEQ ID NO: 181856 - RNA, 19 nt, Artificial Sequence
  Description of Artificial Sequence: Synthetic oligonucleotide
gccuaccaaggcuuauaau

SEQ ID NO: 181857 - RNA, 19 nt, Artificial Sequence
  Description of Artificial Sequence: Synthetic oligonucleotide
ccauggcaagccagucaga

SEQ ID NO: 181858 - RNA, 19 nt, Artificial Sequence
  Description of Artificial Sequence: Synthetic oligonucleotide
ccgugggcugcucugcuua

SEQ ID NO: 181859 - RNA, 19 nt, Artificial Sequence
  Description of Artificial Sequence: Synthetic oligonucleotide
caacaccgccccgaagauu

SEQ ID NO: 181860 - RNA, 19 nt, Artificial Sequence
  Description of Artificial Sequence: Synthetic oligonucleotide
ccucacuaauuuguacuuu

SEQ ID NO: 181861 - RNA, 19 nt, Artificial Sequence
  Description of Artificial Sequence: Synthetic oligonucleotide
gccugccuaccaaggcuua

SEQ ID NO: 181862 - RNA, 19 nt, Artificial Sequence
  Description of Artificial Sequence: Synthetic oligonucleotide
ccugccuaccaaggcuuau

SEQ ID NO: 181863 - RNA, 19 nt, Artificial Sequence
  Description of Artificial Sequence: Synthetic oligonucleotide
ccgccccgaagauucgcuu

SEQ ID NO: 181864 - RNA, 19 nt, Artificial Sequence
  Description of Artificial Sequence: Synthetic oligonucleotide
aaauuuucgagacaggguc

SEQ ID NO: 181865 - RNA, 19 nt, Artificial Sequence
  Description of Artificial Sequence: Synthetic oligonucleotide
aaaggaaugaauccuguac

SEQ ID NO: 181866 - RNA, 19 nt, Artificial Sequence
  Description of Artificial Sequence: Synthetic oligonucleotide
aguacaauaacccugaaga

SEQ ID NO: 181867 - RNA, 19 nt, Artificial Sequence
  Description of Artificial Sequence: Synthetic oligonucleotide
aaauuacugagacaagagc

SEQ ID NO: 181868 - RNA, 19 nt, Artificial Sequence
  Description of Artificial Sequence: Synthetic oligonucleotide
uaaaucuaagcccaaaucc

SEQ ID NO: 181869 - RNA, 19 nt, Artificial Sequence
  Description of Artificial Sequence: Synthetic oligonucleotide
ugauuuggaaccaugaacc

SEQ ID NO: 181870 - RNA, 19 nt, Artificial Sequence
  Description of Artificial Sequence: Synthetic oligonucleotide
cugauuuuaaauaugacug

SEQ ID NO: 181871 - RNA, 19 nt, Artificial Sequence
  Description of Artificial Sequence: Synthetic oligonucleotide
uuugcaauagacuugcugc

SEQ ID NO: 181872 - RNA, 19 nt, Artificial Sequence
  Description of Artificial Sequence: Synthetic oligonucleotide
uuuggaacauuacugaaga

SEQ ID NO: 181873 - RNA, 19 nt, Artificial Sequence
  Description of Artificial Sequence: Synthetic oligonucleotide
aaacccagcaucuggagag

SEQ ID NO: 181874 - RNA, 19 nt, Artificial Sequence
  Description of Artificial Sequence: Synthetic oligonucleotide
agacauccaaaauauauag

SEQ ID NO: 181875 - RNA, 19 nt, Artificial Sequence
  Description of Artificial Sequence: Synthetic oligonucleotide
auaaaagagguagucaacg

SEQ ID NO: 181876 - RNA, 19 nt, Artificial Sequence
  Description of Artificial Sequence: Synthetic oligonucleotide
uaguaaguugggaacauag

SEQ ID NO: 181877 - RNA, 19 nt, Artificial Sequence
  Description of Artificial Sequence: Synthetic oligonucleotide
ucagauuuagggugcaagg

SEQ ID NO: 181878 - RNA, 19 nt, Artificial Sequence
  Description of Artificial Sequence: Synthetic oligonucleotide
uguaccuuaauauugucau

SEQ ID NO: 181879 - RNA, 19 nt, Artificial Sequence
  Description of Artificial Sequence: Synthetic oligonucleotide
uuuaccaucugccgaaagc

SEQ ID NO: 181880 - RNA, 19 nt, Artificial Sequence
  Description of Artificial Sequence: Synthetic oligonucleotide
aauaagcugccuuuaacaa

SEQ ID NO: 181881 - RNA, 19 nt, Artificial Sequence
  Description of Artificial Sequence: Synthetic oligonucleotide
aagguuaacguguacuacu

SEQ ID NO: 181882 - RNA, 19 nt, Artificial Sequence
  Description of Artificial Sequence: Synthetic oligonucleotide
cuugaagugauuacuaguc

SEQ ID NO: 181883 - RNA, 19 nt, Artificial Sequence
  Description of Artificial Sequence: Synthetic oligonucleotide
auuuauaauucuaccacac

SEQ ID NO: 181884 - RNA, 19 nt, Artificial Sequence
  Description of Artificial Sequence: Synthetic oligonucleotide
acuuuacacauguucaguc

SEQ ID NO: 181885 - RNA, 19 nt, Artificial Sequence
  Description of Artificial Sequence: Synthetic oligonucleotide
uuugauucaaagaguaauc

SEQ ID NO: 181886 - RNA, 19 nt, Artificial Sequence
  Description of Artificial Sequence: Synthetic oligonucleotide
ucgaauaucuucuuauaga

SEQ ID NO: 181887 - RNA, 19 nt, Artificial Sequence
  Description of Artificial Sequence: Synthetic oligonucleotide
ucuacuaauguuccugugu

SEQ ID NO: 181888 - RNA, 19 nt, Artificial Sequence
  Description of Artificial Sequence: Synthetic oligonucleotide
cuaagaaggucccagggag

SEQ ID NO: 181889 - RNA, 19 nt, Artificial Sequence
  Description of Artificial Sequence: Synthetic oligonucleotide
uuacuagucucucucuucc

SEQ ID NO: 181890 - RNA, 19 nt, Artificial Sequence
  Description of Artificial Sequence: Synthetic oligonucleotide
ucuuuugcaauagacuugc

SEQ ID NO: 181891 - RNA, 19 nt, Artificial Sequence
  Description of Artificial Sequence: Synthetic oligonucleotide
uccggaauaguuaagcuau

SEQ ID NO: 181892 - RNA, 19 nt, Artificial Sequence
  Description of Artificial Sequence: Synthetic oligonucleotide
uguaccaucagagucgaug

SEQ ID NO: 181893 - RNA, 19 nt, Artificial Sequence
  Description of Artificial Sequence: Synthetic oligonucleotide
uguauaagcuaaaucuuaa

SEQ ID NO: 181894 - RNA, 19 nt, Artificial Sequence
  Description of Artificial Sequence: Synthetic oligonucleotide
auauuccagaauauugucc

SEQ ID NO: 181895 - RNA, 19 nt, Artificial Sequence
  Description of Artificial Sequence: Synthetic oligonucleotide
uacacggcgagaucgaugc

SEQ ID NO: 181896 - RNA, 19 nt, Artificial Sequence
  Description of Artificial Sequence: Synthetic oligonucleotide
uugauucaaagaguaaucc

SEQ ID NO: 181897 - RNA, 19 nt, Artificial Sequence
  Description of Artificial Sequence: Synthetic oligonucleotide
uuaacguguacuacuggug

SEQ ID NO: 181898 - RNA, 19 nt, Artificial Sequence
  Description of Artificial Sequence: Synthetic oligonucleotide
aaaucuaagcccaaauccu

SEQ ID NO: 181899 - RNA, 19 nt, Artificial Sequence
  Description of Artificial Sequence: Synthetic oligonucleotide
ucauucuauguauugcuca

SEQ ID NO: 181900 - RNA, 19 nt, Artificial Sequence
  Description of Artificial Sequence: Synthetic oligonucleotide
ucuuuggagacuauucgcu

SEQ ID NO: 181901 - RNA, 19 nt, Artificial Sequence
  Description of Artificial Sequence: Synthetic oligonucleotide
ucaaccgugagagugaagu

SEQ ID NO: 181902 - RNA, 19 nt, Artificial Sequence
  Description of Artificial Sequence: Synthetic oligonucleotide
augauuuggaacauuacug

SEQ ID NO: 181903 - RNA, 19 nt, Artificial Sequence
  Description of Artificial Sequence: Synthetic oligonucleotide
uaacguguacuacugguga

SEQ ID NO: 181904 - RNA, 19 nt, Artificial Sequence
  Description of Artificial Sequence: Synthetic oligonucleotide
ucugagauacuccuagcgu

SEQ ID NO: 181905 - RNA, 19 nt, Artificial Sequence
  Description of Artificial Sequence: Synthetic oligonucleotide
uauauuccagaauauuguc

SEQ ID NO: 181906 - RNA, 19 nt, Artificial Sequence
  Description of Artificial Sequence: Synthetic oligonucleotide
aacgugucacuucugagau

SEQ ID NO: 181907 - RNA, 19 nt, Artificial Sequence
  Description of Artificial Sequence: Synthetic oligonucleotide
caaaagcucguacacggcg

SEQ ID NO: 181908 - RNA, 19 nt, Artificial Sequence
  Description of Artificial Sequence: Synthetic oligonucleotide
uccagaaacggauaauuuc

SEQ ID NO: 181909 - RNA, 19 nt, Artificial Sequence
  Description of Artificial Sequence: Synthetic oligonucleotide
ucuuggcacaaccauauau

SEQ ID NO: 181910 - RNA, 19 nt, Artificial Sequence
  Description of Artificial Sequence: Synthetic oligonucleotide
ugaagugauuacuagucuc

SEQ ID NO: 181911 - RNA, 19 nt, Artificial Sequence
  Description of Artificial Sequence: Synthetic oligonucleotide
uaagacuucaaaagcucgu

SEQ ID NO: 181912 - RNA, 19 nt, Artificial Sequence
  Description of Artificial Sequence: Synthetic oligonucleotide
ucuagagacugccccagcc

SEQ ID NO: 181913 - RNA, 19 nt, Artificial Sequence
  Description of Artificial Sequence: Synthetic oligonucleotide
uaaaagagguagucaacga

SEQ ID NO: 181914 - RNA, 19 nt, Artificial Sequence
  Description of Artificial Sequence: Synthetic oligonucleotide
ugaggcgauccaaaggugc

SEQ ID NO: 181915 - RNA, 19 nt, Artificial Sequence
  Description of Artificial Sequence: Synthetic oligonucleotide
ugucaauauuacaaauuuc

SEQ ID NO: 181916 - RNA, 19 nt, Artificial Sequence
  Description of Artificial Sequence: Synthetic oligonucleotide
cuacuaauguuccugugug

SEQ ID NO: 181917 - RNA, 19 nt, Artificial Sequence
  Description of Artificial Sequence: Synthetic oligonucleotide
auauugucauucuauguau

SEQ ID NO: 181918 - RNA, 19 nt, Artificial Sequence
  Description of Artificial Sequence: Synthetic oligonucleotide
uccugauuaagagaauuug

SEQ ID NO: 181919 - RNA, 19 nt, Artificial Sequence
  Description of Artificial Sequence: Synthetic oligonucleotide
uuagcuuugugccacccau

SEQ ID NO: 181920 - RNA, 19 nt, Artificial Sequence
  Description of Artificial Sequence: Synthetic oligonucleotide
aguaauccauucuuacucu

SEQ ID NO: 181921 - RNA, 19 nt, Artificial Sequence
  Description of Artificial Sequence: Synthetic oligonucleotide
agaguaauccauucuuacu

SEQ ID NO: 181922 - RNA, 19 nt, Artificial Sequence
  Description of Artificial Sequence: Synthetic oligonucleotide
ucauccggaauaguuaagc

SEQ ID NO: 181923 - RNA, 19 nt, Artificial Sequence
  Description of Artificial Sequence: Synthetic oligonucleotide
uagucaacgauccccauuu

SEQ ID NO: 181924 - RNA, 19 nt, Artificial Sequence
  Description of Artificial Sequence: Synthetic oligonucleotide
guaccaucagagucgaugc

SEQ ID NO: 181925 - RNA, 19 nt, Artificial Sequence
  Description of Artificial Sequence: Synthetic oligonucleotide
uuacugagacaagagcagg

SEQ ID NO: 181926 - RNA, 19 nt, Artificial Sequence
  Description of Artificial Sequence: Synthetic oligonucleotide
aaagcucguacacggcgag

SEQ ID NO: 181927 - RNA, 19 nt, Artificial Sequence
  Description of Artificial Sequence: Synthetic oligonucleotide
gcugccuuuaacaagaggc

SEQ ID NO: 181928 - RNA, 19 nt, Artificial Sequence
  Description of Artificial Sequence: Synthetic oligonucleotide
uuguacuguucauaagccc

SEQ ID NO: 181929 - RNA, 19 nt, Artificial Sequence
  Description of Artificial Sequence: Synthetic oligonucleotide
cugagauacuccuagcguc

SEQ ID NO: 181930 - RNA, 19 nt, Artificial Sequence
  Description of Artificial Sequence: Synthetic oligonucleotide
uuuuggcuacagcuagccg

SEQ ID NO: 181931 - RNA, 19 nt, Artificial Sequence
  Description of Artificial Sequence: Synthetic oligonucleotide
uugcucaaaguacaauaac

SEQ ID NO: 181932 - RNA, 19 nt, Artificial Sequence
  Description of Artificial Sequence: Synthetic oligonucleotide
ugugcgguuacuccagcca

SEQ ID NO: 181933 - RNA, 19 nt, Artificial Sequence
  Description of Artificial Sequence: Synthetic oligonucleotide
uugaggcaagugaaaaugu

SEQ ID NO: 181934 - RNA, 19 nt, Artificial Sequence
  Description of Artificial Sequence: Synthetic oligonucleotide
aaugugggcggaugcauau

SEQ ID NO: 181935 - RNA, 19 nt, Artificial Sequence
  Description of Artificial Sequence: Synthetic oligonucleotide
uggacaauuucugacggcu

SEQ ID NO: 181936 - RNA, 19 nt, Artificial Sequence
  Description of Artificial Sequence: Synthetic oligonucleotide
aauucauccggaauaguua

SEQ ID NO: 181937 - RNA, 19 nt, Artificial Sequence
  Description of Artificial Sequence: Synthetic oligonucleotide
cucguacacggcgagaucg

SEQ ID NO: 181938 - RNA, 19 nt, Artificial Sequence
  Description of Artificial Sequence: Synthetic oligonucleotide
uauauucauugauuuggaa

SEQ ID NO: 181939 - RNA, 19 nt, Artificial Sequence
  Description of Artificial Sequence: Synthetic oligonucleotide
aguuauccagccaauaaga

SEQ ID NO: 181940 - RNA, 19 nt, Artificial Sequence
  Description of Artificial Sequence: Synthetic oligonucleotide
ucgaacgugucacuucuga

SEQ ID NO: 181941 - RNA, 19 nt, Artificial Sequence
  Description of Artificial Sequence: Synthetic oligonucleotide
aguuaagcuauccccuaug

SEQ ID NO: 181942 - RNA, 19 nt, Artificial Sequence
  Description of Artificial Sequence: Synthetic oligonucleotide
aaccgugagagugaaguga

SEQ ID NO: 181943 - RNA, 19 nt, Artificial Sequence
  Description of Artificial Sequence: Synthetic oligonucleotide
uugcaauagacuugcugca

SEQ ID NO: 181944 - RNA, 19 nt, Artificial Sequence
  Description of Artificial Sequence: Synthetic oligonucleotide
uagccggguuuucagaacc

SEQ ID NO: 181945 - RNA, 19 nt, Artificial Sequence
  Description of Artificial Sequence: Synthetic oligonucleotide
uuggcacaaccauauauuc

SEQ ID NO: 181946 - RNA, 19 nt, Artificial Sequence
  Description of Artificial Sequence: Synthetic oligonucleotide
agaagguuaacguguacua

SEQ ID NO: 181947 - RNA, 19 nt, Artificial Sequence
  Description of Artificial Sequence: Synthetic oligonucleotide
aacgauccccauuucacua

SEQ ID NO: 181948 - RNA, 19 nt, Artificial Sequence
  Description of Artificial Sequence: Synthetic oligonucleotide
ucagagucgaugcucugaa

SEQ ID NO: 181949 - RNA, 19 nt, Artificial Sequence
  Description of Artificial Sequence: Synthetic oligonucleotide
agucccuuccuuugcuuac

SEQ ID NO: 181950 - RNA, 19 nt, Artificial Sequence
  Description of Artificial Sequence: Synthetic oligonucleotide
agucaugaaaagagcaguc

SEQ ID NO: 181951 - RNA, 19 nt, Artificial Sequence
  Description of Artificial Sequence: Synthetic oligonucleotide
auauuaagggcugucaaua

SEQ ID NO: 181952 - RNA, 19 nt, Artificial Sequence
  Description of Artificial Sequence: Synthetic oligonucleotide
acacuuauugaaacuauga

SEQ ID NO: 181953 - RNA, 19 nt, Artificial Sequence
  Description of Artificial Sequence: Synthetic oligonucleotide
uccuuuaccaucugccgaa

SEQ ID NO: 181954 - RNA, 19 nt, Artificial Sequence
  Description of Artificial Sequence: Synthetic oligonucleotide
agggcugucaauauuacaa

SEQ ID NO: 181955 - RNA, 19 nt, Artificial Sequence
  Description of Artificial Sequence: Synthetic oligonucleotide
uuuagggugcaaggcacag

SEQ ID NO: 181956 - RNA, 19 nt, Artificial Sequence
  Description of Artificial Sequence: Synthetic oligonucleotide
ugaugccuaguaaguuggg

SEQ ID NO: 181957 - RNA, 19 nt, Artificial Sequence
  Description of Artificial Sequence: Synthetic oligonucleotide
gaaggcucgaacgugucac

SEQ ID NO: 181958 - RNA, 19 nt, Artificial Sequence
  Description of Artificial Sequence: Synthetic oligonucleotide
aaaaugugggcggaugcau

SEQ ID NO: 181959 - RNA, 19 nt, Artificial Sequence
  Description of Artificial Sequence: Synthetic oligonucleotide
aaagaguaauccauucuua

SEQ ID NO: 181960 - RNA, 19 nt, Artificial Sequence
  Description of Artificial Sequence: Synthetic oligonucleotide
aguaaucccuccauucauc

SEQ ID NO: 181961 - RNA, 19 nt, Artificial Sequence
  Description of Artificial Sequence: Synthetic oligonucleotide
uucauccggaauaguuaag

SEQ ID NO: 181962 - RNA, 19 nt, Artificial Sequence
  Description of Artificial Sequence: Synthetic oligonucleotide
ugcguguccucaccaaagc

SEQ ID NO: 181963 - RNA, 19 nt, Artificial Sequence
  Description of Artificial Sequence: Synthetic oligonucleotide
cauuuaccugaaauuaaca

SEQ ID NO: 181964 - RNA, 19 nt, Artificial Sequence
  Description of Artificial Sequence: Synthetic oligonucleotide
aacggauuccuccuuccuu

SEQ ID NO: 181965 - RNA, 19 nt, Artificial Sequence
  Description of Artificial Sequence: Synthetic oligonucleotide
aacguguacuacuggugaa

SEQ ID NO: 181966 - RNA, 19 nt, Artificial Sequence
  Description of Artificial Sequence: Synthetic oligonucleotide
ggcgauuccucuguaaagg

SEQ ID NO: 181967 - RNA, 19 nt, Artificial Sequence
  Description of Artificial Sequence: Synthetic oligonucleotide
acguguacuacuggugaac

SEQ ID NO: 181968 - RNA, 19 nt, Artificial Sequence
  Description of Artificial Sequence: Synthetic oligonucleotide
acuaucgaauaucuucuua

SEQ ID NO: 181969 - RNA, 19 nt, Artificial Sequence
  Description of Artificial Sequence: Synthetic oligonucleotide
guuaacguguacuacuggu

SEQ ID NO: 181970 - RNA, 19 nt, Artificial Sequence
  Description of Artificial Sequence: Synthetic oligonucleotide
guguacuacuggugaacgg

SEQ ID NO: 181971 - RNA, 19 nt, Artificial Sequence
  Description of Artificial Sequence: Synthetic oligonucleotide
uugaggcgauccaaaggug

SEQ ID NO: 181972 - RNA, 19 nt, Artificial Sequence
  Description of Artificial Sequence: Synthetic oligonucleotide
gaugcccgcauaaggaaug

SEQ ID NO: 181973 - RNA, 19 nt, Artificial Sequence
  Description of Artificial Sequence: Synthetic oligonucleotide
acgauccccauuucacuag

SEQ ID NO: 181974 - RNA, 19 nt, Artificial Sequence
  Description of Artificial Sequence: Synthetic oligonucleotide
acuacuggugaacggugcu

SEQ ID NO: 181975 - RNA, 19 nt, Artificial Sequence
  Description of Artificial Sequence: Synthetic oligonucleotide
uaaucccuccauucauccc

SEQ ID NO: 181976 - RNA, 19 nt, Artificial Sequence
  Description of Artificial Sequence: Synthetic oligonucleotide
ugcaugcguguccucacca

SEQ ID NO: 181977 - RNA, 19 nt, Artificial Sequence
  Description of Artificial Sequence: Synthetic oligonucleotide
agcugccuuuaacaagagg

SEQ ID NO: 181978 - RNA, 19 nt, Artificial Sequence
  Description of Artificial Sequence: Synthetic oligonucleotide
guauaagcuaaaucuuaaa

SEQ ID NO: 181979 - RNA, 19 nt, Artificial Sequence
  Description of Artificial Sequence: Synthetic oligonucleotide
caaagauuagagauuuaua

SEQ ID NO: 181980 - RNA, 19 nt, Artificial Sequence
  Description of Artificial Sequence: Synthetic oligonucleotide
ucgaugucugaaacagggu

SEQ ID NO: 181981 - RNA, 19 nt, Artificial Sequence
  Description of Artificial Sequence: Synthetic oligonucleotide
gaaaaugugggcggaugca

SEQ ID NO: 181982 - RNA, 19 nt, Artificial Sequence
  Description of Artificial Sequence: Synthetic oligonucleotide
gagucgaugcucugaagaa

SEQ ID NO: 181983 - RNA, 19 nt, Artificial Sequence
  Description of Artificial Sequence: Synthetic oligonucleotide
cauucuauguauugcucaa

SEQ ID NO: 181984 - RNA, 19 nt, Artificial Sequence
  Description of Artificial Sequence: Synthetic oligonucleotide
ucgaugcccgcauaaggaa

SEQ ID NO: 181985 - RNA, 19 nt, Artificial Sequence
  Description of Artificial Sequence: Synthetic oligonucleotide
gguuaacguguacuacugg

SEQ ID NO: 181986 - RNA, 19 nt, Artificial Sequence
  Description of Artificial Sequence: Synthetic oligonucleotide
cuaucgaauaucuucuuau

SEQ ID NO: 181987 - RNA, 19 nt, Artificial Sequence
  Description of Artificial Sequence: Synthetic oligonucleotide
accgugagagugaagugag

SEQ ID NO: 181988 - RNA, 19 nt, Artificial Sequence
  Description of Artificial Sequence: Synthetic oligonucleotide
ugcgguuacuccagccaug

SEQ ID NO: 181989 - RNA, 19 nt, Artificial Sequence
  Description of Artificial Sequence: Synthetic oligonucleotide
ggcaagugaaaaugugggc

SEQ ID NO: 181990 - RNA, 19 nt, Artificial Sequence
  Description of Artificial Sequence: Synthetic oligonucleotide
agguuaacguguacuacug

SEQ ID NO: 181991 - RNA, 19 nt, Artificial Sequence
  Description of Artificial Sequence: Synthetic oligonucleotide
cuggacaauuucugacggc

SEQ ID NO: 181992 - RNA, 19 nt, Artificial Sequence
  Description of Artificial Sequence: Synthetic oligonucleotide
auuguaccaucagagucga

SEQ ID NO: 181993 - RNA, 19 nt, Artificial Sequence
  Description of Artificial Sequence: Synthetic oligonucleotide
ugccacccauuugagaagc

SEQ ID NO: 181994 - RNA, 19 nt, Artificial Sequence
  Description of Artificial Sequence: Synthetic oligonucleotide
cuuuaccaucugccgaaag

SEQ ID NO: 181995 - RNA, 19 nt, Artificial Sequence
  Description of Artificial Sequence: Synthetic oligonucleotide
ggcuucaaccgugagagug

SEQ ID NO: 181996 - RNA, 19 nt, Artificial Sequence
  Description of Artificial Sequence: Synthetic oligonucleotide
gauuuggaaccaugaaccu

SEQ ID NO: 181997 - RNA, 19 nt, Artificial Sequence
  Description of Artificial Sequence: Synthetic oligonucleotide
accaucugccgaaagccuc

SEQ ID NO: 181998 - RNA, 19 nt, Artificial Sequence
  Description of Artificial Sequence: Synthetic oligonucleotide
ugugggaauuuuacaucua

SEQ ID NO: 181999 - RNA, 19 nt, Artificial Sequence
  Description of Artificial Sequence: Synthetic oligonucleotide
aacggugcuggugccuuag

SEQ ID NO: 182000 - RNA, 19 nt, Artificial Sequence
  Description of Artificial Sequence: Synthetic oligonucleotide
ugccgaaagccuccaaaua

SEQ ID NO: 182001 - RNA, 19 nt, Artificial Sequence
  Description of Artificial Sequence: Synthetic oligonucleotide
cacccauuugagaagcaca

SEQ ID NO: 182002 - RNA, 19 nt, Artificial Sequence
  Description of Artificial Sequence: Synthetic oligonucleotide
gaauucauccggaauaguu

SEQ ID NO: 182003 - RNA, 19 nt, Artificial Sequence
  Description of Artificial Sequence: Synthetic oligonucleotide
agucaacgauccccauuuc

SEQ ID NO: 182004 - RNA, 19 nt, Artificial Sequence
  Description of Artificial Sequence: Synthetic oligonucleotide
gagaucgaugcccgcauaa

SEQ ID NO: 182005 - RNA, 19 nt, Artificial Sequence
  Description of Artificial Sequence: Synthetic oligonucleotide
guguauaagcuaaaucuua

SEQ ID NO: 182006 - RNA, 19 nt, Artificial Sequence
  Description of Artificial Sequence: Synthetic oligonucleotide
guuaagcuauccccuaugu

SEQ ID NO: 182007 - RNA, 19 nt, Artificial Sequence
  Description of Artificial Sequence: Synthetic oligonucleotide
caaccgugagagugaagug

SEQ ID NO: 182008 - RNA, 19 nt, Artificial Sequence
  Description of Artificial Sequence: Synthetic oligonucleotide
guacuacuggugaacggug

SEQ ID NO: 182009 - RNA, 19 nt, Artificial Sequence
  Description of Artificial Sequence: Synthetic oligonucleotide
ccugacacuccuucuuugg

SEQ ID NO: 182010 - RNA, 19 nt, Artificial Sequence
  Description of Artificial Sequence: Synthetic oligonucleotide
uuggaacauuacugaagau

SEQ ID NO: 182011 - RNA, 19 nt, Artificial Sequence
  Description of Artificial Sequence: Synthetic oligonucleotide
uucauugauuuggaaccau

SEQ ID NO: 182012 - RNA, 19 nt, Artificial Sequence
  Description of Artificial Sequence: Synthetic oligonucleotide
cuuggcacaaccauauauu

SEQ ID NO: 182013 - RNA, 19 nt, Artificial Sequence
  Description of Artificial Sequence: Synthetic oligonucleotide
ggagacuauucgcugaaaa

SEQ ID NO: 182014 - RNA, 19 nt, Artificial Sequence
  Description of Artificial Sequence: Synthetic oligonucleotide
caggagcgauuuuaaugac

SEQ ID NO: 182015 - RNA, 19 nt, Artificial Sequence
  Description of Artificial Sequence: Synthetic oligonucleotide
agguagucaacgaucccca

SEQ ID NO: 182016 - RNA, 19 nt, Artificial Sequence
  Description of Artificial Sequence: Synthetic oligonucleotide
acggcgagaucgaugcccg

SEQ ID NO: 182017 - RNA, 19 nt, Artificial Sequence
  Description of Artificial Sequence: Synthetic oligonucleotide
aaaugugggcggaugcaua

SEQ ID NO: 182018 - RNA, 19 nt, Artificial Sequence
  Description of Artificial Sequence: Synthetic oligonucleotide
agcucguacacggcgagau

SEQ ID NO: 182019 - RNA, 19 nt, Artificial Sequence
  Description of Artificial Sequence: Synthetic oligonucleotide
gggcgauuccucuguaaag

SEQ ID NO: 182020 - RNA, 19 nt, Artificial Sequence
  Description of Artificial Sequence: Synthetic oligonucleotide
uccagccaauaagacuuca

SEQ ID NO: 182021 - RNA, 19 nt, Artificial Sequence
  Description of Artificial Sequence: Synthetic oligonucleotide
gcgauuccucuguaaaggc

SEQ ID NO: 182022 - RNA, 19 nt, Artificial Sequence
  Description of Artificial Sequence: Synthetic oligonucleotide
gacggcucgauuuucccau

SEQ ID NO: 182023 - RNA, 19 nt, Artificial Sequence
  Description of Artificial Sequence: Synthetic oligonucleotide
cuuagcuuugugccaccca

SEQ ID NO: 182024 - RNA, 19 nt, Artificial Sequence
  Description of Artificial Sequence: Synthetic oligonucleotide
ggaugcauauguucacaga

SEQ ID NO: 182025 - RNA, 19 nt, Artificial Sequence
  Description of Artificial Sequence: Synthetic oligonucleotide
cagagucgaugcucugaag

SEQ ID NO: 182026 - RNA, 19 nt, Artificial Sequence
  Description of Artificial Sequence: Synthetic oligonucleotide
aggguugacagaguccuuu

SEQ ID NO: 182027 - RNA, 19 nt, Artificial Sequence
  Description of Artificial Sequence: Synthetic oligonucleotide
caaccaugcucagcugcgg

SEQ ID NO: 182028 - RNA, 19 nt, Artificial Sequence
  Description of Artificial Sequence: Synthetic oligonucleotide
acggcucgauuuucccauc

SEQ ID NO: 182029 - RNA, 19 nt, Artificial Sequence
  Description of Artificial Sequence: Synthetic oligonucleotide
guacacggcgagaucgaug

SEQ ID NO: 182030 - RNA, 19 nt, Artificial Sequence
  Description of Artificial Sequence: Synthetic oligonucleotide
gcgguuacuccagccaugg

SEQ ID NO: 182031 - RNA, 19 nt, Artificial Sequence
  Description of Artificial Sequence: Synthetic oligonucleotide
uucuuggcacaaccauaua

SEQ ID NO: 182032 - RNA, 19 nt, Artificial Sequence
  Description of Artificial Sequence: Synthetic oligonucleotide
ccggguuuucagaaccucc

SEQ ID NO: 182033 - RNA, 19 nt, Artificial Sequence
  Description of Artificial Sequence: Synthetic oligonucleotide
cagaagguuaacguguacu

SEQ ID NO: 182034 - RNA, 19 nt, Artificial Sequence
  Description of Artificial Sequence: Synthetic oligonucleotide
ccgcauaaggaaugaugcc

SEQ ID NO: 182035 - RNA, 19 nt, Artificial Sequence
  Description of Artificial Sequence: Synthetic oligonucleotide
cauccggaauaguuaagcu

SEQ ID NO: 182036 - RNA, 19 nt, Artificial Sequence
  Description of Artificial Sequence: Synthetic oligonucleotide
uggggcgauuccucuguaa

SEQ ID NO: 182037 - RNA, 19 nt, Artificial Sequence
  Description of Artificial Sequence: Synthetic oligonucleotide
ggaaugaugccuaguaagu

SEQ ID NO: 182038 - RNA, 19 nt, Artificial Sequence
  Description of Artificial Sequence: Synthetic oligonucleotide
gcuauccccuaugucaaug

SEQ ID NO: 182039 - RNA, 19 nt, Artificial Sequence
  Description of Artificial Sequence: Synthetic oligonucleotide
gugccuuagcuuugugcca

SEQ ID NO: 182040 - RNA, 19 nt, Artificial Sequence
  Description of Artificial Sequence: Synthetic oligonucleotide
cuguagaccaggaccaaau

SEQ ID NO: 182041 - RNA, 19 nt, Artificial Sequence
  Description of Artificial Sequence: Synthetic oligonucleotide
ggagcgauuuuaaugacau

SEQ ID NO: 182042 - RNA, 19 nt, Artificial Sequence
  Description of Artificial Sequence: Synthetic oligonucleotide
gcccgcauaaggaaugaug

SEQ ID NO: 182043 - RNA, 19 nt, Artificial Sequence
  Description of Artificial Sequence: Synthetic oligonucleotide
cucgaacgugucacuucug

SEQ ID NO: 182044 - RNA, 19 nt, Artificial Sequence
  Description of Artificial Sequence: Synthetic oligonucleotide
caugcguguccucaccaaa

SEQ ID NO: 182045 - RNA, 19 nt, Artificial Sequence
  Description of Artificial Sequence: Synthetic oligonucleotide
cguguacuacuggugaacg

SEQ ID NO: 182046 - RNA, 19 nt, Artificial Sequence
  Description of Artificial Sequence: Synthetic oligonucleotide
ggugaacggugcuggugcc

SEQ ID NO: 182047 - RNA, 19 nt, Artificial Sequence
  Description of Artificial Sequence: Synthetic oligonucleotide
ccuuugcuuacauaguaua

SEQ ID NO: 182048 - RNA, 19 nt, Artificial Sequence
  Description of Artificial Sequence: Synthetic oligonucleotide
caacgauccccauuucacu

SEQ ID NO: 182049 - RNA, 19 nt, Artificial Sequence
  Description of Artificial Sequence: Synthetic oligonucleotide
ggggcgauuccucuguaaa

SEQ ID NO: 182050 - RNA, 19 nt, Artificial Sequence
  Description of Artificial Sequence: Synthetic oligonucleotide
guucauaagcccagaacuu

SEQ ID NO: 182051 - RNA, 19 nt, Artificial Sequence
  Description of Artificial Sequence: Synthetic oligonucleotide
gaugaaagucugugcgguu

SEQ ID NO: 182052 - RNA, 19 nt, Artificial Sequence
  Description of Artificial Sequence: Synthetic oligonucleotide
gacuaucgaauaucuucuu

SEQ ID NO: 182053 - RNA, 19 nt, Artificial Sequence
  Description of Artificial Sequence: Synthetic oligonucleotide
agcuauccccuaugucaau

SEQ ID NO: 182054 - RNA, 19 nt, Artificial Sequence
  Description of Artificial Sequence: Synthetic oligonucleotide
ugucugaaacaggguuaaa

SEQ ID NO: 182055 - RNA, 19 nt, Artificial Sequence
  Description of Artificial Sequence: Synthetic oligonucleotide
gccuaguaaguugggaaca

SEQ ID NO: 182056 - RNA, 19 nt, Artificial Sequence
  Description of Artificial Sequence: Synthetic oligonucleotide
ggcucgaacgugucacuuc

SEQ ID NO: 182057 - RNA, 19 nt, Artificial Sequence
  Description of Artificial Sequence: Synthetic oligonucleotide
gcauaaggaaugaugccua

SEQ ID NO: 182058 - RNA, 19 nt, Artificial Sequence
  Description of Artificial Sequence: Synthetic oligonucleotide
ggcugucaauauuacaaau

SEQ ID NO: 182059 - RNA, 19 nt, Artificial Sequence
  Description of Artificial Sequence: Synthetic oligonucleotide
gcuucaaccgugagaguga

SEQ ID NO: 182060 - RNA, 19 nt, Artificial Sequence
  Description of Artificial Sequence: Synthetic oligonucleotide
uuggggcgauuccucugua

SEQ ID NO: 182061 - RNA, 19 nt, Artificial Sequence
  Description of Artificial Sequence: Synthetic oligonucleotide
gcucgaacgugucacuucu

SEQ ID NO: 182062 - RNA, 19 nt, Artificial Sequence
  Description of Artificial Sequence: Synthetic oligonucleotide
augcccgcauaaggaauga

SEQ ID NO: 182063 - RNA, 19 nt, Artificial Sequence
  Description of Artificial Sequence: Synthetic oligonucleotide
cuucaaccgugagagugaa

SEQ ID NO: 182064 - RNA, 19 nt, Artificial Sequence
  Description of Artificial Sequence: Synthetic oligonucleotide
ggacaauuucugacggcuc

SEQ ID NO: 182065 - RNA, 19 nt, Artificial Sequence
  Description of Artificial Sequence: Synthetic oligonucleotide
ccuagcgucugcuucauau

SEQ ID NO: 182066 - RNA, 19 nt, Artificial Sequence
  Description of Artificial Sequence: Synthetic oligonucleotide
cugagacaagagcaggcau

SEQ ID NO: 182067 - RNA, 19 nt, Artificial Sequence
  Description of Artificial Sequence: Synthetic oligonucleotide
gugcgguuacuccagccau

SEQ ID NO: 182068 - RNA, 19 nt, Artificial Sequence
  Description of Artificial Sequence: Synthetic oligonucleotide
agggagccuuccugauuaa

SEQ ID NO: 182069 - RNA, 19 nt, Artificial Sequence
  Description of Artificial Sequence: Synthetic oligonucleotide
ugcccgcauaaggaaugau

SEQ ID NO: 182070 - RNA, 19 nt, Artificial Sequence
  Description of Artificial Sequence: Synthetic oligonucleotide
cuagcgucugcuucauauu

SEQ ID NO: 182071 - RNA, 19 nt, Artificial Sequence
  Description of Artificial Sequence: Synthetic oligonucleotide
ccuuagcuuugugccaccc

SEQ ID NO: 182072 - RNA, 19 nt, Artificial Sequence
  Description of Artificial Sequence: Synthetic oligonucleotide
cccugcuaagacuaucgaa

SEQ ID NO: 182073 - RNA, 19 nt, Artificial Sequence
  Description of Artificial Sequence: Synthetic oligonucleotide
gcggaugcauauguucaca

SEQ ID NO: 182074 - RNA, 19 nt, Artificial Sequence
  Description of Artificial Sequence: Synthetic oligonucleotide
ccggaauaguuaagcuauc

SEQ ID NO: 182075 - RNA, 19 nt, Artificial Sequence
  Description of Artificial Sequence: Synthetic oligonucleotide
gaacggugcuggugccuua

SEQ ID NO: 182076 - RNA, 19 nt, Artificial Sequence
  Description of Artificial Sequence: Synthetic oligonucleotide
gagcgauuuuaaugacauu

SEQ ID NO: 182077 - RNA, 19 nt, Artificial Sequence
  Description of Artificial Sequence: Synthetic oligonucleotide
gcaugcguguccucaccaa

SEQ ID NO: 182078 - RNA, 19 nt, Artificial Sequence
  Description of Artificial Sequence: Synthetic oligonucleotide
gcucguacacggcgagauc

SEQ ID NO: 182079 - RNA, 19 nt, Artificial Sequence
  Description of Artificial Sequence: Synthetic oligonucleotide
gugaacggugcuggugccu

SEQ ID NO: 182080 - RNA, 19 nt, Artificial Sequence
  Description of Artificial Sequence: Synthetic oligonucleotide
gguagucaacgauccccau

SEQ ID NO: 182081 - RNA, 19 nt, Artificial Sequence
  Description of Artificial Sequence: Synthetic oligonucleotide
gcgagaucgaugcccgcau

SEQ ID NO: 182082 - RNA, 19 nt, Artificial Sequence
  Description of Artificial Sequence: Synthetic oligonucleotide
cuacagcuagccggguuuu

SEQ ID NO: 182083 - RNA, 19 nt, Artificial Sequence
  Description of Artificial Sequence: Synthetic oligonucleotide
gccacccauuugagaagca

SEQ ID NO: 182084 - RNA, 19 nt, Artificial Sequence
  Description of Artificial Sequence: Synthetic oligonucleotide
cggcucgauuuucccauca

SEQ ID NO: 182085 - RNA, 19 nt, Artificial Sequence
  Description of Artificial Sequence: Synthetic oligonucleotide
cggcgagaucgaugcccgc

SEQ ID NO: 182086 - RNA, 19 nt, Artificial Sequence
  Description of Artificial Sequence: Synthetic oligonucleotide
cguacacggcgagaucgau

SEQ ID NO: 182087 - RNA, 19 nt, Artificial Sequence
  Description of Artificial Sequence: Synthetic oligonucleotide
uaaacacacacacacaagg

SEQ ID NO: 182088 - RNA, 19 nt, Artificial Sequence
  Description of Artificial Sequence: Synthetic oligonucleotide
acaugugacaaacugagac

SEQ ID NO: 182089 - RNA, 19 nt, Artificial Sequence
  Description of Artificial Sequence: Synthetic oligonucleotide
gaaagagcaacgcacacgg

SEQ ID NO: 182090 - RNA, 19 nt, Artificial Sequence
  Description of Artificial Sequence: Synthetic oligonucleotide
gauaagaaguacuaaugag

SEQ ID NO: 182091 - RNA, 19 nt, Artificial Sequence
  Description of Artificial Sequence: Synthetic oligonucleotide
aacagaaagagcaacgcac

SEQ ID NO: 182092 - RNA, 19 nt, Artificial Sequence
  Description of Artificial Sequence: Synthetic oligonucleotide
agaaguacuaaugagaaug

SEQ ID NO: 182093 - RNA, 19 nt, Artificial Sequence
  Description of Artificial Sequence: Synthetic oligonucleotide
aacuauuagucucagauua

SEQ ID NO: 182094 - RNA, 19 nt, Artificial Sequence
  Description of Artificial Sequence: Synthetic oligonucleotide
cuugauauauaaaugcuac

SEQ ID NO: 182095 - RNA, 19 nt, Artificial Sequence
  Description of Artificial Sequence: Synthetic oligonucleotide
uuugugaaaguuuacacaa

SEQ ID NO: 182096 - RNA, 19 nt, Artificial Sequence
  Description of Artificial Sequence: Synthetic oligonucleotide
agaacuacuucccacacag

SEQ ID NO: 182097 - RNA, 19 nt, Artificial Sequence
  Description of Artificial Sequence: Synthetic oligonucleotide
aagcagauaacauaccugu

SEQ ID NO: 182098 - RNA, 19 nt, Artificial Sequence
  Description of Artificial Sequence: Synthetic oligonucleotide
aacaacccaagacgaaugc

SEQ ID NO: 182099 - RNA, 19 nt, Artificial Sequence
  Description of Artificial Sequence: Synthetic oligonucleotide
cuguauaaaucccacaugc

SEQ ID NO: 182100 - RNA, 19 nt, Artificial Sequence
  Description of Artificial Sequence: Synthetic oligonucleotide
aacacacacacacaaggag

SEQ ID NO: 182101 - RNA, 19 nt, Artificial Sequence
  Description of Artificial Sequence: Synthetic oligonucleotide
aaccgaagaggacaacugc

SEQ ID NO: 182102 - RNA, 19 nt, Artificial Sequence
  Description of Artificial Sequence: Synthetic oligonucleotide
acacacaaggaguucaagc

SEQ ID NO: 182103 - RNA, 19 nt, Artificial Sequence
  Description of Artificial Sequence: Synthetic oligonucleotide
aacgauugauucugaaagg

SEQ ID NO: 182104 - RNA, 19 nt, Artificial Sequence
  Description of Artificial Sequence: Synthetic oligonucleotide
agagcaauuuacuggaguc

SEQ ID NO: 182105 - RNA, 19 nt, Artificial Sequence
  Description of Artificial Sequence: Synthetic oligonucleotide
agcugauaugcuuuugugc

SEQ ID NO: 182106 - RNA, 19 nt, Artificial Sequence
  Description of Artificial Sequence: Synthetic oligonucleotide
uauucaaggagcuaaguua

SEQ ID NO: 182107 - RNA, 19 nt, Artificial Sequence
  Description of Artificial Sequence: Synthetic oligonucleotide
cuacagauggauuuugacc

SEQ ID NO: 182108 - RNA, 19 nt, Artificial Sequence
  Description of Artificial Sequence: Synthetic oligonucleotide
uuaagaacuacuucccaca

SEQ ID NO: 182109 - RNA, 19 nt, Artificial Sequence
  Description of Artificial Sequence: Synthetic oligonucleotide
auagcaacugaucucuuag

SEQ ID NO: 182110 - RNA, 19 nt, Artificial Sequence
  Description of Artificial Sequence: Synthetic oligonucleotide
uguugaaacuauuagucuc

SEQ ID NO: 182111 - RNA, 19 nt, Artificial Sequence
  Description of Artificial Sequence: Synthetic oligonucleotide
aacuuuguaacugaacaca

SEQ ID NO: 182112 - RNA, 19 nt, Artificial Sequence
  Description of Artificial Sequence: Synthetic oligonucleotide
ugauaaaggaccuccacaa

SEQ ID NO: 182113 - RNA, 19 nt, Artificial Sequence
  Description of Artificial Sequence: Synthetic oligonucleotide
uuuugugcuagccugcugu

SEQ ID NO: 182114 - RNA, 19 nt, Artificial Sequence
  Description of Artificial Sequence: Synthetic oligonucleotide
agaaucacgaguuggucag

SEQ ID NO: 182115 - RNA, 19 nt, Artificial Sequence
  Description of Artificial Sequence: Synthetic oligonucleotide
auguggaaauguaacaugc

SEQ ID NO: 182116 - RNA, 19 nt, Artificial Sequence
  Description of Artificial Sequence: Synthetic oligonucleotide
ugacugaccaugcaugaag

SEQ ID NO: 182117 - RNA, 19 nt, Artificial Sequence
  Description of Artificial Sequence: Synthetic oligonucleotide
auggauagacauuucacug

SEQ ID NO: 182118 - RNA, 19 nt, Artificial Sequence
  Description of Artificial Sequence: Synthetic oligonucleotide
uuaagguuagagcuguacu

SEQ ID NO: 182119 - RNA, 19 nt, Artificial Sequence
  Description of Artificial Sequence: Synthetic oligonucleotide
uauaaagcugauaugcuuu

SEQ ID NO: 182120 - RNA, 19 nt, Artificial Sequence
  Description of Artificial Sequence: Synthetic oligonucleotide
uuacuaguuaaugaagacc

SEQ ID NO: 182121 - RNA, 19 nt, Artificial Sequence
  Description of Artificial Sequence: Synthetic oligonucleotide
acuaaacacacacacacaa

SEQ ID NO: 182122 - RNA, 19 nt, Artificial Sequence
  Description of Artificial Sequence: Synthetic oligonucleotide
ucugcaauugcugugguga

SEQ ID NO: 182123 - RNA, 19 nt, Artificial Sequence
  Description of Artificial Sequence: Synthetic oligonucleotide
uguauaaaucccacaugcc

SEQ ID NO: 182124 - RNA, 19 nt, Artificial Sequence
  Description of Artificial Sequence: Synthetic oligonucleotide
aucaaugaccccuuaggag

SEQ ID NO: 182125 - RNA, 19 nt, Artificial Sequence
  Description of Artificial Sequence: Synthetic oligonucleotide
auuacaggcaccuauucaa

SEQ ID NO: 182126 - RNA, 19 nt, Artificial Sequence
  Description of Artificial Sequence: Synthetic oligonucleotide
auaacauaccuguuuauaa

SEQ ID NO: 182127 - RNA, 19 nt, Artificial Sequence
  Description of Artificial Sequence: Synthetic oligonucleotide
ucuguauaaaucccacaug

SEQ ID NO: 182128 - RNA, 19 nt, Artificial Sequence
  Description of Artificial Sequence: Synthetic oligonucleotide
ucuagaaucacgaguuggu

SEQ ID NO: 182129 - RNA, 19 nt, Artificial Sequence
  Description of Artificial Sequence: Synthetic oligonucleotide
aagacugagccucauuacu

SEQ ID NO: 182130 - RNA, 19 nt, Artificial Sequence
  Description of Artificial Sequence: Synthetic oligonucleotide
aggagacaaaauuaugaag

SEQ ID NO: 182131 - RNA, 19 nt, Artificial Sequence
  Description of Artificial Sequence: Synthetic oligonucleotide
uuuaagagauuaucuacaa

SEQ ID NO: 182132 - RNA, 19 nt, Artificial Sequence
  Description of Artificial Sequence: Synthetic oligonucleotide
aaccauaaugagauauuac

SEQ ID NO: 182133 - RNA, 19 nt, Artificial Sequence
  Description of Artificial Sequence: Synthetic oligonucleotide
uauuacaggcaccuauuca

SEQ ID NO: 182134 - RNA, 19 nt, Artificial Sequence
  Description of Artificial Sequence: Synthetic oligonucleotide
caaagugaugaaaacuuac

SEQ ID NO: 182135 - RNA, 19 nt, Artificial Sequence
  Description of Artificial Sequence: Synthetic oligonucleotide
aguuuacaguaacugggac

SEQ ID NO: 182136 - RNA, 19 nt, Artificial Sequence
  Description of Artificial Sequence: Synthetic oligonucleotide
uuaaaagucuacagaugga

SEQ ID NO: 182137 - RNA, 19 nt, Artificial Sequence
  Description of Artificial Sequence: Synthetic oligonucleotide
uggauagacauuucacugc

SEQ ID NO: 182138 - RNA, 19 nt, Artificial Sequence
  Description of Artificial Sequence: Synthetic oligonucleotide
uagccuuuauuugugaaag

SEQ ID NO: 182139 - RNA, 19 nt, Artificial Sequence
  Description of Artificial Sequence: Synthetic oligonucleotide
uaguuaaugaagaccacau

SEQ ID NO: 182140 - RNA, 19 nt, Artificial Sequence
  Description of Artificial Sequence: Synthetic oligonucleotide
aaauaucgggagaagaacu

SEQ ID NO: 182141 - RNA, 19 nt, Artificial Sequence
  Description of Artificial Sequence: Synthetic oligonucleotide
auauuacaggcaccuauuc

SEQ ID NO: 182142 - RNA, 19 nt, Artificial Sequence
  Description of Artificial Sequence: Synthetic oligonucleotide
aaaugacuagcacacgaaa

SEQ ID NO: 182143 - RNA, 19 nt, Artificial Sequence
  Description of Artificial Sequence: Synthetic oligonucleotide
ggugaaagcaaauuucccc

SEQ ID NO: 182144 - RNA, 19 nt, Artificial Sequence
  Description of Artificial Sequence: Synthetic oligonucleotide
ggacuaaacacacacacac

SEQ ID NO: 182145 - RNA, 19 nt, Artificial Sequence
  Description of Artificial Sequence: Synthetic oligonucleotide
uggucggugaucucguacg

SEQ ID NO: 182146 - RNA, 19 nt, Artificial Sequence
  Description of Artificial Sequence: Synthetic oligonucleotide
agagauuaucuacaauuca

SEQ ID NO: 182147 - RNA, 19 nt, Artificial Sequence
  Description of Artificial Sequence: Synthetic oligonucleotide
gaaccuuacuaguuaauga

SEQ ID NO: 182148 - RNA, 19 nt, Artificial Sequence
  Description of Artificial Sequence: Synthetic oligonucleotide
cuugcgagaguucacgggc

SEQ ID NO: 182149 - RNA, 19 nt, Artificial Sequence
  Description of Artificial Sequence: Synthetic oligonucleotide
aagguuagagcuguacuug

SEQ ID NO: 182150 - RNA, 19 nt, Artificial Sequence
  Description of Artificial Sequence: Synthetic oligonucleotide
uguaggcaaagucauuaac

SEQ ID NO: 182151 - RNA, 19 nt, Artificial Sequence
  Description of Artificial Sequence: Synthetic oligonucleotide
ugauaugcuuuugugcuag

SEQ ID NO: 182152 - RNA, 19 nt, Artificial Sequence
  Description of Artificial Sequence: Synthetic oligonucleotide
uaaaagucuacagauggau

SEQ ID NO: 182153 - RNA, 19 nt, Artificial Sequence
  Description of Artificial Sequence: Synthetic oligonucleotide
cuuaggagacaaaauuaug

SEQ ID NO: 182154 - RNA, 19 nt, Artificial Sequence
  Description of Artificial Sequence: Synthetic oligonucleotide
cuagcacacgaaagaaugg

SEQ ID NO: 182155 - RNA, 19 nt, Artificial Sequence
  Description of Artificial Sequence: Synthetic oligonucleotide
uguuauaccagagaacauu

SEQ ID NO: 182156 - RNA, 19 nt, Artificial Sequence
  Description of Artificial Sequence: Synthetic oligonucleotide
uuacaggcaccuauucaag

SEQ ID NO: 182157 - RNA, 19 nt, Artificial Sequence
  Description of Artificial Sequence: Synthetic oligonucleotide
auggcgagcaccgagcugg

SEQ ID NO: 182158 - RNA, 19 nt, Artificial Sequence
  Description of Artificial Sequence: Synthetic oligonucleotide
uggugaaagcaaauuuccc

SEQ ID NO: 182159 - RNA, 19 nt, Artificial Sequence
  Description of Artificial Sequence: Synthetic oligonucleotide
ugugcuagccugcugucca

SEQ ID NO: 182160 - RNA, 19 nt, Artificial Sequence
  Description of Artificial Sequence: Synthetic oligonucleotide
cuaaacacacacacacaag

SEQ ID NO: 182161 - RNA, 19 nt, Artificial Sequence
  Description of Artificial Sequence: Synthetic oligonucleotide
uagaaauaucgggagaaga

SEQ ID NO: 182162 - RNA, 19 nt, Artificial Sequence
  Description of Artificial Sequence: Synthetic oligonucleotide
agaaccuuacuaguuaaug

SEQ ID NO: 182163 - RNA, 19 nt, Artificial Sequence
  Description of Artificial Sequence: Synthetic oligonucleotide
ucauuaggaaaaugcaaau

SEQ ID NO: 182164 - RNA, 19 nt, Artificial Sequence
  Description of Artificial Sequence: Synthetic oligonucleotide
ucauuacucuaucaacuuc

SEQ ID NO: 182165 - RNA, 19 nt, Artificial Sequence
  Description of Artificial Sequence: Synthetic oligonucleotide
guacuaaugagaaugugga

SEQ ID NO: 182166 - RNA, 19 nt, Artificial Sequence
  Description of Artificial Sequence: Synthetic oligonucleotide
auuagucucagauuaucuu

SEQ ID NO: 182167 - RNA, 19 nt, Artificial Sequence
  Description of Artificial Sequence: Synthetic oligonucleotide
acuugcgagaguucacggg

SEQ ID NO: 182168 - RNA, 19 nt, Artificial Sequence
  Description of Artificial Sequence: Synthetic oligonucleotide
ucagauuaucuugaauaug

SEQ ID NO: 182169 - RNA, 19 nt, Artificial Sequence
  Description of Artificial Sequence: Synthetic oligonucleotide
accgaagaggacaacugcc

SEQ ID NO: 182170 - RNA, 19 nt, Artificial Sequence
  Description of Artificial Sequence: Synthetic oligonucleotide
uuaucuagguaaccccugu

SEQ ID NO: 182171 - RNA, 19 nt, Artificial Sequence
  Description of Artificial Sequence: Synthetic oligonucleotide
auacagauggcaaaugacu

SEQ ID NO: 182172 - RNA, 19 nt, Artificial Sequence
  Description of Artificial Sequence: Synthetic oligonucleotide
uucguggacucauuggugu

SEQ ID NO: 182173 - RNA, 19 nt, Artificial Sequence
  Description of Artificial Sequence: Synthetic oligonucleotide
aaacaacccaagacgaaug

SEQ ID NO: 182174 - RNA, 19 nt, Artificial Sequence
  Description of Artificial Sequence: Synthetic oligonucleotide
ucggugaucucguacgcgc

SEQ ID NO: 182175 - RNA, 19 nt, Artificial Sequence
  Description of Artificial Sequence: Synthetic oligonucleotide
uguuaggcuaauggcacag

SEQ ID NO: 182176 - RNA, 19 nt, Artificial Sequence
  Description of Artificial Sequence: Synthetic oligonucleotide
ucuuccguggugaaagcaa

SEQ ID NO: 182177 - RNA, 19 nt, Artificial Sequence
  Description of Artificial Sequence: Synthetic oligonucleotide
guauaaaucccacaugccu

SEQ ID NO: 182178 - RNA, 19 nt, Artificial Sequence
  Description of Artificial Sequence: Synthetic oligonucleotide
gaagacugagccucauuac

SEQ ID NO: 182179 - RNA, 19 nt, Artificial Sequence
  Description of Artificial Sequence: Synthetic oligonucleotide
aauggucaacaccauucau

SEQ ID NO: 182180 - RNA, 19 nt, Artificial Sequence
  Description of Artificial Sequence: Synthetic oligonucleotide
auagccugagacuguaacu

SEQ ID NO: 182181 - RNA, 19 nt, Artificial Sequence
  Description of Artificial Sequence: Synthetic oligonucleotide
guaacucagugacugacca

SEQ ID NO: 182182 - RNA, 19 nt, Artificial Sequence
  Description of Artificial Sequence: Synthetic oligonucleotide
aauauggcccgcagaaucu

SEQ ID NO: 182183 - RNA, 19 nt, Artificial Sequence
  Description of Artificial Sequence: Synthetic oligonucleotide
aacuaacagaguagauuuc

SEQ ID NO: 182184 - RNA, 19 nt, Artificial Sequence
  Description of Artificial Sequence: Synthetic oligonucleotide
aaacacacacacacaagga

SEQ ID NO: 182185 - RNA, 19 nt, Artificial Sequence
  Description of Artificial Sequence: Synthetic oligonucleotide
ggauagacauuucacugcc

SEQ ID NO: 182186 - RNA, 19 nt, Artificial Sequence
  Description of Artificial Sequence: Synthetic oligonucleotide
aaguacuaaugagaaugug

SEQ ID NO: 182187 - RNA, 19 nt, Artificial Sequence
  Description of Artificial Sequence: Synthetic oligonucleotide
agaaauaucgggagaagaa

SEQ ID NO: 182188 - RNA, 19 nt, Artificial Sequence
  Description of Artificial Sequence: Synthetic oligonucleotide
aggcacaagucagaaauag

SEQ ID NO: 182189 - RNA, 19 nt, Artificial Sequence
  Description of Artificial Sequence: Synthetic oligonucleotide
aggugagucuguauaaauc

SEQ ID NO: 182190 - RNA, 19 nt, Artificial Sequence
  Description of Artificial Sequence: Synthetic oligonucleotide
uaucuacaauucaaagcuc

SEQ ID NO: 182191 - RNA, 19 nt, Artificial Sequence
  Description of Artificial Sequence: Synthetic oligonucleotide
guguucguggacucauugg

SEQ ID NO: 182192 - RNA, 19 nt, Artificial Sequence
  Description of Artificial Sequence: Synthetic oligonucleotide
agagcaacgcacacgggcg

SEQ ID NO: 182193 - RNA, 19 nt, Artificial Sequence
  Description of Artificial Sequence: Synthetic oligonucleotide
cuuaagguuagagcuguac

SEQ ID NO: 182194 - RNA, 19 nt, Artificial Sequence
  Description of Artificial Sequence: Synthetic oligonucleotide
agugacugaccaugcauga

SEQ ID NO: 182195 - RNA, 19 nt, Artificial Sequence
  Description of Artificial Sequence: Synthetic oligonucleotide
ugucuagaaucacgaguug

SEQ ID NO: 182196 - RNA, 19 nt, Artificial Sequence
  Description of Artificial Sequence: Synthetic oligonucleotide
caugugacaaacugagaca

SEQ ID NO: 182197 - RNA, 19 nt, Artificial Sequence
  Description of Artificial Sequence: Synthetic oligonucleotide
acgcaagagcaauuuacug

SEQ ID NO: 182198 - RNA, 19 nt, Artificial Sequence
  Description of Artificial Sequence: Synthetic oligonucleotide
agguuauuuucacaaggaa

SEQ ID NO: 182199 - RNA, 19 nt, Artificial Sequence
  Description of Artificial Sequence: Synthetic oligonucleotide
gaccacaugauggaacuac

SEQ ID NO: 182200 - RNA, 19 nt, Artificial Sequence
  Description of Artificial Sequence: Synthetic oligonucleotide
acaaugauaagaaguacua

SEQ ID NO: 182201 - RNA, 19 nt, Artificial Sequence
  Description of Artificial Sequence: Synthetic oligonucleotide
auacuguuaguaggauggc

SEQ ID NO: 182202 - RNA, 19 nt, Artificial Sequence
  Description of Artificial Sequence: Synthetic oligonucleotide
acccaagacgaaugcuggc

SEQ ID NO: 182203 - RNA, 19 nt, Artificial Sequence
  Description of Artificial Sequence: Synthetic oligonucleotide
ccaucaaugaccccuuagg

SEQ ID NO: 182204 - RNA, 19 nt, Artificial Sequence
  Description of Artificial Sequence: Synthetic oligonucleotide
cucuaggcgucguaacucc

SEQ ID NO: 182205 - RNA, 19 nt, Artificial Sequence
  Description of Artificial Sequence: Synthetic oligonucleotide
gucauaagacaaagaaggc

SEQ ID NO: 182206 - RNA, 19 nt, Artificial Sequence
  Description of Artificial Sequence: Synthetic oligonucleotide
ucgggagaagaacuagagu

SEQ ID NO: 182207 - RNA, 19 nt, Artificial Sequence
  Description of Artificial Sequence: Synthetic oligonucleotide
augucuagaaucacgaguu

SEQ ID NO: 182208 - RNA, 19 nt, Artificial Sequence
  Description of Artificial Sequence: Synthetic oligonucleotide
aaucacgaguuggucaggu

SEQ ID NO: 182209 - RNA, 19 nt, Artificial Sequence
  Description of Artificial Sequence: Synthetic oligonucleotide
aaugacccaaguagaaaau

SEQ ID NO: 182210 - RNA, 19 nt, Artificial Sequence
  Description of Artificial Sequence: Synthetic oligonucleotide
agucuguauaaaucccaca

SEQ ID NO: 182211 - RNA, 19 nt, Artificial Sequence
  Description of Artificial Sequence: Synthetic oligonucleotide
auaaagcugauaugcuuuu

SEQ ID NO: 182212 - RNA, 19 nt, Artificial Sequence
  Description of Artificial Sequence: Synthetic oligonucleotide
gacucauuggugucgcgca

SEQ ID NO: 182213 - RNA, 19 nt, Artificial Sequence
  Description of Artificial Sequence: Synthetic oligonucleotide
caucaaugaccccuuagga

SEQ ID NO: 182214 - RNA, 19 nt, Artificial Sequence
  Description of Artificial Sequence: Synthetic oligonucleotide
ugggaucuacaugugacaa

SEQ ID NO: 182215 - RNA, 19 nt, Artificial Sequence
  Description of Artificial Sequence: Synthetic oligonucleotide
uguuaguaggauggccuug

SEQ ID NO: 182216 - RNA, 19 nt, Artificial Sequence
  Description of Artificial Sequence: Synthetic oligonucleotide
acacacacacacaaggagu

SEQ ID NO: 182217 - RNA, 19 nt, Artificial Sequence
  Description of Artificial Sequence: Synthetic oligonucleotide
agcuuaagguuagagcugu

SEQ ID NO: 182218 - RNA, 19 nt, Artificial Sequence
  Description of Artificial Sequence: Synthetic oligonucleotide
caugcaucccaaagugaug

SEQ ID NO: 182219 - RNA, 19 nt, Artificial Sequence
  Description of Artificial Sequence: Synthetic oligonucleotide
acucagugacugaccaugc

SEQ ID NO: 182220 - RNA, 19 nt, Artificial Sequence
  Description of Artificial Sequence: Synthetic oligonucleotide
ucucguacgcgcccgucac

SEQ ID NO: 182221 - RNA, 19 nt, Artificial Sequence
  Description of Artificial Sequence: Synthetic oligonucleotide
gaaagcaaauuuccccuua

SEQ ID NO: 182222 - RNA, 19 nt, Artificial Sequence
  Description of Artificial Sequence: Synthetic oligonucleotide
cacacuucaaacaugucau

SEQ ID NO: 182223 - RNA, 19 nt, Artificial Sequence
  Description of Artificial Sequence: Synthetic oligonucleotide
uacuuauuucucccuggua

SEQ ID NO: 182224 - RNA, 19 nt, Artificial Sequence
  Description of Artificial Sequence: Synthetic oligonucleotide
gaaaccgaagaggacaacu

SEQ ID NO: 182225 - RNA, 19 nt, Artificial Sequence
  Description of Artificial Sequence: Synthetic oligonucleotide
ggagcuaaguuaaaacaac

SEQ ID NO: 182226 - RNA, 19 nt, Artificial Sequence
  Description of Artificial Sequence: Synthetic oligonucleotide
uuuucgccucuacuccaug

SEQ ID NO: 182227 - RNA, 19 nt, Artificial Sequence
  Description of Artificial Sequence: Synthetic oligonucleotide
gaucuugagaugggugcgc

SEQ ID NO: 182228 - RNA, 19 nt, Artificial Sequence
  Description of Artificial Sequence: Synthetic oligonucleotide
gagcaauuuacuggaguca

SEQ ID NO: 182229 - RNA, 19 nt, Artificial Sequence
  Description of Artificial Sequence: Synthetic oligonucleotide
agacuaugguuuugcauuu

SEQ ID NO: 182230 - RNA, 19 nt, Artificial Sequence
  Description of Artificial Sequence: Synthetic oligonucleotide
uacaguaacugggaccuua

SEQ ID NO: 182231 - RNA, 19 nt, Artificial Sequence
  Description of Artificial Sequence: Synthetic oligonucleotide
agcgacgcagguagaagac

SEQ ID NO: 182232 - RNA, 19 nt, Artificial Sequence
  Description of Artificial Sequence: Synthetic oligonucleotide
ccauggauagacauuucac

SEQ ID NO: 182233 - RNA, 19 nt, Artificial Sequence
  Description of Artificial Sequence: Synthetic oligonucleotide
ccuuacuaguuaaugaaga

SEQ ID NO: 182234 - RNA, 19 nt, Artificial Sequence
  Description of Artificial Sequence: Synthetic oligonucleotide
cauuaucuagguaaccccu

SEQ ID NO: 182235 - RNA, 19 nt, Artificial Sequence
  Description of Artificial Sequence: Synthetic oligonucleotide
ccacgcaagagcaauuuac

SEQ ID NO: 182236 - RNA, 19 nt, Artificial Sequence
  Description of Artificial Sequence: Synthetic oligonucleotide
gguagaaguuaugugaaaa

SEQ ID NO: 182237 - RNA, 19 nt, Artificial Sequence
  Description of Artificial Sequence: Synthetic oligonucleotide
gacuaaacacacacacaca

SEQ ID NO: 182238 - RNA, 19 nt, Artificial Sequence
  Description of Artificial Sequence: Synthetic oligonucleotide
gaaagguccucuaggcguc

SEQ ID NO: 182239 - RNA, 19 nt, Artificial Sequence
  Description of Artificial Sequence: Synthetic oligonucleotide
gaaguacuaaugagaaugu

SEQ ID NO: 182240 - RNA, 19 nt, Artificial Sequence
  Description of Artificial Sequence: Synthetic oligonucleotide
gagaccuaucacuucucaa

SEQ ID NO: 182241 - RNA, 19 nt, Artificial Sequence
  Description of Artificial Sequence: Synthetic oligonucleotide
aaacccuaacuaacagagu

SEQ ID NO: 182242 - RNA, 19 nt, Artificial Sequence
  Description of Artificial Sequence: Synthetic oligonucleotide
guaacugaacacacaaugu

SEQ ID NO: 182243 - RNA, 19 nt, Artificial Sequence
  Description of Artificial Sequence: Synthetic oligonucleotide
uggcauuaucuagguaacc

SEQ ID NO: 182244 - RNA, 19 nt, Artificial Sequence
  Description of Artificial Sequence: Synthetic oligonucleotide
gcuagauucuuagaaguga

SEQ ID NO: 182245 - RNA, 19 nt, Artificial Sequence
  Description of Artificial Sequence: Synthetic oligonucleotide
gaaucacgaguuggucagg

SEQ ID NO: 182246 - RNA, 19 nt, Artificial Sequence
  Description of Artificial Sequence: Synthetic oligonucleotide
accuauucaaggagcuaag

SEQ ID NO: 182247 - RNA, 19 nt, Artificial Sequence
  Description of Artificial Sequence: Synthetic oligonucleotide
agccgcguucaccacccgg

SEQ ID NO: 182248 - RNA, 19 nt, Artificial Sequence
  Description of Artificial Sequence: Synthetic oligonucleotide
ucguacgcgcccgucacca

SEQ ID NO: 182249 - RNA, 19 nt, Artificial Sequence
  Description of Artificial Sequence: Synthetic oligonucleotide
cugggaucuacaugugaca

SEQ ID NO: 182250 - RNA, 19 nt, Artificial Sequence
  Description of Artificial Sequence: Synthetic oligonucleotide
agucucagauuaucuugaa

SEQ ID NO: 182251 - RNA, 19 nt, Artificial Sequence
  Description of Artificial Sequence: Synthetic oligonucleotide
gauggaacuacuccaccuu

SEQ ID NO: 182252 - RNA, 19 nt, Artificial Sequence
  Description of Artificial Sequence: Synthetic oligonucleotide
uccguggugaaagcaaauu

SEQ ID NO: 182253 - RNA, 19 nt, Artificial Sequence
  Description of Artificial Sequence: Synthetic oligonucleotide
guucacgggcagauggaag

SEQ ID NO: 182254 - RNA, 19 nt, Artificial Sequence
  Description of Artificial Sequence: Synthetic oligonucleotide
uucuuagaagugagaccua

SEQ ID NO: 182255 - RNA, 19 nt, Artificial Sequence
  Description of Artificial Sequence: Synthetic oligonucleotide
gucggugaucucguacgcg

SEQ ID NO: 182256 - RNA, 19 nt, Artificial Sequence
  Description of Artificial Sequence: Synthetic oligonucleotide
acauucacauaagaaccuu

SEQ ID NO: 182257 - RNA, 19 nt, Artificial Sequence
  Description of Artificial Sequence: Synthetic oligonucleotide
accacacgucugauaaagg

SEQ ID NO: 182258 - RNA, 19 nt, Artificial Sequence
  Description of Artificial Sequence: Synthetic oligonucleotide
acgucugauaaaggaccuc

SEQ ID NO: 182259 - RNA, 19 nt, Artificial Sequence
  Description of Artificial Sequence: Synthetic oligonucleotide
gccauggauagacauuuca

SEQ ID NO: 182260 - RNA, 19 nt, Artificial Sequence
  Description of Artificial Sequence: Synthetic oligonucleotide
ggugaucucguacgcgccc

SEQ ID NO: 182261 - RNA, 19 nt, Artificial Sequence
  Description of Artificial Sequence: Synthetic oligonucleotide
augccucuuuccauuaaca

SEQ ID NO: 182262 - RNA, 19 nt, Artificial Sequence
  Description of Artificial Sequence: Synthetic oligonucleotide
gauagacauuucacugcca

SEQ ID NO: 182263 - RNA, 19 nt, Artificial Sequence
  Description of Artificial Sequence: Synthetic oligonucleotide
guacgcgcccgucaccagc

SEQ ID NO: 182264 - RNA, 19 nt, Artificial Sequence
  Description of Artificial Sequence: Synthetic oligonucleotide
aaugaccccuuaggagaca

SEQ ID NO: 182265 - RNA, 19 nt, Artificial Sequence
  Description of Artificial Sequence: Synthetic oligonucleotide
auccgcccuguucccuugc

SEQ ID NO: 182266 - RNA, 19 nt, Artificial Sequence
  Description of Artificial Sequence: Synthetic oligonucleotide
cuuccguggugaaagcaaa

SEQ ID NO: 182267 - RNA, 19 nt, Artificial Sequence
  Description of Artificial Sequence: Synthetic oligonucleotide
cacgcaagagcaauuuacu

SEQ ID NO: 182268 - RNA, 19 nt, Artificial Sequence
  Description of Artificial Sequence: Synthetic oligonucleotide
aggcgucguaacuccaccu

SEQ ID NO: 182269 - RNA, 19 nt, Artificial Sequence
  Description of Artificial Sequence: Synthetic oligonucleotide
uauccgcccuguucccuug

SEQ ID NO: 182270 - RNA, 19 nt, Artificial Sequence
  Description of Artificial Sequence: Synthetic oligonucleotide
gcgagcaccgagcuggggc

SEQ ID NO: 182271 - RNA, 19 nt, Artificial Sequence
  Description of Artificial Sequence: Synthetic oligonucleotide
augauacuguuaguaggau

SEQ ID NO: 182272 - RNA, 19 nt, Artificial Sequence
  Description of Artificial Sequence: Synthetic oligonucleotide
aguucacgggcagauggaa

SEQ ID NO: 182273 - RNA, 19 nt, Artificial Sequence
  Description of Artificial Sequence: Synthetic oligonucleotide
gcgucguaacuccaccucc

SEQ ID NO: 182274 - RNA, 19 nt, Artificial Sequence
  Description of Artificial Sequence: Synthetic oligonucleotide
cucauuacucuaucaacuu

SEQ ID NO: 182275 - RNA, 19 nt, Artificial Sequence
  Description of Artificial Sequence: Synthetic oligonucleotide
cacagacuaugguuuugca

SEQ ID NO: 182276 - RNA, 19 nt, Artificial Sequence
  Description of Artificial Sequence: Synthetic oligonucleotide
uuccaucggugacuuuaau

SEQ ID NO: 182277 - RNA, 19 nt, Artificial Sequence
  Description of Artificial Sequence: Synthetic oligonucleotide
gacucggguguucguggac

SEQ ID NO: 182278 - RNA, 19 nt, Artificial Sequence
  Description of Artificial Sequence: Synthetic oligonucleotide
aggcacgucccagcgaugu

SEQ ID NO: 182279 - RNA, 19 nt, Artificial Sequence
  Description of Artificial Sequence: Synthetic oligonucleotide
gagcaacgcacacgggcga

SEQ ID NO: 182280 - RNA, 19 nt, Artificial Sequence
  Description of Artificial Sequence: Synthetic oligonucleotide
ccucauuacucuaucaacu

SEQ ID NO: 182281 - RNA, 19 nt, Artificial Sequence
  Description of Artificial Sequence: Synthetic oligonucleotide
ccaguccaaauccuaccgc

SEQ ID NO: 182282 - RNA, 19 nt, Artificial Sequence
  Description of Artificial Sequence: Synthetic oligonucleotide
agcaacgcacacgggcgag

SEQ ID NO: 182283 - RNA, 19 nt, Artificial Sequence
  Description of Artificial Sequence: Synthetic oligonucleotide
ugccacgcaagagcaauuu

SEQ ID NO: 182284 - RNA, 19 nt, Artificial Sequence
  Description of Artificial Sequence: Synthetic oligonucleotide
caacauagugggccagaca

SEQ ID NO: 182285 - RNA, 19 nt, Artificial Sequence
  Description of Artificial Sequence: Synthetic oligonucleotide
gcagauaacauaccuguuu

SEQ ID NO: 182286 - RNA, 19 nt, Artificial Sequence
  Description of Artificial Sequence: Synthetic oligonucleotide
cacugggaucuacauguga

SEQ ID NO: 182287 - RNA, 19 nt, Artificial Sequence
  Description of Artificial Sequence: Synthetic oligonucleotide
cucgcggaggcacuugcga

SEQ ID NO: 182288 - RNA, 19 nt, Artificial Sequence
  Description of Artificial Sequence: Synthetic oligonucleotide
ggucggugaucucguacgc

SEQ ID NO: 182289 - RNA, 19 nt, Artificial Sequence
  Description of Artificial Sequence: Synthetic oligonucleotide
aaaugaucacugggaucua

SEQ ID NO: 182290 - RNA, 19 nt, Artificial Sequence
  Description of Artificial Sequence: Synthetic oligonucleotide
cacgggcagauggaaggag

SEQ ID NO: 182291 - RNA, 19 nt, Artificial Sequence
  Description of Artificial Sequence: Synthetic oligonucleotide
gccgcguucaccacccggg

SEQ ID NO: 182292 - RNA, 19 nt, Artificial Sequence
  Description of Artificial Sequence: Synthetic oligonucleotide
cacacacacacaaggaguu

SEQ ID NO: 182293 - RNA, 19 nt, Artificial Sequence
  Description of Artificial Sequence: Synthetic oligonucleotide
agccauggauagacauuuc

SEQ ID NO: 182294 - RNA, 19 nt, Artificial Sequence
  Description of Artificial Sequence: Synthetic oligonucleotide
ggcgucguaacuccaccuc

SEQ ID NO: 182295 - RNA, 19 nt, Artificial Sequence
  Description of Artificial Sequence: Synthetic oligonucleotide
uccgcccuguucccuugcu

SEQ ID NO: 182296 - RNA, 19 nt, Artificial Sequence
  Description of Artificial Sequence: Synthetic oligonucleotide
cucguacgcgcccgucacc

SEQ ID NO: 182297 - RNA, 19 nt, Artificial Sequence
  Description of Artificial Sequence: Synthetic oligonucleotide
ggcaagaaagcuccacugu

SEQ ID NO: 182298 - RNA, 19 nt, Artificial Sequence
  Description of Artificial Sequence: Synthetic oligonucleotide
gucuuccguggugaaagca

SEQ ID NO: 182299 - RNA, 19 nt, Artificial Sequence
  Description of Artificial Sequence: Synthetic oligonucleotide
guuaggcuaauggcacaga

SEQ ID NO: 182300 - RNA, 19 nt, Artificial Sequence
  Description of Artificial Sequence: Synthetic oligonucleotide
ggagccgcguucaccaccc

SEQ ID NO: 182301 - RNA, 19 nt, Artificial Sequence
  Description of Artificial Sequence: Synthetic oligonucleotide
cacgucugauaaaggaccu

SEQ ID NO: 182302 - RNA, 19 nt, Artificial Sequence
  Description of Artificial Sequence: Synthetic oligonucleotide
gaucuacaugugacaaacu

SEQ ID NO: 182303 - RNA, 19 nt, Artificial Sequence
  Description of Artificial Sequence: Synthetic oligonucleotide
ccaaagugaugaaaacuua

SEQ ID NO: 182304 - RNA, 19 nt, Artificial Sequence
  Description of Artificial Sequence: Synthetic oligonucleotide
gggaucuacaugugacaaa

SEQ ID NO: 182305 - RNA, 19 nt, Artificial Sequence
  Description of Artificial Sequence: Synthetic oligonucleotide
gaucucguacgcgcccguc

SEQ ID NO: 182306 - RNA, 19 nt, Artificial Sequence
  Description of Artificial Sequence: Synthetic oligonucleotide
uggugccggagccgcguuc

SEQ ID NO: 182307 - RNA, 19 nt, Artificial Sequence
  Description of Artificial Sequence: Synthetic oligonucleotide
cacaugccucuuuccauua

SEQ ID NO: 182308 - RNA, 19 nt, Artificial Sequence
  Description of Artificial Sequence: Synthetic oligonucleotide
gugacugaccaugcaugaa

SEQ ID NO: 182309 - RNA, 19 nt, Artificial Sequence
  Description of Artificial Sequence: Synthetic oligonucleotide
gagccgcguucaccacccg

SEQ ID NO: 182310 - RNA, 19 nt, Artificial Sequence
  Description of Artificial Sequence: Synthetic oligonucleotide
gcaacgcacacgggcgagg

SEQ ID NO: 182311 - RNA, 19 nt, Artificial Sequence
  Description of Artificial Sequence: Synthetic oligonucleotide
gcgacgcagguagaagacc

SEQ ID NO: 182312 - RNA, 19 nt, Artificial Sequence
  Description of Artificial Sequence: Synthetic oligonucleotide
cuguuaguaggauggccuu

SEQ ID NO: 182313 - RNA, 19 nt, Artificial Sequence
  Description of Artificial Sequence: Synthetic oligonucleotide
ggugucgcgcaucuccucu

SEQ ID NO: 182314 - RNA, 19 nt, Artificial Sequence
  Description of Artificial Sequence: Synthetic oligonucleotide
agguccucuaggcgucgua

SEQ ID NO: 182315 - RNA, 19 nt, Artificial Sequence
  Description of Artificial Sequence: Synthetic oligonucleotide
cacgucccagcgauguucu

SEQ ID NO: 182316 - RNA, 19 nt, Artificial Sequence
  Description of Artificial Sequence: Synthetic oligonucleotide
ggacucggguguucgugga

SEQ ID NO: 182317 - RNA, 19 nt, Artificial Sequence
  Description of Artificial Sequence: Synthetic oligonucleotide
gguccucuaggcgucguaa

SEQ ID NO: 182318 - RNA, 19 nt, Artificial Sequence
  Description of Artificial Sequence: Synthetic oligonucleotide
ggcaccuauucaaggagcu

SEQ ID NO: 182319 - RNA, 19 nt, Artificial Sequence
  Description of Artificial Sequence: Synthetic oligonucleotide
caggcacgucccagcgaug

SEQ ID NO: 182320 - RNA, 19 nt, Artificial Sequence
  Description of Artificial Sequence: Synthetic oligonucleotide
ggugccggagccgcguuca

SEQ ID NO: 182321 - RNA, 19 nt, Artificial Sequence
  Description of Artificial Sequence: Synthetic oligonucleotide
guguuauaccagagaacau

SEQ ID NO: 182322 - RNA, 19 nt, Artificial Sequence
  Description of Artificial Sequence: Synthetic oligonucleotide
cauuggugucgcgcaucuc

SEQ ID NO: 182323 - RNA, 19 nt, Artificial Sequence
  Description of Artificial Sequence: Synthetic oligonucleotide
cggugaucucguacgcgcc

SEQ ID NO: 182324 - RNA, 19 nt, Artificial Sequence
  Description of Artificial Sequence: Synthetic oligonucleotide
cccgcagaaucugugaucu

SEQ ID NO: 182325 - RNA, 19 nt, Artificial Sequence
  Description of Artificial Sequence: Synthetic oligonucleotide
ggugaggacucaacugcua

SEQ ID NO: 182326 - RNA, 19 nt, Artificial Sequence
  Description of Artificial Sequence: Synthetic oligonucleotide
ccuaacuaacagaguagau

SEQ ID NO: 182327 - RNA, 19 nt, Artificial Sequence
  Description of Artificial Sequence: Synthetic oligonucleotide
gccacgcaagagcaauuua

SEQ ID NO: 182328 - RNA, 19 nt, Artificial Sequence
  Description of Artificial Sequence: Synthetic oligonucleotide
cgacgcagguagaagaccu

SEQ ID NO: 182329 - RNA, 19 nt, Artificial Sequence
  Description of Artificial Sequence: Synthetic oligonucleotide
ccguggugaaagcaaauuu

SEQ ID NO: 182330 - RNA, 19 nt, Artificial Sequence
  Description of Artificial Sequence: Synthetic oligonucleotide
cccuuaguugcaucuuccu

SEQ ID NO: 182331 - RNA, 19 nt, Artificial Sequence
  Description of Artificial Sequence: Synthetic oligonucleotide
gcaccuauucaaggagcua

SEQ ID NO: 182332 - RNA, 19 nt, Artificial Sequence
  Description of Artificial Sequence: Synthetic oligonucleotide
ccgcccuguucccuugcuc

SEQ ID NO: 182333 - RNA, 19 nt, Artificial Sequence
  Description of Artificial Sequence: Synthetic oligonucleotide
cguacgcgcccgucaccag

SEQ ID NO: 182334 - RNA, 19 nt, Artificial Sequence
  Description of Artificial Sequence: Synthetic oligonucleotide
cagcgauguucugcuggcu

SEQ ID NO: 182335 - RNA, 19 nt, Artificial Sequence
  Description of Artificial Sequence: Synthetic oligonucleotide
cccggacuggucggugauc

SEQ ID NO: 182336 - RNA, 19 nt, Artificial Sequence
  Description of Artificial Sequence: Synthetic oligonucleotide
ccccggacuggucggugau

SEQ ID NO: 182337 - RNA, 19 nt, Artificial Sequence
  Description of Artificial Sequence: Synthetic oligonucleotide
ccgcagaaucugugaucuu

SEQ ID NO: 182338 - RNA, 19 nt, Artificial Sequence
  Description of Artificial Sequence: Synthetic oligonucleotide
uaagcuaauacucauagca

SEQ ID NO: 182339 - RNA, 19 nt, Artificial Sequence
  Description of Artificial Sequence: Synthetic oligonucleotide
auuacauaaauacugaggu

SEQ ID NO: 182340 - RNA, 19 nt, Artificial Sequence
  Description of Artificial Sequence: Synthetic oligonucleotide
auuauaagcacuuugccug

SEQ ID NO: 182341 - RNA, 19 nt, Artificial Sequence
  Description of Artificial Sequence: Synthetic oligonucleotide
gauauacccacauacaccc

SEQ ID NO: 182342 - RNA, 19 nt, Artificial Sequence
  Description of Artificial Sequence: Synthetic oligonucleotide
ugagaaaacuccuuuacug

SEQ ID NO: 182343 - RNA, 19 nt, Artificial Sequence
  Description of Artificial Sequence: Synthetic oligonucleotide
aaguuuaccaccuguagcu

SEQ ID NO: 182344 - RNA, 19 nt, Artificial Sequence
  Description of Artificial Sequence: Synthetic oligonucleotide
uuuaaguaaagcagcuggg

SEQ ID NO: 182345 - RNA, 19 nt, Artificial Sequence
  Description of Artificial Sequence: Synthetic oligonucleotide
aagaaagcucuguacauag

SEQ ID NO: 182346 - RNA, 19 nt, Artificial Sequence
  Description of Artificial Sequence: Synthetic oligonucleotide
uagacacucacucaaauac

SEQ ID NO: 182347 - RNA, 19 nt, Artificial Sequence
  Description of Artificial Sequence: Synthetic oligonucleotide
uccuauaugacccauuccu

SEQ ID NO: 182348 - RNA, 19 nt, Artificial Sequence
  Description of Artificial Sequence: Synthetic oligonucleotide
aacgcuagagguucccucc

SEQ ID NO: 182349 - RNA, 19 nt, Artificial Sequence
  Description of Artificial Sequence: Synthetic oligonucleotide
uuggugauagggaaggagg

SEQ ID NO: 182350 - RNA, 19 nt, Artificial Sequence
  Description of Artificial Sequence: Synthetic oligonucleotide
gaucauucacucuuggugc

SEQ ID NO: 182351 - RNA, 19 nt, Artificial Sequence
  Description of Artificial Sequence: Synthetic oligonucleotide
ugauauacccacauacacc

SEQ ID NO: 182352 - RNA, 19 nt, Artificial Sequence
  Description of Artificial Sequence: Synthetic oligonucleotide
cacauuauaagcacuuugc

SEQ ID NO: 182353 - RNA, 19 nt, Artificial Sequence
  Description of Artificial Sequence: Synthetic oligonucleotide
auagacgacgucaugaugg

SEQ ID NO: 182354 - RNA, 19 nt, Artificial Sequence
  Description of Artificial Sequence: Synthetic oligonucleotide
uaauuggugauagggaagg

SEQ ID NO: 182355 - RNA, 19 nt, Artificial Sequence
  Description of Artificial Sequence: Synthetic oligonucleotide
auuagauuuguuuucacuu

SEQ ID NO: 182356 - RNA, 19 nt, Artificial Sequence
  Description of Artificial Sequence: Synthetic oligonucleotide
aaaauaccuaggcaguaca

SEQ ID NO: 182357 - RNA, 19 nt, Artificial Sequence
  Description of Artificial Sequence: Synthetic oligonucleotide
ugcugaaggucguauagcg

SEQ ID NO: 182358 - RNA, 19 nt, Artificial Sequence
  Description of Artificial Sequence: Synthetic oligonucleotide
uguguaaagaaaacgugaa

SEQ ID NO: 182359 - RNA, 19 nt, Artificial Sequence
  Description of Artificial Sequence: Synthetic oligonucleotide
uuucgaguagcaaagguau

SEQ ID NO: 182360 - RNA, 19 nt, Artificial Sequence
  Description of Artificial Sequence: Synthetic oligonucleotide
aagguauacacauggccug

SEQ ID NO: 182361 - RNA, 19 nt, Artificial Sequence
  Description of Artificial Sequence: Synthetic oligonucleotide
agcauaagggaggaaaccc

SEQ ID NO: 182362 - RNA, 19 nt, Artificial Sequence
  Description of Artificial Sequence: Synthetic oligonucleotide
uguuuggaugccuugccgg

SEQ ID NO: 182363 - RNA, 19 nt, Artificial Sequence
  Description of Artificial Sequence: Synthetic oligonucleotide
agaaguagaaaccacugau

SEQ ID NO: 182364 - RNA, 19 nt, Artificial Sequence
  Description of Artificial Sequence: Synthetic oligonucleotide
uggaucuaucuuuuguggg

SEQ ID NO: 182365 - RNA, 19 nt, Artificial Sequence
  Description of Artificial Sequence: Synthetic oligonucleotide
auagcaaacauugagccga

SEQ ID NO: 182366 - RNA, 19 nt, Artificial Sequence
  Description of Artificial Sequence: Synthetic oligonucleotide
cacugauauacccacauac

SEQ ID NO: 182367 - RNA, 19 nt, Artificial Sequence
  Description of Artificial Sequence: Synthetic oligonucleotide
gguaagcuaauacucauag

SEQ ID NO: 182368 - RNA, 19 nt, Artificial Sequence
  Description of Artificial Sequence: Synthetic oligonucleotide
ucaccaaagaggcuggaga

SEQ ID NO: 182369 - RNA, 19 nt, Artificial Sequence
  Description of Artificial Sequence: Synthetic oligonucleotide
agugagagggcauaguccu

SEQ ID NO: 182370 - RNA, 19 nt, Artificial Sequence
  Description of Artificial Sequence: Synthetic oligonucleotide
uggugauagggaaggaggg

SEQ ID NO: 182371 - RNA, 19 nt, Artificial Sequence
  Description of Artificial Sequence: Synthetic oligonucleotide
uuuucgaguagcaaaggua

SEQ ID NO: 182372 - RNA, 19 nt, Artificial Sequence
  Description of Artificial Sequence: Synthetic oligonucleotide
auaaauaaguggugccguc

SEQ ID NO: 182373 - RNA, 19 nt, Artificial Sequence
  Description of Artificial Sequence: Synthetic oligonucleotide
cauacaucacugcaugggg

SEQ ID NO: 182374 - RNA, 19 nt, Artificial Sequence
  Description of Artificial Sequence: Synthetic oligonucleotide
cugauauacccacauacac

SEQ ID NO: 182375 - RNA, 19 nt, Artificial Sequence
  Description of Artificial Sequence: Synthetic oligonucleotide
cagaucguccccaaaauac

SEQ ID NO: 182376 - RNA, 19 nt, Artificial Sequence
  Description of Artificial Sequence: Synthetic oligonucleotide
cuauucaggggcugaaagg

SEQ ID NO: 182377 - RNA, 19 nt, Artificial Sequence
  Description of Artificial Sequence: Synthetic oligonucleotide
cuggaucuaucuuuugugg

SEQ ID NO: 182378 - RNA, 19 nt, Artificial Sequence
  Description of Artificial Sequence: Synthetic oligonucleotide
caaguuuaccaccuguagc

SEQ ID NO: 182379 - RNA, 19 nt, Artificial Sequence
  Description of Artificial Sequence: Synthetic oligonucleotide
aacgucacugucccacugg

SEQ ID NO: 182380 - RNA, 19 nt, Artificial Sequence
  Description of Artificial Sequence: Synthetic oligonucleotide
gacgacgucaugaugguag

SEQ ID NO: 182381 - RNA, 19 nt, Artificial Sequence
  Description of Artificial Sequence: Synthetic oligonucleotide
cucacugcgacuugggccc

SEQ ID NO: 182382 - RNA, 19 nt, Artificial Sequence
  Description of Artificial Sequence: Synthetic oligonucleotide
ugauucacucacuggaucu

SEQ ID NO: 182383 - RNA, 19 nt, Artificial Sequence
  Description of Artificial Sequence: Synthetic oligonucleotide
cauagcaaacauugagccg

SEQ ID NO: 182384 - RNA, 19 nt, Artificial Sequence
  Description of Artificial Sequence: Synthetic oligonucleotide
aacgugaaaaggcaacaau

SEQ ID NO: 182385 - RNA, 19 nt, Artificial Sequence
  Description of Artificial Sequence: Synthetic oligonucleotide
ugcacauagaaaugucacc

SEQ ID NO: 182386 - RNA, 19 nt, Artificial Sequence
  Description of Artificial Sequence: Synthetic oligonucleotide
caguuuucgaguagcaaag

SEQ ID NO: 182387 - RNA, 19 nt, Artificial Sequence
  Description of Artificial Sequence: Synthetic oligonucleotide
uuaaguaaagcagcuggga

SEQ ID NO: 182388 - RNA, 19 nt, Artificial Sequence
  Description of Artificial Sequence: Synthetic oligonucleotide
accugaauggccugcacag

SEQ ID NO: 182389 - RNA, 19 nt, Artificial Sequence
  Description of Artificial Sequence: Synthetic oligonucleotide
uagagguucccuccaaccc

SEQ ID NO: 182390 - RNA, 19 nt, Artificial Sequence
  Description of Artificial Sequence: Synthetic oligonucleotide
ugauuuaccaagccccagu

SEQ ID NO: 182391 - RNA, 19 nt, Artificial Sequence
  Description of Artificial Sequence: Synthetic oligonucleotide
gacgucaugaugguagcgg

SEQ ID NO: 182392 - RNA, 19 nt, Artificial Sequence
  Description of Artificial Sequence: Synthetic oligonucleotide
ugaaggucguauagcgccg

SEQ ID NO: 182393 - RNA, 19 nt, Artificial Sequence
  Description of Artificial Sequence: Synthetic oligonucleotide
guuuaccaccuguagcucg

SEQ ID NO: 182394 - RNA, 19 nt, Artificial Sequence
  Description of Artificial Sequence: Synthetic oligonucleotide
uuuguggggaggaauuaac

SEQ ID NO: 182395 - RNA, 19 nt, Artificial Sequence
  Description of Artificial Sequence: Synthetic oligonucleotide
ggaucuaucuuuugugggg

SEQ ID NO: 182396 - RNA, 19 nt, Artificial Sequence
  Description of Artificial Sequence: Synthetic oligonucleotide
auacugagguuacacuuag

SEQ ID NO: 182397 - RNA, 19 nt, Artificial Sequence
  Description of Artificial Sequence: Synthetic oligonucleotide
ugucacgagagggagacgc

SEQ ID NO: 182398 - RNA, 19 nt, Artificial Sequence
  Description of Artificial Sequence: Synthetic oligonucleotide
uauagacgacgucaugaug

SEQ ID NO: 182399 - RNA, 19 nt, Artificial Sequence
  Description of Artificial Sequence: Synthetic oligonucleotide
agaucguccccaaaauacc

SEQ ID NO: 182400 - RNA, 19 nt, Artificial Sequence
  Description of Artificial Sequence: Synthetic oligonucleotide
uaaccuacccagugcacag

SEQ ID NO: 182401 - RNA, 19 nt, Artificial Sequence
  Description of Artificial Sequence: Synthetic oligonucleotide
agcuaauacucauagcaaa

SEQ ID NO: 182402 - RNA, 19 nt, Artificial Sequence
  Description of Artificial Sequence: Synthetic oligonucleotide
cuuuugacccagacugugg

SEQ ID NO: 182403 - RNA, 19 nt, Artificial Sequence
  Description of Artificial Sequence: Synthetic oligonucleotide
gaugguagcggguaacguc

SEQ ID NO: 182404 - RNA, 19 nt, Artificial Sequence
  Description of Artificial Sequence: Synthetic oligonucleotide
ucuguacauaggaugugac

SEQ ID NO: 182405 - RNA, 19 nt, Artificial Sequence
  Description of Artificial Sequence: Synthetic oligonucleotide
aacccaucagcagaucguc

SEQ ID NO: 182406 - RNA, 19 nt, Artificial Sequence
  Description of Artificial Sequence: Synthetic oligonucleotide
auaccuaggcaguacaaaa

SEQ ID NO: 182407 - RNA, 19 nt, Artificial Sequence
  Description of Artificial Sequence: Synthetic oligonucleotide
uguagcucggugagguugc

SEQ ID NO: 182408 - RNA, 19 nt, Artificial Sequence
  Description of Artificial Sequence: Synthetic oligonucleotide
uuauaagcacuuugccuga

SEQ ID NO: 182409 - RNA, 19 nt, Artificial Sequence
  Description of Artificial Sequence: Synthetic oligonucleotide
acaagcauacacacacccc

SEQ ID NO: 182410 - RNA, 19 nt, Artificial Sequence
  Description of Artificial Sequence: Synthetic oligonucleotide
aauaccuaggcaguacaaa

SEQ ID NO: 182411 - RNA, 19 nt, Artificial Sequence
  Description of Artificial Sequence: Synthetic oligonucleotide
ucuuuuguggggaggaauu

SEQ ID NO: 182412 - RNA, 19 nt, Artificial Sequence
  Description of Artificial Sequence: Synthetic oligonucleotide
ugcauggggacuaggguac

SEQ ID NO: 182413 - RNA, 19 nt, Artificial Sequence
  Description of Artificial Sequence: Synthetic oligonucleotide
ucgaguagcaaagguauac

SEQ ID NO: 182414 - RNA, 19 nt, Artificial Sequence
  Description of Artificial Sequence: Synthetic oligonucleotide
uauacacauggccugucuc

SEQ ID NO: 182415 - RNA, 19 nt, Artificial Sequence
  Description of Artificial Sequence: Synthetic oligonucleotide
auacacauggccugucuca

SEQ ID NO: 182416 - RNA, 19 nt, Artificial Sequence
  Description of Artificial Sequence: Synthetic oligonucleotide
ucguccccaaaauaccuag

SEQ ID NO: 182417 - RNA, 19 nt, Artificial Sequence
  Description of Artificial Sequence: Synthetic oligonucleotide
guuguggguauagacgacg

SEQ ID NO: 182418 - RNA, 19 nt, Artificial Sequence
  Description of Artificial Sequence: Synthetic oligonucleotide
acgucaugaugguagcggg

SEQ ID NO: 182419 - RNA, 19 nt, Artificial Sequence
  Description of Artificial Sequence: Synthetic oligonucleotide
gauuuaccaagccccaguc

SEQ ID NO: 182420 - RNA, 19 nt, Artificial Sequence
  Description of Artificial Sequence: Synthetic oligonucleotide
uccaugggaacagagcggc

SEQ ID NO: 182421 - RNA, 19 nt, Artificial Sequence
  Description of Artificial Sequence: Synthetic oligonucleotide
augcccgucuuccucuugc

SEQ ID NO: 182422 - RNA, 19 nt, Artificial Sequence
  Description of Artificial Sequence: Synthetic oligonucleotide
agaacuaaccagaggucac

SEQ ID NO: 182423 - RNA, 19 nt, Artificial Sequence
  Description of Artificial Sequence: Synthetic oligonucleotide
acgacgucaugaugguagc

SEQ ID NO: 182424 - RNA, 19 nt, Artificial Sequence
  Description of Artificial Sequence: Synthetic oligonucleotide
uggggacuaggguacauca

SEQ ID NO: 182425 - RNA, 19 nt, Artificial Sequence
  Description of Artificial Sequence: Synthetic oligonucleotide
acuuaggaaggaaacacca

SEQ ID NO: 182426 - RNA, 19 nt, Artificial Sequence
  Description of Artificial Sequence: Synthetic oligonucleotide
ugaccauguccacuauucc

SEQ ID NO: 182427 - RNA, 19 nt, Artificial Sequence
  Description of Artificial Sequence: Synthetic oligonucleotide
caagggcuuaaugagacac

SEQ ID NO: 182428 - RNA, 19 nt, Artificial Sequence
  Description of Artificial Sequence: Synthetic oligonucleotide
aauaaguggugccgucccu

SEQ ID NO: 182429 - RNA, 19 nt, Artificial Sequence
  Description of Artificial Sequence: Synthetic oligonucleotide
gagaaguagaaaccacuga

SEQ ID NO: 182430 - RNA, 19 nt, Artificial Sequence
  Description of Artificial Sequence: Synthetic oligonucleotide
gagugaagcaagagcagag

SEQ ID NO: 182431 - RNA, 19 nt, Artificial Sequence
  Description of Artificial Sequence: Synthetic oligonucleotide
guaauuggugauagggaag

SEQ ID NO: 182432 - RNA, 19 nt, Artificial Sequence
  Description of Artificial Sequence: Synthetic oligonucleotide
caccccucaaccuaaccgc

SEQ ID NO: 182433 - RNA, 19 nt, Artificial Sequence
  Description of Artificial Sequence: Synthetic oligonucleotide
guaagcuaauacucauagc

SEQ ID NO: 182434 - RNA, 19 nt, Artificial Sequence
  Description of Artificial Sequence: Synthetic oligonucleotide
aauacugagguuacacuua

SEQ ID NO: 182435 - RNA, 19 nt, Artificial Sequence
  Description of Artificial Sequence: Synthetic oligonucleotide
acgagagggagacgcuugc

SEQ ID NO: 182436 - RNA, 19 nt, Artificial Sequence
  Description of Artificial Sequence: Synthetic oligonucleotide
gagagaacgcuagagguuc

SEQ ID NO: 182437 - RNA, 19 nt, Artificial Sequence
  Description of Artificial Sequence: Synthetic oligonucleotide
caagggucgcugcacauag

SEQ ID NO: 182438 - RNA, 19 nt, Artificial Sequence
  Description of Artificial Sequence: Synthetic oligonucleotide
uuacauaaauacugagguu

SEQ ID NO: 182439 - RNA, 19 nt, Artificial Sequence
  Description of Artificial Sequence: Synthetic oligonucleotide
uuaccaagccccagucuug

SEQ ID NO: 182440 - RNA, 19 nt, Artificial Sequence
  Description of Artificial Sequence: Synthetic oligonucleotide
acucacuggaucuaucuuu

SEQ ID NO: 182441 - RNA, 19 nt, Artificial Sequence
  Description of Artificial Sequence: Synthetic oligonucleotide
caagcagggucucccaagg

SEQ ID NO: 182442 - RNA, 19 nt, Artificial Sequence
  Description of Artificial Sequence: Synthetic oligonucleotide
ugccugauucacucacugg

SEQ ID NO: 182443 - RNA, 19 nt, Artificial Sequence
  Description of Artificial Sequence: Synthetic oligonucleotide
cccugauuuaccaagcccc

SEQ ID NO: 182444 - RNA, 19 nt, Artificial Sequence
  Description of Artificial Sequence: Synthetic oligonucleotide
gguaauuggugauagggaa

SEQ ID NO: 182445 - RNA, 19 nt, Artificial Sequence
  Description of Artificial Sequence: Synthetic oligonucleotide
ugggcaguuacagaccuga

SEQ ID NO: 182446 - RNA, 19 nt, Artificial Sequence
  Description of Artificial Sequence: Synthetic oligonucleotide
gagugagagggcauagucc

SEQ ID NO: 182447 - RNA, 19 nt, Artificial Sequence
  Description of Artificial Sequence: Synthetic oligonucleotide
cugccuguacucuugagca

SEQ ID NO: 182448 - RNA, 19 nt, Artificial Sequence
  Description of Artificial Sequence: Synthetic oligonucleotide
aaacccaucagcagaucgu

SEQ ID NO: 182449 - RNA, 19 nt, Artificial Sequence
  Description of Artificial Sequence: Synthetic oligonucleotide
cuguuuggaugccuugccg

SEQ ID NO: 182450 - RNA, 19 nt, Artificial Sequence
  Description of Artificial Sequence: Synthetic oligonucleotide
caguuacagaccugagucc

SEQ ID NO: 182451 - RNA, 19 nt, Artificial Sequence
  Description of Artificial Sequence: Synthetic oligonucleotide
uuguggguauagacgacgu

SEQ ID NO: 182452 - RNA, 19 nt, Artificial Sequence
  Description of Artificial Sequence: Synthetic oligonucleotide
aguuuucgaguagcaaagg

SEQ ID NO: 182453 - RNA, 19 nt, Artificial Sequence
  Description of Artificial Sequence: Synthetic oligonucleotide
gaacuaaccagaggucacc

SEQ ID NO: 182454 - RNA, 19 nt, Artificial Sequence
  Description of Artificial Sequence: Synthetic oligonucleotide
acugauauacccacauaca

SEQ ID NO: 182455 - RNA, 19 nt, Artificial Sequence
  Description of Artificial Sequence: Synthetic oligonucleotide
gaauggccugcacagggac

SEQ ID NO: 182456 - RNA, 19 nt, Artificial Sequence
  Description of Artificial Sequence: Synthetic oligonucleotide
uguggccacccacaguugu

SEQ ID NO: 182457 - RNA, 19 nt, Artificial Sequence
  Description of Artificial Sequence: Synthetic oligonucleotide
aacuccuuuacuggaugca

SEQ ID NO: 182458 - RNA, 19 nt, Artificial Sequence
  Description of Artificial Sequence: Synthetic oligonucleotide
cauugcuggcucuccauug

SEQ ID NO: 182459 - RNA, 19 nt, Artificial Sequence
  Description of Artificial Sequence: Synthetic oligonucleotide
uggguauagacgacgucau

SEQ ID NO: 182460 - RNA, 19 nt, Artificial Sequence
  Description of Artificial Sequence: Synthetic oligonucleotide
agcggguaacgucacuguc

SEQ ID NO: 182461 - RNA, 19 nt, Artificial Sequence
  Description of Artificial Sequence: Synthetic oligonucleotide
uacauaggaugugaccaug

SEQ ID NO: 182462 - RNA, 19 nt, Artificial Sequence
  Description of Artificial Sequence: Synthetic oligonucleotide
cccuguacaaauuacauaa

SEQ ID NO: 182463 - RNA, 19 nt, Artificial Sequence
  Description of Artificial Sequence: Synthetic oligonucleotide
uacaucauguggccaccca

SEQ ID NO: 182464 - RNA, 19 nt, Artificial Sequence
  Description of Artificial Sequence: Synthetic oligonucleotide
gucaggaacaccugaggga

SEQ ID NO: 182465 - RNA, 19 nt, Artificial Sequence
  Description of Artificial Sequence: Synthetic oligonucleotide
gaaagcuacccaaggcccc

SEQ ID NO: 182466 - RNA, 19 nt, Artificial Sequence
  Description of Artificial Sequence: Synthetic oligonucleotide
gguauagacgacgucauga

SEQ ID NO: 182467 - RNA, 19 nt, Artificial Sequence
  Description of Artificial Sequence: Synthetic oligonucleotide
ugagagggcauaguccugu

SEQ ID NO: 182468 - RNA, 19 nt, Artificial Sequence
  Description of Artificial Sequence: Synthetic oligonucleotide
gggacuaggguacaucaug

SEQ ID NO: 182469 - RNA, 19 nt, Artificial Sequence
  Description of Artificial Sequence: Synthetic oligonucleotide
aucuaucuuuuguggggag

SEQ ID NO: 182470 - RNA, 19 nt, Artificial Sequence
  Description of Artificial Sequence: Synthetic oligonucleotide
uaacgucacugucccacug

SEQ ID NO: 182471 - RNA, 19 nt, Artificial Sequence
  Description of Artificial Sequence: Synthetic oligonucleotide
uuuuguggggaggaauuaa

SEQ ID NO: 182472 - RNA, 19 nt, Artificial Sequence
  Description of Artificial Sequence: Synthetic oligonucleotide
uaaguggugccgucccuug

SEQ ID NO: 182473 - RNA, 19 nt, Artificial Sequence
  Description of Artificial Sequence: Synthetic oligonucleotide
cugauucacucacuggauc

SEQ ID NO: 182474 - RNA, 19 nt, Artificial Sequence
  Description of Artificial Sequence: Synthetic oligonucleotide
ccuaggcaguacaaaaucc

SEQ ID NO: 182475 - RNA, 19 nt, Artificial Sequence
  Description of Artificial Sequence: Synthetic oligonucleotide
uagcaaacauugagccgag

SEQ ID NO: 182476 - RNA, 19 nt, Artificial Sequence
  Description of Artificial Sequence: Synthetic oligonucleotide
ucacccugcucacugcgac

SEQ ID NO: 182477 - RNA, 19 nt, Artificial Sequence
  Description of Artificial Sequence: Synthetic oligonucleotide
aaagcuacccaaggcccca

SEQ ID NO: 182478 - RNA, 19 nt, Artificial Sequence
  Description of Artificial Sequence: Synthetic oligonucleotide
ugcucacugcgacuugggc

SEQ ID NO: 182479 - RNA, 19 nt, Artificial Sequence
  Description of Artificial Sequence: Synthetic oligonucleotide
aaauaccuaggcaguacaa

SEQ ID NO: 182480 - RNA, 19 nt, Artificial Sequence
  Description of Artificial Sequence: Synthetic oligonucleotide
uggguggcguccaaguuua

SEQ ID NO: 182481 - RNA, 19 nt, Artificial Sequence
  Description of Artificial Sequence: Synthetic oligonucleotide
ucacgcuagcagacacugg

SEQ ID NO: 182482 - RNA, 19 nt, Artificial Sequence
  Description of Artificial Sequence: Synthetic oligonucleotide
gaacgcuagagguucccuc

SEQ ID NO: 182483 - RNA, 19 nt, Artificial Sequence
  Description of Artificial Sequence: Synthetic oligonucleotide
aguuuaccaccuguagcuc

SEQ ID NO: 182484 - RNA, 19 nt, Artificial Sequence
  Description of Artificial Sequence: Synthetic oligonucleotide
gguaacgucacugucccac

SEQ ID NO: 182485 - RNA, 19 nt, Artificial Sequence
  Description of Artificial Sequence: Synthetic oligonucleotide
agggucgcugcacauagaa

SEQ ID NO: 182486 - RNA, 19 nt, Artificial Sequence
  Description of Artificial Sequence: Synthetic oligonucleotide
uagacgacgucaugauggu

SEQ ID NO: 182487 - RNA, 19 nt, Artificial Sequence
  Description of Artificial Sequence: Synthetic oligonucleotide
augguagcggguaacguca

SEQ ID NO: 182488 - RNA, 19 nt, Artificial Sequence
  Description of Artificial Sequence: Synthetic oligonucleotide
cucacgcuagcagacacug

SEQ ID NO: 182489 - RNA, 19 nt, Artificial Sequence
  Description of Artificial Sequence: Synthetic oligonucleotide
cauugcugugcucagucca

SEQ ID NO: 182490 - RNA, 19 nt, Artificial Sequence
  Description of Artificial Sequence: Synthetic oligonucleotide
agcagaucguccccaaaau

SEQ ID NO: 182491 - RNA, 19 nt, Artificial Sequence
  Description of Artificial Sequence: Synthetic oligonucleotide
cuccuauaugacccauucc

SEQ ID NO: 182492 - RNA, 19 nt, Artificial Sequence
  Description of Artificial Sequence: Synthetic oligonucleotide
ggaugcaggugguuuaggc

SEQ ID NO: 182493 - RNA, 19 nt, Artificial Sequence
  Description of Artificial Sequence: Synthetic oligonucleotide
acgugaaaaggcaacaaua

SEQ ID NO: 182494 - RNA, 19 nt, Artificial Sequence
  Description of Artificial Sequence: Synthetic oligonucleotide
agguaauuggugauaggga

SEQ ID NO: 182495 - RNA, 19 nt, Artificial Sequence
  Description of Artificial Sequence: Synthetic oligonucleotide
guacaaaaucccuccccac

SEQ ID NO: 182496 - RNA, 19 nt, Artificial Sequence
  Description of Artificial Sequence: Synthetic oligonucleotide
aguaaccuacccagugcac

SEQ ID NO: 182497 - RNA, 19 nt, Artificial Sequence
  Description of Artificial Sequence: Synthetic oligonucleotide
ucaugaugguagcggguaa

SEQ ID NO: 182498 - RNA, 19 nt, Artificial Sequence
  Description of Artificial Sequence: Synthetic oligonucleotide
cagaacuaaccagagguca

SEQ ID NO: 182499 - RNA, 19 nt, Artificial Sequence
  Description of Artificial Sequence: Synthetic oligonucleotide
agaaaacgugaaaaggcaa

SEQ ID NO: 182500 - RNA, 19 nt, Artificial Sequence
  Description of Artificial Sequence: Synthetic oligonucleotide
auggcccuguacaaauuac

SEQ ID NO: 182501 - RNA, 19 nt, Artificial Sequence
  Description of Artificial Sequence: Synthetic oligonucleotide
uguggguauagacgacguc

SEQ ID NO: 182502 - RNA, 19 nt, Artificial Sequence
  Description of Artificial Sequence: Synthetic oligonucleotide
gaacaccugagggacacca

SEQ ID NO: 182503 - RNA, 19 nt, Artificial Sequence
  Description of Artificial Sequence: Synthetic oligonucleotide
gagugguagugaguggcag

SEQ ID NO: 182504 - RNA, 19 nt, Artificial Sequence
  Description of Artificial Sequence: Synthetic oligonucleotide
aggggucugagggagagga

SEQ ID NO: 182505 - RNA, 19 nt, Artificial Sequence
  Description of Artificial Sequence: Synthetic oligonucleotide
aaccuacccagugcacagg

SEQ ID NO: 182506 - RNA, 19 nt, Artificial Sequence
  Description of Artificial Sequence: Synthetic oligonucleotide
gcuaauacucauagcaaac

SEQ ID NO: 182507 - RNA, 19 nt, Artificial Sequence
  Description of Artificial Sequence: Synthetic oligonucleotide
cuauaugacccauuccugu

SEQ ID NO: 182508 - RNA, 19 nt, Artificial Sequence
  Description of Artificial Sequence: Synthetic oligonucleotide
gacauugcgcccauuccca

SEQ ID NO: 182509 - RNA, 19 nt, Artificial Sequence
  Description of Artificial Sequence: Synthetic oligonucleotide
guaaccuacccagugcaca

SEQ ID NO: 182510 - RNA, 19 nt, Artificial Sequence
  Description of Artificial Sequence: Synthetic oligonucleotide
uccacuauuccugggucaa

SEQ ID NO: 182511 - RNA, 19 nt, Artificial Sequence
  Description of Artificial Sequence: Synthetic oligonucleotide
ugugaccauguccacuauu

SEQ ID NO: 182512 - RNA, 19 nt, Artificial Sequence
  Description of Artificial Sequence: Synthetic oligonucleotide
gggcauacaucacugcaug

SEQ ID NO: 182513 - RNA, 19 nt, Artificial Sequence
  Description of Artificial Sequence: Synthetic oligonucleotide
gagcacaaggcugcaauga

SEQ ID NO: 182514 - RNA, 19 nt, Artificial Sequence
  Description of Artificial Sequence: Synthetic oligonucleotide
ccaaguuuaccaccuguag

SEQ ID NO: 182515 - RNA, 19 nt, Artificial Sequence
  Description of Artificial Sequence: Synthetic oligonucleotide
ggucguauagcgccgcagc

SEQ ID NO: 182516 - RNA, 19 nt, Artificial Sequence
  Description of Artificial Sequence: Synthetic oligonucleotide
aagggcuuaaugagacacu

SEQ ID NO: 182517 - RNA, 19 nt, Artificial Sequence
  Description of Artificial Sequence: Synthetic oligonucleotide
agagaacgcuagagguucc

SEQ ID NO: 182518 - RNA, 19 nt, Artificial Sequence
  Description of Artificial Sequence: Synthetic oligonucleotide
uucuaggagaaagcccaga

SEQ ID NO: 182519 - RNA, 19 nt, Artificial Sequence
  Description of Artificial Sequence: Synthetic oligonucleotide
auacaucacugcaugggga

SEQ ID NO: 182520 - RNA, 19 nt, Artificial Sequence
  Description of Artificial Sequence: Synthetic oligonucleotide
agggagacgcuugcugugg

SEQ ID NO: 182521 - RNA, 19 nt, Artificial Sequence
  Description of Artificial Sequence: Synthetic oligonucleotide
ccuauaugacccauuccug

SEQ ID NO: 182522 - RNA, 19 nt, Artificial Sequence
  Description of Artificial Sequence: Synthetic oligonucleotide
ccaagcggguucuaagggg

SEQ ID NO: 182523 - RNA, 19 nt, Artificial Sequence
  Description of Artificial Sequence: Synthetic oligonucleotide
auggggacuaggguacauc

SEQ ID NO: 182524 - RNA, 19 nt, Artificial Sequence
  Description of Artificial Sequence: Synthetic oligonucleotide
ggguacaucauguggccac

SEQ ID NO: 182525 - RNA, 19 nt, Artificial Sequence
  Description of Artificial Sequence: Synthetic oligonucleotide
gcuccuauaugacccauuc

SEQ ID NO: 182526 - RNA, 19 nt, Artificial Sequence
  Description of Artificial Sequence: Synthetic oligonucleotide
gguagugaguggcagugga

SEQ ID NO: 182527 - RNA, 19 nt, Artificial Sequence
  Description of Artificial Sequence: Synthetic oligonucleotide
agcacacauuauaagcacu

SEQ ID NO: 182528 - RNA, 19 nt, Artificial Sequence
  Description of Artificial Sequence: Synthetic oligonucleotide
uggaugcaggugguuuagg

SEQ ID NO: 182529 - RNA, 19 nt, Artificial Sequence
  Description of Artificial Sequence: Synthetic oligonucleotide
acgucacugucccacugga

SEQ ID NO: 182530 - RNA, 19 nt, Artificial Sequence
  Description of Artificial Sequence: Synthetic oligonucleotide
uagcgccgcagcuuguugu

SEQ ID NO: 182531 - RNA, 19 nt, Artificial Sequence
  Description of Artificial Sequence: Synthetic oligonucleotide
cuggugcaccugaauggcc

SEQ ID NO: 182532 - RNA, 19 nt, Artificial Sequence
  Description of Artificial Sequence: Synthetic oligonucleotide
auagcgccgcagcuuguug

SEQ ID NO: 182533 - RNA, 19 nt, Artificial Sequence
  Description of Artificial Sequence: Synthetic oligonucleotide
uggcgggcggaucauucac

SEQ ID NO: 182534 - RNA, 19 nt, Artificial Sequence
  Description of Artificial Sequence: Synthetic oligonucleotide
cacagggaucugcacaguc

SEQ ID NO: 182535 - RNA, 19 nt, Artificial Sequence
  Description of Artificial Sequence: Synthetic oligonucleotide
uccuucggccagucaaugu

SEQ ID NO: 182536 - RNA, 19 nt, Artificial Sequence
  Description of Artificial Sequence: Synthetic oligonucleotide
gaggucugcgugagguccg

SEQ ID NO: 182537 - RNA, 19 nt, Artificial Sequence
  Description of Artificial Sequence: Synthetic oligonucleotide
gaaggucguauagcgccgc

SEQ ID NO: 182538 - RNA, 19 nt, Artificial Sequence
  Description of Artificial Sequence: Synthetic oligonucleotide
agcaaacauugagccgagc

SEQ ID NO: 182539 - RNA, 19 nt, Artificial Sequence
  Description of Artificial Sequence: Synthetic oligonucleotide
gagaacgcuagagguuccc

SEQ ID NO: 182540 - RNA, 19 nt, Artificial Sequence
  Description of Artificial Sequence: Synthetic oligonucleotide
aucuuuuguggggaggaau

SEQ ID NO: 182541 - RNA, 19 nt, Artificial Sequence
  Description of Artificial Sequence: Synthetic oligonucleotide
ccaguaaccuacccagugc

SEQ ID NO: 182542 - RNA, 19 nt, Artificial Sequence
  Description of Artificial Sequence: Synthetic oligonucleotide
accuaaccgcagaagcagg

SEQ ID NO: 182543 - RNA, 19 nt, Artificial Sequence
  Description of Artificial Sequence: Synthetic oligonucleotide
gcauaagggaggaaacccc

SEQ ID NO: 182544 - RNA, 19 nt, Artificial Sequence
  Description of Artificial Sequence: Synthetic oligonucleotide
ugaucaugggcugcaguuu

SEQ ID NO: 182545 - RNA, 19 nt, Artificial Sequence
  Description of Artificial Sequence: Synthetic oligonucleotide
cugcauggggacuagggua

SEQ ID NO: 182546 - RNA, 19 nt, Artificial Sequence
  Description of Artificial Sequence: Synthetic oligonucleotide
ggaggucugcgugaggucc

SEQ ID NO: 182547 - RNA, 19 nt, Artificial Sequence
  Description of Artificial Sequence: Synthetic oligonucleotide
gccagguaauuggugauag

SEQ ID NO: 182548 - RNA, 19 nt, Artificial Sequence
  Description of Artificial Sequence: Synthetic oligonucleotide
gcaaacauugagccgagcu

SEQ ID NO: 182549 - RNA, 19 nt, Artificial Sequence
  Description of Artificial Sequence: Synthetic oligonucleotide
ugccuguacucuugagcac

SEQ ID NO: 182550 - RNA, 19 nt, Artificial Sequence
  Description of Artificial Sequence: Synthetic oligonucleotide
ggguaaaacacccuccccu

SEQ ID NO: 182551 - RNA, 19 nt, Artificial Sequence
  Description of Artificial Sequence: Synthetic oligonucleotide
guauagacgacgucaugau

SEQ ID NO: 182552 - RNA, 19 nt, Artificial Sequence
  Description of Artificial Sequence: Synthetic oligonucleotide
ccuaaccgcagaagcaggc

SEQ ID NO: 182553 - RNA, 19 nt, Artificial Sequence
  Description of Artificial Sequence: Synthetic oligonucleotide
uccccuaugcuagcccacc

SEQ ID NO: 182554 - RNA, 19 nt, Artificial Sequence
  Description of Artificial Sequence: Synthetic oligonucleotide
ugugggacaccugcauggu

SEQ ID NO: 182555 - RNA, 19 nt, Artificial Sequence
  Description of Artificial Sequence: Synthetic oligonucleotide
agagagaacgcuagagguu

SEQ ID NO: 182556 - RNA, 19 nt, Artificial Sequence
  Description of Artificial Sequence: Synthetic oligonucleotide
augcuagcccacccucaag

SEQ ID NO: 182557 - RNA, 19 nt, Artificial Sequence
  Description of Artificial Sequence: Synthetic oligonucleotide
ggcguccaaguuuaccacc

SEQ ID NO: 182558 - RNA, 19 nt, Artificial Sequence
  Description of Artificial Sequence: Synthetic oligonucleotide
auucacucuuggugcugug

SEQ ID NO: 182559 - RNA, 19 nt, Artificial Sequence
  Description of Artificial Sequence: Synthetic oligonucleotide
cuaugcuagcccacccuca

SEQ ID NO: 182560 - RNA, 19 nt, Artificial Sequence
  Description of Artificial Sequence: Synthetic oligonucleotide
cacgcuagcagacacuggu

SEQ ID NO: 182561 - RNA, 19 nt, Artificial Sequence
  Description of Artificial Sequence: Synthetic oligonucleotide
ggggucucaaacccaucag

SEQ ID NO: 182562 - RNA, 19 nt, Artificial Sequence
  Description of Artificial Sequence: Synthetic oligonucleotide
cccaguuauuucuaggaga

SEQ ID NO: 182563 - RNA, 19 nt, Artificial Sequence
  Description of Artificial Sequence: Synthetic oligonucleotide
guccacuauuccuggguca

SEQ ID NO: 182564 - RNA, 19 nt, Artificial Sequence
  Description of Artificial Sequence: Synthetic oligonucleotide
gccgcugcugacuugcaug

SEQ ID NO: 182565 - RNA, 19 nt, Artificial Sequence
  Description of Artificial Sequence: Synthetic oligonucleotide
gguaaaacacccuccccua

SEQ ID NO: 182566 - RNA, 19 nt, Artificial Sequence
  Description of Artificial Sequence: Synthetic oligonucleotide
ucggccagucaaugugugu

SEQ ID NO: 182567 - RNA, 19 nt, Artificial Sequence
  Description of Artificial Sequence: Synthetic oligonucleotide
gaucguccccaaaauaccu

SEQ ID NO: 182568 - RNA, 19 nt, Artificial Sequence
  Description of Artificial Sequence: Synthetic oligonucleotide
gggaucugcacagucccag

SEQ ID NO: 182569 - RNA, 19 nt, Artificial Sequence
  Description of Artificial Sequence: Synthetic oligonucleotide
gacuugcauggugguagag

SEQ ID NO: 182570 - RNA, 19 nt, Artificial Sequence
  Description of Artificial Sequence: Synthetic oligonucleotide
uggagugagagggcauagu

SEQ ID NO: 182571 - RNA, 19 nt, Artificial Sequence
  Description of Artificial Sequence: Synthetic oligonucleotide
ugcuccuauaugacccauu

SEQ ID NO: 182572 - RNA, 19 nt, Artificial Sequence
  Description of Artificial Sequence: Synthetic oligonucleotide
cccaagcggguucuaaggg

SEQ ID NO: 182573 - RNA, 19 nt, Artificial Sequence
  Description of Artificial Sequence: Synthetic oligonucleotide
auaaguggugccgucccuu

SEQ ID NO: 182574 - RNA, 19 nt, Artificial Sequence
  Description of Artificial Sequence: Synthetic oligonucleotide
agaacgcuagagguucccu

SEQ ID NO: 182575 - RNA, 19 nt, Artificial Sequence
  Description of Artificial Sequence: Synthetic oligonucleotide
aggucguauagcgccgcag

SEQ ID NO: 182576 - RNA, 19 nt, Artificial Sequence
  Description of Artificial Sequence: Synthetic oligonucleotide
ccccaagcggguucuaagg

SEQ ID NO: 182577 - RNA, 19 nt, Artificial Sequence
  Description of Artificial Sequence: Synthetic oligonucleotide
cccaguaaccuacccagug

SEQ ID NO: 182578 - RNA, 19 nt, Artificial Sequence
  Description of Artificial Sequence: Synthetic oligonucleotide
gcggaucauucacucuugg

SEQ ID NO: 182579 - RNA, 19 nt, Artificial Sequence
  Description of Artificial Sequence: Synthetic oligonucleotide
ucguauagcgccgcagcuu

SEQ ID NO: 182580 - RNA, 19 nt, Artificial Sequence
  Description of Artificial Sequence: Synthetic oligonucleotide
cauggcccuguacaaauua

SEQ ID NO: 182581 - RNA, 19 nt, Artificial Sequence
  Description of Artificial Sequence: Synthetic oligonucleotide
guuuggaugccuugccggu

SEQ ID NO: 182582 - RNA, 19 nt, Artificial Sequence
  Description of Artificial Sequence: Synthetic oligonucleotide
cacuggaucuaucuuuugu

SEQ ID NO: 182583 - RNA, 19 nt, Artificial Sequence
  Description of Artificial Sequence: Synthetic oligonucleotide
cacuggugccagguaauug

SEQ ID NO: 182584 - RNA, 19 nt, Artificial Sequence
  Description of Artificial Sequence: Synthetic oligonucleotide
acgcuagagguucccucca

SEQ ID NO: 182585 - RNA, 19 nt, Artificial Sequence
  Description of Artificial Sequence: Synthetic oligonucleotide
acauagacacucacucaaa

SEQ ID NO: 182586 - RNA, 19 nt, Artificial Sequence
  Description of Artificial Sequence: Synthetic oligonucleotide
ucacgagagggagacgcuu

SEQ ID NO: 182587 - RNA, 19 nt, Artificial Sequence
  Description of Artificial Sequence: Synthetic oligonucleotide
gcggguaacgucacugucc

SEQ ID NO: 182588 - RNA, 19 nt, Artificial Sequence
  Description of Artificial Sequence: Synthetic oligonucleotide
aagcuacccaaggccccag

SEQ ID NO: 182589 - RNA, 19 nt, Artificial Sequence
  Description of Artificial Sequence: Synthetic oligonucleotide
ccacuggguaagcuaauac

SEQ ID NO: 182590 - RNA, 19 nt, Artificial Sequence
  Description of Artificial Sequence: Synthetic oligonucleotide
cauaguccuguggcugccc

SEQ ID NO: 182591 - RNA, 19 nt, Artificial Sequence
  Description of Artificial Sequence: Synthetic oligonucleotide
cucuggccccugauuuacc

SEQ ID NO: 182592 - RNA, 19 nt, Artificial Sequence
  Description of Artificial Sequence: Synthetic oligonucleotide
cguauagcgccgcagcuug

SEQ ID NO: 182593 - RNA, 19 nt, Artificial Sequence
  Description of Artificial Sequence: Synthetic oligonucleotide
ccagguaauuggugauagg

SEQ ID NO: 182594 - RNA, 19 nt, Artificial Sequence
  Description of Artificial Sequence: Synthetic oligonucleotide
ugccagguaauuggugaua

SEQ ID NO: 182595 - RNA, 19 nt, Artificial Sequence
  Description of Artificial Sequence: Synthetic oligonucleotide
ggugccgucccuugggcca

SEQ ID NO: 182596 - RNA, 19 nt, Artificial Sequence
  Description of Artificial Sequence: Synthetic oligonucleotide
uggugaucaugggcugcag

SEQ ID NO: 182597 - RNA, 19 nt, Artificial Sequence
  Description of Artificial Sequence: Synthetic oligonucleotide
agccgagcuggcaaggggu

SEQ ID NO: 182598 - RNA, 19 nt, Artificial Sequence
  Description of Artificial Sequence: Synthetic oligonucleotide
ccccaguuauuucuaggag

SEQ ID NO: 182599 - RNA, 19 nt, Artificial Sequence
  Description of Artificial Sequence: Synthetic oligonucleotide
ggcucacgcuagcagacac

SEQ ID NO: 182600 - RNA, 19 nt, Artificial Sequence
  Description of Artificial Sequence: Synthetic oligonucleotide
gcuagagguucccuccaac

SEQ ID NO: 182601 - RNA, 19 nt, Artificial Sequence
  Description of Artificial Sequence: Synthetic oligonucleotide
gguggcguccaaguuuacc

SEQ ID NO: 182602 - RNA, 19 nt, Artificial Sequence
  Description of Artificial Sequence: Synthetic oligonucleotide
gguuuaggcuggcucugac

SEQ ID NO: 182603 - RNA, 19 nt, Artificial Sequence
  Description of Artificial Sequence: Synthetic oligonucleotide
cuccccuaugcuagcccac

SEQ ID NO: 182604 - RNA, 19 nt, Artificial Sequence
  Description of Artificial Sequence: Synthetic oligonucleotide
ugcccauugcuggcucucc

SEQ ID NO: 182605 - RNA, 19 nt, Artificial Sequence
  Description of Artificial Sequence: Synthetic oligonucleotide
cggguaacgucacuguccc

SEQ ID NO: 182606 - RNA, 19 nt, Artificial Sequence
  Description of Artificial Sequence: Synthetic oligonucleotide
aggguacaucauguggcca

SEQ ID NO: 182607 - RNA, 19 nt, Artificial Sequence
  Description of Artificial Sequence: Synthetic oligonucleotide
ccuaugcuagcccacccuc

SEQ ID NO: 182608 - RNA, 19 nt, Artificial Sequence
  Description of Artificial Sequence: Synthetic oligonucleotide
gggagacgcuugcuguggg

SEQ ID NO: 182609 - RNA, 19 nt, Artificial Sequence
  Description of Artificial Sequence: Synthetic oligonucleotide
guagccccaguaaccuacc

SEQ ID NO: 182610 - RNA, 19 nt, Artificial Sequence
  Description of Artificial Sequence: Synthetic oligonucleotide
aaggccccaguuauuucua

SEQ ID NO: 182611 - RNA, 19 nt, Artificial Sequence
  Description of Artificial Sequence: Synthetic oligonucleotide
gcgacuugggccccaggug

SEQ ID NO: 182612 - RNA, 19 nt, Artificial Sequence
  Description of Artificial Sequence: Synthetic oligonucleotide
ucccguuggcacugcugac

SEQ ID NO: 182613 - RNA, 19 nt, Artificial Sequence
  Description of Artificial Sequence: Synthetic oligonucleotide
cugugccuacugagggcag

SEQ ID NO: 182614 - RNA, 19 nt, Artificial Sequence
  Description of Artificial Sequence: Synthetic oligonucleotide
cuaggagaaagcccagaau

SEQ ID NO: 182615 - RNA, 19 nt, Artificial Sequence
  Description of Artificial Sequence: Synthetic oligonucleotide
caccaugaugguggagcag

SEQ ID NO: 182616 - RNA, 19 nt, Artificial Sequence
  Description of Artificial Sequence: Synthetic oligonucleotide
agcuauucaggggcugaaa

SEQ ID NO: 182617 - RNA, 19 nt, Artificial Sequence
  Description of Artificial Sequence: Synthetic oligonucleotide
cuccuucggccagucaaug

SEQ ID NO: 182618 - RNA, 19 nt, Artificial Sequence
  Description of Artificial Sequence: Synthetic oligonucleotide
gucguauagcgccgcagcu

SEQ ID NO: 182619 - RNA, 19 nt, Artificial Sequence
  Description of Artificial Sequence: Synthetic oligonucleotide
acgcuagcagacacuggug

SEQ ID NO: 182620 - RNA, 19 nt, Artificial Sequence
  Description of Artificial Sequence: Synthetic oligonucleotide
guaacgucacugucccacu

SEQ ID NO: 182621 - RNA, 19 nt, Artificial Sequence
  Description of Artificial Sequence: Synthetic oligonucleotide
guaaaacacccuccccuau

SEQ ID NO: 182622 - RNA, 19 nt, Artificial Sequence
  Description of Artificial Sequence: Synthetic oligonucleotide
ggccacccacaguuguggg

SEQ ID NO: 182623 - RNA, 19 nt, Artificial Sequence
  Description of Artificial Sequence: Synthetic oligonucleotide
guggcgggcggaucauuca

SEQ ID NO: 182624 - RNA, 19 nt, Artificial Sequence
  Description of Artificial Sequence: Synthetic oligonucleotide
gccuguacucuugagcaca

SEQ ID NO: 182625 - RNA, 19 nt, Artificial Sequence
  Description of Artificial Sequence: Synthetic oligonucleotide
accccucaaccuaaccgca

SEQ ID NO: 182626 - RNA, 19 nt, Artificial Sequence
  Description of Artificial Sequence: Synthetic oligonucleotide
aucguccccaaaauaccua

SEQ ID NO: 182627 - RNA, 19 nt, Artificial Sequence
  Description of Artificial Sequence: Synthetic oligonucleotide
caccuguagcucggugagg

SEQ ID NO: 182628 - RNA, 19 nt, Artificial Sequence
  Description of Artificial Sequence: Synthetic oligonucleotide
gcagaucguccccaaaaua

SEQ ID NO: 182629 - RNA, 19 nt, Artificial Sequence
  Description of Artificial Sequence: Synthetic oligonucleotide
caucacugcauggggacua

SEQ ID NO: 182630 - RNA, 19 nt, Artificial Sequence
  Description of Artificial Sequence: Synthetic oligonucleotide
aagggucgcugcacauaga

SEQ ID NO: 182631 - RNA, 19 nt, Artificial Sequence
  Description of Artificial Sequence: Synthetic oligonucleotide
ggaucugcacagucccaga

SEQ ID NO: 182632 - RNA, 19 nt, Artificial Sequence
  Description of Artificial Sequence: Synthetic oligonucleotide
ccuacccagugcacaggcc

SEQ ID NO: 182633 - RNA, 19 nt, Artificial Sequence
  Description of Artificial Sequence: Synthetic oligonucleotide
ggcucuuuugacccagacu

SEQ ID NO: 182634 - RNA, 19 nt, Artificial Sequence
  Description of Artificial Sequence: Synthetic oligonucleotide
ugccggucucacuggugau

SEQ ID NO: 182635 - RNA, 19 nt, Artificial Sequence
  Description of Artificial Sequence: Synthetic oligonucleotide
cugucacgagagggagacg

SEQ ID NO: 182636 - RNA, 19 nt, Artificial Sequence
  Description of Artificial Sequence: Synthetic oligonucleotide
cguccccaaaauaccuagg

SEQ ID NO: 182637 - RNA, 19 nt, Artificial Sequence
  Description of Artificial Sequence: Synthetic oligonucleotide
gcgggcggaucauucacuc

SEQ ID NO: 182638 - RNA, 19 nt, Artificial Sequence
  Description of Artificial Sequence: Synthetic oligonucleotide
ggccccugauuuaccaagc

SEQ ID NO: 182639 - RNA, 19 nt, Artificial Sequence
  Description of Artificial Sequence: Synthetic oligonucleotide
cugcccauugcuggcucuc

SEQ ID NO: 182640 - RNA, 19 nt, Artificial Sequence
  Description of Artificial Sequence: Synthetic oligonucleotide
cuaaccgcagaagcaggcu

SEQ ID NO: 182641 - RNA, 19 nt, Artificial Sequence
  Description of Artificial Sequence: Synthetic oligonucleotide
ggagugguagugaguggca

SEQ ID NO: 182642 - RNA, 19 nt, Artificial Sequence
  Description of Artificial Sequence: Synthetic oligonucleotide
cugcgacuugggccccagg

SEQ ID NO: 182643 - RNA, 19 nt, Artificial Sequence
  Description of Artificial Sequence: Synthetic oligonucleotide
gacgcuugcuguggggccu

SEQ ID NO: 182644 - RNA, 19 nt, Artificial Sequence
  Description of Artificial Sequence: Synthetic oligonucleotide
gguggcgggcggaucauuc

SEQ ID NO: 182645 - RNA, 19 nt, Artificial Sequence
  Description of Artificial Sequence: Synthetic oligonucleotide
ccccucaaccuaaccgcag

SEQ ID NO: 182646 - RNA, 19 nt, Artificial Sequence
  Description of Artificial Sequence: Synthetic oligonucleotide
ggguaagcuaauacucaua

SEQ ID NO: 182647 - RNA, 19 nt, Artificial Sequence
  Description of Artificial Sequence: Synthetic oligonucleotide
ccuccccuaugcuagccca

SEQ ID NO: 182648 - RNA, 19 nt, Artificial Sequence
  Description of Artificial Sequence: Synthetic oligonucleotide
agacgacgucaugauggua

SEQ ID NO: 182649 - RNA, 19 nt, Artificial Sequence
  Description of Artificial Sequence: Synthetic oligonucleotide
aggucugcgugagguccgu

SEQ ID NO: 182650 - RNA, 19 nt, Artificial Sequence
  Description of Artificial Sequence: Synthetic oligonucleotide
gcgcccauucccacagaag

SEQ ID NO: 182651 - RNA, 19 nt, Artificial Sequence
  Description of Artificial Sequence: Synthetic oligonucleotide
cccucaaccuaaccgcaga

SEQ ID NO: 182652 - RNA, 19 nt, Artificial Sequence
  Description of Artificial Sequence: Synthetic oligonucleotide
cacucacuggaucuaucuu

SEQ ID NO: 182653 - RNA, 19 nt, Artificial Sequence
  Description of Artificial Sequence: Synthetic oligonucleotide
caccuugcuccuggaccug

SEQ ID NO: 182654 - RNA, 19 nt, Artificial Sequence
  Description of Artificial Sequence: Synthetic oligonucleotide
ccggucucacuggugauca

SEQ ID NO: 182655 - RNA, 19 nt, Artificial Sequence
  Description of Artificial Sequence: Synthetic oligonucleotide
ggggcauacaucacugcau

SEQ ID NO: 182656 - RNA, 19 nt, Artificial Sequence
  Description of Artificial Sequence: Synthetic oligonucleotide
cgacgucaugaugguagcg

SEQ ID NO: 182657 - RNA, 19 nt, Artificial Sequence
  Description of Artificial Sequence: Synthetic oligonucleotide
ccucaaccuaaccgcagaa

SEQ ID NO: 182658 - RNA, 19 nt, Artificial Sequence
  Description of Artificial Sequence: Synthetic oligonucleotide
gucacgagagggagacgcu

SEQ ID NO: 182659 - RNA, 19 nt, Artificial Sequence
  Description of Artificial Sequence: Synthetic oligonucleotide
gcguccaaguuuaccaccu

SEQ ID NO: 182660 - RNA, 19 nt, Artificial Sequence
  Description of Artificial Sequence: Synthetic oligonucleotide
gggcugcaguuuucgagua

SEQ ID NO: 182661 - RNA, 19 nt, Artificial Sequence
  Description of Artificial Sequence: Synthetic oligonucleotide
gccggucucacuggugauc

SEQ ID NO: 182662 - RNA, 19 nt, Artificial Sequence
  Description of Artificial Sequence: Synthetic oligonucleotide
acccacaguuguggguaua

SEQ ID NO: 182663 - RNA, 19 nt, Artificial Sequence
  Description of Artificial Sequence: Synthetic oligonucleotide
cacccugcucacugcgacu

SEQ ID NO: 182664 - RNA, 19 nt, Artificial Sequence
  Description of Artificial Sequence: Synthetic oligonucleotide
gggucgcugcacauagaaa

SEQ ID NO: 182665 - RNA, 19 nt, Artificial Sequence
  Description of Artificial Sequence: Synthetic oligonucleotide
ccacugauauacccacaua

SEQ ID NO: 182666 - RNA, 19 nt, Artificial Sequence
  Description of Artificial Sequence: Synthetic oligonucleotide
ccacuauuccugggucaac

SEQ ID NO: 182667 - RNA, 19 nt, Artificial Sequence
  Description of Artificial Sequence: Synthetic oligonucleotide
ggggucugagggagaggac

SEQ ID NO: 182668 - RNA, 19 nt, Artificial Sequence
  Description of Artificial Sequence: Synthetic oligonucleotide
ggguaacgucacuguccca

SEQ ID NO: 182669 - RNA, 19 nt, Artificial Sequence
  Description of Artificial Sequence: Synthetic oligonucleotide
gcacuuugccugauucacu

SEQ ID NO: 182670 - RNA, 19 nt, Artificial Sequence
  Description of Artificial Sequence: Synthetic oligonucleotide
cgucccuugggccaucugu

SEQ ID NO: 182671 - RNA, 19 nt, Artificial Sequence
  Description of Artificial Sequence: Synthetic oligonucleotide
gcagagcaaugggcugggc

SEQ ID NO: 182672 - RNA, 19 nt, Artificial Sequence
  Description of Artificial Sequence: Synthetic oligonucleotide
guauagcgccgcagcuugu

SEQ ID NO: 182673 - RNA, 19 nt, Artificial Sequence
  Description of Artificial Sequence: Synthetic oligonucleotide
gugccugggagaaggcauu

SEQ ID NO: 182674 - RNA, 19 nt, Artificial Sequence
  Description of Artificial Sequence: Synthetic oligonucleotide
ggucugcgugagguccgug

SEQ ID NO: 182675 - RNA, 19 nt, Artificial Sequence
  Description of Artificial Sequence: Synthetic oligonucleotide
cccuaugcuagcccacccu

SEQ ID NO: 182676 - RNA, 19 nt, Artificial Sequence
  Description of Artificial Sequence: Synthetic oligonucleotide
guagcucggugagguugcu

SEQ ID NO: 182677 - RNA, 19 nt, Artificial Sequence
  Description of Artificial Sequence: Synthetic oligonucleotide
gcucacgcuagcagacacu

SEQ ID NO: 182678 - RNA, 19 nt, Artificial Sequence
  Description of Artificial Sequence: Synthetic oligonucleotide
ggggacuaggguacaucau

SEQ ID NO: 182679 - RNA, 19 nt, Artificial Sequence
  Description of Artificial Sequence: Synthetic oligonucleotide
cugcuccuauaugacccau

SEQ ID NO: 182680 - RNA, 19 nt, Artificial Sequence
  Description of Artificial Sequence: Synthetic oligonucleotide
ccuccuucggccagucaau

SEQ ID NO: 182681 - RNA, 19 nt, Artificial Sequence
  Description of Artificial Sequence: Synthetic oligonucleotide
ggcgggcggaucauucacu

SEQ ID NO: 182682 - RNA, 19 nt, Artificial Sequence
  Description of Artificial Sequence: Synthetic oligonucleotide
cacugcgacuugggcccca

SEQ ID NO: 182683 - RNA, 19 nt, Artificial Sequence
  Description of Artificial Sequence: Synthetic oligonucleotide
ugccgucccuugggccauc

SEQ ID NO: 182684 - RNA, 19 nt, Artificial Sequence
  Description of Artificial Sequence: Synthetic oligonucleotide
cgucaugaugguagcgggu

SEQ ID NO: 182685 - RNA, 19 nt, Artificial Sequence
  Description of Artificial Sequence: Synthetic oligonucleotide
caggugguuuaggcuggcu

SEQ ID NO: 182686 - RNA, 19 nt, Artificial Sequence
  Description of Artificial Sequence: Synthetic oligonucleotide
ccgucccuugggccaucug

SEQ ID NO: 182687 - RNA, 19 nt, Artificial Sequence
  Description of Artificial Sequence: Synthetic oligonucleotide
ccccaguaaccuacccagu

SEQ ID NO: 182688 - RNA, 19 nt, Artificial Sequence
  Description of Artificial Sequence: Synthetic oligonucleotide
gaggugcgugggugcuguu

SEQ ID NO: 182689 - RNA, 19 nt, Artificial Sequence
  Description of Artificial Sequence: Synthetic oligonucleotide
gugccgucccuugggccau

SEQ ID NO: 182690 - RNA, 19 nt, Artificial Sequence
  Description of Artificial Sequence: Synthetic oligonucleotide
gcauggcccuguacaaauu

SEQ ID NO: 182691 - RNA, 19 nt, Artificial Sequence
  Description of Artificial Sequence: Synthetic oligonucleotide
gcccagcuauucaggggcu

SEQ ID NO: 182692 - RNA, 19 nt, Artificial Sequence
  Description of Artificial Sequence: Synthetic oligonucleotide
gcgugagguccgugcugcu

SEQ ID NO: 182693 - RNA, 19 nt, Artificial Sequence
  Description of Artificial Sequence: Synthetic oligonucleotide
ccuguagcucggugagguu

SEQ ID NO: 182694 - RNA, 19 nt, Artificial Sequence
  Description of Artificial Sequence: Synthetic oligonucleotide
cgggcggaucauucacucu

SEQ ID NO: 182695 - RNA, 19 nt, Artificial Sequence
  Description of Artificial Sequence: Synthetic oligonucleotide
gccgucccuugggccaucu

SEQ ID NO: 182696 - RNA, 19 nt, Artificial Sequence
  Description of Artificial Sequence: Synthetic oligonucleotide
ccaccccaacugccauucu

SEQ ID NO: 182697 - RNA, 19 nt, Artificial Sequence
  Description of Artificial Sequence: Synthetic oligonucleotide
cggucucacuggugaucau

SEQ ID NO: 182698 - RNA, 19 nt, Artificial Sequence
  Description of Artificial Sequence: Synthetic oligonucleotide
ugugauaaaucucaaaggg

SEQ ID NO: 182699 - RNA, 19 nt, Artificial Sequence
  Description of Artificial Sequence: Synthetic oligonucleotide
aaagccugggcuuugauuc

SEQ ID NO: 182700 - RNA, 19 nt, Artificial Sequence
  Description of Artificial Sequence: Synthetic oligonucleotide
aguauuagggauguaaucc

SEQ ID NO: 182701 - RNA, 19 nt, Artificial Sequence
  Description of Artificial Sequence: Synthetic oligonucleotide
ugaagguuaauaaaagugc

SEQ ID NO: 182702 - RNA, 19 nt, Artificial Sequence
  Description of Artificial Sequence: Synthetic oligonucleotide
ucucaauagacucagauaa

SEQ ID NO: 182703 - RNA, 19 nt, Artificial Sequence
  Description of Artificial Sequence: Synthetic oligonucleotide
auggauauaacuugguaac

SEQ ID NO: 182704 - RNA, 19 nt, Artificial Sequence
  Description of Artificial Sequence: Synthetic oligonucleotide
cuugauaggcccaaaacgg

SEQ ID NO: 182705 - RNA, 19 nt, Artificial Sequence
  Description of Artificial Sequence: Synthetic oligonucleotide
acuugauaggcccaaaacg

SEQ ID NO: 182706 - RNA, 19 nt, Artificial Sequence
  Description of Artificial Sequence: Synthetic oligonucleotide
aaggccggaaagcauaacc

SEQ ID NO: 182707 - RNA, 19 nt, Artificial Sequence
  Description of Artificial Sequence: Synthetic oligonucleotide
aauaaguacuauaacaaca

SEQ ID NO: 182708 - RNA, 19 nt, Artificial Sequence
  Description of Artificial Sequence: Synthetic oligonucleotide
ucuuaugcaaccaccaggc

SEQ ID NO: 182709 - RNA, 19 nt, Artificial Sequence
  Description of Artificial Sequence: Synthetic oligonucleotide
ugucuuagguacaugaaug

SEQ ID NO: 182710 - RNA, 19 nt, Artificial Sequence
  Description of Artificial Sequence: Synthetic oligonucleotide
agauccaaguuucuauucc

SEQ ID NO: 182711 - RNA, 19 nt, Artificial Sequence
  Description of Artificial Sequence: Synthetic oligonucleotide
ugaauauguaugcacacgu

SEQ ID NO: 182712 - RNA, 19 nt, Artificial Sequence
  Description of Artificial Sequence: Synthetic oligonucleotide
aaauguuggaccacugagc

SEQ ID NO: 182713 - RNA, 19 nt, Artificial Sequence
  Description of Artificial Sequence: Synthetic oligonucleotide
uuagggauguaauccaggg

SEQ ID NO: 182714 - RNA, 19 nt, Artificial Sequence
  Description of Artificial Sequence: Synthetic oligonucleotide
auugugacuaggcaguuag

SEQ ID NO: 182715 - RNA, 19 nt, Artificial Sequence
  Description of Artificial Sequence: Synthetic oligonucleotide
ugcgcauaaagucacagac

SEQ ID NO: 182716 - RNA, 19 nt, Artificial Sequence
  Description of Artificial Sequence: Synthetic oligonucleotide
uguagggaaucacuaaaag

SEQ ID NO: 182717 - RNA, 19 nt, Artificial Sequence
  Description of Artificial Sequence: Synthetic oligonucleotide
ucucaaaggguaaugaauc

SEQ ID NO: 182718 - RNA, 19 nt, Artificial Sequence
  Description of Artificial Sequence: Synthetic oligonucleotide
aauuguugugcuccgauaa

SEQ ID NO: 182719 - RNA, 19 nt, Artificial Sequence
  Description of Artificial Sequence: Synthetic oligonucleotide
auuagcaccgaacuuacca

SEQ ID NO: 182720 - RNA, 19 nt, Artificial Sequence
  Description of Artificial Sequence: Synthetic oligonucleotide
guauucauaauugaucucc

SEQ ID NO: 182721 - RNA, 19 nt, Artificial Sequence
  Description of Artificial Sequence: Synthetic oligonucleotide
aauauguaugcacacguuu

SEQ ID NO: 182722 - RNA, 19 nt, Artificial Sequence
  Description of Artificial Sequence: Synthetic oligonucleotide
ugaacagucguugcuaacg

SEQ ID NO: 182723 - RNA, 19 nt, Artificial Sequence
  Description of Artificial Sequence: Synthetic oligonucleotide
agguuaauaaaagugccac

SEQ ID NO: 182724 - RNA, 19 nt, Artificial Sequence
  Description of Artificial Sequence: Synthetic oligonucleotide
ucaagguaccucaaguacc

SEQ ID NO: 182725 - RNA, 19 nt, Artificial Sequence
  Description of Artificial Sequence: Synthetic oligonucleotide
aaucauggauauaacuugg

SEQ ID NO: 182726 - RNA, 19 nt, Artificial Sequence
  Description of Artificial Sequence: Synthetic oligonucleotide
auuugcaauagccauagaa

SEQ ID NO: 182727 - RNA, 19 nt, Artificial Sequence
  Description of Artificial Sequence: Synthetic oligonucleotide
ugagacaggauacggacug

SEQ ID NO: 182728 - RNA, 19 nt, Artificial Sequence
  Description of Artificial Sequence: Synthetic oligonucleotide
ugugacuaggcaguuaggg

SEQ ID NO: 182729 - RNA, 19 nt, Artificial Sequence
  Description of Artificial Sequence: Synthetic oligonucleotide
gugugauaaaucucaaagg

SEQ ID NO: 182730 - RNA, 19 nt, Artificial Sequence
  Description of Artificial Sequence: Synthetic oligonucleotide
auucauaauugaucucccc

SEQ ID NO: 182731 - RNA, 19 nt, Artificial Sequence
  Description of Artificial Sequence: Synthetic oligonucleotide
aaggguaauuauggaaacc

SEQ ID NO: 182732 - RNA, 19 nt, Artificial Sequence
  Description of Artificial Sequence: Synthetic oligonucleotide
cuguacacugcuaugaaug

SEQ ID NO: 182733 - RNA, 19 nt, Artificial Sequence
  Description of Artificial Sequence: Synthetic oligonucleotide
uaauaauccuuccaacccu

SEQ ID NO: 182734 - RNA, 19 nt, Artificial Sequence
  Description of Artificial Sequence: Synthetic oligonucleotide
uucauauuaaaaugacacu

SEQ ID NO: 182735 - RNA, 19 nt, Artificial Sequence
  Description of Artificial Sequence: Synthetic oligonucleotide
uuugaauauguaugcacac

SEQ ID NO: 182736 - RNA, 19 nt, Artificial Sequence
  Description of Artificial Sequence: Synthetic oligonucleotide
uauucauaauugaucuccc

SEQ ID NO: 182737 - RNA, 19 nt, Artificial Sequence
  Description of Artificial Sequence: Synthetic oligonucleotide
auagcuaagauagggagug

SEQ ID NO: 182738 - RNA, 19 nt, Artificial Sequence
  Description of Artificial Sequence: Synthetic oligonucleotide
uugaauauguaugcacacg

SEQ ID NO: 182739 - RNA, 19 nt, Artificial Sequence
  Description of Artificial Sequence: Synthetic oligonucleotide
caacaugcaagggugaucg

SEQ ID NO: 182740 - RNA, 19 nt, Artificial Sequence
  Description of Artificial Sequence: Synthetic oligonucleotide
uauuagggauguaauccag

SEQ ID NO: 182741 - RNA, 19 nt, Artificial Sequence
  Description of Artificial Sequence: Synthetic oligonucleotide
ugacacuuaacaacugcgc

SEQ ID NO: 182742 - RNA, 19 nt, Artificial Sequence
  Description of Artificial Sequence: Synthetic oligonucleotide
ugacuaggcaguuaggggu

SEQ ID NO: 182743 - RNA, 19 nt, Artificial Sequence
  Description of Artificial Sequence: Synthetic oligonucleotide
agugaagguuaauaaaagu

SEQ ID NO: 182744 - RNA, 19 nt, Artificial Sequence
  Description of Artificial Sequence: Synthetic oligonucleotide
agacucaaaagccugggcu

SEQ ID NO: 182745 - RNA, 19 nt, Artificial Sequence
  Description of Artificial Sequence: Synthetic oligonucleotide
aaagcauaaccccuggcuu

SEQ ID NO: 182746 - RNA, 19 nt, Artificial Sequence
  Description of Artificial Sequence: Synthetic oligonucleotide
aacuuaccaccagaaagcg

SEQ ID NO: 182747 - RNA, 19 nt, Artificial Sequence
  Description of Artificial Sequence: Synthetic oligonucleotide
uauuaagugaagguuaaua

SEQ ID NO: 182748 - RNA, 19 nt, Artificial Sequence
  Description of Artificial Sequence: Synthetic oligonucleotide
auauccagggccaaaggcg

SEQ ID NO: 182749 - RNA, 19 nt, Artificial Sequence
  Description of Artificial Sequence: Synthetic oligonucleotide
ugaacucuaguuccaguca

SEQ ID NO: 182750 - RNA, 19 nt, Artificial Sequence
  Description of Artificial Sequence: Synthetic oligonucleotide
auuauauccagggccaaag

SEQ ID NO: 182751 - RNA, 19 nt, Artificial Sequence
  Description of Artificial Sequence: Synthetic oligonucleotide
uaugguugacuuuugguua

SEQ ID NO: 182752 - RNA, 19 nt, Artificial Sequence
  Description of Artificial Sequence: Synthetic oligonucleotide
ucuaaugccucgauucgcu

SEQ ID NO: 182753 - RNA, 19 nt, Artificial Sequence
  Description of Artificial Sequence: Synthetic oligonucleotide
uuugauucacuagaagagu

SEQ ID NO: 182754 - RNA, 19 nt, Artificial Sequence
  Description of Artificial Sequence: Synthetic oligonucleotide
aguaggaugcauuggcuca

SEQ ID NO: 182755 - RNA, 19 nt, Artificial Sequence
  Description of Artificial Sequence: Synthetic oligonucleotide
cauggauauaacuugguaa

SEQ ID NO: 182756 - RNA, 19 nt, Artificial Sequence
  Description of Artificial Sequence: Synthetic oligonucleotide
uugauucacuagaagagua

SEQ ID NO: 182757 - RNA, 19 nt, Artificial Sequence
  Description of Artificial Sequence: Synthetic oligonucleotide
uuguaaaggauagcuaaga

SEQ ID NO: 182758 - RNA, 19 nt, Artificial Sequence
  Description of Artificial Sequence: Synthetic oligonucleotide
uaccucacaacccaauaaa

SEQ ID NO: 182759 - RNA, 19 nt, Artificial Sequence
  Description of Artificial Sequence: Synthetic oligonucleotide
agacaaacuuuuaauuagg

SEQ ID NO: 182760 - RNA, 19 nt, Artificial Sequence
  Description of Artificial Sequence: Synthetic oligonucleotide
ugcuaguguacacagugaa

SEQ ID NO: 182761 - RNA, 19 nt, Artificial Sequence
  Description of Artificial Sequence: Synthetic oligonucleotide
aguggcauaucacuguuaa

SEQ ID NO: 182762 - RNA, 19 nt, Artificial Sequence
  Description of Artificial Sequence: Synthetic oligonucleotide
ugcaguauuagggauguaa

SEQ ID NO: 182763 - RNA, 19 nt, Artificial Sequence
  Description of Artificial Sequence: Synthetic oligonucleotide
uacaaaucauggauauaac

SEQ ID NO: 182764 - RNA, 19 nt, Artificial Sequence
  Description of Artificial Sequence: Synthetic oligonucleotide
guggucgccaaucagagga

SEQ ID NO: 182765 - RNA, 19 nt, Artificial Sequence
  Description of Artificial Sequence: Synthetic oligonucleotide
uuagcaccgaacuuaccac

SEQ ID NO: 182766 - RNA, 19 nt, Artificial Sequence
  Description of Artificial Sequence: Synthetic oligonucleotide
ucguugcuaacgcagggug

SEQ ID NO: 182767 - RNA, 19 nt, Artificial Sequence
  Description of Artificial Sequence: Synthetic oligonucleotide
gauucuaaaucacuacucu

SEQ ID NO: 182768 - RNA, 19 nt, Artificial Sequence
  Description of Artificial Sequence: Synthetic oligonucleotide
ucauggauauaacuuggua

SEQ ID NO: 182769 - RNA, 19 nt, Artificial Sequence
  Description of Artificial Sequence: Synthetic oligonucleotide
cuaaaucacuacucugaag

SEQ ID NO: 182770 - RNA, 19 nt, Artificial Sequence
  Description of Artificial Sequence: Synthetic oligonucleotide
ugcaccguugucucuaaug

SEQ ID NO: 182771 - RNA, 19 nt, Artificial Sequence
  Description of Artificial Sequence: Synthetic oligonucleotide
uuuccauuauccgcggaag

SEQ ID NO: 182772 - RNA, 19 nt, Artificial Sequence
  Description of Artificial Sequence: Synthetic oligonucleotide
cugaacucuaguuccaguc

SEQ ID NO: 182773 - RNA, 19 nt, Artificial Sequence
  Description of Artificial Sequence: Synthetic oligonucleotide
uggggaacgcacucgagug

SEQ ID NO: 182774 - RNA, 19 nt, Artificial Sequence
  Description of Artificial Sequence: Synthetic oligonucleotide
gaaagcauaaccccuggcu

SEQ ID NO: 182775 - RNA, 19 nt, Artificial Sequence
  Description of Artificial Sequence: Synthetic oligonucleotide
auauguaugcacacguuug

SEQ ID NO: 182776 - RNA, 19 nt, Artificial Sequence
  Description of Artificial Sequence: Synthetic oligonucleotide
ucugagguccacacggcca

SEQ ID NO: 182777 - RNA, 19 nt, Artificial Sequence
  Description of Artificial Sequence: Synthetic oligonucleotide
caugcaagggugaucgaac

SEQ ID NO: 182778 - RNA, 19 nt, Artificial Sequence
  Description of Artificial Sequence: Synthetic oligonucleotide
aggccggaaagcauaaccc

SEQ ID NO: 182779 - RNA, 19 nt, Artificial Sequence
  Description of Artificial Sequence: Synthetic oligonucleotide
guauuagggauguaaucca

SEQ ID NO: 182780 - RNA, 19 nt, Artificial Sequence
  Description of Artificial Sequence: Synthetic oligonucleotide
ggauggaaagagaacauag

SEQ ID NO: 182781 - RNA, 19 nt, Artificial Sequence
  Description of Artificial Sequence: Synthetic oligonucleotide
auguaugcacacguuuggc

SEQ ID NO: 182782 - RNA, 19 nt, Artificial Sequence
  Description of Artificial Sequence: Synthetic oligonucleotide
aaauuguugugcuccgaua

SEQ ID NO: 182783 - RNA, 19 nt, Artificial Sequence
  Description of Artificial Sequence: Synthetic oligonucleotide
agagagaccuguacacugc

SEQ ID NO: 182784 - RNA, 19 nt, Artificial Sequence
  Description of Artificial Sequence: Synthetic oligonucleotide
agcauaaccccuggcuucc

SEQ ID NO: 182785 - RNA, 19 nt, Artificial Sequence
  Description of Artificial Sequence: Synthetic oligonucleotide
cacuugauaggcccaaaac

SEQ ID NO: 182786 - RNA, 19 nt, Artificial Sequence
  Description of Artificial Sequence: Synthetic oligonucleotide
gaguaggaugcauuggcuc

SEQ ID NO: 182787 - RNA, 19 nt, Artificial Sequence
  Description of Artificial Sequence: Synthetic oligonucleotide
ugucagauuauuguuucau

SEQ ID NO: 182788 - RNA, 19 nt, Artificial Sequence
  Description of Artificial Sequence: Synthetic oligonucleotide
gugaucgaacaccauuugc

SEQ ID NO: 182789 - RNA, 19 nt, Artificial Sequence
  Description of Artificial Sequence: Synthetic oligonucleotide
uggucauagccauaagcaa

SEQ ID NO: 182790 - RNA, 19 nt, Artificial Sequence
  Description of Artificial Sequence: Synthetic oligonucleotide
caguauuagggauguaauc

SEQ ID NO: 182791 - RNA, 19 nt, Artificial Sequence
  Description of Artificial Sequence: Synthetic oligonucleotide
aucucaauagacucagaua

SEQ ID NO: 182792 - RNA, 19 nt, Artificial Sequence
  Description of Artificial Sequence: Synthetic oligonucleotide
gauaacugcaccguugucu

SEQ ID NO: 182793 - RNA, 19 nt, Artificial Sequence
  Description of Artificial Sequence: Synthetic oligonucleotide
acagucguugcuaacgcag

SEQ ID NO: 182794 - RNA, 19 nt, Artificial Sequence
  Description of Artificial Sequence: Synthetic oligonucleotide
auaccucacaacccaauaa

SEQ ID NO: 182795 - RNA, 19 nt, Artificial Sequence
  Description of Artificial Sequence: Synthetic oligonucleotide
ugcuaacgcagggugagag

SEQ ID NO: 182796 - RNA, 19 nt, Artificial Sequence
  Description of Artificial Sequence: Synthetic oligonucleotide
cucgaguggcauaucacug

SEQ ID NO: 182797 - RNA, 19 nt, Artificial Sequence
  Description of Artificial Sequence: Synthetic oligonucleotide
gcuuugaauauguaugcac

SEQ ID NO: 182798 - RNA, 19 nt, Artificial Sequence
  Description of Artificial Sequence: Synthetic oligonucleotide
guugugcuccgauaacugc

SEQ ID NO: 182799 - RNA, 19 nt, Artificial Sequence
  Description of Artificial Sequence: Synthetic oligonucleotide
uagcaccgaacuuaccacc

SEQ ID NO: 182800 - RNA, 19 nt, Artificial Sequence
  Description of Artificial Sequence: Synthetic oligonucleotide
auaauugaucuccccugca

SEQ ID NO: 182801 - RNA, 19 nt, Artificial Sequence
  Description of Artificial Sequence: Synthetic oligonucleotide
ucagccuaaucauuuggua

SEQ ID NO: 182802 - RNA, 19 nt, Artificial Sequence
  Description of Artificial Sequence: Synthetic oligonucleotide
cucgauucgcucucaggcc

SEQ ID NO: 182803 - RNA, 19 nt, Artificial Sequence
  Description of Artificial Sequence: Synthetic oligonucleotide
augcuugugugugugugcg

SEQ ID NO: 182804 - RNA, 19 nt, Artificial Sequence
  Description of Artificial Sequence: Synthetic oligonucleotide
aaucaaggguuuccauuau

SEQ ID NO: 182805 - RNA, 19 nt, Artificial Sequence
  Description of Artificial Sequence: Synthetic oligonucleotide
caccugguaccacucaggg

SEQ ID NO: 182806 - RNA, 19 nt, Artificial Sequence
  Description of Artificial Sequence: Synthetic oligonucleotide
caugcuugugugugugugc

SEQ ID NO: 182807 - RNA, 19 nt, Artificial Sequence
  Description of Artificial Sequence: Synthetic oligonucleotide
ugguaacuuucuuaugcaa

SEQ ID NO: 182808 - RNA, 19 nt, Artificial Sequence
  Description of Artificial Sequence: Synthetic oligonucleotide
uugcuaguguacacaguga

SEQ ID NO: 182809 - RNA, 19 nt, Artificial Sequence
  Description of Artificial Sequence: Synthetic oligonucleotide
ccuaccucacaucagacac

SEQ ID NO: 182810 - RNA, 19 nt, Artificial Sequence
  Description of Artificial Sequence: Synthetic oligonucleotide
agguaccucaaguaccuga

SEQ ID NO: 182811 - RNA, 19 nt, Artificial Sequence
  Description of Artificial Sequence: Synthetic oligonucleotide
uauugcuaguguacacagu

SEQ ID NO: 182812 - RNA, 19 nt, Artificial Sequence
  Description of Artificial Sequence: Synthetic oligonucleotide
uuccauuauccgcggaagu

SEQ ID NO: 182813 - RNA, 19 nt, Artificial Sequence
  Description of Artificial Sequence: Synthetic oligonucleotide
gcaugacauacauaguccc

SEQ ID NO: 182814 - RNA, 19 nt, Artificial Sequence
  Description of Artificial Sequence: Synthetic oligonucleotide
ugugaaccuuugaucuagc

SEQ ID NO: 182815 - RNA, 19 nt, Artificial Sequence
  Description of Artificial Sequence: Synthetic oligonucleotide
aucucaaaggguaaugaau

SEQ ID NO: 182816 - RNA, 19 nt, Artificial Sequence
  Description of Artificial Sequence: Synthetic oligonucleotide
caacugcgcauaaagucac

SEQ ID NO: 182817 - RNA, 19 nt, Artificial Sequence
  Description of Artificial Sequence: Synthetic oligonucleotide
guauguugugauaaggaaa

SEQ ID NO: 182818 - RNA, 19 nt, Artificial Sequence
  Description of Artificial Sequence: Synthetic oligonucleotide
uggcgagagaagguggccg

SEQ ID NO: 182819 - RNA, 19 nt, Artificial Sequence
  Description of Artificial Sequence: Synthetic oligonucleotide
guaugcacacguuuggcaa

SEQ ID NO: 182820 - RNA, 19 nt, Artificial Sequence
  Description of Artificial Sequence: Synthetic oligonucleotide
uggauauaacuugguaacu

SEQ ID NO: 182821 - RNA, 19 nt, Artificial Sequence
  Description of Artificial Sequence: Synthetic oligonucleotide
uuauccgcggaagucuccc

SEQ ID NO: 182822 - RNA, 19 nt, Artificial Sequence
  Description of Artificial Sequence: Synthetic oligonucleotide
uccauuauccgcggaaguc

SEQ ID NO: 182823 - RNA, 19 nt, Artificial Sequence
  Description of Artificial Sequence: Synthetic oligonucleotide
ugcaagggugaucgaacac

SEQ ID NO: 182824 - RNA, 19 nt, Artificial Sequence
  Description of Artificial Sequence: Synthetic oligonucleotide
auaauccuuccaacccugc

SEQ ID NO: 182825 - RNA, 19 nt, Artificial Sequence
  Description of Artificial Sequence: Synthetic oligonucleotide
acugcgcauaaagucacag

SEQ ID NO: 182826 - RNA, 19 nt, Artificial Sequence
  Description of Artificial Sequence: Synthetic oligonucleotide
cauauugcuaguguacaca

SEQ ID NO: 182827 - RNA, 19 nt, Artificial Sequence
  Description of Artificial Sequence: Synthetic oligonucleotide
ccucgauucgcucucaggc

SEQ ID NO: 182828 - RNA, 19 nt, Artificial Sequence
  Description of Artificial Sequence: Synthetic oligonucleotide
aggucuugacaaaauaagu

SEQ ID NO: 182829 - RNA, 19 nt, Artificial Sequence
  Description of Artificial Sequence: Synthetic oligonucleotide
uaagcaacggucagcucuu

SEQ ID NO: 182830 - RNA, 19 nt, Artificial Sequence
  Description of Artificial Sequence: Synthetic oligonucleotide
ugcauagauccaaguuucu

SEQ ID NO: 182831 - RNA, 19 nt, Artificial Sequence
  Description of Artificial Sequence: Synthetic oligonucleotide
ucauagccauaagcaacgg

SEQ ID NO: 182832 - RNA, 19 nt, Artificial Sequence
  Description of Artificial Sequence: Synthetic oligonucleotide
guguauguugugauaagga

SEQ ID NO: 182833 - RNA, 19 nt, Artificial Sequence
  Description of Artificial Sequence: Synthetic oligonucleotide
gugcauagauccaaguuuc

SEQ ID NO: 182834 - RNA, 19 nt, Artificial Sequence
  Description of Artificial Sequence: Synthetic oligonucleotide
augcaagggugaucgaaca

SEQ ID NO: 182835 - RNA, 19 nt, Artificial Sequence
  Description of Artificial Sequence: Synthetic oligonucleotide
uuacaauacaaggccggaa

SEQ ID NO: 182836 - RNA, 19 nt, Artificial Sequence
  Description of Artificial Sequence: Synthetic oligonucleotide
accucacaacccaauaaag

SEQ ID NO: 182837 - RNA, 19 nt, Artificial Sequence
  Description of Artificial Sequence: Synthetic oligonucleotide
auuauccgcggaagucucc

SEQ ID NO: 182838 - RNA, 19 nt, Artificial Sequence
  Description of Artificial Sequence: Synthetic oligonucleotide
ggagcuacaaaucauggau

SEQ ID NO: 182839 - RNA, 19 nt, Artificial Sequence
  Description of Artificial Sequence: Synthetic oligonucleotide
cauuauccgcggaagucuc

SEQ ID NO: 182840 - RNA, 19 nt, Artificial Sequence
  Description of Artificial Sequence: Synthetic oligonucleotide
ggucauagccauaagcaac

SEQ ID NO: 182841 - RNA, 19 nt, Artificial Sequence
  Description of Artificial Sequence: Synthetic oligonucleotide
gacaggauacggacugugc

SEQ ID NO: 182842 - RNA, 19 nt, Artificial Sequence
  Description of Artificial Sequence: Synthetic oligonucleotide
ugugugugcgugugugugu

SEQ ID NO: 182843 - RNA, 19 nt, Artificial Sequence
  Description of Artificial Sequence: Synthetic oligonucleotide
cuaacgcagggugagagga

SEQ ID NO: 182844 - RNA, 19 nt, Artificial Sequence
  Description of Artificial Sequence: Synthetic oligonucleotide
auccgcggaagucucccuc

SEQ ID NO: 182845 - RNA, 19 nt, Artificial Sequence
  Description of Artificial Sequence: Synthetic oligonucleotide
gacuaggcaguuaggggug

SEQ ID NO: 182846 - RNA, 19 nt, Artificial Sequence
  Description of Artificial Sequence: Synthetic oligonucleotide
ugucucuaaugccucgauu

SEQ ID NO: 182847 - RNA, 19 nt, Artificial Sequence
  Description of Artificial Sequence: Synthetic oligonucleotide
gcuaagauagggagugagg

SEQ ID NO: 182848 - RNA, 19 nt, Artificial Sequence
  Description of Artificial Sequence: Synthetic oligonucleotide
agguaaacacaccuccauu

SEQ ID NO: 182849 - RNA, 19 nt, Artificial Sequence
  Description of Artificial Sequence: Synthetic oligonucleotide
ggauucuaaaucacuacuc

SEQ ID NO: 182850 - RNA, 19 nt, Artificial Sequence
  Description of Artificial Sequence: Synthetic oligonucleotide
ugugugugugcgugugugu

SEQ ID NO: 182851 - RNA, 19 nt, Artificial Sequence
  Description of Artificial Sequence: Synthetic oligonucleotide
gcaagggugaucgaacacc

SEQ ID NO: 182852 - RNA, 19 nt, Artificial Sequence
  Description of Artificial Sequence: Synthetic oligonucleotide
auacagaucaaagguuaaa

SEQ ID NO: 182853 - RNA, 19 nt, Artificial Sequence
  Description of Artificial Sequence: Synthetic oligonucleotide
uugugugugugugcgugug

SEQ ID NO: 182854 - RNA, 19 nt, Artificial Sequence
  Description of Artificial Sequence: Synthetic oligonucleotide
cuaugaaugcaaaauccau

SEQ ID NO: 182855 - RNA, 19 nt, Artificial Sequence
  Description of Artificial Sequence: Synthetic oligonucleotide
cugucucacuaagacaaac

SEQ ID NO: 182856 - RNA, 19 nt, Artificial Sequence
  Description of Artificial Sequence: Synthetic oligonucleotide
ugugugugugugcgugugu

SEQ ID NO: 182857 - RNA, 19 nt, Artificial Sequence
  Description of Artificial Sequence: Synthetic oligonucleotide
agguggucgccaaucagag

SEQ ID NO: 182858 - RNA, 19 nt, Artificial Sequence
  Description of Artificial Sequence: Synthetic oligonucleotide
cauuagcaccgaacuuacc

SEQ ID NO: 182859 - RNA, 19 nt, Artificial Sequence
  Description of Artificial Sequence: Synthetic oligonucleotide
cuguagggaaucacuaaaa

SEQ ID NO: 182860 - RNA, 19 nt, Artificial Sequence
  Description of Artificial Sequence: Synthetic oligonucleotide
acaugcaagggugaucgaa

SEQ ID NO: 182861 - RNA, 19 nt, Artificial Sequence
  Description of Artificial Sequence: Synthetic oligonucleotide
ggugaucgaacaccauuug

SEQ ID NO: 182862 - RNA, 19 nt, Artificial Sequence
  Description of Artificial Sequence: Synthetic oligonucleotide
gccuugucaguuugcaugc

SEQ ID NO: 182863 - RNA, 19 nt, Artificial Sequence
  Description of Artificial Sequence: Synthetic oligonucleotide
ugcccgcccucucugggag

SEQ ID NO: 182864 - RNA, 19 nt, Artificial Sequence
  Description of Artificial Sequence: Synthetic oligonucleotide
uggcuugaaauaguuucau

SEQ ID NO: 182865 - RNA, 19 nt, Artificial Sequence
  Description of Artificial Sequence: Synthetic oligonucleotide
aggcuaaagaaaagacuca

SEQ ID NO: 182866 - RNA, 19 nt, Artificial Sequence
  Description of Artificial Sequence: Synthetic oligonucleotide
cuaaugccucgauucgcuc

SEQ ID NO: 182867 - RNA, 19 nt, Artificial Sequence
  Description of Artificial Sequence: Synthetic oligonucleotide
gugauaaaucucaaagggu

SEQ ID NO: 182868 - RNA, 19 nt, Artificial Sequence
  Description of Artificial Sequence: Synthetic oligonucleotide
gugugugugcgugugugug

SEQ ID NO: 182869 - RNA, 19 nt, Artificial Sequence
  Description of Artificial Sequence: Synthetic oligonucleotide
accuguacacugcuaugaa

SEQ ID NO: 182870 - RNA, 19 nt, Artificial Sequence
  Description of Artificial Sequence: Synthetic oligonucleotide
caagguaccucaaguaccu

SEQ ID NO: 182871 - RNA, 19 nt, Artificial Sequence
  Description of Artificial Sequence: Synthetic oligonucleotide
gugugugugugcgugugug

SEQ ID NO: 182872 - RNA, 19 nt, Artificial Sequence
  Description of Artificial Sequence: Synthetic oligonucleotide
aucauggauauaacuuggu

SEQ ID NO: 182873 - RNA, 19 nt, Artificial Sequence
  Description of Artificial Sequence: Synthetic oligonucleotide
aacgcacucgaguggcaua

SEQ ID NO: 182874 - RNA, 19 nt, Artificial Sequence
  Description of Artificial Sequence: Synthetic oligonucleotide
gcuaacgcagggugagagg

SEQ ID NO: 182875 - RNA, 19 nt, Artificial Sequence
  Description of Artificial Sequence: Synthetic oligonucleotide
ggcuguauggcuugaaaua

SEQ ID NO: 182876 - RNA, 19 nt, Artificial Sequence
  Description of Artificial Sequence: Synthetic oligonucleotide
aacauaccucacaacccaa

SEQ ID NO: 182877 - RNA, 19 nt, Artificial Sequence
  Description of Artificial Sequence: Synthetic oligonucleotide
gugaaccuuugaucuagca

SEQ ID NO: 182878 - RNA, 19 nt, Artificial Sequence
  Description of Artificial Sequence: Synthetic oligonucleotide
caccccggggucuggaccc

SEQ ID NO: 182879 - RNA, 19 nt, Artificial Sequence
  Description of Artificial Sequence: Synthetic oligonucleotide
ucacuacucugaagacaga

SEQ ID NO: 182880 - RNA, 19 nt, Artificial Sequence
  Description of Artificial Sequence: Synthetic oligonucleotide
uggucgccaaucagaggac

SEQ ID NO: 182881 - RNA, 19 nt, Artificial Sequence
  Description of Artificial Sequence: Synthetic oligonucleotide
ggaaagcauaaccccuggc

SEQ ID NO: 182882 - RNA, 19 nt, Artificial Sequence
  Description of Artificial Sequence: Synthetic oligonucleotide
gguaaugaaucugaacucu

SEQ ID NO: 182883 - RNA, 19 nt, Artificial Sequence
  Description of Artificial Sequence: Synthetic oligonucleotide
auaaccccuggcuuccauu

SEQ ID NO: 182884 - RNA, 19 nt, Artificial Sequence
  Description of Artificial Sequence: Synthetic oligonucleotide
gauacggacugugcugaga

SEQ ID NO: 182885 - RNA, 19 nt, Artificial Sequence
  Description of Artificial Sequence: Synthetic oligonucleotide
guguucauauugcuagugu

SEQ ID NO: 182886 - RNA, 19 nt, Artificial Sequence
  Description of Artificial Sequence: Synthetic oligonucleotide
ggggaacgcacucgagugg

SEQ ID NO: 182887 - RNA, 19 nt, Artificial Sequence
  Description of Artificial Sequence: Synthetic oligonucleotide
ggcaaaugacccuacauuu

SEQ ID NO: 182888 - RNA, 19 nt, Artificial Sequence
  Description of Artificial Sequence: Synthetic oligonucleotide
cauaccucacaacccaaua

SEQ ID NO: 182889 - RNA, 19 nt, Artificial Sequence
  Description of Artificial Sequence: Synthetic oligonucleotide
agcaccgaacuuaccacca

SEQ ID NO: 182890 - RNA, 19 nt, Artificial Sequence
  Description of Artificial Sequence: Synthetic oligonucleotide
uggccgggaaacccaguuc

SEQ ID NO: 182891 - RNA, 19 nt, Artificial Sequence
  Description of Artificial Sequence: Synthetic oligonucleotide
gcuugugugugugugcgug

SEQ ID NO: 182892 - RNA, 19 nt, Artificial Sequence
  Description of Artificial Sequence: Synthetic oligonucleotide
cuaugagccaguucuuuau

SEQ ID NO: 182893 - RNA, 19 nt, Artificial Sequence
  Description of Artificial Sequence: Synthetic oligonucleotide
agaugcaguuuggaguaaa

SEQ ID NO: 182894 - RNA, 19 nt, Artificial Sequence
  Description of Artificial Sequence: Synthetic oligonucleotide
cagccuaaucauuugguau

SEQ ID NO: 182895 - RNA, 19 nt, Artificial Sequence
  Description of Artificial Sequence: Synthetic oligonucleotide
gguggucgccaaucagagg

SEQ ID NO: 182896 - RNA, 19 nt, Artificial Sequence
  Description of Artificial Sequence: Synthetic oligonucleotide
aagcaacggucagcucuuc

SEQ ID NO: 182897 - RNA, 19 nt, Artificial Sequence
  Description of Artificial Sequence: Synthetic oligonucleotide
aacaacagucuggcccuau

SEQ ID NO: 182898 - RNA, 19 nt, Artificial Sequence
  Description of Artificial Sequence: Synthetic oligonucleotide
gggaacgcacucgaguggc

SEQ ID NO: 182899 - RNA, 19 nt, Artificial Sequence
  Description of Artificial Sequence: Synthetic oligonucleotide
ugcuugugugugugugcgu

SEQ ID NO: 182900 - RNA, 19 nt, Artificial Sequence
  Description of Artificial Sequence: Synthetic oligonucleotide
uauccgcggaagucucccu

SEQ ID NO: 182901 - RNA, 19 nt, Artificial Sequence
  Description of Artificial Sequence: Synthetic oligonucleotide
gccucgauucgcucucagg

SEQ ID NO: 182902 - RNA, 19 nt, Artificial Sequence
  Description of Artificial Sequence: Synthetic oligonucleotide
acauaccucacaacccaau

SEQ ID NO: 182903 - RNA, 19 nt, Artificial Sequence
  Description of Artificial Sequence: Synthetic oligonucleotide
cccuguaguaucaagggua

SEQ ID NO: 182904 - RNA, 19 nt, Artificial Sequence
  Description of Artificial Sequence: Synthetic oligonucleotide
guuggggaacgcacucgag

SEQ ID NO: 182905 - RNA, 19 nt, Artificial Sequence
  Description of Artificial Sequence: Synthetic oligonucleotide
gcaugcuugugugugugug

SEQ ID NO: 182906 - RNA, 19 nt, Artificial Sequence
  Description of Artificial Sequence: Synthetic oligonucleotide
uagcuaagauagggaguga

SEQ ID NO: 182907 - RNA, 19 nt, Artificial Sequence
  Description of Artificial Sequence: Synthetic oligonucleotide
gguggcgagagaagguggc

SEQ ID NO: 182908 - RNA, 19 nt, Artificial Sequence
  Description of Artificial Sequence: Synthetic oligonucleotide
aucaaucaagguaccucaa

SEQ ID NO: 182909 - RNA, 19 nt, Artificial Sequence
  Description of Artificial Sequence: Synthetic oligonucleotide
acggccaugucugguuucu

SEQ ID NO: 182910 - RNA, 19 nt, Artificial Sequence
  Description of Artificial Sequence: Synthetic oligonucleotide
gaauauguaugcacacguu

SEQ ID NO: 182911 - RNA, 19 nt, Artificial Sequence
  Description of Artificial Sequence: Synthetic oligonucleotide
gcacucgaguggcauauca

SEQ ID NO: 182912 - RNA, 19 nt, Artificial Sequence
  Description of Artificial Sequence: Synthetic oligonucleotide
guauauggccuugucaguu

SEQ ID NO: 182913 - RNA, 19 nt, Artificial Sequence
  Description of Artificial Sequence: Synthetic oligonucleotide
ccuguagggaaucacuaaa

SEQ ID NO: 182914 - RNA, 19 nt, Artificial Sequence
  Description of Artificial Sequence: Synthetic oligonucleotide
uugcuaacgcagggugaga

SEQ ID NO: 182915 - RNA, 19 nt, Artificial Sequence
  Description of Artificial Sequence: Synthetic oligonucleotide
augcacacguuuggcaaau

SEQ ID NO: 182916 - RNA, 19 nt, Artificial Sequence
  Description of Artificial Sequence: Synthetic oligonucleotide
gcacacguuuggcaaauaa

SEQ ID NO: 182917 - RNA, 19 nt, Artificial Sequence
  Description of Artificial Sequence: Synthetic oligonucleotide
cucaauagacucagauaau

SEQ ID NO: 182918 - RNA, 19 nt, Artificial Sequence
  Description of Artificial Sequence: Synthetic oligonucleotide
ugugugcguguguguguau

SEQ ID NO: 182919 - RNA, 19 nt, Artificial Sequence
  Description of Artificial Sequence: Synthetic oligonucleotide
ggaccccaacuccacugag

SEQ ID NO: 182920 - RNA, 19 nt, Artificial Sequence
  Description of Artificial Sequence: Synthetic oligonucleotide
cagggugcggaugcacuug

SEQ ID NO: 182921 - RNA, 19 nt, Artificial Sequence
  Description of Artificial Sequence: Synthetic oligonucleotide
gcaccgaacuuaccaccag

SEQ ID NO: 182922 - RNA, 19 nt, Artificial Sequence
  Description of Artificial Sequence: Synthetic oligonucleotide
ggauacggacugugcugag

SEQ ID NO: 182923 - RNA, 19 nt, Artificial Sequence
  Description of Artificial Sequence: Synthetic oligonucleotide
agacaggaaucaaggguuu

SEQ ID NO: 182924 - RNA, 19 nt, Artificial Sequence
  Description of Artificial Sequence: Synthetic oligonucleotide
ggauauaacuugguaacuu

SEQ ID NO: 182925 - RNA, 19 nt, Artificial Sequence
  Description of Artificial Sequence: Synthetic oligonucleotide
ggccgggaaacccaguucu

SEQ ID NO: 182926 - RNA, 19 nt, Artificial Sequence
  Description of Artificial Sequence: Synthetic oligonucleotide
cacggccaugucugguuuc

SEQ ID NO: 182927 - RNA, 19 nt, Artificial Sequence
  Description of Artificial Sequence: Synthetic oligonucleotide
gcacuugauaggcccaaaa

SEQ ID NO: 182928 - RNA, 19 nt, Artificial Sequence
  Description of Artificial Sequence: Synthetic oligonucleotide
gguugucccauugucagau

SEQ ID NO: 182929 - RNA, 19 nt, Artificial Sequence
  Description of Artificial Sequence: Synthetic oligonucleotide
gcgcauaaagucacagaca

SEQ ID NO: 182930 - RNA, 19 nt, Artificial Sequence
  Description of Artificial Sequence: Synthetic oligonucleotide
gccuguagggaaucacuaa

SEQ ID NO: 182931 - RNA, 19 nt, Artificial Sequence
  Description of Artificial Sequence: Synthetic oligonucleotide
gcaacaugcaagggugauc

SEQ ID NO: 182932 - RNA, 19 nt, Artificial Sequence
  Description of Artificial Sequence: Synthetic oligonucleotide
cuugugugugugugcgugu

SEQ ID NO: 182933 - RNA, 19 nt, Artificial Sequence
  Description of Artificial Sequence: Synthetic oligonucleotide
ggcggguuggggaacgcac

SEQ ID NO: 182934 - RNA, 19 nt, Artificial Sequence
  Description of Artificial Sequence: Synthetic oligonucleotide
gugugugcgugugugugua

SEQ ID NO: 182935 - RNA, 19 nt, Artificial Sequence
  Description of Artificial Sequence: Synthetic oligonucleotide
ggaaucaaucaagguaccu

SEQ ID NO: 182936 - RNA, 19 nt, Artificial Sequence
  Description of Artificial Sequence: Synthetic oligonucleotide
gcaguauuagggauguaau

SEQ ID NO: 182937 - RNA, 19 nt, Artificial Sequence
  Description of Artificial Sequence: Synthetic oligonucleotide
guaccacucaggggcuuca

SEQ ID NO: 182938 - RNA, 19 nt, Artificial Sequence
  Description of Artificial Sequence: Synthetic oligonucleotide
gaacgcacucgaguggcau

SEQ ID NO: 182939 - RNA, 19 nt, Artificial Sequence
  Description of Artificial Sequence: Synthetic oligonucleotide
agagaccuguacacugcua

SEQ ID NO: 182940 - RNA, 19 nt, Artificial Sequence
  Description of Artificial Sequence: Synthetic oligonucleotide
ugcaaccaccaggcaugac

SEQ ID NO: 182941 - RNA, 19 nt, Artificial Sequence
  Description of Artificial Sequence: Synthetic oligonucleotide
cauugugacuaggcaguua

SEQ ID NO: 182942 - RNA, 19 nt, Artificial Sequence
  Description of Artificial Sequence: Synthetic oligonucleotide
guauggcuugaaauaguuu

SEQ ID NO: 182943 - RNA, 19 nt, Artificial Sequence
  Description of Artificial Sequence: Synthetic oligonucleotide
ccaccccggggucuggacc

SEQ ID NO: 182944 - RNA, 19 nt, Artificial Sequence
  Description of Artificial Sequence: Synthetic oligonucleotide
caucacaacuauccaucuu

SEQ ID NO: 182945 - RNA, 19 nt, Artificial Sequence
  Description of Artificial Sequence: Synthetic oligonucleotide
gggugaucgaacaccauuu

SEQ ID NO: 182946 - RNA, 19 nt, Artificial Sequence
  Description of Artificial Sequence: Synthetic oligonucleotide
ggccuguagggaaucacua

SEQ ID NO: 182947 - RNA, 19 nt, Artificial Sequence
  Description of Artificial Sequence: Synthetic oligonucleotide
cggaugcacuugauaggcc

SEQ ID NO: 182948 - RNA, 19 nt, Artificial Sequence
  Description of Artificial Sequence: Synthetic oligonucleotide
gccuaaucauuugguaucu

SEQ ID NO: 182949 - RNA, 19 nt, Artificial Sequence
  Description of Artificial Sequence: Synthetic oligonucleotide
ccuaaucauuugguaucuc

SEQ ID NO: 182950 - RNA, 19 nt, Artificial Sequence
  Description of Artificial Sequence: Synthetic oligonucleotide
ccgauaacugcaccguugu

SEQ ID NO: 182951 - RNA, 19 nt, Artificial Sequence
  Description of Artificial Sequence: Synthetic oligonucleotide
gcuccgauaacugcaccgu

SEQ ID NO: 182952 - RNA, 19 nt, Artificial Sequence
  Description of Artificial Sequence: Synthetic oligonucleotide
cucuaguugcuaggcaaau

SEQ ID NO: 182953 - RNA, 19 nt, Artificial Sequence
  Description of Artificial Sequence: Synthetic oligonucleotide
cccugacauugugacuagg

SEQ ID NO: 182954 - RNA, 19 nt, Artificial Sequence
  Description of Artificial Sequence: Synthetic oligonucleotide
cguugcuaacgcaggguga

SEQ ID NO: 182955 - RNA, 19 nt, Artificial Sequence
  Description of Artificial Sequence: Synthetic oligonucleotide
ccaccaggcaugacauaca

SEQ ID NO: 182956 - RNA, 19 nt, Artificial Sequence
  Description of Artificial Sequence: Synthetic oligonucleotide
ccgaacuuaccaccagaaa

SEQ ID NO: 182957 - RNA, 19 nt, Artificial Sequence
  Description of Artificial Sequence: Synthetic oligonucleotide
ggaacgcacucgaguggca

SEQ ID NO: 182958 - RNA, 19 nt, Artificial Sequence
  Description of Artificial Sequence: Synthetic oligonucleotide
cgauaacugcaccguuguc

SEQ ID NO: 182959 - RNA, 19 nt, Artificial Sequence
  Description of Artificial Sequence: Synthetic oligonucleotide
caccuccauuagcaccgaa

SEQ ID NO: 182960 - RNA, 19 nt, Artificial Sequence
  Description of Artificial Sequence: Synthetic oligonucleotide
cuguaguaucaaggguaau

SEQ ID NO: 182961 - RNA, 19 nt, Artificial Sequence
  Description of Artificial Sequence: Synthetic oligonucleotide
cccaccccggggucuggac

SEQ ID NO: 182962 - RNA, 19 nt, Artificial Sequence
  Description of Artificial Sequence: Synthetic oligonucleotide
cugcaccguugucucuaau

SEQ ID NO: 182963 - RNA, 19 nt, Artificial Sequence
  Description of Artificial Sequence: Synthetic oligonucleotide
cgcacucgaguggcauauc

SEQ ID NO: 182964 - RNA, 19 nt, Artificial Sequence
  Description of Artificial Sequence: Synthetic oligonucleotide
gcccuaugagccaguucuu

SEQ ID NO: 182965 - RNA, 19 nt, Artificial Sequence
  Description of Artificial Sequence: Synthetic oligonucleotide
cgcggaagucucccucucu

SEQ ID NO: 182966 - RNA, 19 nt, Artificial Sequence
  Description of Artificial Sequence: Synthetic oligonucleotide
aauaugauaccauaguuac

SEQ ID NO: 182967 - RNA, 19 nt, Artificial Sequence
  Description of Artificial Sequence: Synthetic oligonucleotide
uuaauaaagauucagggug

SEQ ID NO: 182968 - RNA, 19 nt, Artificial Sequence
  Description of Artificial Sequence: Synthetic oligonucleotide
aauaaugugcacaugauug

SEQ ID NO: 182969 - RNA, 19 nt, Artificial Sequence
  Description of Artificial Sequence: Synthetic oligonucleotide
aauuaagaugaacuguggg

SEQ ID NO: 182970 - RNA, 19 nt, Artificial Sequence
  Description of Artificial Sequence: Synthetic oligonucleotide
guuaaaaugcguaagaugc

SEQ ID NO: 182971 - RNA, 19 nt, Artificial Sequence
  Description of Artificial Sequence: Synthetic oligonucleotide
uacuauaagaugaugcagg

SEQ ID NO: 182972 - RNA, 19 nt, Artificial Sequence
  Description of Artificial Sequence: Synthetic oligonucleotide
aauaaacuagccuuaauaa

SEQ ID NO: 182973 - RNA, 19 nt, Artificial Sequence
  Description of Artificial Sequence: Synthetic oligonucleotide
auuaagaugaacugugggg

SEQ ID NO: 182974 - RNA, 19 nt, Artificial Sequence
  Description of Artificial Sequence: Synthetic oligonucleotide
aacacuaagcaauagguga

SEQ ID NO: 182975 - RNA, 19 nt, Artificial Sequence
  Description of Artificial Sequence: Synthetic oligonucleotide
uuaccaaauagaaaguaag

SEQ ID NO: 182976 - RNA, 19 nt, Artificial Sequence
  Description of Artificial Sequence: Synthetic oligonucleotide
aauaggugagaacagguug

SEQ ID NO: 182977 - RNA, 19 nt, Artificial Sequence
  Description of Artificial Sequence: Synthetic oligonucleotide
uagacauuuaguuauaagu

SEQ ID NO: 182978 - RNA, 19 nt, Artificial Sequence
  Description of Artificial Sequence: Synthetic oligonucleotide
aauuuacuaguacuuugac

SEQ ID NO: 182979 - RNA, 19 nt, Artificial Sequence
  Description of Artificial Sequence: Synthetic oligonucleotide
aguccauaagccuaggaac

SEQ ID NO: 182980 - RNA, 19 nt, Artificial Sequence
  Description of Artificial Sequence: Synthetic oligonucleotide
ugcguuaaaaggcaagggg

SEQ ID NO: 182981 - RNA, 19 nt, Artificial Sequence
  Description of Artificial Sequence: Synthetic oligonucleotide
ugaacggacaaaauuaaga

SEQ ID NO: 182982 - RNA, 19 nt, Artificial Sequence
  Description of Artificial Sequence: Synthetic oligonucleotide
uaaagauucagggugauga

SEQ ID NO: 182983 - RNA, 19 nt, Artificial Sequence
  Description of Artificial Sequence: Synthetic oligonucleotide
uucauaagugaacaaagac

SEQ ID NO: 182984 - RNA, 19 nt, Artificial Sequence
  Description of Artificial Sequence: Synthetic oligonucleotide
uuauacaguaaccuaauau

SEQ ID NO: 182985 - RNA, 19 nt, Artificial Sequence
  Description of Artificial Sequence: Synthetic oligonucleotide
uuauuuagcuacaagccac

SEQ ID NO: 182986 - RNA, 19 nt, Artificial Sequence
  Description of Artificial Sequence: Synthetic oligonucleotide
uguuaaaaugcguaagaug

SEQ ID NO: 182987 - RNA, 19 nt, Artificial Sequence
  Description of Artificial Sequence: Synthetic oligonucleotide
auuauuaacccacugguau

SEQ ID NO: 182988 - RNA, 19 nt, Artificial Sequence
  Description of Artificial Sequence: Synthetic oligonucleotide
uaccuuagugguaagcugg

SEQ ID NO: 182989 - RNA, 19 nt, Artificial Sequence
  Description of Artificial Sequence: Synthetic oligonucleotide
ugguauaaaauuuucccca

SEQ ID NO: 182990 - RNA, 19 nt, Artificial Sequence
  Description of Artificial Sequence: Synthetic oligonucleotide
ugaugaacggacaaaauua

SEQ ID NO: 182991 - RNA, 19 nt, Artificial Sequence
  Description of Artificial Sequence: Synthetic oligonucleotide
aaaauuaaguaugacacuu

SEQ ID NO: 182992 - RNA, 19 nt, Artificial Sequence
  Description of Artificial Sequence: Synthetic oligonucleotide
aagauuguuauucuguauu

SEQ ID NO: 182993 - RNA, 19 nt, Artificial Sequence
  Description of Artificial Sequence: Synthetic oligonucleotide
ucagcauuacauuuauucc

SEQ ID NO: 182994 - RNA, 19 nt, Artificial Sequence
  Description of Artificial Sequence: Synthetic oligonucleotide
gaugcuggaaguauaaccc

SEQ ID NO: 182995 - RNA, 19 nt, Artificial Sequence
  Description of Artificial Sequence: Synthetic oligonucleotide
acaacuuucucucucucuc

SEQ ID NO: 182996 - RNA, 19 nt, Artificial Sequence
  Description of Artificial Sequence: Synthetic oligonucleotide
uuaagaugaacugugggga

SEQ ID NO: 182997 - RNA, 19 nt, Artificial Sequence
  Description of Artificial Sequence: Synthetic oligonucleotide
ugagacauaacagaauaug

SEQ ID NO: 182998 - RNA, 19 nt, Artificial Sequence
  Description of Artificial Sequence: Synthetic oligonucleotide
uuugcguuaaaaggcaagg

SEQ ID NO: 182999 - RNA, 19 nt, Artificial Sequence
  Description of Artificial Sequence: Synthetic oligonucleotide
aucuuaaucaacuguauau

SEQ ID NO: 183000 - RNA, 19 nt, Artificial Sequence
  Description of Artificial Sequence: Synthetic oligonucleotide
aauauccuguaauaaacua

SEQ ID NO: 183001 - RNA, 19 nt, Artificial Sequence
  Description of Artificial Sequence: Synthetic oligonucleotide
acuuuacugagacauaaca

SEQ ID NO: 183002 - RNA, 19 nt, Artificial Sequence
  Description of Artificial Sequence: Synthetic oligonucleotide
aaacuaaguccauaagccu

SEQ ID NO: 183003 - RNA, 19 nt, Artificial Sequence
  Description of Artificial Sequence: Synthetic oligonucleotide
aauuaaguaugacacuuuu

SEQ ID NO: 183004 - RNA, 19 nt, Artificial Sequence
  Description of Artificial Sequence: Synthetic oligonucleotide
acaaagauauguuuaagua

SEQ ID NO: 183005 - RNA, 19 nt, Artificial Sequence
  Description of Artificial Sequence: Synthetic oligonucleotide
uguauauuguaaagacaag

SEQ ID NO: 183006 - RNA, 19 nt, Artificial Sequence
  Description of Artificial Sequence: Synthetic oligonucleotide
agacaaaugaagccaagug

SEQ ID NO: 183007 - RNA, 19 nt, Artificial Sequence
  Description of Artificial Sequence: Synthetic oligonucleotide
aaucaguaaagggugaaga

SEQ ID NO: 183008 - RNA, 19 nt, Artificial Sequence
  Description of Artificial Sequence: Synthetic oligonucleotide
ggcacuauauaacauaagc

SEQ ID NO: 183009 - RNA, 19 nt, Artificial Sequence
  Description of Artificial Sequence: Synthetic oligonucleotide
auauaacauaagcaauuag

SEQ ID NO: 183010 - RNA, 19 nt, Artificial Sequence
  Description of Artificial Sequence: Synthetic oligonucleotide
uaccaaauagaaaguaaga

SEQ ID NO: 183011 - RNA, 19 nt, Artificial Sequence
  Description of Artificial Sequence: Synthetic oligonucleotide
uuagguucuagaaaccauc

SEQ ID NO: 183012 - RNA, 19 nt, Artificial Sequence
  Description of Artificial Sequence: Synthetic oligonucleotide
aacuuucucucucucucuc

SEQ ID NO: 183013 - RNA, 19 nt, Artificial Sequence
  Description of Artificial Sequence: Synthetic oligonucleotide
uccuguaauaaacuagccu

SEQ ID NO: 183014 - RNA, 19 nt, Artificial Sequence
  Description of Artificial Sequence: Synthetic oligonucleotide
uaugcccaucaguagaggg

SEQ ID NO: 183015 - RNA, 19 nt, Artificial Sequence
  Description of Artificial Sequence: Synthetic oligonucleotide
caguaaccuaauaugauac

SEQ ID NO: 183016 - RNA, 19 nt, Artificial Sequence
  Description of Artificial Sequence: Synthetic oligonucleotide
cauccuagggaucaaacac

SEQ ID NO: 183017 - RNA, 19 nt, Artificial Sequence
  Description of Artificial Sequence: Synthetic oligonucleotide
uuauacucccuuauggcaa

SEQ ID NO: 183018 - RNA, 19 nt, Artificial Sequence
  Description of Artificial Sequence: Synthetic oligonucleotide
uggaaguauaacccaaaga

SEQ ID NO: 183019 - RNA, 19 nt, Artificial Sequence
  Description of Artificial Sequence: Synthetic oligonucleotide
ucuacaugucauauauaug

SEQ ID NO: 183020 - RNA, 19 nt, Artificial Sequence
  Description of Artificial Sequence: Synthetic oligonucleotide
aaaaugcguaagaugcugg

SEQ ID NO: 183021 - RNA, 19 nt, Artificial Sequence
  Description of Artificial Sequence: Synthetic oligonucleotide
augcguaagaugcuggaag

SEQ ID NO: 183022 - RNA, 19 nt, Artificial Sequence
  Description of Artificial Sequence: Synthetic oligonucleotide
uuuagcuacaagccacagc

SEQ ID NO: 183023 - RNA, 19 nt, Artificial Sequence
  Description of Artificial Sequence: Synthetic oligonucleotide
uuaaaugguggagugaauc

SEQ ID NO: 183024 - RNA, 19 nt, Artificial Sequence
  Description of Artificial Sequence: Synthetic oligonucleotide
uuaaaaugcguaagaugcu

SEQ ID NO: 183025 - RNA, 19 nt, Artificial Sequence
  Description of Artificial Sequence: Synthetic oligonucleotide
gacaacucggaagagagac

SEQ ID NO: 183026 - RNA, 19 nt, Artificial Sequence
  Description of Artificial Sequence: Synthetic oligonucleotide
gguacuacagaugaggcag

SEQ ID NO: 183027 - RNA, 19 nt, Artificial Sequence
  Description of Artificial Sequence: Synthetic oligonucleotide
aaaugcguaagaugcugga

SEQ ID NO: 183028 - RNA, 19 nt, Artificial Sequence
  Description of Artificial Sequence: Synthetic oligonucleotide
aaaucaguaaagggugaag

SEQ ID NO: 183029 - RNA, 19 nt, Artificial Sequence
  Description of Artificial Sequence: Synthetic oligonucleotide
aacaccaaccacugcuaag

SEQ ID NO: 183030 - RNA, 19 nt, Artificial Sequence
  Description of Artificial Sequence: Synthetic oligonucleotide
agacauuacagaaacuaag

SEQ ID NO: 183031 - RNA, 19 nt, Artificial Sequence
  Description of Artificial Sequence: Synthetic oligonucleotide
uuguaguuaacauggcuaa

SEQ ID NO: 183032 - RNA, 19 nt, Artificial Sequence
  Description of Artificial Sequence: Synthetic oligonucleotide
gacgcuuuuauucuuucca

SEQ ID NO: 183033 - RNA, 19 nt, Artificial Sequence
  Description of Artificial Sequence: Synthetic oligonucleotide
aggaacaggcacuauauaa

SEQ ID NO: 183034 - RNA, 19 nt, Artificial Sequence
  Description of Artificial Sequence: Synthetic oligonucleotide
agauucagggugaugaguc

SEQ ID NO: 183035 - RNA, 19 nt, Artificial Sequence
  Description of Artificial Sequence: Synthetic oligonucleotide
aaacacuaagcaauaggug

SEQ ID NO: 183036 - RNA, 19 nt, Artificial Sequence
  Description of Artificial Sequence: Synthetic oligonucleotide
aguaagauuguuauucugu

SEQ ID NO: 183037 - RNA, 19 nt, Artificial Sequence
  Description of Artificial Sequence: Synthetic oligonucleotide
ucucucucucuccugaaca

SEQ ID NO: 183038 - RNA, 19 nt, Artificial Sequence
  Description of Artificial Sequence: Synthetic oligonucleotide
acgcuuuuauucuuuccac

SEQ ID NO: 183039 - RNA, 19 nt, Artificial Sequence
  Description of Artificial Sequence: Synthetic oligonucleotide
acuuucucucucucucucc

SEQ ID NO: 183040 - RNA, 19 nt, Artificial Sequence
  Description of Artificial Sequence: Synthetic oligonucleotide
cacuaacaggcuuacaaug

SEQ ID NO: 183041 - RNA, 19 nt, Artificial Sequence
  Description of Artificial Sequence: Synthetic oligonucleotide
uuaccuuuugcaagguaac

SEQ ID NO: 183042 - RNA, 19 nt, Artificial Sequence
  Description of Artificial Sequence: Synthetic oligonucleotide
cagacaacaaccuauggaa

SEQ ID NO: 183043 - RNA, 19 nt, Artificial Sequence
  Description of Artificial Sequence: Synthetic oligonucleotide
uacaguaaccuaauaugau

SEQ ID NO: 183044 - RNA, 19 nt, Artificial Sequence
  Description of Artificial Sequence: Synthetic oligonucleotide
ugcugcaccguucuccuag

SEQ ID NO: 183045 - RNA, 19 nt, Artificial Sequence
  Description of Artificial Sequence: Synthetic oligonucleotide
uucccggucuacuauaaga

SEQ ID NO: 183046 - RNA, 19 nt, Artificial Sequence
  Description of Artificial Sequence: Synthetic oligonucleotide
auaaucaguauuuggcuua

SEQ ID NO: 183047 - RNA, 19 nt, Artificial Sequence
  Description of Artificial Sequence: Synthetic oligonucleotide
gaaacacuaagcaauaggu

SEQ ID NO: 183048 - RNA, 19 nt, Artificial Sequence
  Description of Artificial Sequence: Synthetic oligonucleotide
acaacaaccuauggaaauc

SEQ ID NO: 183049 - RNA, 19 nt, Artificial Sequence
  Description of Artificial Sequence: Synthetic oligonucleotide
ucuauuugauuugacguau

SEQ ID NO: 183050 - RNA, 19 nt, Artificial Sequence
  Description of Artificial Sequence: Synthetic oligonucleotide
aacuuuacugagacauaac

SEQ ID NO: 183051 - RNA, 19 nt, Artificial Sequence
  Description of Artificial Sequence: Synthetic oligonucleotide
uaguuaacauggcuaacaa

SEQ ID NO: 183052 - RNA, 19 nt, Artificial Sequence
  Description of Artificial Sequence: Synthetic oligonucleotide
acaguaaccuaauaugaua

SEQ ID NO: 183053 - RNA, 19 nt, Artificial Sequence
  Description of Artificial Sequence: Synthetic oligonucleotide
gacaacuagucuuuccuga

SEQ ID NO: 183054 - RNA, 19 nt, Artificial Sequence
  Description of Artificial Sequence: Synthetic oligonucleotide
aacccacugguauaaaauu

SEQ ID NO: 183055 - RNA, 19 nt, Artificial Sequence
  Description of Artificial Sequence: Synthetic oligonucleotide
cuacuauaagaugaugcag

SEQ ID NO: 183056 - RNA, 19 nt, Artificial Sequence
  Description of Artificial Sequence: Synthetic oligonucleotide
uauuugauuugacguauuu

SEQ ID NO: 183057 - RNA, 19 nt, Artificial Sequence
  Description of Artificial Sequence: Synthetic oligonucleotide
uuuaguuacuagccauggu

SEQ ID NO: 183058 - RNA, 19 nt, Artificial Sequence
  Description of Artificial Sequence: Synthetic oligonucleotide
aucuucgacaacuagucuu

SEQ ID NO: 183059 - RNA, 19 nt, Artificial Sequence
  Description of Artificial Sequence: Synthetic oligonucleotide
uugcguuaaaaggcaaggg

SEQ ID NO: 183060 - RNA, 19 nt, Artificial Sequence
  Description of Artificial Sequence: Synthetic oligonucleotide
ucuugacauuuuaauuuac

SEQ ID NO: 183061 - RNA, 19 nt, Artificial Sequence
  Description of Artificial Sequence: Synthetic oligonucleotide
ugguuaggaaguugcaaga

SEQ ID NO: 183062 - RNA, 19 nt, Artificial Sequence
  Description of Artificial Sequence: Synthetic oligonucleotide
uauucuuucgauggaggcu

SEQ ID NO: 183063 - RNA, 19 nt, Artificial Sequence
  Description of Artificial Sequence: Synthetic oligonucleotide
aaaagacgcuuuuauucuu

SEQ ID NO: 183064 - RNA, 19 nt, Artificial Sequence
  Description of Artificial Sequence: Synthetic oligonucleotide
ucuucgacaacuagucuuu

SEQ ID NO: 183065 - RNA, 19 nt, Artificial Sequence
  Description of Artificial Sequence: Synthetic oligonucleotide
uuauuaacccacugguaua

SEQ ID NO: 183066 - RNA, 19 nt, Artificial Sequence
  Description of Artificial Sequence: Synthetic oligonucleotide
gguuuuaaaugguggagug

SEQ ID NO: 183067 - RNA, 19 nt, Artificial Sequence
  Description of Artificial Sequence: Synthetic oligonucleotide
acuagccuuaauaaaauau

SEQ ID NO: 183068 - RNA, 19 nt, Artificial Sequence
  Description of Artificial Sequence: Synthetic oligonucleotide
agaggauaaacacuacauu

SEQ ID NO: 183069 - RNA, 19 nt, Artificial Sequence
  Description of Artificial Sequence: Synthetic oligonucleotide
ugguuaccggguaagcuga

SEQ ID NO: 183070 - RNA, 19 nt, Artificial Sequence
  Description of Artificial Sequence: Synthetic oligonucleotide
uugguaugcccaucaguag

SEQ ID NO: 183071 - RNA, 19 nt, Artificial Sequence
  Description of Artificial Sequence: Synthetic oligonucleotide
ugcguaagaugcuggaagu

SEQ ID NO: 183072 - RNA, 19 nt, Artificial Sequence
  Description of Artificial Sequence: Synthetic oligonucleotide
uucucucucucucuccuga

SEQ ID NO: 183073 - RNA, 19 nt, Artificial Sequence
  Description of Artificial Sequence: Synthetic oligonucleotide
gaaaauuaaguaugacacu

SEQ ID NO: 183074 - RNA, 19 nt, Artificial Sequence
  Description of Artificial Sequence: Synthetic oligonucleotide
uauuaacccacugguauaa

SEQ ID NO: 183075 - RNA, 19 nt, Artificial Sequence
  Description of Artificial Sequence: Synthetic oligonucleotide
uguaauaaacuagccuuaa

SEQ ID NO: 183076 - RNA, 19 nt, Artificial Sequence
  Description of Artificial Sequence: Synthetic oligonucleotide
uucgacaacuagucuuucc

SEQ ID NO: 183077 - RNA, 19 nt, Artificial Sequence
  Description of Artificial Sequence: Synthetic oligonucleotide
ggacauagacaaaugaagc

SEQ ID NO: 183078 - RNA, 19 nt, Artificial Sequence
  Description of Artificial Sequence: Synthetic oligonucleotide
aacuaaguccauaagccua

SEQ ID NO: 183079 - RNA, 19 nt, Artificial Sequence
  Description of Artificial Sequence: Synthetic oligonucleotide
aguucuaccuuagugguaa

SEQ ID NO: 183080 - RNA, 19 nt, Artificial Sequence
  Description of Artificial Sequence: Synthetic oligonucleotide
acuaaguccauaagccuag

SEQ ID NO: 183081 - RNA, 19 nt, Artificial Sequence
  Description of Artificial Sequence: Synthetic oligonucleotide
ccggaaauagagaaggggc

SEQ ID NO: 183082 - RNA, 19 nt, Artificial Sequence
  Description of Artificial Sequence: Synthetic oligonucleotide
uaaguccauaagccuagga

SEQ ID NO: 183083 - RNA, 19 nt, Artificial Sequence
  Description of Artificial Sequence: Synthetic oligonucleotide
ucccggucuacuauaagau

SEQ ID NO: 183084 - RNA, 19 nt, Artificial Sequence
  Description of Artificial Sequence: Synthetic oligonucleotide
auccuguaauaaacuagcc

SEQ ID NO: 183085 - RNA, 19 nt, Artificial Sequence
  Description of Artificial Sequence: Synthetic oligonucleotide
gauaaacacuacauugcuc

SEQ ID NO: 183086 - RNA, 19 nt, Artificial Sequence
  Description of Artificial Sequence: Synthetic oligonucleotide
uguaaacaaugagucaaaa

SEQ ID NO: 183087 - RNA, 19 nt, Artificial Sequence
  Description of Artificial Sequence: Synthetic oligonucleotide
acuacauugcucacaggag

SEQ ID NO: 183088 - RNA, 19 nt, Artificial Sequence
  Description of Artificial Sequence: Synthetic oligonucleotide
ggauaguuuaaagauuagc

SEQ ID NO: 183089 - RNA, 19 nt, Artificial Sequence
  Description of Artificial Sequence: Synthetic oligonucleotide
cauuugugagcauguuagc

SEQ ID NO: 183090 - RNA, 19 nt, Artificial Sequence
  Description of Artificial Sequence: Synthetic oligonucleotide
auacggaggaucucagaca

SEQ ID NO: 183091 - RNA, 19 nt, Artificial Sequence
  Description of Artificial Sequence: Synthetic oligonucleotide
cauuuacugucucuaacca

SEQ ID NO: 183092 - RNA, 19 nt, Artificial Sequence
  Description of Artificial Sequence: Synthetic oligonucleotide
acuaacaggcuuacaauga

SEQ ID NO: 183093 - RNA, 19 nt, Artificial Sequence
  Description of Artificial Sequence: Synthetic oligonucleotide
uguguguaggucagacaac

SEQ ID NO: 183094 - RNA, 19 nt, Artificial Sequence
  Description of Artificial Sequence: Synthetic oligonucleotide
auagaaaguaagauuguua

SEQ ID NO: 183095 - RNA, 19 nt, Artificial Sequence
  Description of Artificial Sequence: Synthetic oligonucleotide
aacaaccuauggaaaucag

SEQ ID NO: 183096 - RNA, 19 nt, Artificial Sequence
  Description of Artificial Sequence: Synthetic oligonucleotide
gaugaacggacaaaauuaa

SEQ ID NO: 183097 - RNA, 19 nt, Artificial Sequence
  Description of Artificial Sequence: Synthetic oligonucleotide
agcucauagcaccaacaca

SEQ ID NO: 183098 - RNA, 19 nt, Artificial Sequence
  Description of Artificial Sequence: Synthetic oligonucleotide
aguuaacauggcuaacaau

SEQ ID NO: 183099 - RNA, 19 nt, Artificial Sequence
  Description of Artificial Sequence: Synthetic oligonucleotide
guuugcguuaaaaggcaag

SEQ ID NO: 183100 - RNA, 19 nt, Artificial Sequence
  Description of Artificial Sequence: Synthetic oligonucleotide
auaggugagaacagguugu

SEQ ID NO: 183101 - RNA, 19 nt, Artificial Sequence
  Description of Artificial Sequence: Synthetic oligonucleotide
accggguaagcugaaggcg

SEQ ID NO: 183102 - RNA, 19 nt, Artificial Sequence
  Description of Artificial Sequence: Synthetic oligonucleotide
aaauuaaguaugacacuuu

SEQ ID NO: 183103 - RNA, 19 nt, Artificial Sequence
  Description of Artificial Sequence: Synthetic oligonucleotide
auucuuucgauggaggcuu

SEQ ID NO: 183104 - RNA, 19 nt, Artificial Sequence
  Description of Artificial Sequence: Synthetic oligonucleotide
ugcaccguucuccuagccu

SEQ ID NO: 183105 - RNA, 19 nt, Artificial Sequence
  Description of Artificial Sequence: Synthetic oligonucleotide
aaugcguaagaugcuggaa

SEQ ID NO: 183106 - RNA, 19 nt, Artificial Sequence
  Description of Artificial Sequence: Synthetic oligonucleotide
agagaggcaggucauucaa

SEQ ID NO: 183107 - RNA, 19 nt, Artificial Sequence
  Description of Artificial Sequence: Synthetic oligonucleotide
aguauaacccaaagaauua

SEQ ID NO: 183108 - RNA, 19 nt, Artificial Sequence
  Description of Artificial Sequence: Synthetic oligonucleotide
cuauguuugcuaccaauaa

SEQ ID NO: 183109 - RNA, 19 nt, Artificial Sequence
  Description of Artificial Sequence: Synthetic oligonucleotide
acucggaagagagacuuca

SEQ ID NO: 183110 - RNA, 19 nt, Artificial Sequence
  Description of Artificial Sequence: Synthetic oligonucleotide
agaugaacuguggggauca

SEQ ID NO: 183111 - RNA, 19 nt, Artificial Sequence
  Description of Artificial Sequence: Synthetic oligonucleotide
aggaaguugcaagacauuu

SEQ ID NO: 183112 - RNA, 19 nt, Artificial Sequence
  Description of Artificial Sequence: Synthetic oligonucleotide
gagacauuacagaaacuaa

SEQ ID NO: 183113 - RNA, 19 nt, Artificial Sequence
  Description of Artificial Sequence: Synthetic oligonucleotide
ggaacaggcacuauauaac

SEQ ID NO: 183114 - RNA, 19 nt, Artificial Sequence
  Description of Artificial Sequence: Synthetic oligonucleotide
aacuccccugccacuuucc

SEQ ID NO: 183115 - RNA, 19 nt, Artificial Sequence
  Description of Artificial Sequence: Synthetic oligonucleotide
uacucccuuauggcaaagg

SEQ ID NO: 183116 - RNA, 19 nt, Artificial Sequence
  Description of Artificial Sequence: Synthetic oligonucleotide
uguaguuaacauggcuaac

SEQ ID NO: 183117 - RNA, 19 nt, Artificial Sequence
  Description of Artificial Sequence: Synthetic oligonucleotide
ccuuuugcaagguaacaac

SEQ ID NO: 183118 - RNA, 19 nt, Artificial Sequence
  Description of Artificial Sequence: Synthetic oligonucleotide
acaaccuauggaaaucagu

SEQ ID NO: 183119 - RNA, 19 nt, Artificial Sequence
  Description of Artificial Sequence: Synthetic oligonucleotide
auuuagcuacaagccacag

SEQ ID NO: 183120 - RNA, 19 nt, Artificial Sequence
  Description of Artificial Sequence: Synthetic oligonucleotide
gugguacuacagaugaggc

SEQ ID NO: 183121 - RNA, 19 nt, Artificial Sequence
  Description of Artificial Sequence: Synthetic oligonucleotide
uaccuuuugcaagguaaca

SEQ ID NO: 183122 - RNA, 19 nt, Artificial Sequence
  Description of Artificial Sequence: Synthetic oligonucleotide
uacuagccaugguuaccgg

SEQ ID NO: 183123 - RNA, 19 nt, Artificial Sequence
  Description of Artificial Sequence: Synthetic oligonucleotide
auaucuuaaucaacuguau

SEQ ID NO: 183124 - RNA, 19 nt, Artificial Sequence
  Description of Artificial Sequence: Synthetic oligonucleotide
caggcacuauauaacauaa

SEQ ID NO: 183125 - RNA, 19 nt, Artificial Sequence
  Description of Artificial Sequence: Synthetic oligonucleotide
accuuuugcaagguaacaa

SEQ ID NO: 183126 - RNA, 19 nt, Artificial Sequence
  Description of Artificial Sequence: Synthetic oligonucleotide
uuucucucucucucuccug

SEQ ID NO: 183127 - RNA, 19 nt, Artificial Sequence
  Description of Artificial Sequence: Synthetic oligonucleotide
gccggaaauagagaagggg

SEQ ID NO: 183128 - RNA, 19 nt, Artificial Sequence
  Description of Artificial Sequence: Synthetic oligonucleotide
guuuuaaaugguggaguga

SEQ ID NO: 183129 - RNA, 19 nt, Artificial Sequence
  Description of Artificial Sequence: Synthetic oligonucleotide
aacucggaagagagacuuc

SEQ ID NO: 183130 - RNA, 19 nt, Artificial Sequence
  Description of Artificial Sequence: Synthetic oligonucleotide
ugaagugauucuugacauu

SEQ ID NO: 183131 - RNA, 19 nt, Artificial Sequence
  Description of Artificial Sequence: Synthetic oligonucleotide
uaggugagaacagguugug

SEQ ID NO: 183132 - RNA, 19 nt, Artificial Sequence
  Description of Artificial Sequence: Synthetic oligonucleotide
auccuagggaucaaacaca

SEQ ID NO: 183133 - RNA, 19 nt, Artificial Sequence
  Description of Artificial Sequence: Synthetic oligonucleotide
ggccagaugggugacuugg

SEQ ID NO: 183134 - RNA, 19 nt, Artificial Sequence
  Description of Artificial Sequence: Synthetic oligonucleotide
augggugacuuggagaaau

SEQ ID NO: 183135 - RNA, 19 nt, Artificial Sequence
  Description of Artificial Sequence: Synthetic oligonucleotide
ggugcuugccgucuugcug

SEQ ID NO: 183136 - RNA, 19 nt, Artificial Sequence
  Description of Artificial Sequence: Synthetic oligonucleotide
ggauaaacacuacauugcu

SEQ ID NO: 183137 - RNA, 19 nt, Artificial Sequence
  Description of Artificial Sequence: Synthetic oligonucleotide
acacuacauugcucacagg

SEQ ID NO: 183138 - RNA, 19 nt, Artificial Sequence
  Description of Artificial Sequence: Synthetic oligonucleotide
ggagaaauauugaaugucu

SEQ ID NO: 183139 - RNA, 19 nt, Artificial Sequence
  Description of Artificial Sequence: Synthetic oligonucleotide
ggacaaaauuaagaugaac

SEQ ID NO: 183140 - RNA, 19 nt, Artificial Sequence
  Description of Artificial Sequence: Synthetic oligonucleotide
ccggucuacuauaagauga

SEQ ID NO: 183141 - RNA, 19 nt, Artificial Sequence
  Description of Artificial Sequence: Synthetic oligonucleotide
cuaaguccauaagccuagg

SEQ ID NO: 183142 - RNA, 19 nt, Artificial Sequence
  Description of Artificial Sequence: Synthetic oligonucleotide
guaugcccaucaguagagg

SEQ ID NO: 183143 - RNA, 19 nt, Artificial Sequence
  Description of Artificial Sequence: Synthetic oligonucleotide
cucucucucucuccugaac

SEQ ID NO: 183144 - RNA, 19 nt, Artificial Sequence
  Description of Artificial Sequence: Synthetic oligonucleotide
cauugcugcagacaguuau

SEQ ID NO: 183145 - RNA, 19 nt, Artificial Sequence
  Description of Artificial Sequence: Synthetic oligonucleotide
gguuaggaaguugcaagac

SEQ ID NO: 183146 - RNA, 19 nt, Artificial Sequence
  Description of Artificial Sequence: Synthetic oligonucleotide
gggaauacggaggaucuca

SEQ ID NO: 183147 - RNA, 19 nt, Artificial Sequence
  Description of Artificial Sequence: Synthetic oligonucleotide
gucauucaaccaaggcacc

SEQ ID NO: 183148 - RNA, 19 nt, Artificial Sequence
  Description of Artificial Sequence: Synthetic oligonucleotide
aggcacuauauaacauaag

SEQ ID NO: 183149 - RNA, 19 nt, Artificial Sequence
  Description of Artificial Sequence: Synthetic oligonucleotide
guuaccggguaagcugaag

SEQ ID NO: 183150 - RNA, 19 nt, Artificial Sequence
  Description of Artificial Sequence: Synthetic oligonucleotide
gggccagccggaaauagag

SEQ ID NO: 183151 - RNA, 19 nt, Artificial Sequence
  Description of Artificial Sequence: Synthetic oligonucleotide
agacaacaaccuauggaaa

SEQ ID NO: 183152 - RNA, 19 nt, Artificial Sequence
  Description of Artificial Sequence: Synthetic oligonucleotide
agccggaaauagagaaggg

SEQ ID NO: 183153 - RNA, 19 nt, Artificial Sequence
  Description of Artificial Sequence: Synthetic oligonucleotide
agcauguuagcaagugaaa

SEQ ID NO: 183154 - RNA, 19 nt, Artificial Sequence
  Description of Artificial Sequence: Synthetic oligonucleotide
aagugauucuugacauuuu

SEQ ID NO: 183155 - RNA, 19 nt, Artificial Sequence
  Description of Artificial Sequence: Synthetic oligonucleotide
ggaauacggaggaucucag

SEQ ID NO: 183156 - RNA, 19 nt, Artificial Sequence
  Description of Artificial Sequence: Synthetic oligonucleotide
cuugcuggccccaguuuga

SEQ ID NO: 183157 - RNA, 19 nt, Artificial Sequence
  Description of Artificial Sequence: Synthetic oligonucleotide
ucucucucucucuccugaa

SEQ ID NO: 183158 - RNA, 19 nt, Artificial Sequence
  Description of Artificial Sequence: Synthetic oligonucleotide
cagagaggcaggucauuca

SEQ ID NO: 183159 - RNA, 19 nt, Artificial Sequence
  Description of Artificial Sequence: Synthetic oligonucleotide
ugcuaccaauaaugugcac

SEQ ID NO: 183160 - RNA, 19 nt, Artificial Sequence
  Description of Artificial Sequence: Synthetic oligonucleotide
gccagccggaaauagagaa

SEQ ID NO: 183161 - RNA, 19 nt, Artificial Sequence
  Description of Artificial Sequence: Synthetic oligonucleotide
acccacugguauaaaauuu

SEQ ID NO: 183162 - RNA, 19 nt, Artificial Sequence
  Description of Artificial Sequence: Synthetic oligonucleotide
gcaagggguugcuucccgg

SEQ ID NO: 183163 - RNA, 19 nt, Artificial Sequence
  Description of Artificial Sequence: Synthetic oligonucleotide
caauaaugugcacaugauu

SEQ ID NO: 183164 - RNA, 19 nt, Artificial Sequence
  Description of Artificial Sequence: Synthetic oligonucleotide
uucuuucgauggaggcuuc

SEQ ID NO: 183165 - RNA, 19 nt, Artificial Sequence
  Description of Artificial Sequence: Synthetic oligonucleotide
guguuaaaaugcguaagau

SEQ ID NO: 183166 - RNA, 19 nt, Artificial Sequence
  Description of Artificial Sequence: Synthetic oligonucleotide
cuuucucucucucucuccu

SEQ ID NO: 183167 - RNA, 19 nt, Artificial Sequence
  Description of Artificial Sequence: Synthetic oligonucleotide
caccugggaauacggagga

SEQ ID NO: 183168 - RNA, 19 nt, Artificial Sequence
  Description of Artificial Sequence: Synthetic oligonucleotide
acaacucggaagagagacu

SEQ ID NO: 183169 - RNA, 19 nt, Artificial Sequence
  Description of Artificial Sequence: Synthetic oligonucleotide
agcaauuaggugagacaaa

SEQ ID NO: 183170 - RNA, 19 nt, Artificial Sequence
  Description of Artificial Sequence: Synthetic oligonucleotide
ccauaagccuaggaacagg

SEQ ID NO: 183171 - RNA, 19 nt, Artificial Sequence
  Description of Artificial Sequence: Synthetic oligonucleotide
acggaggaucucagacagc

SEQ ID NO: 183172 - RNA, 19 nt, Artificial Sequence
  Description of Artificial Sequence: Synthetic oligonucleotide
accuuagugguaagcuggu

SEQ ID NO: 183173 - RNA, 19 nt, Artificial Sequence
  Description of Artificial Sequence: Synthetic oligonucleotide
auacucccuuauggcaaag

SEQ ID NO: 183174 - RNA, 19 nt, Artificial Sequence
  Description of Artificial Sequence: Synthetic oligonucleotide
auuaacccacugguauaaa

SEQ ID NO: 183175 - RNA, 19 nt, Artificial Sequence
  Description of Artificial Sequence: Synthetic oligonucleotide
cugccacuuuccuuauaca

SEQ ID NO: 183176 - RNA, 19 nt, Artificial Sequence
  Description of Artificial Sequence: Synthetic oligonucleotide
cccggucuacuauaagaug

SEQ ID NO: 183177 - RNA, 19 nt, Artificial Sequence
  Description of Artificial Sequence: Synthetic oligonucleotide
uugcuggccccaguuugac

SEQ ID NO: 183178 - RNA, 19 nt, Artificial Sequence
  Description of Artificial Sequence: Synthetic oligonucleotide
caugguuaccggguaagcu

SEQ ID NO: 183179 - RNA, 19 nt, Artificial Sequence
  Description of Artificial Sequence: Synthetic oligonucleotide
cuucgacaacuagucuuuc

SEQ ID NO: 183180 - RNA, 19 nt, Artificial Sequence
  Description of Artificial Sequence: Synthetic oligonucleotide
caacuuucucucucucucu

SEQ ID NO: 183181 - RNA, 19 nt, Artificial Sequence
  Description of Artificial Sequence: Synthetic oligonucleotide
guacuacagaugaggcaga

SEQ ID NO: 183182 - RNA, 19 nt, Artificial Sequence
  Description of Artificial Sequence: Synthetic oligonucleotide
cgacaacuagucuuuccug

SEQ ID NO: 183183 - RNA, 19 nt, Artificial Sequence
  Description of Artificial Sequence: Synthetic oligonucleotide
uggccccaguuugacacau

SEQ ID NO: 183184 - RNA, 19 nt, Artificial Sequence
  Description of Artificial Sequence: Synthetic oligonucleotide
agggccagccggaaauaga

SEQ ID NO: 183185 - RNA, 19 nt, Artificial Sequence
  Description of Artificial Sequence: Synthetic oligonucleotide
ucccacuaacaggcuuaca

SEQ ID NO: 183186 - RNA, 19 nt, Artificial Sequence
  Description of Artificial Sequence: Synthetic oligonucleotide
cauaagcaauuaggugaga

SEQ ID NO: 183187 - RNA, 19 nt, Artificial Sequence
  Description of Artificial Sequence: Synthetic oligonucleotide
caucuucgacaacuagucu

SEQ ID NO: 183188 - RNA, 19 nt, Artificial Sequence
  Description of Artificial Sequence: Synthetic oligonucleotide
caguucuaccuuaguggua

SEQ ID NO: 183189 - RNA, 19 nt, Artificial Sequence
  Description of Artificial Sequence: Synthetic oligonucleotide
cuauuugauuugacguauu

SEQ ID NO: 183190 - RNA, 19 nt, Artificial Sequence
  Description of Artificial Sequence: Synthetic oligonucleotide
gccccaguuugacacaucu

SEQ ID NO: 183191 - RNA, 19 nt, Artificial Sequence
  Description of Artificial Sequence: Synthetic oligonucleotide
cugacaguucuaccuuagu

SEQ ID NO: 183192 - RNA, 19 nt, Artificial Sequence
  Description of Artificial Sequence: Synthetic oligonucleotide
ggugacuuggagaaauauu

SEQ ID NO: 183193 - RNA, 19 nt, Artificial Sequence
  Description of Artificial Sequence: Synthetic oligonucleotide
gcagacaguuaucuggcuu

SEQ ID NO: 183194 - RNA, 19 nt, Artificial Sequence
  Description of Artificial Sequence: Synthetic oligonucleotide
cccaucaguagagggucac

SEQ ID NO: 183195 - RNA, 19 nt, Artificial Sequence
  Description of Artificial Sequence: Synthetic oligonucleotide
ggaucugauuucacuuuua

SEQ ID NO: 183196 - RNA, 19 nt, Artificial Sequence
  Description of Artificial Sequence: Synthetic oligonucleotide
cccacugguauaaaauuuu

SEQ ID NO: 183197 - RNA, 19 nt, Artificial Sequence
  Description of Artificial Sequence: Synthetic oligonucleotide
ggacaacucggaagagaga

SEQ ID NO: 183198 - RNA, 19 nt, Artificial Sequence
  Description of Artificial Sequence: Synthetic oligonucleotide
acauugcugcagacaguua

SEQ ID NO: 183199 - RNA, 19 nt, Artificial Sequence
  Description of Artificial Sequence: Synthetic oligonucleotide
ccggguaagcugaaggcgu

SEQ ID NO: 183200 - RNA, 19 nt, Artificial Sequence
  Description of Artificial Sequence: Synthetic oligonucleotide
gguugcuucccggucuacu

SEQ ID NO: 183201 - RNA, 19 nt, Artificial Sequence
  Description of Artificial Sequence: Synthetic oligonucleotide
gcguaagaugcuggaagua

SEQ ID NO: 183202 - RNA, 19 nt, Artificial Sequence
  Description of Artificial Sequence: Synthetic oligonucleotide
ggccagccggaaauagaga

SEQ ID NO: 183203 - RNA, 19 nt, Artificial Sequence
  Description of Artificial Sequence: Synthetic oligonucleotide
gggguugcuucccggucua

SEQ ID NO: 183204 - RNA, 19 nt, Artificial Sequence
  Description of Artificial Sequence: Synthetic oligonucleotide
gcuacaagccacagcugau

SEQ ID NO: 183205 - RNA, 19 nt, Artificial Sequence
  Description of Artificial Sequence: Synthetic oligonucleotide
gguuaccggguaagcugaa

SEQ ID NO: 183206 - RNA, 19 nt, Artificial Sequence
  Description of Artificial Sequence: Synthetic oligonucleotide
ggguugcuucccggucuac

SEQ ID NO: 183207 - RNA, 19 nt, Artificial Sequence
  Description of Artificial Sequence: Synthetic oligonucleotide
ggccccaguuugacacauc

SEQ ID NO: 183208 - RNA, 19 nt, Artificial Sequence
  Description of Artificial Sequence: Synthetic oligonucleotide
uaugcuaugauaaauaacc

SEQ ID NO: 183209 - RNA, 19 nt, Artificial Sequence
  Description of Artificial Sequence: Synthetic oligonucleotide
uguucgaucagccacacag

SEQ ID NO: 183210 - RNA, 19 nt, Artificial Sequence
  Description of Artificial Sequence: Synthetic oligonucleotide
uguuguaaugcacaguggg

SEQ ID NO: 183211 - RNA, 19 nt, Artificial Sequence
  Description of Artificial Sequence: Synthetic oligonucleotide
uggucaauaaucuaugaag

SEQ ID NO: 183212 - RNA, 19 nt, Artificial Sequence
  Description of Artificial Sequence: Synthetic oligonucleotide
gaagcaaccaguuacaguc

SEQ ID NO: 183213 - RNA, 19 nt, Artificial Sequence
  Description of Artificial Sequence: Synthetic oligonucleotide
guagacgugaucuuucucg

SEQ ID NO: 183214 - RNA, 19 nt, Artificial Sequence
  Description of Artificial Sequence: Synthetic oligonucleotide
ucuuauucgguguauagac

SEQ ID NO: 183215 - RNA, 19 nt, Artificial Sequence
  Description of Artificial Sequence: Synthetic oligonucleotide
uuauucgguguauagaccc

SEQ ID NO: 183216 - RNA, 19 nt, Artificial Sequence
  Description of Artificial Sequence: Synthetic oligonucleotide
aaggcaugcaguauuaaac

SEQ ID NO: 183217 - RNA, 19 nt, Artificial Sequence
  Description of Artificial Sequence: Synthetic oligonucleotide
agcauaaucaagacaaccc

SEQ ID NO: 183218 - RNA, 19 nt, Artificial Sequence
  Description of Artificial Sequence: Synthetic oligonucleotide
aggcaugcaguauuaaacc

SEQ ID NO: 183219 - RNA, 19 nt, Artificial Sequence
  Description of Artificial Sequence: Synthetic oligonucleotide
gguuuuaucaguaggaacg

SEQ ID NO: 183220 - RNA, 19 nt, Artificial Sequence
  Description of Artificial Sequence: Synthetic oligonucleotide
uuuucuagcucgaccacgg

SEQ ID NO: 183221 - RNA, 19 nt, Artificial Sequence
  Description of Artificial Sequence: Synthetic oligonucleotide
aguaaccuaaacaaggcac

SEQ ID NO: 183222 - RNA, 19 nt, Artificial Sequence
  Description of Artificial Sequence: Synthetic oligonucleotide
uaugaagugacucauuguu

SEQ ID NO: 183223 - RNA, 19 nt, Artificial Sequence
  Description of Artificial Sequence: Synthetic oligonucleotide
ugucaaaucucagagaccu

SEQ ID NO: 183224 - RNA, 19 nt, Artificial Sequence
  Description of Artificial Sequence: Synthetic oligonucleotide
uguugaugagaauaccucc

SEQ ID NO: 183225 - RNA, 19 nt, Artificial Sequence
  Description of Artificial Sequence: Synthetic oligonucleotide
uguuguuguccacauauga

SEQ ID NO: 183226 - RNA, 19 nt, Artificial Sequence
  Description of Artificial Sequence: Synthetic oligonucleotide
aacucuaaguccuggcaag

SEQ ID NO: 183227 - RNA, 19 nt, Artificial Sequence
  Description of Artificial Sequence: Synthetic oligonucleotide
augcaugcaacuugagugc

SEQ ID NO: 183228 - RNA, 19 nt, Artificial Sequence
  Description of Artificial Sequence: Synthetic oligonucleotide
aauggcaugccauaauuuu

SEQ ID NO: 183229 - RNA, 19 nt, Artificial Sequence
  Description of Artificial Sequence: Synthetic oligonucleotide
aagcuaaccagcauauaac

SEQ ID NO: 183230 - RNA, 19 nt, Artificial Sequence
  Description of Artificial Sequence: Synthetic oligonucleotide
aauuagagcaaugaaugaa

SEQ ID NO: 183231 - RNA, 19 nt, Artificial Sequence
  Description of Artificial Sequence: Synthetic oligonucleotide
uguuggucaauaaucuaug

SEQ ID NO: 183232 - RNA, 19 nt, Artificial Sequence
  Description of Artificial Sequence: Synthetic oligonucleotide
uuuaucaguaggaacggau

SEQ ID NO: 183233 - RNA, 19 nt, Artificial Sequence
  Description of Artificial Sequence: Synthetic oligonucleotide
auaccuaccauguucaaaa

SEQ ID NO: 183234 - RNA, 19 nt, Artificial Sequence
  Description of Artificial Sequence: Synthetic oligonucleotide
agguuuuaucaguaggaac

SEQ ID NO: 183235 - RNA, 19 nt, Artificial Sequence
  Description of Artificial Sequence: Synthetic oligonucleotide
gacgugaucuuucucgggg

SEQ ID NO: 183236 - RNA, 19 nt, Artificial Sequence
  Description of Artificial Sequence: Synthetic oligonucleotide
acuacgagguccaauaggg

SEQ ID NO: 183237 - RNA, 19 nt, Artificial Sequence
  Description of Artificial Sequence: Synthetic oligonucleotide
accauauauaccugugggg

SEQ ID NO: 183238 - RNA, 19 nt, Artificial Sequence
  Description of Artificial Sequence: Synthetic oligonucleotide
auauauggucugcagugcg

SEQ ID NO: 183239 - RNA, 19 nt, Artificial Sequence
  Description of Artificial Sequence: Synthetic oligonucleotide
gagucauggaucgagauac

SEQ ID NO: 183240 - RNA, 19 nt, Artificial Sequence
  Description of Artificial Sequence: Synthetic oligonucleotide
aaccacauaagcugguccu

SEQ ID NO: 183241 - RNA, 19 nt, Artificial Sequence
  Description of Artificial Sequence: Synthetic oligonucleotide
ucccaauucaauuagcaua

SEQ ID NO: 183242 - RNA, 19 nt, Artificial Sequence
  Description of Artificial Sequence: Synthetic oligonucleotide
ugcuaugauaaauaaccac

SEQ ID NO: 183243 - RNA, 19 nt, Artificial Sequence
  Description of Artificial Sequence: Synthetic oligonucleotide
caauccuuuauugagacuc

SEQ ID NO: 183244 - RNA, 19 nt, Artificial Sequence
  Description of Artificial Sequence: Synthetic oligonucleotide
uccuucacggaucucaaga

SEQ ID NO: 183245 - RNA, 19 nt, Artificial Sequence
  Description of Artificial Sequence: Synthetic oligonucleotide
caccauauauaccuguggg

SEQ ID NO: 183246 - RNA, 19 nt, Artificial Sequence
  Description of Artificial Sequence: Synthetic oligonucleotide
ucaagagucauggaucgag

SEQ ID NO: 183247 - RNA, 19 nt, Artificial Sequence
  Description of Artificial Sequence: Synthetic oligonucleotide
ugucccucacaucaaauac

SEQ ID NO: 183248 - RNA, 19 nt, Artificial Sequence
  Description of Artificial Sequence: Synthetic oligonucleotide
uagagcaaugaaugaaugc

SEQ ID NO: 183249 - RNA, 19 nt, Artificial Sequence
  Description of Artificial Sequence: Synthetic oligonucleotide
agagcuuuguaaggcaugc

SEQ ID NO: 183250 - RNA, 19 nt, Artificial Sequence
  Description of Artificial Sequence: Synthetic oligonucleotide
aaacucuaaguccuggcaa

SEQ ID NO: 183251 - RNA, 19 nt, Artificial Sequence
  Description of Artificial Sequence: Synthetic oligonucleotide
cuucccaauuauuaagggc

SEQ ID NO: 183252 - RNA, 19 nt, Artificial Sequence
  Description of Artificial Sequence: Synthetic oligonucleotide
auauauaccuguggggugg

SEQ ID NO: 183253 - RNA, 19 nt, Artificial Sequence
  Description of Artificial Sequence: Synthetic oligonucleotide
uugacuguugaugagaaua

SEQ ID NO: 183254 - RNA, 19 nt, Artificial Sequence
  Description of Artificial Sequence: Synthetic oligonucleotide
uccaauagggaauuugcuc

SEQ ID NO: 183255 - RNA, 19 nt, Artificial Sequence
  Description of Artificial Sequence: Synthetic oligonucleotide
auuauuaagggcccacccu

SEQ ID NO: 183256 - RNA, 19 nt, Artificial Sequence
  Description of Artificial Sequence: Synthetic oligonucleotide
uuauuaagggcccacccua

SEQ ID NO: 183257 - RNA, 19 nt, Artificial Sequence
  Description of Artificial Sequence: Synthetic oligonucleotide
uagacgugaucuuucucgg

SEQ ID NO: 183258 - RNA, 19 nt, Artificial Sequence
  Description of Artificial Sequence: Synthetic oligonucleotide
aaguagguccgcccauagc

SEQ ID NO: 183259 - RNA, 19 nt, Artificial Sequence
  Description of Artificial Sequence: Synthetic oligonucleotide
aacaccgaugagccugccc

SEQ ID NO: 183260 - RNA, 19 nt, Artificial Sequence
  Description of Artificial Sequence: Synthetic oligonucleotide
gucaauaaucuaugaagug

SEQ ID NO: 183261 - RNA, 19 nt, Artificial Sequence
  Description of Artificial Sequence: Synthetic oligonucleotide
ucagcgaaucuuaacuugu

SEQ ID NO: 183262 - RNA, 19 nt, Artificial Sequence
  Description of Artificial Sequence: Synthetic oligonucleotide
auaaucaagacaaccccuc

SEQ ID NO: 183263 - RNA, 19 nt, Artificial Sequence
  Description of Artificial Sequence: Synthetic oligonucleotide
uuguaaugcacagugggga

SEQ ID NO: 183264 - RNA, 19 nt, Artificial Sequence
  Description of Artificial Sequence: Synthetic oligonucleotide
aucucaagagucauggauc

SEQ ID NO: 183265 - RNA, 19 nt, Artificial Sequence
  Description of Artificial Sequence: Synthetic oligonucleotide
guaggaacggauagcaggg

SEQ ID NO: 183266 - RNA, 19 nt, Artificial Sequence
  Description of Artificial Sequence: Synthetic oligonucleotide
cuuuauaaucuucccuggc

SEQ ID NO: 183267 - RNA, 19 nt, Artificial Sequence
  Description of Artificial Sequence: Synthetic oligonucleotide
aucagcgaaucuuaacuug

SEQ ID NO: 183268 - RNA, 19 nt, Artificial Sequence
  Description of Artificial Sequence: Synthetic oligonucleotide
uauauggucugcagugcgc

SEQ ID NO: 183269 - RNA, 19 nt, Artificial Sequence
  Description of Artificial Sequence: Synthetic oligonucleotide
auaugagaggguguguuuc

SEQ ID NO: 183270 - RNA, 19 nt, Artificial Sequence
  Description of Artificial Sequence: Synthetic oligonucleotide
uaacuugucaagauucaua

SEQ ID NO: 183271 - RNA, 19 nt, Artificial Sequence
  Description of Artificial Sequence: Synthetic oligonucleotide
caugcaguauuaaacccug

SEQ ID NO: 183272 - RNA, 19 nt, Artificial Sequence
  Description of Artificial Sequence: Synthetic oligonucleotide
caguguuccucaaauggcc

SEQ ID NO: 183273 - RNA, 19 nt, Artificial Sequence
  Description of Artificial Sequence: Synthetic oligonucleotide
gaugcuagauuucgucaag

SEQ ID NO: 183274 - RNA, 19 nt, Artificial Sequence
  Description of Artificial Sequence: Synthetic oligonucleotide
caauuagcauaaucaagac

SEQ ID NO: 183275 - RNA, 19 nt, Artificial Sequence
  Description of Artificial Sequence: Synthetic oligonucleotide
ugcaguuacgcaguccagg

SEQ ID NO: 183276 - RNA, 19 nt, Artificial Sequence
  Description of Artificial Sequence: Synthetic oligonucleotide
cacggugucguagaaaugc

SEQ ID NO: 183277 - RNA, 19 nt, Artificial Sequence
  Description of Artificial Sequence: Synthetic oligonucleotide
uaugugaucgggucggaaa

SEQ ID NO: 183278 - RNA, 19 nt, Artificial Sequence
  Description of Artificial Sequence: Synthetic oligonucleotide
ugcaacaguaugugaucgg

SEQ ID NO: 183279 - RNA, 19 nt, Artificial Sequence
  Description of Artificial Sequence: Synthetic oligonucleotide
uaaucaagacaaccccuca

SEQ ID NO: 183280 - RNA, 19 nt, Artificial Sequence
  Description of Artificial Sequence: Synthetic oligonucleotide
ugcugguaugggcagaugu

SEQ ID NO: 183281 - RNA, 19 nt, Artificial Sequence
  Description of Artificial Sequence: Synthetic oligonucleotide
aaucuaugaagugacucau

SEQ ID NO: 183282 - RNA, 19 nt, Artificial Sequence
  Description of Artificial Sequence: Synthetic oligonucleotide
ggaauuugcuccaagccgg

SEQ ID NO: 183283 - RNA, 19 nt, Artificial Sequence
  Description of Artificial Sequence: Synthetic oligonucleotide
gaagccgcgaaaccgcugc

SEQ ID NO: 183284 - RNA, 19 nt, Artificial Sequence
  Description of Artificial Sequence: Synthetic oligonucleotide
gaguagaaaucccaucuga

SEQ ID NO: 183285 - RNA, 19 nt, Artificial Sequence
  Description of Artificial Sequence: Synthetic oligonucleotide
guugaugagaauaccuccc

SEQ ID NO: 183286 - RNA, 19 nt, Artificial Sequence
  Description of Artificial Sequence: Synthetic oligonucleotide
acgugaucuuucucggggc

SEQ ID NO: 183287 - RNA, 19 nt, Artificial Sequence
  Description of Artificial Sequence: Synthetic oligonucleotide
uccuucauuugaaggaagu

SEQ ID NO: 183288 - RNA, 19 nt, Artificial Sequence
  Description of Artificial Sequence: Synthetic oligonucleotide
gugaaaauuagagcaauga

SEQ ID NO: 183289 - RNA, 19 nt, Artificial Sequence
  Description of Artificial Sequence: Synthetic oligonucleotide
uaguuagugggaaucccac

SEQ ID NO: 183290 - RNA, 19 nt, Artificial Sequence
  Description of Artificial Sequence: Synthetic oligonucleotide
uguauagacccaucuucga

SEQ ID NO: 183291 - RNA, 19 nt, Artificial Sequence
  Description of Artificial Sequence: Synthetic oligonucleotide
ugacagguaaaccuaugua

SEQ ID NO: 183292 - RNA, 19 nt, Artificial Sequence
  Description of Artificial Sequence: Synthetic oligonucleotide
ucccaauuauuaagggccc

SEQ ID NO: 183293 - RNA, 19 nt, Artificial Sequence
  Description of Artificial Sequence: Synthetic oligonucleotide
gguguauagacccaucuuc

SEQ ID NO: 183294 - RNA, 19 nt, Artificial Sequence
  Description of Artificial Sequence: Synthetic oligonucleotide
uuagcauaaucaagacaac

SEQ ID NO: 183295 - RNA, 19 nt, Artificial Sequence
  Description of Artificial Sequence: Synthetic oligonucleotide
cuugcaguuacgcagucca

SEQ ID NO: 183296 - RNA, 19 nt, Artificial Sequence
  Description of Artificial Sequence: Synthetic oligonucleotide
uagcugcuagguuuuauca

SEQ ID NO: 183297 - RNA, 19 nt, Artificial Sequence
  Description of Artificial Sequence: Synthetic oligonucleotide
ucuguguuccagaccauuc

SEQ ID NO: 183298 - RNA, 19 nt, Artificial Sequence
  Description of Artificial Sequence: Synthetic oligonucleotide
acgcugauaaaucuuccca

SEQ ID NO: 183299 - RNA, 19 nt, Artificial Sequence
  Description of Artificial Sequence: Synthetic oligonucleotide
agcugcuagguuuuaucag

SEQ ID NO: 183300 - RNA, 19 nt, Artificial Sequence
  Description of Artificial Sequence: Synthetic oligonucleotide
augguguugccuauagugg

SEQ ID NO: 183301 - RNA, 19 nt, Artificial Sequence
  Description of Artificial Sequence: Synthetic oligonucleotide
aauaaucuaugaagugacu

SEQ ID NO: 183302 - RNA, 19 nt, Artificial Sequence
  Description of Artificial Sequence: Synthetic oligonucleotide
auuagagcaaugaaugaau

SEQ ID NO: 183303 - RNA, 19 nt, Artificial Sequence
  Description of Artificial Sequence: Synthetic oligonucleotide
gucggaaagagcuuuguaa

SEQ ID NO: 183304 - RNA, 19 nt, Artificial Sequence
  Description of Artificial Sequence: Synthetic oligonucleotide
uacucaucaacccgcacuu

SEQ ID NO: 183305 - RNA, 19 nt, Artificial Sequence
  Description of Artificial Sequence: Synthetic oligonucleotide
ucccucacaucaaauacua

SEQ ID NO: 183306 - RNA, 19 nt, Artificial Sequence
  Description of Artificial Sequence: Synthetic oligonucleotide
ucuccauauagcuggcuaa

SEQ ID NO: 183307 - RNA, 19 nt, Artificial Sequence
  Description of Artificial Sequence: Synthetic oligonucleotide
cuucccaauucaauuagca

SEQ ID NO: 183308 - RNA, 19 nt, Artificial Sequence
  Description of Artificial Sequence: Synthetic oligonucleotide
ccauauauggucugcagug

SEQ ID NO: 183309 - RNA, 19 nt, Artificial Sequence
  Description of Artificial Sequence: Synthetic oligonucleotide
uagauuucgucaaguugac

SEQ ID NO: 183310 - RNA, 19 nt, Artificial Sequence
  Description of Artificial Sequence: Synthetic oligonucleotide
ugcuagguuuuaucaguag

SEQ ID NO: 183311 - RNA, 19 nt, Artificial Sequence
  Description of Artificial Sequence: Synthetic oligonucleotide
cuauagugggcugucuucc

SEQ ID NO: 183312 - RNA, 19 nt, Artificial Sequence
  Description of Artificial Sequence: Synthetic oligonucleotide
auuuaagaauuaugccagu

SEQ ID NO: 183313 - RNA, 19 nt, Artificial Sequence
  Description of Artificial Sequence: Synthetic oligonucleotide
gucaagauucauaacugac

SEQ ID NO: 183314 - RNA, 19 nt, Artificial Sequence
  Description of Artificial Sequence: Synthetic oligonucleotide
gaaguagguccgcccauag

SEQ ID NO: 183315 - RNA, 19 nt, Artificial Sequence
  Description of Artificial Sequence: Synthetic oligonucleotide
caaggugugcaagagugag

SEQ ID NO: 183316 - RNA, 19 nt, Artificial Sequence
  Description of Artificial Sequence: Synthetic oligonucleotide
agcgaaucuuaacuuguca

SEQ ID NO: 183317 - RNA, 19 nt, Artificial Sequence
  Description of Artificial Sequence: Synthetic oligonucleotide
gcuagauuucgucaaguug

SEQ ID NO: 183318 - RNA, 19 nt, Artificial Sequence
  Description of Artificial Sequence: Synthetic oligonucleotide
caacccgcacuuuauaauc

SEQ ID NO: 183319 - RNA, 19 nt, Artificial Sequence
  Description of Artificial Sequence: Synthetic oligonucleotide
uucgaugcacagugcaaug

SEQ ID NO: 183320 - RNA, 19 nt, Artificial Sequence
  Description of Artificial Sequence: Synthetic oligonucleotide
gaucucaagagucauggau

SEQ ID NO: 183321 - RNA, 19 nt, Artificial Sequence
  Description of Artificial Sequence: Synthetic oligonucleotide
accuauguaugcuaugaua

SEQ ID NO: 183322 - RNA, 19 nt, Artificial Sequence
  Description of Artificial Sequence: Synthetic oligonucleotide
gggaaucccacccauguug

SEQ ID NO: 183323 - RNA, 19 nt, Artificial Sequence
  Description of Artificial Sequence: Synthetic oligonucleotide
uccauacaaggugugcaag

SEQ ID NO: 183324 - RNA, 19 nt, Artificial Sequence
  Description of Artificial Sequence: Synthetic oligonucleotide
uagguuuuaucaguaggaa

SEQ ID NO: 183325 - RNA, 19 nt, Artificial Sequence
  Description of Artificial Sequence: Synthetic oligonucleotide
uccaucagcgaaucuuaac

SEQ ID NO: 183326 - RNA, 19 nt, Artificial Sequence
  Description of Artificial Sequence: Synthetic oligonucleotide
uauaccuaccauguucaaa

SEQ ID NO: 183327 - RNA, 19 nt, Artificial Sequence
  Description of Artificial Sequence: Synthetic oligonucleotide
uuccauacaaggugugcaa

SEQ ID NO: 183328 - RNA, 19 nt, Artificial Sequence
  Description of Artificial Sequence: Synthetic oligonucleotide
agacuacgagguccaauag

SEQ ID NO: 183329 - RNA, 19 nt, Artificial Sequence
  Description of Artificial Sequence: Synthetic oligonucleotide
ugcuaaauggcaugccaua

SEQ ID NO: 183330 - RNA, 19 nt, Artificial Sequence
  Description of Artificial Sequence: Synthetic oligonucleotide
gugaugcuagauuucguca

SEQ ID NO: 183331 - RNA, 19 nt, Artificial Sequence
  Description of Artificial Sequence: Synthetic oligonucleotide
gucgaugacaggucuguac

SEQ ID NO: 183332 - RNA, 19 nt, Artificial Sequence
  Description of Artificial Sequence: Synthetic oligonucleotide
cuccccgugacuccuuucg

SEQ ID NO: 183333 - RNA, 19 nt, Artificial Sequence
  Description of Artificial Sequence: Synthetic oligonucleotide
cuaaguccuggcaagguaa

SEQ ID NO: 183334 - RNA, 19 nt, Artificial Sequence
  Description of Artificial Sequence: Synthetic oligonucleotide
uccuaggugaugcuagauu

SEQ ID NO: 183335 - RNA, 19 nt, Artificial Sequence
  Description of Artificial Sequence: Synthetic oligonucleotide
caaacucuaaguccuggca

SEQ ID NO: 183336 - RNA, 19 nt, Artificial Sequence
  Description of Artificial Sequence: Synthetic oligonucleotide
uuuuaucaguaggaacgga

SEQ ID NO: 183337 - RNA, 19 nt, Artificial Sequence
  Description of Artificial Sequence: Synthetic oligonucleotide
guuggucaauaaucuauga

SEQ ID NO: 183338 - RNA, 19 nt, Artificial Sequence
  Description of Artificial Sequence: Synthetic oligonucleotide
augaaccuuucaccuugac

SEQ ID NO: 183339 - RNA, 19 nt, Artificial Sequence
  Description of Artificial Sequence: Synthetic oligonucleotide
ugaucgggucggaaagagc

SEQ ID NO: 183340 - RNA, 19 nt, Artificial Sequence
  Description of Artificial Sequence: Synthetic oligonucleotide
uugucgaugacaggucugu

SEQ ID NO: 183341 - RNA, 19 nt, Artificial Sequence
  Description of Artificial Sequence: Synthetic oligonucleotide
gaucgggucggaaagagcu

SEQ ID NO: 183342 - RNA, 19 nt, Artificial Sequence
  Description of Artificial Sequence: Synthetic oligonucleotide
gcaacaguaugugaucggg

SEQ ID NO: 183343 - RNA, 19 nt, Artificial Sequence
  Description of Artificial Sequence: Synthetic oligonucleotide
uuaagggcccacccuacuu

SEQ ID NO: 183344 - RNA, 19 nt, Artificial Sequence
  Description of Artificial Sequence: Synthetic oligonucleotide
aguagaaaucccaucugaa

SEQ ID NO: 183345 - RNA, 19 nt, Artificial Sequence
  Description of Artificial Sequence: Synthetic oligonucleotide
cuagcucgaccacggaggc

SEQ ID NO: 183346 - RNA, 19 nt, Artificial Sequence
  Description of Artificial Sequence: Synthetic oligonucleotide
ggauccacugccuagggaa

SEQ ID NO: 183347 - RNA, 19 nt, Artificial Sequence
  Description of Artificial Sequence: Synthetic oligonucleotide
uugcaguuacgcaguccag

SEQ ID NO: 183348 - RNA, 19 nt, Artificial Sequence
  Description of Artificial Sequence: Synthetic oligonucleotide
gguacugaguagaaauccc

SEQ ID NO: 183349 - RNA, 19 nt, Artificial Sequence
  Description of Artificial Sequence: Synthetic oligonucleotide
agugcgcacagcaucaggu

SEQ ID NO: 183350 - RNA, 19 nt, Artificial Sequence
  Description of Artificial Sequence: Synthetic oligonucleotide
ccaguguuccucaaauggc

SEQ ID NO: 183351 - RNA, 19 nt, Artificial Sequence
  Description of Artificial Sequence: Synthetic oligonucleotide
aacccgcacuuuauaaucu

SEQ ID NO: 183352 - RNA, 19 nt, Artificial Sequence
  Description of Artificial Sequence: Synthetic oligonucleotide
uagguccgcccauagcccc

SEQ ID NO: 183353 - RNA, 19 nt, Artificial Sequence
  Description of Artificial Sequence: Synthetic oligonucleotide
uaggaacggauagcagggg

SEQ ID NO: 183354 - RNA, 19 nt, Artificial Sequence
  Description of Artificial Sequence: Synthetic oligonucleotide
guaguuagugggaauccca

SEQ ID NO: 183355 - RNA, 19 nt, Artificial Sequence
  Description of Artificial Sequence: Synthetic oligonucleotide
acauaugagaggguguguu

SEQ ID NO: 183356 - RNA, 19 nt, Artificial Sequence
  Description of Artificial Sequence: Synthetic oligonucleotide
gauucugcauugacuucug

SEQ ID NO: 183357 - RNA, 19 nt, Artificial Sequence
  Description of Artificial Sequence: Synthetic oligonucleotide
acauccacgccagcgaaga

SEQ ID NO: 183358 - RNA, 19 nt, Artificial Sequence
  Description of Artificial Sequence: Synthetic oligonucleotide
ucacggugucguagaaaug

SEQ ID NO: 183359 - RNA, 19 nt, Artificial Sequence
  Description of Artificial Sequence: Synthetic oligonucleotide
cacccauguuguaaugcac

SEQ ID NO: 183360 - RNA, 19 nt, Artificial Sequence
  Description of Artificial Sequence: Synthetic oligonucleotide
ucucaagccugccccucca

SEQ ID NO: 183361 - RNA, 19 nt, Artificial Sequence
  Description of Artificial Sequence: Synthetic oligonucleotide
gugaucgggucggaaagag

SEQ ID NO: 183362 - RNA, 19 nt, Artificial Sequence
  Description of Artificial Sequence: Synthetic oligonucleotide
ugaucuuucucggggccac

SEQ ID NO: 183363 - RNA, 19 nt, Artificial Sequence
  Description of Artificial Sequence: Synthetic oligonucleotide
guuccagaccauuccucug

SEQ ID NO: 183364 - RNA, 19 nt, Artificial Sequence
  Description of Artificial Sequence: Synthetic oligonucleotide
uaccuaccauguucaaaac

SEQ ID NO: 183365 - RNA, 19 nt, Artificial Sequence
  Description of Artificial Sequence: Synthetic oligonucleotide
caugcaacuugagugcuca

SEQ ID NO: 183366 - RNA, 19 nt, Artificial Sequence
  Description of Artificial Sequence: Synthetic oligonucleotide
ugugaucgggucggaaaga

SEQ ID NO: 183367 - RNA, 19 nt, Artificial Sequence
  Description of Artificial Sequence: Synthetic oligonucleotide
ccgcacuuuauaaucuucc

SEQ ID NO: 183368 - RNA, 19 nt, Artificial Sequence
  Description of Artificial Sequence: Synthetic oligonucleotide
uucgguguauagacccauc

SEQ ID NO: 183369 - RNA, 19 nt, Artificial Sequence
  Description of Artificial Sequence: Synthetic oligonucleotide
cucuuauucgguguauaga

SEQ ID NO: 183370 - RNA, 19 nt, Artificial Sequence
  Description of Artificial Sequence: Synthetic oligonucleotide
ggucaauaaucuaugaagu

SEQ ID NO: 183371 - RNA, 19 nt, Artificial Sequence
  Description of Artificial Sequence: Synthetic oligonucleotide
ggccuguucgaucagccac

SEQ ID NO: 183372 - RNA, 19 nt, Artificial Sequence
  Description of Artificial Sequence: Synthetic oligonucleotide
uccagaccauuccucuguc

SEQ ID NO: 183373 - RNA, 19 nt, Artificial Sequence
  Description of Artificial Sequence: Synthetic oligonucleotide
uggauuggcuuggaguaau

SEQ ID NO: 183374 - RNA, 19 nt, Artificial Sequence
  Description of Artificial Sequence: Synthetic oligonucleotide
cugucauguaauggauggc

SEQ ID NO: 183375 - RNA, 19 nt, Artificial Sequence
  Description of Artificial Sequence: Synthetic oligonucleotide
aagcaaccaguuacaguca

SEQ ID NO: 183376 - RNA, 19 nt, Artificial Sequence
  Description of Artificial Sequence: Synthetic oligonucleotide
gcgaaucuuaacuugucaa

SEQ ID NO: 183377 - RNA, 19 nt, Artificial Sequence
  Description of Artificial Sequence: Synthetic oligonucleotide
ccugcaagauucugcaaug

SEQ ID NO: 183378 - RNA, 19 nt, Artificial Sequence
  Description of Artificial Sequence: Synthetic oligonucleotide
gugucguagaaaugccauc

SEQ ID NO: 183379 - RNA, 19 nt, Artificial Sequence
  Description of Artificial Sequence: Synthetic oligonucleotide
uuucacggugucguagaaa

SEQ ID NO: 183380 - RNA, 19 nt, Artificial Sequence
  Description of Artificial Sequence: Synthetic oligonucleotide
cagcgaaucuuaacuuguc

SEQ ID NO: 183381 - RNA, 19 nt, Artificial Sequence
  Description of Artificial Sequence: Synthetic oligonucleotide
uauauaccuguggggugga

SEQ ID NO: 183382 - RNA, 19 nt, Artificial Sequence
  Description of Artificial Sequence: Synthetic oligonucleotide
caggcagacguguggccag

SEQ ID NO: 183383 - RNA, 19 nt, Artificial Sequence
  Description of Artificial Sequence: Synthetic oligonucleotide
augcuagauuucgucaagu

SEQ ID NO: 183384 - RNA, 19 nt, Artificial Sequence
  Description of Artificial Sequence: Synthetic oligonucleotide
guagguccgcccauagccc

SEQ ID NO: 183385 - RNA, 19 nt, Artificial Sequence
  Description of Artificial Sequence: Synthetic oligonucleotide
uacuagcaagcuguugguc

SEQ ID NO: 183386 - RNA, 19 nt, Artificial Sequence
  Description of Artificial Sequence: Synthetic oligonucleotide
uguagcugcuagguuuuau

SEQ ID NO: 183387 - RNA, 19 nt, Artificial Sequence
  Description of Artificial Sequence: Synthetic oligonucleotide
gacauccacgccagcgaag

SEQ ID NO: 183388 - RNA, 19 nt, Artificial Sequence
  Description of Artificial Sequence: Synthetic oligonucleotide
guauagacccaucuucgau

SEQ ID NO: 183389 - RNA, 19 nt, Artificial Sequence
  Description of Artificial Sequence: Synthetic oligonucleotide
ugaaguagguccgcccaua

SEQ ID NO: 183390 - RNA, 19 nt, Artificial Sequence
  Description of Artificial Sequence: Synthetic oligonucleotide
cucaucaacccgcacuuua

SEQ ID NO: 183391 - RNA, 19 nt, Artificial Sequence
  Description of Artificial Sequence: Synthetic oligonucleotide
ccuauagugggcugucuuc

SEQ ID NO: 183392 - RNA, 19 nt, Artificial Sequence
  Description of Artificial Sequence: Synthetic oligonucleotide
auucgguguauagacccau

SEQ ID NO: 183393 - RNA, 19 nt, Artificial Sequence
  Description of Artificial Sequence: Synthetic oligonucleotide
ugggaaucccacccauguu

SEQ ID NO: 183394 - RNA, 19 nt, Artificial Sequence
  Description of Artificial Sequence: Synthetic oligonucleotide
cugaggcguaguucugaug

SEQ ID NO: 183395 - RNA, 19 nt, Artificial Sequence
  Description of Artificial Sequence: Synthetic oligonucleotide
cuuugcucuuauucggugu

SEQ ID NO: 183396 - RNA, 19 nt, Artificial Sequence
  Description of Artificial Sequence: Synthetic oligonucleotide
uggcgugagcuccccguga

SEQ ID NO: 183397 - RNA, 19 nt, Artificial Sequence
  Description of Artificial Sequence: Synthetic oligonucleotide
uccauauagcuggcuaauu

SEQ ID NO: 183398 - RNA, 19 nt, Artificial Sequence
  Description of Artificial Sequence: Synthetic oligonucleotide
ucgggucggaaagagcuuu

SEQ ID NO: 183399 - RNA, 19 nt, Artificial Sequence
  Description of Artificial Sequence: Synthetic oligonucleotide
agauuucgucaaguugaca

SEQ ID NO: 183400 - RNA, 19 nt, Artificial Sequence
  Description of Artificial Sequence: Synthetic oligonucleotide
aagccgcgaaaccgcugca

SEQ ID NO: 183401 - RNA, 19 nt, Artificial Sequence
  Description of Artificial Sequence: Synthetic oligonucleotide
caccgaugagccugcccgc

SEQ ID NO: 183402 - RNA, 19 nt, Artificial Sequence
  Description of Artificial Sequence: Synthetic oligonucleotide
gucauggaucgagauacaa

SEQ ID NO: 183403 - RNA, 19 nt, Artificial Sequence
  Description of Artificial Sequence: Synthetic oligonucleotide
aauuugcuccaagccgguu

SEQ ID NO: 183404 - RNA, 19 nt, Artificial Sequence
  Description of Artificial Sequence: Synthetic oligonucleotide
ccuggauuggcuuggagua

SEQ ID NO: 183405 - RNA, 19 nt, Artificial Sequence
  Description of Artificial Sequence: Synthetic oligonucleotide
cucagagaccuuccauaca

SEQ ID NO: 183406 - RNA, 19 nt, Artificial Sequence
  Description of Artificial Sequence: Synthetic oligonucleotide
uugccuauagugggcuguc

SEQ ID NO: 183407 - RNA, 19 nt, Artificial Sequence
  Description of Artificial Sequence: Synthetic oligonucleotide
aggcagacguguggccagc

SEQ ID NO: 183408 - RNA, 19 nt, Artificial Sequence
  Description of Artificial Sequence: Synthetic oligonucleotide
acccgcacuuuauaaucuu

SEQ ID NO: 183409 - RNA, 19 nt, Artificial Sequence
  Description of Artificial Sequence: Synthetic oligonucleotide
cauccccugugcugguaug

SEQ ID NO: 183410 - RNA, 19 nt, Artificial Sequence
  Description of Artificial Sequence: Synthetic oligonucleotide
gucuugucgaugacagguc

SEQ ID NO: 183411 - RNA, 19 nt, Artificial Sequence
  Description of Artificial Sequence: Synthetic oligonucleotide
gguagacgugaucuuucuc

SEQ ID NO: 183412 - RNA, 19 nt, Artificial Sequence
  Description of Artificial Sequence: Synthetic oligonucleotide
ggucuguacuccaaaguaa

SEQ ID NO: 183413 - RNA, 19 nt, Artificial Sequence
  Description of Artificial Sequence: Synthetic oligonucleotide
agcuagcgccaagcggcgc

SEQ ID NO: 183414 - RNA, 19 nt, Artificial Sequence
  Description of Artificial Sequence: Synthetic oligonucleotide
cuucacggaucucaagagu

SEQ ID NO: 183415 - RNA, 19 nt, Artificial Sequence
  Description of Artificial Sequence: Synthetic oligonucleotide
uugcucuuauucgguguau

SEQ ID NO: 183416 - RNA, 19 nt, Artificial Sequence
  Description of Artificial Sequence: Synthetic oligonucleotide
ccgcgaaaccgcugcaacg

SEQ ID NO: 183417 - RNA, 19 nt, Artificial Sequence
  Description of Artificial Sequence: Synthetic oligonucleotide
guugccuauagugggcugu

SEQ ID NO: 183418 - RNA, 19 nt, Artificial Sequence
  Description of Artificial Sequence: Synthetic oligonucleotide
ccauauauaccuguggggu

SEQ ID NO: 183419 - RNA, 19 nt, Artificial Sequence
  Description of Artificial Sequence: Synthetic oligonucleotide
cuauaccuaccauguucaa

SEQ ID NO: 183420 - RNA, 19 nt, Artificial Sequence
  Description of Artificial Sequence: Synthetic oligonucleotide
aguaugugaucgggucgga

SEQ ID NO: 183421 - RNA, 19 nt, Artificial Sequence
  Description of Artificial Sequence: Synthetic oligonucleotide
guccaauagggaauuugcu

SEQ ID NO: 183422 - RNA, 19 nt, Artificial Sequence
  Description of Artificial Sequence: Synthetic oligonucleotide
cagauccuuucacgguguc

SEQ ID NO: 183423 - RNA, 19 nt, Artificial Sequence
  Description of Artificial Sequence: Synthetic oligonucleotide
ugcccgccuuucccaaacu

SEQ ID NO: 183424 - RNA, 19 nt, Artificial Sequence
  Description of Artificial Sequence: Synthetic oligonucleotide
ugccuauagugggcugucu

SEQ ID NO: 183425 - RNA, 19 nt, Artificial Sequence
  Description of Artificial Sequence: Synthetic oligonucleotide
caucaacccgcacuuuaua

SEQ ID NO: 183426 - RNA, 19 nt, Artificial Sequence
  Description of Artificial Sequence: Synthetic oligonucleotide
cuuucacggugucguagaa

SEQ ID NO: 183427 - RNA, 19 nt, Artificial Sequence
  Description of Artificial Sequence: Synthetic oligonucleotide
agaagccgcgaaaccgcug

SEQ ID NO: 183428 - RNA, 19 nt, Artificial Sequence
  Description of Artificial Sequence: Synthetic oligonucleotide
agucauggaucgagauaca

SEQ ID NO: 183429 - RNA, 19 nt, Artificial Sequence
  Description of Artificial Sequence: Synthetic oligonucleotide
cgcgaaaccgcugcaacgc

SEQ ID NO: 183430 - RNA, 19 nt, Artificial Sequence
  Description of Artificial Sequence: Synthetic oligonucleotide
caagcggcgcccgcgaaga

SEQ ID NO: 183431 - RNA, 19 nt, Artificial Sequence
  Description of Artificial Sequence: Synthetic oligonucleotide
uucgugccucugcaccaua

SEQ ID NO: 183432 - RNA, 19 nt, Artificial Sequence
  Description of Artificial Sequence: Synthetic oligonucleotide
gccgcgaaaccgcugcaac

SEQ ID NO: 183433 - RNA, 19 nt, Artificial Sequence
  Description of Artificial Sequence: Synthetic oligonucleotide
gcacgcugauaaaucuucc

SEQ ID NO: 183434 - RNA, 19 nt, Artificial Sequence
  Description of Artificial Sequence: Synthetic oligonucleotide
gaauuugcuccaagccggu

SEQ ID NO: 183435 - RNA, 19 nt, Artificial Sequence
  Description of Artificial Sequence: Synthetic oligonucleotide
ggcgugagcuccccgugac

SEQ ID NO: 183436 - RNA, 19 nt, Artificial Sequence
  Description of Artificial Sequence: Synthetic oligonucleotide
gcgaaaccgcugcaacgcc

SEQ ID NO: 183437 - RNA, 19 nt, Artificial Sequence
  Description of Artificial Sequence: Synthetic oligonucleotide
ccgccuuucccaaacuuga

SEQ ID NO: 183438 - RNA, 19 nt, Artificial Sequence
  Description of Artificial Sequence: Synthetic oligonucleotide
ccgugacuccuuucgugcc

SEQ ID NO: 183439 - RNA, 19 nt, Artificial Sequence
  Description of Artificial Sequence: Synthetic oligonucleotide
guaugugaucgggucggaa

SEQ ID NO: 183440 - RNA, 19 nt, Artificial Sequence
  Description of Artificial Sequence: Synthetic oligonucleotide
ggucggaaagagcuuugua

SEQ ID NO: 183441 - RNA, 19 nt, Artificial Sequence
  Description of Artificial Sequence: Synthetic oligonucleotide
uagcgccaagcggcgcccg

SEQ ID NO: 183442 - RNA, 19 nt, Artificial Sequence
  Description of Artificial Sequence: Synthetic oligonucleotide
gcagcugaaguagguccgc

SEQ ID NO: 183443 - RNA, 19 nt, Artificial Sequence
  Description of Artificial Sequence: Synthetic oligonucleotide
gaucuuucucggggccaca

SEQ ID NO: 183444 - RNA, 19 nt, Artificial Sequence
  Description of Artificial Sequence: Synthetic oligonucleotide
cucaagagucauggaucga

SEQ ID NO: 183445 - RNA, 19 nt, Artificial Sequence
  Description of Artificial Sequence: Synthetic oligonucleotide
ggcgcccgcgaagaagccg

SEQ ID NO: 183446 - RNA, 19 nt, Artificial Sequence
  Description of Artificial Sequence: Synthetic oligonucleotide
cacccuacuucacaugauu

SEQ ID NO: 183447 - RNA, 19 nt, Artificial Sequence
  Description of Artificial Sequence: Synthetic oligonucleotide
ccuacaagacaaucaaauu

SEQ ID NO: 183448 - RNA, 19 nt, Artificial Sequence
  Description of Artificial Sequence: Synthetic oligonucleotide
cuggauuggcuuggaguaa

SEQ ID NO: 183449 - RNA, 19 nt, Artificial Sequence
  Description of Artificial Sequence: Synthetic oligonucleotide
gcgcccgcgaagaagccgc

SEQ ID NO: 183450 - RNA, 19 nt, Artificial Sequence
  Description of Artificial Sequence: Synthetic oligonucleotide
ggaaucccacccauguugu

SEQ ID NO: 183451 - RNA, 19 nt, Artificial Sequence
  Description of Artificial Sequence: Synthetic oligonucleotide
ccaagcggcgcccgcgaag

SEQ ID NO: 183452 - RNA, 19 nt, Artificial Sequence
  Description of Artificial Sequence: Synthetic oligonucleotide
cucuaaguccuggcaaggu

SEQ ID NO: 183453 - RNA, 19 nt, Artificial Sequence
  Description of Artificial Sequence: Synthetic oligonucleotide
agccgcgaaaccgcugcaa

SEQ ID NO: 183454 - RNA, 19 nt, Artificial Sequence
  Description of Artificial Sequence: Synthetic oligonucleotide
caccaaaugcacgcugaua

SEQ ID NO: 183455 - RNA, 19 nt, Artificial Sequence
  Description of Artificial Sequence: Synthetic oligonucleotide
cccuggauuggcuuggagu

SEQ ID NO: 183456 - RNA, 19 nt, Artificial Sequence
  Description of Artificial Sequence: Synthetic oligonucleotide
aucgggucggaaagagcuu

SEQ ID NO: 183457 - RNA, 19 nt, Artificial Sequence
  Description of Artificial Sequence: Synthetic oligonucleotide
gcaaccaguuacagucaca

SEQ ID NO: 183458 - RNA, 19 nt, Artificial Sequence
  Description of Artificial Sequence: Synthetic oligonucleotide
ggauuggcuuggaguaauc

SEQ ID NO: 183459 - RNA, 19 nt, Artificial Sequence
  Description of Artificial Sequence: Synthetic oligonucleotide
gugcugguaugggcagaug

SEQ ID NO: 183460 - RNA, 19 nt, Artificial Sequence
  Description of Artificial Sequence: Synthetic oligonucleotide
cugaaguagguccgcccau

SEQ ID NO: 183461 - RNA, 19 nt, Artificial Sequence
  Description of Artificial Sequence: Synthetic oligonucleotide
gcaauccuuuauugagacu

SEQ ID NO: 183462 - RNA, 19 nt, Artificial Sequence
  Description of Artificial Sequence: Synthetic oligonucleotide
ggcuuggaguaaucauacu

SEQ ID NO: 183463 - RNA, 19 nt, Artificial Sequence
  Description of Artificial Sequence: Synthetic oligonucleotide
cggugucguagaaaugcca

SEQ ID NO: 183464 - RNA, 19 nt, Artificial Sequence
  Description of Artificial Sequence: Synthetic oligonucleotide
cccgcgaagaagccgcgaa

SEQ ID NO: 183465 - RNA, 19 nt, Artificial Sequence
  Description of Artificial Sequence: Synthetic oligonucleotide
cgggucggaaagagcuuug

SEQ ID NO: 183466 - RNA, 19 nt, Artificial Sequence
  Description of Artificial Sequence: Synthetic oligonucleotide
gcgccuaccaccacagcau

SEQ ID NO: 183467 - RNA, 19 nt, Artificial Sequence
  Description of Artificial Sequence: Synthetic oligonucleotide
cgccagcgaagaucauggc

SEQ ID NO: 183468 - RNA, 19 nt, Artificial Sequence
  Description of Artificial Sequence: Synthetic oligonucleotide
gggucggaaagagcuuugu

SEQ ID NO: 183469 - RNA, 19 nt, Artificial Sequence
  Description of Artificial Sequence: Synthetic oligonucleotide
ccacauaagcugguccugu

SEQ ID NO: 183470 - RNA, 19 nt, Artificial Sequence
  Description of Artificial Sequence: Synthetic oligonucleotide
cauccacgccagcgaagau

SEQ ID NO: 183471 - RNA, 19 nt, Artificial Sequence
  Description of Artificial Sequence: Synthetic oligonucleotide
gcgugagcuccccgugacu

SEQ ID NO: 183472 - RNA, 19 nt, Artificial Sequence
  Description of Artificial Sequence: Synthetic oligonucleotide
ccauccccugugcugguau

SEQ ID NO: 183473 - RNA, 19 nt, Artificial Sequence
  Description of Artificial Sequence: Synthetic oligonucleotide
ccacccuacuucacaugau

SEQ ID NO: 183474 - RNA, 19 nt, Artificial Sequence
  Description of Artificial Sequence: Synthetic oligonucleotide
cggcgcccgcgaagaagcc

SEQ ID NO: 183475 - RNA, 19 nt, Artificial Sequence
  Description of Artificial Sequence: Synthetic oligonucleotide
uuagauaaaaucuugggca

SEQ ID NO: 183476 - RNA, 19 nt, Artificial Sequence
  Description of Artificial Sequence: Synthetic oligonucleotide
uguuguuacaguaggaugg

SEQ ID NO: 183477 - RNA, 19 nt, Artificial Sequence
  Description of Artificial Sequence: Synthetic oligonucleotide
uuuacuagaaguacgggag

SEQ ID NO: 183478 - RNA, 19 nt, Artificial Sequence
  Description of Artificial Sequence: Synthetic oligonucleotide
auggacaugacuuucaaag

SEQ ID NO: 183479 - RNA, 19 nt, Artificial Sequence
  Description of Artificial Sequence: Synthetic oligonucleotide
uguucacucaucauaaugc

SEQ ID NO: 183480 - RNA, 19 nt, Artificial Sequence
  Description of Artificial Sequence: Synthetic oligonucleotide
aagacaauccuccacauaa

SEQ ID NO: 183481 - RNA, 19 nt, Artificial Sequence
  Description of Artificial Sequence: Synthetic oligonucleotide
caaagcgucuacuagaggg

SEQ ID NO: 183482 - RNA, 19 nt, Artificial Sequence
  Description of Artificial Sequence: Synthetic oligonucleotide
aauuguaugauuauuuagu

SEQ ID NO: 183483 - RNA, 19 nt, Artificial Sequence
  Description of Artificial Sequence: Synthetic oligonucleotide
gaaaacuaugaauuagugc

SEQ ID NO: 183484 - RNA, 19 nt, Artificial Sequence
  Description of Artificial Sequence: Synthetic oligonucleotide
ugucuuauuaauauucgcu

SEQ ID NO: 183485 - RNA, 19 nt, Artificial Sequence
  Description of Artificial Sequence: Synthetic oligonucleotide
uucagaaacagcaugacuu

SEQ ID NO: 183486 - RNA, 19 nt, Artificial Sequence
  Description of Artificial Sequence: Synthetic oligonucleotide
uuuacaacacuuuaaggaa

SEQ ID NO: 183487 - RNA, 19 nt, Artificial Sequence
  Description of Artificial Sequence: Synthetic oligonucleotide
uuuaugagaaaggcgauag

SEQ ID NO: 183488 - RNA, 19 nt, Artificial Sequence
  Description of Artificial Sequence: Synthetic oligonucleotide
uguaguucuagcaauugcu

SEQ ID NO: 183489 - RNA, 19 nt, Artificial Sequence
  Description of Artificial Sequence: Synthetic oligonucleotide
aguacgaugaaagugcagg

SEQ ID NO: 183490 - RNA, 19 nt, Artificial Sequence
  Description of Artificial Sequence: Synthetic oligonucleotide
uuuuacuagaaguacggga

SEQ ID NO: 183491 - RNA, 19 nt, Artificial Sequence
  Description of Artificial Sequence: Synthetic oligonucleotide
aguaggauggauuuauuug

SEQ ID NO: 183492 - RNA, 19 nt, Artificial Sequence
  Description of Artificial Sequence: Synthetic oligonucleotide
cucaguacgaugaaagugc

SEQ ID NO: 183493 - RNA, 19 nt, Artificial Sequence
  Description of Artificial Sequence: Synthetic oligonucleotide
ucgagaugaggaaaggacg

SEQ ID NO: 183494 - RNA, 19 nt, Artificial Sequence
  Description of Artificial Sequence: Synthetic oligonucleotide
caucauaaugcaacgauag

SEQ ID NO: 183495 - RNA, 19 nt, Artificial Sequence
  Description of Artificial Sequence: Synthetic oligonucleotide
cuugagagcaacuauuuac

SEQ ID NO: 183496 - RNA, 19 nt, Artificial Sequence
  Description of Artificial Sequence: Synthetic oligonucleotide
agaaaucucaacuacuaca

SEQ ID NO: 183497 - RNA, 19 nt, Artificial Sequence
  Description of Artificial Sequence: Synthetic oligonucleotide
acuacuacauaacucaacu

SEQ ID NO: 183498 - RNA, 19 nt, Artificial Sequence
  Description of Artificial Sequence: Synthetic oligonucleotide
aaucucaguacgaugaaag

SEQ ID NO: 183499 - RNA, 19 nt, Artificial Sequence
  Description of Artificial Sequence: Synthetic oligonucleotide
auuauucugggcaugcugc

SEQ ID NO: 183500 - RNA, 19 nt, Artificial Sequence
  Description of Artificial Sequence: Synthetic oligonucleotide
ugacuuagauauaaaguga

SEQ ID NO: 183501 - RNA, 19 nt, Artificial Sequence
  Description of Artificial Sequence: Synthetic oligonucleotide
uugagagagacaauacuug

SEQ ID NO: 183502 - RNA, 19 nt, Artificial Sequence
  Description of Artificial Sequence: Synthetic oligonucleotide
ugcaauuuaugagaaaggc

SEQ ID NO: 183503 - RNA, 19 nt, Artificial Sequence
  Description of Artificial Sequence: Synthetic oligonucleotide
auuauuaggaggcaguuuu

SEQ ID NO: 183504 - RNA, 19 nt, Artificial Sequence
  Description of Artificial Sequence: Synthetic oligonucleotide
uacuacauaacucaacuuu

SEQ ID NO: 183505 - RNA, 19 nt, Artificial Sequence
  Description of Artificial Sequence: Synthetic oligonucleotide
uguucuaaauugcugugug

SEQ ID NO: 183506 - RNA, 19 nt, Artificial Sequence
  Description of Artificial Sequence: Synthetic oligonucleotide
aaguacgggaguuucgcuc

SEQ ID NO: 183507 - RNA, 19 nt, Artificial Sequence
  Description of Artificial Sequence: Synthetic oligonucleotide
aguacgggaguuucgcucc

SEQ ID NO: 183508 - RNA, 19 nt, Artificial Sequence
  Description of Artificial Sequence: Synthetic oligonucleotide
aaaccuaacuguaggauag

SEQ ID NO: 183509 - RNA, 19 nt, Artificial Sequence
  Description of Artificial Sequence: Synthetic oligonucleotide
ugagaaaggcgauagaaau

SEQ ID NO: 183510 - RNA, 19 nt, Artificial Sequence
  Description of Artificial Sequence: Synthetic oligonucleotide
uaauauucgcuguagguaa

SEQ ID NO: 183511 - RNA, 19 nt, Artificial Sequence
  Description of Artificial Sequence: Synthetic oligonucleotide
uuauaacugaaguaucaga

SEQ ID NO: 183512 - RNA, 19 nt, Artificial Sequence
  Description of Artificial Sequence: Synthetic oligonucleotide
aucauaaugcaacgauagc

SEQ ID NO: 183513 - RNA, 19 nt, Artificial Sequence
  Description of Artificial Sequence: Synthetic oligonucleotide
gacaguaugggaauauuag

SEQ ID NO: 183514 - RNA, 19 nt, Artificial Sequence
  Description of Artificial Sequence: Synthetic oligonucleotide
acaguuuucucucucucuc

SEQ ID NO: 183515 - RNA, 19 nt, Artificial Sequence
  Description of Artificial Sequence: Synthetic oligonucleotide
ucauauugucggcagcagg

SEQ ID NO: 183516 - RNA, 19 nt, Artificial Sequence
  Description of Artificial Sequence: Synthetic oligonucleotide
aggcgauagaaauauugac

SEQ ID NO: 183517 - RNA, 19 nt, Artificial Sequence
  Description of Artificial Sequence: Synthetic oligonucleotide
uuuauggcucaauagucca

SEQ ID NO: 183518 - RNA, 19 nt, Artificial Sequence
  Description of Artificial Sequence: Synthetic oligonucleotide
uacaggaacaaccaucauc

SEQ ID NO: 183519 - RNA, 19 nt, Artificial Sequence
  Description of Artificial Sequence: Synthetic oligonucleotide
aguaugggaauauuaggcu

SEQ ID NO: 183520 - RNA, 19 nt, Artificial Sequence
  Description of Artificial Sequence: Synthetic oligonucleotide
acgccuaugacuuucaaau

SEQ ID NO: 183521 - RNA, 19 nt, Artificial Sequence
  Description of Artificial Sequence: Synthetic oligonucleotide
agaaacuacuccagaagcc

SEQ ID NO: 183522 - RNA, 19 nt, Artificial Sequence
  Description of Artificial Sequence: Synthetic oligonucleotide
agugcuaucgaaacacagc

SEQ ID NO: 183523 - RNA, 19 nt, Artificial Sequence
  Description of Artificial Sequence: Synthetic oligonucleotide
uaugcauuggucacuagua

SEQ ID NO: 183524 - RNA, 19 nt, Artificial Sequence
  Description of Artificial Sequence: Synthetic oligonucleotide
auuccguaagcucccauuc

SEQ ID NO: 183525 - RNA, 19 nt, Artificial Sequence
  Description of Artificial Sequence: Synthetic oligonucleotide
aucgcugcacaacucauuc

SEQ ID NO: 183526 - RNA, 19 nt, Artificial Sequence
  Description of Artificial Sequence: Synthetic oligonucleotide
gcaguuuuaagguggaggg

SEQ ID NO: 183527 - RNA, 19 nt, Artificial Sequence
  Description of Artificial Sequence: Synthetic oligonucleotide
uuaauauucgcuguaggua

SEQ ID NO: 183528 - RNA, 19 nt, Artificial Sequence
  Description of Artificial Sequence: Synthetic oligonucleotide
aagucaagacaguauggga

SEQ ID NO: 183529 - RNA, 19 nt, Artificial Sequence
  Description of Artificial Sequence: Synthetic oligonucleotide
auuuccuacacgcacaguu

SEQ ID NO: 183530 - RNA, 19 nt, Artificial Sequence
  Description of Artificial Sequence: Synthetic oligonucleotide
cauuuuauacuguggcccc

SEQ ID NO: 183531 - RNA, 19 nt, Artificial Sequence
  Description of Artificial Sequence: Synthetic oligonucleotide
uuggucacuaguaugugaa

SEQ ID NO: 183532 - RNA, 19 nt, Artificial Sequence
  Description of Artificial Sequence: Synthetic oligonucleotide
uuuguacagugaauucuag

SEQ ID NO: 183533 - RNA, 19 nt, Artificial Sequence
  Description of Artificial Sequence: Synthetic oligonucleotide
aagcucuauuucuacacga

SEQ ID NO: 183534 - RNA, 19 nt, Artificial Sequence
  Description of Artificial Sequence: Synthetic oligonucleotide
gguaccauuauucugggca

SEQ ID NO: 183535 - RNA, 19 nt, Artificial Sequence
  Description of Artificial Sequence: Synthetic oligonucleotide
agcaauugcugcucuagag

SEQ ID NO: 183536 - RNA, 19 nt, Artificial Sequence
  Description of Artificial Sequence: Synthetic oligonucleotide
guagauuggcuuuacuuac

SEQ ID NO: 183537 - RNA, 19 nt, Artificial Sequence
  Description of Artificial Sequence: Synthetic oligonucleotide
uggcuauauaucacuaaug

SEQ ID NO: 183538 - RNA, 19 nt, Artificial Sequence
  Description of Artificial Sequence: Synthetic oligonucleotide
auuguaugauuauuuaguu

SEQ ID NO: 183539 - RNA, 19 nt, Artificial Sequence
  Description of Artificial Sequence: Synthetic oligonucleotide
cugcaauuuaugagaaagg

SEQ ID NO: 183540 - RNA, 19 nt, Artificial Sequence
  Description of Artificial Sequence: Synthetic oligonucleotide
agaaaggcgauagaaauau

SEQ ID NO: 183541 - RNA, 19 nt, Artificial Sequence
  Description of Artificial Sequence: Synthetic oligonucleotide
ucaguggcuauauaucacu

SEQ ID NO: 183542 - RNA, 19 nt, Artificial Sequence
  Description of Artificial Sequence: Synthetic oligonucleotide
ugcauuggucacuaguaug

SEQ ID NO: 183543 - RNA, 19 nt, Artificial Sequence
  Description of Artificial Sequence: Synthetic oligonucleotide
caucuuaugauggacauga

SEQ ID NO: 183544 - RNA, 19 nt, Artificial Sequence
  Description of Artificial Sequence: Synthetic oligonucleotide
gucauuuuauacuguggcc

SEQ ID NO: 183545 - RNA, 19 nt, Artificial Sequence
  Description of Artificial Sequence: Synthetic oligonucleotide
aguaugugaaaacuaugaa

SEQ ID NO: 183546 - RNA, 19 nt, Artificial Sequence
  Description of Artificial Sequence: Synthetic oligonucleotide
gagaacagaucaucagaag

SEQ ID NO: 183547 - RNA, 19 nt, Artificial Sequence
  Description of Artificial Sequence: Synthetic oligonucleotide
ucaucauaaugcaacgaua

SEQ ID NO: 183548 - RNA, 19 nt, Artificial Sequence
  Description of Artificial Sequence: Synthetic oligonucleotide
cucucucucucuuuuaaug

SEQ ID NO: 183549 - RNA, 19 nt, Artificial Sequence
  Description of Artificial Sequence: Synthetic oligonucleotide
ucacuaguaugugaaaacu

SEQ ID NO: 183550 - RNA, 19 nt, Artificial Sequence
  Description of Artificial Sequence: Synthetic oligonucleotide
aaccacuuaauguucugua

SEQ ID NO: 183551 - RNA, 19 nt, Artificial Sequence
  Description of Artificial Sequence: Synthetic oligonucleotide
gugcuaucgaaacacagca

SEQ ID NO: 183552 - RNA, 19 nt, Artificial Sequence
  Description of Artificial Sequence: Synthetic oligonucleotide
ucaguacgaugaaagugca

SEQ ID NO: 183553 - RNA, 19 nt, Artificial Sequence
  Description of Artificial Sequence: Synthetic oligonucleotide
uucauugguacugaugaau

SEQ ID NO: 183554 - RNA, 19 nt, Artificial Sequence
  Description of Artificial Sequence: Synthetic oligonucleotide
aacuguaggauagacccaa

SEQ ID NO: 183555 - RNA, 19 nt, Artificial Sequence
  Description of Artificial Sequence: Synthetic oligonucleotide
acuaguaugugaaaacuau

SEQ ID NO: 183556 - RNA, 19 nt, Artificial Sequence
  Description of Artificial Sequence: Synthetic oligonucleotide
uuacuagaaguacgggagu

SEQ ID NO: 183557 - RNA, 19 nt, Artificial Sequence
  Description of Artificial Sequence: Synthetic oligonucleotide
uuuucucucucucucuuuu

SEQ ID NO: 183558 - RNA, 19 nt, Artificial Sequence
  Description of Artificial Sequence: Synthetic oligonucleotide
gaacagaucaucagaagaa

SEQ ID NO: 183559 - RNA, 19 nt, Artificial Sequence
  Description of Artificial Sequence: Synthetic oligonucleotide
cugauuagauauuuuacua

SEQ ID NO: 183560 - RNA, 19 nt, Artificial Sequence
  Description of Artificial Sequence: Synthetic oligonucleotide
cugaguuauguaaacauua

SEQ ID NO: 183561 - RNA, 19 nt, Artificial Sequence
  Description of Artificial Sequence: Synthetic oligonucleotide
cuacccucucugaugagag

SEQ ID NO: 183562 - RNA, 19 nt, Artificial Sequence
  Description of Artificial Sequence: Synthetic oligonucleotide
uacaguaggauggauuuau

SEQ ID NO: 183563 - RNA, 19 nt, Artificial Sequence
  Description of Artificial Sequence: Synthetic oligonucleotide
cuggcaaaucaguaucagc

SEQ ID NO: 183564 - RNA, 19 nt, Artificial Sequence
  Description of Artificial Sequence: Synthetic oligonucleotide
aaccaguugaggugguuau

SEQ ID NO: 183565 - RNA, 19 nt, Artificial Sequence
  Description of Artificial Sequence: Synthetic oligonucleotide
guauccccagugcuuaggg

SEQ ID NO: 183566 - RNA, 19 nt, Artificial Sequence
  Description of Artificial Sequence: Synthetic oligonucleotide
ggacaugacuuucaaagac

SEQ ID NO: 183567 - RNA, 19 nt, Artificial Sequence
  Description of Artificial Sequence: Synthetic oligonucleotide
uucucucucucucuuuuaa

SEQ ID NO: 183568 - RNA, 19 nt, Artificial Sequence
  Description of Artificial Sequence: Synthetic oligonucleotide
aacuaugaauuagugcaau

SEQ ID NO: 183569 - RNA, 19 nt, Artificial Sequence
  Description of Artificial Sequence: Synthetic oligonucleotide
gggguuaauaucaucaaac

SEQ ID NO: 183570 - RNA, 19 nt, Artificial Sequence
  Description of Artificial Sequence: Synthetic oligonucleotide
ugucacuaucccauuuccu

SEQ ID NO: 183571 - RNA, 19 nt, Artificial Sequence
  Description of Artificial Sequence: Synthetic oligonucleotide
ugcucuagagagaaucaua

SEQ ID NO: 183572 - RNA, 19 nt, Artificial Sequence
  Description of Artificial Sequence: Synthetic oligonucleotide
auaaugcaacgauagcaaa

SEQ ID NO: 183573 - RNA, 19 nt, Artificial Sequence
  Description of Artificial Sequence: Synthetic oligonucleotide
gcuaucgaaacacagcaca

SEQ ID NO: 183574 - RNA, 19 nt, Artificial Sequence
  Description of Artificial Sequence: Synthetic oligonucleotide
gugguuaucauuauuauuu

SEQ ID NO: 183575 - RNA, 19 nt, Artificial Sequence
  Description of Artificial Sequence: Synthetic oligonucleotide
cagugcuaucgaaacacag

SEQ ID NO: 183576 - RNA, 19 nt, Artificial Sequence
  Description of Artificial Sequence: Synthetic oligonucleotide
cucuagagagaaucauaag

SEQ ID NO: 183577 - RNA, 19 nt, Artificial Sequence
  Description of Artificial Sequence: Synthetic oligonucleotide
guaguucuagcaauugcug

SEQ ID NO: 183578 - RNA, 19 nt, Artificial Sequence
  Description of Artificial Sequence: Synthetic oligonucleotide
aaugaacuagguagcuucu

SEQ ID NO: 183579 - RNA, 19 nt, Artificial Sequence
  Description of Artificial Sequence: Synthetic oligonucleotide
ucuccuuguuagcuguugu

SEQ ID NO: 183580 - RNA, 19 nt, Artificial Sequence
  Description of Artificial Sequence: Synthetic oligonucleotide
auaucacuaaugauaauuu

SEQ ID NO: 183581 - RNA, 19 nt, Artificial Sequence
  Description of Artificial Sequence: Synthetic oligonucleotide
uauugucggcagcagguuc

SEQ ID NO: 183582 - RNA, 19 nt, Artificial Sequence
  Description of Artificial Sequence: Synthetic oligonucleotide
aagcuuuuacauacaagau

SEQ ID NO: 183583 - RNA, 19 nt, Artificial Sequence
  Description of Artificial Sequence: Synthetic oligonucleotide
guugaggugguuaucauua

SEQ ID NO: 183584 - RNA, 19 nt, Artificial Sequence
  Description of Artificial Sequence: Synthetic oligonucleotide
aaacuaugaauuagugcaa

SEQ ID NO: 183585 - RNA, 19 nt, Artificial Sequence
  Description of Artificial Sequence: Synthetic oligonucleotide
ucuacacgauauacacaug

SEQ ID NO: 183586 - RNA, 19 nt, Artificial Sequence
  Description of Artificial Sequence: Synthetic oligonucleotide
gaaagugcaggucauguuu

SEQ ID NO: 183587 - RNA, 19 nt, Artificial Sequence
  Description of Artificial Sequence: Synthetic oligonucleotide
accacuuaauguucuguaa

SEQ ID NO: 183588 - RNA, 19 nt, Artificial Sequence
  Description of Artificial Sequence: Synthetic oligonucleotide
ugcuaucgaaacacagcac

SEQ ID NO: 183589 - RNA, 19 nt, Artificial Sequence
  Description of Artificial Sequence: Synthetic oligonucleotide
uuaugcuuuuccccagcuc

SEQ ID NO: 183590 - RNA, 19 nt, Artificial Sequence
  Description of Artificial Sequence: Synthetic oligonucleotide
gucacuaucccauuuccua

SEQ ID NO: 183591 - RNA, 19 nt, Artificial Sequence
  Description of Artificial Sequence: Synthetic oligonucleotide
aguggcuauauaucacuaa

SEQ ID NO: 183592 - RNA, 19 nt, Artificial Sequence
  Description of Artificial Sequence: Synthetic oligonucleotide
gagaaucauaagggugugg

SEQ ID NO: 183593 - RNA, 19 nt, Artificial Sequence
  Description of Artificial Sequence: Synthetic oligonucleotide
uuauggcucaauaguccaa

SEQ ID NO: 183594 - RNA, 19 nt, Artificial Sequence
  Description of Artificial Sequence: Synthetic oligonucleotide
acuaugaauuagugcaauu

SEQ ID NO: 183595 - RNA, 19 nt, Artificial Sequence
  Description of Artificial Sequence: Synthetic oligonucleotide
gguaaguacagacaguuau

SEQ ID NO: 183596 - RNA, 19 nt, Artificial Sequence
  Description of Artificial Sequence: Synthetic oligonucleotide
ucccacuuuaggguaaacu

SEQ ID NO: 183597 - RNA, 19 nt, Artificial Sequence
  Description of Artificial Sequence: Synthetic oligonucleotide
cuuacgaaaacacuucaau

SEQ ID NO: 183598 - RNA, 19 nt, Artificial Sequence
  Description of Artificial Sequence: Synthetic oligonucleotide
guauccgucacagaagaaa

SEQ ID NO: 183599 - RNA, 19 nt, Artificial Sequence
  Description of Artificial Sequence: Synthetic oligonucleotide
cuacacgauauacacaugu

SEQ ID NO: 183600 - RNA, 19 nt, Artificial Sequence
  Description of Artificial Sequence: Synthetic oligonucleotide
aguggugugucggcuaaag

SEQ ID NO: 183601 - RNA, 19 nt, Artificial Sequence
  Description of Artificial Sequence: Synthetic oligonucleotide
auguucuaaauugcugugu

SEQ ID NO: 183602 - RNA, 19 nt, Artificial Sequence
  Description of Artificial Sequence: Synthetic oligonucleotide
cuaucccauuuccuacacg

SEQ ID NO: 183603 - RNA, 19 nt, Artificial Sequence
  Description of Artificial Sequence: Synthetic oligonucleotide
aguuuucucucucucucuu

SEQ ID NO: 183604 - RNA, 19 nt, Artificial Sequence
  Description of Artificial Sequence: Synthetic oligonucleotide
agauaaaaucuugggcaca

SEQ ID NO: 183605 - RNA, 19 nt, Artificial Sequence
  Description of Artificial Sequence: Synthetic oligonucleotide
cuccaccuauagaaguagc

SEQ ID NO: 183606 - RNA, 19 nt, Artificial Sequence
  Description of Artificial Sequence: Synthetic oligonucleotide
uacccucucugaugagagg

SEQ ID NO: 183607 - RNA, 19 nt, Artificial Sequence
  Description of Artificial Sequence: Synthetic oligonucleotide
agagaaucauaagggugug

SEQ ID NO: 183608 - RNA, 19 nt, Artificial Sequence
  Description of Artificial Sequence: Synthetic oligonucleotide
ggagcuacccucucugaug

SEQ ID NO: 183609 - RNA, 19 nt, Artificial Sequence
  Description of Artificial Sequence: Synthetic oligonucleotide
auuuaugagaaaggcgaua

SEQ ID NO: 183610 - RNA, 19 nt, Artificial Sequence
  Description of Artificial Sequence: Synthetic oligonucleotide
ggaauugugaccucuucua

SEQ ID NO: 183611 - RNA, 19 nt, Artificial Sequence
  Description of Artificial Sequence: Synthetic oligonucleotide
ugugucggcuaaaggcagu

SEQ ID NO: 183612 - RNA, 19 nt, Artificial Sequence
  Description of Artificial Sequence: Synthetic oligonucleotide
ggaguuucgcucccgcucc

SEQ ID NO: 183613 - RNA, 19 nt, Artificial Sequence
  Description of Artificial Sequence: Synthetic oligonucleotide
ucucucucucucuuuuaau

SEQ ID NO: 183614 - RNA, 19 nt, Artificial Sequence
  Description of Artificial Sequence: Synthetic oligonucleotide
uguauccgucacagaagaa

SEQ ID NO: 183615 - RNA, 19 nt, Artificial Sequence
  Description of Artificial Sequence: Synthetic oligonucleotide
cacaauuggucaaguauua

SEQ ID NO: 183616 - RNA, 19 nt, Artificial Sequence
  Description of Artificial Sequence: Synthetic oligonucleotide
agcgucuacuagagggagc

SEQ ID NO: 183617 - RNA, 19 nt, Artificial Sequence
  Description of Artificial Sequence: Synthetic oligonucleotide
caguuuuaagguggagggc

SEQ ID NO: 183618 - RNA, 19 nt, Artificial Sequence
  Description of Artificial Sequence: Synthetic oligonucleotide
uuaguuccuuaggaauaga

SEQ ID NO: 183619 - RNA, 19 nt, Artificial Sequence
  Description of Artificial Sequence: Synthetic oligonucleotide
caguacgaugaaagugcag

SEQ ID NO: 183620 - RNA, 19 nt, Artificial Sequence
  Description of Artificial Sequence: Synthetic oligonucleotide
gaagacaauccuccacaua

SEQ ID NO: 183621 - RNA, 19 nt, Artificial Sequence
  Description of Artificial Sequence: Synthetic oligonucleotide
uuucucucucucucuuuua

SEQ ID NO: 183622 - RNA, 19 nt, Artificial Sequence
  Description of Artificial Sequence: Synthetic oligonucleotide
ggugugucggcuaaaggca

SEQ ID NO: 183623 - RNA, 19 nt, Artificial Sequence
  Description of Artificial Sequence: Synthetic oligonucleotide
aaccuaacuguaggauaga

SEQ ID NO: 183624 - RNA, 19 nt, Artificial Sequence
  Description of Artificial Sequence: Synthetic oligonucleotide
acuuacgaaaacacuucaa

SEQ ID NO: 183625 - RNA, 19 nt, Artificial Sequence
  Description of Artificial Sequence: Synthetic oligonucleotide
uuacaggaacaaccaucau

SEQ ID NO: 183626 - RNA, 19 nt, Artificial Sequence
  Description of Artificial Sequence: Synthetic oligonucleotide
guuuuaagguggagggcac

SEQ ID NO: 183627 - RNA, 19 nt, Artificial Sequence
  Description of Artificial Sequence: Synthetic oligonucleotide
gcgauagaaauauugacuu

SEQ ID NO: 183628 - RNA, 19 nt, Artificial Sequence
  Description of Artificial Sequence: Synthetic oligonucleotide
cauuggucacuaguaugug

SEQ ID NO: 183629 - RNA, 19 nt, Artificial Sequence
  Description of Artificial Sequence: Synthetic oligonucleotide
gaaggacacuaguuuuaaa

SEQ ID NO: 183630 - RNA, 19 nt, Artificial Sequence
  Description of Artificial Sequence: Synthetic oligonucleotide
aggaccuugagagcaacua

SEQ ID NO: 183631 - RNA, 19 nt, Artificial Sequence
  Description of Artificial Sequence: Synthetic oligonucleotide
gcgucuacuagagggagcc

SEQ ID NO: 183632 - RNA, 19 nt, Artificial Sequence
  Description of Artificial Sequence: Synthetic oligonucleotide
ggacuuacgaaaacacuuc

SEQ ID NO: 183633 - RNA, 19 nt, Artificial Sequence
  Description of Artificial Sequence: Synthetic oligonucleotide
cuguagggaagcuauaguu

SEQ ID NO: 183634 - RNA, 19 nt, Artificial Sequence
  Description of Artificial Sequence: Synthetic oligonucleotide
acuuuaggguaaacuaaau

SEQ ID NO: 183635 - RNA, 19 nt, Artificial Sequence
  Description of Artificial Sequence: Synthetic oligonucleotide
gugugucggcuaaaggcag

SEQ ID NO: 183636 - RNA, 19 nt, Artificial Sequence
  Description of Artificial Sequence: Synthetic oligonucleotide
ggcgauagaaauauugacu

SEQ ID NO: 183637 - RNA, 19 nt, Artificial Sequence
  Description of Artificial Sequence: Synthetic oligonucleotide
gaguccgggguacuggcaa

SEQ ID NO: 183638 - RNA, 19 nt, Artificial Sequence
  Description of Artificial Sequence: Synthetic oligonucleotide
ucgcugcacaacucauucu

SEQ ID NO: 183639 - RNA, 19 nt, Artificial Sequence
  Description of Artificial Sequence: Synthetic oligonucleotide
cuuucauagcuccaccuau

SEQ ID NO: 183640 - RNA, 19 nt, Artificial Sequence
  Description of Artificial Sequence: Synthetic oligonucleotide
acuagaaguacgggaguuu

SEQ ID NO: 183641 - RNA, 19 nt, Artificial Sequence
  Description of Artificial Sequence: Synthetic oligonucleotide
guacgaugaaagugcaggu

SEQ ID NO: 183642 - RNA, 19 nt, Artificial Sequence
  Description of Artificial Sequence: Synthetic oligonucleotide
uacgggaguuucgcucccg

SEQ ID NO: 183643 - RNA, 19 nt, Artificial Sequence
  Description of Artificial Sequence: Synthetic oligonucleotide
cagcaugacuuagauauaa

SEQ ID NO: 183644 - RNA, 19 nt, Artificial Sequence
  Description of Artificial Sequence: Synthetic oligonucleotide
ccaccuauagaaguagcac

SEQ ID NO: 183645 - RNA, 19 nt, Artificial Sequence
  Description of Artificial Sequence: Synthetic oligonucleotide
agcucuauuucuacacgau

SEQ ID NO: 183646 - RNA, 19 nt, Artificial Sequence
  Description of Artificial Sequence: Synthetic oligonucleotide
ccaugcucacacuauuuuc

SEQ ID NO: 183647 - RNA, 19 nt, Artificial Sequence
  Description of Artificial Sequence: Synthetic oligonucleotide
cccacuuuaggguaaacua

SEQ ID NO: 183648 - RNA, 19 nt, Artificial Sequence
  Description of Artificial Sequence: Synthetic oligonucleotide
ggcggagucgagaugagga

SEQ ID NO: 183649 - RNA, 19 nt, Artificial Sequence
  Description of Artificial Sequence: Synthetic oligonucleotide
gaaagagucaagggccacu

SEQ ID NO: 183650 - RNA, 19 nt, Artificial Sequence
  Description of Artificial Sequence: Synthetic oligonucleotide
gaaguacgggaguuucgcu

SEQ ID NO: 183651 - RNA, 19 nt, Artificial Sequence
  Description of Artificial Sequence: Synthetic oligonucleotide
uagagggagccuucauauu

SEQ ID NO: 183652 - RNA, 19 nt, Artificial Sequence
  Description of Artificial Sequence: Synthetic oligonucleotide
guaccauuauucugggcau

SEQ ID NO: 183653 - RNA, 19 nt, Artificial Sequence
  Description of Artificial Sequence: Synthetic oligonucleotide
gcugugcaauggaacaucc

SEQ ID NO: 183654 - RNA, 19 nt, Artificial Sequence
  Description of Artificial Sequence: Synthetic oligonucleotide
gcuccaccuauagaaguag

SEQ ID NO: 183655 - RNA, 19 nt, Artificial Sequence
  Description of Artificial Sequence: Synthetic oligonucleotide
ggucaacuccuguagggaa

SEQ ID NO: 183656 - RNA, 19 nt, Artificial Sequence
  Description of Artificial Sequence: Synthetic oligonucleotide
auauugucggcagcagguu

SEQ ID NO: 183657 - RNA, 19 nt, Artificial Sequence
  Description of Artificial Sequence: Synthetic oligonucleotide
caauguucuauagguaagu

SEQ ID NO: 183658 - RNA, 19 nt, Artificial Sequence
  Description of Artificial Sequence: Synthetic oligonucleotide
agcaugacuuagauauaaa

SEQ ID NO: 183659 - RNA, 19 nt, Artificial Sequence
  Description of Artificial Sequence: Synthetic oligonucleotide
gaaaggacguuuccuucuu

SEQ ID NO: 183660 - RNA, 19 nt, Artificial Sequence
  Description of Artificial Sequence: Synthetic oligonucleotide
aggcacaauuggucaagua

SEQ ID NO: 183661 - RNA, 19 nt, Artificial Sequence
  Description of Artificial Sequence: Synthetic oligonucleotide
guaugauuauuuaguuccu

SEQ ID NO: 183662 - RNA, 19 nt, Artificial Sequence
  Description of Artificial Sequence: Synthetic oligonucleotide
gcauuggucacuaguaugu

SEQ ID NO: 183663 - RNA, 19 nt, Artificial Sequence
  Description of Artificial Sequence: Synthetic oligonucleotide
ccacuuaauguucuguaaa

SEQ ID NO: 183664 - RNA, 19 nt, Artificial Sequence
  Description of Artificial Sequence: Synthetic oligonucleotide
gaccuugagagcaacuauu

SEQ ID NO: 183665 - RNA, 19 nt, Artificial Sequence
  Description of Artificial Sequence: Synthetic oligonucleotide
auaucccacuuuaggguaa

SEQ ID NO: 183666 - RNA, 19 nt, Artificial Sequence
  Description of Artificial Sequence: Synthetic oligonucleotide
agcuccaccuauagaagua

SEQ ID NO: 183667 - RNA, 19 nt, Artificial Sequence
  Description of Artificial Sequence: Synthetic oligonucleotide
aguccgggguacuggcaaa

SEQ ID NO: 183668 - RNA, 19 nt, Artificial Sequence
  Description of Artificial Sequence: Synthetic oligonucleotide
cuacuacauaacucaacuu

SEQ ID NO: 183669 - RNA, 19 nt, Artificial Sequence
  Description of Artificial Sequence: Synthetic oligonucleotide
cauuccguaagcucccauu

SEQ ID NO: 183670 - RNA, 19 nt, Artificial Sequence
  Description of Artificial Sequence: Synthetic oligonucleotide
caguuuucucucucucucu

SEQ ID NO: 183671 - RNA, 19 nt, Artificial Sequence
  Description of Artificial Sequence: Synthetic oligonucleotide
guuuucucucucucucuuu

SEQ ID NO: 183672 - RNA, 19 nt, Artificial Sequence
  Description of Artificial Sequence: Synthetic oligonucleotide
gucuacuagagggagccuu

SEQ ID NO: 183673 - RNA, 19 nt, Artificial Sequence
  Description of Artificial Sequence: Synthetic oligonucleotide
aggcugauuuaagcucuau

SEQ ID NO: 183674 - RNA, 19 nt, Artificial Sequence
  Description of Artificial Sequence: Synthetic oligonucleotide
gccccuguguauccgucac

SEQ ID NO: 183675 - RNA, 19 nt, Artificial Sequence
  Description of Artificial Sequence: Synthetic oligonucleotide
ggaccuugagagcaacuau

SEQ ID NO: 183676 - RNA, 19 nt, Artificial Sequence
  Description of Artificial Sequence: Synthetic oligonucleotide
gaaaggcgauagaaauauu

SEQ ID NO: 183677 - RNA, 19 nt, Artificial Sequence
  Description of Artificial Sequence: Synthetic oligonucleotide
cugcucuagagagaaucau

SEQ ID NO: 183678 - RNA, 19 nt, Artificial Sequence
  Description of Artificial Sequence: Synthetic oligonucleotide
gguguucacucaucauaau

SEQ ID NO: 183679 - RNA, 19 nt, Artificial Sequence
  Description of Artificial Sequence: Synthetic oligonucleotide
ccuacacgcacaguuugaa

SEQ ID NO: 183680 - RNA, 19 nt, Artificial Sequence
  Description of Artificial Sequence: Synthetic oligonucleotide
ccuguagggaagcuauagu

SEQ ID NO: 183681 - RNA, 19 nt, Artificial Sequence
  Description of Artificial Sequence: Synthetic oligonucleotide
ggauagacccaagcugagu

SEQ ID NO: 183682 - RNA, 19 nt, Artificial Sequence
  Description of Artificial Sequence: Synthetic oligonucleotide
cagccaugcucacacuauu

SEQ ID NO: 183683 - RNA, 19 nt, Artificial Sequence
  Description of Artificial Sequence: Synthetic oligonucleotide
gugucggcuaaaggcaguu

SEQ ID NO: 183684 - RNA, 19 nt, Artificial Sequence
  Description of Artificial Sequence: Synthetic oligonucleotide
ggaguccgggguacuggca

SEQ ID NO: 183685 - RNA, 19 nt, Artificial Sequence
  Description of Artificial Sequence: Synthetic oligonucleotide
ccgucacagaagaaacagu

SEQ ID NO: 183686 - RNA, 19 nt, Artificial Sequence
  Description of Artificial Sequence: Synthetic oligonucleotide
cauuuccuacacgcacagu

SEQ ID NO: 183687 - RNA, 19 nt, Artificial Sequence
  Description of Artificial Sequence: Synthetic oligonucleotide
cccaaguucaguggcuaua

SEQ ID NO: 183688 - RNA, 19 nt, Artificial Sequence
  Description of Artificial Sequence: Synthetic oligonucleotide
cgauagaaauauugacuuu

SEQ ID NO: 183689 - RNA, 19 nt, Artificial Sequence
  Description of Artificial Sequence: Synthetic oligonucleotide
cggagucgagaugaggaaa

SEQ ID NO: 183690 - RNA, 19 nt, Artificial Sequence
  Description of Artificial Sequence: Synthetic oligonucleotide
ccuauagaaguagcacuuu

SEQ ID NO: 183691 - RNA, 19 nt, Artificial Sequence
  Description of Artificial Sequence: Synthetic oligonucleotide
uauucuaugagaaugaaug

SEQ ID NO: 183692 - RNA, 19 nt, Artificial Sequence
  Description of Artificial Sequence: Synthetic oligonucleotide
gauagaauacucuuaagag

SEQ ID NO: 183693 - RNA, 19 nt, Artificial Sequence
  Description of Artificial Sequence: Synthetic oligonucleotide
aauaagaaugccucuuggc

SEQ ID NO: 183694 - RNA, 19 nt, Artificial Sequence
  Description of Artificial Sequence: Synthetic oligonucleotide
auaagaaugccucuuggcc

SEQ ID NO: 183695 - RNA, 19 nt, Artificial Sequence
  Description of Artificial Sequence: Synthetic oligonucleotide
ugacauaucuguaucacgg

SEQ ID NO: 183696 - RNA, 19 nt, Artificial Sequence
  Description of Artificial Sequence: Synthetic oligonucleotide
  modified_base (2)..(2): a, c, u, g, unknown or other
cnuauaaagguccagaaac

SEQ ID NO: 183697 - RNA, 19 nt, Artificial Sequence
  Description of Artificial Sequence: Synthetic oligonucleotide
gacgaauucaaguacaaag

SEQ ID NO: 183698 - RNA, 19 nt, Artificial Sequence
  Description of Artificial Sequence: Synthetic oligonucleotide
gaaacuauuaggcacauca

SEQ ID NO: 183699 - RNA, 19 nt, Artificial Sequence
  Description of Artificial Sequence: Synthetic oligonucleotide
uaagguauuagaaaagaug

SEQ ID NO: 183700 - RNA, 19 nt, Artificial Sequence
  Description of Artificial Sequence: Synthetic oligonucleotide
aaguguaacauuuuaccag

SEQ ID NO: 183701 - RNA, 19 nt, Artificial Sequence
  Description of Artificial Sequence: Synthetic oligonucleotide
uaaauuaugucacaugaac

SEQ ID NO: 183702 - RNA, 19 nt, Artificial Sequence
  Description of Artificial Sequence: Synthetic oligonucleotide
ugauagaauacucuuaaga

SEQ ID NO: 183703 - RNA, 19 nt, Artificial Sequence
  Description of Artificial Sequence: Synthetic oligonucleotide
aaauaagaaugccucuugg

SEQ ID NO: 183704 - RNA, 19 nt, Artificial Sequence
  Description of Artificial Sequence: Synthetic oligonucleotide
uuucaauuauuaaauuucc

SEQ ID NO: 183705 - RNA, 19 nt, Artificial Sequence
  Description of Artificial Sequence: Synthetic oligonucleotide
  modified_base (12)..(12): a, c, u, g, unknown or other
uguaagcaagcnuauaaag

SEQ ID NO: 183706 - RNA, 19 nt, Artificial Sequence
  Description of Artificial Sequence: Synthetic oligonucleotide
aauuaugucacaugaacua

SEQ ID NO: 183707 - RNA, 19 nt, Artificial Sequence
  Description of Artificial Sequence: Synthetic oligonucleotide
guaaguguaacauuuuacc

SEQ ID NO: 183708 - RNA, 19 nt, Artificial Sequence
  Description of Artificial Sequence: Synthetic oligonucleotide
ucuguaauugagcaguuca

SEQ ID NO: 183709 - RNA, 19 nt, Artificial Sequence
  Description of Artificial Sequence: Synthetic oligonucleotide
gaugaucuuucauugaccc

SEQ ID NO: 183710 - RNA, 19 nt, Artificial Sequence
  Description of Artificial Sequence: Synthetic oligonucleotide
uaagucuacacugagacga

SEQ ID NO: 183711 - RNA, 19 nt, Artificial Sequence
  Description of Artificial Sequence: Synthetic oligonucleotide
aacuaguccuguuuaacag

SEQ ID NO: 183712 - RNA, 19 nt, Artificial Sequence
  Description of Artificial Sequence: Synthetic oligonucleotide
aaucguaugccguggagag

SEQ ID NO: 183713 - RNA, 19 nt, Artificial Sequence
  Description of Artificial Sequence: Synthetic oligonucleotide
aaugaaugcgcuaugacga

SEQ ID NO: 183714 - RNA, 19 nt, Artificial Sequence
  Description of Artificial Sequence: Synthetic oligonucleotide
agauauaccaacaaauguc

SEQ ID NO: 183715 - RNA, 19 nt, Artificial Sequence
  Description of Artificial Sequence: Synthetic oligonucleotide
ucuuaagagggaaaacuag

SEQ ID NO: 183716 - RNA, 19 nt, Artificial Sequence
  Description of Artificial Sequence: Synthetic oligonucleotide
auauaagcuaagucuacac

SEQ ID NO: 183717 - RNA, 19 nt, Artificial Sequence
  Description of Artificial Sequence: Synthetic oligonucleotide
uaaccauuuguuaagacau

SEQ ID NO: 183718 - RNA, 19 nt, Artificial Sequence
  Description of Artificial Sequence: Synthetic oligonucleotide
acauaucuguaucacggcc

SEQ ID NO: 183719 - RNA, 19 nt, Artificial Sequence
  Description of Artificial Sequence: Synthetic oligonucleotide
aaccacuacaguuauaaaa

SEQ ID NO: 183720 - RNA, 19 nt, Artificial Sequence
  Description of Artificial Sequence: Synthetic oligonucleotide
acaccugaaacuauuaggc

SEQ ID NO: 183721 - RNA, 19 nt, Artificial Sequence
  Description of Artificial Sequence: Synthetic oligonucleotide
uguagucuguaauugagca

SEQ ID NO: 183722 - RNA, 19 nt, Artificial Sequence
  Description of Artificial Sequence: Synthetic oligonucleotide
uaaagguccagaaacauuu

SEQ ID NO: 183723 - RNA, 19 nt, Artificial Sequence
  Description of Artificial Sequence: Synthetic oligonucleotide
  modified_base (14)..(14): a, c, u, g, unknown or other
aguguaagcaagcnuauaa

SEQ ID NO: 183724 - RNA, 19 nt, Artificial Sequence
  Description of Artificial Sequence: Synthetic oligonucleotide
aucaacuaagaaauguucc

SEQ ID NO: 183725 - RNA, 19 nt, Artificial Sequence
  Description of Artificial Sequence: Synthetic oligonucleotide
gaagccuccauacacuggg

SEQ ID NO: 183726 - RNA, 19 nt, Artificial Sequence
  Description of Artificial Sequence: Synthetic oligonucleotide
aacuuaaguaugagaagcc

SEQ ID NO: 183727 - RNA, 19 nt, Artificial Sequence
  Description of Artificial Sequence: Synthetic oligonucleotide
acgaauucaaguacaaagc

SEQ ID NO: 183728 - RNA, 19 nt, Artificial Sequence
  Description of Artificial Sequence: Synthetic oligonucleotide
ucaucuacuuaguugaacu

SEQ ID NO: 183729 - RNA, 19 nt, Artificial Sequence
  Description of Artificial Sequence: Synthetic oligonucleotide
  modified_base (11)..(11): a, c, u, g, unknown or other
guaagcaagcnuauaaagg

SEQ ID NO: 183730 - RNA, 19 nt, Artificial Sequence
  Description of Artificial Sequence: Synthetic oligonucleotide
uagaacuacagcuaacugu

SEQ ID NO: 183731 - RNA, 19 nt, Artificial Sequence
  Description of Artificial Sequence: Synthetic oligonucleotide
ugaacuuaaguaugagaag

SEQ ID NO: 183732 - RNA, 19 nt, Artificial Sequence
  Description of Artificial Sequence: Synthetic oligonucleotide
acuuaguugaacuuucaca

SEQ ID NO: 183733 - RNA, 19 nt, Artificial Sequence
  Description of Artificial Sequence: Synthetic oligonucleotide
aaugggucuauuuaauuuu

SEQ ID NO: 183734 - RNA, 19 nt, Artificial Sequence
  Description of Artificial Sequence: Synthetic oligonucleotide
uauaagcuaagucuacacu

SEQ ID NO: 183735 - RNA, 19 nt, Artificial Sequence
  Description of Artificial Sequence: Synthetic oligonucleotide
  modified_base (8)..(8): a, c, u, g, unknown or other
agcaagcnuauaaaggucc

SEQ ID NO: 183736 - RNA, 19 nt, Artificial Sequence
  Description of Artificial Sequence: Synthetic oligonucleotide
cugaacuuaaguaugagaa

SEQ ID NO: 183737 - RNA, 19 nt, Artificial Sequence
  Description of Artificial Sequence: Synthetic oligonucleotide
uuuauguaguucaggaguc

SEQ ID NO: 183738 - RNA, 19 nt, Artificial Sequence
  Description of Artificial Sequence: Synthetic oligonucleotide
gaugcuuccagguguauac

SEQ ID NO: 183739 - RNA, 19 nt, Artificial Sequence
  Description of Artificial Sequence: Synthetic oligonucleotide
ugugcuucgucucuuaguc

SEQ ID NO: 183740 - RNA, 19 nt, Artificial Sequence
  Description of Artificial Sequence: Synthetic oligonucleotide
aguguaacauuuuaccaga

SEQ ID NO: 183741 - RNA, 19 nt, Artificial Sequence
  Description of Artificial Sequence: Synthetic oligonucleotide
caaguauauagcuguauac

SEQ ID NO: 183742 - RNA, 19 nt, Artificial Sequence
  Description of Artificial Sequence: Synthetic oligonucleotide
acuauuaggcacaucaaag

SEQ ID NO: 183743 - RNA, 19 nt, Artificial Sequence
  Description of Artificial Sequence: Synthetic oligonucleotide
ugagacgaauucaaguaca

SEQ ID NO: 183744 - RNA, 19 nt, Artificial Sequence
  Description of Artificial Sequence: Synthetic oligonucleotide
ucugacauuucacuaaaua

SEQ ID NO: 183745 - RNA, 19 nt, Artificial Sequence
  Description of Artificial Sequence: Synthetic oligonucleotide
uaagcuaagucuacacuga

SEQ ID NO: 183746 - RNA, 19 nt, Artificial Sequence
  Description of Artificial Sequence: Synthetic oligonucleotide
gcuaugacgacacauuagg

SEQ ID NO: 183747 - RNA, 19 nt, Artificial Sequence
  Description of Artificial Sequence: Synthetic oligonucleotide
aguuuauguaguucaggag

SEQ ID NO: 183748 - RNA, 19 nt, Artificial Sequence
  Description of Artificial Sequence: Synthetic oligonucleotide
cauaucuguaucacggccc

SEQ ID NO: 183749 - RNA, 19 nt, Artificial Sequence
  Description of Artificial Sequence: Synthetic oligonucleotide
ucaaguauauagcuguaua

SEQ ID NO: 183750 - RNA, 19 nt, Artificial Sequence
  Description of Artificial Sequence: Synthetic oligonucleotide
aaugccucuuggccuaaac

SEQ ID NO: 183751 - RNA, 19 nt, Artificial Sequence
  Description of Artificial Sequence: Synthetic oligonucleotide
uuaagagggaaaacuaguu

SEQ ID NO: 183752 - RNA, 19 nt, Artificial Sequence
  Description of Artificial Sequence: Synthetic oligonucleotide
ugaucaacuaagaaauguu

SEQ ID NO: 183753 - RNA, 19 nt, Artificial Sequence
  Description of Artificial Sequence: Synthetic oligonucleotide
acuacagcuaacuguauau

SEQ ID NO: 183754 - RNA, 19 nt, Artificial Sequence
  Description of Artificial Sequence: Synthetic oligonucleotide
caacaaagugaacuagucc

SEQ ID NO: 183755 - RNA, 19 nt, Artificial Sequence
  Description of Artificial Sequence: Synthetic oligonucleotide
guucgcuucaguuagaacu

SEQ ID NO: 183756 - RNA, 19 nt, Artificial Sequence
  Description of Artificial Sequence: Synthetic oligonucleotide
  modified_base (5)..(5): a, c, u, g, unknown or other
aagcnuauaaagguccaga

SEQ ID NO: 183757 - RNA, 19 nt, Artificial Sequence
  Description of Artificial Sequence: Synthetic oligonucleotide
  modified_base (9)..(9): a, c, u, g, unknown or other
aagcaagcnuauaaagguc

SEQ ID NO: 183758 - RNA, 19 nt, Artificial Sequence
  Description of Artificial Sequence: Synthetic oligonucleotide
auucaaguggaucacgcaa

SEQ ID NO: 183759 - RNA, 19 nt, Artificial Sequence
  Description of Artificial Sequence: Synthetic oligonucleotide
uacgaaugggucuauuuaa

SEQ ID NO: 183760 - RNA, 19 nt, Artificial Sequence
  Description of Artificial Sequence: Synthetic oligonucleotide
guaugagaagccuccauac

SEQ ID NO: 183761 - RNA, 19 nt, Artificial Sequence
  Description of Artificial Sequence: Synthetic oligonucleotide
uuaugucacaugaacuaaa

SEQ ID NO: 183762 - RNA, 19 nt, Artificial Sequence
  Description of Artificial Sequence: Synthetic oligonucleotide
ucuguagaucuuuaugaaa

SEQ ID NO: 183763 - RNA, 19 nt, Artificial Sequence
  Description of Artificial Sequence: Synthetic oligonucleotide
gaacuaguccuguuuaaca

SEQ ID NO: 183764 - RNA, 19 nt, Artificial Sequence
  Description of Artificial Sequence: Synthetic oligonucleotide
cacgagacaacaugccugg

SEQ ID NO: 183765 - RNA, 19 nt, Artificial Sequence
  Description of Artificial Sequence: Synthetic oligonucleotide
acaccuuuaccucaauacu

SEQ ID NO: 183766 - RNA, 19 nt, Artificial Sequence
  Description of Artificial Sequence: Synthetic oligonucleotide
  modified_base (4)..(4): a, c, u, g, unknown or other
agcnuauaaagguccagaa

SEQ ID NO: 183767 - RNA, 19 nt, Artificial Sequence
  Description of Artificial Sequence: Synthetic oligonucleotide
agacaccugaaacuauuag

SEQ ID NO: 183768 - RNA, 19 nt, Artificial Sequence
  Description of Artificial Sequence: Synthetic oligonucleotide
uuucauugacccuuccggu

SEQ ID NO: 183769 - RNA, 19 nt, Artificial Sequence
  Description of Artificial Sequence: Synthetic oligonucleotide
ggguguauuaaugaugggg

SEQ ID NO: 183770 - RNA, 19 nt, Artificial Sequence
  Description of Artificial Sequence: Synthetic oligonucleotide
gacauaucuguaucacggc

SEQ ID NO: 183771 - RNA, 19 nt, Artificial Sequence
  Description of Artificial Sequence: Synthetic oligonucleotide
uauaaagguccagaaacau

SEQ ID NO: 183772 - RNA, 19 nt, Artificial Sequence
  Description of Artificial Sequence: Synthetic oligonucleotide
gcaaguucgcuucaguuag

SEQ ID NO: 183773 - RNA, 19 nt, Artificial Sequence
  Description of Artificial Sequence: Synthetic oligonucleotide
gaauacucuuaagaguuac

SEQ ID NO: 183774 - RNA, 19 nt, Artificial Sequence
  Description of Artificial Sequence: Synthetic oligonucleotide
gauauaccaacaaaugucu

SEQ ID NO: 183775 - RNA, 19 nt, Artificial Sequence
  Description of Artificial Sequence: Synthetic oligonucleotide
augaaugcgcuaugacgac

SEQ ID NO: 183776 - RNA, 19 nt, Artificial Sequence
  Description of Artificial Sequence: Synthetic oligonucleotide
uaugcaguuguugauccac

SEQ ID NO: 183777 - RNA, 19 nt, Artificial Sequence
  Description of Artificial Sequence: Synthetic oligonucleotide
guuacaacugaguaagugu

SEQ ID NO: 183778 - RNA, 19 nt, Artificial Sequence
  Description of Artificial Sequence: Synthetic oligonucleotide
uucccaucccuuuaauaca

SEQ ID NO: 183779 - RNA, 19 nt, Artificial Sequence
  Description of Artificial Sequence: Synthetic oligonucleotide
caccuuuaccucaauacuc

SEQ ID NO: 183780 - RNA, 19 nt, Artificial Sequence
  Description of Artificial Sequence: Synthetic oligonucleotide
guguauuaaugauggggcc

SEQ ID NO: 183781 - RNA, 19 nt, Artificial Sequence
  Description of Artificial Sequence: Synthetic oligonucleotide
uucgcuucaguuagaacua

SEQ ID NO: 183782 - RNA, 19 nt, Artificial Sequence
  Description of Artificial Sequence: Synthetic oligonucleotide
aagaaugccucuuggccua

SEQ ID NO: 183783 - RNA, 19 nt, Artificial Sequence
  Description of Artificial Sequence: Synthetic oligonucleotide
uaugccguggagagcaagu

SEQ ID NO: 183784 - RNA, 19 nt, Artificial Sequence
  Description of Artificial Sequence: Synthetic oligonucleotide
ugaacuaguccuguuuaac

SEQ ID NO: 183785 - RNA, 19 nt, Artificial Sequence
  Description of Artificial Sequence: Synthetic oligonucleotide
agugaacuaguccuguuua

SEQ ID NO: 183786 - RNA, 19 nt, Artificial Sequence
  Description of Artificial Sequence: Synthetic oligonucleotide
ugacgacacauuaggacaa

SEQ ID NO: 183787 - RNA, 19 nt, Artificial Sequence
  Description of Artificial Sequence: Synthetic oligonucleotide
uuuagcgguugacuuggcu

SEQ ID NO: 183788 - RNA, 19 nt, Artificial Sequence
  Description of Artificial Sequence: Synthetic oligonucleotide
ugugaaugcuuuggaaaug

SEQ ID NO: 183789 - RNA, 19 nt, Artificial Sequence
  Description of Artificial Sequence: Synthetic oligonucleotide
ugucaacaacuaacaagca

SEQ ID NO: 183790 - RNA, 19 nt, Artificial Sequence
  Description of Artificial Sequence: Synthetic oligonucleotide
aguucgcuucaguuagaac

SEQ ID NO: 183791 - RNA, 19 nt, Artificial Sequence
  Description of Artificial Sequence: Synthetic oligonucleotide
gucacacgagacaacaugc

SEQ ID NO: 183792 - RNA, 19 nt, Artificial Sequence
  Description of Artificial Sequence: Synthetic oligonucleotide
uggaucacgcaaauuuauc

SEQ ID NO: 183793 - RNA, 19 nt, Artificial Sequence
  Description of Artificial Sequence: Synthetic oligonucleotide
agaucacaguccuuuauua

SEQ ID NO: 183794 - RNA, 19 nt, Artificial Sequence
  Description of Artificial Sequence: Synthetic oligonucleotide
aaacaccuuuaccucaaua

SEQ ID NO: 183795 - RNA, 19 nt, Artificial Sequence
  Description of Artificial Sequence: Synthetic oligonucleotide
agacaauugagaaaauuua

SEQ ID NO: 183796 - RNA, 19 nt, Artificial Sequence
  Description of Artificial Sequence: Synthetic oligonucleotide
aguuagaacuacagcuaac

SEQ ID NO: 183797 - RNA, 19 nt, Artificial Sequence
  Description of Artificial Sequence: Synthetic oligonucleotide
acuacgaaugggucuauuu

SEQ ID NO: 183798 - RNA, 19 nt, Artificial Sequence
  Description of Artificial Sequence: Synthetic oligonucleotide
uuauguaguucaggagucc

SEQ ID NO: 183799 - RNA, 19 nt, Artificial Sequence
  Description of Artificial Sequence: Synthetic oligonucleotide
ucaaguggaucacgcaaau

SEQ ID NO: 183800 - RNA, 19 nt, Artificial Sequence
  Description of Artificial Sequence: Synthetic oligonucleotide
aaauaugcgagcacauaua

SEQ ID NO: 183801 - RNA, 19 nt, Artificial Sequence
  Description of Artificial Sequence: Synthetic oligonucleotide
auuaugucacaugaacuaa

SEQ ID NO: 183802 - RNA, 19 nt, Artificial Sequence
  Description of Artificial Sequence: Synthetic oligonucleotide
agaucacuacgaauggguc

SEQ ID NO: 183803 - RNA, 19 nt, Artificial Sequence
  Description of Artificial Sequence: Synthetic oligonucleotide
cacuacugauagaauacuc

SEQ ID NO: 183804 - RNA, 19 nt, Artificial Sequence
  Description of Artificial Sequence: Synthetic oligonucleotide
ugaacccaacuaaagcaua

SEQ ID NO: 183805 - RNA, 19 nt, Artificial Sequence
  Description of Artificial Sequence: Synthetic oligonucleotide
caacuaacaagcacuaucu

SEQ ID NO: 183806 - RNA, 19 nt, Artificial Sequence
  Description of Artificial Sequence: Synthetic oligonucleotide
agcccuauucccauggaag

SEQ ID NO: 183807 - RNA, 19 nt, Artificial Sequence
  Description of Artificial Sequence: Synthetic oligonucleotide
gaaugggucuauuuaauuu

SEQ ID NO: 183808 - RNA, 19 nt, Artificial Sequence
  Description of Artificial Sequence: Synthetic oligonucleotide
gaaugcgcuaugacgacac

SEQ ID NO: 183809 - RNA, 19 nt, Artificial Sequence
  Description of Artificial Sequence: Synthetic oligonucleotide
ugcgcuaugacgacacauu

SEQ ID NO: 183810 - RNA, 19 nt, Artificial Sequence
  Description of Artificial Sequence: Synthetic oligonucleotide
acaccaccaaugguggcgc

SEQ ID NO: 183811 - RNA, 19 nt, Artificial Sequence
  Description of Artificial Sequence: Synthetic oligonucleotide
aauuccuccuuaaucuaaa

SEQ ID NO: 183812 - RNA, 19 nt, Artificial Sequence
  Description of Artificial Sequence: Synthetic oligonucleotide
uuccagguguauacaacaa

SEQ ID NO: 183813 - RNA, 19 nt, Artificial Sequence
  Description of Artificial Sequence: Synthetic oligonucleotide
auauaccaacaaaugucuc

SEQ ID NO: 183814 - RNA, 19 nt, Artificial Sequence
  Description of Artificial Sequence: Synthetic oligonucleotide
uggagacacauuucuaguu

SEQ ID NO: 183815 - RNA, 19 nt, Artificial Sequence
  Description of Artificial Sequence: Synthetic oligonucleotide
aaaccacuacaguuauaaa

SEQ ID NO: 183816 - RNA, 19 nt, Artificial Sequence
  Description of Artificial Sequence: Synthetic oligonucleotide
auuaucagauuuguguguu

SEQ ID NO: 183817 - RNA, 19 nt, Artificial Sequence
  Description of Artificial Sequence: Synthetic oligonucleotide
cagccuguaaguuagaaau

SEQ ID NO: 183818 - RNA, 19 nt, Artificial Sequence
  Description of Artificial Sequence: Synthetic oligonucleotide
acacgagacaacaugccug

SEQ ID NO: 183819 - RNA, 19 nt, Artificial Sequence
  Description of Artificial Sequence: Synthetic oligonucleotide
agcaguuuagcgguugacu

SEQ ID NO: 183820 - RNA, 19 nt, Artificial Sequence
  Description of Artificial Sequence: Synthetic oligonucleotide
guuagaacuacagcuaacu

SEQ ID NO: 183821 - RNA, 19 nt, Artificial Sequence
  Description of Artificial Sequence: Synthetic oligonucleotide
gcuaacuguauaucuguac

SEQ ID NO: 183822 - RNA, 19 nt, Artificial Sequence
  Description of Artificial Sequence: Synthetic oligonucleotide
aagguacaguuuauguagu

SEQ ID NO: 183823 - RNA, 19 nt, Artificial Sequence
  Description of Artificial Sequence: Synthetic oligonucleotide
uuaucagauuuguguguuc

SEQ ID NO: 183824 - RNA, 19 nt, Artificial Sequence
  Description of Artificial Sequence: Synthetic oligonucleotide
uuaacaggucaaacugcua

SEQ ID NO: 183825 - RNA, 19 nt, Artificial Sequence
  Description of Artificial Sequence: Synthetic oligonucleotide
aucuacuuaguugaacuuu

SEQ ID NO: 183826 - RNA, 19 nt, Artificial Sequence
  Description of Artificial Sequence: Synthetic oligonucleotide
uggaaucguaugccgugga

SEQ ID NO: 183827 - RNA, 19 nt, Artificial Sequence
  Description of Artificial Sequence: Synthetic oligonucleotide
gcccuauucccauggaagg

SEQ ID NO: 183828 - RNA, 19 nt, Artificial Sequence
  Description of Artificial Sequence: Synthetic oligonucleotide
  modified_base (6)..(6): a, c, u, g, unknown or other
caagcnuauaaagguccag

SEQ ID NO: 183829 - RNA, 19 nt, Artificial Sequence
  Description of Artificial Sequence: Synthetic oligonucleotide
aaauuguacuuuaguguuu

SEQ ID NO: 183830 - RNA, 19 nt, Artificial Sequence
  Description of Artificial Sequence: Synthetic oligonucleotide
gugggguguauuaaugaug

SEQ ID NO: 183831 - RNA, 19 nt, Artificial Sequence
  Description of Artificial Sequence: Synthetic oligonucleotide
augaucaccgcgggucggc

SEQ ID NO: 183832 - RNA, 19 nt, Artificial Sequence
  Description of Artificial Sequence: Synthetic oligonucleotide
aaguucgcuucaguuagaa

SEQ ID NO: 183833 - RNA, 19 nt, Artificial Sequence
  Description of Artificial Sequence: Synthetic oligonucleotide
aaugcgcuaugacgacaca

SEQ ID NO: 183834 - RNA, 19 nt, Artificial Sequence
  Description of Artificial Sequence: Synthetic oligonucleotide
ugccguggagagcaagugu

SEQ ID NO: 183835 - RNA, 19 nt, Artificial Sequence
  Description of Artificial Sequence: Synthetic oligonucleotide
ugaaugcgcuaugacgaca

SEQ ID NO: 183836 - RNA, 19 nt, Artificial Sequence
  Description of Artificial Sequence: Synthetic oligonucleotide
cuggaaucguaugccgugg

SEQ ID NO: 183837 - RNA, 19 nt, Artificial Sequence
  Description of Artificial Sequence: Synthetic oligonucleotide
cuaugacgacacauuagga

SEQ ID NO: 183838 - RNA, 19 nt, Artificial Sequence
  Description of Artificial Sequence: Synthetic oligonucleotide
uggcaaguucgcuucaguu

SEQ ID NO: 183839 - RNA, 19 nt, Artificial Sequence
  Description of Artificial Sequence: Synthetic oligonucleotide
cuacgaaugggucuauuua

SEQ ID NO: 183840 - RNA, 19 nt, Artificial Sequence
  Description of Artificial Sequence: Synthetic oligonucleotide
cuucgucucuuagucagac

SEQ ID NO: 183841 - RNA, 19 nt, Artificial Sequence
  Description of Artificial Sequence: Synthetic oligonucleotide
gaucaccgcgggucggccg

SEQ ID NO: 183842 - RNA, 19 nt, Artificial Sequence
  Description of Artificial Sequence: Synthetic oligonucleotide
caaagcacagccuguaagu

SEQ ID NO: 183843 - RNA, 19 nt, Artificial Sequence
  Description of Artificial Sequence: Synthetic oligonucleotide
gggucuauuuaauuuugga

SEQ ID NO: 183844 - RNA, 19 nt, Artificial Sequence
  Description of Artificial Sequence: Synthetic oligonucleotide
cacucaaaagaggagcuga

SEQ ID NO: 183845 - RNA, 19 nt, Artificial Sequence
  Description of Artificial Sequence: Synthetic oligonucleotide
aucguaugccguggagagc

SEQ ID NO: 183846 - RNA, 19 nt, Artificial Sequence
  Description of Artificial Sequence: Synthetic oligonucleotide
cagaucacuacgaaugggu

SEQ ID NO: 183847 - RNA, 19 nt, Artificial Sequence
  Description of Artificial Sequence: Synthetic oligonucleotide
ggaucacgcaaauuuaucu

SEQ ID NO: 183848 - RNA, 19 nt, Artificial Sequence
  Description of Artificial Sequence: Synthetic oligonucleotide
cuacagcuaacuguauauc

SEQ ID NO: 183849 - RNA, 19 nt, Artificial Sequence
  Description of Artificial Sequence: Synthetic oligonucleotide
agacauuucaccagauaua

SEQ ID NO: 183850 - RNA, 19 nt, Artificial Sequence
  Description of Artificial Sequence: Synthetic oligonucleotide
cugggauaguauuggucuc

SEQ ID NO: 183851 - RNA, 19 nt, Artificial Sequence
  Description of Artificial Sequence: Synthetic oligonucleotide
gagcaagugugcuucgucu

SEQ ID NO: 183852 - RNA, 19 nt, Artificial Sequence
  Description of Artificial Sequence: Synthetic oligonucleotide
aacuauucccacacagcuu

SEQ ID NO: 183853 - RNA, 19 nt, Artificial Sequence
  Description of Artificial Sequence: Synthetic oligonucleotide
caccugaaacuauuaggca

SEQ ID NO: 183854 - RNA, 19 nt, Artificial Sequence
  Description of Artificial Sequence: Synthetic oligonucleotide
cuacuuaguugaacuuuca

SEQ ID NO: 183855 - RNA, 19 nt, Artificial Sequence
  Description of Artificial Sequence: Synthetic oligonucleotide
  modified_base (3)..(3): a, c, u, g, unknown or other
gcnuauaaagguccagaaa

SEQ ID NO: 183856 - RNA, 19 nt, Artificial Sequence
  Description of Artificial Sequence: Synthetic oligonucleotide
augcgagcacauauaagcu

SEQ ID NO: 183857 - RNA, 19 nt, Artificial Sequence
  Description of Artificial Sequence: Synthetic oligonucleotide
gagacgaauucaaguacaa

SEQ ID NO: 183858 - RNA, 19 nt, Artificial Sequence
  Description of Artificial Sequence: Synthetic oligonucleotide
gaucuuucauugacccuuc

SEQ ID NO: 183859 - RNA, 19 nt, Artificial Sequence
  Description of Artificial Sequence: Synthetic oligonucleotide
gagucccuuuguaaggguc

SEQ ID NO: 183860 - RNA, 19 nt, Artificial Sequence
  Description of Artificial Sequence: Synthetic oligonucleotide
gugaacuaguccuguuuaa

SEQ ID NO: 183861 - RNA, 19 nt, Artificial Sequence
  Description of Artificial Sequence: Synthetic oligonucleotide
cuuuugaguuauauucuau

SEQ ID NO: 183862 - RNA, 19 nt, Artificial Sequence
  Description of Artificial Sequence: Synthetic oligonucleotide
gcauauguuugaugagaac

SEQ ID NO: 183863 - RNA, 19 nt, Artificial Sequence
  Description of Artificial Sequence: Synthetic oligonucleotide
acgaaugggucuauuuaau

SEQ ID NO: 183864 - RNA, 19 nt, Artificial Sequence
  Description of Artificial Sequence: Synthetic oligonucleotide
ggcaaguucgcuucaguua

SEQ ID NO: 183865 - RNA, 19 nt, Artificial Sequence
  Description of Artificial Sequence: Synthetic oligonucleotide
acgagacaacaugccuggc

SEQ ID NO: 183866 - RNA, 19 nt, Artificial Sequence
  Description of Artificial Sequence: Synthetic oligonucleotide
cgaauucaaguacaaagca

SEQ ID NO: 183867 - RNA, 19 nt, Artificial Sequence
  Description of Artificial Sequence: Synthetic oligonucleotide
aagucuacacugagacgaa

SEQ ID NO: 183868 - RNA, 19 nt, Artificial Sequence
  Description of Artificial Sequence: Synthetic oligonucleotide
acucaaaagaggagcugaa

SEQ ID NO: 183869 - RNA, 19 nt, Artificial Sequence
  Description of Artificial Sequence: Synthetic oligonucleotide
gccguggagagcaagugug

SEQ ID NO: 183870 - RNA, 19 nt, Artificial Sequence
  Description of Artificial Sequence: Synthetic oligonucleotide
augcgcuaugacgacacau

SEQ ID NO: 183871 - RNA, 19 nt, Artificial Sequence
  Description of Artificial Sequence: Synthetic oligonucleotide
  modified_base (15)..(15): a, c, u, g, unknown or other
uaguguaagcaagcnuaua

SEQ ID NO: 183872 - RNA, 19 nt, Artificial Sequence
  Description of Artificial Sequence: Synthetic oligonucleotide
guaugccguggagagcaag

SEQ ID NO: 183873 - RNA, 19 nt, Artificial Sequence
  Description of Artificial Sequence: Synthetic oligonucleotide
auaccuccagucacacgag

SEQ ID NO: 183874 - RNA, 19 nt, Artificial Sequence
  Description of Artificial Sequence: Synthetic oligonucleotide
gacgacacauuaggacaac

SEQ ID NO: 183875 - RNA, 19 nt, Artificial Sequence
  Description of Artificial Sequence: Synthetic oligonucleotide
uccggugguucaucacuaa

SEQ ID NO: 183876 - RNA, 19 nt, Artificial Sequence
  Description of Artificial Sequence: Synthetic oligonucleotide
aucaguuauucaaguggau

SEQ ID NO: 183877 - RNA, 19 nt, Artificial Sequence
  Description of Artificial Sequence: Synthetic oligonucleotide
uugacccuuccggugguuc

SEQ ID NO: 183878 - RNA, 19 nt, Artificial Sequence
  Description of Artificial Sequence: Synthetic oligonucleotide
ucgcuucaguuagaacuac

SEQ ID NO: 183879 - RNA, 19 nt, Artificial Sequence
  Description of Artificial Sequence: Synthetic oligonucleotide
agaugcuuccagguguaua

SEQ ID NO: 183880 - RNA, 19 nt, Artificial Sequence
  Description of Artificial Sequence: Synthetic oligonucleotide
ugaucaccgcgggucggcc

SEQ ID NO: 183881 - RNA, 19 nt, Artificial Sequence
  Description of Artificial Sequence: Synthetic oligonucleotide
  modified_base (7)..(7): a, c, u, g, unknown or other
gcaagcnuauaaaggucca

SEQ ID NO: 183882 - RNA, 19 nt, Artificial Sequence
  Description of Artificial Sequence: Synthetic oligonucleotide
cacacgagacaacaugccu

SEQ ID NO: 183883 - RNA, 19 nt, Artificial Sequence
  Description of Artificial Sequence: Synthetic oligonucleotide
gucuguaauugagcaguuc

SEQ ID NO: 183884 - RNA, 19 nt, Artificial Sequence
  Description of Artificial Sequence: Synthetic oligonucleotide
gacaacaugccuggcugcu

SEQ ID NO: 183885 - RNA, 19 nt, Artificial Sequence
  Description of Artificial Sequence: Synthetic oligonucleotide
gcgagcacauauaagcuaa

SEQ ID NO: 183886 - RNA, 19 nt, Artificial Sequence
  Description of Artificial Sequence: Synthetic oligonucleotide
cgcuaugacgacacauuag

SEQ ID NO: 183887 - RNA, 19 nt, Artificial Sequence
  Description of Artificial Sequence: Synthetic oligonucleotide
gugcuucgucucuuaguca

SEQ ID NO: 183888 - RNA, 19 nt, Artificial Sequence
  Description of Artificial Sequence: Synthetic oligonucleotide
cagcaguuuagcgguugac

SEQ ID NO: 183889 - RNA, 19 nt, Artificial Sequence
  Description of Artificial Sequence: Synthetic oligonucleotide
cacuggaaucguaugccgu

SEQ ID NO: 183890 - RNA, 19 nt, Artificial Sequence
  Description of Artificial Sequence: Synthetic oligonucleotide
caaguucgcuucaguuaga

SEQ ID NO: 183891 - RNA, 19 nt, Artificial Sequence
  Description of Artificial Sequence: Synthetic oligonucleotide
agccuguaaguuagaaaua

SEQ ID NO: 183892 - RNA, 19 nt, Artificial Sequence
  Description of Artificial Sequence: Synthetic oligonucleotide
caucuacuuaguugaacuu

SEQ ID NO: 183893 - RNA, 19 nt, Artificial Sequence
  Description of Artificial Sequence: Synthetic oligonucleotide
ccggugguucaucacuaag

SEQ ID NO: 183894 - RNA, 19 nt, Artificial Sequence
  Description of Artificial Sequence: Synthetic oligonucleotide
caucaaagguacaguuuau

SEQ ID NO: 183895 - RNA, 19 nt, Artificial Sequence
  Description of Artificial Sequence: Synthetic oligonucleotide
ccuauucccauggaaggca

SEQ ID NO: 183896 - RNA, 19 nt, Artificial Sequence
  Description of Artificial Sequence: Synthetic oligonucleotide
acccuuccggugguucauc

SEQ ID NO: 183897 - RNA, 19 nt, Artificial Sequence
  Description of Artificial Sequence: Synthetic oligonucleotide
agucuguaauugagcaguu

SEQ ID NO: 183898 - RNA, 19 nt, Artificial Sequence
  Description of Artificial Sequence: Synthetic oligonucleotide
guuuagcgguugacuuggc

SEQ ID NO: 183899 - RNA, 19 nt, Artificial Sequence
  Description of Artificial Sequence: Synthetic oligonucleotide
ucacuacgaaugggucuau

SEQ ID NO: 183900 - RNA, 19 nt, Artificial Sequence
  Description of Artificial Sequence: Synthetic oligonucleotide
guaucacggcccacuccca

SEQ ID NO: 183901 - RNA, 19 nt, Artificial Sequence
  Description of Artificial Sequence: Synthetic oligonucleotide
gaacuacagcuaacuguau

SEQ ID NO: 183902 - RNA, 19 nt, Artificial Sequence
  Description of Artificial Sequence: Synthetic oligonucleotide
cccaggcuuagauuauaaa

SEQ ID NO: 183903 - RNA, 19 nt, Artificial Sequence
  Description of Artificial Sequence: Synthetic oligonucleotide
gaaugccucuuggccuaaa

SEQ ID NO: 183904 - RNA, 19 nt, Artificial Sequence
  Description of Artificial Sequence: Synthetic oligonucleotide
gcuucgucucuuagucaga

SEQ ID NO: 183905 - RNA, 19 nt, Artificial Sequence
  Description of Artificial Sequence: Synthetic oligonucleotide
cuccauacacugggauagu

SEQ ID NO: 183906 - RNA, 19 nt, Artificial Sequence
  Description of Artificial Sequence: Synthetic oligonucleotide
ccgcgggucggccgggcug

SEQ ID NO: 183907 - RNA, 19 nt, Artificial Sequence
  Description of Artificial Sequence: Synthetic oligonucleotide
cacuacgaaugggucuauu

SEQ ID NO: 183908 - RNA, 19 nt, Artificial Sequence
  Description of Artificial Sequence: Synthetic oligonucleotide
aauaauaaggcucguagcc

SEQ ID NO: 183909 - RNA, 19 nt, Artificial Sequence
  Description of Artificial Sequence: Synthetic oligonucleotide
uauauauauauauaaaaca

SEQ ID NO: 183910 - RNA, 19 nt, Artificial Sequence
  Description of Artificial Sequence: Synthetic oligonucleotide
aauaaacuagauuacagca

SEQ ID NO: 183911 - RNA, 19 nt, Artificial Sequence
  Description of Artificial Sequence: Synthetic oligonucleotide
uguauauauauauauaugu

SEQ ID NO: 183912 - RNA, 19 nt, Artificial Sequence
  Description of Artificial Sequence: Synthetic oligonucleotide
uauauauauauauauauaa

SEQ ID NO: 183913 - RNA, 19 nt, Artificial Sequence
  Description of Artificial Sequence: Synthetic oligonucleotide
uuaguuuugaagcugucgg

SEQ ID NO: 183914 - RNA, 19 nt, Artificial Sequence
  Description of Artificial Sequence: Synthetic oligonucleotide
uauauauauauauauauau

SEQ ID NO: 183915 - RNA, 19 nt, Artificial Sequence
  Description of Artificial Sequence: Synthetic oligonucleotide
uauauauauguauauauac

SEQ ID NO: 183916 - RNA, 19 nt, Artificial Sequence
  Description of Artificial Sequence: Synthetic oligonucleotide
uauauauauauauauaaaa

SEQ ID NO: 183917 - RNA, 19 nt, Artificial Sequence
  Description of Artificial Sequence: Synthetic oligonucleotide
auauauauauauauaaaac

SEQ ID NO: 183918 - RNA, 19 nt, Artificial Sequence
  Description of Artificial Sequence: Synthetic oligonucleotide
uauauauguauauauauau

SEQ ID NO: 183919 - RNA, 19 nt, Artificial Sequence
  Description of Artificial Sequence: Synthetic oligonucleotide
uauauauauauaaaacaga

SEQ ID NO: 183920 - RNA, 19 nt, Artificial Sequence
  Description of Artificial Sequence: Synthetic oligonucleotide
uauauauauauguauauau

SEQ ID NO: 183921 - RNA, 19 nt, Artificial Sequence
  Description of Artificial Sequence: Synthetic oligonucleotide
uauauguauauauauauau

SEQ ID NO: 183922 - RNA, 19 nt, Artificial Sequence
  Description of Artificial Sequence: Synthetic oligonucleotide
auauauauauauaaaacag

SEQ ID NO: 183923 - RNA, 19 nt, Artificial Sequence
  Description of Artificial Sequence: Synthetic oligonucleotide
agaauaauaaggcucguag

SEQ ID NO: 183924 - RNA, 19 nt, Artificial Sequence
  Description of Artificial Sequence: Synthetic oligonucleotide
uauguauauauauauauau

SEQ ID NO: 183925 - RNA, 19 nt, Artificial Sequence
  Description of Artificial Sequence: Synthetic oligonucleotide
uauauauauguauauauau

SEQ ID NO: 183926 - RNA, 19 nt, Artificial Sequence
  Description of Artificial Sequence: Synthetic oligonucleotide
uauacguauauauauauau

SEQ ID NO: 183927 - RNA, 19 nt, Artificial Sequence
  Description of Artificial Sequence: Synthetic oligonucleotide
uauauauauauauauguau

SEQ ID NO: 183928 - RNA, 19 nt, Artificial Sequence
  Description of Artificial Sequence: Synthetic oligonucleotide
ucuaaauuguaccaagugu

SEQ ID NO: 183929 - RNA, 19 nt, Artificial Sequence
  Description of Artificial Sequence: Synthetic oligonucleotide
ugugauaaccgacuggugc

SEQ ID NO: 183930 - RNA, 19 nt, Artificial Sequence
  Description of Artificial Sequence: Synthetic oligonucleotide
gaaaugauaucugaugggg

SEQ ID NO: 183931 - RNA, 19 nt, Artificial Sequence
  Description of Artificial Sequence: Synthetic oligonucleotide
aggauaagcaugcaaguac

SEQ ID NO: 183932 - RNA, 19 nt, Artificial Sequence
  Description of Artificial Sequence: Synthetic oligonucleotide
caauucgacaucuaaauug

SEQ ID NO: 183933 - RNA, 19 nt, Artificial Sequence
  Description of Artificial Sequence: Synthetic oligonucleotide
cugguauacguaaugaugc

SEQ ID NO: 183934 - RNA, 19 nt, Artificial Sequence
  Description of Artificial Sequence: Synthetic oligonucleotide
ugaugagucuuuaaccagg

SEQ ID NO: 183935 - RNA, 19 nt, Artificial Sequence
  Description of Artificial Sequence: Synthetic oligonucleotide
uauauauauauauguauau

SEQ ID NO: 183936 - RNA, 19 nt, Artificial Sequence
  Description of Artificial Sequence: Synthetic oligonucleotide
uacguauauauauauauau

SEQ ID NO: 183937 - RNA, 19 nt, Artificial Sequence
  Description of Artificial Sequence: Synthetic oligonucleotide
ugaaggauaugcaagguuc

SEQ ID NO: 183938 - RNA, 19 nt, Artificial Sequence
  Description of Artificial Sequence: Synthetic oligonucleotide
ugcaaguacuguauguacg

SEQ ID NO: 183939 - RNA, 19 nt, Artificial Sequence
  Description of Artificial Sequence: Synthetic oligonucleotide
uguaacuuggagaauaaua

SEQ ID NO: 183940 - RNA, 19 nt, Artificial Sequence
  Description of Artificial Sequence: Synthetic oligonucleotide
agaaaugauaucugauggg

SEQ ID NO: 183941 - RNA, 19 nt, Artificial Sequence
  Description of Artificial Sequence: Synthetic oligonucleotide
ucgacaucuaaauuguacc

SEQ ID NO: 183942 - RNA, 19 nt, Artificial Sequence
  Description of Artificial Sequence: Synthetic oligonucleotide
gagucuuuaaccaggagcc

SEQ ID NO: 183943 - RNA, 19 nt, Artificial Sequence
  Description of Artificial Sequence: Synthetic oligonucleotide
gaauaauaaggcucguagc

SEQ ID NO: 183944 - RNA, 19 nt, Artificial Sequence
  Description of Artificial Sequence: Synthetic oligonucleotide
ugaucuagauacuugggcu

SEQ ID NO: 183945 - RNA, 19 nt, Artificial Sequence
  Description of Artificial Sequence: Synthetic oligonucleotide
cuggccauaauaaagugac

SEQ ID NO: 183946 - RNA, 19 nt, Artificial Sequence
  Description of Artificial Sequence: Synthetic oligonucleotide
aaugaugccauguccuuga

SEQ ID NO: 183947 - RNA, 19 nt, Artificial Sequence
  Description of Artificial Sequence: Synthetic oligonucleotide
cuguauguacgacugaugc

SEQ ID NO: 183948 - RNA, 19 nt, Artificial Sequence
  Description of Artificial Sequence: Synthetic oligonucleotide
cauauauauauauauaugu

SEQ ID NO: 183949 - RNA, 19 nt, Artificial Sequence
  Description of Artificial Sequence: Synthetic oligonucleotide
acguaaugaugccaugucc

SEQ ID NO: 183950 - RNA, 19 nt, Artificial Sequence
  Description of Artificial Sequence: Synthetic oligonucleotide
acuaacguugggcagcacg

SEQ ID NO: 183951 - RNA, 19 nt, Artificial Sequence
  Description of Artificial Sequence: Synthetic oligonucleotide
uucgacaucuaaauuguac

SEQ ID NO: 183952 - RNA, 19 nt, Artificial Sequence
  Description of Artificial Sequence: Synthetic oligonucleotide
aggaaagcauucaauauac

SEQ ID NO: 183953 - RNA, 19 nt, Artificial Sequence
  Description of Artificial Sequence: Synthetic oligonucleotide
uguuuaaaucucgagguug

SEQ ID NO: 183954 - RNA, 19 nt, Artificial Sequence
  Description of Artificial Sequence: Synthetic oligonucleotide
agaaucugggcgcuuggcc

SEQ ID NO: 183955 - RNA, 19 nt, Artificial Sequence
  Description of Artificial Sequence: Synthetic oligonucleotide
aguagagggagcuuuugag

SEQ ID NO: 183956 - RNA, 19 nt, Artificial Sequence
  Description of Artificial Sequence: Synthetic oligonucleotide
uaaaucucgagguuggguc

SEQ ID NO: 183957 - RNA, 19 nt, Artificial Sequence
  Description of Artificial Sequence: Synthetic oligonucleotide
uguagggcuauucaaguaa

SEQ ID NO: 183958 - RNA, 19 nt, Artificial Sequence
  Description of Artificial Sequence: Synthetic oligonucleotide
uugguuggcgugauguugg

SEQ ID NO: 183959 - RNA, 19 nt, Artificial Sequence
  Description of Artificial Sequence: Synthetic oligonucleotide
ugaugucuauauaaagcgc

SEQ ID NO: 183960 - RNA, 19 nt, Artificial Sequence
  Description of Artificial Sequence: Synthetic oligonucleotide
aauucgacaucuaaauugu

SEQ ID NO: 183961 - RNA, 19 nt, Artificial Sequence
  Description of Artificial Sequence: Synthetic oligonucleotide
uuguuaggcgucuuccucg

SEQ ID NO: 183962 - RNA, 19 nt, Artificial Sequence
  Description of Artificial Sequence: Synthetic oligonucleotide
caugguaauagggagaaug

SEQ ID NO: 183963 - RNA, 19 nt, Artificial Sequence
  Description of Artificial Sequence: Synthetic oligonucleotide
uaaggcauuucaaauuaac

SEQ ID NO: 183964 - RNA, 19 nt, Artificial Sequence
  Description of Artificial Sequence: Synthetic oligonucleotide
aguuuuauuaggcacugau

SEQ ID NO: 183965 - RNA, 19 nt, Artificial Sequence
  Description of Artificial Sequence: Synthetic oligonucleotide
guaacugugcauuaagaca

SEQ ID NO: 183966 - RNA, 19 nt, Artificial Sequence
  Description of Artificial Sequence: Synthetic oligonucleotide
gaagaauggccuuucacga

SEQ ID NO: 183967 - RNA, 19 nt, Artificial Sequence
  Description of Artificial Sequence: Synthetic oligonucleotide
uuagaaucuaacugcucug

SEQ ID NO: 183968 - RNA, 19 nt, Artificial Sequence
  Description of Artificial Sequence: Synthetic oligonucleotide
aacgacuccucauuauuca

SEQ ID NO: 183969 - RNA, 19 nt, Artificial Sequence
  Description of Artificial Sequence: Synthetic oligonucleotide
auauauauguauauauaca

SEQ ID NO: 183970 - RNA, 19 nt, Artificial Sequence
  Description of Artificial Sequence: Synthetic oligonucleotide
accaauucgacaucuaaau

SEQ ID NO: 183971 - RNA, 19 nt, Artificial Sequence
  Description of Artificial Sequence: Synthetic oligonucleotide
uuugacuaacguugggcag

SEQ ID NO: 183972 - RNA, 19 nt, Artificial Sequence
  Description of Artificial Sequence: Synthetic oligonucleotide
cugaucuagauacuugggc

SEQ ID NO: 183973 - RNA, 19 nt, Artificial Sequence
  Description of Artificial Sequence: Synthetic oligonucleotide
guuuaaaucucgagguugg

SEQ ID NO: 183974 - RNA, 19 nt, Artificial Sequence
  Description of Artificial Sequence: Synthetic oligonucleotide
auuuguuacucugugauaa

SEQ ID NO: 183975 - RNA, 19 nt, Artificial Sequence
  Description of Artificial Sequence: Synthetic oligonucleotide
aaaucucgagguugggucu

SEQ ID NO: 183976 - RNA, 19 nt, Artificial Sequence
  Description of Artificial Sequence: Synthetic oligonucleotide
acacgggaaggcuaggcac

SEQ ID NO: 183977 - RNA, 19 nt, Artificial Sequence
  Description of Artificial Sequence: Synthetic oligonucleotide
uuuguuaggcuccggagua

SEQ ID NO: 183978 - RNA, 19 nt, Artificial Sequence
  Description of Artificial Sequence: Synthetic oligonucleotide
ccauauagagcccauaggc

SEQ ID NO: 183979 - RNA, 19 nt, Artificial Sequence
  Description of Artificial Sequence: Synthetic oligonucleotide
aaguaaccaggcaauggcg

SEQ ID NO: 183980 - RNA, 19 nt, Artificial Sequence
  Description of Artificial Sequence: Synthetic oligonucleotide
ucuuugugugauaaccgac

SEQ ID NO: 183981 - RNA, 19 nt, Artificial Sequence
  Description of Artificial Sequence: Synthetic oligonucleotide
auauauauauauauguaua

SEQ ID NO: 183982 - RNA, 19 nt, Artificial Sequence
  Description of Artificial Sequence: Synthetic oligonucleotide
guaauagggagaaugggac

SEQ ID NO: 183983 - RNA, 19 nt, Artificial Sequence
  Description of Artificial Sequence: Synthetic oligonucleotide
ugaaaagggucguauugac

SEQ ID NO: 183984 - RNA, 19 nt, Artificial Sequence
  Description of Artificial Sequence: Synthetic oligonucleotide
auauauauauauauauaaa

SEQ ID NO: 183985 - RNA, 19 nt, Artificial Sequence
  Description of Artificial Sequence: Synthetic oligonucleotide
auguauauauauauauaug

SEQ ID NO: 183986 - RNA, 19 nt, Artificial Sequence
  Description of Artificial Sequence: Synthetic oligonucleotide
uucgguauugguuggcgug

SEQ ID NO: 183987 - RNA, 19 nt, Artificial Sequence
  Description of Artificial Sequence: Synthetic oligonucleotide
uggguuaucugccauucaa

SEQ ID NO: 183988 - RNA, 19 nt, Artificial Sequence
  Description of Artificial Sequence: Synthetic oligonucleotide
uuucaaggggaguucggcc

SEQ ID NO: 183989 - RNA, 19 nt, Artificial Sequence
  Description of Artificial Sequence: Synthetic oligonucleotide
uugaaaagggucguauuga

SEQ ID NO: 183990 - RNA, 19 nt, Artificial Sequence
  Description of Artificial Sequence: Synthetic oligonucleotide
ucgagguugggucuacacc

SEQ ID NO: 183991 - RNA, 19 nt, Artificial Sequence
  Description of Artificial Sequence: Synthetic oligonucleotide
ugauuuaccuguguccuca

SEQ ID NO: 183992 - RNA, 19 nt, Artificial Sequence
  Description of Artificial Sequence: Synthetic oligonucleotide
ugcuuaguuuugaagcugu

SEQ ID NO: 183993 - RNA, 19 nt, Artificial Sequence
  Description of Artificial Sequence: Synthetic oligonucleotide
aaagcgcuuccccauguga

SEQ ID NO: 183994 - RNA, 19 nt, Artificial Sequence
  Description of Artificial Sequence: Synthetic oligonucleotide
uguugguucuggcaacccc

SEQ ID NO: 183995 - RNA, 19 nt, Artificial Sequence
  Description of Artificial Sequence: Synthetic oligonucleotide
uguauguacgacugaugcu

SEQ ID NO: 183996 - RNA, 19 nt, Artificial Sequence
  Description of Artificial Sequence: Synthetic oligonucleotide
uguuaggcgucuuccucgg

SEQ ID NO: 183997 - RNA, 19 nt, Artificial Sequence
  Description of Artificial Sequence: Synthetic oligonucleotide
uugacuaacguugggcagc

SEQ ID NO: 183998 - RNA, 19 nt, Artificial Sequence
  Description of Artificial Sequence: Synthetic oligonucleotide
guggguaaggauaagcaug

SEQ ID NO: 183999 - RNA, 19 nt, Artificial Sequence
  Description of Artificial Sequence: Synthetic oligonucleotide
auauauauauauauaugua

SEQ ID NO: 184000 - RNA, 19 nt, Artificial Sequence
  Description of Artificial Sequence: Synthetic oligonucleotide
uacguaaugaugccauguc

SEQ ID NO: 184001 - RNA, 19 nt, Artificial Sequence
  Description of Artificial Sequence: Synthetic oligonucleotide
auauauauauauauauaua

SEQ ID NO: 184002 - RNA, 19 nt, Artificial Sequence
  Description of Artificial Sequence: Synthetic oligonucleotide
guagcccaugccaacaugg

SEQ ID NO: 184003 - RNA, 19 nt, Artificial Sequence
  Description of Artificial Sequence: Synthetic oligonucleotide
uuaggcgucuuccucggac

SEQ ID NO: 184004 - RNA, 19 nt, Artificial Sequence
  Description of Artificial Sequence: Synthetic oligonucleotide
uguagagauguagaauugu

SEQ ID NO: 184005 - RNA, 19 nt, Artificial Sequence
  Description of Artificial Sequence: Synthetic oligonucleotide
aaaugauaucugaugggga

SEQ ID NO: 184006 - RNA, 19 nt, Artificial Sequence
  Description of Artificial Sequence: Synthetic oligonucleotide
aggguaacugugcauuaag

SEQ ID NO: 184007 - RNA, 19 nt, Artificial Sequence
  Description of Artificial Sequence: Synthetic oligonucleotide
ugguauacguaaugaugcc

SEQ ID NO: 184008 - RNA, 19 nt, Artificial Sequence
  Description of Artificial Sequence: Synthetic oligonucleotide
ccauauauauauauauaug

SEQ ID NO: 184009 - RNA, 19 nt, Artificial Sequence
  Description of Artificial Sequence: Synthetic oligonucleotide
agcacgacccugugugugc

SEQ ID NO: 184010 - RNA, 19 nt, Artificial Sequence
  Description of Artificial Sequence: Synthetic oligonucleotide
uuaaaucucgagguugggu

SEQ ID NO: 184011 - RNA, 19 nt, Artificial Sequence
  Description of Artificial Sequence: Synthetic oligonucleotide
auauauauauauguauaua

SEQ ID NO: 184012 - RNA, 19 nt, Artificial Sequence
  Description of Artificial Sequence: Synthetic oligonucleotide
auauauauguauauauaua

SEQ ID NO: 184013 - RNA, 19 nt, Artificial Sequence
  Description of Artificial Sequence: Synthetic oligonucleotide
uauacguaaugaugccaug

SEQ ID NO: 184014 - RNA, 19 nt, Artificial Sequence
  Description of Artificial Sequence: Synthetic oligonucleotide
acgacuccucauuauucac

SEQ ID NO: 184015 - RNA, 19 nt, Artificial Sequence
  Description of Artificial Sequence: Synthetic oligonucleotide
guuuguuaaugacacggga

SEQ ID NO: 184016 - RNA, 19 nt, Artificial Sequence
  Description of Artificial Sequence: Synthetic oligonucleotide
cuuagaaucuaacugcucu

SEQ ID NO: 184017 - RNA, 19 nt, Artificial Sequence
  Description of Artificial Sequence: Synthetic oligonucleotide
aacaaguaaccaggcaaug

SEQ ID NO: 184018 - RNA, 19 nt, Artificial Sequence
  Description of Artificial Sequence: Synthetic oligonucleotide
auauauauauguauauaua

SEQ ID NO: 184019 - RNA, 19 nt, Artificial Sequence
  Description of Artificial Sequence: Synthetic oligonucleotide
uacuggccauaauaaagug

SEQ ID NO: 184020 - RNA, 19 nt, Artificial Sequence
  Description of Artificial Sequence: Synthetic oligonucleotide
gagccauauauauauauau

SEQ ID NO: 184021 - RNA, 19 nt, Artificial Sequence
  Description of Artificial Sequence: Synthetic oligonucleotide
cuacgggaacauuuuacac

SEQ ID NO: 184022 - RNA, 19 nt, Artificial Sequence
  Description of Artificial Sequence: Synthetic oligonucleotide
ugguuugacuaacguuggg

SEQ ID NO: 184023 - RNA, 19 nt, Artificial Sequence
  Description of Artificial Sequence: Synthetic oligonucleotide
ugggcugguauacguaaug

SEQ ID NO: 184024 - RNA, 19 nt, Artificial Sequence
  Description of Artificial Sequence: Synthetic oligonucleotide
auaaggcucguagccaugg

SEQ ID NO: 184025 - RNA, 19 nt, Artificial Sequence
  Description of Artificial Sequence: Synthetic oligonucleotide
aucuagauacuugggcugg

SEQ ID NO: 184026 - RNA, 19 nt, Artificial Sequence
  Description of Artificial Sequence: Synthetic oligonucleotide
ggcguuaaaguccuucucc

SEQ ID NO: 184027 - RNA, 19 nt, Artificial Sequence
  Description of Artificial Sequence: Synthetic oligonucleotide
guauauauauauauaugua

SEQ ID NO: 184028 - RNA, 19 nt, Artificial Sequence
  Description of Artificial Sequence: Synthetic oligonucleotide
guauauauauauauauaua

SEQ ID NO: 184029 - RNA, 19 nt, Artificial Sequence
  Description of Artificial Sequence: Synthetic oligonucleotide
uuuguugguucuggcaacc

SEQ ID NO: 184030 - RNA, 19 nt, Artificial Sequence
  Description of Artificial Sequence: Synthetic oligonucleotide
auugguuggcgugauguug

SEQ ID NO: 184031 - RNA, 19 nt, Artificial Sequence
  Description of Artificial Sequence: Synthetic oligonucleotide
auauguauauauauauaua

SEQ ID NO: 184032 - RNA, 19 nt, Artificial Sequence
  Description of Artificial Sequence: Synthetic oligonucleotide
acgacaccgucuuuauuag

SEQ ID NO: 184033 - RNA, 19 nt, Artificial Sequence
  Description of Artificial Sequence: Synthetic oligonucleotide
uuggcgugauguuggagca

SEQ ID NO: 184034 - RNA, 19 nt, Artificial Sequence
  Description of Artificial Sequence: Synthetic oligonucleotide
aaggauaagcaugcaagua

SEQ ID NO: 184035 - RNA, 19 nt, Artificial Sequence
  Description of Artificial Sequence: Synthetic oligonucleotide
auacguaaugaugccaugu

SEQ ID NO: 184036 - RNA, 19 nt, Artificial Sequence
  Description of Artificial Sequence: Synthetic oligonucleotide
guaccaagugucaucauca

SEQ ID NO: 184037 - RNA, 19 nt, Artificial Sequence
  Description of Artificial Sequence: Synthetic oligonucleotide
ugugcgagccauauauaua

SEQ ID NO: 184038 - RNA, 19 nt, Artificial Sequence
  Description of Artificial Sequence: Synthetic oligonucleotide
gacuacgggaacauuuuac

SEQ ID NO: 184039 - RNA, 19 nt, Artificial Sequence
  Description of Artificial Sequence: Synthetic oligonucleotide
uuguuuaaaucucgagguu

SEQ ID NO: 184040 - RNA, 19 nt, Artificial Sequence
  Description of Artificial Sequence: Synthetic oligonucleotide
guagagggagcuuuugaga

SEQ ID NO: 184041 - RNA, 19 nt, Artificial Sequence
  Description of Artificial Sequence: Synthetic oligonucleotide
guacgacugaugcugacuc

SEQ ID NO: 184042 - RNA, 19 nt, Artificial Sequence
  Description of Artificial Sequence: Synthetic oligonucleotide
uacuguauguacgacugau

SEQ ID NO: 184043 - RNA, 19 nt, Artificial Sequence
  Description of Artificial Sequence: Synthetic oligonucleotide
auauauguauauauauaua

SEQ ID NO: 184044 - RNA, 19 nt, Artificial Sequence
  Description of Artificial Sequence: Synthetic oligonucleotide
cacgacaccgucuuuauua

SEQ ID NO: 184045 - RNA, 19 nt, Artificial Sequence
  Description of Artificial Sequence: Synthetic oligonucleotide
uguacgacugaugcugacu

SEQ ID NO: 184046 - RNA, 19 nt, Artificial Sequence
  Description of Artificial Sequence: Synthetic oligonucleotide
uuuguuacucugugauaaa

SEQ ID NO: 184047 - RNA, 19 nt, Artificial Sequence
  Description of Artificial Sequence: Synthetic oligonucleotide
gauuguggccgauggcaug

SEQ ID NO: 184048 - RNA, 19 nt, Artificial Sequence
  Description of Artificial Sequence: Synthetic oligonucleotide
cauucaagauuaucaacaa

SEQ ID NO: 184049 - RNA, 19 nt, Artificial Sequence
  Description of Artificial Sequence: Synthetic oligonucleotide
gguuaucugccauucaaga

SEQ ID NO: 184050 - RNA, 19 nt, Artificial Sequence
  Description of Artificial Sequence: Synthetic oligonucleotide
ugagaugauugugcugaag

SEQ ID NO: 184051 - RNA, 19 nt, Artificial Sequence
  Description of Artificial Sequence: Synthetic oligonucleotide
uuucacgacaccgucuuua

SEQ ID NO: 184052 - RNA, 19 nt, Artificial Sequence
  Description of Artificial Sequence: Synthetic oligonucleotide
gcugguauacguaaugaug

SEQ ID NO: 184053 - RNA, 19 nt, Artificial Sequence
  Description of Artificial Sequence: Synthetic oligonucleotide
gguuugacuaacguugggc

SEQ ID NO: 184054 - RNA, 19 nt, Artificial Sequence
  Description of Artificial Sequence: Synthetic oligonucleotide
gguaauagggagaauggga

SEQ ID NO: 184055 - RNA, 19 nt, Artificial Sequence
  Description of Artificial Sequence: Synthetic oligonucleotide
ugagguugguuugacuaac

SEQ ID NO: 184056 - RNA, 19 nt, Artificial Sequence
  Description of Artificial Sequence: Synthetic oligonucleotide
accgucuuuauuagaaaug

SEQ ID NO: 184057 - RNA, 19 nt, Artificial Sequence
  Description of Artificial Sequence: Synthetic oligonucleotide
ccauaauaaagugacugag

SEQ ID NO: 184058 - RNA, 19 nt, Artificial Sequence
  Description of Artificial Sequence: Synthetic oligonucleotide
gaugagugugcaggugccg

SEQ ID NO: 184059 - RNA, 19 nt, Artificial Sequence
  Description of Artificial Sequence: Synthetic oligonucleotide
agugacuacgggaacauuu

SEQ ID NO: 184060 - RNA, 19 nt, Artificial Sequence
  Description of Artificial Sequence: Synthetic oligonucleotide
gccauauauauauauauau

SEQ ID NO: 184061 - RNA, 19 nt, Artificial Sequence
  Description of Artificial Sequence: Synthetic oligonucleotide
gaugagucuuuaaccagga

SEQ ID NO: 184062 - RNA, 19 nt, Artificial Sequence
  Description of Artificial Sequence: Synthetic oligonucleotide
uucacgggagucuuuccau

SEQ ID NO: 184063 - RNA, 19 nt, Artificial Sequence
  Description of Artificial Sequence: Synthetic oligonucleotide
auaaccgacuggugcugag

SEQ ID NO: 184064 - RNA, 19 nt, Artificial Sequence
  Description of Artificial Sequence: Synthetic oligonucleotide
ugauaaccgacuggugcug

SEQ ID NO: 184065 - RNA, 19 nt, Artificial Sequence
  Description of Artificial Sequence: Synthetic oligonucleotide
gacacgggaaggcuaggca

SEQ ID NO: 184066 - RNA, 19 nt, Artificial Sequence
  Description of Artificial Sequence: Synthetic oligonucleotide
auacguauauauauauaua

SEQ ID NO: 184067 - RNA, 19 nt, Artificial Sequence
  Description of Artificial Sequence: Synthetic oligonucleotide
gaaucugggcgcuuggccu

SEQ ID NO: 184068 - RNA, 19 nt, Artificial Sequence
  Description of Artificial Sequence: Synthetic oligonucleotide
acguauauauauauauaua

SEQ ID NO: 184069 - RNA, 19 nt, Artificial Sequence
  Description of Artificial Sequence: Synthetic oligonucleotide
gugugugcgagccauauau

SEQ ID NO: 184070 - RNA, 19 nt, Artificial Sequence
  Description of Artificial Sequence: Synthetic oligonucleotide
auuguggccgauggcaugu

SEQ ID NO: 184071 - RNA, 19 nt, Artificial Sequence
  Description of Artificial Sequence: Synthetic oligonucleotide
gaaggcuaggcacaccacu

SEQ ID NO: 184072 - RNA, 19 nt, Artificial Sequence
  Description of Artificial Sequence: Synthetic oligonucleotide
uucacgacaccgucuuuau

SEQ ID NO: 184073 - RNA, 19 nt, Artificial Sequence
  Description of Artificial Sequence: Synthetic oligonucleotide
guucacgggagucuuucca

SEQ ID NO: 184074 - RNA, 19 nt, Artificial Sequence
  Description of Artificial Sequence: Synthetic oligonucleotide
ucgguauugguuggcguga

SEQ ID NO: 184075 - RNA, 19 nt, Artificial Sequence
  Description of Artificial Sequence: Synthetic oligonucleotide
ugacuacgggaacauuuua

SEQ ID NO: 184076 - RNA, 19 nt, Artificial Sequence
  Description of Artificial Sequence: Synthetic oligonucleotide
ugugguccacuuucuuaga

SEQ ID NO: 184077 - RNA, 19 nt, Artificial Sequence
  Description of Artificial Sequence: Synthetic oligonucleotide
gugcgagccauauauauau

SEQ ID NO: 184078 - RNA, 19 nt, Artificial Sequence
  Description of Artificial Sequence: Synthetic oligonucleotide
ugggacucuuucagcugag

SEQ ID NO: 184079 - RNA, 19 nt, Artificial Sequence
  Description of Artificial Sequence: Synthetic oligonucleotide
acuguauguacgacugaug

SEQ ID NO: 184080 - RNA, 19 nt, Artificial Sequence
  Description of Artificial Sequence: Synthetic oligonucleotide
ugauggcccuagcuuagaa

SEQ ID NO: 184081 - RNA, 19 nt, Artificial Sequence
  Description of Artificial Sequence: Synthetic oligonucleotide
uuuaaccaggagccaccaa

SEQ ID NO: 184082 - RNA, 19 nt, Artificial Sequence
  Description of Artificial Sequence: Synthetic oligonucleotide
gugauaaccgacuggugcu

SEQ ID NO: 184083 - RNA, 19 nt, Artificial Sequence
  Description of Artificial Sequence: Synthetic oligonucleotide
guauugguuggcgugaugu

SEQ ID NO: 184084 - RNA, 19 nt, Artificial Sequence
  Description of Artificial Sequence: Synthetic oligonucleotide
aguucgccuuucugagggg

SEQ ID NO: 184085 - RNA, 19 nt, Artificial Sequence
  Description of Artificial Sequence: Synthetic oligonucleotide
ugacuaacguugggcagca

SEQ ID NO: 184086 - RNA, 19 nt, Artificial Sequence
  Description of Artificial Sequence: Synthetic oligonucleotide
ugugugcgagccauauaua

SEQ ID NO: 184087 - RNA, 19 nt, Artificial Sequence
  Description of Artificial Sequence: Synthetic oligonucleotide
uauugguuggcgugauguu

SEQ ID NO: 184088 - RNA, 19 nt, Artificial Sequence
  Description of Artificial Sequence: Synthetic oligonucleotide
ggugacuggagagaagcug

SEQ ID NO: 184089 - RNA, 19 nt, Artificial Sequence
  Description of Artificial Sequence: Synthetic oligonucleotide
auuaggcacugauggcccu

SEQ ID NO: 184090 - RNA, 19 nt, Artificial Sequence
  Description of Artificial Sequence: Synthetic oligonucleotide
acugauggcccuagcuuag

SEQ ID NO: 184091 - RNA, 19 nt, Artificial Sequence
  Description of Artificial Sequence: Synthetic oligonucleotide
agccauauauauauauaua

SEQ ID NO: 184092 - RNA, 19 nt, Artificial Sequence
  Description of Artificial Sequence: Synthetic oligonucleotide
cguauauauauauauauau

SEQ ID NO: 184093 - RNA, 19 nt, Artificial Sequence
  Description of Artificial Sequence: Synthetic oligonucleotide
aagcgcuuccccaugugau

SEQ ID NO: 184094 - RNA, 19 nt, Artificial Sequence
  Description of Artificial Sequence: Synthetic oligonucleotide
agggucguauugaccaggg

SEQ ID NO: 184095 - RNA, 19 nt, Artificial Sequence
  Description of Artificial Sequence: Synthetic oligonucleotide
uaaggcucguagccauggu

SEQ ID NO: 184096 - RNA, 19 nt, Artificial Sequence
  Description of Artificial Sequence: Synthetic oligonucleotide
gagaauaauaaggcucgua

SEQ ID NO: 184097 - RNA, 19 nt, Artificial Sequence
  Description of Artificial Sequence: Synthetic oligonucleotide
guauacguauauauauaua

SEQ ID NO: 184098 - RNA, 19 nt, Artificial Sequence
  Description of Artificial Sequence: Synthetic oligonucleotide
uccagggugcauguaacuu

SEQ ID NO: 184099 - RNA, 19 nt, Artificial Sequence
  Description of Artificial Sequence: Synthetic oligonucleotide
uugggcugguauacguaau

SEQ ID NO: 184100 - RNA, 19 nt, Artificial Sequence
  Description of Artificial Sequence: Synthetic oligonucleotide
cuuuugagauuguggccga

SEQ ID NO: 184101 - RNA, 19 nt, Artificial Sequence
  Description of Artificial Sequence: Synthetic oligonucleotide
guauacguaaugaugccau

SEQ ID NO: 184102 - RNA, 19 nt, Artificial Sequence
  Description of Artificial Sequence: Synthetic oligonucleotide
guaugcaggguggcugggg

SEQ ID NO: 184103 - RNA, 19 nt, Artificial Sequence
  Description of Artificial Sequence: Synthetic oligonucleotide
ggucguauugaccagggau

SEQ ID NO: 184104 - RNA, 19 nt, Artificial Sequence
  Description of Artificial Sequence: Synthetic oligonucleotide
acgacugaugcugacucau

SEQ ID NO: 184105 - RNA, 19 nt, Artificial Sequence
  Description of Artificial Sequence: Synthetic oligonucleotide
gguauacguaaugaugcca

SEQ ID NO: 184106 - RNA, 19 nt, Artificial Sequence
  Description of Artificial Sequence: Synthetic oligonucleotide
ggguuaucugccauucaag

SEQ ID NO: 184107 - RNA, 19 nt, Artificial Sequence
  Description of Artificial Sequence: Synthetic oligonucleotide
ccagggugcauguaacuug

SEQ ID NO: 184108 - RNA, 19 nt, Artificial Sequence
  Description of Artificial Sequence: Synthetic oligonucleotide
gggaacuggccuuugaccu

SEQ ID NO: 184109 - RNA, 19 nt, Artificial Sequence
  Description of Artificial Sequence: Synthetic oligonucleotide
gugauuuaccuguguccuc

SEQ ID NO: 184110 - RNA, 19 nt, Artificial Sequence
  Description of Artificial Sequence: Synthetic oligonucleotide
ggcauacuggccauaauaa

SEQ ID NO: 184111 - RNA, 19 nt, Artificial Sequence
  Description of Artificial Sequence: Synthetic oligonucleotide
cuaacugcucugccuuguc

SEQ ID NO: 184112 - RNA, 19 nt, Artificial Sequence
  Description of Artificial Sequence: Synthetic oligonucleotide
cauuuguuacucugugaua

SEQ ID NO: 184113 - RNA, 19 nt, Artificial Sequence
  Description of Artificial Sequence: Synthetic oligonucleotide
gauaaccgacuggugcuga

SEQ ID NO: 184114 - RNA, 19 nt, Artificial Sequence
  Description of Artificial Sequence: Synthetic oligonucleotide
cagcccgguaugcagggug

SEQ ID NO: 184115 - RNA, 19 nt, Artificial Sequence
  Description of Artificial Sequence: Synthetic oligonucleotide
aaucucgagguugggucua

SEQ ID NO: 184116 - RNA, 19 nt, Artificial Sequence
  Description of Artificial Sequence: Synthetic oligonucleotide
agucuuuaaccaggagcca

SEQ ID NO: 184117 - RNA, 19 nt, Artificial Sequence
  Description of Artificial Sequence: Synthetic oligonucleotide
caguucacgggagucuuuc

SEQ ID NO: 184118 - RNA, 19 nt, Artificial Sequence
  Description of Artificial Sequence: Synthetic oligonucleotide
gugugcgagccauauauau

SEQ ID NO: 184119 - RNA, 19 nt, Artificial Sequence
  Description of Artificial Sequence: Synthetic oligonucleotide
uccaguucacgggagucuu

SEQ ID NO: 184120 - RNA, 19 nt, Artificial Sequence
  Description of Artificial Sequence: Synthetic oligonucleotide
ugcuucgguauugguuggc

SEQ ID NO: 184121 - RNA, 19 nt, Artificial Sequence
  Description of Artificial Sequence: Synthetic oligonucleotide
gcuucgguauugguuggcg

SEQ ID NO: 184122 - RNA, 19 nt, Artificial Sequence
  Description of Artificial Sequence: Synthetic oligonucleotide
agcccgguaugcagggugg

SEQ ID NO: 184123 - RNA, 19 nt, Artificial Sequence
  Description of Artificial Sequence: Synthetic oligonucleotide
augccaacauggguguggu

SEQ ID NO: 184124 - RNA, 19 nt, Artificial Sequence
  Description of Artificial Sequence: Synthetic oligonucleotide
agauuguggccgauggcau

SEQ ID NO: 184125 - RNA, 19 nt, Artificial Sequence
  Description of Artificial Sequence: Synthetic oligonucleotide
aucucgagguugggucuac

SEQ ID NO: 184126 - RNA, 19 nt, Artificial Sequence
  Description of Artificial Sequence: Synthetic oligonucleotide
ggacuugcuucgguauugg

SEQ ID NO: 184127 - RNA, 19 nt, Artificial Sequence
  Description of Artificial Sequence: Synthetic oligonucleotide
gggacuugcuucgguauug

SEQ ID NO: 184128 - RNA, 19 nt, Artificial Sequence
  Description of Artificial Sequence: Synthetic oligonucleotide
ucacgacaccgucuuuauu

SEQ ID NO: 184129 - RNA, 19 nt, Artificial Sequence
  Description of Artificial Sequence: Synthetic oligonucleotide
gguauugguuggcgugaug

SEQ ID NO: 184130 - RNA, 19 nt, Artificial Sequence
  Description of Artificial Sequence: Synthetic oligonucleotide
cagcacgacccugugugug

SEQ ID NO: 184131 - RNA, 19 nt, Artificial Sequence
  Description of Artificial Sequence: Synthetic oligonucleotide
agcaggggacuugcuucgg

SEQ ID NO: 184132 - RNA, 19 nt, Artificial Sequence
  Description of Artificial Sequence: Synthetic oligonucleotide
caacaaacgacuccucauu

SEQ ID NO: 184133 - RNA, 19 nt, Artificial Sequence
  Description of Artificial Sequence: Synthetic oligonucleotide
ugccaacauggguguggug

SEQ ID NO: 184134 - RNA, 19 nt, Artificial Sequence
  Description of Artificial Sequence: Synthetic oligonucleotide
gcaugcaaguacuguaugu

SEQ ID NO: 184135 - RNA, 19 nt, Artificial Sequence
  Description of Artificial Sequence: Synthetic oligonucleotide
gacaccggacacuuccgau

SEQ ID NO: 184136 - RNA, 19 nt, Artificial Sequence
  Description of Artificial Sequence: Synthetic oligonucleotide
gggucauacaucugugggu

SEQ ID NO: 184137 - RNA, 19 nt, Artificial Sequence
  Description of Artificial Sequence: Synthetic oligonucleotide
gcgcuuccccaugugaucc

SEQ ID NO: 184138 - RNA, 19 nt, Artificial Sequence
  Description of Artificial Sequence: Synthetic oligonucleotide
gcgagccauauauauauau

SEQ ID NO: 184139 - RNA, 19 nt, Artificial Sequence
  Description of Artificial Sequence: Synthetic oligonucleotide
cuucgguauugguuggcgu

SEQ ID NO: 184140 - RNA, 19 nt, Artificial Sequence
  Description of Artificial Sequence: Synthetic oligonucleotide
gggcugguauacguaauga

SEQ ID NO: 184141 - RNA, 19 nt, Artificial Sequence
  Description of Artificial Sequence: Synthetic oligonucleotide
ggacucuuucagcugagau

SEQ ID NO: 184142 - RNA, 19 nt, Artificial Sequence
  Description of Artificial Sequence: Synthetic oligonucleotide
caggggacuugcuucggua

SEQ ID NO: 184143 - RNA, 19 nt, Artificial Sequence
  Description of Artificial Sequence: Synthetic oligonucleotide
ucgccuuucugaggggcuu

SEQ ID NO: 184144 - RNA, 19 nt, Artificial Sequence
  Description of Artificial Sequence: Synthetic oligonucleotide
gugacuacgggaacauuuu

SEQ ID NO: 184145 - RNA, 19 nt, Artificial Sequence
  Description of Artificial Sequence: Synthetic oligonucleotide
cgagguugggucuacaccu

SEQ ID NO: 184146 - RNA, 19 nt, Artificial Sequence
  Description of Artificial Sequence: Synthetic oligonucleotide
ccaccaauucgacaucuaa

SEQ ID NO: 184147 - RNA, 19 nt, Artificial Sequence
  Description of Artificial Sequence: Synthetic oligonucleotide
gcacgacccugugugugcg

SEQ ID NO: 184148 - RNA, 19 nt, Artificial Sequence
  Description of Artificial Sequence: Synthetic oligonucleotide
ggcugguauacguaaugau

SEQ ID NO: 184149 - RNA, 19 nt, Artificial Sequence
  Description of Artificial Sequence: Synthetic oligonucleotide
caggguaacugugcauuaa

SEQ ID NO: 184150 - RNA, 19 nt, Artificial Sequence
  Description of Artificial Sequence: Synthetic oligonucleotide
ggagagagauaggccccag

SEQ ID NO: 184151 - RNA, 19 nt, Artificial Sequence
  Description of Artificial Sequence: Synthetic oligonucleotide
guuaggcgucuuccucgga

SEQ ID NO: 184152 - RNA, 19 nt, Artificial Sequence
  Description of Artificial Sequence: Synthetic oligonucleotide
ccgguaugcaggguggcug

SEQ ID NO: 184153 - RNA, 19 nt, Artificial Sequence
  Description of Artificial Sequence: Synthetic oligonucleotide
cgagccauauauauauaua

SEQ ID NO: 184154 - RNA, 19 nt, Artificial Sequence
  Description of Artificial Sequence: Synthetic oligonucleotide
uccggaguagagggagcuu

SEQ ID NO: 184155 - RNA, 19 nt, Artificial Sequence
  Description of Artificial Sequence: Synthetic oligonucleotide
ggaaggcuaggcacaccac

SEQ ID NO: 184156 - RNA, 19 nt, Artificial Sequence
  Description of Artificial Sequence: Synthetic oligonucleotide
agccuugaaaagggucgua

SEQ ID NO: 184157 - RNA, 19 nt, Artificial Sequence
  Description of Artificial Sequence: Synthetic oligonucleotide
ccggacacuuccgauccug

SEQ ID NO: 184158 - RNA, 19 nt, Artificial Sequence
  Description of Artificial Sequence: Synthetic oligonucleotide
cugauggcccuagcuuaga

SEQ ID NO: 184159 - RNA, 19 nt, Artificial Sequence
  Description of Artificial Sequence: Synthetic oligonucleotide
gacuaacguugggcagcac

SEQ ID NO: 184160 - RNA, 19 nt, Artificial Sequence
  Description of Artificial Sequence: Synthetic oligonucleotide
gggucguauugaccaggga

SEQ ID NO: 184161 - RNA, 19 nt, Artificial Sequence
  Description of Artificial Sequence: Synthetic oligonucleotide
cuccggaguagagggagcu

SEQ ID NO: 184162 - RNA, 19 nt, Artificial Sequence
  Description of Artificial Sequence: Synthetic oligonucleotide
ugcaggcuauuggguuauc

SEQ ID NO: 184163 - RNA, 19 nt, Artificial Sequence
  Description of Artificial Sequence: Synthetic oligonucleotide
ggggaguucggccuuucuu

SEQ ID NO: 184164 - RNA, 19 nt, Artificial Sequence
  Description of Artificial Sequence: Synthetic oligonucleotide
uuguggccgauggcauguu

SEQ ID NO: 184165 - RNA, 19 nt, Artificial Sequence
  Description of Artificial Sequence: Synthetic oligonucleotide
ccuuucacgacaccgucuu

SEQ ID NO: 184166 - RNA, 19 nt, Artificial Sequence
  Description of Artificial Sequence: Synthetic oligonucleotide
gcucguagccaugguaaua

SEQ ID NO: 184167 - RNA, 19 nt, Artificial Sequence
  Description of Artificial Sequence: Synthetic oligonucleotide
ccaggguaacugugcauua

SEQ ID NO: 184168 - RNA, 19 nt, Artificial Sequence
  Description of Artificial Sequence: Synthetic oligonucleotide
ggcucguagccaugguaau

SEQ ID NO: 184169 - RNA, 19 nt, Artificial Sequence
  Description of Artificial Sequence: Synthetic oligonucleotide
cuuucacgacaccgucuuu

SEQ ID NO: 184170 - RNA, 19 nt, Artificial Sequence
  Description of Artificial Sequence: Synthetic oligonucleotide
gcccgguaugcaggguggc

SEQ ID NO: 184171 - RNA, 19 nt, Artificial Sequence
  Description of Artificial Sequence: Synthetic oligonucleotide
gccuuucacgacaccgucu

SEQ ID NO: 184172 - RNA, 19 nt, Artificial Sequence
  Description of Artificial Sequence: Synthetic oligonucleotide
cucuuucagcugagaugau

SEQ ID NO: 184173 - RNA, 19 nt, Artificial Sequence
  Description of Artificial Sequence: Synthetic oligonucleotide
gccaccaauucgacaucua

SEQ ID NO: 184174 - RNA, 19 nt, Artificial Sequence
  Description of Artificial Sequence: Synthetic oligonucleotide
cacuuccgauccuguuauu

SEQ ID NO: 184175 - RNA, 19 nt, Artificial Sequence
  Description of Artificial Sequence: Synthetic oligonucleotide
cagugacuacgggaacauu

SEQ ID NO: 184176 - RNA, 19 nt, Artificial Sequence
  Description of Artificial Sequence: Synthetic oligonucleotide
gcccuagcuuagaaugguu

SEQ ID NO: 184177 - RNA, 19 nt, Artificial Sequence
  Description of Artificial Sequence: Synthetic oligonucleotide
ccguucccgcucuguggaa

SEQ ID NO: 184178 - RNA, 19 nt, Artificial Sequence
  Description of Artificial Sequence: Synthetic oligonucleotide
ccaugguaauagggagaau

SEQ ID NO: 184179 - RNA, 19 nt, Artificial Sequence
  Description of Artificial Sequence: Synthetic oligonucleotide
auaaacaucaaacugaacg

SEQ ID NO: 184180 - RNA, 19 nt, Artificial Sequence
  Description of Artificial Sequence: Synthetic oligonucleotide
aaucgaaucuguuugagac

SEQ ID NO: 184181 - RNA, 19 nt, Artificial Sequence
  Description of Artificial Sequence: Synthetic oligonucleotide
aauguaauccuucaacugg

SEQ ID NO: 184182 - RNA, 19 nt, Artificial Sequence
  Description of Artificial Sequence: Synthetic oligonucleotide
ugaaauuauauaaagugac

SEQ ID NO: 184183 - RNA, 19 nt, Artificial Sequence
  Description of Artificial Sequence: Synthetic oligonucleotide
uauugaucagguaagaaac

SEQ ID NO: 184184 - RNA, 19 nt, Artificial Sequence
  Description of Artificial Sequence: Synthetic oligonucleotide
cuugccuggauuaugaugc

SEQ ID NO: 184185 - RNA, 19 nt, Artificial Sequence
  Description of Artificial Sequence: Synthetic oligonucleotide
uggauuaugaugcuguccc

SEQ ID NO: 184186 - RNA, 19 nt, Artificial Sequence
  Description of Artificial Sequence: Synthetic oligonucleotide
aaacaaaucugacggcgac

SEQ ID NO: 184187 - RNA, 19 nt, Artificial Sequence
  Description of Artificial Sequence: Synthetic oligonucleotide
uauuagccaaacuauacga

SEQ ID NO: 184188 - RNA, 19 nt, Artificial Sequence
  Description of Artificial Sequence: Synthetic oligonucleotide
aacaauacaucucauucau

SEQ ID NO: 184189 - RNA, 19 nt, Artificial Sequence
  Description of Artificial Sequence: Synthetic oligonucleotide
uuuacgucccuaauuuggg

SEQ ID NO: 184190 - RNA, 19 nt, Artificial Sequence
  Description of Artificial Sequence: Synthetic oligonucleotide
cuuuacgucccuaauuugg

SEQ ID NO: 184191 - RNA, 19 nt, Artificial Sequence
  Description of Artificial Sequence: Synthetic oligonucleotide
ucuugcacaagucaaugug

SEQ ID NO: 184192 - RNA, 19 nt, Artificial Sequence
  Description of Artificial Sequence: Synthetic oligonucleotide
uuuuacaauauguccucgg

SEQ ID NO: 184193 - RNA, 19 nt, Artificial Sequence
  Description of Artificial Sequence: Synthetic oligonucleotide
uuucacguuacagugacag

SEQ ID NO: 184194 - RNA, 19 nt, Artificial Sequence
  Description of Artificial Sequence: Synthetic oligonucleotide
agacaucacaaucaggcuc

SEQ ID NO: 184195 - RNA, 19 nt, Artificial Sequence
  Description of Artificial Sequence: Synthetic oligonucleotide
ucauagauggagcaagcug

SEQ ID NO: 184196 - RNA, 19 nt, Artificial Sequence
  Description of Artificial Sequence: Synthetic oligonucleotide
gacaguuacaaccaaacaa

SEQ ID NO: 184197 - RNA, 19 nt, Artificial Sequence
  Description of Artificial Sequence: Synthetic oligonucleotide
aauuguuuagacauccaug

SEQ ID NO: 184198 - RNA, 19 nt, Artificial Sequence
  Description of Artificial Sequence: Synthetic oligonucleotide
ugacucacuacccagaaua

SEQ ID NO: 184199 - RNA, 19 nt, Artificial Sequence
  Description of Artificial Sequence: Synthetic oligonucleotide
uuuucgugggauuggacag

SEQ ID NO: 184200 - RNA, 19 nt, Artificial Sequence
  Description of Artificial Sequence: Synthetic oligonucleotide
aguucuagagaauaaguaa

SEQ ID NO: 184201 - RNA, 19 nt, Artificial Sequence
  Description of Artificial Sequence: Synthetic oligonucleotide
agguguuuuaaauagcacu

SEQ ID NO: 184202 - RNA, 19 nt, Artificial Sequence
  Description of Artificial Sequence: Synthetic oligonucleotide
aaagcuuaggacuccuugu

SEQ ID NO: 184203 - RNA, 19 nt, Artificial Sequence
  Description of Artificial Sequence: Synthetic oligonucleotide
ucuuaaugcccuuucacgu

SEQ ID NO: 184204 - RNA, 19 nt, Artificial Sequence
  Description of Artificial Sequence: Synthetic oligonucleotide
uuuacaauauguccucggu

SEQ ID NO: 184205 - RNA, 19 nt, Artificial Sequence
  Description of Artificial Sequence: Synthetic oligonucleotide
uagaaaaucugauggggug

SEQ ID NO: 184206 - RNA, 19 nt, Artificial Sequence
  Description of Artificial Sequence: Synthetic oligonucleotide
uuagccaaacuauacgaga

SEQ ID NO: 184207 - RNA, 19 nt, Artificial Sequence
  Description of Artificial Sequence: Synthetic oligonucleotide
auaagcugccugcugauag

SEQ ID NO: 184208 - RNA, 19 nt, Artificial Sequence
  Description of Artificial Sequence: Synthetic oligonucleotide
ugaucauugugcuugccug

SEQ ID NO: 184209 - RNA, 19 nt, Artificial Sequence
  Description of Artificial Sequence: Synthetic oligonucleotide
uauugugaaaacauugcuu

SEQ ID NO: 184210 - RNA, 19 nt, Artificial Sequence
  Description of Artificial Sequence: Synthetic oligonucleotide
aagccugauuguuaaagcu

SEQ ID NO: 184211 - RNA, 19 nt, Artificial Sequence
  Description of Artificial Sequence: Synthetic oligonucleotide
gcaagauuaacuuuucacc

SEQ ID NO: 184212 - RNA, 19 nt, Artificial Sequence
  Description of Artificial Sequence: Synthetic oligonucleotide
aggugaggcacuuaaaaca

SEQ ID NO: 184213 - RNA, 19 nt, Artificial Sequence
  Description of Artificial Sequence: Synthetic oligonucleotide
uccacaucgaacauacacu

SEQ ID NO: 184214 - RNA, 19 nt, Artificial Sequence
  Description of Artificial Sequence: Synthetic oligonucleotide
acguucaugagguucuuuc

SEQ ID NO: 184215 - RNA, 19 nt, Artificial Sequence
  Description of Artificial Sequence: Synthetic oligonucleotide
acaugaaggcaucacuggg

SEQ ID NO: 184216 - RNA, 19 nt, Artificial Sequence
  Description of Artificial Sequence: Synthetic oligonucleotide
auuaugaucucagagugga

SEQ ID NO: 184217 - RNA, 19 nt, Artificial Sequence
  Description of Artificial Sequence: Synthetic oligonucleotide
gguaaugacucucugacac

SEQ ID NO: 184218 - RNA, 19 nt, Artificial Sequence
  Description of Artificial Sequence: Synthetic oligonucleotide
caauagaugcaucauccag

SEQ ID NO: 184219 - RNA, 19 nt, Artificial Sequence
  Description of Artificial Sequence: Synthetic oligonucleotide
cugagaacucuuaaugccc

SEQ ID NO: 184220 - RNA, 19 nt, Artificial Sequence
  Description of Artificial Sequence: Synthetic oligonucleotide
caugagguucuuucuaucc

SEQ ID NO: 184221 - RNA, 19 nt, Artificial Sequence
  Description of Artificial Sequence: Synthetic oligonucleotide
ucugacggcgacaucaaac

SEQ ID NO: 184222 - RNA, 19 nt, Artificial Sequence
  Description of Artificial Sequence: Synthetic oligonucleotide
cagguaaugacucucugac

SEQ ID NO: 184223 - RNA, 19 nt, Artificial Sequence
  Description of Artificial Sequence: Synthetic oligonucleotide
ucggucuacauaauaaaau

SEQ ID NO: 184224 - RNA, 19 nt, Artificial Sequence
  Description of Artificial Sequence: Synthetic oligonucleotide
gaucauugugcuugccugg

SEQ ID NO: 184225 - RNA, 19 nt, Artificial Sequence
  Description of Artificial Sequence: Synthetic oligonucleotide
uaagccugauuguuaaagc

SEQ ID NO: 184226 - RNA, 19 nt, Artificial Sequence
  Description of Artificial Sequence: Synthetic oligonucleotide
uuuaagccagcagugagcu

SEQ ID NO: 184227 - RNA, 19 nt, Artificial Sequence
  Description of Artificial Sequence: Synthetic oligonucleotide
auucacuagcgcucucucc

SEQ ID NO: 184228 - RNA, 19 nt, Artificial Sequence
  Description of Artificial Sequence: Synthetic oligonucleotide
guauugaucagguaagaaa

SEQ ID NO: 184229 - RNA, 19 nt, Artificial Sequence
  Description of Artificial Sequence: Synthetic oligonucleotide
agggcuuucauucauuaaa

SEQ ID NO: 184230 - RNA, 19 nt, Artificial Sequence
  Description of Artificial Sequence: Synthetic oligonucleotide
uaagggaucaggacuggga

SEQ ID NO: 184231 - RNA, 19 nt, Artificial Sequence
  Description of Artificial Sequence: Synthetic oligonucleotide
aaaucgaagcaaguugaug

SEQ ID NO: 184232 - RNA, 19 nt, Artificial Sequence
  Description of Artificial Sequence: Synthetic oligonucleotide
guaagugguaccugacagg

SEQ ID NO: 184233 - RNA, 19 nt, Artificial Sequence
  Description of Artificial Sequence: Synthetic oligonucleotide
guaagccugauuguuaaag

SEQ ID NO: 184234 - RNA, 19 nt, Artificial Sequence
  Description of Artificial Sequence: Synthetic oligonucleotide
gaccugagaacaugaaggc

SEQ ID NO: 184235 - RNA, 19 nt, Artificial Sequence
  Description of Artificial Sequence: Synthetic oligonucleotide
gauuaugaucucagagugg

SEQ ID NO: 184236 - RNA, 19 nt, Artificial Sequence
  Description of Artificial Sequence: Synthetic oligonucleotide
ggaaacaaaucugacggcg

SEQ ID NO: 184237 - RNA, 19 nt, Artificial Sequence
  Description of Artificial Sequence: Synthetic oligonucleotide
uagccaaacuauacgagaa

SEQ ID NO: 184238 - RNA, 19 nt, Artificial Sequence
  Description of Artificial Sequence: Synthetic oligonucleotide
gguaggacucaucacacag

SEQ ID NO: 184239 - RNA, 19 nt, Artificial Sequence
  Description of Artificial Sequence: Synthetic oligonucleotide
acugaacgggaacauccac

SEQ ID NO: 184240 - RNA, 19 nt, Artificial Sequence
  Description of Artificial Sequence: Synthetic oligonucleotide
acagcuaagacaucacaau

SEQ ID NO: 184241 - RNA, 19 nt, Artificial Sequence
  Description of Artificial Sequence: Synthetic oligonucleotide
uaaucgaaucuguuugaga

SEQ ID NO: 184242 - RNA, 19 nt, Artificial Sequence
  Description of Artificial Sequence: Synthetic oligonucleotide
agcuuuacgucccuaauuu

SEQ ID NO: 184243 - RNA, 19 nt, Artificial Sequence
  Description of Artificial Sequence: Synthetic oligonucleotide
guaaugacucucugacacg

SEQ ID NO: 184244 - RNA, 19 nt, Artificial Sequence
  Description of Artificial Sequence: Synthetic oligonucleotide
ugaacgggaacauccacau

SEQ ID NO: 184245 - RNA, 19 nt, Artificial Sequence
  Description of Artificial Sequence: Synthetic oligonucleotide
ugauaguagaagccagggu

SEQ ID NO: 184246 - RNA, 19 nt, Artificial Sequence
  Description of Artificial Sequence: Synthetic oligonucleotide
ggcaagauuaacuuuucac

SEQ ID NO: 184247 - RNA, 19 nt, Artificial Sequence
  Description of Artificial Sequence: Synthetic oligonucleotide
caggagucgacccuguggc

SEQ ID NO: 184248 - RNA, 19 nt, Artificial Sequence
  Description of Artificial Sequence: Synthetic oligonucleotide
uauacgagaagaugauuuu

SEQ ID NO: 184249 - RNA, 19 nt, Artificial Sequence
  Description of Artificial Sequence: Synthetic oligonucleotide
ugugacacuugcaaacaau

SEQ ID NO: 184250 - RNA, 19 nt, Artificial Sequence
  Description of Artificial Sequence: Synthetic oligonucleotide
ggcauaauaagcugccugc

SEQ ID NO: 184251 - RNA, 19 nt, Artificial Sequence
  Description of Artificial Sequence: Synthetic oligonucleotide
auuagccaaacuauacgag

SEQ ID NO: 184252 - RNA, 19 nt, Artificial Sequence
  Description of Artificial Sequence: Synthetic oligonucleotide
aacgccuauugugaaaaca

SEQ ID NO: 184253 - RNA, 19 nt, Artificial Sequence
  Description of Artificial Sequence: Synthetic oligonucleotide
acagguaaugacucucuga

SEQ ID NO: 184254 - RNA, 19 nt, Artificial Sequence
  Description of Artificial Sequence: Synthetic oligonucleotide
uuuagacauccaugcagca

SEQ ID NO: 184255 - RNA, 19 nt, Artificial Sequence
  Description of Artificial Sequence: Synthetic oligonucleotide
ugcauucacguggaguggg

SEQ ID NO: 184256 - RNA, 19 nt, Artificial Sequence
  Description of Artificial Sequence: Synthetic oligonucleotide
auccgaguauuucugguca

SEQ ID NO: 184257 - RNA, 19 nt, Artificial Sequence
  Description of Artificial Sequence: Synthetic oligonucleotide
ugguaucauauccauuaaa

SEQ ID NO: 184258 - RNA, 19 nt, Artificial Sequence
  Description of Artificial Sequence: Synthetic oligonucleotide
uacgucccuaauuugggac

SEQ ID NO: 184259 - RNA, 19 nt, Artificial Sequence
  Description of Artificial Sequence: Synthetic oligonucleotide
aggaguucuagagaauaag

SEQ ID NO: 184260 - RNA, 19 nt, Artificial Sequence
  Description of Artificial Sequence: Synthetic oligonucleotide
gacaucacaaucaggcuca

SEQ ID NO: 184261 - RNA, 19 nt, Artificial Sequence
  Description of Artificial Sequence: Synthetic oligonucleotide
agucauagauggagcaagc

SEQ ID NO: 184262 - RNA, 19 nt, Artificial Sequence
  Description of Artificial Sequence: Synthetic oligonucleotide
ugcguaaucgaaucuguuu

SEQ ID NO: 184263 - RNA, 19 nt, Artificial Sequence
  Description of Artificial Sequence: Synthetic oligonucleotide
uucacguggagugggaugu

SEQ ID NO: 184264 - RNA, 19 nt, Artificial Sequence
  Description of Artificial Sequence: Synthetic oligonucleotide
uguauugaucagguaagaa

SEQ ID NO: 184265 - RNA, 19 nt, Artificial Sequence
  Description of Artificial Sequence: Synthetic oligonucleotide
agccaaacuauacgagaag

SEQ ID NO: 184266 - RNA, 19 nt, Artificial Sequence
  Description of Artificial Sequence: Synthetic oligonucleotide
uguuuauuuacagcacuau

SEQ ID NO: 184267 - RNA, 19 nt, Artificial Sequence
  Description of Artificial Sequence: Synthetic oligonucleotide
agaugguccauuguaguca

SEQ ID NO: 184268 - RNA, 19 nt, Artificial Sequence
  Description of Artificial Sequence: Synthetic oligonucleotide
gcguaaucgaaucuguuug

SEQ ID NO: 184269 - RNA, 19 nt, Artificial Sequence
  Description of Artificial Sequence: Synthetic oligonucleotide
gauaccccgccaucagagg

SEQ ID NO: 184270 - RNA, 19 nt, Artificial Sequence
  Description of Artificial Sequence: Synthetic oligonucleotide
aacuauacgagaagaugau

SEQ ID NO: 184271 - RNA, 19 nt, Artificial Sequence
  Description of Artificial Sequence: Synthetic oligonucleotide
agaaaaucugauggggugu

SEQ ID NO: 184272 - RNA, 19 nt, Artificial Sequence
  Description of Artificial Sequence: Synthetic oligonucleotide
guaaucgaaucuguuugag

SEQ ID NO: 184273 - RNA, 19 nt, Artificial Sequence
  Description of Artificial Sequence: Synthetic oligonucleotide
cucagaguggacgacacuc

SEQ ID NO: 184274 - RNA, 19 nt, Artificial Sequence
  Description of Artificial Sequence: Synthetic oligonucleotide
aguuuuggccgccuuuuga

SEQ ID NO: 184275 - RNA, 19 nt, Artificial Sequence
  Description of Artificial Sequence: Synthetic oligonucleotide
agacugauuaugaucucag

SEQ ID NO: 184276 - RNA, 19 nt, Artificial Sequence
  Description of Artificial Sequence: Synthetic oligonucleotide
auucacguggagugggaug

SEQ ID NO: 184277 - RNA, 19 nt, Artificial Sequence
  Description of Artificial Sequence: Synthetic oligonucleotide
guaagaacaccaagggcug

SEQ ID NO: 184278 - RNA, 19 nt, Artificial Sequence
  Description of Artificial Sequence: Synthetic oligonucleotide
ugugagggcccaaggugag

SEQ ID NO: 184279 - RNA, 19 nt, Artificial Sequence
  Description of Artificial Sequence: Synthetic oligonucleotide
gguagcugcugauaccccg

SEQ ID NO: 184280 - RNA, 19 nt, Artificial Sequence
  Description of Artificial Sequence: Synthetic oligonucleotide
guggacgacacuccuuucc

SEQ ID NO: 184281 - RNA, 19 nt, Artificial Sequence
  Description of Artificial Sequence: Synthetic oligonucleotide
aacaaaucugacggcgaca

SEQ ID NO: 184282 - RNA, 19 nt, Artificial Sequence
  Description of Artificial Sequence: Synthetic oligonucleotide
cugacacguccaaacgacg

SEQ ID NO: 184283 - RNA, 19 nt, Artificial Sequence
  Description of Artificial Sequence: Synthetic oligonucleotide
ugagcuuuacgucccuaau

SEQ ID NO: 184284 - RNA, 19 nt, Artificial Sequence
  Description of Artificial Sequence: Synthetic oligonucleotide
gauuaacuuuucaccauga

SEQ ID NO: 184285 - RNA, 19 nt, Artificial Sequence
  Description of Artificial Sequence: Synthetic oligonucleotide
augaaacuuggcuuugcau

SEQ ID NO: 184286 - RNA, 19 nt, Artificial Sequence
  Description of Artificial Sequence: Synthetic oligonucleotide
auugugcuugccuggauua

SEQ ID NO: 184287 - RNA, 19 nt, Artificial Sequence
  Description of Artificial Sequence: Synthetic oligonucleotide
uuacgucccuaauuuggga

SEQ ID NO: 184288 - RNA, 19 nt, Artificial Sequence
  Description of Artificial Sequence: Synthetic oligonucleotide
aucgaacauacacuguuuu

SEQ ID NO: 184289 - RNA, 19 nt, Artificial Sequence
  Description of Artificial Sequence: Synthetic oligonucleotide
acaaaucugacggcgacau

SEQ ID NO: 184290 - RNA, 19 nt, Artificial Sequence
  Description of Artificial Sequence: Synthetic oligonucleotide
gaguucuagagaauaagua

SEQ ID NO: 184291 - RNA, 19 nt, Artificial Sequence
  Description of Artificial Sequence: Synthetic oligonucleotide
agugaaccucauuguuggg

SEQ ID NO: 184292 - RNA, 19 nt, Artificial Sequence
  Description of Artificial Sequence: Synthetic oligonucleotide
cuauacgagaagaugauuu

SEQ ID NO: 184293 - RNA, 19 nt, Artificial Sequence
  Description of Artificial Sequence: Synthetic oligonucleotide
caugagguaggaacacuuc

SEQ ID NO: 184294 - RNA, 19 nt, Artificial Sequence
  Description of Artificial Sequence: Synthetic oligonucleotide
cuggauuaugaugcugucc

SEQ ID NO: 184295 - RNA, 19 nt, Artificial Sequence
  Description of Artificial Sequence: Synthetic oligonucleotide
accugacagguaaugacuc

SEQ ID NO: 184296 - RNA, 19 nt, Artificial Sequence
  Description of Artificial Sequence: Synthetic oligonucleotide
ccuugugacacuugcaaac

SEQ ID NO: 184297 - RNA, 19 nt, Artificial Sequence
  Description of Artificial Sequence: Synthetic oligonucleotide
auaccccgccaucagagga

SEQ ID NO: 184298 - RNA, 19 nt, Artificial Sequence
  Description of Artificial Sequence: Synthetic oligonucleotide
cuaauuugggacuuuucgu

SEQ ID NO: 184299 - RNA, 19 nt, Artificial Sequence
  Description of Artificial Sequence: Synthetic oligonucleotide
uugugacacuugcaaacaa

SEQ ID NO: 184300 - RNA, 19 nt, Artificial Sequence
  Description of Artificial Sequence: Synthetic oligonucleotide
agucagccuucagauaaac

SEQ ID NO: 184301 - RNA, 19 nt, Artificial Sequence
  Description of Artificial Sequence: Synthetic oligonucleotide
acaggaaugucggugagua

SEQ ID NO: 184302 - RNA, 19 nt, Artificial Sequence
  Description of Artificial Sequence: Synthetic oligonucleotide
aaugacucucugacacguc

SEQ ID NO: 184303 - RNA, 19 nt, Artificial Sequence
  Description of Artificial Sequence: Synthetic oligonucleotide
aacgacggcaagucugcau

SEQ ID NO: 184304 - RNA, 19 nt, Artificial Sequence
  Description of Artificial Sequence: Synthetic oligonucleotide
uuagacauccaugcagcau

SEQ ID NO: 184305 - RNA, 19 nt, Artificial Sequence
  Description of Artificial Sequence: Synthetic oligonucleotide
agccugauuguuaaagcug

SEQ ID NO: 184306 - RNA, 19 nt, Artificial Sequence
  Description of Artificial Sequence: Synthetic oligonucleotide
gaaugucggugaguaaggc

SEQ ID NO: 184307 - RNA, 19 nt, Artificial Sequence
  Description of Artificial Sequence: Synthetic oligonucleotide
auugaucagguaagaaaca

SEQ ID NO: 184308 - RNA, 19 nt, Artificial Sequence
  Description of Artificial Sequence: Synthetic oligonucleotide
aucaaacggaaagacaguu

SEQ ID NO: 184309 - RNA, 19 nt, Artificial Sequence
  Description of Artificial Sequence: Synthetic oligonucleotide
uccugucuguaagacaacu

SEQ ID NO: 184310 - RNA, 19 nt, Artificial Sequence
  Description of Artificial Sequence: Synthetic oligonucleotide
cugaacgggaacauccaca

SEQ ID NO: 184311 - RNA, 19 nt, Artificial Sequence
  Description of Artificial Sequence: Synthetic oligonucleotide
cucugaauagcugguauca

SEQ ID NO: 184312 - RNA, 19 nt, Artificial Sequence
  Description of Artificial Sequence: Synthetic oligonucleotide
ccaaacgacggcaagucug

SEQ ID NO: 184313 - RNA, 19 nt, Artificial Sequence
  Description of Artificial Sequence: Synthetic oligonucleotide
uucacguuacagugacaga

SEQ ID NO: 184314 - RNA, 19 nt, Artificial Sequence
  Description of Artificial Sequence: Synthetic oligonucleotide
gacugauuaugaucucaga

SEQ ID NO: 184315 - RNA, 19 nt, Artificial Sequence
  Description of Artificial Sequence: Synthetic oligonucleotide
gggcauaauaagcugccug

SEQ ID NO: 184316 - RNA, 19 nt, Artificial Sequence
  Description of Artificial Sequence: Synthetic oligonucleotide
acgucccuaauuugggacu

SEQ ID NO: 184317 - RNA, 19 nt, Artificial Sequence
  Description of Artificial Sequence: Synthetic oligonucleotide
cucggucuacauaauaaaa

SEQ ID NO: 184318 - RNA, 19 nt, Artificial Sequence
  Description of Artificial Sequence: Synthetic oligonucleotide
ggaaugucggugaguaagg

SEQ ID NO: 184319 - RNA, 19 nt, Artificial Sequence
  Description of Artificial Sequence: Synthetic oligonucleotide
acgacggcaagucugcauu

SEQ ID NO: 184320 - RNA, 19 nt, Artificial Sequence
  Description of Artificial Sequence: Synthetic oligonucleotide
gacggcgacaucaaacgga

SEQ ID NO: 184321 - RNA, 19 nt, Artificial Sequence
  Description of Artificial Sequence: Synthetic oligonucleotide
acggaaagacaguuucuau

SEQ ID NO: 184322 - RNA, 19 nt, Artificial Sequence
  Description of Artificial Sequence: Synthetic oligonucleotide
uccuagguacucucucgac

SEQ ID NO: 184323 - RNA, 19 nt, Artificial Sequence
  Description of Artificial Sequence: Synthetic oligonucleotide
acuuuucgugggauuggac

SEQ ID NO: 184324 - RNA, 19 nt, Artificial Sequence
  Description of Artificial Sequence: Synthetic oligonucleotide
acgccuauugugaaaacau

SEQ ID NO: 184325 - RNA, 19 nt, Artificial Sequence
  Description of Artificial Sequence: Synthetic oligonucleotide
cauucacuagcgcucucuc

SEQ ID NO: 184326 - RNA, 19 nt, Artificial Sequence
  Description of Artificial Sequence: Synthetic oligonucleotide
cucaugucgcagauguaca

SEQ ID NO: 184327 - RNA, 19 nt, Artificial Sequence
  Description of Artificial Sequence: Synthetic oligonucleotide
acguccaaacgacggcaag

SEQ ID NO: 184328 - RNA, 19 nt, Artificial Sequence
  Description of Artificial Sequence: Synthetic oligonucleotide
cugauuguuaaagcugaca

SEQ ID NO: 184329 - RNA, 19 nt, Artificial Sequence
  Description of Artificial Sequence: Synthetic oligonucleotide
  modified_base (19)..(19): a, c, u, g, unknown or other
ggguauugugcugaaaacn

SEQ ID NO: 184330 - RNA, 19 nt, Artificial Sequence
  Description of Artificial Sequence: Synthetic oligonucleotide
cuugugacacuugcaaaca

SEQ ID NO: 184331 - RNA, 19 nt, Artificial Sequence
  Description of Artificial Sequence: Synthetic oligonucleotide
uccaaaggccuggaauugu

SEQ ID NO: 184332 - RNA, 19 nt, Artificial Sequence
  Description of Artificial Sequence: Synthetic oligonucleotide
auucuguaagugguaccug

SEQ ID NO: 184333 - RNA, 19 nt, Artificial Sequence
  Description of Artificial Sequence: Synthetic oligonucleotide
acucacuacccagaauaca

SEQ ID NO: 184334 - RNA, 19 nt, Artificial Sequence
  Description of Artificial Sequence: Synthetic oligonucleotide
agcaugaguuucucugaau

SEQ ID NO: 184335 - RNA, 19 nt, Artificial Sequence
  Description of Artificial Sequence: Synthetic oligonucleotide
uccgcuccugggcauaaua

SEQ ID NO: 184336 - RNA, 19 nt, Artificial Sequence
  Description of Artificial Sequence: Synthetic oligonucleotide
gggguauugugcugaaaac

SEQ ID NO: 184337 - RNA, 19 nt, Artificial Sequence
  Description of Artificial Sequence: Synthetic oligonucleotide
uuucgugggauuggacagu

SEQ ID NO: 184338 - RNA, 19 nt, Artificial Sequence
  Description of Artificial Sequence: Synthetic oligonucleotide
cagcgugaugacaguacug

SEQ ID NO: 184339 - RNA, 19 nt, Artificial Sequence
  Description of Artificial Sequence: Synthetic oligonucleotide
gcuuaggacuccuugucuc

SEQ ID NO: 184340 - RNA, 19 nt, Artificial Sequence
  Description of Artificial Sequence: Synthetic oligonucleotide
gggacuuuucgugggauug

SEQ ID NO: 184341 - RNA, 19 nt, Artificial Sequence
  Description of Artificial Sequence: Synthetic oligonucleotide
gcaugaguuucucugaaua

SEQ ID NO: 184342 - RNA, 19 nt, Artificial Sequence
  Description of Artificial Sequence: Synthetic oligonucleotide
gaacgggaacauccacaug

SEQ ID NO: 184343 - RNA, 19 nt, Artificial Sequence
  Description of Artificial Sequence: Synthetic oligonucleotide
ggagauaauguaauguccu

SEQ ID NO: 184344 - RNA, 19 nt, Artificial Sequence
  Description of Artificial Sequence: Synthetic oligonucleotide
gaacgccuauugugaaaac

SEQ ID NO: 184345 - RNA, 19 nt, Artificial Sequence
  Description of Artificial Sequence: Synthetic oligonucleotide
aaucugacggcgacaucaa

SEQ ID NO: 184346 - RNA, 19 nt, Artificial Sequence
  Description of Artificial Sequence: Synthetic oligonucleotide
gacuuuucgugggauugga

SEQ ID NO: 184347 - RNA, 19 nt, Artificial Sequence
  Description of Artificial Sequence: Synthetic oligonucleotide
acuauacgagaagaugauu

SEQ ID NO: 184348 - RNA, 19 nt, Artificial Sequence
  Description of Artificial Sequence: Synthetic oligonucleotide
gugagcuuuacgucccuaa

SEQ ID NO: 184349 - RNA, 19 nt, Artificial Sequence
  Description of Artificial Sequence: Synthetic oligonucleotide
ucggagcaugaaacuuggc

SEQ ID NO: 184350 - RNA, 19 nt, Artificial Sequence
  Description of Artificial Sequence: Synthetic oligonucleotide
gagucgacccuguggcuuc

SEQ ID NO: 184351 - RNA, 19 nt, Artificial Sequence
  Description of Artificial Sequence: Synthetic oligonucleotide
guuguaagccugauuguua

SEQ ID NO: 184352 - RNA, 19 nt, Artificial Sequence
  Description of Artificial Sequence: Synthetic oligonucleotide
cgugggauuggacaguuac

SEQ ID NO: 184353 - RNA, 19 nt, Artificial Sequence
  Description of Artificial Sequence: Synthetic oligonucleotide
uucauccggggacgacuug

SEQ ID NO: 184354 - RNA, 19 nt, Artificial Sequence
  Description of Artificial Sequence: Synthetic oligonucleotide
cugcauucacguggagugg

SEQ ID NO: 184355 - RNA, 19 nt, Artificial Sequence
  Description of Artificial Sequence: Synthetic oligonucleotide
ucgacccuguggcuucaca

SEQ ID NO: 184356 - RNA, 19 nt, Artificial Sequence
  Description of Artificial Sequence: Synthetic oligonucleotide
caugauuacagagggcucu

SEQ ID NO: 184357 - RNA, 19 nt, Artificial Sequence
  Description of Artificial Sequence: Synthetic oligonucleotide
cauccuugugacacuugca

SEQ ID NO: 184358 - RNA, 19 nt, Artificial Sequence
  Description of Artificial Sequence: Synthetic oligonucleotide
gcuuuacgucccuaauuug

SEQ ID NO: 184359 - RNA, 19 nt, Artificial Sequence
  Description of Artificial Sequence: Synthetic oligonucleotide
cuauccgaguauuucuggu

SEQ ID NO: 184360 - RNA, 19 nt, Artificial Sequence
  Description of Artificial Sequence: Synthetic oligonucleotide
uguuuccgcuccugggcau

SEQ ID NO: 184361 - RNA, 19 nt, Artificial Sequence
  Description of Artificial Sequence: Synthetic oligonucleotide
gcucggagcaugaaacuug

SEQ ID NO: 184362 - RNA, 19 nt, Artificial Sequence
  Description of Artificial Sequence: Synthetic oligonucleotide
uugggacuuuucgugggau

SEQ ID NO: 184363 - RNA, 19 nt, Artificial Sequence
  Description of Artificial Sequence: Synthetic oligonucleotide
ggcagaaugcguaaucgaa

SEQ ID NO: 184364 - RNA, 19 nt, Artificial Sequence
  Description of Artificial Sequence: Synthetic oligonucleotide
aaacgacggcaagucugca

SEQ ID NO: 184365 - RNA, 19 nt, Artificial Sequence
  Description of Artificial Sequence: Synthetic oligonucleotide
gagcuuuacgucccuaauu

SEQ ID NO: 184366 - RNA, 19 nt, Artificial Sequence
  Description of Artificial Sequence: Synthetic oligonucleotide
uucgugggauuggacaguu

SEQ ID NO: 184367 - RNA, 19 nt, Artificial Sequence
  Description of Artificial Sequence: Synthetic oligonucleotide
agcucggagcaugaaacuu

SEQ ID NO: 184368 - RNA, 19 nt, Artificial Sequence
  Description of Artificial Sequence: Synthetic oligonucleotide
agguacucucucgacuccu

SEQ ID NO: 184369 - RNA, 19 nt, Artificial Sequence
  Description of Artificial Sequence: Synthetic oligonucleotide
agacccggucagcccacag

SEQ ID NO: 184370 - RNA, 19 nt, Artificial Sequence
  Description of Artificial Sequence: Synthetic oligonucleotide
caucaaacggaaagacagu

SEQ ID NO: 184371 - RNA, 19 nt, Artificial Sequence
  Description of Artificial Sequence: Synthetic oligonucleotide
cuccugucuguaagacaac

SEQ ID NO: 184372 - RNA, 19 nt, Artificial Sequence
  Description of Artificial Sequence: Synthetic oligonucleotide
cuuaaugcccuuucacguu

SEQ ID NO: 184373 - RNA, 19 nt, Artificial Sequence
  Description of Artificial Sequence: Synthetic oligonucleotide
aggagucgacccuguggcu

SEQ ID NO: 184374 - RNA, 19 nt, Artificial Sequence
  Description of Artificial Sequence: Synthetic oligonucleotide
caaguugauguugagcgau

SEQ ID NO: 184375 - RNA, 19 nt, Artificial Sequence
  Description of Artificial Sequence: Synthetic oligonucleotide
cugauaccccgccaucaga

SEQ ID NO: 184376 - RNA, 19 nt, Artificial Sequence
  Description of Artificial Sequence: Synthetic oligonucleotide
agagacccggucagcccac

SEQ ID NO: 184377 - RNA, 19 nt, Artificial Sequence
  Description of Artificial Sequence: Synthetic oligonucleotide
cugccugcugauaguagaa

SEQ ID NO: 184378 - RNA, 19 nt, Artificial Sequence
  Description of Artificial Sequence: Synthetic oligonucleotide
ccuuuugaaagaccucgca

SEQ ID NO: 184379 - RNA, 19 nt, Artificial Sequence
  Description of Artificial Sequence: Synthetic oligonucleotide
cuuucacguuacagugaca

SEQ ID NO: 184380 - RNA, 19 nt, Artificial Sequence
  Description of Artificial Sequence: Synthetic oligonucleotide
aucugacggcgacaucaaa

SEQ ID NO: 184381 - RNA, 19 nt, Artificial Sequence
  Description of Artificial Sequence: Synthetic oligonucleotide
cucuggcgugcuguuuccg

SEQ ID NO: 184382 - RNA, 19 nt, Artificial Sequence
  Description of Artificial Sequence: Synthetic oligonucleotide
guccucggucuacauaaua

SEQ ID NO: 184383 - RNA, 19 nt, Artificial Sequence
  Description of Artificial Sequence: Synthetic oligonucleotide
caguacugaugacagggau

SEQ ID NO: 184384 - RNA, 19 nt, Artificial Sequence
  Description of Artificial Sequence: Synthetic oligonucleotide
acgggaacauccacaugaa

SEQ ID NO: 184385 - RNA, 19 nt, Artificial Sequence
  Description of Artificial Sequence: Synthetic oligonucleotide
augcguaaucgaaucuguu

SEQ ID NO: 184386 - RNA, 19 nt, Artificial Sequence
  Description of Artificial Sequence: Synthetic oligonucleotide
cauugugcuugccuggauu

SEQ ID NO: 184387 - RNA, 19 nt, Artificial Sequence
  Description of Artificial Sequence: Synthetic oligonucleotide
caaccccaacuuaauggcu

SEQ ID NO: 184388 - RNA, 19 nt, Artificial Sequence
  Description of Artificial Sequence: Synthetic oligonucleotide
ucgugggauuggacaguua

SEQ ID NO: 184389 - RNA, 19 nt, Artificial Sequence
  Description of Artificial Sequence: Synthetic oligonucleotide
cguaaucgaaucuguuuga

SEQ ID NO: 184390 - RNA, 19 nt, Artificial Sequence
  Description of Artificial Sequence: Synthetic oligonucleotide
caccugccugacucacuac

SEQ ID NO: 184391 - RNA, 19 nt, Artificial Sequence
  Description of Artificial Sequence: Synthetic oligonucleotide
gccgccuuuugaaagaccu

SEQ ID NO: 184392 - RNA, 19 nt, Artificial Sequence
  Description of Artificial Sequence: Synthetic oligonucleotide
acguggagugggauguuuu

SEQ ID NO: 184393 - RNA, 19 nt, Artificial Sequence
  Description of Artificial Sequence: Synthetic oligonucleotide
gcagcgugaugacaguacu

SEQ ID NO: 184394 - RNA, 19 nt, Artificial Sequence
  Description of Artificial Sequence: Synthetic oligonucleotide
gagaacucuuaaugcccuu

SEQ ID NO: 184395 - RNA, 19 nt, Artificial Sequence
  Description of Artificial Sequence: Synthetic oligonucleotide
aggcagcgugaugacagua

SEQ ID NO: 184396 - RNA, 19 nt, Artificial Sequence
  Description of Artificial Sequence: Synthetic oligonucleotide
gcauaauaagcugccugcu

SEQ ID NO: 184397 - RNA, 19 nt, Artificial Sequence
  Description of Artificial Sequence: Synthetic oligonucleotide
gcagaaugcguaaucgaau

SEQ ID NO: 184398 - RNA, 19 nt, Artificial Sequence
  Description of Artificial Sequence: Synthetic oligonucleotide
ccuagguacucucucgacu

SEQ ID NO: 184399 - RNA, 19 nt, Artificial Sequence
  Description of Artificial Sequence: Synthetic oligonucleotide
ggcugucaaccccaacuua

SEQ ID NO: 184400 - RNA, 19 nt, Artificial Sequence
  Description of Artificial Sequence: Synthetic oligonucleotide
ccugacucacuacccagaa

SEQ ID NO: 184401 - RNA, 19 nt, Artificial Sequence
  Description of Artificial Sequence: Synthetic oligonucleotide
cggagcaugaaacuuggcu

SEQ ID NO: 184402 - RNA, 19 nt, Artificial Sequence
  Description of Artificial Sequence: Synthetic oligonucleotide
cccuuucacguuacaguga

SEQ ID NO: 184403 - RNA, 19 nt, Artificial Sequence
  Description of Artificial Sequence: Synthetic oligonucleotide
cucucucgacuccuuugua

SEQ ID NO: 184404 - RNA, 19 nt, Artificial Sequence
  Description of Artificial Sequence: Synthetic oligonucleotide
agucgacccuguggcuuca

SEQ ID NO: 184405 - RNA, 19 nt, Artificial Sequence
  Description of Artificial Sequence: Synthetic oligonucleotide
ucacguggagugggauguu

SEQ ID NO: 184406 - RNA, 19 nt, Artificial Sequence
  Description of Artificial Sequence: Synthetic oligonucleotide
gccugacucacuacccaga

SEQ ID NO: 184407 - RNA, 19 nt, Artificial Sequence
  Description of Artificial Sequence: Synthetic oligonucleotide
ccaugagguaggaacacuu

SEQ ID NO: 184408 - RNA, 19 nt, Artificial Sequence
  Description of Artificial Sequence: Synthetic oligonucleotide
cacaauugugagggcccaa

SEQ ID NO: 184409 - RNA, 19 nt, Artificial Sequence
  Description of Artificial Sequence: Synthetic oligonucleotide
ccaaggugaggcacuuaaa

SEQ ID NO: 184410 - RNA, 19 nt, Artificial Sequence
  Description of Artificial Sequence: Synthetic oligonucleotide
cugacucacuacccagaau

SEQ ID NO: 184411 - RNA, 19 nt, Artificial Sequence
  Description of Artificial Sequence: Synthetic oligonucleotide
cauucacguggagugggau

SEQ ID NO: 184412 - RNA, 19 nt, Artificial Sequence
  Description of Artificial Sequence: Synthetic oligonucleotide
gcauucacguggaguggga

SEQ ID NO: 184413 - RNA, 19 nt, Artificial Sequence
  Description of Artificial Sequence: Synthetic oligonucleotide
gagacccggucagcccaca

SEQ ID NO: 184414 - RNA, 19 nt, Artificial Sequence
  Description of Artificial Sequence: Synthetic oligonucleotide
cgaaucuguuugagaccug

SEQ ID NO: 184415 - RNA, 19 nt, Artificial Sequence
  Description of Artificial Sequence: Synthetic oligonucleotide
uuccgcuccugggcauaau

SEQ ID NO: 184416 - RNA, 19 nt, Artificial Sequence
  Description of Artificial Sequence: Synthetic oligonucleotide
ggagucgacccuguggcuu

SEQ ID NO: 184417 - RNA, 19 nt, Artificial Sequence
  Description of Artificial Sequence: Synthetic oligonucleotide
cugcacucccaacuuucuu

SEQ ID NO: 184418 - RNA, 19 nt, Artificial Sequence
  Description of Artificial Sequence: Synthetic oligonucleotide
gcgugaugacaguacugau

SEQ ID NO: 184419 - RNA, 19 nt, Artificial Sequence
  Description of Artificial Sequence: Synthetic oligonucleotide
ggcuuucauccggggacga

SEQ ID NO: 184420 - RNA, 19 nt, Artificial Sequence
  Description of Artificial Sequence: Synthetic oligonucleotide
gucgacccuguggcuucac

SEQ ID NO: 184421 - RNA, 19 nt, Artificial Sequence
  Description of Artificial Sequence: Synthetic oligonucleotide
cccagugaaccucauuguu

SEQ ID NO: 184422 - RNA, 19 nt, Artificial Sequence
  Description of Artificial Sequence: Synthetic oligonucleotide
gggaaguuuuggccgccuu

SEQ ID NO: 184423 - RNA, 19 nt, Artificial Sequence
  Description of Artificial Sequence: Synthetic oligonucleotide
cacguggagugggauguuu

SEQ ID NO: 184424 - RNA, 19 nt, Artificial Sequence
  Description of Artificial Sequence: Synthetic oligonucleotide
gccugaguagcugguuggu

SEQ ID NO: 184425 - RNA, 19 nt, Artificial Sequence
  Description of Artificial Sequence: Synthetic oligonucleotide
gguacucucucgacuccuu

SEQ ID NO: 184426 - RNA, 19 nt, Artificial Sequence
  Description of Artificial Sequence: Synthetic oligonucleotide
gucccuaauuugggacuuu

SEQ ID NO: 184427 - RNA, 19 nt, Artificial Sequence
  Description of Artificial Sequence: Synthetic oligonucleotide
cccaacuuaauggcuucau

SEQ ID NO: 184428 - RNA, 19 nt, Artificial Sequence
  Description of Artificial Sequence: Synthetic oligonucleotide
cgccuauugugaaaacauu

SEQ ID NO: 184429 - RNA, 19 nt, Artificial Sequence
  Description of Artificial Sequence: Synthetic oligonucleotide
cgucccuaauuugggacuu

SEQ ID NO: 184430 - RNA, 19 nt, Artificial Sequence
  Description of Artificial Sequence: Synthetic oligonucleotide
agauauuuaaguuuaauac

SEQ ID NO: 184431 - RNA, 19 nt, Artificial Sequence
  Description of Artificial Sequence: Synthetic oligonucleotide
auuaauuguucucauauac

SEQ ID NO: 184432 - RNA, 19 nt, Artificial Sequence
  Description of Artificial Sequence: Synthetic oligonucleotide
uguacaaagguccaugggg

SEQ ID NO: 184433 - RNA, 19 nt, Artificial Sequence
  Description of Artificial Sequence: Synthetic oligonucleotide
aaaguguaccuacuuauac

SEQ ID NO: 184434 - RNA, 19 nt, Artificial Sequence
  Description of Artificial Sequence: Synthetic oligonucleotide
aaaauugagcuucacuuuc

SEQ ID NO: 184435 - RNA, 19 nt, Artificial Sequence
  Description of Artificial Sequence: Synthetic oligonucleotide
ugaguauccaagaaggagg

SEQ ID NO: 184436 - RNA, 19 nt, Artificial Sequence
  Description of Artificial Sequence: Synthetic oligonucleotide
cauaacaucgucuuguagg

SEQ ID NO: 184437 - RNA, 19 nt, Artificial Sequence
  Description of Artificial Sequence: Synthetic oligonucleotide
acaaaauggaacuacagca

SEQ ID NO: 184438 - RNA, 19 nt, Artificial Sequence
  Description of Artificial Sequence: Synthetic oligonucleotide
gaagaguucguacuggugg

SEQ ID NO: 184439 - RNA, 19 nt, Artificial Sequence
  Description of Artificial Sequence: Synthetic oligonucleotide
auaugcuaaaagcaguuac

SEQ ID NO: 184440 - RNA, 19 nt, Artificial Sequence
  Description of Artificial Sequence: Synthetic oligonucleotide
uaacgggacagcaugaccg

SEQ ID NO: 184441 - RNA, 19 nt, Artificial Sequence
  Description of Artificial Sequence: Synthetic oligonucleotide
ugcuauuugagucaacuug

SEQ ID NO: 184442 - RNA, 19 nt, Artificial Sequence
  Description of Artificial Sequence: Synthetic oligonucleotide
aauaaggccagcuaggcua

SEQ ID NO: 184443 - RNA, 19 nt, Artificial Sequence
  Description of Artificial Sequence: Synthetic oligonucleotide
ucaucgucccuuuuaaugg

SEQ ID NO: 184444 - RNA, 19 nt, Artificial Sequence
  Description of Artificial Sequence: Synthetic oligonucleotide
uaauuguucucauauacac

SEQ ID NO: 184445 - RNA, 19 nt, Artificial Sequence
  Description of Artificial Sequence: Synthetic oligonucleotide
uuuuauaaguuaaggucag

SEQ ID NO: 184446 - RNA, 19 nt, Artificial Sequence
  Description of Artificial Sequence: Synthetic oligonucleotide
cauagcggaaaucacaccg

SEQ ID NO: 184447 - RNA, 19 nt, Artificial Sequence
  Description of Artificial Sequence: Synthetic oligonucleotide
ucucucgggagccagaaag

SEQ ID NO: 184448 - RNA, 19 nt, Artificial Sequence
  Description of Artificial Sequence: Synthetic oligonucleotide
uguuggacucacaaggucc

SEQ ID NO: 184449 - RNA, 19 nt, Artificial Sequence
  Description of Artificial Sequence: Synthetic oligonucleotide
uaaacuagcuggacaaugc

SEQ ID NO: 184450 - RNA, 19 nt, Artificial Sequence
  Description of Artificial Sequence: Synthetic oligonucleotide
auguacuggaaugauauac

SEQ ID NO: 184451 - RNA, 19 nt, Artificial Sequence
  Description of Artificial Sequence: Synthetic oligonucleotide
aacgaagacuaaaauguac

SEQ ID NO: 184452 - RNA, 19 nt, Artificial Sequence
  Description of Artificial Sequence: Synthetic oligonucleotide
uacgcuucccaaauaaggc

SEQ ID NO: 184453 - RNA, 19 nt, Artificial Sequence
  Description of Artificial Sequence: Synthetic oligonucleotide
ucuggaacgcaucuguccc

SEQ ID NO: 184454 - RNA, 19 nt, Artificial Sequence
  Description of Artificial Sequence: Synthetic oligonucleotide
augcuaaaagcaguuacgc

SEQ ID NO: 184455 - RNA, 19 nt, Artificial Sequence
  Description of Artificial Sequence: Synthetic oligonucleotide
ccuacuuauaccuaaagug

SEQ ID NO: 184456 - RNA, 19 nt, Artificial Sequence
  Description of Artificial Sequence: Synthetic oligonucleotide
agauucugcggccugcgcc

SEQ ID NO: 184457 - RNA, 19 nt, Artificial Sequence
  Description of Artificial Sequence: Synthetic oligonucleotide
ugucuagucgagauucccg

SEQ ID NO: 184458 - RNA, 19 nt, Artificial Sequence
  Description of Artificial Sequence: Synthetic oligonucleotide
aaaauacucccauaugcua

SEQ ID NO: 184459 - RNA, 19 nt, Artificial Sequence
  Description of Artificial Sequence: Synthetic oligonucleotide
gcggaaaucacaccgaacg

SEQ ID NO: 184460 - RNA, 19 nt, Artificial Sequence
  Description of Artificial Sequence: Synthetic oligonucleotide
uauaccuaaaguguuggac

SEQ ID NO: 184461 - RNA, 19 nt, Artificial Sequence
  Description of Artificial Sequence: Synthetic oligonucleotide
cuaacagagccuugguugg

SEQ ID NO: 184462 - RNA, 19 nt, Artificial Sequence
  Description of Artificial Sequence: Synthetic oligonucleotide
uguaccuuggagcccagug

SEQ ID NO: 184463 - RNA, 19 nt, Artificial Sequence
  Description of Artificial Sequence: Synthetic oligonucleotide
uguuucauaacaucgucuu

SEQ ID NO: 184464 - RNA, 19 nt, Artificial Sequence
  Description of Artificial Sequence: Synthetic oligonucleotide
aagaaggaggaccucugug

SEQ ID NO: 184465 - RNA, 19 nt, Artificial Sequence
  Description of Artificial Sequence: Synthetic oligonucleotide
auguucacagauuuugaug

SEQ ID NO: 184466 - RNA, 19 nt, Artificial Sequence
  Description of Artificial Sequence: Synthetic oligonucleotide
cuuauaccuaaaguguugg

SEQ ID NO: 184467 - RNA, 19 nt, Artificial Sequence
  Description of Artificial Sequence: Synthetic oligonucleotide
uguaaauaaugcaguugug

SEQ ID NO: 184468 - RNA, 19 nt, Artificial Sequence
  Description of Artificial Sequence: Synthetic oligonucleotide
gucaucgucccuuuuaaug

SEQ ID NO: 184469 - RNA, 19 nt, Artificial Sequence
  Description of Artificial Sequence: Synthetic oligonucleotide
uguaccuacuuauaccuaa

SEQ ID NO: 184470 - RNA, 19 nt, Artificial Sequence
  Description of Artificial Sequence: Synthetic oligonucleotide
aguaaacgaagacuaaaau

SEQ ID NO: 184471 - RNA, 19 nt, Artificial Sequence
  Description of Artificial Sequence: Synthetic oligonucleotide
uugguacuggcuauugggc

SEQ ID NO: 184472 - RNA, 19 nt, Artificial Sequence
  Description of Artificial Sequence: Synthetic oligonucleotide
gcuaacagagccuugguug

SEQ ID NO: 184473 - RNA, 19 nt, Artificial Sequence
  Description of Artificial Sequence: Synthetic oligonucleotide
uuaacgggacagcaugacc

SEQ ID NO: 184474 - RNA, 19 nt, Artificial Sequence
  Description of Artificial Sequence: Synthetic oligonucleotide
gaagacuaaaauguacaac

SEQ ID NO: 184475 - RNA, 19 nt, Artificial Sequence
  Description of Artificial Sequence: Synthetic oligonucleotide
uacaacggaauguacugga

SEQ ID NO: 184476 - RNA, 19 nt, Artificial Sequence
  Description of Artificial Sequence: Synthetic oligonucleotide
gacuaaaauguacaacgga

SEQ ID NO: 184477 - RNA, 19 nt, Artificial Sequence
  Description of Artificial Sequence: Synthetic oligonucleotide
gaaaucacaccgaacguac

SEQ ID NO: 184478 - RNA, 19 nt, Artificial Sequence
  Description of Artificial Sequence: Synthetic oligonucleotide
ucauaacaucgucuuguag

SEQ ID NO: 184479 - RNA, 19 nt, Artificial Sequence
  Description of Artificial Sequence: Synthetic oligonucleotide
cuuaccaacaaugaagaga

SEQ ID NO: 184480 - RNA, 19 nt, Artificial Sequence
  Description of Artificial Sequence: Synthetic oligonucleotide
accauagcggaaaucacac

SEQ ID NO: 184481 - RNA, 19 nt, Artificial Sequence
  Description of Artificial Sequence: Synthetic oligonucleotide
aggugucuagucgagauuc

SEQ ID NO: 184482 - RNA, 19 nt, Artificial Sequence
  Description of Artificial Sequence: Synthetic oligonucleotide
accuacuuauaccuaaagu

SEQ ID NO: 184483 - RNA, 19 nt, Artificial Sequence
  Description of Artificial Sequence: Synthetic oligonucleotide
guuggaaccuaggagaaug

SEQ ID NO: 184484 - RNA, 19 nt, Artificial Sequence
  Description of Artificial Sequence: Synthetic oligonucleotide
ggaacuacagcagacguag

SEQ ID NO: 184485 - RNA, 19 nt, Artificial Sequence
  Description of Artificial Sequence: Synthetic oligonucleotide
aaauacucccauaugcuaa

SEQ ID NO: 184486 - RNA, 19 nt, Artificial Sequence
  Description of Artificial Sequence: Synthetic oligonucleotide
aguuacgcuucccaaauaa

SEQ ID NO: 184487 - RNA, 19 nt, Artificial Sequence
  Description of Artificial Sequence: Synthetic oligonucleotide
agacuaaaauguacaacgg

SEQ ID NO: 184488 - RNA, 19 nt, Artificial Sequence
  Description of Artificial Sequence: Synthetic oligonucleotide
uuuugcuucgaucgaugcu

SEQ ID NO: 184489 - RNA, 19 nt, Artificial Sequence
  Description of Artificial Sequence: Synthetic oligonucleotide
uuugagucaacuugugauu

SEQ ID NO: 184490 - RNA, 19 nt, Artificial Sequence
  Description of Artificial Sequence: Synthetic oligonucleotide
gucaacuugugauuucccc

SEQ ID NO: 184491 - RNA, 19 nt, Artificial Sequence
  Description of Artificial Sequence: Synthetic oligonucleotide
cagacguagcguuaacggg

SEQ ID NO: 184492 - RNA, 19 nt, Artificial Sequence
  Description of Artificial Sequence: Synthetic oligonucleotide
gcagacguagcguuaacgg

SEQ ID NO: 184493 - RNA, 19 nt, Artificial Sequence
  Description of Artificial Sequence: Synthetic oligonucleotide
ugauccucgcuucuccuca

SEQ ID NO: 184494 - RNA, 19 nt, Artificial Sequence
  Description of Artificial Sequence: Synthetic oligonucleotide
gaaugguacuucugggaug

SEQ ID NO: 184495 - RNA, 19 nt, Artificial Sequence
  Description of Artificial Sequence: Synthetic oligonucleotide
acgacuuuugcuauuugag

SEQ ID NO: 184496 - RNA, 19 nt, Artificial Sequence
  Description of Artificial Sequence: Synthetic oligonucleotide
uagucgagauucccgagac

SEQ ID NO: 184497 - RNA, 19 nt, Artificial Sequence
  Description of Artificial Sequence: Synthetic oligonucleotide
auggaacuacagcagacgu

SEQ ID NO: 184498 - RNA, 19 nt, Artificial Sequence
  Description of Artificial Sequence: Synthetic oligonucleotide
cuacuuauaccuaaagugu

SEQ ID NO: 184499 - RNA, 19 nt, Artificial Sequence
  Description of Artificial Sequence: Synthetic oligonucleotide
uguguuucaugcuuacaua

SEQ ID NO: 184500 - RNA, 19 nt, Artificial Sequence
  Description of Artificial Sequence: Synthetic oligonucleotide
guaaucgcaauagcuagug

SEQ ID NO: 184501 - RNA, 19 nt, Artificial Sequence
  Description of Artificial Sequence: Synthetic oligonucleotide
uaggcuaggucagugacgu

SEQ ID NO: 184502 - RNA, 19 nt, Artificial Sequence
  Description of Artificial Sequence: Synthetic oligonucleotide
uggcuauugggcguguagg

SEQ ID NO: 184503 - RNA, 19 nt, Artificial Sequence
  Description of Artificial Sequence: Synthetic oligonucleotide
acgaagacuaaaauguaca

SEQ ID NO: 184504 - RNA, 19 nt, Artificial Sequence
  Description of Artificial Sequence: Synthetic oligonucleotide
cucccauaugcuaaaagca

SEQ ID NO: 184505 - RNA, 19 nt, Artificial Sequence
  Description of Artificial Sequence: Synthetic oligonucleotide
ggguaaucgcaauagcuag

SEQ ID NO: 184506 - RNA, 19 nt, Artificial Sequence
  Description of Artificial Sequence: Synthetic oligonucleotide
uaccuaaaguguuggacuc

SEQ ID NO: 184507 - RNA, 19 nt, Artificial Sequence
  Description of Artificial Sequence: Synthetic oligonucleotide
ucuagucgagauucccgag

SEQ ID NO: 184508 - RNA, 19 nt, Artificial Sequence
  Description of Artificial Sequence: Synthetic oligonucleotide
agugacgucacaaagugua

SEQ ID NO: 184509 - RNA, 19 nt, Artificial Sequence
  Description of Artificial Sequence: Synthetic oligonucleotide
gaaagguccagggucgagc

SEQ ID NO: 184510 - RNA, 19 nt, Artificial Sequence
  Description of Artificial Sequence: Synthetic oligonucleotide
uuauaccuaaaguguugga

SEQ ID NO: 184511 - RNA, 19 nt, Artificial Sequence
  Description of Artificial Sequence: Synthetic oligonucleotide
aucacaccgaacguacugg

SEQ ID NO: 184512 - RNA, 19 nt, Artificial Sequence
  Description of Artificial Sequence: Synthetic oligonucleotide
gaacagcaaucccugggcc

SEQ ID NO: 184513 - RNA, 19 nt, Artificial Sequence
  Description of Artificial Sequence: Synthetic oligonucleotide
gcacccuagucccagaagg

SEQ ID NO: 184514 - RNA, 19 nt, Artificial Sequence
  Description of Artificial Sequence: Synthetic oligonucleotide
cuauuugagucaacuugug

SEQ ID NO: 184515 - RNA, 19 nt, Artificial Sequence
  Description of Artificial Sequence: Synthetic oligonucleotide
caagucgcugcccuguagc

SEQ ID NO: 184516 - RNA, 19 nt, Artificial Sequence
  Description of Artificial Sequence: Synthetic oligonucleotide
acuuauaccuaaaguguug

SEQ ID NO: 184517 - RNA, 19 nt, Artificial Sequence
  Description of Artificial Sequence: Synthetic oligonucleotide
ugcacagcuugcauucucu

SEQ ID NO: 184518 - RNA, 19 nt, Artificial Sequence
  Description of Artificial Sequence: Synthetic oligonucleotide
agauucccgagacucuuug

SEQ ID NO: 184519 - RNA, 19 nt, Artificial Sequence
  Description of Artificial Sequence: Synthetic oligonucleotide
acaauuaauuguucucaua

SEQ ID NO: 184520 - RNA, 19 nt, Artificial Sequence
  Description of Artificial Sequence: Synthetic oligonucleotide
agcagacguagcguuaacg

SEQ ID NO: 184521 - RNA, 19 nt, Artificial Sequence
  Description of Artificial Sequence: Synthetic oligonucleotide
caucgucccuuuuaauggc

SEQ ID NO: 184522 - RNA, 19 nt, Artificial Sequence
  Description of Artificial Sequence: Synthetic oligonucleotide
ucggcgaugagccggucac

SEQ ID NO: 184523 - RNA, 19 nt, Artificial Sequence
  Description of Artificial Sequence: Synthetic oligonucleotide
guacaacggaauguacugg

SEQ ID NO: 184524 - RNA, 19 nt, Artificial Sequence
  Description of Artificial Sequence: Synthetic oligonucleotide
gucgagauucccgagacuc

SEQ ID NO: 184525 - RNA, 19 nt, Artificial Sequence
  Description of Artificial Sequence: Synthetic oligonucleotide
cucucgggagccagaaagg

SEQ ID NO: 184526 - RNA, 19 nt, Artificial Sequence
  Description of Artificial Sequence: Synthetic oligonucleotide
ugcacccuagucccagaag

SEQ ID NO: 184527 - RNA, 19 nt, Artificial Sequence
  Description of Artificial Sequence: Synthetic oligonucleotide
agggguaaucgcaauagcu

SEQ ID NO: 184528 - RNA, 19 nt, Artificial Sequence
  Description of Artificial Sequence: Synthetic oligonucleotide
uaaucgcaauagcuagugu

SEQ ID NO: 184529 - RNA, 19 nt, Artificial Sequence
  Description of Artificial Sequence: Synthetic oligonucleotide
uaaggucaguauagauaug

SEQ ID NO: 184530 - RNA, 19 nt, Artificial Sequence
  Description of Artificial Sequence: Synthetic oligonucleotide
ugucacaccucuugcuaac

SEQ ID NO: 184531 - RNA, 19 nt, Artificial Sequence
  Description of Artificial Sequence: Synthetic oligonucleotide
guuacgcuucccaaauaag

SEQ ID NO: 184532 - RNA, 19 nt, Artificial Sequence
  Description of Artificial Sequence: Synthetic oligonucleotide
uuggucaagcagcaaggua

SEQ ID NO: 184533 - RNA, 19 nt, Artificial Sequence
  Description of Artificial Sequence: Synthetic oligonucleotide
agcaguuacgcuucccaaa

SEQ ID NO: 184534 - RNA, 19 nt, Artificial Sequence
  Description of Artificial Sequence: Synthetic oligonucleotide
uggaacuacagcagacgua

SEQ ID NO: 184535 - RNA, 19 nt, Artificial Sequence
  Description of Artificial Sequence: Synthetic oligonucleotide
gucuagucgagauucccga

SEQ ID NO: 184536 - RNA, 19 nt, Artificial Sequence
  Description of Artificial Sequence: Synthetic oligonucleotide
ggcuauugggcguguaggg

SEQ ID NO: 184537 - RNA, 19 nt, Artificial Sequence
  Description of Artificial Sequence: Synthetic oligonucleotide
ugaugacgacuuuugcuau

SEQ ID NO: 184538 - RNA, 19 nt, Artificial Sequence
  Description of Artificial Sequence: Synthetic oligonucleotide
acaccgaacguacuggcuu

SEQ ID NO: 184539 - RNA, 19 nt, Artificial Sequence
  Description of Artificial Sequence: Synthetic oligonucleotide
agcguggcaugucggacag

SEQ ID NO: 184540 - RNA, 19 nt, Artificial Sequence
  Description of Artificial Sequence: Synthetic oligonucleotide
uagcggaaaucacaccgaa

SEQ ID NO: 184541 - RNA, 19 nt, Artificial Sequence
  Description of Artificial Sequence: Synthetic oligonucleotide
cuggcuauugggcguguag

SEQ ID NO: 184542 - RNA, 19 nt, Artificial Sequence
  Description of Artificial Sequence: Synthetic oligonucleotide
ucgagauucccgagacucu

SEQ ID NO: 184543 - RNA, 19 nt, Artificial Sequence
  Description of Artificial Sequence: Synthetic oligonucleotide
aaggugucuagucgagauu

SEQ ID NO: 184544 - RNA, 19 nt, Artificial Sequence
  Description of Artificial Sequence: Synthetic oligonucleotide
gaaggugucuagucgagau

SEQ ID NO: 184545 - RNA, 19 nt, Artificial Sequence
  Description of Artificial Sequence: Synthetic oligonucleotide
uugcuucgaucgaugcuug

SEQ ID NO: 184546 - RNA, 19 nt, Artificial Sequence
  Description of Artificial Sequence: Synthetic oligonucleotide
gguaggcuaggucagugac

SEQ ID NO: 184547 - RNA, 19 nt, Artificial Sequence
  Description of Artificial Sequence: Synthetic oligonucleotide
acggaauguacuggaauga

SEQ ID NO: 184548 - RNA, 19 nt, Artificial Sequence
  Description of Artificial Sequence: Synthetic oligonucleotide
uagcguuaacgggacagca

SEQ ID NO: 184549 - RNA, 19 nt, Artificial Sequence
  Description of Artificial Sequence: Synthetic oligonucleotide
ugacgacuuuugcuauuug

SEQ ID NO: 184550 - RNA, 19 nt, Artificial Sequence
  Description of Artificial Sequence: Synthetic oligonucleotide
gcguuaacgggacagcaug

SEQ ID NO: 184551 - RNA, 19 nt, Artificial Sequence
  Description of Artificial Sequence: Synthetic oligonucleotide
uggucucgucuacugcuug

SEQ ID NO: 184552 - RNA, 19 nt, Artificial Sequence
  Description of Artificial Sequence: Synthetic oligonucleotide
agcuugcauucucuuacca

SEQ ID NO: 184553 - RNA, 19 nt, Artificial Sequence
  Description of Artificial Sequence: Synthetic oligonucleotide
uucgaucgaugcuuguuuu

SEQ ID NO: 184554 - RNA, 19 nt, Artificial Sequence
  Description of Artificial Sequence: Synthetic oligonucleotide
cuucgugcuggucccugcg

SEQ ID NO: 184555 - RNA, 19 nt, Artificial Sequence
  Description of Artificial Sequence: Synthetic oligonucleotide
cacagauuuugaugacgac

SEQ ID NO: 184556 - RNA, 19 nt, Artificial Sequence
  Description of Artificial Sequence: Synthetic oligonucleotide
aaaucacaccgaacguacu

SEQ ID NO: 184557 - RNA, 19 nt, Artificial Sequence
  Description of Artificial Sequence: Synthetic oligonucleotide
cuagucgagauucccgaga

SEQ ID NO: 184558 - RNA, 19 nt, Artificial Sequence
  Description of Artificial Sequence: Synthetic oligonucleotide
ccauccgagggcuuggacc

SEQ ID NO: 184559 - RNA, 19 nt, Artificial Sequence
  Description of Artificial Sequence: Synthetic oligonucleotide
guuaacgggacagcaugac

SEQ ID NO: 184560 - RNA, 19 nt, Artificial Sequence
  Description of Artificial Sequence: Synthetic oligonucleotide
cugcgcugugcucggagcg

SEQ ID NO: 184561 - RNA, 19 nt, Artificial Sequence
  Description of Artificial Sequence: Synthetic oligonucleotide
agaagaguucguacuggug

SEQ ID NO: 184562 - RNA, 19 nt, Artificial Sequence
  Description of Artificial Sequence: Synthetic oligonucleotide
aggucagugacgucacaaa

SEQ ID NO: 184563 - RNA, 19 nt, Artificial Sequence
  Description of Artificial Sequence: Synthetic oligonucleotide
uggaacgcaucugucccug

SEQ ID NO: 184564 - RNA, 19 nt, Artificial Sequence
  Description of Artificial Sequence: Synthetic oligonucleotide
agcggaaaucacaccgaac

SEQ ID NO: 184565 - RNA, 19 nt, Artificial Sequence
  Description of Artificial Sequence: Synthetic oligonucleotide
guguuggacucacaagguc

SEQ ID NO: 184566 - RNA, 19 nt, Artificial Sequence
  Description of Artificial Sequence: Synthetic oligonucleotide
gaacgcaucugucccugga

SEQ ID NO: 184567 - RNA, 19 nt, Artificial Sequence
  Description of Artificial Sequence: Synthetic oligonucleotide
guagggucugugaggggcg

SEQ ID NO: 184568 - RNA, 19 nt, Artificial Sequence
  Description of Artificial Sequence: Synthetic oligonucleotide
guagcguuaacgggacagc

SEQ ID NO: 184569 - RNA, 19 nt, Artificial Sequence
  Description of Artificial Sequence: Synthetic oligonucleotide
auagcggaaaucacaccga

SEQ ID NO: 184570 - RNA, 19 nt, Artificial Sequence
  Description of Artificial Sequence: Synthetic oligonucleotide
agguaggcuaggucaguga

SEQ ID NO: 184571 - RNA, 19 nt, Artificial Sequence
  Description of Artificial Sequence: Synthetic oligonucleotide
agucaagucgcugcccugu

SEQ ID NO: 184572 - RNA, 19 nt, Artificial Sequence
  Description of Artificial Sequence: Synthetic oligonucleotide
ugucaaaauugagcuucac

SEQ ID NO: 184573 - RNA, 19 nt, Artificial Sequence
  Description of Artificial Sequence: Synthetic oligonucleotide
gagcguggcaugucggaca

SEQ ID NO: 184574 - RNA, 19 nt, Artificial Sequence
  Description of Artificial Sequence: Synthetic oligonucleotide
ggacucacaagguccagca

SEQ ID NO: 184575 - RNA, 19 nt, Artificial Sequence
  Description of Artificial Sequence: Synthetic oligonucleotide
uacucugcguaguccgggu

SEQ ID NO: 184576 - RNA, 19 nt, Artificial Sequence
  Description of Artificial Sequence: Synthetic oligonucleotide
cacaaaguguaccuacuua

SEQ ID NO: 184577 - RNA, 19 nt, Artificial Sequence
  Description of Artificial Sequence: Synthetic oligonucleotide
ucgucccuuuuaauggcau

SEQ ID NO: 184578 - RNA, 19 nt, Artificial Sequence
  Description of Artificial Sequence: Synthetic oligonucleotide
agagccccgauguggugug

SEQ ID NO: 184579 - RNA, 19 nt, Artificial Sequence
  Description of Artificial Sequence: Synthetic oligonucleotide
agauuuugaugacgacuuu

SEQ ID NO: 184580 - RNA, 19 nt, Artificial Sequence
  Description of Artificial Sequence: Synthetic oligonucleotide
aguagcugacuggguacag

SEQ ID NO: 184581 - RNA, 19 nt, Artificial Sequence
  Description of Artificial Sequence: Synthetic oligonucleotide
gggguaaacuagcuggaca

SEQ ID NO: 184582 - RNA, 19 nt, Artificial Sequence
  Description of Artificial Sequence: Synthetic oligonucleotide
cugauccucgcuucuccuc

SEQ ID NO: 184583 - RNA, 19 nt, Artificial Sequence
  Description of Artificial Sequence: Synthetic oligonucleotide
ggcuaggucagugacguca

SEQ ID NO: 184584 - RNA, 19 nt, Artificial Sequence
  Description of Artificial Sequence: Synthetic oligonucleotide
cugacagggguaaucgcaa

SEQ ID NO: 184585 - RNA, 19 nt, Artificial Sequence
  Description of Artificial Sequence: Synthetic oligonucleotide
agugagcuuguguuucaua

SEQ ID NO: 184586 - RNA, 19 nt, Artificial Sequence
  Description of Artificial Sequence: Synthetic oligonucleotide
caccgaacguacuggcuuc

SEQ ID NO: 184587 - RNA, 19 nt, Artificial Sequence
  Description of Artificial Sequence: Synthetic oligonucleotide
agggagauucugcggccug

SEQ ID NO: 184588 - RNA, 19 nt, Artificial Sequence
  Description of Artificial Sequence: Synthetic oligonucleotide
gauugcuacagggcucaca

SEQ ID NO: 184589 - RNA, 19 nt, Artificial Sequence
  Description of Artificial Sequence: Synthetic oligonucleotide
uccauccgagggcuuggac

SEQ ID NO: 184590 - RNA, 19 nt, Artificial Sequence
  Description of Artificial Sequence: Synthetic oligonucleotide
agcccugacaccacaguga

SEQ ID NO: 184591 - RNA, 19 nt, Artificial Sequence
  Description of Artificial Sequence: Synthetic oligonucleotide
acguagaacuccagcauau

SEQ ID NO: 184592 - RNA, 19 nt, Artificial Sequence
  Description of Artificial Sequence: Synthetic oligonucleotide
acagcagacguagcguuaa

SEQ ID NO: 184593 - RNA, 19 nt, Artificial Sequence
  Description of Artificial Sequence: Synthetic oligonucleotide
agucgagauucccgagacu

SEQ ID NO: 184594 - RNA, 19 nt, Artificial Sequence
  Description of Artificial Sequence: Synthetic oligonucleotide
ucucagcuauugugcuccc

SEQ ID NO: 184595 - RNA, 19 nt, Artificial Sequence
  Description of Artificial Sequence: Synthetic oligonucleotide
ugagagccccgauguggug

SEQ ID NO: 184596 - RNA, 19 nt, Artificial Sequence
  Description of Artificial Sequence: Synthetic oligonucleotide
uguguaccuuggagcccag

SEQ ID NO: 184597 - RNA, 19 nt, Artificial Sequence
  Description of Artificial Sequence: Synthetic oligonucleotide
uaacagagccuugguugga

SEQ ID NO: 184598 - RNA, 19 nt, Artificial Sequence
  Description of Artificial Sequence: Synthetic oligonucleotide
ugacagggguaaucgcaau

SEQ ID NO: 184599 - RNA, 19 nt, Artificial Sequence
  Description of Artificial Sequence: Synthetic oligonucleotide
cauccgagggcuuggaccu

SEQ ID NO: 184600 - RNA, 19 nt, Artificial Sequence
  Description of Artificial Sequence: Synthetic oligonucleotide
ccggguguugcuccaaggg

SEQ ID NO: 184601 - RNA, 19 nt, Artificial Sequence
  Description of Artificial Sequence: Synthetic oligonucleotide
accuaaaguguuggacuca

SEQ ID NO: 184602 - RNA, 19 nt, Artificial Sequence
  Description of Artificial Sequence: Synthetic oligonucleotide
gcuauuugagucaacuugu

SEQ ID NO: 184603 - RNA, 19 nt, Artificial Sequence
  Description of Artificial Sequence: Synthetic oligonucleotide
gucgcugcccuguagccaa

SEQ ID NO: 184604 - RNA, 19 nt, Artificial Sequence
  Description of Artificial Sequence: Synthetic oligonucleotide
cgucacaaaguguaccuac

SEQ ID NO: 184605 - RNA, 19 nt, Artificial Sequence
  Description of Artificial Sequence: Synthetic oligonucleotide
ggucucgucuacugcuugc

SEQ ID NO: 184606 - RNA, 19 nt, Artificial Sequence
  Description of Artificial Sequence: Synthetic oligonucleotide
gccccuuugggaaccauag

SEQ ID NO: 184607 - RNA, 19 nt, Artificial Sequence
  Description of Artificial Sequence: Synthetic oligonucleotide
gcuauugggcguguagggc

SEQ ID NO: 184608 - RNA, 19 nt, Artificial Sequence
  Description of Artificial Sequence: Synthetic oligonucleotide
guagggcguccugaauggg

SEQ ID NO: 184609 - RNA, 19 nt, Artificial Sequence
  Description of Artificial Sequence: Synthetic oligonucleotide
augcacccuagucccagaa

SEQ ID NO: 184610 - RNA, 19 nt, Artificial Sequence
  Description of Artificial Sequence: Synthetic oligonucleotide
gucgagcuguccuugcucu

SEQ ID NO: 184611 - RNA, 19 nt, Artificial Sequence
  Description of Artificial Sequence: Synthetic oligonucleotide
cguagcguuaacgggacag

SEQ ID NO: 184612 - RNA, 19 nt, Artificial Sequence
  Description of Artificial Sequence: Synthetic oligonucleotide
acaacggaauguacuggaa

SEQ ID NO: 184613 - RNA, 19 nt, Artificial Sequence
  Description of Artificial Sequence: Synthetic oligonucleotide
cucagcuauugugcucccc

SEQ ID NO: 184614 - RNA, 19 nt, Artificial Sequence
  Description of Artificial Sequence: Synthetic oligonucleotide
aucgucccuuuuaauggca

SEQ ID NO: 184615 - RNA, 19 nt, Artificial Sequence
  Description of Artificial Sequence: Synthetic oligonucleotide
guguggcggguccaggaca

SEQ ID NO: 184616 - RNA, 19 nt, Artificial Sequence
  Description of Artificial Sequence: Synthetic oligonucleotide
agcguuaacgggacagcau

SEQ ID NO: 184617 - RNA, 19 nt, Artificial Sequence
  Description of Artificial Sequence: Synthetic oligonucleotide
ccauagcggaaaucacacc

SEQ ID NO: 184618 - RNA, 19 nt, Artificial Sequence
  Description of Artificial Sequence: Synthetic oligonucleotide
ggaacgcaucugucccugg

SEQ ID NO: 184619 - RNA, 19 nt, Artificial Sequence
  Description of Artificial Sequence: Synthetic oligonucleotide
cuucgaucgaugcuuguuu

SEQ ID NO: 184620 - RNA, 19 nt, Artificial Sequence
  Description of Artificial Sequence: Synthetic oligonucleotide
ucugcguaguccggguguu

SEQ ID NO: 184621 - RNA, 19 nt, Artificial Sequence
  Description of Artificial Sequence: Synthetic oligonucleotide
caacggaauguacuggaau

SEQ ID NO: 184622 - RNA, 19 nt, Artificial Sequence
  Description of Artificial Sequence: Synthetic oligonucleotide
gucggacagggagauucug

SEQ ID NO: 184623 - RNA, 19 nt, Artificial Sequence
  Description of Artificial Sequence: Synthetic oligonucleotide
augaccgguccuggcuuuc

SEQ ID NO: 184624 - RNA, 19 nt, Artificial Sequence
  Description of Artificial Sequence: Synthetic oligonucleotide
cggguguugcuccaagggg

SEQ ID NO: 184625 - RNA, 19 nt, Artificial Sequence
  Description of Artificial Sequence: Synthetic oligonucleotide
ggugucuagucgagauucc

SEQ ID NO: 184626 - RNA, 19 nt, Artificial Sequence
  Description of Artificial Sequence: Synthetic oligonucleotide
ggcucacaaugcaugcacc

SEQ ID NO: 184627 - RNA, 19 nt, Artificial Sequence
  Description of Artificial Sequence: Synthetic oligonucleotide
aggcuaggucagugacguc

SEQ ID NO: 184628 - RNA, 19 nt, Artificial Sequence
  Description of Artificial Sequence: Synthetic oligonucleotide
gagagccccgauguggugu

SEQ ID NO: 184629 - RNA, 19 nt, Artificial Sequence
  Description of Artificial Sequence: Synthetic oligonucleotide
guguccgugcuugccucag

SEQ ID NO: 184630 - RNA, 19 nt, Artificial Sequence
  Description of Artificial Sequence: Synthetic oligonucleotide
gaccgguccuggcuuucuc

SEQ ID NO: 184631 - RNA, 19 nt, Artificial Sequence
  Description of Artificial Sequence: Synthetic oligonucleotide
ugaccgguccuggcuuucu

SEQ ID NO: 184632 - RNA, 19 nt, Artificial Sequence
  Description of Artificial Sequence: Synthetic oligonucleotide
gcuaggaucuagcagcauu

SEQ ID NO: 184633 - RNA, 19 nt, Artificial Sequence
  Description of Artificial Sequence: Synthetic oligonucleotide
gcaguuacgcuucccaaau

SEQ ID NO: 184634 - RNA, 19 nt, Artificial Sequence
  Description of Artificial Sequence: Synthetic oligonucleotide
gggguguucuggcucacaa

SEQ ID NO: 184635 - RNA, 19 nt, Artificial Sequence
  Description of Artificial Sequence: Synthetic oligonucleotide
acgucacaaaguguaccua

SEQ ID NO: 184636 - RNA, 19 nt, Artificial Sequence
  Description of Artificial Sequence: Synthetic oligonucleotide
ccugaguauccaagaagga

SEQ ID NO: 184637 - RNA, 19 nt, Artificial Sequence
  Description of Artificial Sequence: Synthetic oligonucleotide
gcuaggucagugacgucac

SEQ ID NO: 184638 - RNA, 19 nt, Artificial Sequence
  Description of Artificial Sequence: Synthetic oligonucleotide
augguacuucugggauggg

SEQ ID NO: 184639 - RNA, 19 nt, Artificial Sequence
  Description of Artificial Sequence: Synthetic oligonucleotide
accgaacguacuggcuucu

SEQ ID NO: 184640 - RNA, 19 nt, Artificial Sequence
  Description of Artificial Sequence: Synthetic oligonucleotide
cagcagacguagcguuaac

SEQ ID NO: 184641 - RNA, 19 nt, Artificial Sequence
  Description of Artificial Sequence: Synthetic oligonucleotide
acguagcguuaacgggaca

SEQ ID NO: 184642 - RNA, 19 nt, Artificial Sequence
  Description of Artificial Sequence: Synthetic oligonucleotide
acgggcuucuggaacgcau

SEQ ID NO: 184643 - RNA, 19 nt, Artificial Sequence
  Description of Artificial Sequence: Synthetic oligonucleotide
ggagcguggcaugucggac

SEQ ID NO: 184644 - RNA, 19 nt, Artificial Sequence
  Description of Artificial Sequence: Synthetic oligonucleotide
gggagcguggcaugucgga

SEQ ID NO: 184645 - RNA, 19 nt, Artificial Sequence
  Description of Artificial Sequence: Synthetic oligonucleotide
agccccgauguggugugcu

SEQ ID NO: 184646 - RNA, 19 nt, Artificial Sequence
  Description of Artificial Sequence: Synthetic oligonucleotide
ugcuaggaucuagcagcau

SEQ ID NO: 184647 - RNA, 19 nt, Artificial Sequence
  Description of Artificial Sequence: Synthetic oligonucleotide
cuaggucagugacgucaca

SEQ ID NO: 184648 - RNA, 19 nt, Artificial Sequence
  Description of Artificial Sequence: Synthetic oligonucleotide
gcccgugugcacagaagag

SEQ ID NO: 184649 - RNA, 19 nt, Artificial Sequence
  Description of Artificial Sequence: Synthetic oligonucleotide
ggggagcguggcaugucgg

SEQ ID NO: 184650 - RNA, 19 nt, Artificial Sequence
  Description of Artificial Sequence: Synthetic oligonucleotide
gguaaucgcaauagcuagu

SEQ ID NO: 184651 - RNA, 19 nt, Artificial Sequence
  Description of Artificial Sequence: Synthetic oligonucleotide
cacaccgaacguacuggcu

SEQ ID NO: 184652 - RNA, 19 nt, Artificial Sequence
  Description of Artificial Sequence: Synthetic oligonucleotide
uuccgucaucgucccuuuu

SEQ ID NO: 184653 - RNA, 19 nt, Artificial Sequence
  Description of Artificial Sequence: Synthetic oligonucleotide
cugugcguuggaggagcug

SEQ ID NO: 184654 - RNA, 19 nt, Artificial Sequence
  Description of Artificial Sequence: Synthetic oligonucleotide
ggggcggauggcuuggugu

SEQ ID NO: 184655 - RNA, 19 nt, Artificial Sequence
  Description of Artificial Sequence: Synthetic oligonucleotide
ggagcccgugugcacagaa

SEQ ID NO: 184656 - RNA, 19 nt, Artificial Sequence
  Description of Artificial Sequence: Synthetic oligonucleotide
cucaauccucagccuucga

SEQ ID NO: 184657 - RNA, 19 nt, Artificial Sequence
  Description of Artificial Sequence: Synthetic oligonucleotide
cagugacgucacaaagugu

SEQ ID NO: 184658 - RNA, 19 nt, Artificial Sequence
  Description of Artificial Sequence: Synthetic oligonucleotide
ggcgcugggguugcuagga

SEQ ID NO: 184659 - RNA, 19 nt, Artificial Sequence
  Description of Artificial Sequence: Synthetic oligonucleotide
gggaaccauagcggaaauc

SEQ ID NO: 184660 - RNA, 19 nt, Artificial Sequence
  Description of Artificial Sequence: Synthetic oligonucleotide
gcuccaagcucuagccuca

SEQ ID NO: 184661 - RNA, 19 nt, Artificial Sequence
  Description of Artificial Sequence: Synthetic oligonucleotide
caguuacgcuucccaaaua

SEQ ID NO: 184662 - RNA, 19 nt, Artificial Sequence
  Description of Artificial Sequence: Synthetic oligonucleotide
cugcguaguccggguguug

SEQ ID NO: 184663 - RNA, 19 nt, Artificial Sequence
  Description of Artificial Sequence: Synthetic oligonucleotide
cguuaacgggacagcauga

SEQ ID NO: 184664 - RNA, 19 nt, Artificial Sequence
  Description of Artificial Sequence: Synthetic oligonucleotide
cagcuauugugcuccccgu

SEQ ID NO: 184665 - RNA, 19 nt, Artificial Sequence
  Description of Artificial Sequence: Synthetic oligonucleotide
ccccgauguggugugcugc

SEQ ID NO: 184666 - RNA, 19 nt, Artificial Sequence
  Description of Artificial Sequence: Synthetic oligonucleotide
ggacgggcuucuggaacgc

SEQ ID NO: 184667 - RNA, 19 nt, Artificial Sequence
  Description of Artificial Sequence: Synthetic oligonucleotide
gccccgauguggugugcug

SEQ ID NO: 184668 - RNA, 19 nt, Artificial Sequence
  Description of Artificial Sequence: Synthetic oligonucleotide
cucggagcgggcugauccu

SEQ ID NO: 184669 - RNA, 19 nt, Artificial Sequence
  Description of Artificial Sequence: Synthetic oligonucleotide
gugucucucgggagccaga

SEQ ID NO: 184670 - RNA, 19 nt, Artificial Sequence
  Description of Artificial Sequence: Synthetic oligonucleotide
gcguguagggcguccugaa

SEQ ID NO: 184671 - RNA, 19 nt, Artificial Sequence
  Description of Artificial Sequence: Synthetic oligonucleotide
gggcguguagggcguccug

SEQ ID NO: 184672 - RNA, 19 nt, Artificial Sequence
  Description of Artificial Sequence: Synthetic oligonucleotide
gguaaacuagcuggacaau

SEQ ID NO: 184673 - RNA, 19 nt, Artificial Sequence
  Description of Artificial Sequence: Synthetic oligonucleotide
gagccccgauguggugugc

SEQ ID NO: 184674 - RNA, 19 nt, Artificial Sequence
  Description of Artificial Sequence: Synthetic oligonucleotide
gagcgggcugauccucgcu

SEQ ID NO: 184675 - RNA, 19 nt, Artificial Sequence
  Description of Artificial Sequence: Synthetic oligonucleotide
agguaacauucuggacaua

SEQ ID NO: 184676 - RNA, 19 nt, Artificial Sequence
  Description of Artificial Sequence: Synthetic oligonucleotide
ccgugugcacagaagaguu

SEQ ID NO: 184677 - RNA, 19 nt, Artificial Sequence
  Description of Artificial Sequence: Synthetic oligonucleotide
gcguuggaggagcugcccu

SEQ ID NO: 184678 - RNA, 19 nt, Artificial Sequence
  Description of Artificial Sequence: Synthetic oligonucleotide
ggcuagcuagccagcucuc

SEQ ID NO: 184679 - RNA, 19 nt, Artificial Sequence
  Description of Artificial Sequence: Synthetic oligonucleotide
caugaccgguccuggcuuu

SEQ ID NO: 184680 - RNA, 19 nt, Artificial Sequence
  Description of Artificial Sequence: Synthetic oligonucleotide
gcaugaccgguccuggcuu

SEQ ID NO: 184681 - RNA, 19 nt, Artificial Sequence
  Description of Artificial Sequence: Synthetic oligonucleotide
gcuucgaucgaugcuuguu

SEQ ID NO: 184682 - RNA, 19 nt, Artificial Sequence
  Description of Artificial Sequence: Synthetic oligonucleotide
gcguccugaauggggaaua

SEQ ID NO: 184683 - RNA, 19 nt, Artificial Sequence
  Description of Artificial Sequence: Synthetic oligonucleotide
cagggagauucugcggccu

SEQ ID NO: 184684 - RNA, 19 nt, Artificial Sequence
  Description of Artificial Sequence: Synthetic oligonucleotide
gcaugucggacagggagau

SEQ ID NO: 184685 - RNA, 19 nt, Artificial Sequence
  Description of Artificial Sequence: Synthetic oligonucleotide
ccgagacucuuugggcaug

SEQ ID NO: 184686 - RNA, 19 nt, Artificial Sequence
  Description of Artificial Sequence: Synthetic oligonucleotide
ccgcucagaaggggcuugc

SEQ ID NO: 184687 - RNA, 19 nt, Artificial Sequence
  Description of Artificial Sequence: Synthetic oligonucleotide
cccgugugcacagaagagu

SEQ ID NO: 184688 - RNA, 19 nt, Artificial Sequence
  Description of Artificial Sequence: Synthetic oligonucleotide
gcgccgccgcucagaaggg

SEQ ID NO: 184689 - RNA, 19 nt, Artificial Sequence
  Description of Artificial Sequence: Synthetic oligonucleotide
ggcuuccgugcagccguac

SEQ ID NO: 184690 - RNA, 19 nt, Artificial Sequence
  Description of Artificial Sequence: Synthetic oligonucleotide
auccgagggcuuggaccuu

SEQ ID NO: 184691 - RNA, 19 nt, Artificial Sequence
  Description of Artificial Sequence: Synthetic oligonucleotide
ccgaacguacuggcuucuc

SEQ ID NO: 184692 - RNA, 19 nt, Artificial Sequence
  Description of Artificial Sequence: Synthetic oligonucleotide
gaggggcggauggcuuggu

SEQ ID NO: 184693 - RNA, 19 nt, Artificial Sequence
  Description of Artificial Sequence: Synthetic oligonucleotide
cggcgaugagccggucacg

SEQ ID NO: 184694 - RNA, 19 nt, Artificial Sequence
  Description of Artificial Sequence: Synthetic oligonucleotide
cguagaacuccagcauaua

SEQ ID NO: 184695 - RNA, 19 nt, Artificial Sequence
  Description of Artificial Sequence: Synthetic oligonucleotide
aggcuuccgugcagccgua

SEQ ID NO: 184696 - RNA, 19 nt, Artificial Sequence
  Description of Artificial Sequence: Synthetic oligonucleotide
gcgcugggguugcuaggau

SEQ ID NO: 184697 - RNA, 19 nt, Artificial Sequence
  Description of Artificial Sequence: Synthetic oligonucleotide
cguguagggcguccugaau

SEQ ID NO: 184698 - RNA, 19 nt, Artificial Sequence
  Description of Artificial Sequence: Synthetic oligonucleotide
aauauuuagaggaagaucc

SEQ ID NO: 184699 - RNA, 19 nt, Artificial Sequence
  Description of Artificial Sequence: Synthetic oligonucleotide
aagguuauugaucaagucg

SEQ ID NO: 184700 - RNA, 19 nt, Artificial Sequence
  Description of Artificial Sequence: Synthetic oligonucleotide
aaacauauagcucugguga

SEQ ID NO: 184701 - RNA, 19 nt, Artificial Sequence
  Description of Artificial Sequence: Synthetic oligonucleotide
uauagauuacuucuaagcc

SEQ ID NO: 184702 - RNA, 19 nt, Artificial Sequence
  Description of Artificial Sequence: Synthetic oligonucleotide
ugaguuacaagaccuaggg

SEQ ID NO: 184703 - RNA, 19 nt, Artificial Sequence
  Description of Artificial Sequence: Synthetic oligonucleotide
aauaccuagaccaagcuug

SEQ ID NO: 184704 - RNA, 19 nt, Artificial Sequence
  Description of Artificial Sequence: Synthetic oligonucleotide
aauaauggagugaucaggg

SEQ ID NO: 184705 - RNA, 19 nt, Artificial Sequence
  Description of Artificial Sequence: Synthetic oligonucleotide
ugacaauacagcaagggga

SEQ ID NO: 184706 - RNA, 19 nt, Artificial Sequence
  Description of Artificial Sequence: Synthetic oligonucleotide
aguuacaagaccuagggaa

SEQ ID NO: 184707 - RNA, 19 nt, Artificial Sequence
  Description of Artificial Sequence: Synthetic oligonucleotide
uguauuuacuucuaagacu

SEQ ID NO: 184708 - RNA, 19 nt, Artificial Sequence
  Description of Artificial Sequence: Synthetic oligonucleotide
acgggaaauauuuagagga

SEQ ID NO: 184709 - RNA, 19 nt, Artificial Sequence
  Description of Artificial Sequence: Synthetic oligonucleotide
agcuuagucgacuucuucc

SEQ ID NO: 184710 - RNA, 19 nt, Artificial Sequence
  Description of Artificial Sequence: Synthetic oligonucleotide
acuagggucugucagacuc

SEQ ID NO: 184711 - RNA, 19 nt, Artificial Sequence
  Description of Artificial Sequence: Synthetic oligonucleotide
ucuuucagguguaagauaa

SEQ ID NO: 184712 - RNA, 19 nt, Artificial Sequence
  Description of Artificial Sequence: Synthetic oligonucleotide
ucggcaaccaaauacgcag

SEQ ID NO: 184713 - RNA, 19 nt, Artificial Sequence
  Description of Artificial Sequence: Synthetic oligonucleotide
agaguaaugggauagccga

SEQ ID NO: 184714 - RNA, 19 nt, Artificial Sequence
  Description of Artificial Sequence: Synthetic oligonucleotide
acagcuaaacacugcagac

SEQ ID NO: 184715 - RNA, 19 nt, Artificial Sequence
  Description of Artificial Sequence: Synthetic oligonucleotide
uguauaguaucgcaacagc

SEQ ID NO: 184716 - RNA, 19 nt, Artificial Sequence
  Description of Artificial Sequence: Synthetic oligonucleotide
guugguuaagcucuuguag

SEQ ID NO: 184717 - RNA, 19 nt, Artificial Sequence
  Description of Artificial Sequence: Synthetic oligonucleotide
aagauaaccuuuguuccac

SEQ ID NO: 184718 - RNA, 19 nt, Artificial Sequence
  Description of Artificial Sequence: Synthetic oligonucleotide
caguaucacaaguagaaag

SEQ ID NO: 184719 - RNA, 19 nt, Artificial Sequence
  Description of Artificial Sequence: Synthetic oligonucleotide
guauccacgauaguaaggg

SEQ ID NO: 184720 - RNA, 19 nt, Artificial Sequence
  Description of Artificial Sequence: Synthetic oligonucleotide
agguuauugaucaagucgg

SEQ ID NO: 184721 - RNA, 19 nt, Artificial Sequence
  Description of Artificial Sequence: Synthetic oligonucleotide
aguuucauacagcaagauc

SEQ ID NO: 184722 - RNA, 19 nt, Artificial Sequence
  Description of Artificial Sequence: Synthetic oligonucleotide
aaggggacgucaccaaucg

SEQ ID NO: 184723 - RNA, 19 nt, Artificial Sequence
  Description of Artificial Sequence: Synthetic oligonucleotide
aauuccaguauccacgaua

SEQ ID NO: 184724 - RNA, 19 nt, Artificial Sequence
  Description of Artificial Sequence: Synthetic oligonucleotide
auagccgauaaauugagaa

SEQ ID NO: 184725 - RNA, 19 nt, Artificial Sequence
  Description of Artificial Sequence: Synthetic oligonucleotide
uuaaugugcagcuccuucc

SEQ ID NO: 184726 - RNA, 19 nt, Artificial Sequence
  Description of Artificial Sequence: Synthetic oligonucleotide
uuaguuuucaugccacaca

SEQ ID NO: 184727 - RNA, 19 nt, Artificial Sequence
  Description of Artificial Sequence: Synthetic oligonucleotide
uagauuacuucuaagccau

SEQ ID NO: 184728 - RNA, 19 nt, Artificial Sequence
  Description of Artificial Sequence: Synthetic oligonucleotide
aucaagucggccuugguca

SEQ ID NO: 184729 - RNA, 19 nt, Artificial Sequence
  Description of Artificial Sequence: Synthetic oligonucleotide
uuaguuuuguucucaguac

SEQ ID NO: 184730 - RNA, 19 nt, Artificial Sequence
  Description of Artificial Sequence: Synthetic oligonucleotide
auaaccuuuguuccacgac

SEQ ID NO: 184731 - RNA, 19 nt, Artificial Sequence
  Description of Artificial Sequence: Synthetic oligonucleotide
gggaauaagauuaaugugc

SEQ ID NO: 184732 - RNA, 19 nt, Artificial Sequence
  Description of Artificial Sequence: Synthetic oligonucleotide
aaauguucuaccaacccgu

SEQ ID NO: 184733 - RNA, 19 nt, Artificial Sequence
  Description of Artificial Sequence: Synthetic oligonucleotide
aacccguugagucaagccu

SEQ ID NO: 184734 - RNA, 19 nt, Artificial Sequence
  Description of Artificial Sequence: Synthetic oligonucleotide
uuuagaggaagauccucag

SEQ ID NO: 184735 - RNA, 19 nt, Artificial Sequence
  Description of Artificial Sequence: Synthetic oligonucleotide
ugugucgucaucuccuucc

SEQ ID NO: 184736 - RNA, 19 nt, Artificial Sequence
  Description of Artificial Sequence: Synthetic oligonucleotide
aucaauaccuagaccaagc

SEQ ID NO: 184737 - RNA, 19 nt, Artificial Sequence
  Description of Artificial Sequence: Synthetic oligonucleotide
ucugguacaauaguccuug

SEQ ID NO: 184738 - RNA, 19 nt, Artificial Sequence
  Description of Artificial Sequence: Synthetic oligonucleotide
aagcagauguauaguaucg

SEQ ID NO: 184739 - RNA, 19 nt, Artificial Sequence
  Description of Artificial Sequence: Synthetic oligonucleotide
acgaguuugaaaugagcuc

SEQ ID NO: 184740 - RNA, 19 nt, Artificial Sequence
  Description of Artificial Sequence: Synthetic oligonucleotide
ucauauagauuacuucuaa

SEQ ID NO: 184741 - RNA, 19 nt, Artificial Sequence
  Description of Artificial Sequence: Synthetic oligonucleotide
caauaauggagugaucagg

SEQ ID NO: 184742 - RNA, 19 nt, Artificial Sequence
  Description of Artificial Sequence: Synthetic oligonucleotide
gaagcagauguauaguauc

SEQ ID NO: 184743 - RNA, 19 nt, Artificial Sequence
  Description of Artificial Sequence: Synthetic oligonucleotide
ggcucaaucauauagauua

SEQ ID NO: 184744 - RNA, 19 nt, Artificial Sequence
  Description of Artificial Sequence: Synthetic oligonucleotide
gauugggcacuauauuucc

SEQ ID NO: 184745 - RNA, 19 nt, Artificial Sequence
  Description of Artificial Sequence: Synthetic oligonucleotide
caaucauauagauuacuuc

SEQ ID NO: 184746 - RNA, 19 nt, Artificial Sequence
  Description of Artificial Sequence: Synthetic oligonucleotide
acccguaugugcuugugac

SEQ ID NO: 184747 - RNA, 19 nt, Artificial Sequence
  Description of Artificial Sequence: Synthetic oligonucleotide
cagagucuagcuuacuagg

SEQ ID NO: 184748 - RNA, 19 nt, Artificial Sequence
  Description of Artificial Sequence: Synthetic oligonucleotide
uacaugcagaauuaacuac

SEQ ID NO: 184749 - RNA, 19 nt, Artificial Sequence
  Description of Artificial Sequence: Synthetic oligonucleotide
caaacauauagcucuggug

SEQ ID NO: 184750 - RNA, 19 nt, Artificial Sequence
  Description of Artificial Sequence: Synthetic oligonucleotide
cuaagacuaguacaugcag

SEQ ID NO: 184751 - RNA, 19 nt, Artificial Sequence
  Description of Artificial Sequence: Synthetic oligonucleotide
ugccaguucaguaaauagu

SEQ ID NO: 184752 - RNA, 19 nt, Artificial Sequence
  Description of Artificial Sequence: Synthetic oligonucleotide
aucgguuugauacgaccac

SEQ ID NO: 184753 - RNA, 19 nt, Artificial Sequence
  Description of Artificial Sequence: Synthetic oligonucleotide
uagauacucaggaauuaac

SEQ ID NO: 184754 - RNA, 19 nt, Artificial Sequence
  Description of Artificial Sequence: Synthetic oligonucleotide
ucugacgaguuugaaauga

SEQ ID NO: 184755 - RNA, 19 nt, Artificial Sequence
  Description of Artificial Sequence: Synthetic oligonucleotide
aaugugauugggcacuaua

SEQ ID NO: 184756 - RNA, 19 nt, Artificial Sequence
  Description of Artificial Sequence: Synthetic oligonucleotide
ugguacaauaguccuugag

SEQ ID NO: 184757 - RNA, 19 nt, Artificial Sequence
  Description of Artificial Sequence: Synthetic oligonucleotide
ucguaucugaucuuaucca

SEQ ID NO: 184758 - RNA, 19 nt, Artificial Sequence
  Description of Artificial Sequence: Synthetic oligonucleotide
ugucguaggguuucaauaa

SEQ ID NO: 184759 - RNA, 19 nt, Artificial Sequence
  Description of Artificial Sequence: Synthetic oligonucleotide
aacauuucacgggaaauau

SEQ ID NO: 184760 - RNA, 19 nt, Artificial Sequence
  Description of Artificial Sequence: Synthetic oligonucleotide
ugagugaccgcgcacggga

SEQ ID NO: 184761 - RNA, 19 nt, Artificial Sequence
  Description of Artificial Sequence: Synthetic oligonucleotide
uaauggagugaucaggguu

SEQ ID NO: 184762 - RNA, 19 nt, Artificial Sequence
  Description of Artificial Sequence: Synthetic oligonucleotide
cugaguuacaagaccuagg

SEQ ID NO: 184763 - RNA, 19 nt, Artificial Sequence
  Description of Artificial Sequence: Synthetic oligonucleotide
ugacgaguuugaaaugagc

SEQ ID NO: 184764 - RNA, 19 nt, Artificial Sequence
  Description of Artificial Sequence: Synthetic oligonucleotide
auuccaguauccacgauag

SEQ ID NO: 184765 - RNA, 19 nt, Artificial Sequence
  Description of Artificial Sequence: Synthetic oligonucleotide
caaucgguuugauacgacc

SEQ ID NO: 184766 - RNA, 19 nt, Artificial Sequence
  Description of Artificial Sequence: Synthetic oligonucleotide
aaucgguuugauacgacca

SEQ ID NO: 184767 - RNA, 19 nt, Artificial Sequence
  Description of Artificial Sequence: Synthetic oligonucleotide
uuagucgacuucuuccaug

SEQ ID NO: 184768 - RNA, 19 nt, Artificial Sequence
  Description of Artificial Sequence: Synthetic oligonucleotide
ugauacgaccaccuucuca

SEQ ID NO: 184769 - RNA, 19 nt, Artificial Sequence
  Description of Artificial Sequence: Synthetic oligonucleotide
agcagauguauaguaucgc

SEQ ID NO: 184770 - RNA, 19 nt, Artificial Sequence
  Description of Artificial Sequence: Synthetic oligonucleotide
cacaguaucacaaguagaa

SEQ ID NO: 184771 - RNA, 19 nt, Artificial Sequence
  Description of Artificial Sequence: Synthetic oligonucleotide
guuugauacgaccaccuuc

SEQ ID NO: 184772 - RNA, 19 nt, Artificial Sequence
  Description of Artificial Sequence: Synthetic oligonucleotide
ucguaggguuucaauaaug

SEQ ID NO: 184773 - RNA, 19 nt, Artificial Sequence
  Description of Artificial Sequence: Synthetic oligonucleotide
aacuuaggccaucuuaauu

SEQ ID NO: 184774 - RNA, 19 nt, Artificial Sequence
  Description of Artificial Sequence: Synthetic oligonucleotide
guuacaagaccuagggaag

SEQ ID NO: 184775 - RNA, 19 nt, Artificial Sequence
  Description of Artificial Sequence: Synthetic oligonucleotide
uaggccaucuuaauuuggu

SEQ ID NO: 184776 - RNA, 19 nt, Artificial Sequence
  Description of Artificial Sequence: Synthetic oligonucleotide
ucuuccaugcgugaugugu

SEQ ID NO: 184777 - RNA, 19 nt, Artificial Sequence
  Description of Artificial Sequence: Synthetic oligonucleotide
aauggagugaucaggguuu

SEQ ID NO: 184778 - RNA, 19 nt, Artificial Sequence
  Description of Artificial Sequence: Synthetic oligonucleotide
gcagaauuaacuacagggg

SEQ ID NO: 184779 - RNA, 19 nt, Artificial Sequence
  Description of Artificial Sequence: Synthetic oligonucleotide
ucaagccuagaguaucaca

SEQ ID NO: 184780 - RNA, 19 nt, Artificial Sequence
  Description of Artificial Sequence: Synthetic oligonucleotide
cacgaagagaguaauggga

SEQ ID NO: 184781 - RNA, 19 nt, Artificial Sequence
  Description of Artificial Sequence: Synthetic oligonucleotide
ucucggcaaccaaauacgc

SEQ ID NO: 184782 - RNA, 19 nt, Artificial Sequence
  Description of Artificial Sequence: Synthetic oligonucleotide
uuagauacucaggaauuaa

SEQ ID NO: 184783 - RNA, 19 nt, Artificial Sequence
  Description of Artificial Sequence: Synthetic oligonucleotide
uuccaugcgugaugugucg

SEQ ID NO: 184784 - RNA, 19 nt, Artificial Sequence
  Description of Artificial Sequence: Synthetic oligonucleotide
agauaaccuuuguuccacg

SEQ ID NO: 184785 - RNA, 19 nt, Artificial Sequence
  Description of Artificial Sequence: Synthetic oligonucleotide
gauaaccuuuguuccacga

SEQ ID NO: 184786 - RNA, 19 nt, Artificial Sequence
  Description of Artificial Sequence: Synthetic oligonucleotide
aguauccacgauaguaagg

SEQ ID NO: 184787 - RNA, 19 nt, Artificial Sequence
  Description of Artificial Sequence: Synthetic oligonucleotide
guacaugcagaauuaacua

SEQ ID NO: 184788 - RNA, 19 nt, Artificial Sequence
  Description of Artificial Sequence: Synthetic oligonucleotide
auauauuaucagaaggaau

SEQ ID NO: 184789 - RNA, 19 nt, Artificial Sequence
  Description of Artificial Sequence: Synthetic oligonucleotide
ugaucuuauccagagcauc

SEQ ID NO: 184790 - RNA, 19 nt, Artificial Sequence
  Description of Artificial Sequence: Synthetic oligonucleotide
caaucguugguuaagcucu

SEQ ID NO: 184791 - RNA, 19 nt, Artificial Sequence
  Description of Artificial Sequence: Synthetic oligonucleotide
gacuaguacaugcagaauu

SEQ ID NO: 184792 - RNA, 19 nt, Artificial Sequence
  Description of Artificial Sequence: Synthetic oligonucleotide
aucguuauguuuggugauc

SEQ ID NO: 184793 - RNA, 19 nt, Artificial Sequence
  Description of Artificial Sequence: Synthetic oligonucleotide
aggccaucuuaauuugguc

SEQ ID NO: 184794 - RNA, 19 nt, Artificial Sequence
  Description of Artificial Sequence: Synthetic oligonucleotide
uagccgauaaauugagaau

SEQ ID NO: 184795 - RNA, 19 nt, Artificial Sequence
  Description of Artificial Sequence: Synthetic oligonucleotide
auaauggagugaucagggu

SEQ ID NO: 184796 - RNA, 19 nt, Artificial Sequence
  Description of Artificial Sequence: Synthetic oligonucleotide
caucugacgaguuugaaau

SEQ ID NO: 184797 - RNA, 19 nt, Artificial Sequence
  Description of Artificial Sequence: Synthetic oligonucleotide
cauucacaagccuugcuga

SEQ ID NO: 184798 - RNA, 19 nt, Artificial Sequence
  Description of Artificial Sequence: Synthetic oligonucleotide
cugacgaguuugaaaugag

SEQ ID NO: 184799 - RNA, 19 nt, Artificial Sequence
  Description of Artificial Sequence: Synthetic oligonucleotide
cuuacuagggucugucaga

SEQ ID NO: 184800 - RNA, 19 nt, Artificial Sequence
  Description of Artificial Sequence: Synthetic oligonucleotide
acuacaggggaugaaaauu

SEQ ID NO: 184801 - RNA, 19 nt, Artificial Sequence
  Description of Artificial Sequence: Synthetic oligonucleotide
ucguuauguuuggugauca

SEQ ID NO: 184802 - RNA, 19 nt, Artificial Sequence
  Description of Artificial Sequence: Synthetic oligonucleotide
gcuuacuagggucugucag

SEQ ID NO: 184803 - RNA, 19 nt, Artificial Sequence
  Description of Artificial Sequence: Synthetic oligonucleotide
auaguccuugagagaaacc

SEQ ID NO: 184804 - RNA, 19 nt, Artificial Sequence
  Description of Artificial Sequence: Synthetic oligonucleotide
acauauagcucuggugaag

SEQ ID NO: 184805 - RNA, 19 nt, Artificial Sequence
  Description of Artificial Sequence: Synthetic oligonucleotide
ucugucagacucucguauc

SEQ ID NO: 184806 - RNA, 19 nt, Artificial Sequence
  Description of Artificial Sequence: Synthetic oligonucleotide
aagaccuagggaagcuuag

SEQ ID NO: 184807 - RNA, 19 nt, Artificial Sequence
  Description of Artificial Sequence: Synthetic oligonucleotide
cuuccaugcgugauguguc

SEQ ID NO: 184808 - RNA, 19 nt, Artificial Sequence
  Description of Artificial Sequence: Synthetic oligonucleotide
cguaggguuucaauaaugg

SEQ ID NO: 184809 - RNA, 19 nt, Artificial Sequence
  Description of Artificial Sequence: Synthetic oligonucleotide
uccuguuagcaugugucug

SEQ ID NO: 184810 - RNA, 19 nt, Artificial Sequence
  Description of Artificial Sequence: Synthetic oligonucleotide
uaguaucgcaacagcucug

SEQ ID NO: 184811 - RNA, 19 nt, Artificial Sequence
  Description of Artificial Sequence: Synthetic oligonucleotide
ucggccuuggucauuccaa

SEQ ID NO: 184812 - RNA, 19 nt, Artificial Sequence
  Description of Artificial Sequence: Synthetic oligonucleotide
agaucaaauggagcacguc

SEQ ID NO: 184813 - RNA, 19 nt, Artificial Sequence
  Description of Artificial Sequence: Synthetic oligonucleotide
caggaauuaacuccucaca

SEQ ID NO: 184814 - RNA, 19 nt, Artificial Sequence
  Description of Artificial Sequence: Synthetic oligonucleotide
cauuucacgggaaauauuu

SEQ ID NO: 184815 - RNA, 19 nt, Artificial Sequence
  Description of Artificial Sequence: Synthetic oligonucleotide
ucgguuugauacgaccacc

SEQ ID NO: 184816 - RNA, 19 nt, Artificial Sequence
  Description of Artificial Sequence: Synthetic oligonucleotide
ggaauaagauuaaugugca

SEQ ID NO: 184817 - RNA, 19 nt, Artificial Sequence
  Description of Artificial Sequence: Synthetic oligonucleotide
aguaucgcaacagcucuga

SEQ ID NO: 184818 - RNA, 19 nt, Artificial Sequence
  Description of Artificial Sequence: Synthetic oligonucleotide
aucugacgaguuugaaaug

SEQ ID NO: 184819 - RNA, 19 nt, Artificial Sequence
  Description of Artificial Sequence: Synthetic oligonucleotide
acaacuuaauguuguucuu

SEQ ID NO: 184820 - RNA, 19 nt, Artificial Sequence
  Description of Artificial Sequence: Synthetic oligonucleotide
cgaguuugaaaugagcucc

SEQ ID NO: 184821 - RNA, 19 nt, Artificial Sequence
  Description of Artificial Sequence: Synthetic oligonucleotide
gaguuacaagaccuaggga

SEQ ID NO: 184822 - RNA, 19 nt, Artificial Sequence
  Description of Artificial Sequence: Synthetic oligonucleotide
auacgaccaccuucucaac

SEQ ID NO: 184823 - RNA, 19 nt, Artificial Sequence
  Description of Artificial Sequence: Synthetic oligonucleotide
cagauguauaguaucgcaa

SEQ ID NO: 184824 - RNA, 19 nt, Artificial Sequence
  Description of Artificial Sequence: Synthetic oligonucleotide
uccuuaucgcguuccuucu

SEQ ID NO: 184825 - RNA, 19 nt, Artificial Sequence
  Description of Artificial Sequence: Synthetic oligonucleotide
acuaguacaugcagaauua

SEQ ID NO: 184826 - RNA, 19 nt, Artificial Sequence
  Description of Artificial Sequence: Synthetic oligonucleotide
gagucaagccuagaguauc

SEQ ID NO: 184827 - RNA, 19 nt, Artificial Sequence
  Description of Artificial Sequence: Synthetic oligonucleotide
ugguucaccugugucaguc

SEQ ID NO: 184828 - RNA, 19 nt, Artificial Sequence
  Description of Artificial Sequence: Synthetic oligonucleotide
uauccacgauaguaagggu

SEQ ID NO: 184829 - RNA, 19 nt, Artificial Sequence
  Description of Artificial Sequence: Synthetic oligonucleotide
acgaagagaguaaugggau

SEQ ID NO: 184830 - RNA, 19 nt, Artificial Sequence
  Description of Artificial Sequence: Synthetic oligonucleotide
acaauacagcaaggggacg

SEQ ID NO: 184831 - RNA, 19 nt, Artificial Sequence
  Description of Artificial Sequence: Synthetic oligonucleotide
gcugcaacauuucacggga

SEQ ID NO: 184832 - RNA, 19 nt, Artificial Sequence
  Description of Artificial Sequence: Synthetic oligonucleotide
augugauugggcacuauau

SEQ ID NO: 184833 - RNA, 19 nt, Artificial Sequence
  Description of Artificial Sequence: Synthetic oligonucleotide
ggauagccgauaaauugag

SEQ ID NO: 184834 - RNA, 19 nt, Artificial Sequence
  Description of Artificial Sequence: Synthetic oligonucleotide
accaaucgguuugauacga

SEQ ID NO: 184835 - RNA, 19 nt, Artificial Sequence
  Description of Artificial Sequence: Synthetic oligonucleotide
ccaaucguugguuaagcuc

SEQ ID NO: 184836 - RNA, 19 nt, Artificial Sequence
  Description of Artificial Sequence: Synthetic oligonucleotide
gcagauguauaguaucgca

SEQ ID NO: 184837 - RNA, 19 nt, Artificial Sequence
  Description of Artificial Sequence: Synthetic oligonucleotide
agucgacuucuuccaugcg

SEQ ID NO: 184838 - RNA, 19 nt, Artificial Sequence
  Description of Artificial Sequence: Synthetic oligonucleotide
agauuaaugugcagcuccu

SEQ ID NO: 184839 - RNA, 19 nt, Artificial Sequence
  Description of Artificial Sequence: Synthetic oligonucleotide
gagucuagcuuacuagggu

SEQ ID NO: 184840 - RNA, 19 nt, Artificial Sequence
  Description of Artificial Sequence: Synthetic oligonucleotide
ccuccaaauacuccguuug

SEQ ID NO: 184841 - RNA, 19 nt, Artificial Sequence
  Description of Artificial Sequence: Synthetic oligonucleotide
ugucgucggauuccuuuuc

SEQ ID NO: 184842 - RNA, 19 nt, Artificial Sequence
  Description of Artificial Sequence: Synthetic oligonucleotide
cuaccaacccguugaguca

SEQ ID NO: 184843 - RNA, 19 nt, Artificial Sequence
  Description of Artificial Sequence: Synthetic oligonucleotide
auuaacuacaggggaugaa

SEQ ID NO: 184844 - RNA, 19 nt, Artificial Sequence
  Description of Artificial Sequence: Synthetic oligonucleotide
gaugaaacuuaggccaucu

SEQ ID NO: 184845 - RNA, 19 nt, Artificial Sequence
  Description of Artificial Sequence: Synthetic oligonucleotide
ugcgugaugugucgucauc

SEQ ID NO: 184846 - RNA, 19 nt, Artificial Sequence
  Description of Artificial Sequence: Synthetic oligonucleotide
acuuucucggcaaccaaau

SEQ ID NO: 184847 - RNA, 19 nt, Artificial Sequence
  Description of Artificial Sequence: Synthetic oligonucleotide
ucgcaacagcucugaaagc

SEQ ID NO: 184848 - RNA, 19 nt, Artificial Sequence
  Description of Artificial Sequence: Synthetic oligonucleotide
uugucgucggauuccuuuu

SEQ ID NO: 184849 - RNA, 19 nt, Artificial Sequence
  Description of Artificial Sequence: Synthetic oligonucleotide
gggcacuauauuuccauuc

SEQ ID NO: 184850 - RNA, 19 nt, Artificial Sequence
  Description of Artificial Sequence: Synthetic oligonucleotide
acgaaggcugaguuagcaa

SEQ ID NO: 184851 - RNA, 19 nt, Artificial Sequence
  Description of Artificial Sequence: Synthetic oligonucleotide
acaggagugcaguuucaua

SEQ ID NO: 184852 - RNA, 19 nt, Artificial Sequence
  Description of Artificial Sequence: Synthetic oligonucleotide
auccacgauaguaaggguu

SEQ ID NO: 184853 - RNA, 19 nt, Artificial Sequence
  Description of Artificial Sequence: Synthetic oligonucleotide
cucggcaaccaaauacgca

SEQ ID NO: 184854 - RNA, 19 nt, Artificial Sequence
  Description of Artificial Sequence: Synthetic oligonucleotide
gauagccgauaaauugaga

SEQ ID NO: 184855 - RNA, 19 nt, Artificial Sequence
  Description of Artificial Sequence: Synthetic oligonucleotide
ggaauuaacuccucacagu

SEQ ID NO: 184856 - RNA, 19 nt, Artificial Sequence
  Description of Artificial Sequence: Synthetic oligonucleotide
aggggacgucaccaaucgg

SEQ ID NO: 184857 - RNA, 19 nt, Artificial Sequence
  Description of Artificial Sequence: Synthetic oligonucleotide
cuucgcugagugaccgcgc

SEQ ID NO: 184858 - RNA, 19 nt, Artificial Sequence
  Description of Artificial Sequence: Synthetic oligonucleotide
agucaagccuagaguauca

SEQ ID NO: 184859 - RNA, 19 nt, Artificial Sequence
  Description of Artificial Sequence: Synthetic oligonucleotide
caagaccuagggaagcuua

SEQ ID NO: 184860 - RNA, 19 nt, Artificial Sequence
  Description of Artificial Sequence: Synthetic oligonucleotide
acgggacgugacgagccgc

SEQ ID NO: 184861 - RNA, 19 nt, Artificial Sequence
  Description of Artificial Sequence: Synthetic oligonucleotide
ggccaucuuaauuuggucu

SEQ ID NO: 184862 - RNA, 19 nt, Artificial Sequence
  Description of Artificial Sequence: Synthetic oligonucleotide
aggauuccugguccaaaua

SEQ ID NO: 184863 - RNA, 19 nt, Artificial Sequence
  Description of Artificial Sequence: Synthetic oligonucleotide
acgacccauugguucaccu

SEQ ID NO: 184864 - RNA, 19 nt, Artificial Sequence
  Description of Artificial Sequence: Synthetic oligonucleotide
gguuauugaucaagucggc

SEQ ID NO: 184865 - RNA, 19 nt, Artificial Sequence
  Description of Artificial Sequence: Synthetic oligonucleotide
auugggcacuauauuucca

SEQ ID NO: 184866 - RNA, 19 nt, Artificial Sequence
  Description of Artificial Sequence: Synthetic oligonucleotide
auuucacgggaaauauuua

SEQ ID NO: 184867 - RNA, 19 nt, Artificial Sequence
  Description of Artificial Sequence: Synthetic oligonucleotide
aacaagccacauggggaau

SEQ ID NO: 184868 - RNA, 19 nt, Artificial Sequence
  Description of Artificial Sequence: Synthetic oligonucleotide
ucgucggauuccuuuucuu

SEQ ID NO: 184869 - RNA, 19 nt, Artificial Sequence
  Description of Artificial Sequence: Synthetic oligonucleotide
cugagugaccgcgcacggg

SEQ ID NO: 184870 - RNA, 19 nt, Artificial Sequence
  Description of Artificial Sequence: Synthetic oligonucleotide
uccaugcgugaugugucgu

SEQ ID NO: 184871 - RNA, 19 nt, Artificial Sequence
  Description of Artificial Sequence: Synthetic oligonucleotide
caugcgugaugugucguca

SEQ ID NO: 184872 - RNA, 19 nt, Artificial Sequence
  Description of Artificial Sequence: Synthetic oligonucleotide
cacgaaggcugaguuagca

SEQ ID NO: 184873 - RNA, 19 nt, Artificial Sequence
  Description of Artificial Sequence: Synthetic oligonucleotide
gucugcguuuccucaggca

SEQ ID NO: 184874 - RNA, 19 nt, Artificial Sequence
  Description of Artificial Sequence: Synthetic oligonucleotide
caauacagcaaggggacgu

SEQ ID NO: 184875 - RNA, 19 nt, Artificial Sequence
  Description of Artificial Sequence: Synthetic oligonucleotide
gucaagccuagaguaucac

SEQ ID NO: 184876 - RNA, 19 nt, Artificial Sequence
  Description of Artificial Sequence: Synthetic oligonucleotide
agacuaguacaugcagaau

SEQ ID NO: 184877 - RNA, 19 nt, Artificial Sequence
  Description of Artificial Sequence: Synthetic oligonucleotide
aggguucggucuuguuugu

SEQ ID NO: 184878 - RNA, 19 nt, Artificial Sequence
  Description of Artificial Sequence: Synthetic oligonucleotide
augcgugaugugucgucau

SEQ ID NO: 184879 - RNA, 19 nt, Artificial Sequence
  Description of Artificial Sequence: Synthetic oligonucleotide
uccacccguaugugcuugu

SEQ ID NO: 184880 - RNA, 19 nt, Artificial Sequence
  Description of Artificial Sequence: Synthetic oligonucleotide
aucguugguuaagcucuug

SEQ ID NO: 184881 - RNA, 19 nt, Artificial Sequence
  Description of Artificial Sequence: Synthetic oligonucleotide
aaucguugguuaagcucuu

SEQ ID NO: 184882 - RNA, 19 nt, Artificial Sequence
  Description of Artificial Sequence: Synthetic oligonucleotide
ugcagaccacaaaguuaau

SEQ ID NO: 184883 - RNA, 19 nt, Artificial Sequence
  Description of Artificial Sequence: Synthetic oligonucleotide
acaagaccuagggaagcuu

SEQ ID NO: 184884 - RNA, 19 nt, Artificial Sequence
  Description of Artificial Sequence: Synthetic oligonucleotide
gucggccuuggucauucca

SEQ ID NO: 184885 - RNA, 19 nt, Artificial Sequence
  Description of Artificial Sequence: Synthetic oligonucleotide
cugucagacucucguaucu

SEQ ID NO: 184886 - RNA, 19 nt, Artificial Sequence
  Description of Artificial Sequence: Synthetic oligonucleotide
acaagccacauggggaauu

SEQ ID NO: 184887 - RNA, 19 nt, Artificial Sequence
  Description of Artificial Sequence: Synthetic oligonucleotide
agauuacuucuaagccaug

SEQ ID NO: 184888 - RNA, 19 nt, Artificial Sequence
  Description of Artificial Sequence: Synthetic oligonucleotide
acccguugagucaagccua

SEQ ID NO: 184889 - RNA, 19 nt, Artificial Sequence
  Description of Artificial Sequence: Synthetic oligonucleotide
cagcaaggggacgucacca

SEQ ID NO: 184890 - RNA, 19 nt, Artificial Sequence
  Description of Artificial Sequence: Synthetic oligonucleotide
caucguuauguuuggugau

SEQ ID NO: 184891 - RNA, 19 nt, Artificial Sequence
  Description of Artificial Sequence: Synthetic oligonucleotide
caauaccuagaccaagcuu

SEQ ID NO: 184892 - RNA, 19 nt, Artificial Sequence
  Description of Artificial Sequence: Synthetic oligonucleotide
gucguaggguuucaauaau

SEQ ID NO: 184893 - RNA, 19 nt, Artificial Sequence
  Description of Artificial Sequence: Synthetic oligonucleotide
cgucggauuccuuuucuuc

SEQ ID NO: 184894 - RNA, 19 nt, Artificial Sequence
  Description of Artificial Sequence: Synthetic oligonucleotide
ccaaucgguuugauacgac

SEQ ID NO: 184895 - RNA, 19 nt, Artificial Sequence
  Description of Artificial Sequence: Synthetic oligonucleotide
gucgucggauuccuuuucu

SEQ ID NO: 184896 - RNA, 19 nt, Artificial Sequence
  Description of Artificial Sequence: Synthetic oligonucleotide
acgucaccaaucgguuuga

SEQ ID NO: 184897 - RNA, 19 nt, Artificial Sequence
  Description of Artificial Sequence: Synthetic oligonucleotide
gaagggcccggaauuccaa

SEQ ID NO: 184898 - RNA, 19 nt, Artificial Sequence
  Description of Artificial Sequence: Synthetic oligonucleotide
ggggacgucaccaaucggu

SEQ ID NO: 184899 - RNA, 19 nt, Artificial Sequence
  Description of Artificial Sequence: Synthetic oligonucleotide
cccguugagucaagccuag

SEQ ID NO: 184900 - RNA, 19 nt, Artificial Sequence
  Description of Artificial Sequence: Synthetic oligonucleotide
ccacgauaguaaggguucg

SEQ ID NO: 184901 - RNA, 19 nt, Artificial Sequence
  Description of Artificial Sequence: Synthetic oligonucleotide
guaucgcaacagcucugaa

SEQ ID NO: 184902 - RNA, 19 nt, Artificial Sequence
  Description of Artificial Sequence: Synthetic oligonucleotide
cugguacaauaguccuuga

SEQ ID NO: 184903 - RNA, 19 nt, Artificial Sequence
  Description of Artificial Sequence: Synthetic oligonucleotide
gcaucuucgcugagugacc

SEQ ID NO: 184904 - RNA, 19 nt, Artificial Sequence
  Description of Artificial Sequence: Synthetic oligonucleotide
ccguaugugcuugugacaa

SEQ ID NO: 184905 - RNA, 19 nt, Artificial Sequence
  Description of Artificial Sequence: Synthetic oligonucleotide
ccaugcgugaugugucguc

SEQ ID NO: 184906 - RNA, 19 nt, Artificial Sequence
  Description of Artificial Sequence: Synthetic oligonucleotide
cuuagucgacuucuuccau

SEQ ID NO: 184907 - RNA, 19 nt, Artificial Sequence
  Description of Artificial Sequence: Synthetic oligonucleotide
gaguaaugggauagccgau

SEQ ID NO: 184908 - RNA, 19 nt, Artificial Sequence
  Description of Artificial Sequence: Synthetic oligonucleotide
ccccuuaguuuucaugcca

SEQ ID NO: 184909 - RNA, 19 nt, Artificial Sequence
  Description of Artificial Sequence: Synthetic oligonucleotide
gccgauaaauugagaaugu

SEQ ID NO: 184910 - RNA, 19 nt, Artificial Sequence
  Description of Artificial Sequence: Synthetic oligonucleotide
ccuuaucgcguuccuucuc

SEQ ID NO: 184911 - RNA, 19 nt, Artificial Sequence
  Description of Artificial Sequence: Synthetic oligonucleotide
gacucucguaucugaucuu

SEQ ID NO: 184912 - RNA, 19 nt, Artificial Sequence
  Description of Artificial Sequence: Synthetic oligonucleotide
gagcucccucagaaagauc

SEQ ID NO: 184913 - RNA, 19 nt, Artificial Sequence
  Description of Artificial Sequence: Synthetic oligonucleotide
cucucguaucugaucuuau

SEQ ID NO: 184914 - RNA, 19 nt, Artificial Sequence
  Description of Artificial Sequence: Synthetic oligonucleotide
gggaauuccucaguuguuu

SEQ ID NO: 184915 - RNA, 19 nt, Artificial Sequence
  Description of Artificial Sequence: Synthetic oligonucleotide
gaccgcgcacgggacguga

SEQ ID NO: 184916 - RNA, 19 nt, Artificial Sequence
  Description of Artificial Sequence: Synthetic oligonucleotide
cugccauguaacccaucgu

SEQ ID NO: 184917 - RNA, 19 nt, Artificial Sequence
  Description of Artificial Sequence: Synthetic oligonucleotide
cguugguuaagcucuugua

SEQ ID NO: 184918 - RNA, 19 nt, Artificial Sequence
  Description of Artificial Sequence: Synthetic oligonucleotide
gcccggaauuccaauuguc

SEQ ID NO: 184919 - RNA, 19 nt, Artificial Sequence
  Description of Artificial Sequence: Synthetic oligonucleotide
gcgcacgggacgugacgag

SEQ ID NO: 184920 - RNA, 19 nt, Artificial Sequence
  Description of Artificial Sequence: Synthetic oligonucleotide
gguuugauacgaccaccuu

SEQ ID NO: 184921 - RNA, 19 nt, Artificial Sequence
  Description of Artificial Sequence: Synthetic oligonucleotide
ggguuuaucuccagguguu

SEQ ID NO: 184922 - RNA, 19 nt, Artificial Sequence
  Description of Artificial Sequence: Synthetic oligonucleotide
cgaagagaguaaugggaua

SEQ ID NO: 184923 - RNA, 19 nt, Artificial Sequence
  Description of Artificial Sequence: Synthetic oligonucleotide
gagcacgucuugggacaaa

SEQ ID NO: 184924 - RNA, 19 nt, Artificial Sequence
  Description of Artificial Sequence: Synthetic oligonucleotide
cggcaaccaaauacgcaga

SEQ ID NO: 184925 - RNA, 19 nt, Artificial Sequence
  Description of Artificial Sequence: Synthetic oligonucleotide
gguuuaucuccagguguuu

SEQ ID NO: 184926 - RNA, 19 nt, Artificial Sequence
  Description of Artificial Sequence: Synthetic oligonucleotide
ccacuccucuaaugaaauu

SEQ ID NO: 184927 - RNA, 19 nt, Artificial Sequence
  Description of Artificial Sequence: Synthetic oligonucleotide
cguaugugcuugugacaau

SEQ ID NO: 184928 - RNA, 19 nt, Artificial Sequence
  Description of Artificial Sequence: Synthetic oligonucleotide
aaauagaagguucaaaagc

SEQ ID NO: 184929 - RNA, 19 nt, Artificial Sequence
  Description of Artificial Sequence: Synthetic oligonucleotide
ugcagaaucaaauagaagg

SEQ ID NO: 184930 - RNA, 19 nt, Artificial Sequence
  Description of Artificial Sequence: Synthetic oligonucleotide
aacaguauucauuagguac

SEQ ID NO: 184931 - RNA, 19 nt, Artificial Sequence
  Description of Artificial Sequence: Synthetic oligonucleotide
uuaauuaacauacaguaga

SEQ ID NO: 184932 - RNA, 19 nt, Artificial Sequence
  Description of Artificial Sequence: Synthetic oligonucleotide
uauauuauaaucuagcaaa

SEQ ID NO: 184933 - RNA, 19 nt, Artificial Sequence
  Description of Artificial Sequence: Synthetic oligonucleotide
aguuuugugaaauuagugc

SEQ ID NO: 184934 - RNA, 19 nt, Artificial Sequence
  Description of Artificial Sequence: Synthetic oligonucleotide
acugucuaagaauauaucc

SEQ ID NO: 184935 - RNA, 19 nt, Artificial Sequence
  Description of Artificial Sequence: Synthetic oligonucleotide
uuaauuuagaaucagguau

SEQ ID NO: 184936 - RNA, 19 nt, Artificial Sequence
  Description of Artificial Sequence: Synthetic oligonucleotide
uuuaaagauguuaauagcu

SEQ ID NO: 184937 - RNA, 19 nt, Artificial Sequence
  Description of Artificial Sequence: Synthetic oligonucleotide
cuugugaagaagaagaacc

SEQ ID NO: 184938 - RNA, 19 nt, Artificial Sequence
  Description of Artificial Sequence: Synthetic oligonucleotide
aguucauagacauuuguac

SEQ ID NO: 184939 - RNA, 19 nt, Artificial Sequence
  Description of Artificial Sequence: Synthetic oligonucleotide
aagauguaaacccgaauac

SEQ ID NO: 184940 - RNA, 19 nt, Artificial Sequence
  Description of Artificial Sequence: Synthetic oligonucleotide
uuuagaaucagguauuuac

SEQ ID NO: 184941 - RNA, 19 nt, Artificial Sequence
  Description of Artificial Sequence: Synthetic oligonucleotide
uuuguaucaguuuugagac

SEQ ID NO: 184942 - RNA, 19 nt, Artificial Sequence
  Description of Artificial Sequence: Synthetic oligonucleotide
aaaacauauacgcaacuca

SEQ ID NO: 184943 - RNA, 19 nt, Artificial Sequence
  Description of Artificial Sequence: Synthetic oligonucleotide
aaugugauuccaucaaguc

SEQ ID NO: 184944 - RNA, 19 nt, Artificial Sequence
  Description of Artificial Sequence: Synthetic oligonucleotide
ucauccuucagccauacug

SEQ ID NO: 184945 - RNA, 19 nt, Artificial Sequence
  Description of Artificial Sequence: Synthetic oligonucleotide
uuaaagauguuaauagcug

SEQ ID NO: 184946 - RNA, 19 nt, Artificial Sequence
  Description of Artificial Sequence: Synthetic oligonucleotide
ucuucgaacagaauguuug

SEQ ID NO: 184947 - RNA, 19 nt, Artificial Sequence
  Description of Artificial Sequence: Synthetic oligonucleotide
ucgaagaucauauucaguc

SEQ ID NO: 184948 - RNA, 19 nt, Artificial Sequence
  Description of Artificial Sequence: Synthetic oligonucleotide
acguacauaaaguaacugg

SEQ ID NO: 184949 - RNA, 19 nt, Artificial Sequence
  Description of Artificial Sequence: Synthetic oligonucleotide
aaaacaacuuaauguagcu

SEQ ID NO: 184950 - RNA, 19 nt, Artificial Sequence
  Description of Artificial Sequence: Synthetic oligonucleotide
aauagaagguucaaaagca

SEQ ID NO: 184951 - RNA, 19 nt, Artificial Sequence
  Description of Artificial Sequence: Synthetic oligonucleotide
caauguucuguuuugauug

SEQ ID NO: 184952 - RNA, 19 nt, Artificial Sequence
  Description of Artificial Sequence: Synthetic oligonucleotide
uaaauaacaccaaaccaac

SEQ ID NO: 184953 - RNA, 19 nt, Artificial Sequence
  Description of Artificial Sequence: Synthetic oligonucleotide
aacucaagcccuuucuuuc

SEQ ID NO: 184954 - RNA, 19 nt, Artificial Sequence
  Description of Artificial Sequence: Synthetic oligonucleotide
agcauuaaccuuuuaaugu

SEQ ID NO: 184955 - RNA, 19 nt, Artificial Sequence
  Description of Artificial Sequence: Synthetic oligonucleotide
auaucuuuccaguacacug

SEQ ID NO: 184956 - RNA, 19 nt, Artificial Sequence
  Description of Artificial Sequence: Synthetic oligonucleotide
caaacguacauaaaguaac

SEQ ID NO: 184957 - RNA, 19 nt, Artificial Sequence
  Description of Artificial Sequence: Synthetic oligonucleotide
auauacgcaacucaguaug

SEQ ID NO: 184958 - RNA, 19 nt, Artificial Sequence
  Description of Artificial Sequence: Synthetic oligonucleotide
gaagaucauauucagucag

SEQ ID NO: 184959 - RNA, 19 nt, Artificial Sequence
  Description of Artificial Sequence: Synthetic oligonucleotide
aauguagcuggagaaauag

SEQ ID NO: 184960 - RNA, 19 nt, Artificial Sequence
  Description of Artificial Sequence: Synthetic oligonucleotide
aguaguucagauuaagaga

SEQ ID NO: 184961 - RNA, 19 nt, Artificial Sequence
  Description of Artificial Sequence: Synthetic oligonucleotide
aagaauauauccgggagug

SEQ ID NO: 184962 - RNA, 19 nt, Artificial Sequence
  Description of Artificial Sequence: Synthetic oligonucleotide
aaauuagugccacugacuu

SEQ ID NO: 184963 - RNA, 19 nt, Artificial Sequence
  Description of Artificial Sequence: Synthetic oligonucleotide
uucauagacauuuguacug

SEQ ID NO: 184964 - RNA, 19 nt, Artificial Sequence
  Description of Artificial Sequence: Synthetic oligonucleotide
aaucuagcaaaguuauuca

SEQ ID NO: 184965 - RNA, 19 nt, Artificial Sequence
  Description of Artificial Sequence: Synthetic oligonucleotide
ugauacaauaauuuaucac

SEQ ID NO: 184966 - RNA, 19 nt, Artificial Sequence
  Description of Artificial Sequence: Synthetic oligonucleotide
uaaucuagcaaaguuauuc

SEQ ID NO: 184967 - RNA, 19 nt, Artificial Sequence
  Description of Artificial Sequence: Synthetic oligonucleotide
aaaagcccgguguaguuuc

SEQ ID NO: 184968 - RNA, 19 nt, Artificial Sequence
  Description of Artificial Sequence: Synthetic oligonucleotide
aaagaguccuuuaauuaac

SEQ ID NO: 184969 - RNA, 19 nt, Artificial Sequence
  Description of Artificial Sequence: Synthetic oligonucleotide
acucauuacagagauaguc

SEQ ID NO: 184970 - RNA, 19 nt, Artificial Sequence
  Description of Artificial Sequence: Synthetic oligonucleotide
aaacauauacgcaacucag

SEQ ID NO: 184971 - RNA, 19 nt, Artificial Sequence
  Description of Artificial Sequence: Synthetic oligonucleotide
gagaugugaaauaacaaug

SEQ ID NO: 184972 - RNA, 19 nt, Artificial Sequence
  Description of Artificial Sequence: Synthetic oligonucleotide
uugaugaauggagucaugg

SEQ ID NO: 184973 - RNA, 19 nt, Artificial Sequence
  Description of Artificial Sequence: Synthetic oligonucleotide
uaaacuaaauggccaaugu

SEQ ID NO: 184974 - RNA, 19 nt, Artificial Sequence
  Description of Artificial Sequence: Synthetic oligonucleotide
ugaaauuagugccacugac

SEQ ID NO: 184975 - RNA, 19 nt, Artificial Sequence
  Description of Artificial Sequence: Synthetic oligonucleotide
ucuaagaauauauccggga

SEQ ID NO: 184976 - RNA, 19 nt, Artificial Sequence
  Description of Artificial Sequence: Synthetic oligonucleotide
uaguuuugugaaauuagug

SEQ ID NO: 184977 - RNA, 19 nt, Artificial Sequence
  Description of Artificial Sequence: Synthetic oligonucleotide
auaucagaaacauuucacu

SEQ ID NO: 184978 - RNA, 19 nt, Artificial Sequence
  Description of Artificial Sequence: Synthetic oligonucleotide
caugguuagaacaacugug

SEQ ID NO: 184979 - RNA, 19 nt, Artificial Sequence
  Description of Artificial Sequence: Synthetic oligonucleotide
cuaagaauauauccgggag

SEQ ID NO: 184980 - RNA, 19 nt, Artificial Sequence
  Description of Artificial Sequence: Synthetic oligonucleotide
ugugaaauuagugccacug

SEQ ID NO: 184981 - RNA, 19 nt, Artificial Sequence
  Description of Artificial Sequence: Synthetic oligonucleotide
uucagauuaagagauguga

SEQ ID NO: 184982 - RNA, 19 nt, Artificial Sequence
  Description of Artificial Sequence: Synthetic oligonucleotide
aaaagagucuuguugugau

SEQ ID NO: 184983 - RNA, 19 nt, Artificial Sequence
  Description of Artificial Sequence: Synthetic oligonucleotide
uauucagucagugugagua

SEQ ID NO: 184984 - RNA, 19 nt, Artificial Sequence
  Description of Artificial Sequence: Synthetic oligonucleotide
  modified_base (3)..(3): a, c, u, g, unknown or other
uunuccauuaguggcaugc

SEQ ID NO: 184985 - RNA, 19 nt, Artificial Sequence
  Description of Artificial Sequence: Synthetic oligonucleotide
cauacugcgacaugcuugg

SEQ ID NO: 184986 - RNA, 19 nt, Artificial Sequence
  Description of Artificial Sequence: Synthetic oligonucleotide
agcauugaugaauggaguc

SEQ ID NO: 184987 - RNA, 19 nt, Artificial Sequence
  Description of Artificial Sequence: Synthetic oligonucleotide
aauagcuaauauauuauaa

SEQ ID NO: 184988 - RNA, 19 nt, Artificial Sequence
  Description of Artificial Sequence: Synthetic oligonucleotide
uaagaauauauccgggagu

SEQ ID NO: 184989 - RNA, 19 nt, Artificial Sequence
  Description of Artificial Sequence: Synthetic oligonucleotide
aaacaaacguacauaaagu

SEQ ID NO: 184990 - RNA, 19 nt, Artificial Sequence
  Description of Artificial Sequence: Synthetic oligonucleotide
aacauguaaucuccgcaag

SEQ ID NO: 184991 - RNA, 19 nt, Artificial Sequence
  Description of Artificial Sequence: Synthetic oligonucleotide
guauucauuagguacugug

SEQ ID NO: 184992 - RNA, 19 nt, Artificial Sequence
  Description of Artificial Sequence: Synthetic oligonucleotide
acugcgacaugcuugguag

SEQ ID NO: 184993 - RNA, 19 nt, Artificial Sequence
  Description of Artificial Sequence: Synthetic oligonucleotide
aaagcagcgaagcaagaau

SEQ ID NO: 184994 - RNA, 19 nt, Artificial Sequence
  Description of Artificial Sequence: Synthetic oligonucleotide
aauucucgcucuccuacuc

SEQ ID NO: 184995 - RNA, 19 nt, Artificial Sequence
  Description of Artificial Sequence: Synthetic oligonucleotide
gaucgaagaucauauucag

SEQ ID NO: 184996 - RNA, 19 nt, Artificial Sequence
  Description of Artificial Sequence: Synthetic oligonucleotide
aaacccgaauacuauaaaa

SEQ ID NO: 184997 - RNA, 19 nt, Artificial Sequence
  Description of Artificial Sequence: Synthetic oligonucleotide
uggagaaauagcuuagagu

SEQ ID NO: 184998 - RNA, 19 nt, Artificial Sequence
  Description of Artificial Sequence: Synthetic oligonucleotide
aguuuugagacuugaagau

SEQ ID NO: 184999 - RNA, 19 nt, Artificial Sequence
  Description of Artificial Sequence: Synthetic oligonucleotide
guuaagauuucaacaagag

SEQ ID NO: 185000 - RNA, 19 nt, Artificial Sequence
  Description of Artificial Sequence: Synthetic oligonucleotide
uacugaucagaauucaagu

SEQ ID NO: 185001 - RNA, 19 nt, Artificial Sequence
  Description of Artificial Sequence: Synthetic oligonucleotide
ucauauucagucaguguga

SEQ ID NO: 185002 - RNA, 19 nt, Artificial Sequence
  Description of Artificial Sequence: Synthetic oligonucleotide
agaaucaugccacacacuu

SEQ ID NO: 185003 - RNA, 19 nt, Artificial Sequence
  Description of Artificial Sequence: Synthetic oligonucleotide
auaaaaggcaauaaacaca

SEQ ID NO: 185004 - RNA, 19 nt, Artificial Sequence
  Description of Artificial Sequence: Synthetic oligonucleotide
aaaguaacugguguaugug

SEQ ID NO: 185005 - RNA, 19 nt, Artificial Sequence
  Description of Artificial Sequence: Synthetic oligonucleotide
ugugauauaaaaggcaaua

SEQ ID NO: 185006 - RNA, 19 nt, Artificial Sequence
  Description of Artificial Sequence: Synthetic oligonucleotide
auuagugccacugacuuga

SEQ ID NO: 185007 - RNA, 19 nt, Artificial Sequence
  Description of Artificial Sequence: Synthetic oligonucleotide
acaagacaauauuugcguc

SEQ ID NO: 185008 - RNA, 19 nt, Artificial Sequence
  Description of Artificial Sequence: Synthetic oligonucleotide
gacuuugauuuccagagga

SEQ ID NO: 185009 - RNA, 19 nt, Artificial Sequence
  Description of Artificial Sequence: Synthetic oligonucleotide
aguaaugugauuccaucaa

SEQ ID NO: 185010 - RNA, 19 nt, Artificial Sequence
  Description of Artificial Sequence: Synthetic oligonucleotide
ucgcucgugaacaaugacc

SEQ ID NO: 185011 - RNA, 19 nt, Artificial Sequence
  Description of Artificial Sequence: Synthetic oligonucleotide
agguugagaacccaggaga

SEQ ID NO: 185012 - RNA, 19 nt, Artificial Sequence
  Description of Artificial Sequence: Synthetic oligonucleotide
caugguaaagcagcgaagc

SEQ ID NO: 185013 - RNA, 19 nt, Artificial Sequence
  Description of Artificial Sequence: Synthetic oligonucleotide
auacaguagaaugugucuc

SEQ ID NO: 185014 - RNA, 19 nt, Artificial Sequence
  Description of Artificial Sequence: Synthetic oligonucleotide
gaaugcagagcugacuagg

SEQ ID NO: 185015 - RNA, 19 nt, Artificial Sequence
  Description of Artificial Sequence: Synthetic oligonucleotide
uguaacuacuguauauuua

SEQ ID NO: 185016 - RNA, 19 nt, Artificial Sequence
  Description of Artificial Sequence: Synthetic oligonucleotide
ugugggcucuccauuacag

SEQ ID NO: 185017 - RNA, 19 nt, Artificial Sequence
  Description of Artificial Sequence: Synthetic oligonucleotide
aagaugauuagcucaugua

SEQ ID NO: 185018 - RNA, 19 nt, Artificial Sequence
  Description of Artificial Sequence: Synthetic oligonucleotide
ugaguaaugugauuccauc

SEQ ID NO: 185019 - RNA, 19 nt, Artificial Sequence
  Description of Artificial Sequence: Synthetic oligonucleotide
auauuaguuaaaucuggau

SEQ ID NO: 185020 - RNA, 19 nt, Artificial Sequence
  Description of Artificial Sequence: Synthetic oligonucleotide
uuuaucacauuaguuuugu

SEQ ID NO: 185021 - RNA, 19 nt, Artificial Sequence
  Description of Artificial Sequence: Synthetic oligonucleotide
guaaugugauuccaucaag

SEQ ID NO: 185022 - RNA, 19 nt, Artificial Sequence
  Description of Artificial Sequence: Synthetic oligonucleotide
acauauacgcaacucagua

SEQ ID NO: 185023 - RNA, 19 nt, Artificial Sequence
  Description of Artificial Sequence: Synthetic oligonucleotide
uucaaaagcauggagccuc

SEQ ID NO: 185024 - RNA, 19 nt, Artificial Sequence
  Description of Artificial Sequence: Synthetic oligonucleotide
cugaucagaauucaaguca

SEQ ID NO: 185025 - RNA, 19 nt, Artificial Sequence
  Description of Artificial Sequence: Synthetic oligonucleotide
aagucaaaaccugaaaaua

SEQ ID NO: 185026 - RNA, 19 nt, Artificial Sequence
  Description of Artificial Sequence: Synthetic oligonucleotide
cuuccuuaugccaagacaa

SEQ ID NO: 185027 - RNA, 19 nt, Artificial Sequence
  Description of Artificial Sequence: Synthetic oligonucleotide
uacaguagaaugugucuca

SEQ ID NO: 185028 - RNA, 19 nt, Artificial Sequence
  Description of Artificial Sequence: Synthetic oligonucleotide
auauuauaaucuagcaaag

SEQ ID NO: 185029 - RNA, 19 nt, Artificial Sequence
  Description of Artificial Sequence: Synthetic oligonucleotide
aguucagauuaagagaugu

SEQ ID NO: 185030 - RNA, 19 nt, Artificial Sequence
  Description of Artificial Sequence: Synthetic oligonucleotide
ucgugaacaaugaccauaa

SEQ ID NO: 185031 - RNA, 19 nt, Artificial Sequence
  Description of Artificial Sequence: Synthetic oligonucleotide
aacguacauaaaguaacug

SEQ ID NO: 185032 - RNA, 19 nt, Artificial Sequence
  Description of Artificial Sequence: Synthetic oligonucleotide
ugaaagauguaaacccgaa

SEQ ID NO: 185033 - RNA, 19 nt, Artificial Sequence
  Description of Artificial Sequence: Synthetic oligonucleotide
acuagacucauuugcuuug

SEQ ID NO: 185034 - RNA, 19 nt, Artificial Sequence
  Description of Artificial Sequence: Synthetic oligonucleotide
ucagacuacagagccuucg

SEQ ID NO: 185035 - RNA, 19 nt, Artificial Sequence
  Description of Artificial Sequence: Synthetic oligonucleotide
accuuuuaaugucuccuag

SEQ ID NO: 185036 - RNA, 19 nt, Artificial Sequence
  Description of Artificial Sequence: Synthetic oligonucleotide
ucuggguccaaucuucgaa

SEQ ID NO: 185037 - RNA, 19 nt, Artificial Sequence
  Description of Artificial Sequence: Synthetic oligonucleotide
uucgcagaaggaucgaccu

SEQ ID NO: 185038 - RNA, 19 nt, Artificial Sequence
  Description of Artificial Sequence: Synthetic oligonucleotide
gaaucaaauagaagguuca

SEQ ID NO: 185039 - RNA, 19 nt, Artificial Sequence
  Description of Artificial Sequence: Synthetic oligonucleotide
gcauaaagcuuccuuaugc

SEQ ID NO: 185040 - RNA, 19 nt, Artificial Sequence
  Description of Artificial Sequence: Synthetic oligonucleotide
gaguaaugugauuccauca

SEQ ID NO: 185041 - RNA, 19 nt, Artificial Sequence
  Description of Artificial Sequence: Synthetic oligonucleotide
uacgcucugguauuggcca

SEQ ID NO: 185042 - RNA, 19 nt, Artificial Sequence
  Description of Artificial Sequence: Synthetic oligonucleotide
gaauacagugcccaucaga

SEQ ID NO: 185043 - RNA, 19 nt, Artificial Sequence
  Description of Artificial Sequence: Synthetic oligonucleotide
uucauuagguacugugcca

SEQ ID NO: 185044 - RNA, 19 nt, Artificial Sequence
  Description of Artificial Sequence: Synthetic oligonucleotide
acuugauacaauaauuuau

SEQ ID NO: 185045 - RNA, 19 nt, Artificial Sequence
  Description of Artificial Sequence: Synthetic oligonucleotide
gucagugugaguaauguga

SEQ ID NO: 185046 - RNA, 19 nt, Artificial Sequence
  Description of Artificial Sequence: Synthetic oligonucleotide
ucaagucggugcuuguugc

SEQ ID NO: 185047 - RNA, 19 nt, Artificial Sequence
  Description of Artificial Sequence: Synthetic oligonucleotide
uccuacucugaugauacgc

SEQ ID NO: 185048 - RNA, 19 nt, Artificial Sequence
  Description of Artificial Sequence: Synthetic oligonucleotide
aaauucucgcucuccuacu

SEQ ID NO: 185049 - RNA, 19 nt, Artificial Sequence
  Description of Artificial Sequence: Synthetic oligonucleotide
  modified_base (7)..(7): a, c, u, g, unknown or other
cccuuunuccauuaguggc

SEQ ID NO: 185050 - RNA, 19 nt, Artificial Sequence
  Description of Artificial Sequence: Synthetic oligonucleotide
agaguaugguaguacaaaa

SEQ ID NO: 185051 - RNA, 19 nt, Artificial Sequence
  Description of Artificial Sequence: Synthetic oligonucleotide
aguuaagauuucaacaaga

SEQ ID NO: 185052 - RNA, 19 nt, Artificial Sequence
  Description of Artificial Sequence: Synthetic oligonucleotide
uguccuaaugauccaugga

SEQ ID NO: 185053 - RNA, 19 nt, Artificial Sequence
  Description of Artificial Sequence: Synthetic oligonucleotide
uguaaacccgaauacuaua

SEQ ID NO: 185054 - RNA, 19 nt, Artificial Sequence
  Description of Artificial Sequence: Synthetic oligonucleotide
cuguccuaaugauccaugg

SEQ ID NO: 185055 - RNA, 19 nt, Artificial Sequence
  Description of Artificial Sequence: Synthetic oligonucleotide
cugaacauguaaucuccgc

SEQ ID NO: 185056 - RNA, 19 nt, Artificial Sequence
  Description of Artificial Sequence: Synthetic oligonucleotide
gaacauguaaucuccgcaa

SEQ ID NO: 185057 - RNA, 19 nt, Artificial Sequence
  Description of Artificial Sequence: Synthetic oligonucleotide
gauacgcucugguauuggc

SEQ ID NO: 185058 - RNA, 19 nt, Artificial Sequence
  Description of Artificial Sequence: Synthetic oligonucleotide
uagaaucagguauuuacuu

SEQ ID NO: 185059 - RNA, 19 nt, Artificial Sequence
  Description of Artificial Sequence: Synthetic oligonucleotide
ucgaacagaauguuuguuu

SEQ ID NO: 185060 - RNA, 19 nt, Artificial Sequence
  Description of Artificial Sequence: Synthetic oligonucleotide
aaacguacauaaaguaacu

SEQ ID NO: 185061 - RNA, 19 nt, Artificial Sequence
  Description of Artificial Sequence: Synthetic oligonucleotide
cuucgcagaaggaucgacc

SEQ ID NO: 185062 - RNA, 19 nt, Artificial Sequence
  Description of Artificial Sequence: Synthetic oligonucleotide
aaucuccgcaaguguggac

SEQ ID NO: 185063 - RNA, 19 nt, Artificial Sequence
  Description of Artificial Sequence: Synthetic oligonucleotide
aacugcuucuggucuccac

SEQ ID NO: 185064 - RNA, 19 nt, Artificial Sequence
  Description of Artificial Sequence: Synthetic oligonucleotide
ugaguacuagacucauuug

SEQ ID NO: 185065 - RNA, 19 nt, Artificial Sequence
  Description of Artificial Sequence: Synthetic oligonucleotide
caguuaagauuucaacaag

SEQ ID NO: 185066 - RNA, 19 nt, Artificial Sequence
  Description of Artificial Sequence: Synthetic oligonucleotide
cauguaaucuccgcaagug

SEQ ID NO: 185067 - RNA, 19 nt, Artificial Sequence
  Description of Artificial Sequence: Synthetic oligonucleotide
gacaccuacuucuacaaua

SEQ ID NO: 185068 - RNA, 19 nt, Artificial Sequence
  Description of Artificial Sequence: Synthetic oligonucleotide
uccaacggcgaaugcagag

SEQ ID NO: 185069 - RNA, 19 nt, Artificial Sequence
  Description of Artificial Sequence: Synthetic oligonucleotide
agcuacaucaugccaaaau

SEQ ID NO: 185070 - RNA, 19 nt, Artificial Sequence
  Description of Artificial Sequence: Synthetic oligonucleotide
aaguaacacuaguuucucu

SEQ ID NO: 185071 - RNA, 19 nt, Artificial Sequence
  Description of Artificial Sequence: Synthetic oligonucleotide
gauguaaacccgaauacua

SEQ ID NO: 185072 - RNA, 19 nt, Artificial Sequence
  Description of Artificial Sequence: Synthetic oligonucleotide
ucagucagugugaguaaug

SEQ ID NO: 185073 - RNA, 19 nt, Artificial Sequence
  Description of Artificial Sequence: Synthetic oligonucleotide
agaaucagguauuuacuua

SEQ ID NO: 185074 - RNA, 19 nt, Artificial Sequence
  Description of Artificial Sequence: Synthetic oligonucleotide
uaaacccgaauacuauaaa

SEQ ID NO: 185075 - RNA, 19 nt, Artificial Sequence
  Description of Artificial Sequence: Synthetic oligonucleotide
uguaugugcacaagacaau

SEQ ID NO: 185076 - RNA, 19 nt, Artificial Sequence
  Description of Artificial Sequence: Synthetic oligonucleotide
aaccgacaccuacuucuac

SEQ ID NO: 185077 - RNA, 19 nt, Artificial Sequence
  Description of Artificial Sequence: Synthetic oligonucleotide
gaguccuuuaauuaacaua

SEQ ID NO: 185078 - RNA, 19 nt, Artificial Sequence
  Description of Artificial Sequence: Synthetic oligonucleotide
guugugauauaaaaggcaa

SEQ ID NO: 185079 - RNA, 19 nt, Artificial Sequence
  Description of Artificial Sequence: Synthetic oligonucleotide
gugcuugugaagaagaaga

SEQ ID NO: 185080 - RNA, 19 nt, Artificial Sequence
  Description of Artificial Sequence: Synthetic oligonucleotide
ugguguauacucugugaca

SEQ ID NO: 185081 - RNA, 19 nt, Artificial Sequence
  Description of Artificial Sequence: Synthetic oligonucleotide
aacauauacgcaacucagu

SEQ ID NO: 185082 - RNA, 19 nt, Artificial Sequence
  Description of Artificial Sequence: Synthetic oligonucleotide
gaaaccaaauucucgcucu

SEQ ID NO: 185083 - RNA, 19 nt, Artificial Sequence
  Description of Artificial Sequence: Synthetic oligonucleotide
aaccuuuuaaugucuccua

SEQ ID NO: 185084 - RNA, 19 nt, Artificial Sequence
  Description of Artificial Sequence: Synthetic oligonucleotide
auacgcucugguauuggcc

SEQ ID NO: 185085 - RNA, 19 nt, Artificial Sequence
  Description of Artificial Sequence: Synthetic oligonucleotide
agauguaaacccgaauacu

SEQ ID NO: 185086 - RNA, 19 nt, Artificial Sequence
  Description of Artificial Sequence: Synthetic oligonucleotide
uccuaaugauccauggauu

SEQ ID NO: 185087 - RNA, 19 nt, Artificial Sequence
  Description of Artificial Sequence: Synthetic oligonucleotide
uacuagacucauuugcuuu

SEQ ID NO: 185088 - RNA, 19 nt, Artificial Sequence
  Description of Artificial Sequence: Synthetic oligonucleotide
ucgccuggcuccaagacaa

SEQ ID NO: 185089 - RNA, 19 nt, Artificial Sequence
  Description of Artificial Sequence: Synthetic oligonucleotide
uauauccgggagugguggg

SEQ ID NO: 185090 - RNA, 19 nt, Artificial Sequence
  Description of Artificial Sequence: Synthetic oligonucleotide
uugugauauaaaaggcaau

SEQ ID NO: 185091 - RNA, 19 nt, Artificial Sequence
  Description of Artificial Sequence: Synthetic oligonucleotide
gaaucagguauuuacuuau

SEQ ID NO: 185092 - RNA, 19 nt, Artificial Sequence
  Description of Artificial Sequence: Synthetic oligonucleotide
acauguaaucuccgcaagu

SEQ ID NO: 185093 - RNA, 19 nt, Artificial Sequence
  Description of Artificial Sequence: Synthetic oligonucleotide
acaaacguacauaaaguaa

SEQ ID NO: 185094 - RNA, 19 nt, Artificial Sequence
  Description of Artificial Sequence: Synthetic oligonucleotide
guuuagcccagcaaacugc

SEQ ID NO: 185095 - RNA, 19 nt, Artificial Sequence
  Description of Artificial Sequence: Synthetic oligonucleotide
agcccgguguaguuucucc

SEQ ID NO: 185096 - RNA, 19 nt, Artificial Sequence
  Description of Artificial Sequence: Synthetic oligonucleotide
ugccauuaacauugcauuc

SEQ ID NO: 185097 - RNA, 19 nt, Artificial Sequence
  Description of Artificial Sequence: Synthetic oligonucleotide
cacuaagcugggaaggaug

SEQ ID NO: 185098 - RNA, 19 nt, Artificial Sequence
  Description of Artificial Sequence: Synthetic oligonucleotide
guuaaaucuggauuuaauu

SEQ ID NO: 185099 - RNA, 19 nt, Artificial Sequence
  Description of Artificial Sequence: Synthetic oligonucleotide
aagacaauauuugcgucuu

SEQ ID NO: 185100 - RNA, 19 nt, Artificial Sequence
  Description of Artificial Sequence: Synthetic oligonucleotide
caaaccgacaccuacuucu

SEQ ID NO: 185101 - RNA, 19 nt, Artificial Sequence
  Description of Artificial Sequence: Synthetic oligonucleotide
ugguauuggccagaguaug

SEQ ID NO: 185102 - RNA, 19 nt, Artificial Sequence
  Description of Artificial Sequence: Synthetic oligonucleotide
aguccaacggcgaaugcag

SEQ ID NO: 185103 - RNA, 19 nt, Artificial Sequence
  Description of Artificial Sequence: Synthetic oligonucleotide
uacgcaacucaguaugguc

SEQ ID NO: 185104 - RNA, 19 nt, Artificial Sequence
  Description of Artificial Sequence: Synthetic oligonucleotide
gugugaguaaugugauucc

SEQ ID NO: 185105 - RNA, 19 nt, Artificial Sequence
  Description of Artificial Sequence: Synthetic oligonucleotide
aacucaguauggucuucca

SEQ ID NO: 185106 - RNA, 19 nt, Artificial Sequence
  Description of Artificial Sequence: Synthetic oligonucleotide
auuagcucauguaaacacu

SEQ ID NO: 185107 - RNA, 19 nt, Artificial Sequence
  Description of Artificial Sequence: Synthetic oligonucleotide
aucuagcaaaguuauucau

SEQ ID NO: 185108 - RNA, 19 nt, Artificial Sequence
  Description of Artificial Sequence: Synthetic oligonucleotide
guucauagacauuuguacu

SEQ ID NO: 185109 - RNA, 19 nt, Artificial Sequence
  Description of Artificial Sequence: Synthetic oligonucleotide
uccuaggacuuugauuucc

SEQ ID NO: 185110 - RNA, 19 nt, Artificial Sequence
  Description of Artificial Sequence: Synthetic oligonucleotide
ucauuagguacugugccau

SEQ ID NO: 185111 - RNA, 19 nt, Artificial Sequence
  Description of Artificial Sequence: Synthetic oligonucleotide
guaguucagauuaagagau

SEQ ID NO: 185112 - RNA, 19 nt, Artificial Sequence
  Description of Artificial Sequence: Synthetic oligonucleotide
aggagaucgaagaucauau

SEQ ID NO: 185113 - RNA, 19 nt, Artificial Sequence
  Description of Artificial Sequence: Synthetic oligonucleotide
uaguccaacggcgaaugca

SEQ ID NO: 185114 - RNA, 19 nt, Artificial Sequence
  Description of Artificial Sequence: Synthetic oligonucleotide
uaguggcaugcucauucag

SEQ ID NO: 185115 - RNA, 19 nt, Artificial Sequence
  Description of Artificial Sequence: Synthetic oligonucleotide
agguauuuacuuauauaca

SEQ ID NO: 185116 - RNA, 19 nt, Artificial Sequence
  Description of Artificial Sequence: Synthetic oligonucleotide
ucauaggacugucacuguu

SEQ ID NO: 185117 - RNA, 19 nt, Artificial Sequence
  Description of Artificial Sequence: Synthetic oligonucleotide
gcauuaaccuuuuaauguc

SEQ ID NO: 185118 - RNA, 19 nt, Artificial Sequence
  Description of Artificial Sequence: Synthetic oligonucleotide
gguuuagcccagcaaacug

SEQ ID NO: 185119 - RNA, 19 nt, Artificial Sequence
  Description of Artificial Sequence: Synthetic oligonucleotide
acuccauaacauuccuucu

SEQ ID NO: 185120 - RNA, 19 nt, Artificial Sequence
  Description of Artificial Sequence: Synthetic oligonucleotide
uggccaauguucuguuuug

SEQ ID NO: 185121 - RNA, 19 nt, Artificial Sequence
  Description of Artificial Sequence: Synthetic oligonucleotide
acugaacauguaaucuccg

SEQ ID NO: 185122 - RNA, 19 nt, Artificial Sequence
  Description of Artificial Sequence: Synthetic oligonucleotide
ucgaccugugcuugugaag

SEQ ID NO: 185123 - RNA, 19 nt, Artificial Sequence
  Description of Artificial Sequence: Synthetic oligonucleotide
caggcaaaccgacaccuac

SEQ ID NO: 185124 - RNA, 19 nt, Artificial Sequence
  Description of Artificial Sequence: Synthetic oligonucleotide
aaggaucgaccugugcuug

SEQ ID NO: 185125 - RNA, 19 nt, Artificial Sequence
  Description of Artificial Sequence: Synthetic oligonucleotide
ucuccuuucaaagcauaaa

SEQ ID NO: 185126 - RNA, 19 nt, Artificial Sequence
  Description of Artificial Sequence: Synthetic oligonucleotide
uccgcaaguguggacacca

SEQ ID NO: 185127 - RNA, 19 nt, Artificial Sequence
  Description of Artificial Sequence: Synthetic oligonucleotide
cuaggacuuugauuuccag

SEQ ID NO: 185128 - RNA, 19 nt, Artificial Sequence
  Description of Artificial Sequence: Synthetic oligonucleotide
ugauacgcucugguauugg

SEQ ID NO: 185129 - RNA, 19 nt, Artificial Sequence
  Description of Artificial Sequence: Synthetic oligonucleotide
aguuaaaucuggauuuaau

SEQ ID NO: 185130 - RNA, 19 nt, Artificial Sequence
  Description of Artificial Sequence: Synthetic oligonucleotide
  modified_base (4)..(4): a, c, u, g, unknown or other
uuunuccauuaguggcaug

SEQ ID NO: 185131 - RNA, 19 nt, Artificial Sequence
  Description of Artificial Sequence: Synthetic oligonucleotide
cacucgcucgugaacaaug

SEQ ID NO: 185132 - RNA, 19 nt, Artificial Sequence
  Description of Artificial Sequence: Synthetic oligonucleotide
cauucuguaacuacuguau

SEQ ID NO: 185133 - RNA, 19 nt, Artificial Sequence
  Description of Artificial Sequence: Synthetic oligonucleotide
ccuaaugauccauggauuc

SEQ ID NO: 185134 - RNA, 19 nt, Artificial Sequence
  Description of Artificial Sequence: Synthetic oligonucleotide
acuaagcugggaaggauga

SEQ ID NO: 185135 - RNA, 19 nt, Artificial Sequence
  Description of Artificial Sequence: Synthetic oligonucleotide
gacuugacaggcaaaccga

SEQ ID NO: 185136 - RNA, 19 nt, Artificial Sequence
  Description of Artificial Sequence: Synthetic oligonucleotide
gaaauuagugccacugacu

SEQ ID NO: 185137 - RNA, 19 nt, Artificial Sequence
  Description of Artificial Sequence: Synthetic oligonucleotide
gcuguuuaguucuucagaa

SEQ ID NO: 185138 - RNA, 19 nt, Artificial Sequence
  Description of Artificial Sequence: Synthetic oligonucleotide
ucuggucuccacugaguac

SEQ ID NO: 185139 - RNA, 19 nt, Artificial Sequence
  Description of Artificial Sequence: Synthetic oligonucleotide
uacugcgacaugcuuggua

SEQ ID NO: 185140 - RNA, 19 nt, Artificial Sequence
  Description of Artificial Sequence: Synthetic oligonucleotide
aaauagcuuagaguucaua

SEQ ID NO: 185141 - RNA, 19 nt, Artificial Sequence
  Description of Artificial Sequence: Synthetic oligonucleotide
ggacucauaggacugucac

SEQ ID NO: 185142 - RNA, 19 nt, Artificial Sequence
  Description of Artificial Sequence: Synthetic oligonucleotide
guccuaaugauccauggau

SEQ ID NO: 185143 - RNA, 19 nt, Artificial Sequence
  Description of Artificial Sequence: Synthetic oligonucleotide
guaaacccgaauacuauaa

SEQ ID NO: 185144 - RNA, 19 nt, Artificial Sequence
  Description of Artificial Sequence: Synthetic oligonucleotide
gagagagugugcaagaaau

SEQ ID NO: 185145 - RNA, 19 nt, Artificial Sequence
  Description of Artificial Sequence: Synthetic oligonucleotide
cugugcuucaagguauggc

SEQ ID NO: 185146 - RNA, 19 nt, Artificial Sequence
  Description of Artificial Sequence: Synthetic oligonucleotide
ugguuuagcccagcaaacu

SEQ ID NO: 185147 - RNA, 19 nt, Artificial Sequence
  Description of Artificial Sequence: Synthetic oligonucleotide
cauacaguagaaugugucu

SEQ ID NO: 185148 - RNA, 19 nt, Artificial Sequence
  Description of Artificial Sequence: Synthetic oligonucleotide
gguauuggccagaguaugg

SEQ ID NO: 185149 - RNA, 19 nt, Artificial Sequence
  Description of Artificial Sequence: Synthetic oligonucleotide
caagacaauauuugcgucu

SEQ ID NO: 185150 - RNA, 19 nt, Artificial Sequence
  Description of Artificial Sequence: Synthetic oligonucleotide
uaaucuccgcaagugugga

SEQ ID NO: 185151 - RNA, 19 nt, Artificial Sequence
  Description of Artificial Sequence: Synthetic oligonucleotide
agccuucgcagaaggaucg

SEQ ID NO: 185152 - RNA, 19 nt, Artificial Sequence
  Description of Artificial Sequence: Synthetic oligonucleotide
gcgaagcaagaauacagug

SEQ ID NO: 185153 - RNA, 19 nt, Artificial Sequence
  Description of Artificial Sequence: Synthetic oligonucleotide
acgcaacucaguauggucu

SEQ ID NO: 185154 - RNA, 19 nt, Artificial Sequence
  Description of Artificial Sequence: Synthetic oligonucleotide
acaugguaaagcagcgaag

SEQ ID NO: 185155 - RNA, 19 nt, Artificial Sequence
  Description of Artificial Sequence: Synthetic oligonucleotide
ggaaaccaaauucucgcuc

SEQ ID NO: 185156 - RNA, 19 nt, Artificial Sequence
  Description of Artificial Sequence: Synthetic oligonucleotide
ccaccaaucgccuggcucc

SEQ ID NO: 185157 - RNA, 19 nt, Artificial Sequence
  Description of Artificial Sequence: Synthetic oligonucleotide
aucgccuggcuccaagaca

SEQ ID NO: 185158 - RNA, 19 nt, Artificial Sequence
  Description of Artificial Sequence: Synthetic oligonucleotide
auguacugguacugaucag

SEQ ID NO: 185159 - RNA, 19 nt, Artificial Sequence
  Description of Artificial Sequence: Synthetic oligonucleotide
gugcccaucagacuacaga

SEQ ID NO: 185160 - RNA, 19 nt, Artificial Sequence
  Description of Artificial Sequence: Synthetic oligonucleotide
cuugguaguccaacggcga

SEQ ID NO: 185161 - RNA, 19 nt, Artificial Sequence
  Description of Artificial Sequence: Synthetic oligonucleotide
ggacuuugauuuccagagg

SEQ ID NO: 185162 - RNA, 19 nt, Artificial Sequence
  Description of Artificial Sequence: Synthetic oligonucleotide
ccuucagccauacugcgac

SEQ ID NO: 185163 - RNA, 19 nt, Artificial Sequence
  Description of Artificial Sequence: Synthetic oligonucleotide
ugugcgccaccaaucgccu

SEQ ID NO: 185164 - RNA, 19 nt, Artificial Sequence
  Description of Artificial Sequence: Synthetic oligonucleotide
gcuugguaguccaacggcg

SEQ ID NO: 185165 - RNA, 19 nt, Artificial Sequence
  Description of Artificial Sequence: Synthetic oligonucleotide
ucgcagaaggaucgaccug

SEQ ID NO: 185166 - RNA, 19 nt, Artificial Sequence
  Description of Artificial Sequence: Synthetic oligonucleotide
agauuucaacaagaggaaa

SEQ ID NO: 185167 - RNA, 19 nt, Artificial Sequence
  Description of Artificial Sequence: Synthetic oligonucleotide
gguguauacucugugacaa

SEQ ID NO: 185168 - RNA, 19 nt, Artificial Sequence
  Description of Artificial Sequence: Synthetic oligonucleotide
gcuacaucaugccaaaaua

SEQ ID NO: 185169 - RNA, 19 nt, Artificial Sequence
  Description of Artificial Sequence: Synthetic oligonucleotide
cugacuugacaggcaaacc

SEQ ID NO: 185170 - RNA, 19 nt, Artificial Sequence
  Description of Artificial Sequence: Synthetic oligonucleotide
gaaagauguaaacccgaau

SEQ ID NO: 185171 - RNA, 19 nt, Artificial Sequence
  Description of Artificial Sequence: Synthetic oligonucleotide
gaugauacgcucugguauu

SEQ ID NO: 185172 - RNA, 19 nt, Artificial Sequence
  Description of Artificial Sequence: Synthetic oligonucleotide
ggucauaccaaagccacuc

SEQ ID NO: 185173 - RNA, 19 nt, Artificial Sequence
  Description of Artificial Sequence: Synthetic oligonucleotide
acggcgaaugcagagcuga

SEQ ID NO: 185174 - RNA, 19 nt, Artificial Sequence
  Description of Artificial Sequence: Synthetic oligonucleotide
ugucuccuaggacuuugau

SEQ ID NO: 185175 - RNA, 19 nt, Artificial Sequence
  Description of Artificial Sequence: Synthetic oligonucleotide
ggauccaaauguagcacag

SEQ ID NO: 185176 - RNA, 19 nt, Artificial Sequence
  Description of Artificial Sequence: Synthetic oligonucleotide
auuagguacugugccauua

SEQ ID NO: 185177 - RNA, 19 nt, Artificial Sequence
  Description of Artificial Sequence: Synthetic oligonucleotide
ugcgacaugcuugguaguc

SEQ ID NO: 185178 - RNA, 19 nt, Artificial Sequence
  Description of Artificial Sequence: Synthetic oligonucleotide
auguaaacccgaauacuau

SEQ ID NO: 185179 - RNA, 19 nt, Artificial Sequence
  Description of Artificial Sequence: Synthetic oligonucleotide
gcaaaguuauucauuuuca

SEQ ID NO: 185180 - RNA, 19 nt, Artificial Sequence
  Description of Artificial Sequence: Synthetic oligonucleotide
acugguguaugugcacaag

SEQ ID NO: 185181 - RNA, 19 nt, Artificial Sequence
  Description of Artificial Sequence: Synthetic oligonucleotide
gcuuguugcauaaaauguc

SEQ ID NO: 185182 - RNA, 19 nt, Artificial Sequence
  Description of Artificial Sequence: Synthetic oligonucleotide
uucagucagugugaguaau

SEQ ID NO: 185183 - RNA, 19 nt, Artificial Sequence
  Description of Artificial Sequence: Synthetic oligonucleotide
cuacaucaugccaaaauau

SEQ ID NO: 185184 - RNA, 19 nt, Artificial Sequence
  Description of Artificial Sequence: Synthetic oligonucleotide
acuguccuaaugauccaug

SEQ ID NO: 185185 - RNA, 19 nt, Artificial Sequence
  Description of Artificial Sequence: Synthetic oligonucleotide
cuguggggaguacugguuc

SEQ ID NO: 185186 - RNA, 19 nt, Artificial Sequence
  Description of Artificial Sequence: Synthetic oligonucleotide
aucgaccugugcuugugaa

SEQ ID NO: 185187 - RNA, 19 nt, Artificial Sequence
  Description of Artificial Sequence: Synthetic oligonucleotide
  modified_base (8)..(8): a, c, u, g, unknown or other
ccccuuunuccauuagugg

SEQ ID NO: 185188 - RNA, 19 nt, Artificial Sequence
  Description of Artificial Sequence: Synthetic oligonucleotide
aagucggugcuuguugcau

SEQ ID NO: 185189 - RNA, 19 nt, Artificial Sequence
  Description of Artificial Sequence: Synthetic oligonucleotide
ccaauuagucuuuucauua

SEQ ID NO: 185190 - RNA, 19 nt, Artificial Sequence
  Description of Artificial Sequence: Synthetic oligonucleotide
agcuuagaguucauagaca

SEQ ID NO: 185191 - RNA, 19 nt, Artificial Sequence
  Description of Artificial Sequence: Synthetic oligonucleotide
uucgaacagaauguuuguu

SEQ ID NO: 185192 - RNA, 19 nt, Artificial Sequence
  Description of Artificial Sequence: Synthetic oligonucleotide
cauuaaccuuuuaaugucu

SEQ ID NO: 185193 - RNA, 19 nt, Artificial Sequence
  Description of Artificial Sequence: Synthetic oligonucleotide
uccaaucuucgaacagaau

SEQ ID NO: 185194 - RNA, 19 nt, Artificial Sequence
  Description of Artificial Sequence: Synthetic oligonucleotide
ucuccgcaaguguggacac

SEQ ID NO: 185195 - RNA, 19 nt, Artificial Sequence
  Description of Artificial Sequence: Synthetic oligonucleotide
gguaguccaacggcgaaug

SEQ ID NO: 185196 - RNA, 19 nt, Artificial Sequence
  Description of Artificial Sequence: Synthetic oligonucleotide
acuagggccugccauucuu

SEQ ID NO: 185197 - RNA, 19 nt, Artificial Sequence
  Description of Artificial Sequence: Synthetic oligonucleotide
auacgcaacucaguauggu

SEQ ID NO: 185198 - RNA, 19 nt, Artificial Sequence
  Description of Artificial Sequence: Synthetic oligonucleotide
gagccuucgcagaaggauc

SEQ ID NO: 185199 - RNA, 19 nt, Artificial Sequence
  Description of Artificial Sequence: Synthetic oligonucleotide
ccacugaacauguaaucuc

SEQ ID NO: 185200 - RNA, 19 nt, Artificial Sequence
  Description of Artificial Sequence: Synthetic oligonucleotide
acacugugcuucaagguau

SEQ ID NO: 185201 - RNA, 19 nt, Artificial Sequence
  Description of Artificial Sequence: Synthetic oligonucleotide
cauaaaguaacugguguau

SEQ ID NO: 185202 - RNA, 19 nt, Artificial Sequence
  Description of Artificial Sequence: Synthetic oligonucleotide
gauccaaauguagcacaga

SEQ ID NO: 185203 - RNA, 19 nt, Artificial Sequence
  Description of Artificial Sequence: Synthetic oligonucleotide
ggacugucacuguuguagc

SEQ ID NO: 185204 - RNA, 19 nt, Artificial Sequence
  Description of Artificial Sequence: Synthetic oligonucleotide
aagcccgguguaguuucuc

SEQ ID NO: 185205 - RNA, 19 nt, Artificial Sequence
  Description of Artificial Sequence: Synthetic oligonucleotide
gauugacaucagauggaga

SEQ ID NO: 185206 - RNA, 19 nt, Artificial Sequence
  Description of Artificial Sequence: Synthetic oligonucleotide
gcuuagaguucauagacau

SEQ ID NO: 185207 - RNA, 19 nt, Artificial Sequence
  Description of Artificial Sequence: Synthetic oligonucleotide
caggugcuguccuggcacg

SEQ ID NO: 185208 - RNA, 19 nt, Artificial Sequence
  Description of Artificial Sequence: Synthetic oligonucleotide
cuccuacucugaugauacg

SEQ ID NO: 185209 - RNA, 19 nt, Artificial Sequence
  Description of Artificial Sequence: Synthetic oligonucleotide
gaaggaucgaccugugcuu

SEQ ID NO: 185210 - RNA, 19 nt, Artificial Sequence
  Description of Artificial Sequence: Synthetic oligonucleotide
aggcacucgcucgugaaca

SEQ ID NO: 185211 - RNA, 19 nt, Artificial Sequence
  Description of Artificial Sequence: Synthetic oligonucleotide
caguauggucuuccaguac

SEQ ID NO: 185212 - RNA, 19 nt, Artificial Sequence
  Description of Artificial Sequence: Synthetic oligonucleotide
auugaugaauggagucaug

SEQ ID NO: 185213 - RNA, 19 nt, Artificial Sequence
  Description of Artificial Sequence: Synthetic oligonucleotide
cacugugcuucaagguaug

SEQ ID NO: 185214 - RNA, 19 nt, Artificial Sequence
  Description of Artificial Sequence: Synthetic oligonucleotide
cucgcucgugaacaaugac

SEQ ID NO: 185215 - RNA, 19 nt, Artificial Sequence
  Description of Artificial Sequence: Synthetic oligonucleotide
augauacgcucugguauug

SEQ ID NO: 185216 - RNA, 19 nt, Artificial Sequence
  Description of Artificial Sequence: Synthetic oligonucleotide
auacacuuccauauaucuu

SEQ ID NO: 185217 - RNA, 19 nt, Artificial Sequence
  Description of Artificial Sequence: Synthetic oligonucleotide
gaucgaccugugcuuguga

SEQ ID NO: 185218 - RNA, 19 nt, Artificial Sequence
  Description of Artificial Sequence: Synthetic oligonucleotide
cucgugaacaaugaccaua

SEQ ID NO: 185219 - RNA, 19 nt, Artificial Sequence
  Description of Artificial Sequence: Synthetic oligonucleotide
guaucaguuuugagacuug

SEQ ID NO: 185220 - RNA, 19 nt, Artificial Sequence
  Description of Artificial Sequence: Synthetic oligonucleotide
caaagcauaaagcuuccuu

SEQ ID NO: 185221 - RNA, 19 nt, Artificial Sequence
  Description of Artificial Sequence: Synthetic oligonucleotide
aggaaaggugugaagucaa

SEQ ID NO: 185222 - RNA, 19 nt, Artificial Sequence
  Description of Artificial Sequence: Synthetic oligonucleotide
guaguccaacggcgaaugc

SEQ ID NO: 185223 - RNA, 19 nt, Artificial Sequence
  Description of Artificial Sequence: Synthetic oligonucleotide
gugugaagucaaaaccuga

SEQ ID NO: 185224 - RNA, 19 nt, Artificial Sequence
  Description of Artificial Sequence: Synthetic oligonucleotide
ucacuacaguuaagauuuc

SEQ ID NO: 185225 - RNA, 19 nt, Artificial Sequence
  Description of Artificial Sequence: Synthetic oligonucleotide
uuagugccacugacuugac

SEQ ID NO: 185226 - RNA, 19 nt, Artificial Sequence
  Description of Artificial Sequence: Synthetic oligonucleotide
caacaguauucauuaggua

SEQ ID NO: 185227 - RNA, 19 nt, Artificial Sequence
  Description of Artificial Sequence: Synthetic oligonucleotide
acaguagaaugugucucaa

SEQ ID NO: 185228 - RNA, 19 nt, Artificial Sequence
  Description of Artificial Sequence: Synthetic oligonucleotide
cacuguuguagcccaucuc

SEQ ID NO: 185229 - RNA, 19 nt, Artificial Sequence
  Description of Artificial Sequence: Synthetic oligonucleotide
aaaccgacaccuacuucua

SEQ ID NO: 185230 - RNA, 19 nt, Artificial Sequence
  Description of Artificial Sequence: Synthetic oligonucleotide
cauuaacauugcauucaaa

SEQ ID NO: 185231 - RNA, 19 nt, Artificial Sequence
  Description of Artificial Sequence: Synthetic oligonucleotide
acgcucugguauuggccag

SEQ ID NO: 185232 - RNA, 19 nt, Artificial Sequence
  Description of Artificial Sequence: Synthetic oligonucleotide
cauauacgcaacucaguau

SEQ ID NO: 185233 - RNA, 19 nt, Artificial Sequence
  Description of Artificial Sequence: Synthetic oligonucleotide
auauccgggaguggugggu

SEQ ID NO: 185234 - RNA, 19 nt, Artificial Sequence
  Description of Artificial Sequence: Synthetic oligonucleotide
caauuagucuuuucauuau

SEQ ID NO: 185235 - RNA, 19 nt, Artificial Sequence
  Description of Artificial Sequence: Synthetic oligonucleotide
gcgaaugcagagcugacua

SEQ ID NO: 185236 - RNA, 19 nt, Artificial Sequence
  Description of Artificial Sequence: Synthetic oligonucleotide
aaacaucaauauggauuuu

SEQ ID NO: 185237 - RNA, 19 nt, Artificial Sequence
  Description of Artificial Sequence: Synthetic oligonucleotide
ugguaguccaacggcgaau

SEQ ID NO: 185238 - RNA, 19 nt, Artificial Sequence
  Description of Artificial Sequence: Synthetic oligonucleotide
auccgggagugguggguag

SEQ ID NO: 185239 - RNA, 19 nt, Artificial Sequence
  Description of Artificial Sequence: Synthetic oligonucleotide
guauggucuuccaguacuc

SEQ ID NO: 185240 - RNA, 19 nt, Artificial Sequence
  Description of Artificial Sequence: Synthetic oligonucleotide
acagucgugugugggcucu

SEQ ID NO: 185241 - RNA, 19 nt, Artificial Sequence
  Description of Artificial Sequence: Synthetic oligonucleotide
gucggugcuuguugcauaa

SEQ ID NO: 185242 - RNA, 19 nt, Artificial Sequence
  Description of Artificial Sequence: Synthetic oligonucleotide
ggagagagugugcaagaaa

SEQ ID NO: 185243 - RNA, 19 nt, Artificial Sequence
  Description of Artificial Sequence: Synthetic oligonucleotide
agucggugcuuguugcaua

SEQ ID NO: 185244 - RNA, 19 nt, Artificial Sequence
  Description of Artificial Sequence: Synthetic oligonucleotide
aacggcgaaugcagagcug

SEQ ID NO: 185245 - RNA, 19 nt, Artificial Sequence
  Description of Artificial Sequence: Synthetic oligonucleotide
acucgcucgugaacaauga

SEQ ID NO: 185246 - RNA, 19 nt, Artificial Sequence
  Description of Artificial Sequence: Synthetic oligonucleotide
agagagugugcaagaaauu

SEQ ID NO: 185247 - RNA, 19 nt, Artificial Sequence
  Description of Artificial Sequence: Synthetic oligonucleotide
acggagagggaggucacaa

SEQ ID NO: 185248 - RNA, 19 nt, Artificial Sequence
  Description of Artificial Sequence: Synthetic oligonucleotide
cuccuaggacuuugauuuc

SEQ ID NO: 185249 - RNA, 19 nt, Artificial Sequence
  Description of Artificial Sequence: Synthetic oligonucleotide
caagucggugcuuguugca

SEQ ID NO: 185250 - RNA, 19 nt, Artificial Sequence
  Description of Artificial Sequence: Synthetic oligonucleotide
caaucgccuggcuccaaga

SEQ ID NO: 185251 - RNA, 19 nt, Artificial Sequence
  Description of Artificial Sequence: Synthetic oligonucleotide
guacuagacucauuugcuu

SEQ ID NO: 185252 - RNA, 19 nt, Artificial Sequence
  Description of Artificial Sequence: Synthetic oligonucleotide
aaagcccgguguaguuucu

SEQ ID NO: 185253 - RNA, 19 nt, Artificial Sequence
  Description of Artificial Sequence: Synthetic oligonucleotide
ggagugguggguaggucug

SEQ ID NO: 185254 - RNA, 19 nt, Artificial Sequence
  Description of Artificial Sequence: Synthetic oligonucleotide
cugguauuggccagaguau

SEQ ID NO: 185255 - RNA, 19 nt, Artificial Sequence
  Description of Artificial Sequence: Synthetic oligonucleotide
uggucuccacugaguacua

SEQ ID NO: 185256 - RNA, 19 nt, Artificial Sequence
  Description of Artificial Sequence: Synthetic oligonucleotide
agccauacugcgacaugcu

SEQ ID NO: 185257 - RNA, 19 nt, Artificial Sequence
  Description of Artificial Sequence: Synthetic oligonucleotide
ccaacggcgaaugcagagc

SEQ ID NO: 185258 - RNA, 19 nt, Artificial Sequence
  Description of Artificial Sequence: Synthetic oligonucleotide
cacuucagucauggagaag

SEQ ID NO: 185259 - RNA, 19 nt, Artificial Sequence
  Description of Artificial Sequence: Synthetic oligonucleotide
caacggcgaaugcagagcu

SEQ ID NO: 185260 - RNA, 19 nt, Artificial Sequence
  Description of Artificial Sequence: Synthetic oligonucleotide
caguagaaugugucucaaa

SEQ ID NO: 185261 - RNA, 19 nt, Artificial Sequence
  Description of Artificial Sequence: Synthetic oligonucleotide
cacgggauccugggaacac

SEQ ID NO: 185262 - RNA, 19 nt, Artificial Sequence
  Description of Artificial Sequence: Synthetic oligonucleotide
cacagucgugugugggcuc

SEQ ID NO: 185263 - RNA, 19 nt, Artificial Sequence
  Description of Artificial Sequence: Synthetic oligonucleotide
acgggauccugggaacacu

SEQ ID NO: 185264 - RNA, 19 nt, Artificial Sequence
  Description of Artificial Sequence: Synthetic oligonucleotide
gcgacaugcuugguagucc

SEQ ID NO: 185265 - RNA, 19 nt, Artificial Sequence
  Description of Artificial Sequence: Synthetic oligonucleotide
gcagcgaagcaagaauaca

SEQ ID NO: 185266 - RNA, 19 nt, Artificial Sequence
  Description of Artificial Sequence: Synthetic oligonucleotide
gucgugugugggcucucca

SEQ ID NO: 185267 - RNA, 19 nt, Artificial Sequence
  Description of Artificial Sequence: Synthetic oligonucleotide
  modified_base (5)..(5): a, c, u, g, unknown or other
cuuunuccauuaguggcau

SEQ ID NO: 185268 - RNA, 19 nt, Artificial Sequence
  Description of Artificial Sequence: Synthetic oligonucleotide
ggaucgaccugugcuugug

SEQ ID NO: 185269 - RNA, 19 nt, Artificial Sequence
  Description of Artificial Sequence: Synthetic oligonucleotide
uccaguacucuggguccaa

SEQ ID NO: 185270 - RNA, 19 nt, Artificial Sequence
  Description of Artificial Sequence: Synthetic oligonucleotide
gcaaaccgacaccuacuuc

SEQ ID NO: 185271 - RNA, 19 nt, Artificial Sequence
  Description of Artificial Sequence: Synthetic oligonucleotide
guggguaggucugcauguc

SEQ ID NO: 185272 - RNA, 19 nt, Artificial Sequence
  Description of Artificial Sequence: Synthetic oligonucleotide
guccaucacagucgugugu

SEQ ID NO: 185273 - RNA, 19 nt, Artificial Sequence
  Description of Artificial Sequence: Synthetic oligonucleotide
gugcuucaagguauggcua

SEQ ID NO: 185274 - RNA, 19 nt, Artificial Sequence
  Description of Artificial Sequence: Synthetic oligonucleotide
cuccgcaaguguggacacc

SEQ ID NO: 185275 - RNA, 19 nt, Artificial Sequence
  Description of Artificial Sequence: Synthetic oligonucleotide
ccacugaguacuagacuca

SEQ ID NO: 185276 - RNA, 19 nt, Artificial Sequence
  Description of Artificial Sequence: Synthetic oligonucleotide
cuagacucauuugcuuugu

SEQ ID NO: 185277 - RNA, 19 nt, Artificial Sequence
  Description of Artificial Sequence: Synthetic oligonucleotide
gcugacuagggccugccau

SEQ ID NO: 185278 - RNA, 19 nt, Artificial Sequence
  Description of Artificial Sequence: Synthetic oligonucleotide
ggucuccacugaguacuag

SEQ ID NO: 185279 - RNA, 19 nt, Artificial Sequence
  Description of Artificial Sequence: Synthetic oligonucleotide
ccaauguucuguuuugauu

SEQ ID NO: 185280 - RNA, 19 nt, Artificial Sequence
  Description of Artificial Sequence: Synthetic oligonucleotide
ccgacaccuacuucuacaa

SEQ ID NO: 185281 - RNA, 19 nt, Artificial Sequence
  Description of Artificial Sequence: Synthetic oligonucleotide
cccacgggauccugggaac

SEQ ID NO: 185282 - RNA, 19 nt, Artificial Sequence
  Description of Artificial Sequence: Synthetic oligonucleotide
ggaaaggugugaagucaaa

SEQ ID NO: 185283 - RNA, 19 nt, Artificial Sequence
  Description of Artificial Sequence: Synthetic oligonucleotide
ccagcuacaucaugccaaa

SEQ ID NO: 185284 - RNA, 19 nt, Artificial Sequence
  Description of Artificial Sequence: Synthetic oligonucleotide
gugcgccaccaaucgccug

SEQ ID NO: 185285 - RNA, 19 nt, Artificial Sequence
  Description of Artificial Sequence: Synthetic oligonucleotide
ggcaaaccgacaccuacuu

SEQ ID NO: 185286 - RNA, 19 nt, Artificial Sequence
  Description of Artificial Sequence: Synthetic oligonucleotide
cccgguguaguuucuccca

SEQ ID NO: 185287 - RNA, 19 nt, Artificial Sequence
  Description of Artificial Sequence: Synthetic oligonucleotide
gacuagggccugccauucu

SEQ ID NO: 185288 - RNA, 19 nt, Artificial Sequence
  Description of Artificial Sequence: Synthetic oligonucleotide
gcagaaggaucgaccugug

SEQ ID NO: 185289 - RNA, 19 nt, Artificial Sequence
  Description of Artificial Sequence: Synthetic oligonucleotide
ccacuccaaauggcaaaag

SEQ ID NO: 185290 - RNA, 19 nt, Artificial Sequence
  Description of Artificial Sequence: Synthetic oligonucleotide
auacugcgacaugcuuggu

SEQ ID NO: 185291 - RNA, 19 nt, Artificial Sequence
  Description of Artificial Sequence: Synthetic oligonucleotide
caaaagcccgguguaguuu

SEQ ID NO: 185292 - RNA, 19 nt, Artificial Sequence
  Description of Artificial Sequence: Synthetic oligonucleotide
ggagaucgaagaucauauu

SEQ ID NO: 185293 - RNA, 19 nt, Artificial Sequence
  Description of Artificial Sequence: Synthetic oligonucleotide
ggcacucgcucgugaacaa

SEQ ID NO: 185294 - RNA, 19 nt, Artificial Sequence
  Description of Artificial Sequence: Synthetic oligonucleotide
cacugaguacuagacucau

SEQ ID NO: 185295 - RNA, 19 nt, Artificial Sequence
  Description of Artificial Sequence: Synthetic oligonucleotide
cauuagguacugugccauu

SEQ ID NO: 185296 - RNA, 19 nt, Artificial Sequence
  Description of Artificial Sequence: Synthetic oligonucleotide
gcaaaagcccgguguaguu

SEQ ID NO: 185297 - RNA, 19 nt, Artificial Sequence
  Description of Artificial Sequence: Synthetic oligonucleotide
ggcgaaugcagagcugacu

SEQ ID NO: 185298 - RNA, 19 nt, Artificial Sequence
  Description of Artificial Sequence: Synthetic oligonucleotide
ccgcaaguguggacaccag

SEQ ID NO: 185299 - RNA, 19 nt, Artificial Sequence
  Description of Artificial Sequence: Synthetic oligonucleotide
caccaaucgccuggcucca

SEQ ID NO: 185300 - RNA, 19 nt, Artificial Sequence
  Description of Artificial Sequence: Synthetic oligonucleotide
cacggagagggaggucaca

SEQ ID NO: 185301 - RNA, 19 nt, Artificial Sequence
  Description of Artificial Sequence: Synthetic oligonucleotide
caucaagucggugcuuguu

SEQ ID NO: 185302 - RNA, 19 nt, Artificial Sequence
  Description of Artificial Sequence: Synthetic oligonucleotide
caccuacuucuacaauaau

SEQ ID NO: 185303 - RNA, 19 nt, Artificial Sequence
  Description of Artificial Sequence: Synthetic oligonucleotide
cugcgacaugcuugguagu

SEQ ID NO: 185304 - RNA, 19 nt, Artificial Sequence
  Description of Artificial Sequence: Synthetic oligonucleotide
accaaucgccuggcuccaa

SEQ ID NO: 185305 - RNA, 19 nt, Artificial Sequence
  Description of Artificial Sequence: Synthetic oligonucleotide
cgcagaaggaucgaccugu

SEQ ID NO: 185306 - RNA, 19 nt, Artificial Sequence
  Description of Artificial Sequence: Synthetic oligonucleotide
gcacggagagggaggucac

SEQ ID NO: 185307 - RNA, 19 nt, Artificial Sequence
  Description of Artificial Sequence: Synthetic oligonucleotide
cagcuacaucaugccaaaa

SEQ ID NO: 185308 - RNA, 19 nt, Artificial Sequence
  Description of Artificial Sequence: Synthetic oligonucleotide
cagucgugugugggcucuc

SEQ ID NO: 185309 - RNA, 19 nt, Artificial Sequence
  Description of Artificial Sequence: Synthetic oligonucleotide
cucugguauuggccagagu

SEQ ID NO: 185310 - RNA, 19 nt, Artificial Sequence
  Description of Artificial Sequence: Synthetic oligonucleotide
gcgccaccaaucgccuggc

SEQ ID NO: 185311 - RNA, 19 nt, Artificial Sequence
  Description of Artificial Sequence: Synthetic oligonucleotide
cggcgaaugcagagcugac

SEQ ID NO: 185312 - RNA, 19 nt, Artificial Sequence
  Description of Artificial Sequence: Synthetic oligonucleotide
gcucgugaacaaugaccau

SEQ ID NO: 185313 - RNA, 19 nt, Artificial Sequence
  Description of Artificial Sequence: Synthetic oligonucleotide
gccuggcuccaagacaagu

SEQ ID NO: 185314 - RNA, 19 nt, Artificial Sequence
  Description of Artificial Sequence: Synthetic oligonucleotide
gccuucgcagaaggaucga

SEQ ID NO: 185315 - RNA, 19 nt, Artificial Sequence
  Description of Artificial Sequence: Synthetic oligonucleotide
caugcucauucagcucuuu

SEQ ID NO: 185316 - RNA, 19 nt, Artificial Sequence
  Description of Artificial Sequence: Synthetic oligonucleotide
ccaucaagucggugcuugu

SEQ ID NO: 185317 - RNA, 19 nt, Artificial Sequence
  Description of Artificial Sequence: Synthetic oligonucleotide
ggaggagaucgaagaucau

SEQ ID NO: 185318 - RNA, 19 nt, Artificial Sequence
  Description of Artificial Sequence: Synthetic oligonucleotide
gcacucgcucgugaacaau

SEQ ID NO: 185319 - RNA, 19 nt, Artificial Sequence
  Description of Artificial Sequence: Synthetic oligonucleotide
ccgggagugguggguaggu

SEQ ID NO: 185320 - RNA, 19 nt, Artificial Sequence
  Description of Artificial Sequence: Synthetic oligonucleotide
cgugaacaaugaccauaau

SEQ ID NO: 185321 - RNA, 19 nt, Artificial Sequence
  Description of Artificial Sequence: Synthetic oligonucleotide
ccaguacucuggguccaau

SEQ ID NO: 185322 - RNA, 19 nt, Artificial Sequence
  Description of Artificial Sequence: Synthetic oligonucleotide
aauuuggccaucuugcggc

SEQ ID NO: 185323 - RNA, 19 nt, Artificial Sequence
  Description of Artificial Sequence: Synthetic oligonucleotide
uuccuuagcaauaaagugg

SEQ ID NO: 185324 - RNA, 19 nt, Artificial Sequence
  Description of Artificial Sequence: Synthetic oligonucleotide
auuacacacacacacacac

SEQ ID NO: 185325 - RNA, 19 nt, Artificial Sequence
  Description of Artificial Sequence: Synthetic oligonucleotide
ugugcaaucucacuugugg

SEQ ID NO: 185326 - RNA, 19 nt, Artificial Sequence
  Description of Artificial Sequence: Synthetic oligonucleotide
cuuagaaccaaccucuugg

SEQ ID NO: 185327 - RNA, 19 nt, Artificial Sequence
  Description of Artificial Sequence: Synthetic oligonucleotide
aaaggcgucuuguuuauuc

SEQ ID NO: 185328 - RNA, 19 nt, Artificial Sequence
  Description of Artificial Sequence: Synthetic oligonucleotide
augacuaaggugcuugugc

SEQ ID NO: 185329 - RNA, 19 nt, Artificial Sequence
  Description of Artificial Sequence: Synthetic oligonucleotide
acauuacacacacacacac

SEQ ID NO: 185330 - RNA, 19 nt, Artificial Sequence
  Description of Artificial Sequence: Synthetic oligonucleotide
aagcaaacacucuacgcac

SEQ ID NO: 185331 - RNA, 19 nt, Artificial Sequence
  Description of Artificial Sequence: Synthetic oligonucleotide
aaacacucuacgcacgcac

SEQ ID NO: 185332 - RNA, 19 nt, Artificial Sequence
  Description of Artificial Sequence: Synthetic oligonucleotide
uuuuacguaccacucggcg

SEQ ID NO: 185333 - RNA, 19 nt, Artificial Sequence
  Description of Artificial Sequence: Synthetic oligonucleotide
aauucugccagacuggaaa

SEQ ID NO: 185334 - RNA, 19 nt, Artificial Sequence
  Description of Artificial Sequence: Synthetic oligonucleotide
uuacguaccacucggcggg

SEQ ID NO: 185335 - RNA, 19 nt, Artificial Sequence
  Description of Artificial Sequence: Synthetic oligonucleotide
uauuaaauucagaaaccca

SEQ ID NO: 185336 - RNA, 19 nt, Artificial Sequence
  Description of Artificial Sequence: Synthetic oligonucleotide
uuaagaguggaaagaaaca

SEQ ID NO: 185337 - RNA, 19 nt, Artificial Sequence
  Description of Artificial Sequence: Synthetic oligonucleotide
ucuuguuuauucuuaucag

SEQ ID NO: 185338 - RNA, 19 nt, Artificial Sequence
  Description of Artificial Sequence: Synthetic oligonucleotide
ugacccgugacacaagggg

SEQ ID NO: 185339 - RNA, 19 nt, Artificial Sequence
  Description of Artificial Sequence: Synthetic oligonucleotide
aggggaguaacagaaaccc

SEQ ID NO: 185340 - RNA, 19 nt, Artificial Sequence
  Description of Artificial Sequence: Synthetic oligonucleotide
uuuacguaccacucggcgg

SEQ ID NO: 185341 - RNA, 19 nt, Artificial Sequence
  Description of Artificial Sequence: Synthetic oligonucleotide
uaguuaaugugcaaucuca

SEQ ID NO: 185342 - RNA, 19 nt, Artificial Sequence
  Description of Artificial Sequence: Synthetic oligonucleotide
uccuuagcaauaaagugga

SEQ ID NO: 185343 - RNA, 19 nt, Artificial Sequence
  Description of Artificial Sequence: Synthetic oligonucleotide
uccuguucugucuugaccc

SEQ ID NO: 185344 - RNA, 19 nt, Artificial Sequence
  Description of Artificial Sequence: Synthetic oligonucleotide
cuagugaguaguuuucucc

SEQ ID NO: 185345 - RNA, 19 nt, Artificial Sequence
  Description of Artificial Sequence: Synthetic oligonucleotide
uacacacacacacacacac

SEQ ID NO: 185346 - RNA, 19 nt, Artificial Sequence
  Description of Artificial Sequence: Synthetic oligonucleotide
uucucuaagccuuuugggc

SEQ ID NO: 185347 - RNA, 19 nt, Artificial Sequence
  Description of Artificial Sequence: Synthetic oligonucleotide
ucagauguuaagagggacc

SEQ ID NO: 185348 - RNA, 19 nt, Artificial Sequence
  Description of Artificial Sequence: Synthetic oligonucleotide
ugugaacacccuuaaacug

SEQ ID NO: 185349 - RNA, 19 nt, Artificial Sequence
  Description of Artificial Sequence: Synthetic oligonucleotide
agcuccacaaaccaccaac

SEQ ID NO: 185350 - RNA, 19 nt, Artificial Sequence
  Description of Artificial Sequence: Synthetic oligonucleotide
agaccuuucagucccgugg

SEQ ID NO: 185351 - RNA, 19 nt, Artificial Sequence
  Description of Artificial Sequence: Synthetic oligonucleotide
cucuaucuugcuaacgucg

SEQ ID NO: 185352 - RNA, 19 nt, Artificial Sequence
  Description of Artificial Sequence: Synthetic oligonucleotide
gagacauggaagcacuggg

SEQ ID NO: 185353 - RNA, 19 nt, Artificial Sequence
  Description of Artificial Sequence: Synthetic oligonucleotide
uuagaaccaaccucuuggg

SEQ ID NO: 185354 - RNA, 19 nt, Artificial Sequence
  Description of Artificial Sequence: Synthetic oligonucleotide
guuaagaguggaaagaaac

SEQ ID NO: 185355 - RNA, 19 nt, Artificial Sequence
  Description of Artificial Sequence: Synthetic oligonucleotide
uguggaaacaugcacccac

SEQ ID NO: 185356 - RNA, 19 nt, Artificial Sequence
  Description of Artificial Sequence: Synthetic oligonucleotide
gaauuuggccaucuugcgg

SEQ ID NO: 185357 - RNA, 19 nt, Artificial Sequence
  Description of Artificial Sequence: Synthetic oligonucleotide
ugagguaaggcacaacccu

SEQ ID NO: 185358 - RNA, 19 nt, Artificial Sequence
  Description of Artificial Sequence: Synthetic oligonucleotide
cuaacgucgcugaugaagc

SEQ ID NO: 185359 - RNA, 19 nt, Artificial Sequence
  Description of Artificial Sequence: Synthetic oligonucleotide
cuagaacagaaccagugag

SEQ ID NO: 185360 - RNA, 19 nt, Artificial Sequence
  Description of Artificial Sequence: Synthetic oligonucleotide
ucaacuccccuccacuugg

SEQ ID NO: 185361 - RNA, 19 nt, Artificial Sequence
  Description of Artificial Sequence: Synthetic oligonucleotide
uucaauauuucauucgcua

SEQ ID NO: 185362 - RNA, 19 nt, Artificial Sequence
  Description of Artificial Sequence: Synthetic oligonucleotide
uuagcuagggaugucaacu

SEQ ID NO: 185363 - RNA, 19 nt, Artificial Sequence
  Description of Artificial Sequence: Synthetic oligonucleotide
uggccuguccccaugagag

SEQ ID NO: 185364 - RNA, 19 nt, Artificial Sequence
  Description of Artificial Sequence: Synthetic oligonucleotide
uggggcauccgguuaaugg

SEQ ID NO: 185365 - RNA, 19 nt, Artificial Sequence
  Description of Artificial Sequence: Synthetic oligonucleotide
ucuaucuugcuaacgucgc

SEQ ID NO: 185366 - RNA, 19 nt, Artificial Sequence
  Description of Artificial Sequence: Synthetic oligonucleotide
uagagggguaugauggagg

SEQ ID NO: 185367 - RNA, 19 nt, Artificial Sequence
  Description of Artificial Sequence: Synthetic oligonucleotide
uugcuaacgucgcugauga

SEQ ID NO: 185368 - RNA, 19 nt, Artificial Sequence
  Description of Artificial Sequence: Synthetic oligonucleotide
agcagggugggauuuagag

SEQ ID NO: 185369 - RNA, 19 nt, Artificial Sequence
  Description of Artificial Sequence: Synthetic oligonucleotide
ucucuaagccuuuugggcu

SEQ ID NO: 185370 - RNA, 19 nt, Artificial Sequence
  Description of Artificial Sequence: Synthetic oligonucleotide
cacacacacacacacacag

SEQ ID NO: 185371 - RNA, 19 nt, Artificial Sequence
  Description of Artificial Sequence: Synthetic oligonucleotide
gauguuaagagggacccug

SEQ ID NO: 185372 - RNA, 19 nt, Artificial Sequence
  Description of Artificial Sequence: Synthetic oligonucleotide
caacaauggauguggaccc

SEQ ID NO: 185373 - RNA, 19 nt, Artificial Sequence
  Description of Artificial Sequence: Synthetic oligonucleotide
uugugcuuuagcuagggau

SEQ ID NO: 185374 - RNA, 19 nt, Artificial Sequence
  Description of Artificial Sequence: Synthetic oligonucleotide
ccaucagauguuaagaggg

SEQ ID NO: 185375 - RNA, 19 nt, Artificial Sequence
  Description of Artificial Sequence: Synthetic oligonucleotide
aaaugacguuaaugcaggg

SEQ ID NO: 185376 - RNA, 19 nt, Artificial Sequence
  Description of Artificial Sequence: Synthetic oligonucleotide
cuagaaugcagaguugggg

SEQ ID NO: 185377 - RNA, 19 nt, Artificial Sequence
  Description of Artificial Sequence: Synthetic oligonucleotide
auggcuaagguacuggggu

SEQ ID NO: 185378 - RNA, 19 nt, Artificial Sequence
  Description of Artificial Sequence: Synthetic oligonucleotide
aacuuggagagcuaacuuu

SEQ ID NO: 185379 - RNA, 19 nt, Artificial Sequence
  Description of Artificial Sequence: Synthetic oligonucleotide
ugggugugcacuugcacgg

SEQ ID NO: 185380 - RNA, 19 nt, Artificial Sequence
  Description of Artificial Sequence: Synthetic oligonucleotide
aaggugcagguacagacga

SEQ ID NO: 185381 - RNA, 19 nt, Artificial Sequence
  Description of Artificial Sequence: Synthetic oligonucleotide
ucaguucuagaauuucucu

SEQ ID NO: 185382 - RNA, 19 nt, Artificial Sequence
  Description of Artificial Sequence: Synthetic oligonucleotide
ugugcucacauauuaaauu

SEQ ID NO: 185383 - RNA, 19 nt, Artificial Sequence
  Description of Artificial Sequence: Synthetic oligonucleotide
ucuccaauccugcaacccc

SEQ ID NO: 185384 - RNA, 19 nt, Artificial Sequence
  Description of Artificial Sequence: Synthetic oligonucleotide
aaaugccuaagaggaaggg

SEQ ID NO: 185385 - RNA, 19 nt, Artificial Sequence
  Description of Artificial Sequence: Synthetic oligonucleotide
aaccccgugccucugaaga

SEQ ID NO: 185386 - RNA, 19 nt, Artificial Sequence
  Description of Artificial Sequence: Synthetic oligonucleotide
auaaaguggacagucccuc

SEQ ID NO: 185387 - RNA, 19 nt, Artificial Sequence
  Description of Artificial Sequence: Synthetic oligonucleotide
agcuuuuacguaccacucg

SEQ ID NO: 185388 - RNA, 19 nt, Artificial Sequence
  Description of Artificial Sequence: Synthetic oligonucleotide
uggaaaccuguccugagac

SEQ ID NO: 185389 - RNA, 19 nt, Artificial Sequence
  Description of Artificial Sequence: Synthetic oligonucleotide
acacucuacgcacgcacgc

SEQ ID NO: 185390 - RNA, 19 nt, Artificial Sequence
  Description of Artificial Sequence: Synthetic oligonucleotide
ugcuugccaaguuaccagg

SEQ ID NO: 185391 - RNA, 19 nt, Artificial Sequence
  Description of Artificial Sequence: Synthetic oligonucleotide
ucuuagaaccaaccucuug

SEQ ID NO: 185392 - RNA, 19 nt, Artificial Sequence
  Description of Artificial Sequence: Synthetic oligonucleotide
gaaaugccuaagaggaagg

SEQ ID NO: 185393 - RNA, 19 nt, Artificial Sequence
  Description of Artificial Sequence: Synthetic oligonucleotide
auuagagggugcugcuggc

SEQ ID NO: 185394 - RNA, 19 nt, Artificial Sequence
  Description of Artificial Sequence: Synthetic oligonucleotide
agucccguggagcugcccc

SEQ ID NO: 185395 - RNA, 19 nt, Artificial Sequence
  Description of Artificial Sequence: Synthetic oligonucleotide
uguaccccuggcuuuauac

SEQ ID NO: 185396 - RNA, 19 nt, Artificial Sequence
  Description of Artificial Sequence: Synthetic oligonucleotide
ugguuccacucauacaucc

SEQ ID NO: 185397 - RNA, 19 nt, Artificial Sequence
  Description of Artificial Sequence: Synthetic oligonucleotide
aguuaaugugcaaucucac

SEQ ID NO: 185398 - RNA, 19 nt, Artificial Sequence
  Description of Artificial Sequence: Synthetic oligonucleotide
aguuaccaggacauugugc

SEQ ID NO: 185399 - RNA, 19 nt, Artificial Sequence
  Description of Artificial Sequence: Synthetic oligonucleotide
agaguuaagaguggaaaga

SEQ ID NO: 185400 - RNA, 19 nt, Artificial Sequence
  Description of Artificial Sequence: Synthetic oligonucleotide
aaguuaccaggacauugug

SEQ ID NO: 185401 - RNA, 19 nt, Artificial Sequence
  Description of Artificial Sequence: Synthetic oligonucleotide
ugacuaaggugcuugugcu

SEQ ID NO: 185402 - RNA, 19 nt, Artificial Sequence
  Description of Artificial Sequence: Synthetic oligonucleotide
ggagagcuaacuuugagga

SEQ ID NO: 185403 - RNA, 19 nt, Artificial Sequence
  Description of Artificial Sequence: Synthetic oligonucleotide
uggugaaaugacguuaaug

SEQ ID NO: 185404 - RNA, 19 nt, Artificial Sequence
  Description of Artificial Sequence: Synthetic oligonucleotide
aggacauugugcuuuggga

SEQ ID NO: 185405 - RNA, 19 nt, Artificial Sequence
  Description of Artificial Sequence: Synthetic oligonucleotide
uguuaagagggacccuggc

SEQ ID NO: 185406 - RNA, 19 nt, Artificial Sequence
  Description of Artificial Sequence: Synthetic oligonucleotide
gcuuuuacguaccacucgg

SEQ ID NO: 185407 - RNA, 19 nt, Artificial Sequence
  Description of Artificial Sequence: Synthetic oligonucleotide
ugacguuaaugcaggggag

SEQ ID NO: 185408 - RNA, 19 nt, Artificial Sequence
  Description of Artificial Sequence: Synthetic oligonucleotide
aaggcgucuuguuuauucu

SEQ ID NO: 185409 - RNA, 19 nt, Artificial Sequence
  Description of Artificial Sequence: Synthetic oligonucleotide
cuugacccgugacacaagg

SEQ ID NO: 185410 - RNA, 19 nt, Artificial Sequence
  Description of Artificial Sequence: Synthetic oligonucleotide
cacccuuaaacuguagucc

SEQ ID NO: 185411 - RNA, 19 nt, Artificial Sequence
  Description of Artificial Sequence: Synthetic oligonucleotide
cacacacacacacaguuuc

SEQ ID NO: 185412 - RNA, 19 nt, Artificial Sequence
  Description of Artificial Sequence: Synthetic oligonucleotide
caccaucagauguuaagag

SEQ ID NO: 185413 - RNA, 19 nt, Artificial Sequence
  Description of Artificial Sequence: Synthetic oligonucleotide
gaaaccuguccugagacuc

SEQ ID NO: 185414 - RNA, 19 nt, Artificial Sequence
  Description of Artificial Sequence: Synthetic oligonucleotide
uaucuugcuaacgucgcug

SEQ ID NO: 185415 - RNA, 19 nt, Artificial Sequence
  Description of Artificial Sequence: Synthetic oligonucleotide
cauggcuaagguacugggg

SEQ ID NO: 185416 - RNA, 19 nt, Artificial Sequence
  Description of Artificial Sequence: Synthetic oligonucleotide
aguaguuaaugugcaaucu

SEQ ID NO: 185417 - RNA, 19 nt, Artificial Sequence
  Description of Artificial Sequence: Synthetic oligonucleotide
cuuaaacuguaguccuggg

SEQ ID NO: 185418 - RNA, 19 nt, Artificial Sequence
  Description of Artificial Sequence: Synthetic oligonucleotide
cagacaguagcucgugacg

SEQ ID NO: 185419 - RNA, 19 nt, Artificial Sequence
  Description of Artificial Sequence: Synthetic oligonucleotide
ugguuggauccacaggagc

SEQ ID NO: 185420 - RNA, 19 nt, Artificial Sequence
  Description of Artificial Sequence: Synthetic oligonucleotide
uagcucgugacguggcugg

SEQ ID NO: 185421 - RNA, 19 nt, Artificial Sequence
  Description of Artificial Sequence: Synthetic oligonucleotide
guaccucagacacauuccc

SEQ ID NO: 185422 - RNA, 19 nt, Artificial Sequence
  Description of Artificial Sequence: Synthetic oligonucleotide
ccacauuacacacacacac

SEQ ID NO: 185423 - RNA, 19 nt, Artificial Sequence
  Description of Artificial Sequence: Synthetic oligonucleotide
ucuccuagugaguaguuuu

SEQ ID NO: 185424 - RNA, 19 nt, Artificial Sequence
  Description of Artificial Sequence: Synthetic oligonucleotide
uuuagagggguaugaugga

SEQ ID NO: 185425 - RNA, 19 nt, Artificial Sequence
  Description of Artificial Sequence: Synthetic oligonucleotide
caaccucuugggcugaggg

SEQ ID NO: 185426 - RNA, 19 nt, Artificial Sequence
  Description of Artificial Sequence: Synthetic oligonucleotide
acucuacgcacgcacgcac

SEQ ID NO: 185427 - RNA, 19 nt, Artificial Sequence
  Description of Artificial Sequence: Synthetic oligonucleotide
gaagauggggccuccucug

SEQ ID NO: 185428 - RNA, 19 nt, Artificial Sequence
  Description of Artificial Sequence: Synthetic oligonucleotide
aacacucuacgcacgcacg

SEQ ID NO: 185429 - RNA, 19 nt, Artificial Sequence
  Description of Artificial Sequence: Synthetic oligonucleotide
uugacccgugacacaaggg

SEQ ID NO: 185430 - RNA, 19 nt, Artificial Sequence
  Description of Artificial Sequence: Synthetic oligonucleotide
ggaaaugccuaagaggaag

SEQ ID NO: 185431 - RNA, 19 nt, Artificial Sequence
  Description of Artificial Sequence: Synthetic oligonucleotide
uuuagcuagggaugucaac

SEQ ID NO: 185432 - RNA, 19 nt, Artificial Sequence
  Description of Artificial Sequence: Synthetic oligonucleotide
uuacacacacacacacaca

SEQ ID NO: 185433 - RNA, 19 nt, Artificial Sequence
  Description of Artificial Sequence: Synthetic oligonucleotide
gacacaaggggcaguggcg

SEQ ID NO: 185434 - RNA, 19 nt, Artificial Sequence
  Description of Artificial Sequence: Synthetic oligonucleotide
acccuuaaacuguaguccu

SEQ ID NO: 185435 - RNA, 19 nt, Artificial Sequence
  Description of Artificial Sequence: Synthetic oligonucleotide
acuuggagagcuaacuuug

SEQ ID NO: 185436 - RNA, 19 nt, Artificial Sequence
  Description of Artificial Sequence: Synthetic oligonucleotide
uggagucccaagcagccac

SEQ ID NO: 185437 - RNA, 19 nt, Artificial Sequence
  Description of Artificial Sequence: Synthetic oligonucleotide
ggcgcuuuuggagacaugg

SEQ ID NO: 185438 - RNA, 19 nt, Artificial Sequence
  Description of Artificial Sequence: Synthetic oligonucleotide
guacagacgagagggacag

SEQ ID NO: 185439 - RNA, 19 nt, Artificial Sequence
  Description of Artificial Sequence: Synthetic oligonucleotide
acuugcacggaguccaacu

SEQ ID NO: 185440 - RNA, 19 nt, Artificial Sequence
  Description of Artificial Sequence: Synthetic oligonucleotide
aggaaggcgcuuuuggaga

SEQ ID NO: 185441 - RNA, 19 nt, Artificial Sequence
  Description of Artificial Sequence: Synthetic oligonucleotide
ucuacgcacgcacgcacgc

SEQ ID NO: 185442 - RNA, 19 nt, Artificial Sequence
  Description of Artificial Sequence: Synthetic oligonucleotide
ugugcacuugcacggaguc

SEQ ID NO: 185443 - RNA, 19 nt, Artificial Sequence
  Description of Artificial Sequence: Synthetic oligonucleotide
ccugagguaaggcacaacc

SEQ ID NO: 185444 - RNA, 19 nt, Artificial Sequence
  Description of Artificial Sequence: Synthetic oligonucleotide
ugcucccugguuccgaccc

SEQ ID NO: 185445 - RNA, 19 nt, Artificial Sequence
  Description of Artificial Sequence: Synthetic oligonucleotide
uaccccuggcuuuauaccu

SEQ ID NO: 185446 - RNA, 19 nt, Artificial Sequence
  Description of Artificial Sequence: Synthetic oligonucleotide
ugaguaguuuucuccccug

SEQ ID NO: 185447 - RNA, 19 nt, Artificial Sequence
  Description of Artificial Sequence: Synthetic oligonucleotide
agggcauuggcacuucaca

SEQ ID NO: 185448 - RNA, 19 nt, Artificial Sequence
  Description of Artificial Sequence: Synthetic oligonucleotide
uagcuaucacccucuacca

SEQ ID NO: 185449 - RNA, 19 nt, Artificial Sequence
  Description of Artificial Sequence: Synthetic oligonucleotide
uuuguuacaaaggcgucuu

SEQ ID NO: 185450 - RNA, 19 nt, Artificial Sequence
  Description of Artificial Sequence: Synthetic oligonucleotide
ugcacggaguccaacuccu

SEQ ID NO: 185451 - RNA, 19 nt, Artificial Sequence
  Description of Artificial Sequence: Synthetic oligonucleotide
aagaccuuucagucccgug

SEQ ID NO: 185452 - RNA, 19 nt, Artificial Sequence
  Description of Artificial Sequence: Synthetic oligonucleotide
acaguagcucgugacgugg

SEQ ID NO: 185453 - RNA, 19 nt, Artificial Sequence
  Description of Artificial Sequence: Synthetic oligonucleotide
gaugucaacuccccuccac

SEQ ID NO: 185454 - RNA, 19 nt, Artificial Sequence
  Description of Artificial Sequence: Synthetic oligonucleotide
aacaccacuccucuccgua

SEQ ID NO: 185455 - RNA, 19 nt, Artificial Sequence
  Description of Artificial Sequence: Synthetic oligonucleotide
cuuuuacguaccacucggc

SEQ ID NO: 185456 - RNA, 19 nt, Artificial Sequence
  Description of Artificial Sequence: Synthetic oligonucleotide
aaccaccaacaauggaugu

SEQ ID NO: 185457 - RNA, 19 nt, Artificial Sequence
  Description of Artificial Sequence: Synthetic oligonucleotide
augccuaagaggaagggga

SEQ ID NO: 185458 - RNA, 19 nt, Artificial Sequence
  Description of Artificial Sequence: Synthetic oligonucleotide
agcugguuggauccacagg

SEQ ID NO: 185459 - RNA, 19 nt, Artificial Sequence
  Description of Artificial Sequence: Synthetic oligonucleotide
cucgccugcccacaggagg

SEQ ID NO: 185460 - RNA, 19 nt, Artificial Sequence
  Description of Artificial Sequence: Synthetic oligonucleotide
guuaagagggacccuggca

SEQ ID NO: 185461 - RNA, 19 nt, Artificial Sequence
  Description of Artificial Sequence: Synthetic oligonucleotide
ugaacacccuuaaacugua

SEQ ID NO: 185462 - RNA, 19 nt, Artificial Sequence
  Description of Artificial Sequence: Synthetic oligonucleotide
uaugacuaaggugcuugug

SEQ ID NO: 185463 - RNA, 19 nt, Artificial Sequence
  Description of Artificial Sequence: Synthetic oligonucleotide
cuugcuaacgucgcugaug

SEQ ID NO: 185464 - RNA, 19 nt, Artificial Sequence
  Description of Artificial Sequence: Synthetic oligonucleotide
gcuaacgucgcugaugaag

SEQ ID NO: 185465 - RNA, 19 nt, Artificial Sequence
  Description of Artificial Sequence: Synthetic oligonucleotide
gguaugacuaaggugcuug

SEQ ID NO: 185466 - RNA, 19 nt, Artificial Sequence
  Description of Artificial Sequence: Synthetic oligonucleotide
ggaggggacagacaguagc

SEQ ID NO: 185467 - RNA, 19 nt, Artificial Sequence
  Description of Artificial Sequence: Synthetic oligonucleotide
acagacgagagggacagga

SEQ ID NO: 185468 - RNA, 19 nt, Artificial Sequence
  Description of Artificial Sequence: Synthetic oligonucleotide
uccguacaguaguuaaugu

SEQ ID NO: 185469 - RNA, 19 nt, Artificial Sequence
  Description of Artificial Sequence: Synthetic oligonucleotide
cuccguacaguaguuaaug

SEQ ID NO: 185470 - RNA, 19 nt, Artificial Sequence
  Description of Artificial Sequence: Synthetic oligonucleotide
agagggucaguucuagaau

SEQ ID NO: 185471 - RNA, 19 nt, Artificial Sequence
  Description of Artificial Sequence: Synthetic oligonucleotide
uuacuaagucugggcaggg

SEQ ID NO: 185472 - RNA, 19 nt, Artificial Sequence
  Description of Artificial Sequence: Synthetic oligonucleotide
acaccacuccucuccguac

SEQ ID NO: 185473 - RNA, 19 nt, Artificial Sequence
  Description of Artificial Sequence: Synthetic oligonucleotide
acacacacacacaguuucc

SEQ ID NO: 185474 - RNA, 19 nt, Artificial Sequence
  Description of Artificial Sequence: Synthetic oligonucleotide
gagguaaggcacaacccug

SEQ ID NO: 185475 - RNA, 19 nt, Artificial Sequence
  Description of Artificial Sequence: Synthetic oligonucleotide
agcuaucacccucuaccag

SEQ ID NO: 185476 - RNA, 19 nt, Artificial Sequence
  Description of Artificial Sequence: Synthetic oligonucleotide
uggagaguuaagaguggaa

SEQ ID NO: 185477 - RNA, 19 nt, Artificial Sequence
  Description of Artificial Sequence: Synthetic oligonucleotide
guaccccuggcuuuauacc

SEQ ID NO: 185478 - RNA, 19 nt, Artificial Sequence
  Description of Artificial Sequence: Synthetic oligonucleotide
gauggugaaaugacguuaa

SEQ ID NO: 185479 - RNA, 19 nt, Artificial Sequence
  Description of Artificial Sequence: Synthetic oligonucleotide
auguccggcucuaucuugc

SEQ ID NO: 185480 - RNA, 19 nt, Artificial Sequence
  Description of Artificial Sequence: Synthetic oligonucleotide
uguaagcacuggagguacc

SEQ ID NO: 185481 - RNA, 19 nt, Artificial Sequence
  Description of Artificial Sequence: Synthetic oligonucleotide
caugcacccacauuacaca

SEQ ID NO: 185482 - RNA, 19 nt, Artificial Sequence
  Description of Artificial Sequence: Synthetic oligonucleotide
aucuugcuaacgucgcuga

SEQ ID NO: 185483 - RNA, 19 nt, Artificial Sequence
  Description of Artificial Sequence: Synthetic oligonucleotide
gacaguagcucgugacgug

SEQ ID NO: 185484 - RNA, 19 nt, Artificial Sequence
  Description of Artificial Sequence: Synthetic oligonucleotide
uguccgcucugacaugcug

SEQ ID NO: 185485 - RNA, 19 nt, Artificial Sequence
  Description of Artificial Sequence: Synthetic oligonucleotide
uucugucuugacccgugac

SEQ ID NO: 185486 - RNA, 19 nt, Artificial Sequence
  Description of Artificial Sequence: Synthetic oligonucleotide
gacguggcuggcugucucg

SEQ ID NO: 185487 - RNA, 19 nt, Artificial Sequence
  Description of Artificial Sequence: Synthetic oligonucleotide
cacacacacacaguuuccc

SEQ ID NO: 185488 - RNA, 19 nt, Artificial Sequence
  Description of Artificial Sequence: Synthetic oligonucleotide
gagguaccugggcuguccg

SEQ ID NO: 185489 - RNA, 19 nt, Artificial Sequence
  Description of Artificial Sequence: Synthetic oligonucleotide
guuggauccacaggagccc

SEQ ID NO: 185490 - RNA, 19 nt, Artificial Sequence
  Description of Artificial Sequence: Synthetic oligonucleotide
gguuggauccacaggagcc

SEQ ID NO: 185491 - RNA, 19 nt, Artificial Sequence
  Description of Artificial Sequence: Synthetic oligonucleotide
agauggugaaaugacguua

SEQ ID NO: 185492 - RNA, 19 nt, Artificial Sequence
  Description of Artificial Sequence: Synthetic oligonucleotide
cuccuagugaguaguuuuc

SEQ ID NO: 185493 - RNA, 19 nt, Artificial Sequence
  Description of Artificial Sequence: Synthetic oligonucleotide
cucuacgcacgcacgcacg

SEQ ID NO: 185494 - RNA, 19 nt, Artificial Sequence
  Description of Artificial Sequence: Synthetic oligonucleotide
ucacugacucucaggguuc

SEQ ID NO: 185495 - RNA, 19 nt, Artificial Sequence
  Description of Artificial Sequence: Synthetic oligonucleotide
cuaccacaagaccuuucag

SEQ ID NO: 185496 - RNA, 19 nt, Artificial Sequence
  Description of Artificial Sequence: Synthetic oligonucleotide
gcagauuagagggugcugc

SEQ ID NO: 185497 - RNA, 19 nt, Artificial Sequence
  Description of Artificial Sequence: Synthetic oligonucleotide
agcaaacacucuacgcacg

SEQ ID NO: 185498 - RNA, 19 nt, Artificial Sequence
  Description of Artificial Sequence: Synthetic oligonucleotide
cagagggucaguucuagaa

SEQ ID NO: 185499 - RNA, 19 nt, Artificial Sequence
  Description of Artificial Sequence: Synthetic oligonucleotide
ucuugacccgugacacaag

SEQ ID NO: 185500 - RNA, 19 nt, Artificial Sequence
  Description of Artificial Sequence: Synthetic oligonucleotide
cacauuacacacacacaca

SEQ ID NO: 185501 - RNA, 19 nt, Artificial Sequence
  Description of Artificial Sequence: Synthetic oligonucleotide
ugccuaagaggaaggggaa

SEQ ID NO: 185502 - RNA, 19 nt, Artificial Sequence
  Description of Artificial Sequence: Synthetic oligonucleotide
ucgccugcccacaggagga

SEQ ID NO: 185503 - RNA, 19 nt, Artificial Sequence
  Description of Artificial Sequence: Synthetic oligonucleotide
agguaccugggcuguccgc

SEQ ID NO: 185504 - RNA, 19 nt, Artificial Sequence
  Description of Artificial Sequence: Synthetic oligonucleotide
uacaggacucugaggcucu

SEQ ID NO: 185505 - RNA, 19 nt, Artificial Sequence
  Description of Artificial Sequence: Synthetic oligonucleotide
cugugaacacccuuaaacu

SEQ ID NO: 185506 - RNA, 19 nt, Artificial Sequence
  Description of Artificial Sequence: Synthetic oligonucleotide
aagcugugcuccaugcuca

SEQ ID NO: 185507 - RNA, 19 nt, Artificial Sequence
  Description of Artificial Sequence: Synthetic oligonucleotide
uagcuagggaugucaacuc

SEQ ID NO: 185508 - RNA, 19 nt, Artificial Sequence
  Description of Artificial Sequence: Synthetic oligonucleotide
ggcacugggacugagcccc

SEQ ID NO: 185509 - RNA, 19 nt, Artificial Sequence
  Description of Artificial Sequence: Synthetic oligonucleotide
cugguuggauccacaggag

SEQ ID NO: 185510 - RNA, 19 nt, Artificial Sequence
  Description of Artificial Sequence: Synthetic oligonucleotide
gaagaacucagugcccuuc

SEQ ID NO: 185511 - RNA, 19 nt, Artificial Sequence
  Description of Artificial Sequence: Synthetic oligonucleotide
cauuacacacacacacaca

SEQ ID NO: 185512 - RNA, 19 nt, Artificial Sequence
  Description of Artificial Sequence: Synthetic oligonucleotide
agggucggaugggagaagg

SEQ ID NO: 185513 - RNA, 19 nt, Artificial Sequence
  Description of Artificial Sequence: Synthetic oligonucleotide
ggguaccucagacacauuc

SEQ ID NO: 185514 - RNA, 19 nt, Artificial Sequence
  Description of Artificial Sequence: Synthetic oligonucleotide
gacccgugacacaaggggc

SEQ ID NO: 185515 - RNA, 19 nt, Artificial Sequence
  Description of Artificial Sequence: Synthetic oligonucleotide
gaccuuucagucccgugga

SEQ ID NO: 185516 - RNA, 19 nt, Artificial Sequence
  Description of Artificial Sequence: Synthetic oligonucleotide
uccaccccgugacagguuc

SEQ ID NO: 185517 - RNA, 19 nt, Artificial Sequence
  Description of Artificial Sequence: Synthetic oligonucleotide
gcaggggaguaacagaaac

SEQ ID NO: 185518 - RNA, 19 nt, Artificial Sequence
  Description of Artificial Sequence: Synthetic oligonucleotide
caagagugggcucagccaa

SEQ ID NO: 185519 - RNA, 19 nt, Artificial Sequence
  Description of Artificial Sequence: Synthetic oligonucleotide
cauguccggcucuaucuug

SEQ ID NO: 185520 - RNA, 19 nt, Artificial Sequence
  Description of Artificial Sequence: Synthetic oligonucleotide
agccuagugucugcgcuac

SEQ ID NO: 185521 - RNA, 19 nt, Artificial Sequence
  Description of Artificial Sequence: Synthetic oligonucleotide
guacaguaguuaaugugca

SEQ ID NO: 185522 - RNA, 19 nt, Artificial Sequence
  Description of Artificial Sequence: Synthetic oligonucleotide
aacaauggauguggacccu

SEQ ID NO: 185523 - RNA, 19 nt, Artificial Sequence
  Description of Artificial Sequence: Synthetic oligonucleotide
cugaccuccagaggagggg

SEQ ID NO: 185524 - RNA, 19 nt, Artificial Sequence
  Description of Artificial Sequence: Synthetic oligonucleotide
aguagcucgugacguggcu

SEQ ID NO: 185525 - RNA, 19 nt, Artificial Sequence
  Description of Artificial Sequence: Synthetic oligonucleotide
uuggugcacaugucagcug

SEQ ID NO: 185526 - RNA, 19 nt, Artificial Sequence
  Description of Artificial Sequence: Synthetic oligonucleotide
gcuagaacagaaccaguga

SEQ ID NO: 185527 - RNA, 19 nt, Artificial Sequence
  Description of Artificial Sequence: Synthetic oligonucleotide
aguccaacuccuguucugu

SEQ ID NO: 185528 - RNA, 19 nt, Artificial Sequence
  Description of Artificial Sequence: Synthetic oligonucleotide
cccuaguugucuuuccugc

SEQ ID NO: 185529 - RNA, 19 nt, Artificial Sequence
  Description of Artificial Sequence: Synthetic oligonucleotide
gaaugcagaguuggggaga

SEQ ID NO: 185530 - RNA, 19 nt, Artificial Sequence
  Description of Artificial Sequence: Synthetic oligonucleotide
gguaccucagacacauucc

SEQ ID NO: 185531 - RNA, 19 nt, Artificial Sequence
  Description of Artificial Sequence: Synthetic oligonucleotide
caucagauguuaagaggga

SEQ ID NO: 185532 - RNA, 19 nt, Artificial Sequence
  Description of Artificial Sequence: Synthetic oligonucleotide
caguucuagaauuucucua

SEQ ID NO: 185533 - RNA, 19 nt, Artificial Sequence
  Description of Artificial Sequence: Synthetic oligonucleotide
agcugcuugccaaguuacc

SEQ ID NO: 185534 - RNA, 19 nt, Artificial Sequence
  Description of Artificial Sequence: Synthetic oligonucleotide
ccguacaguaguuaaugug

SEQ ID NO: 185535 - RNA, 19 nt, Artificial Sequence
  Description of Artificial Sequence: Synthetic oligonucleotide
acaauggauguggacccug

SEQ ID NO: 185536 - RNA, 19 nt, Artificial Sequence
  Description of Artificial Sequence: Synthetic oligonucleotide
agagcagggugggauuuag

SEQ ID NO: 185537 - RNA, 19 nt, Artificial Sequence
  Description of Artificial Sequence: Synthetic oligonucleotide
cucuccguacaguaguuaa

SEQ ID NO: 185538 - RNA, 19 nt, Artificial Sequence
  Description of Artificial Sequence: Synthetic oligonucleotide
cuuucagucccguggagcu

SEQ ID NO: 185539 - RNA, 19 nt, Artificial Sequence
  Description of Artificial Sequence: Synthetic oligonucleotide
acaugcugguuccacucau

SEQ ID NO: 185540 - RNA, 19 nt, Artificial Sequence
  Description of Artificial Sequence: Synthetic oligonucleotide
uggcagauuagagggugcu

SEQ ID NO: 185541 - RNA, 19 nt, Artificial Sequence
  Description of Artificial Sequence: Synthetic oligonucleotide
cuugagcucugcccauccc

SEQ ID NO: 185542 - RNA, 19 nt, Artificial Sequence
  Description of Artificial Sequence: Synthetic oligonucleotide
cuuuagcuagggaugucaa

SEQ ID NO: 185543 - RNA, 19 nt, Artificial Sequence
  Description of Artificial Sequence: Synthetic oligonucleotide
cauccgguuaauggccagg

SEQ ID NO: 185544 - RNA, 19 nt, Artificial Sequence
  Description of Artificial Sequence: Synthetic oligonucleotide
acacaaggggcaguggcgu

SEQ ID NO: 185545 - RNA, 19 nt, Artificial Sequence
  Description of Artificial Sequence: Synthetic oligonucleotide
ccauggcuaagguacuggg

SEQ ID NO: 185546 - RNA, 19 nt, Artificial Sequence
  Description of Artificial Sequence: Synthetic oligonucleotide
caguagcucgugacguggc

SEQ ID NO: 185547 - RNA, 19 nt, Artificial Sequence
  Description of Artificial Sequence: Synthetic oligonucleotide
gugaacacccuuaaacugu

SEQ ID NO: 185548 - RNA, 19 nt, Artificial Sequence
  Description of Artificial Sequence: Synthetic oligonucleotide
acagagggucaguucuaga

SEQ ID NO: 185549 - RNA, 19 nt, Artificial Sequence
  Description of Artificial Sequence: Synthetic oligonucleotide
acggaguccaacuccuguu

SEQ ID NO: 185550 - RNA, 19 nt, Artificial Sequence
  Description of Artificial Sequence: Synthetic oligonucleotide
gccuuuugggcuuguuucc

SEQ ID NO: 185551 - RNA, 19 nt, Artificial Sequence
  Description of Artificial Sequence: Synthetic oligonucleotide
agucugggcagggagcaca

SEQ ID NO: 185552 - RNA, 19 nt, Artificial Sequence
  Description of Artificial Sequence: Synthetic oligonucleotide
ugccccuaguugucuuucc

SEQ ID NO: 185553 - RNA, 19 nt, Artificial Sequence
  Description of Artificial Sequence: Synthetic oligonucleotide
gagcuaacuuugaggaaga

SEQ ID NO: 185554 - RNA, 19 nt, Artificial Sequence
  Description of Artificial Sequence: Synthetic oligonucleotide
uacuaagucugggcaggga

SEQ ID NO: 185555 - RNA, 19 nt, Artificial Sequence
  Description of Artificial Sequence: Synthetic oligonucleotide
aaauucugccagacuggaa

SEQ ID NO: 185556 - RNA, 19 nt, Artificial Sequence
  Description of Artificial Sequence: Synthetic oligonucleotide
uuggccacccauggcuaag

SEQ ID NO: 185557 - RNA, 19 nt, Artificial Sequence
  Description of Artificial Sequence: Synthetic oligonucleotide
agaaacccaagagcuugcu

SEQ ID NO: 185558 - RNA, 19 nt, Artificial Sequence
  Description of Artificial Sequence: Synthetic oligonucleotide
gaggugcuuggaaccaaug

SEQ ID NO: 185559 - RNA, 19 nt, Artificial Sequence
  Description of Artificial Sequence: Synthetic oligonucleotide
cccacucuaccacaagacc

SEQ ID NO: 185560 - RNA, 19 nt, Artificial Sequence
  Description of Artificial Sequence: Synthetic oligonucleotide
uccgguuaauggccagguc

SEQ ID NO: 185561 - RNA, 19 nt, Artificial Sequence
  Description of Artificial Sequence: Synthetic oligonucleotide
gaacacccuuaaacuguag

SEQ ID NO: 185562 - RNA, 19 nt, Artificial Sequence
  Description of Artificial Sequence: Synthetic oligonucleotide
gaccugugaacacccuuaa

SEQ ID NO: 185563 - RNA, 19 nt, Artificial Sequence
  Description of Artificial Sequence: Synthetic oligonucleotide
ggcucuaucuugcuaacgu

SEQ ID NO: 185564 - RNA, 19 nt, Artificial Sequence
  Description of Artificial Sequence: Synthetic oligonucleotide
ucugcgcuacaggacucug

SEQ ID NO: 185565 - RNA, 19 nt, Artificial Sequence
  Description of Artificial Sequence: Synthetic oligonucleotide
cuaccccagccccaaggug

SEQ ID NO: 185566 - RNA, 19 nt, Artificial Sequence
  Description of Artificial Sequence: Synthetic oligonucleotide
acugcucucuuagaaccaa

SEQ ID NO: 185567 - RNA, 19 nt, Artificial Sequence
  Description of Artificial Sequence: Synthetic oligonucleotide
gguuaauggccaggucugg

SEQ ID NO: 185568 - RNA, 19 nt, Artificial Sequence
  Description of Artificial Sequence: Synthetic oligonucleotide
cacacacacacacacaguu

SEQ ID NO: 185569 - RNA, 19 nt, Artificial Sequence
  Description of Artificial Sequence: Synthetic oligonucleotide
gacugagccccuguggaaa

SEQ ID NO: 185570 - RNA, 19 nt, Artificial Sequence
  Description of Artificial Sequence: Synthetic oligonucleotide
acuccucuccguacaguag

SEQ ID NO: 185571 - RNA, 19 nt, Artificial Sequence
  Description of Artificial Sequence: Synthetic oligonucleotide
gugaguaguuuucuccccu

SEQ ID NO: 185572 - RNA, 19 nt, Artificial Sequence
  Description of Artificial Sequence: Synthetic oligonucleotide
agauguuaagagggacccu

SEQ ID NO: 185573 - RNA, 19 nt, Artificial Sequence
  Description of Artificial Sequence: Synthetic oligonucleotide
aggcgucuuguuuauucuu

SEQ ID NO: 185574 - RNA, 19 nt, Artificial Sequence
  Description of Artificial Sequence: Synthetic oligonucleotide
gagauggugaaaugacguu

SEQ ID NO: 185575 - RNA, 19 nt, Artificial Sequence
  Description of Artificial Sequence: Synthetic oligonucleotide
uguccggcucuaucuugcu

SEQ ID NO: 185576 - RNA, 19 nt, Artificial Sequence
  Description of Artificial Sequence: Synthetic oligonucleotide
gggagggguccugagaacc

SEQ ID NO: 185577 - RNA, 19 nt, Artificial Sequence
  Description of Artificial Sequence: Synthetic oligonucleotide
ccuagugaguaguuuucuc

SEQ ID NO: 185578 - RNA, 19 nt, Artificial Sequence
  Description of Artificial Sequence: Synthetic oligonucleotide
gacguuaaugcaggggagu

SEQ ID NO: 185579 - RNA, 19 nt, Artificial Sequence
  Description of Artificial Sequence: Synthetic oligonucleotide
ccuagugucugcgcuacag

SEQ ID NO: 185580 - RNA, 19 nt, Artificial Sequence
  Description of Artificial Sequence: Synthetic oligonucleotide
cccgugacagguuccgagg

SEQ ID NO: 185581 - RNA, 19 nt, Artificial Sequence
  Description of Artificial Sequence: Synthetic oligonucleotide
gcuuuagcuagggauguca

SEQ ID NO: 185582 - RNA, 19 nt, Artificial Sequence
  Description of Artificial Sequence: Synthetic oligonucleotide
acguuaaugcaggggagua

SEQ ID NO: 185583 - RNA, 19 nt, Artificial Sequence
  Description of Artificial Sequence: Synthetic oligonucleotide
ccccuuacuaagucugggc

SEQ ID NO: 185584 - RNA, 19 nt, Artificial Sequence
  Description of Artificial Sequence: Synthetic oligonucleotide
gcucuaucuugcuaacguc

SEQ ID NO: 185585 - RNA, 19 nt, Artificial Sequence
  Description of Artificial Sequence: Synthetic oligonucleotide
gugacacaaggggcagugg

SEQ ID NO: 185586 - RNA, 19 nt, Artificial Sequence
  Description of Artificial Sequence: Synthetic oligonucleotide
ugagccccuguggaaacau

SEQ ID NO: 185587 - RNA, 19 nt, Artificial Sequence
  Description of Artificial Sequence: Synthetic oligonucleotide
caacuccccuccacuuggc

SEQ ID NO: 185588 - RNA, 19 nt, Artificial Sequence
  Description of Artificial Sequence: Synthetic oligonucleotide
cuugcuccuggagaguuaa

SEQ ID NO: 185589 - RNA, 19 nt, Artificial Sequence
  Description of Artificial Sequence: Synthetic oligonucleotide
caccccgugacagguuccg

SEQ ID NO: 185590 - RNA, 19 nt, Artificial Sequence
  Description of Artificial Sequence: Synthetic oligonucleotide
gggcaagcagcugaccucc

SEQ ID NO: 185591 - RNA, 19 nt, Artificial Sequence
  Description of Artificial Sequence: Synthetic oligonucleotide
aucccaccucuccaauccu

SEQ ID NO: 185592 - RNA, 19 nt, Artificial Sequence
  Description of Artificial Sequence: Synthetic oligonucleotide
gguacagacgagagggaca

SEQ ID NO: 185593 - RNA, 19 nt, Artificial Sequence
  Description of Artificial Sequence: Synthetic oligonucleotide
accugugaacacccuuaaa

SEQ ID NO: 185594 - RNA, 19 nt, Artificial Sequence
  Description of Artificial Sequence: Synthetic oligonucleotide
uacagacgagagggacagg

SEQ ID NO: 185595 - RNA, 19 nt, Artificial Sequence
  Description of Artificial Sequence: Synthetic oligonucleotide
acacacacacacacacaca

SEQ ID NO: 185596 - RNA, 19 nt, Artificial Sequence
  Description of Artificial Sequence: Synthetic oligonucleotide
gcauggauggguggguuug

SEQ ID NO: 185597 - RNA, 19 nt, Artificial Sequence
  Description of Artificial Sequence: Synthetic oligonucleotide
cccuuacuaagucugggca

SEQ ID NO: 185598 - RNA, 19 nt, Artificial Sequence
  Description of Artificial Sequence: Synthetic oligonucleotide
acacacacacacacacagu

SEQ ID NO: 185599 - RNA, 19 nt, Artificial Sequence
  Description of Artificial Sequence: Synthetic oligonucleotide
uugccccuaguugucuuuc

SEQ ID NO: 185600 - RNA, 19 nt, Artificial Sequence
  Description of Artificial Sequence: Synthetic oligonucleotide
ccgugacagguuccgaggg

SEQ ID NO: 185601 - RNA, 19 nt, Artificial Sequence
  Description of Artificial Sequence: Synthetic oligonucleotide
cgguuaauggccaggucug

SEQ ID NO: 185602 - RNA, 19 nt, Artificial Sequence
  Description of Artificial Sequence: Synthetic oligonucleotide
ccucaccuaccccagcccc

SEQ ID NO: 185603 - RNA, 19 nt, Artificial Sequence
  Description of Artificial Sequence: Synthetic oligonucleotide
cucaccuaccccagcccca

SEQ ID NO: 185604 - RNA, 19 nt, Artificial Sequence
  Description of Artificial Sequence: Synthetic oligonucleotide
gugcacuugcacggagucc

SEQ ID NO: 185605 - RNA, 19 nt, Artificial Sequence
  Description of Artificial Sequence: Synthetic oligonucleotide
guaagcacuggagguaccu

SEQ ID NO: 185606 - RNA, 19 nt, Artificial Sequence
  Description of Artificial Sequence: Synthetic oligonucleotide
ucgugacguggcuggcugu

SEQ ID NO: 185607 - RNA, 19 nt, Artificial Sequence
  Description of Artificial Sequence: Synthetic oligonucleotide
acccauggcuaagguacug

SEQ ID NO: 185608 - RNA, 19 nt, Artificial Sequence
  Description of Artificial Sequence: Synthetic oligonucleotide
ugcuuuagcuagggauguc

SEQ ID NO: 185609 - RNA, 19 nt, Artificial Sequence
  Description of Artificial Sequence: Synthetic oligonucleotide
acacacacacacacaguuu

SEQ ID NO: 185610 - RNA, 19 nt, Artificial Sequence
  Description of Artificial Sequence: Synthetic oligonucleotide
ggccuguccccaugagagg

SEQ ID NO: 185611 - RNA, 19 nt, Artificial Sequence
  Description of Artificial Sequence: Synthetic oligonucleotide
ggauguggacccugcccug

SEQ ID NO: 185612 - RNA, 19 nt, Artificial Sequence
  Description of Artificial Sequence: Synthetic oligonucleotide
cugcucccugguuccgacc

SEQ ID NO: 185613 - RNA, 19 nt, Artificial Sequence
  Description of Artificial Sequence: Synthetic oligonucleotide
aggcaagucuccagaucug

SEQ ID NO: 185614 - RNA, 19 nt, Artificial Sequence
  Description of Artificial Sequence: Synthetic oligonucleotide
auggagucccaagcagcca

SEQ ID NO: 185615 - RNA, 19 nt, Artificial Sequence
  Description of Artificial Sequence: Synthetic oligonucleotide
ccccuaguugucuuuccug

SEQ ID NO: 185616 - RNA, 19 nt, Artificial Sequence
  Description of Artificial Sequence: Synthetic oligonucleotide
agggucaguucuagaauuu

SEQ ID NO: 185617 - RNA, 19 nt, Artificial Sequence
  Description of Artificial Sequence: Synthetic oligonucleotide
accccugggcccauggagu

SEQ ID NO: 185618 - RNA, 19 nt, Artificial Sequence
  Description of Artificial Sequence: Synthetic oligonucleotide
ggcuaagguacugggguca

SEQ ID NO: 185619 - RNA, 19 nt, Artificial Sequence
  Description of Artificial Sequence: Synthetic oligonucleotide
cccuuaaacuguaguccug

SEQ ID NO: 185620 - RNA, 19 nt, Artificial Sequence
  Description of Artificial Sequence: Synthetic oligonucleotide
ggacccauagaggcagagc

SEQ ID NO: 185621 - RNA, 19 nt, Artificial Sequence
  Description of Artificial Sequence: Synthetic oligonucleotide
cacucuaccacaagaccuu

SEQ ID NO: 185622 - RNA, 19 nt, Artificial Sequence
  Description of Artificial Sequence: Synthetic oligonucleotide
gcucucuuagaaccaaccu

SEQ ID NO: 185623 - RNA, 19 nt, Artificial Sequence
  Description of Artificial Sequence: Synthetic oligonucleotide
cagauuagagggugcugcu

SEQ ID NO: 185624 - RNA, 19 nt, Artificial Sequence
  Description of Artificial Sequence: Synthetic oligonucleotide
uacguaccacucggcgggc

SEQ ID NO: 185625 - RNA, 19 nt, Artificial Sequence
  Description of Artificial Sequence: Synthetic oligonucleotide
caggguaccucagacacau

SEQ ID NO: 185626 - RNA, 19 nt, Artificial Sequence
  Description of Artificial Sequence: Synthetic oligonucleotide
cugcgcuacaggacucuga

SEQ ID NO: 185627 - RNA, 19 nt, Artificial Sequence
  Description of Artificial Sequence: Synthetic oligonucleotide
ccccgugacagguuccgag

SEQ ID NO: 185628 - RNA, 19 nt, Artificial Sequence
  Description of Artificial Sequence: Synthetic oligonucleotide
agggcuccaccccgugaca

SEQ ID NO: 185629 - RNA, 19 nt, Artificial Sequence
  Description of Artificial Sequence: Synthetic oligonucleotide
ggcagauuagagggugcug

SEQ ID NO: 185630 - RNA, 19 nt, Artificial Sequence
  Description of Artificial Sequence: Synthetic oligonucleotide
gcgcuacaggacucugagg

SEQ ID NO: 185631 - RNA, 19 nt, Artificial Sequence
  Description of Artificial Sequence: Synthetic oligonucleotide
cuaucuugcuaacgucgcu

SEQ ID NO: 185632 - RNA, 19 nt, Artificial Sequence
  Description of Artificial Sequence: Synthetic oligonucleotide
gugcuuuagcuagggaugu

SEQ ID NO: 185633 - RNA, 19 nt, Artificial Sequence
  Description of Artificial Sequence: Synthetic oligonucleotide
ugcuaacgucgcugaugaa

SEQ ID NO: 185634 - RNA, 19 nt, Artificial Sequence
  Description of Artificial Sequence: Synthetic oligonucleotide
gggucggaugggagaaggg

SEQ ID NO: 185635 - RNA, 19 nt, Artificial Sequence
  Description of Artificial Sequence: Synthetic oligonucleotide
cacucuacgcacgcacgca

SEQ ID NO: 185636 - RNA, 19 nt, Artificial Sequence
  Description of Artificial Sequence: Synthetic oligonucleotide
cacggaguccaacuccugu

SEQ ID NO: 185637 - RNA, 19 nt, Artificial Sequence
  Description of Artificial Sequence: Synthetic oligonucleotide
ggcaacugguguaagcacu

SEQ ID NO: 185638 - RNA, 19 nt, Artificial Sequence
  Description of Artificial Sequence: Synthetic oligonucleotide
agguuccgaggggagggga

SEQ ID NO: 185639 - RNA, 19 nt, Artificial Sequence
  Description of Artificial Sequence: Synthetic oligonucleotide
gggacccauagaggcagag

SEQ ID NO: 185640 - RNA, 19 nt, Artificial Sequence
  Description of Artificial Sequence: Synthetic oligonucleotide
acccucaccaucagauguu

SEQ ID NO: 185641 - RNA, 19 nt, Artificial Sequence
  Description of Artificial Sequence: Synthetic oligonucleotide
ggccagccuagugucugcg

SEQ ID NO: 185642 - RNA, 19 nt, Artificial Sequence
  Description of Artificial Sequence: Synthetic oligonucleotide
ggcgucuuguuuauucuua

SEQ ID NO: 185643 - RNA, 19 nt, Artificial Sequence
  Description of Artificial Sequence: Synthetic oligonucleotide
cucggcgggcauuggugca

SEQ ID NO: 185644 - RNA, 19 nt, Artificial Sequence
  Description of Artificial Sequence: Synthetic oligonucleotide
gagcagggugggauuuaga

SEQ ID NO: 185645 - RNA, 19 nt, Artificial Sequence
  Description of Artificial Sequence: Synthetic oligonucleotide
cuguggaaacaugcaccca

SEQ ID NO: 185646 - RNA, 19 nt, Artificial Sequence
  Description of Artificial Sequence: Synthetic oligonucleotide
cuggggcauccgguuaaug

SEQ ID NO: 185647 - RNA, 19 nt, Artificial Sequence
  Description of Artificial Sequence: Synthetic oligonucleotide
gguuccgaggggaggggac

SEQ ID NO: 185648 - RNA, 19 nt, Artificial Sequence
  Description of Artificial Sequence: Synthetic oligonucleotide
gggcuccaccccgugacag

SEQ ID NO: 185649 - RNA, 19 nt, Artificial Sequence
  Description of Artificial Sequence: Synthetic oligonucleotide
gccagcuuuuacguaccac

SEQ ID NO: 185650 - RNA, 19 nt, Artificial Sequence
  Description of Artificial Sequence: Synthetic oligonucleotide
gguaccugggcuguccgcu

SEQ ID NO: 185651 - RNA, 19 nt, Artificial Sequence
  Description of Artificial Sequence: Synthetic oligonucleotide
ggaugucaacuccccucca

SEQ ID NO: 185652 - RNA, 19 nt, Artificial Sequence
  Description of Artificial Sequence: Synthetic oligonucleotide
cgcaacuuggagagcuaac

SEQ ID NO: 185653 - RNA, 19 nt, Artificial Sequence
  Description of Artificial Sequence: Synthetic oligonucleotide
caacccugucuuuggcucu

SEQ ID NO: 185654 - RNA, 19 nt, Artificial Sequence
  Description of Artificial Sequence: Synthetic oligonucleotide
cacugacucucaggguuca

SEQ ID NO: 185655 - RNA, 19 nt, Artificial Sequence
  Description of Artificial Sequence: Synthetic oligonucleotide
ggauuuagagggguaugau

SEQ ID NO: 185656 - RNA, 19 nt, Artificial Sequence
  Description of Artificial Sequence: Synthetic oligonucleotide
ggggucaagucagacccaa

SEQ ID NO: 185657 - RNA, 19 nt, Artificial Sequence
  Description of Artificial Sequence: Synthetic oligonucleotide
ccggcucuaucuugcuaac

SEQ ID NO: 185658 - RNA, 19 nt, Artificial Sequence
  Description of Artificial Sequence: Synthetic oligonucleotide
cugcuaucccacagccucu

SEQ ID NO: 185659 - RNA, 19 nt, Artificial Sequence
  Description of Artificial Sequence: Synthetic oligonucleotide
ccaauccugcaaccccgug

SEQ ID NO: 185660 - RNA, 19 nt, Artificial Sequence
  Description of Artificial Sequence: Synthetic oligonucleotide
gugugcacuugcacggagu

SEQ ID NO: 185661 - RNA, 19 nt, Artificial Sequence
  Description of Artificial Sequence: Synthetic oligonucleotide
ggugggauuuagaggggua

SEQ ID NO: 185662 - RNA, 19 nt, Artificial Sequence
  Description of Artificial Sequence: Synthetic oligonucleotide
acguaccacucggcgggca

SEQ ID NO: 185663 - RNA, 19 nt, Artificial Sequence
  Description of Artificial Sequence: Synthetic oligonucleotide
caccuaccccagccccaag

SEQ ID NO: 185664 - RNA, 19 nt, Artificial Sequence
  Description of Artificial Sequence: Synthetic oligonucleotide
ccaccccgugacagguucc

SEQ ID NO: 185665 - RNA, 19 nt, Artificial Sequence
  Description of Artificial Sequence: Synthetic oligonucleotide
ugagaaccccugggcccau

SEQ ID NO: 185666 - RNA, 19 nt, Artificial Sequence
  Description of Artificial Sequence: Synthetic oligonucleotide
cccgugacacaaggggcag

SEQ ID NO: 185667 - RNA, 19 nt, Artificial Sequence
  Description of Artificial Sequence: Synthetic oligonucleotide
cagucccguggagcugccc

SEQ ID NO: 185668 - RNA, 19 nt, Artificial Sequence
  Description of Artificial Sequence: Synthetic oligonucleotide
gcaaccccgugccucugaa

SEQ ID NO: 185669 - RNA, 19 nt, Artificial Sequence
  Description of Artificial Sequence: Synthetic oligonucleotide
gucgcaacuuggagagcua

SEQ ID NO: 185670 - RNA, 19 nt, Artificial Sequence
  Description of Artificial Sequence: Synthetic oligonucleotide
gcgcuuuuggagacaugga

SEQ ID NO: 185671 - RNA, 19 nt, Artificial Sequence
  Description of Artificial Sequence: Synthetic oligonucleotide
caagaccuuucagucccgu

SEQ ID NO: 185672 - RNA, 19 nt, Artificial Sequence
  Description of Artificial Sequence: Synthetic oligonucleotide
cuguucugucuugacccgu

SEQ ID NO: 185673 - RNA, 19 nt, Artificial Sequence
  Description of Artificial Sequence: Synthetic oligonucleotide
ggggaguaacagaaacccu

SEQ ID NO: 185674 - RNA, 19 nt, Artificial Sequence
  Description of Artificial Sequence: Synthetic oligonucleotide
ccaggguaccucagacaca

SEQ ID NO: 185675 - RNA, 19 nt, Artificial Sequence
  Description of Artificial Sequence: Synthetic oligonucleotide
cucuccuagugaguaguuu

SEQ ID NO: 185676 - RNA, 19 nt, Artificial Sequence
  Description of Artificial Sequence: Synthetic oligonucleotide
ccagggucggaugggagaa

SEQ ID NO: 185677 - RNA, 19 nt, Artificial Sequence
  Description of Artificial Sequence: Synthetic oligonucleotide
gccccuaguugucuuuccu

SEQ ID NO: 185678 - RNA, 19 nt, Artificial Sequence
  Description of Artificial Sequence: Synthetic oligonucleotide
cugcaaccccgugccucug

SEQ ID NO: 185679 - RNA, 19 nt, Artificial Sequence
  Description of Artificial Sequence: Synthetic oligonucleotide
gggaccugugaacacccuu

SEQ ID NO: 185680 - RNA, 19 nt, Artificial Sequence
  Description of Artificial Sequence: Synthetic oligonucleotide
ggccuggugcugggaaaug

SEQ ID NO: 185681 - RNA, 19 nt, Artificial Sequence
  Description of Artificial Sequence: Synthetic oligonucleotide
gguuugccccuaguugucu

SEQ ID NO: 185682 - RNA, 19 nt, Artificial Sequence
  Description of Artificial Sequence: Synthetic oligonucleotide
cuguaccccuggcuuuaua

SEQ ID NO: 185683 - RNA, 19 nt, Artificial Sequence
  Description of Artificial Sequence: Synthetic oligonucleotide
gggugugcacuugcacgga

SEQ ID NO: 185684 - RNA, 19 nt, Artificial Sequence
  Description of Artificial Sequence: Synthetic oligonucleotide
ccucaccaucagauguuaa

SEQ ID NO: 185685 - RNA, 19 nt, Artificial Sequence
  Description of Artificial Sequence: Synthetic oligonucleotide
gggguaugacuaaggugcu

SEQ ID NO: 185686 - RNA, 19 nt, Artificial Sequence
  Description of Artificial Sequence: Synthetic oligonucleotide
gugacguggcuggcugucu

SEQ ID NO: 185687 - RNA, 19 nt, Artificial Sequence
  Description of Artificial Sequence: Synthetic oligonucleotide
ccugcaaccccgugccucu

SEQ ID NO: 185688 - RNA, 19 nt, Artificial Sequence
  Description of Artificial Sequence: Synthetic oligonucleotide
cgugacguggcuggcuguc

SEQ ID NO: 185689 - RNA, 19 nt, Artificial Sequence
  Description of Artificial Sequence: Synthetic oligonucleotide
cacuggguuugccccuagu

SEQ ID NO: 185690 - RNA, 19 nt, Artificial Sequence
  Description of Artificial Sequence: Synthetic oligonucleotide
gccuagugucugcgcuaca

SEQ ID NO: 185691 - RNA, 19 nt, Artificial Sequence
  Description of Artificial Sequence: Synthetic oligonucleotide
guaccacucggcgggcauu

SEQ ID NO: 185692 - RNA, 19 nt, Artificial Sequence
  Description of Artificial Sequence: Synthetic oligonucleotide
aggguaccucagacacauu

SEQ ID NO: 185693 - RNA, 19 nt, Artificial Sequence
  Description of Artificial Sequence: Synthetic oligonucleotide
ccccaagagugggcucagc

SEQ ID NO: 185694 - RNA, 19 nt, Artificial Sequence
  Description of Artificial Sequence: Synthetic oligonucleotide
ccucuccguacaguaguua

SEQ ID NO: 185695 - RNA, 19 nt, Artificial Sequence
  Description of Artificial Sequence: Synthetic oligonucleotide
ggguaugacuaaggugcuu

SEQ ID NO: 185696 - RNA, 19 nt, Artificial Sequence
  Description of Artificial Sequence: Synthetic oligonucleotide
gccacuggguuugccccua

SEQ ID NO: 185697 - RNA, 19 nt, Artificial Sequence
  Description of Artificial Sequence: Synthetic oligonucleotide
ccacucggcgggcauuggu

SEQ ID NO: 185698 - RNA, 19 nt, Artificial Sequence
  Description of Artificial Sequence: Synthetic oligonucleotide
cuccaccccgugacagguu

SEQ ID NO: 185699 - RNA, 19 nt, Artificial Sequence
  Description of Artificial Sequence: Synthetic oligonucleotide
ccccuguaccccuggcuuu

SEQ ID NO: 185700 - RNA, 19 nt, Artificial Sequence
  Description of Artificial Sequence: Synthetic oligonucleotide
ccgcucugacaugcugguu

SEQ ID NO: 185701 - RNA, 19 nt, Artificial Sequence
  Description of Artificial Sequence: Synthetic oligonucleotide
uuggguauuaucaaggagg

SEQ ID NO: 185702 - RNA, 19 nt, Artificial Sequence
  Description of Artificial Sequence: Synthetic oligonucleotide
aagaauaagcaucaaaucu

SEQ ID NO: 185703 - RNA, 19 nt, Artificial Sequence
  Description of Artificial Sequence: Synthetic oligonucleotide
gaaagacucacuuuggccg

SEQ ID NO: 185704 - RNA, 19 nt, Artificial Sequence
  Description of Artificial Sequence: Synthetic oligonucleotide
aagcauuuguaccaauggc

SEQ ID NO: 185705 - RNA, 19 nt, Artificial Sequence
  Description of Artificial Sequence: Synthetic oligonucleotide
uauuccuuaggcaugcagg

SEQ ID NO: 185706 - RNA, 19 nt, Artificial Sequence
  Description of Artificial Sequence: Synthetic oligonucleotide
uaagcaucaaaucucgaag

SEQ ID NO: 185707 - RNA, 19 nt, Artificial Sequence
  Description of Artificial Sequence: Synthetic oligonucleotide
uguaguauguauuuugucu

SEQ ID NO: 185708 - RNA, 19 nt, Artificial Sequence
  Description of Artificial Sequence: Synthetic oligonucleotide
agaguacugaguuuauugc

SEQ ID NO: 185709 - RNA, 19 nt, Artificial Sequence
  Description of Artificial Sequence: Synthetic oligonucleotide
aaggaaauguauuacucca

SEQ ID NO: 185710 - RNA, 19 nt, Artificial Sequence
  Description of Artificial Sequence: Synthetic oligonucleotide
ugauaugagaucuauuugu

SEQ ID NO: 185711 - RNA, 19 nt, Artificial Sequence
  Description of Artificial Sequence: Synthetic oligonucleotide
uggacuagaacacuguuga

SEQ ID NO: 185712 - RNA, 19 nt, Artificial Sequence
  Description of Artificial Sequence: Synthetic oligonucleotide
aauacgguggccuuuggga

SEQ ID NO: 185713 - RNA, 19 nt, Artificial Sequence
  Description of Artificial Sequence: Synthetic oligonucleotide
uauuacuccacccucccag

SEQ ID NO: 185714 - RNA, 19 nt, Artificial Sequence
  Description of Artificial Sequence: Synthetic oligonucleotide
aguacuaguggaccugucc

SEQ ID NO: 185715 - RNA, 19 nt, Artificial Sequence
  Description of Artificial Sequence: Synthetic oligonucleotide
aucgauuauguuuucgggg

SEQ ID NO: 185716 - RNA, 19 nt, Artificial Sequence
  Description of Artificial Sequence: Synthetic oligonucleotide
uuaaguugaagcagaauuc

SEQ ID NO: 185717 - RNA, 19 nt, Artificial Sequence
  Description of Artificial Sequence: Synthetic oligonucleotide
agucagagugaauucuugc

SEQ ID NO: 185718 - RNA, 19 nt, Artificial Sequence
  Description of Artificial Sequence: Synthetic oligonucleotide
gaccacagaaauccgacgg

SEQ ID NO: 185719 - RNA, 19 nt, Artificial Sequence
  Description of Artificial Sequence: Synthetic oligonucleotide
gaugacgccggcuaagcgg

SEQ ID NO: 185720 - RNA, 19 nt, Artificial Sequence
  Description of Artificial Sequence: Synthetic oligonucleotide
ugucuagucaugucuaugc

SEQ ID NO: 185721 - RNA, 19 nt, Artificial Sequence
  Description of Artificial Sequence: Synthetic oligonucleotide
agugauucugaguagguga

SEQ ID NO: 185722 - RNA, 19 nt, Artificial Sequence
  Description of Artificial Sequence: Synthetic oligonucleotide
agcggauucacacccaacg

SEQ ID NO: 185723 - RNA, 19 nt, Artificial Sequence
  Description of Artificial Sequence: Synthetic oligonucleotide
aaugcucuaaacugaggca

SEQ ID NO: 185724 - RNA, 19 nt, Artificial Sequence
  Description of Artificial Sequence: Synthetic oligonucleotide
ggaaccuugccuuacauag

SEQ ID NO: 185725 - RNA, 19 nt, Artificial Sequence
  Description of Artificial Sequence: Synthetic oligonucleotide
uuggccgagacaauucugg

SEQ ID NO: 185726 - RNA, 19 nt, Artificial Sequence
  Description of Artificial Sequence: Synthetic oligonucleotide
gggauugucuuucagaucc

SEQ ID NO: 185727 - RNA, 19 nt, Artificial Sequence
  Description of Artificial Sequence: Synthetic oligonucleotide
aagccuauuccuuaggcau

SEQ ID NO: 185728 - RNA, 19 nt, Artificial Sequence
  Description of Artificial Sequence: Synthetic oligonucleotide
agcagauaagcaccaagac

SEQ ID NO: 185729 - RNA, 19 nt, Artificial Sequence
  Description of Artificial Sequence: Synthetic oligonucleotide
uguggagcuacacagcaga

SEQ ID NO: 185730 - RNA, 19 nt, Artificial Sequence
  Description of Artificial Sequence: Synthetic oligonucleotide
aagcaucaaaucucgaagu

SEQ ID NO: 185731 - RNA, 19 nt, Artificial Sequence
  Description of Artificial Sequence: Synthetic oligonucleotide
acaguuuugaguggcagac

SEQ ID NO: 185732 - RNA, 19 nt, Artificial Sequence
  Description of Artificial Sequence: Synthetic oligonucleotide
caggacagauccaauacgg

SEQ ID NO: 185733 - RNA, 19 nt, Artificial Sequence
  Description of Artificial Sequence: Synthetic oligonucleotide
uggguauuaucaaggaggc

SEQ ID NO: 185734 - RNA, 19 nt, Artificial Sequence
  Description of Artificial Sequence: Synthetic oligonucleotide
aacgaaccacgccugcgcc

SEQ ID NO: 185735 - RNA, 19 nt, Artificial Sequence
  Description of Artificial Sequence: Synthetic oligonucleotide
ucgauuauguuuucggggu

SEQ ID NO: 185736 - RNA, 19 nt, Artificial Sequence
  Description of Artificial Sequence: Synthetic oligonucleotide
uuaggcuagauuuacccaa

SEQ ID NO: 185737 - RNA, 19 nt, Artificial Sequence
  Description of Artificial Sequence: Synthetic oligonucleotide
uuggacuagaacacuguug

SEQ ID NO: 185738 - RNA, 19 nt, Artificial Sequence
  Description of Artificial Sequence: Synthetic oligonucleotide
uguaacaccuuguuugcac

SEQ ID NO: 185739 - RNA, 19 nt, Artificial Sequence
  Description of Artificial Sequence: Synthetic oligonucleotide
auaagcaucaaaucucgaa

SEQ ID NO: 185740 - RNA, 19 nt, Artificial Sequence
  Description of Artificial Sequence: Synthetic oligonucleotide
gauuauguuuucggggugg

SEQ ID NO: 185741 - RNA, 19 nt, Artificial Sequence
  Description of Artificial Sequence: Synthetic oligonucleotide
uguuacaggcccagaauca

SEQ ID NO: 185742 - RNA, 19 nt, Artificial Sequence
  Description of Artificial Sequence: Synthetic oligonucleotide
ucguagaugguguucacac

SEQ ID NO: 185743 - RNA, 19 nt, Artificial Sequence
  Description of Artificial Sequence: Synthetic oligonucleotide
guaguauguauuuugucuc

SEQ ID NO: 185744 - RNA, 19 nt, Artificial Sequence
  Description of Artificial Sequence: Synthetic oligonucleotide
ggguuuaugacauacaaaa

SEQ ID NO: 185745 - RNA, 19 nt, Artificial Sequence
  Description of Artificial Sequence: Synthetic oligonucleotide
ccaaguauugcuuaucccc

SEQ ID NO: 185746 - RNA, 19 nt, Artificial Sequence
  Description of Artificial Sequence: Synthetic oligonucleotide
auuacuccacccucccagc

SEQ ID NO: 185747 - RNA, 19 nt, Artificial Sequence
  Description of Artificial Sequence: Synthetic oligonucleotide
cauacugcccucuaaucug

SEQ ID NO: 185748 - RNA, 19 nt, Artificial Sequence
  Description of Artificial Sequence: Synthetic oligonucleotide
uaaucugucccgguuaccc

SEQ ID NO: 185749 - RNA, 19 nt, Artificial Sequence
  Description of Artificial Sequence: Synthetic oligonucleotide
agaucuauuuguggguggc

SEQ ID NO: 185750 - RNA, 19 nt, Artificial Sequence
  Description of Artificial Sequence: Synthetic oligonucleotide
ucuagucaugucuaugcac

SEQ ID NO: 185751 - RNA, 19 nt, Artificial Sequence
  Description of Artificial Sequence: Synthetic oligonucleotide
uccuacaaaggggagaucu

SEQ ID NO: 185752 - RNA, 19 nt, Artificial Sequence
  Description of Artificial Sequence: Synthetic oligonucleotide
gacacaguuauuucugauc

SEQ ID NO: 185753 - RNA, 19 nt, Artificial Sequence
  Description of Artificial Sequence: Synthetic oligonucleotide
uaacauacugcccucuaau

SEQ ID NO: 185754 - RNA, 19 nt, Artificial Sequence
  Description of Artificial Sequence: Synthetic oligonucleotide
cuaagccuauuccuuaggc

SEQ ID NO: 185755 - RNA, 19 nt, Artificial Sequence
  Description of Artificial Sequence: Synthetic oligonucleotide
acugaguuuauugcaggac

SEQ ID NO: 185756 - RNA, 19 nt, Artificial Sequence
  Description of Artificial Sequence: Synthetic oligonucleotide
uacuaguggaccugucccg

SEQ ID NO: 185757 - RNA, 19 nt, Artificial Sequence
  Description of Artificial Sequence: Synthetic oligonucleotide
aagagguuguguccagcag

SEQ ID NO: 185758 - RNA, 19 nt, Artificial Sequence
  Description of Artificial Sequence: Synthetic oligonucleotide
guacuaguggaccuguccc

SEQ ID NO: 185759 - RNA, 19 nt, Artificial Sequence
  Description of Artificial Sequence: Synthetic oligonucleotide
ucuaaucugucccgguuac

SEQ ID NO: 185760 - RNA, 19 nt, Artificial Sequence
  Description of Artificial Sequence: Synthetic oligonucleotide
uuggcucccacucuuguac

SEQ ID NO: 185761 - RNA, 19 nt, Artificial Sequence
  Description of Artificial Sequence: Synthetic oligonucleotide
gagaucuauuugugggugg

SEQ ID NO: 185762 - RNA, 19 nt, Artificial Sequence
  Description of Artificial Sequence: Synthetic oligonucleotide
ugucuuucagauccagcca

SEQ ID NO: 185763 - RNA, 19 nt, Artificial Sequence
  Description of Artificial Sequence: Synthetic oligonucleotide
aaauccgacggaagaguac

SEQ ID NO: 185764 - RNA, 19 nt, Artificial Sequence
  Description of Artificial Sequence: Synthetic oligonucleotide
ugcuuauccccaauaacau

SEQ ID NO: 185765 - RNA, 19 nt, Artificial Sequence
  Description of Artificial Sequence: Synthetic oligonucleotide
uggcuugcgaggacgagag

SEQ ID NO: 185766 - RNA, 19 nt, Artificial Sequence
  Description of Artificial Sequence: Synthetic oligonucleotide
agggcuacacucucugaac

SEQ ID NO: 185767 - RNA, 19 nt, Artificial Sequence
  Description of Artificial Sequence: Synthetic oligonucleotide
cuuggguauuaucaaggag

SEQ ID NO: 185768 - RNA, 19 nt, Artificial Sequence
  Description of Artificial Sequence: Synthetic oligonucleotide
guaggugauucugaguagg

SEQ ID NO: 185769 - RNA, 19 nt, Artificial Sequence
  Description of Artificial Sequence: Synthetic oligonucleotide
cuuagcuugcugcuuggcc

SEQ ID NO: 185770 - RNA, 19 nt, Artificial Sequence
  Description of Artificial Sequence: Synthetic oligonucleotide
gaggaucucgugaugacgc

SEQ ID NO: 185771 - RNA, 19 nt, Artificial Sequence
  Description of Artificial Sequence: Synthetic oligonucleotide
acuagggcuacacucucug

SEQ ID NO: 185772 - RNA, 19 nt, Artificial Sequence
  Description of Artificial Sequence: Synthetic oligonucleotide
agaucucaaguaccaauca

SEQ ID NO: 185773 - RNA, 19 nt, Artificial Sequence
  Description of Artificial Sequence: Synthetic oligonucleotide
uccggagcuugcaauuggg

SEQ ID NO: 185774 - RNA, 19 nt, Artificial Sequence
  Description of Artificial Sequence: Synthetic oligonucleotide
gucccgguuacccagggag

SEQ ID NO: 185775 - RNA, 19 nt, Artificial Sequence
  Description of Artificial Sequence: Synthetic oligonucleotide
guaacuagaaaagccuaug

SEQ ID NO: 185776 - RNA, 19 nt, Artificial Sequence
  Description of Artificial Sequence: Synthetic oligonucleotide
ugcucuaaacugaggcaag

SEQ ID NO: 185777 - RNA, 19 nt, Artificial Sequence
  Description of Artificial Sequence: Synthetic oligonucleotide
acgagagccagacuuagau

SEQ ID NO: 185778 - RNA, 19 nt, Artificial Sequence
  Description of Artificial Sequence: Synthetic oligonucleotide
ucgcuucgaagcuuucugg

SEQ ID NO: 185779 - RNA, 19 nt, Artificial Sequence
  Description of Artificial Sequence: Synthetic oligonucleotide
uagggcuacacucucugaa

SEQ ID NO: 185780 - RNA, 19 nt, Artificial Sequence
  Description of Artificial Sequence: Synthetic oligonucleotide
aucucgugaugacgcaggc

SEQ ID NO: 185781 - RNA, 19 nt, Artificial Sequence
  Description of Artificial Sequence: Synthetic oligonucleotide
ugucauccggcaugcaacc

SEQ ID NO: 185782 - RNA, 19 nt, Artificial Sequence
  Description of Artificial Sequence: Synthetic oligonucleotide
aaguuucuaggcugccucu

SEQ ID NO: 185783 - RNA, 19 nt, Artificial Sequence
  Description of Artificial Sequence: Synthetic oligonucleotide
uuuggacuagaacacuguu

SEQ ID NO: 185784 - RNA, 19 nt, Artificial Sequence
  Description of Artificial Sequence: Synthetic oligonucleotide
ucguuccacuuccagccgg

SEQ ID NO: 185785 - RNA, 19 nt, Artificial Sequence
  Description of Artificial Sequence: Synthetic oligonucleotide
aggaaauguauuacuccac

SEQ ID NO: 185786 - RNA, 19 nt, Artificial Sequence
  Description of Artificial Sequence: Synthetic oligonucleotide
caaguuucuaggcugccuc

SEQ ID NO: 185787 - RNA, 19 nt, Artificial Sequence
  Description of Artificial Sequence: Synthetic oligonucleotide
aguggaccugucccggggc

SEQ ID NO: 185788 - RNA, 19 nt, Artificial Sequence
  Description of Artificial Sequence: Synthetic oligonucleotide
cuauuccuuaggcaugcag

SEQ ID NO: 185789 - RNA, 19 nt, Artificial Sequence
  Description of Artificial Sequence: Synthetic oligonucleotide
aacucuaaaccugcuuuga

SEQ ID NO: 185790 - RNA, 19 nt, Artificial Sequence
  Description of Artificial Sequence: Synthetic oligonucleotide
cugaguuuauugcaggaca

SEQ ID NO: 185791 - RNA, 19 nt, Artificial Sequence
  Description of Artificial Sequence: Synthetic oligonucleotide
augaugacgccggcuaagc

SEQ ID NO: 185792 - RNA, 19 nt, Artificial Sequence
  Description of Artificial Sequence: Synthetic oligonucleotide
agauccaauacgguggccu

SEQ ID NO: 185793 - RNA, 19 nt, Artificial Sequence
  Description of Artificial Sequence: Synthetic oligonucleotide
caacucuaaaccugcuuug

SEQ ID NO: 185794 - RNA, 19 nt, Artificial Sequence
  Description of Artificial Sequence: Synthetic oligonucleotide
uaguggaccugucccgggg

SEQ ID NO: 185795 - RNA, 19 nt, Artificial Sequence
  Description of Artificial Sequence: Synthetic oligonucleotide
aggggagaucucaaguacc

SEQ ID NO: 185796 - RNA, 19 nt, Artificial Sequence
  Description of Artificial Sequence: Synthetic oligonucleotide
uuauccccaauaacauacu

SEQ ID NO: 185797 - RNA, 19 nt, Artificial Sequence
  Description of Artificial Sequence: Synthetic oligonucleotide
ucgaagucagagugaauuc

SEQ ID NO: 185798 - RNA, 19 nt, Artificial Sequence
  Description of Artificial Sequence: Synthetic oligonucleotide
ugcccucuaaucugucccg

SEQ ID NO: 185799 - RNA, 19 nt, Artificial Sequence
  Description of Artificial Sequence: Synthetic oligonucleotide
cuugccuuacauagcuuug

SEQ ID NO: 185800 - RNA, 19 nt, Artificial Sequence
  Description of Artificial Sequence: Synthetic oligonucleotide
auaacauacugcccucuaa

SEQ ID NO: 185801 - RNA, 19 nt, Artificial Sequence
  Description of Artificial Sequence: Synthetic oligonucleotide
ugucucaauaaagcauuug

SEQ ID NO: 185802 - RNA, 19 nt, Artificial Sequence
  Description of Artificial Sequence: Synthetic oligonucleotide
gaagacuaaaggaaugugu

SEQ ID NO: 185803 - RNA, 19 nt, Artificial Sequence
  Description of Artificial Sequence: Synthetic oligonucleotide
gauuuacccaaguauugcu

SEQ ID NO: 185804 - RNA, 19 nt, Artificial Sequence
  Description of Artificial Sequence: Synthetic oligonucleotide
agugagaguuggguucugc

SEQ ID NO: 185805 - RNA, 19 nt, Artificial Sequence
  Description of Artificial Sequence: Synthetic oligonucleotide
aagucagagugaauucuug

SEQ ID NO: 185806 - RNA, 19 nt, Artificial Sequence
  Description of Artificial Sequence: Synthetic oligonucleotide
caauacgguggccuuuggg

SEQ ID NO: 185807 - RNA, 19 nt, Artificial Sequence
  Description of Artificial Sequence: Synthetic oligonucleotide
aaggaaccuugccuuacau

SEQ ID NO: 185808 - RNA, 19 nt, Artificial Sequence
  Description of Artificial Sequence: Synthetic oligonucleotide
ugcgccuuaagccgccgcc

SEQ ID NO: 185809 - RNA, 19 nt, Artificial Sequence
  Description of Artificial Sequence: Synthetic oligonucleotide
ucccggggcagcuuuguag

SEQ ID NO: 185810 - RNA, 19 nt, Artificial Sequence
  Description of Artificial Sequence: Synthetic oligonucleotide
acuaguggaccugucccgg

SEQ ID NO: 185811 - RNA, 19 nt, Artificial Sequence
  Description of Artificial Sequence: Synthetic oligonucleotide
ucccgguuacccagggagg

SEQ ID NO: 185812 - RNA, 19 nt, Artificial Sequence
  Description of Artificial Sequence: Synthetic oligonucleotide
aggaucgauuauguuuucg

SEQ ID NO: 185813 - RNA, 19 nt, Artificial Sequence
  Description of Artificial Sequence: Synthetic oligonucleotide
agggacuuaaugcucuaaa

SEQ ID NO: 185814 - RNA, 19 nt, Artificial Sequence
  Description of Artificial Sequence: Synthetic oligonucleotide
auuaucaaggaggccaaau

SEQ ID NO: 185815 - RNA, 19 nt, Artificial Sequence
  Description of Artificial Sequence: Synthetic oligonucleotide
cuuacauagcuuuguguaa

SEQ ID NO: 185816 - RNA, 19 nt, Artificial Sequence
  Description of Artificial Sequence: Synthetic oligonucleotide
uccaauacgguggccuuug

SEQ ID NO: 185817 - RNA, 19 nt, Artificial Sequence
  Description of Artificial Sequence: Synthetic oligonucleotide
aguccuacaaaggggagau

SEQ ID NO: 185818 - RNA, 19 nt, Artificial Sequence
  Description of Artificial Sequence: Synthetic oligonucleotide
augacgccggcuaagcggg

SEQ ID NO: 185819 - RNA, 19 nt, Artificial Sequence
  Description of Artificial Sequence: Synthetic oligonucleotide
gaugacgcaggcccuggac

SEQ ID NO: 185820 - RNA, 19 nt, Artificial Sequence
  Description of Artificial Sequence: Synthetic oligonucleotide
gccauuuaaguugaagcag

SEQ ID NO: 185821 - RNA, 19 nt, Artificial Sequence
  Description of Artificial Sequence: Synthetic oligonucleotide
augcucuaaacugaggcaa

SEQ ID NO: 185822 - RNA, 19 nt, Artificial Sequence
  Description of Artificial Sequence: Synthetic oligonucleotide
uggccuuugggagugcagc

SEQ ID NO: 185823 - RNA, 19 nt, Artificial Sequence
  Description of Artificial Sequence: Synthetic oligonucleotide
uuuggggccugauuuguuu

SEQ ID NO: 185824 - RNA, 19 nt, Artificial Sequence
  Description of Artificial Sequence: Synthetic oligonucleotide
cauccggcaugcaaccagc

SEQ ID NO: 185825 - RNA, 19 nt, Artificial Sequence
  Description of Artificial Sequence: Synthetic oligonucleotide
gggacuuaaugcucuaaac

SEQ ID NO: 185826 - RNA, 19 nt, Artificial Sequence
  Description of Artificial Sequence: Synthetic oligonucleotide
auaagcaccaagacacagu

SEQ ID NO: 185827 - RNA, 19 nt, Artificial Sequence
  Description of Artificial Sequence: Synthetic oligonucleotide
gacggaagaguacugaguu

SEQ ID NO: 185828 - RNA, 19 nt, Artificial Sequence
  Description of Artificial Sequence: Synthetic oligonucleotide
uggcagaccuauccagaug

SEQ ID NO: 185829 - RNA, 19 nt, Artificial Sequence
  Description of Artificial Sequence: Synthetic oligonucleotide
cuagaacacuguugacaag

SEQ ID NO: 185830 - RNA, 19 nt, Artificial Sequence
  Description of Artificial Sequence: Synthetic oligonucleotide
ggacuuaaugcucuaaacu

SEQ ID NO: 185831 - RNA, 19 nt, Artificial Sequence
  Description of Artificial Sequence: Synthetic oligonucleotide
auagcagcagcagcagcag

SEQ ID NO: 185832 - RNA, 19 nt, Artificial Sequence
  Description of Artificial Sequence: Synthetic oligonucleotide
uuuucggggugguggcuug

SEQ ID NO: 185833 - RNA, 19 nt, Artificial Sequence
  Description of Artificial Sequence: Synthetic oligonucleotide
guccggagcuugcaauugg

SEQ ID NO: 185834 - RNA, 19 nt, Artificial Sequence
  Description of Artificial Sequence: Synthetic oligonucleotide
ggaauguguagugauucug

SEQ ID NO: 185835 - RNA, 19 nt, Artificial Sequence
  Description of Artificial Sequence: Synthetic oligonucleotide
gaagugaccuucacagcca

SEQ ID NO: 185836 - RNA, 19 nt, Artificial Sequence
  Description of Artificial Sequence: Synthetic oligonucleotide
agguauuucaucacaccaa

SEQ ID NO: 185837 - RNA, 19 nt, Artificial Sequence
  Description of Artificial Sequence: Synthetic oligonucleotide
cagaaucaacucuaaaccu

SEQ ID NO: 185838 - RNA, 19 nt, Artificial Sequence
  Description of Artificial Sequence: Synthetic oligonucleotide
cagaccuauccagaugggc

SEQ ID NO: 185839 - RNA, 19 nt, Artificial Sequence
  Description of Artificial Sequence: Synthetic oligonucleotide
gcaucguacuccuuucgcc

SEQ ID NO: 185840 - RNA, 19 nt, Artificial Sequence
  Description of Artificial Sequence: Synthetic oligonucleotide
aaguacuaguggaccuguc

SEQ ID NO: 185841 - RNA, 19 nt, Artificial Sequence
  Description of Artificial Sequence: Synthetic oligonucleotide
caugucuaugcaccaccac

SEQ ID NO: 185842 - RNA, 19 nt, Artificial Sequence
  Description of Artificial Sequence: Synthetic oligonucleotide
augucuagucaugucuaug

SEQ ID NO: 185843 - RNA, 19 nt, Artificial Sequence
  Description of Artificial Sequence: Synthetic oligonucleotide
acucacuuuggccgagaca

SEQ ID NO: 185844 - RNA, 19 nt, Artificial Sequence
  Description of Artificial Sequence: Synthetic oligonucleotide
uccgacggaagaguacuga

SEQ ID NO: 185845 - RNA, 19 nt, Artificial Sequence
  Description of Artificial Sequence: Synthetic oligonucleotide
gcucagcggauucacaccc

SEQ ID NO: 185846 - RNA, 19 nt, Artificial Sequence
  Description of Artificial Sequence: Synthetic oligonucleotide
cuugucgcggagguucccg

SEQ ID NO: 185847 - RNA, 19 nt, Artificial Sequence
  Description of Artificial Sequence: Synthetic oligonucleotide
ggauucacacccaacgaac

SEQ ID NO: 185848 - RNA, 19 nt, Artificial Sequence
  Description of Artificial Sequence: Synthetic oligonucleotide
ggaggaucucgugaugacg

SEQ ID NO: 185849 - RNA, 19 nt, Artificial Sequence
  Description of Artificial Sequence: Synthetic oligonucleotide
gucuagucaugucuaugca

SEQ ID NO: 185850 - RNA, 19 nt, Artificial Sequence
  Description of Artificial Sequence: Synthetic oligonucleotide
ccuuacauagcuuugugua

SEQ ID NO: 185851 - RNA, 19 nt, Artificial Sequence
  Description of Artificial Sequence: Synthetic oligonucleotide
agcagcagcagcagcagca

SEQ ID NO: 185852 - RNA, 19 nt, Artificial Sequence
  Description of Artificial Sequence: Synthetic oligonucleotide
uuagauuuuggggccugau

SEQ ID NO: 185853 - RNA, 19 nt, Artificial Sequence
  Description of Artificial Sequence: Synthetic oligonucleotide
uuuagcagauaagcaccaa

SEQ ID NO: 185854 - RNA, 19 nt, Artificial Sequence
  Description of Artificial Sequence: Synthetic oligonucleotide
auuauguuuucgggguggu

SEQ ID NO: 185855 - RNA, 19 nt, Artificial Sequence
  Description of Artificial Sequence: Synthetic oligonucleotide
gccucaaccagccagguua

SEQ ID NO: 185856 - RNA, 19 nt, Artificial Sequence
  Description of Artificial Sequence: Synthetic oligonucleotide
ucucgugaugacgcaggcc

SEQ ID NO: 185857 - RNA, 19 nt, Artificial Sequence
  Description of Artificial Sequence: Synthetic oligonucleotide
uggcaagacuugucuauua

SEQ ID NO: 185858 - RNA, 19 nt, Artificial Sequence
  Description of Artificial Sequence: Synthetic oligonucleotide
uagcagcagcagcagcagc

SEQ ID NO: 185859 - RNA, 19 nt, Artificial Sequence
  Description of Artificial Sequence: Synthetic oligonucleotide
ggcaucguacuccuuucgc

SEQ ID NO: 185860 - RNA, 19 nt, Artificial Sequence
  Description of Artificial Sequence: Synthetic oligonucleotide
aggaaccuugccuuacaua

SEQ ID NO: 185861 - RNA, 19 nt, Artificial Sequence
  Description of Artificial Sequence: Synthetic oligonucleotide
caaaggggagaucucaagu

SEQ ID NO: 185862 - RNA, 19 nt, Artificial Sequence
  Description of Artificial Sequence: Synthetic oligonucleotide
gaaauccgacggaagagua

SEQ ID NO: 185863 - RNA, 19 nt, Artificial Sequence
  Description of Artificial Sequence: Synthetic oligonucleotide
aggugauucugaguagggu

SEQ ID NO: 185864 - RNA, 19 nt, Artificial Sequence
  Description of Artificial Sequence: Synthetic oligonucleotide
ugucgcggagguucccgcc

SEQ ID NO: 185865 - RNA, 19 nt, Artificial Sequence
  Description of Artificial Sequence: Synthetic oligonucleotide
ucaccauauguaguaugua

SEQ ID NO: 185866 - RNA, 19 nt, Artificial Sequence
  Description of Artificial Sequence: Synthetic oligonucleotide
ucgcugagacucaggucca

SEQ ID NO: 185867 - RNA, 19 nt, Artificial Sequence
  Description of Artificial Sequence: Synthetic oligonucleotide
caccauauguaguauguau

SEQ ID NO: 185868 - RNA, 19 nt, Artificial Sequence
  Description of Artificial Sequence: Synthetic oligonucleotide
gccgagacaauucuggugu

SEQ ID NO: 185869 - RNA, 19 nt, Artificial Sequence
  Description of Artificial Sequence: Synthetic oligonucleotide
gguccgacgggcaggagag

SEQ ID NO: 185870 - RNA, 19 nt, Artificial Sequence
  Description of Artificial Sequence: Synthetic oligonucleotide
cuuuggacuagaacacugu

SEQ ID NO: 185871 - RNA, 19 nt, Artificial Sequence
  Description of Artificial Sequence: Synthetic oligonucleotide
ccggccuuggucaugauga

SEQ ID NO: 185872 - RNA, 19 nt, Artificial Sequence
  Description of Artificial Sequence: Synthetic oligonucleotide
cuaaucugucccgguuacc

SEQ ID NO: 185873 - RNA, 19 nt, Artificial Sequence
  Description of Artificial Sequence: Synthetic oligonucleotide
uacccaaguauugcuuauc

SEQ ID NO: 185874 - RNA, 19 nt, Artificial Sequence
  Description of Artificial Sequence: Synthetic oligonucleotide
ucggucuggaggacccacu

SEQ ID NO: 185875 - RNA, 19 nt, Artificial Sequence
  Description of Artificial Sequence: Synthetic oligonucleotide
gaucuauuuguggguggca

SEQ ID NO: 185876 - RNA, 19 nt, Artificial Sequence
  Description of Artificial Sequence: Synthetic oligonucleotide
uuacuaugacuagccugac

SEQ ID NO: 185877 - RNA, 19 nt, Artificial Sequence
  Description of Artificial Sequence: Synthetic oligonucleotide
cucgaagucagagugaauu

SEQ ID NO: 185878 - RNA, 19 nt, Artificial Sequence
  Description of Artificial Sequence: Synthetic oligonucleotide
agcacaacccaggaucgau

SEQ ID NO: 185879 - RNA, 19 nt, Artificial Sequence
  Description of Artificial Sequence: Synthetic oligonucleotide
ggccgagacaauucuggug

SEQ ID NO: 185880 - RNA, 19 nt, Artificial Sequence
  Description of Artificial Sequence: Synthetic oligonucleotide
cacccaacgaaccacgccu

SEQ ID NO: 185881 - RNA, 19 nt, Artificial Sequence
  Description of Artificial Sequence: Synthetic oligonucleotide
cucuaaucugucccgguua

SEQ ID NO: 185882 - RNA, 19 nt, Artificial Sequence
  Description of Artificial Sequence: Synthetic oligonucleotide
acaacccaggaucgauuau

SEQ ID NO: 185883 - RNA, 19 nt, Artificial Sequence
  Description of Artificial Sequence: Synthetic oligonucleotide
uucccgcccuugcuaccgg

SEQ ID NO: 185884 - RNA, 19 nt, Artificial Sequence
  Description of Artificial Sequence: Synthetic oligonucleotide
ccuaagccuauuccuuagg

SEQ ID NO: 185885 - RNA, 19 nt, Artificial Sequence
  Description of Artificial Sequence: Synthetic oligonucleotide
gucgcggagguucccgccc

SEQ ID NO: 185886 - RNA, 19 nt, Artificial Sequence
  Description of Artificial Sequence: Synthetic oligonucleotide
cacaacccaggaucgauua

SEQ ID NO: 185887 - RNA, 19 nt, Artificial Sequence
  Description of Artificial Sequence: Synthetic oligonucleotide
agccuauuccuuaggcaug

SEQ ID NO: 185888 - RNA, 19 nt, Artificial Sequence
  Description of Artificial Sequence: Synthetic oligonucleotide
acgaaccacgccugcgccu

SEQ ID NO: 185889 - RNA, 19 nt, Artificial Sequence
  Description of Artificial Sequence: Synthetic oligonucleotide
gggcaucguacuccuuucg

SEQ ID NO: 185890 - RNA, 19 nt, Artificial Sequence
  Description of Artificial Sequence: Synthetic oligonucleotide
uguuuucggggugguggcu

SEQ ID NO: 185891 - RNA, 19 nt, Artificial Sequence
  Description of Artificial Sequence: Synthetic oligonucleotide
ggaucucgugaugacgcag

SEQ ID NO: 185892 - RNA, 19 nt, Artificial Sequence
  Description of Artificial Sequence: Synthetic oligonucleotide
ccgacggaagaguacugag

SEQ ID NO: 185893 - RNA, 19 nt, Artificial Sequence
  Description of Artificial Sequence: Synthetic oligonucleotide
guuacccagggaggaauga

SEQ ID NO: 185894 - RNA, 19 nt, Artificial Sequence
  Description of Artificial Sequence: Synthetic oligonucleotide
gccuauuccuuaggcaugc

SEQ ID NO: 185895 - RNA, 19 nt, Artificial Sequence
  Description of Artificial Sequence: Synthetic oligonucleotide
cccuaagccuauuccuuag

SEQ ID NO: 185896 - RNA, 19 nt, Artificial Sequence
  Description of Artificial Sequence: Synthetic oligonucleotide
ugauucugaguaggugauu

SEQ ID NO: 185897 - RNA, 19 nt, Artificial Sequence
  Description of Artificial Sequence: Synthetic oligonucleotide
guggcuugcgaggacgaga

SEQ ID NO: 185898 - RNA, 19 nt, Artificial Sequence
  Description of Artificial Sequence: Synthetic oligonucleotide
ggggagaucucaaguacca

SEQ ID NO: 185899 - RNA, 19 nt, Artificial Sequence
  Description of Artificial Sequence: Synthetic oligonucleotide
ccccaauaacauacugccc

SEQ ID NO: 185900 - RNA, 19 nt, Artificial Sequence
  Description of Artificial Sequence: Synthetic oligonucleotide
gguggcaagacuugucuau

SEQ ID NO: 185901 - RNA, 19 nt, Artificial Sequence
  Description of Artificial Sequence: Synthetic oligonucleotide
ccaaguacuaguggaccug

SEQ ID NO: 185902 - RNA, 19 nt, Artificial Sequence
  Description of Artificial Sequence: Synthetic oligonucleotide
caaccagccagguuacuau

SEQ ID NO: 185903 - RNA, 19 nt, Artificial Sequence
  Description of Artificial Sequence: Synthetic oligonucleotide
gcggauucacacccaacga

SEQ ID NO: 185904 - RNA, 19 nt, Artificial Sequence
  Description of Artificial Sequence: Synthetic oligonucleotide
ccaacgaaccacgccugcg

SEQ ID NO: 185905 - RNA, 19 nt, Artificial Sequence
  Description of Artificial Sequence: Synthetic oligonucleotide
cugccacacauagcagcag

SEQ ID NO: 185906 - RNA, 19 nt, Artificial Sequence
  Description of Artificial Sequence: Synthetic oligonucleotide
gcucacugcugggagucgg

SEQ ID NO: 185907 - RNA, 19 nt, Artificial Sequence
  Description of Artificial Sequence: Synthetic oligonucleotide
gcuuauccccaauaacaua

SEQ ID NO: 185908 - RNA, 19 nt, Artificial Sequence
  Description of Artificial Sequence: Synthetic oligonucleotide
aguaggguguggagcuaca

SEQ ID NO: 185909 - RNA, 19 nt, Artificial Sequence
  Description of Artificial Sequence: Synthetic oligonucleotide
cagauccaauacgguggcc

SEQ ID NO: 185910 - RNA, 19 nt, Artificial Sequence
  Description of Artificial Sequence: Synthetic oligonucleotide
cuagccugacuucuguuuu

SEQ ID NO: 185911 - RNA, 19 nt, Artificial Sequence
  Description of Artificial Sequence: Synthetic oligonucleotide
guauuucaucacaccaagu

SEQ ID NO: 185912 - RNA, 19 nt, Artificial Sequence
  Description of Artificial Sequence: Synthetic oligonucleotide
uggcuugacuaggcucagc

SEQ ID NO: 185913 - RNA, 19 nt, Artificial Sequence
  Description of Artificial Sequence: Synthetic oligonucleotide
cagcagcagcagcagcaac

SEQ ID NO: 185914 - RNA, 19 nt, Artificial Sequence
  Description of Artificial Sequence: Synthetic oligonucleotide
ggguccgacgggcaggaga

SEQ ID NO: 185915 - RNA, 19 nt, Artificial Sequence
  Description of Artificial Sequence: Synthetic oligonucleotide
ccaggaucgauuauguuuu

SEQ ID NO: 185916 - RNA, 19 nt, Artificial Sequence
  Description of Artificial Sequence: Synthetic oligonucleotide
ccucaaccagccagguuac

SEQ ID NO: 185917 - RNA, 19 nt, Artificial Sequence
  Description of Artificial Sequence: Synthetic oligonucleotide
cugcgccuuaagccgccgc

SEQ ID NO: 185918 - RNA, 19 nt, Artificial Sequence
  Description of Artificial Sequence: Synthetic oligonucleotide
gacuuagauuuuggggccu

SEQ ID NO: 185919 - RNA, 19 nt, Artificial Sequence
  Description of Artificial Sequence: Synthetic oligonucleotide
ugcuaccggccuuggucau

SEQ ID NO: 185920 - RNA, 19 nt, Artificial Sequence
  Description of Artificial Sequence: Synthetic oligonucleotide
cccaggaucgauuauguuu

SEQ ID NO: 185921 - RNA, 19 nt, Artificial Sequence
  Description of Artificial Sequence: Synthetic oligonucleotide
gaagcggcucguggggcuc

SEQ ID NO: 185922 - RNA, 19 nt, Artificial Sequence
  Description of Artificial Sequence: Synthetic oligonucleotide
aaccacgccugcgccuuaa

SEQ ID NO: 185923 - RNA, 19 nt, Artificial Sequence
  Description of Artificial Sequence: Synthetic oligonucleotide
auccaauacgguggccuuu

SEQ ID NO: 185924 - RNA, 19 nt, Artificial Sequence
  Description of Artificial Sequence: Synthetic oligonucleotide
cuccccgccccuaagccua

SEQ ID NO: 185925 - RNA, 19 nt, Artificial Sequence
  Description of Artificial Sequence: Synthetic oligonucleotide
ggcuacacucucugaacua

SEQ ID NO: 185926 - RNA, 19 nt, Artificial Sequence
  Description of Artificial Sequence: Synthetic oligonucleotide
gccuuacauagcuuugugu

SEQ ID NO: 185927 - RNA, 19 nt, Artificial Sequence
  Description of Artificial Sequence: Synthetic oligonucleotide
agacucacuuuggccgaga

SEQ ID NO: 185928 - RNA, 19 nt, Artificial Sequence
  Description of Artificial Sequence: Synthetic oligonucleotide
ccgccccuaagccuauucc

SEQ ID NO: 185929 - RNA, 19 nt, Artificial Sequence
  Description of Artificial Sequence: Synthetic oligonucleotide
gcccucuaaucugucccgg

SEQ ID NO: 185930 - RNA, 19 nt, Artificial Sequence
  Description of Artificial Sequence: Synthetic oligonucleotide
gggcuacacucucugaacu

SEQ ID NO: 185931 - RNA, 19 nt, Artificial Sequence
  Description of Artificial Sequence: Synthetic oligonucleotide
guuuugaguggcagaccua

SEQ ID NO: 185932 - RNA, 19 nt, Artificial Sequence
  Description of Artificial Sequence: Synthetic oligonucleotide
cgauuauguuuucggggug

SEQ ID NO: 185933 - RNA, 19 nt, Artificial Sequence
  Description of Artificial Sequence: Synthetic oligonucleotide
cucucgcuucgaagcuuuc

SEQ ID NO: 185934 - RNA, 19 nt, Artificial Sequence
  Description of Artificial Sequence: Synthetic oligonucleotide
gacuagccugacuucuguu

SEQ ID NO: 185935 - RNA, 19 nt, Artificial Sequence
  Description of Artificial Sequence: Synthetic oligonucleotide
gcgccuuaagccgccgccg

SEQ ID NO: 185936 - RNA, 19 nt, Artificial Sequence
  Description of Artificial Sequence: Synthetic oligonucleotide
cggcuaagcggguuccugc

SEQ ID NO: 185937 - RNA, 19 nt, Artificial Sequence
  Description of Artificial Sequence: Synthetic oligonucleotide
cccaacgaaccacgccugc

SEQ ID NO: 185938 - RNA, 19 nt, Artificial Sequence
  Description of Artificial Sequence: Synthetic oligonucleotide
ccaauacgguggccuuugg

SEQ ID NO: 185939 - RNA, 19 nt, Artificial Sequence
  Description of Artificial Sequence: Synthetic oligonucleotide
ugacgccggcuaagcgggu

SEQ ID NO: 185940 - RNA, 19 nt, Artificial Sequence
  Description of Artificial Sequence: Synthetic oligonucleotide
gcuaagcggguuccugcuc

SEQ ID NO: 185941 - RNA, 19 nt, Artificial Sequence
  Description of Artificial Sequence: Synthetic oligonucleotide
gguggcuugcgaggacgag

SEQ ID NO: 185942 - RNA, 19 nt, Artificial Sequence
  Description of Artificial Sequence: Synthetic oligonucleotide
cuauccagaugggccacua

SEQ ID NO: 185943 - RNA, 19 nt, Artificial Sequence
  Description of Artificial Sequence: Synthetic oligonucleotide
cagguaggucugacgcuaa

SEQ ID NO: 185944 - RNA, 19 nt, Artificial Sequence
  Description of Artificial Sequence: Synthetic oligonucleotide
ccgagacaauucuggugug

SEQ ID NO: 185945 - RNA, 19 nt, Artificial Sequence
  Description of Artificial Sequence: Synthetic oligonucleotide
ggcuaagcggguuccugcu

SEQ ID NO: 185946 - RNA, 19 nt, Artificial Sequence
  Description of Artificial Sequence: Synthetic oligonucleotide
gccacuagggcuacacucu

SEQ ID NO: 185947 - RNA, 19 nt, Artificial Sequence
  Description of Artificial Sequence: Synthetic oligonucleotide
gcuacacucucugaacuau

SEQ ID NO: 185948 - RNA, 19 nt, Artificial Sequence
  Description of Artificial Sequence: Synthetic oligonucleotide
cagggacuuaaugcucuaa

SEQ ID NO: 185949 - RNA, 19 nt, Artificial Sequence
  Description of Artificial Sequence: Synthetic oligonucleotide
cggacauggauuuaauaau

SEQ ID NO: 185950 - RNA, 19 nt, Artificial Sequence
  Description of Artificial Sequence: Synthetic oligonucleotide
ggcuugcgaggacgagagc

SEQ ID NO: 185951 - RNA, 19 nt, Artificial Sequence
  Description of Artificial Sequence: Synthetic oligonucleotide
gcccuugcuaccggccuug

SEQ ID NO: 185952 - RNA, 19 nt, Artificial Sequence
  Description of Artificial Sequence: Synthetic oligonucleotide
gcuaccggccuuggucaug

SEQ ID NO: 185953 - RNA, 19 nt, Artificial Sequence
  Description of Artificial Sequence: Synthetic oligonucleotide
cgccuuaagccgccgccgc

SEQ ID NO: 185954 - RNA, 19 nt, Artificial Sequence
  Description of Artificial Sequence: Synthetic oligonucleotide
gcagcagcagcagcagcaa

SEQ ID NO: 185955 - RNA, 19 nt, Artificial Sequence
  Description of Artificial Sequence: Synthetic oligonucleotide
cgaagucagagugaauucu

SEQ ID NO: 185956 - RNA, 19 nt, Artificial Sequence
  Description of Artificial Sequence: Synthetic oligonucleotide
ccggcuaagcggguuccug

SEQ ID NO: 185957 - RNA, 19 nt, Artificial Sequence
  Description of Artificial Sequence: Synthetic oligonucleotide
gaaccacgccugcgccuua

SEQ ID NO: 185958 - RNA, 19 nt, Artificial Sequence
  Description of Artificial Sequence: Synthetic oligonucleotide
gcuugucgcggagguuccc

SEQ ID NO: 185959 - RNA, 19 nt, Artificial Sequence
  Description of Artificial Sequence: Synthetic oligonucleotide
gcggagguucccgcccuug

SEQ ID NO: 185960 - RNA, 19 nt, Artificial Sequence
  Description of Artificial Sequence: Synthetic oligonucleotide
cgacggaagaguacugagu

SEQ ID NO: 185961 - RNA, 19 nt, Artificial Sequence
  Description of Artificial Sequence: Synthetic oligonucleotide
cguagaugguguucacacu

SEQ ID NO: 185962 - RNA, 19 nt, Artificial Sequence
  Description of Artificial Sequence: Synthetic oligonucleotide
ggaggccaaauggcaucaa

SEQ ID NO: 185963 - RNA, 19 nt, Artificial Sequence
  Description of Artificial Sequence: Synthetic oligonucleotide
cgccccuaagccuauuccu

SEQ ID NO: 185964 - RNA, 19 nt, Artificial Sequence
  Description of Artificial Sequence: Synthetic oligonucleotide
guccgacgggcaggagaga

SEQ ID NO: 185965 - RNA, 19 nt, Artificial Sequence
  Description of Artificial Sequence: Synthetic oligonucleotide
gccccuaagccuauuccuu

SEQ ID NO: 185966 - RNA, 19 nt, Artificial Sequence
  Description of Artificial Sequence: Synthetic oligonucleotide
ccuauuccuuaggcaugca

SEQ ID NO: 185967 - RNA, 19 nt, Artificial Sequence
  Description of Artificial Sequence: Synthetic oligonucleotide
cccucuaaucugucccggu

SEQ ID NO: 185968 - RNA, 19 nt, Artificial Sequence
  Description of Artificial Sequence: Synthetic oligonucleotide
gcacaacccaggaucgauu

SEQ ID NO: 185969 - RNA, 19 nt, Artificial Sequence
  Description of Artificial Sequence: Synthetic oligonucleotide
gggguccgacgggcaggag

SEQ ID NO: 185970 - RNA, 19 nt, Artificial Sequence
  Description of Artificial Sequence: Synthetic oligonucleotide
ggaccucauucaggucgcu

SEQ ID NO: 185971 - RNA, 19 nt, Artificial Sequence
  Description of Artificial Sequence: Synthetic oligonucleotide
gcggcucguggggcucagc

SEQ ID NO: 185972 - RNA, 19 nt, Artificial Sequence
  Description of Artificial Sequence: Synthetic oligonucleotide
ccuauccagaugggccacu

SEQ ID NO: 185973 - RNA, 19 nt, Artificial Sequence
  Description of Artificial Sequence: Synthetic oligonucleotide
gccggcuaagcggguuccu

SEQ ID NO: 185974 - RNA, 19 nt, Artificial Sequence
  Description of Artificial Sequence: Synthetic oligonucleotide
cgaggacgagagccagacu

SEQ ID NO: 185975 - RNA, 19 nt, Artificial Sequence
  Description of Artificial Sequence: Synthetic oligonucleotide
aaauuauagaggcaagggc

SEQ ID NO: 185976 - RNA, 19 nt, Artificial Sequence
  Description of Artificial Sequence: Synthetic oligonucleotide
acuacugagguuuucaucc

SEQ ID NO: 185977 - RNA, 19 nt, Artificial Sequence
  Description of Artificial Sequence: Synthetic oligonucleotide
aauaugucuacuaugauag

SEQ ID NO: 185978 - RNA, 19 nt, Artificial Sequence
  Description of Artificial Sequence: Synthetic oligonucleotide
aaaucuaauuucuuugugg

SEQ ID NO: 185979 - RNA, 19 nt, Artificial Sequence
  Description of Artificial Sequence: Synthetic oligonucleotide
aauaguaccauuugccauc

SEQ ID NO: 185980 - RNA, 19 nt, Artificial Sequence
  Description of Artificial Sequence: Synthetic oligonucleotide
ucuaacuaaauaaacuucc

SEQ ID NO: 185981 - RNA, 19 nt, Artificial Sequence
  Description of Artificial Sequence: Synthetic oligonucleotide
aucaucgaaucuuauaugc

SEQ ID NO: 185982 - RNA, 19 nt, Artificial Sequence
  Description of Artificial Sequence: Synthetic oligonucleotide
agguuuaauaaguggaucc

SEQ ID NO: 185983 - RNA, 19 nt, Artificial Sequence
  Description of Artificial Sequence: Synthetic oligonucleotide
aaaucuccgaguuacaaca

SEQ ID NO: 185984 - RNA, 19 nt, Artificial Sequence
  Description of Artificial Sequence: Synthetic oligonucleotide
aaaucuaugauuguauaug

SEQ ID NO: 185985 - RNA, 19 nt, Artificial Sequence
  Description of Artificial Sequence: Synthetic oligonucleotide
  modified_base (7)..(7): a, c, u, g, unknown or other
cuugaunuaagccagcauc

SEQ ID NO: 185986 - RNA, 19 nt, Artificial Sequence
  Description of Artificial Sequence: Synthetic oligonucleotide
aaucugauaaaggauuuac

SEQ ID NO: 185987 - RNA, 19 nt, Artificial Sequence
  Description of Artificial Sequence: Synthetic oligonucleotide
ucuuaaaugcucuaggagu

SEQ ID NO: 185988 - RNA, 19 nt, Artificial Sequence
  Description of Artificial Sequence: Synthetic oligonucleotide
aagguaucuagcuugucuc

SEQ ID NO: 185989 - RNA, 19 nt, Artificial Sequence
  Description of Artificial Sequence: Synthetic oligonucleotide
ugcaaucaaauuauagagg

SEQ ID NO: 185990 - RNA, 19 nt, Artificial Sequence
  Description of Artificial Sequence: Synthetic oligonucleotide
gaaaagaccuuucaucuag

SEQ ID NO: 185991 - RNA, 19 nt, Artificial Sequence
  Description of Artificial Sequence: Synthetic oligonucleotide
uauucagcggcucaaaugu

SEQ ID NO: 185992 - RNA, 19 nt, Artificial Sequence
  Description of Artificial Sequence: Synthetic oligonucleotide
uuguguuuuaauguggugg

SEQ ID NO: 185993 - RNA, 19 nt, Artificial Sequence
  Description of Artificial Sequence: Synthetic oligonucleotide
ugugaguugaccuuuacaa

SEQ ID NO: 185994 - RNA, 19 nt, Artificial Sequence
  Description of Artificial Sequence: Synthetic oligonucleotide
uaagaaaaucgcuugaggu

SEQ ID NO: 185995 - RNA, 19 nt, Artificial Sequence
  Description of Artificial Sequence: Synthetic oligonucleotide
gauuguauaugucagugac

SEQ ID NO: 185996 - RNA, 19 nt, Artificial Sequence
  Description of Artificial Sequence: Synthetic oligonucleotide
uguauuacucauauacuug

SEQ ID NO: 185997 - RNA, 19 nt, Artificial Sequence
  Description of Artificial Sequence: Synthetic oligonucleotide
uucucuuaggcaaacagga

SEQ ID NO: 185998 - RNA, 19 nt, Artificial Sequence
  Description of Artificial Sequence: Synthetic oligonucleotide
cuaccugugucuuaaaugc

SEQ ID NO: 185999 - RNA, 19 nt, Artificial Sequence
  Description of Artificial Sequence: Synthetic oligonucleotide
uuacucauauacuuguucc

SEQ ID NO: 186000 - RNA, 19 nt, Artificial Sequence
  Description of Artificial Sequence: Synthetic oligonucleotide
  modified_base (6)..(6): a, c, u, g, unknown or other
uugaunuaagccagcaucc

SEQ ID NO: 186001 - RNA, 19 nt, Artificial Sequence
  Description of Artificial Sequence: Synthetic oligonucleotide
uauuccagcccucagucgg

SEQ ID NO: 186002 - RNA, 19 nt, Artificial Sequence
  Description of Artificial Sequence: Synthetic oligonucleotide
ugaucaauucagcauauga

SEQ ID NO: 186003 - RNA, 19 nt, Artificial Sequence
  Description of Artificial Sequence: Synthetic oligonucleotide
ugaagggaguucuugaucc

SEQ ID NO: 186004 - RNA, 19 nt, Artificial Sequence
  Description of Artificial Sequence: Synthetic oligonucleotide
uguaauccauccaauagga

SEQ ID NO: 186005 - RNA, 19 nt, Artificial Sequence
  Description of Artificial Sequence: Synthetic oligonucleotide
acuaugauagaaucauuuc

SEQ ID NO: 186006 - RNA, 19 nt, Artificial Sequence
  Description of Artificial Sequence: Synthetic oligonucleotide
ucuuuuaacuguauauaug

SEQ ID NO: 186007 - RNA, 19 nt, Artificial Sequence
  Description of Artificial Sequence: Synthetic oligonucleotide
uauccugugaaaucuauga

SEQ ID NO: 186008 - RNA, 19 nt, Artificial Sequence
  Description of Artificial Sequence: Synthetic oligonucleotide
aaaggauuuacauucgguu

SEQ ID NO: 186009 - RNA, 19 nt, Artificial Sequence
  Description of Artificial Sequence: Synthetic oligonucleotide
ucaaauuauagaggcaagg

SEQ ID NO: 186010 - RNA, 19 nt, Artificial Sequence
  Description of Artificial Sequence: Synthetic oligonucleotide
ugcguuuggguuaaugagg

SEQ ID NO: 186011 - RNA, 19 nt, Artificial Sequence
  Description of Artificial Sequence: Synthetic oligonucleotide
aaagcguccuaccuguguc

SEQ ID NO: 186012 - RNA, 19 nt, Artificial Sequence
  Description of Artificial Sequence: Synthetic oligonucleotide
aauuagugugcauacaguu

SEQ ID NO: 186013 - RNA, 19 nt, Artificial Sequence
  Description of Artificial Sequence: Synthetic oligonucleotide
uaugacuuagcuauuucac

SEQ ID NO: 186014 - RNA, 19 nt, Artificial Sequence
  Description of Artificial Sequence: Synthetic oligonucleotide
agcugaagcaccuuuagug

SEQ ID NO: 186015 - RNA, 19 nt, Artificial Sequence
  Description of Artificial Sequence: Synthetic oligonucleotide
guuacugagaucuuagcac

SEQ ID NO: 186016 - RNA, 19 nt, Artificial Sequence
  Description of Artificial Sequence: Synthetic oligonucleotide
aaagggauuuauuugugau

SEQ ID NO: 186017 - RNA, 19 nt, Artificial Sequence
  Description of Artificial Sequence: Synthetic oligonucleotide
uauacuuguuccacaaucu

SEQ ID NO: 186018 - RNA, 19 nt, Artificial Sequence
  Description of Artificial Sequence: Synthetic oligonucleotide
uuccuauauauauuuagcu

SEQ ID NO: 186019 - RNA, 19 nt, Artificial Sequence
  Description of Artificial Sequence: Synthetic oligonucleotide
aguauuauuucuugguaca

SEQ ID NO: 186020 - RNA, 19 nt, Artificial Sequence
  Description of Artificial Sequence: Synthetic oligonucleotide
ucuacuaugauagaaucau

SEQ ID NO: 186021 - RNA, 19 nt, Artificial Sequence
  Description of Artificial Sequence: Synthetic oligonucleotide
cuuaaaugcucuaggagug

SEQ ID NO: 186022 - RNA, 19 nt, Artificial Sequence
  Description of Artificial Sequence: Synthetic oligonucleotide
uaagguaucuagcuugucu

SEQ ID NO: 186023 - RNA, 19 nt, Artificial Sequence
  Description of Artificial Sequence: Synthetic oligonucleotide
cuugaggugcaccacaagg

SEQ ID NO: 186024 - RNA, 19 nt, Artificial Sequence
  Description of Artificial Sequence: Synthetic oligonucleotide
uucaguauuauuucuuggu

SEQ ID NO: 186025 - RNA, 19 nt, Artificial Sequence
  Description of Artificial Sequence: Synthetic oligonucleotide
aaagcagacaaugcugcac

SEQ ID NO: 186026 - RNA, 19 nt, Artificial Sequence
  Description of Artificial Sequence: Synthetic oligonucleotide
uacacaauccauuuucaga

SEQ ID NO: 186027 - RNA, 19 nt, Artificial Sequence
  Description of Artificial Sequence: Synthetic oligonucleotide
uuaauaaguggauccauuc

SEQ ID NO: 186028 - RNA, 19 nt, Artificial Sequence
  Description of Artificial Sequence: Synthetic oligonucleotide
caaauuauagaggcaaggg

SEQ ID NO: 186029 - RNA, 19 nt, Artificial Sequence
  Description of Artificial Sequence: Synthetic oligonucleotide
agaagaguacguaugcugc

SEQ ID NO: 186030 - RNA, 19 nt, Artificial Sequence
  Description of Artificial Sequence: Synthetic oligonucleotide
uucuaacuaaauaaacuuc

SEQ ID NO: 186031 - RNA, 19 nt, Artificial Sequence
  Description of Artificial Sequence: Synthetic oligonucleotide
ucauguaucuacuguaaga

SEQ ID NO: 186032 - RNA, 19 nt, Artificial Sequence
  Description of Artificial Sequence: Synthetic oligonucleotide
uguaauccaacucaucgau

SEQ ID NO: 186033 - RNA, 19 nt, Artificial Sequence
  Description of Artificial Sequence: Synthetic oligonucleotide
ugacaaagcagacaaugcu

SEQ ID NO: 186034 - RNA, 19 nt, Artificial Sequence
  Description of Artificial Sequence: Synthetic oligonucleotide
acauucgguuaucugaaac

SEQ ID NO: 186035 - RNA, 19 nt, Artificial Sequence
  Description of Artificial Sequence: Synthetic oligonucleotide
auaaggugcuccuuaagug

SEQ ID NO: 186036 - RNA, 19 nt, Artificial Sequence
  Description of Artificial Sequence: Synthetic oligonucleotide
ugacuaucaucuuaucugc

SEQ ID NO: 186037 - RNA, 19 nt, Artificial Sequence
  Description of Artificial Sequence: Synthetic oligonucleotide
cauuaauuagugugcauac

SEQ ID NO: 186038 - RNA, 19 nt, Artificial Sequence
  Description of Artificial Sequence: Synthetic oligonucleotide
uacuaugauagaaucauuu

SEQ ID NO: 186039 - RNA, 19 nt, Artificial Sequence
  Description of Artificial Sequence: Synthetic oligonucleotide
ugguacuugucauugaggu

SEQ ID NO: 186040 - RNA, 19 nt, Artificial Sequence
  Description of Artificial Sequence: Synthetic oligonucleotide
uugccuaaauugaugaacu

SEQ ID NO: 186041 - RNA, 19 nt, Artificial Sequence
  Description of Artificial Sequence: Synthetic oligonucleotide
uaaaggauuuacauucggu

SEQ ID NO: 186042 - RNA, 19 nt, Artificial Sequence
  Description of Artificial Sequence: Synthetic oligonucleotide
  modified_base (4)..(4): a, c, u, g, unknown or other
gaunuaagccagcauccug

SEQ ID NO: 186043 - RNA, 19 nt, Artificial Sequence
  Description of Artificial Sequence: Synthetic oligonucleotide
uuaagagacaauuucuguu

SEQ ID NO: 186044 - RNA, 19 nt, Artificial Sequence
  Description of Artificial Sequence: Synthetic oligonucleotide
gaccacaucugcuugauca

SEQ ID NO: 186045 - RNA, 19 nt, Artificial Sequence
  Description of Artificial Sequence: Synthetic oligonucleotide
aacuccgacauauccaagu

SEQ ID NO: 186046 - RNA, 19 nt, Artificial Sequence
  Description of Artificial Sequence: Synthetic oligonucleotide
ucaucuuaucugcagguac

SEQ ID NO: 186047 - RNA, 19 nt, Artificial Sequence
  Description of Artificial Sequence: Synthetic oligonucleotide
aacuccucaucucagacuu

SEQ ID NO: 186048 - RNA, 19 nt, Artificial Sequence
  Description of Artificial Sequence: Synthetic oligonucleotide
aauguauuacucauauacu

SEQ ID NO: 186049 - RNA, 19 nt, Artificial Sequence
  Description of Artificial Sequence: Synthetic oligonucleotide
agugacuaucaucuuaucu

SEQ ID NO: 186050 - RNA, 19 nt, Artificial Sequence
  Description of Artificial Sequence: Synthetic oligonucleotide
gaucaauucagcauaugac

SEQ ID NO: 186051 - RNA, 19 nt, Artificial Sequence
  Description of Artificial Sequence: Synthetic oligonucleotide
ugucuuaaaugcucuagga

SEQ ID NO: 186052 - RNA, 19 nt, Artificial Sequence
  Description of Artificial Sequence: Synthetic oligonucleotide
auaugacuuagcuauuuca

SEQ ID NO: 186053 - RNA, 19 nt, Artificial Sequence
  Description of Artificial Sequence: Synthetic oligonucleotide
ugcuaucugguuuauucag

SEQ ID NO: 186054 - RNA, 19 nt, Artificial Sequence
  Description of Artificial Sequence: Synthetic oligonucleotide
ucaucgaaucuuauaugcc

SEQ ID NO: 186055 - RNA, 19 nt, Artificial Sequence
  Description of Artificial Sequence: Synthetic oligonucleotide
uacaagucucuucaguaca

SEQ ID NO: 186056 - RNA, 19 nt, Artificial Sequence
  Description of Artificial Sequence: Synthetic oligonucleotide
auauauauuuagcuuguaa

SEQ ID NO: 186057 - RNA, 19 nt, Artificial Sequence
  Description of Artificial Sequence: Synthetic oligonucleotide
aagcuaagaguucuuggca

SEQ ID NO: 186058 - RNA, 19 nt, Artificial Sequence
  Description of Artificial Sequence: Synthetic oligonucleotide
uaaggugcuccuuaaguga

SEQ ID NO: 186059 - RNA, 19 nt, Artificial Sequence
  Description of Artificial Sequence: Synthetic oligonucleotide
uuucacagagcuucaauuc

SEQ ID NO: 186060 - RNA, 19 nt, Artificial Sequence
  Description of Artificial Sequence: Synthetic oligonucleotide
uguaguugauaucaguguu

SEQ ID NO: 186061 - RNA, 19 nt, Artificial Sequence
  Description of Artificial Sequence: Synthetic oligonucleotide
uuacauucgguuaucugaa

SEQ ID NO: 186062 - RNA, 19 nt, Artificial Sequence
  Description of Artificial Sequence: Synthetic oligonucleotide
gaugcucuuuacaauuugg

SEQ ID NO: 186063 - RNA, 19 nt, Artificial Sequence
  Description of Artificial Sequence: Synthetic oligonucleotide
auguauuacucauauacuu

SEQ ID NO: 186064 - RNA, 19 nt, Artificial Sequence
  Description of Artificial Sequence: Synthetic oligonucleotide
uguugauauccagagaacu

SEQ ID NO: 186065 - RNA, 19 nt, Artificial Sequence
  Description of Artificial Sequence: Synthetic oligonucleotide
caguauuauuucuugguac

SEQ ID NO: 186066 - RNA, 19 nt, Artificial Sequence
  Description of Artificial Sequence: Synthetic oligonucleotide
uacuguaagaaaaucgcuu

SEQ ID NO: 186067 - RNA, 19 nt, Artificial Sequence
  Description of Artificial Sequence: Synthetic oligonucleotide
aaucgcuugaggugcacca

SEQ ID NO: 186068 - RNA, 19 nt, Artificial Sequence
  Description of Artificial Sequence: Synthetic oligonucleotide
uugacauaccggcacauuc

SEQ ID NO: 186069 - RNA, 19 nt, Artificial Sequence
  Description of Artificial Sequence: Synthetic oligonucleotide
agcuaagaguucuuggcag

SEQ ID NO: 186070 - RNA, 19 nt, Artificial Sequence
  Description of Artificial Sequence: Synthetic oligonucleotide
ugugucuuaaaugcucuag

SEQ ID NO: 186071 - RNA, 19 nt, Artificial Sequence
  Description of Artificial Sequence: Synthetic oligonucleotide
uccaauaggaaagcuaaga

SEQ ID NO: 186072 - RNA, 19 nt, Artificial Sequence
  Description of Artificial Sequence: Synthetic oligonucleotide
uaucaucgaaucuuauaug

SEQ ID NO: 186073 - RNA, 19 nt, Artificial Sequence
  Description of Artificial Sequence: Synthetic oligonucleotide
ugucuacuaugauagaauc

SEQ ID NO: 186074 - RNA, 19 nt, Artificial Sequence
  Description of Artificial Sequence: Synthetic oligonucleotide
auagacauuuugaucuccc

SEQ ID NO: 186075 - RNA, 19 nt, Artificial Sequence
  Description of Artificial Sequence: Synthetic oligonucleotide
aauggugcuaucugguuua

SEQ ID NO: 186076 - RNA, 19 nt, Artificial Sequence
  Description of Artificial Sequence: Synthetic oligonucleotide
acucauauacuuguuccac

SEQ ID NO: 186077 - RNA, 19 nt, Artificial Sequence
  Description of Artificial Sequence: Synthetic oligonucleotide
ucgcuauuggcucuuggcc

SEQ ID NO: 186078 - RNA, 19 nt, Artificial Sequence
  Description of Artificial Sequence: Synthetic oligonucleotide
uccuauauauauuuagcuu

SEQ ID NO: 186079 - RNA, 19 nt, Artificial Sequence
  Description of Artificial Sequence: Synthetic oligonucleotide
uccgacauauccaagucau

SEQ ID NO: 186080 - RNA, 19 nt, Artificial Sequence
  Description of Artificial Sequence: Synthetic oligonucleotide
uauuauuucuugguacagc

SEQ ID NO: 186081 - RNA, 19 nt, Artificial Sequence
  Description of Artificial Sequence: Synthetic oligonucleotide
augauuguauaugucagug

SEQ ID NO: 186082 - RNA, 19 nt, Artificial Sequence
  Description of Artificial Sequence: Synthetic oligonucleotide
aguagacaucuugacauac

SEQ ID NO: 186083 - RNA, 19 nt, Artificial Sequence
  Description of Artificial Sequence: Synthetic oligonucleotide
ucaaauccucauguaaucc

SEQ ID NO: 186084 - RNA, 19 nt, Artificial Sequence
  Description of Artificial Sequence: Synthetic oligonucleotide
aaaucgcuugaggugcacc

SEQ ID NO: 186085 - RNA, 19 nt, Artificial Sequence
  Description of Artificial Sequence: Synthetic oligonucleotide
ugugcauacaguuuucauu

SEQ ID NO: 186086 - RNA, 19 nt, Artificial Sequence
  Description of Artificial Sequence: Synthetic oligonucleotide
gaaucuuauaugccuggug

SEQ ID NO: 186087 - RNA, 19 nt, Artificial Sequence
  Description of Artificial Sequence: Synthetic oligonucleotide
acauauaugucaucccgcu

SEQ ID NO: 186088 - RNA, 19 nt, Artificial Sequence
  Description of Artificial Sequence: Synthetic oligonucleotide
uuucauuaauuagugugca

SEQ ID NO: 186089 - RNA, 19 nt, Artificial Sequence
  Description of Artificial Sequence: Synthetic oligonucleotide
uaucaucuuaucugcaggu

SEQ ID NO: 186090 - RNA, 19 nt, Artificial Sequence
  Description of Artificial Sequence: Synthetic oligonucleotide
aucuuauaugccugguguc

SEQ ID NO: 186091 - RNA, 19 nt, Artificial Sequence
  Description of Artificial Sequence: Synthetic oligonucleotide
uugaccuuuacaagucucu

SEQ ID NO: 186092 - RNA, 19 nt, Artificial Sequence
  Description of Artificial Sequence: Synthetic oligonucleotide
uaucacuaacaccuguccu

SEQ ID NO: 186093 - RNA, 19 nt, Artificial Sequence
  Description of Artificial Sequence: Synthetic oligonucleotide
acagccauaagaaaaggcu

SEQ ID NO: 186094 - RNA, 19 nt, Artificial Sequence
  Description of Artificial Sequence: Synthetic oligonucleotide
acaauuuggucuucagaug

SEQ ID NO: 186095 - RNA, 19 nt, Artificial Sequence
  Description of Artificial Sequence: Synthetic oligonucleotide
uaauguccaccucccaucc

SEQ ID NO: 186096 - RNA, 19 nt, Artificial Sequence
  Description of Artificial Sequence: Synthetic oligonucleotide
  modified_base (18)..(18): a, c, u, g, unknown or other
uaacaccuguccuugaunu

SEQ ID NO: 186097 - RNA, 19 nt, Artificial Sequence
  Description of Artificial Sequence: Synthetic oligonucleotide
uucgguuaucugaaacucc

SEQ ID NO: 186098 - RNA, 19 nt, Artificial Sequence
  Description of Artificial Sequence: Synthetic oligonucleotide
ucuuauaugccugguguca

SEQ ID NO: 186099 - RNA, 19 nt, Artificial Sequence
  Description of Artificial Sequence: Synthetic oligonucleotide
uugagguaucacuaacacc

SEQ ID NO: 186100 - RNA, 19 nt, Artificial Sequence
  Description of Artificial Sequence: Synthetic oligonucleotide
aacauacccuguucuacca

SEQ ID NO: 186101 - RNA, 19 nt, Artificial Sequence
  Description of Artificial Sequence: Synthetic oligonucleotide
ugacauaccggcacauucu

SEQ ID NO: 186102 - RNA, 19 nt, Artificial Sequence
  Description of Artificial Sequence: Synthetic oligonucleotide
ugcaaagcguccuaccugu

SEQ ID NO: 186103 - RNA, 19 nt, Artificial Sequence
  Description of Artificial Sequence: Synthetic oligonucleotide
aggauuuacauucgguuau

SEQ ID NO: 186104 - RNA, 19 nt, Artificial Sequence
  Description of Artificial Sequence: Synthetic oligonucleotide
acguaugcugcuuuggaca

SEQ ID NO: 186105 - RNA, 19 nt, Artificial Sequence
  Description of Artificial Sequence: Synthetic oligonucleotide
aagggauugucaaaauuca

SEQ ID NO: 186106 - RNA, 19 nt, Artificial Sequence
  Description of Artificial Sequence: Synthetic oligonucleotide
guauaugucagugacuauc

SEQ ID NO: 186107 - RNA, 19 nt, Artificial Sequence
  Description of Artificial Sequence: Synthetic oligonucleotide
cauccaauaggaaagcuaa

SEQ ID NO: 186108 - RNA, 19 nt, Artificial Sequence
  Description of Artificial Sequence: Synthetic oligonucleotide
acauucaggacacacuaaa

SEQ ID NO: 186109 - RNA, 19 nt, Artificial Sequence
  Description of Artificial Sequence: Synthetic oligonucleotide
aaagcgagaaaagaccuuu

SEQ ID NO: 186110 - RNA, 19 nt, Artificial Sequence
  Description of Artificial Sequence: Synthetic oligonucleotide
cugcguuuggguuaaugag

SEQ ID NO: 186111 - RNA, 19 nt, Artificial Sequence
  Description of Artificial Sequence: Synthetic oligonucleotide
auucuauucaaauccucau

SEQ ID NO: 186112 - RNA, 19 nt, Artificial Sequence
  Description of Artificial Sequence: Synthetic oligonucleotide
ugcuugaucaauucagcau

SEQ ID NO: 186113 - RNA, 19 nt, Artificial Sequence
  Description of Artificial Sequence: Synthetic oligonucleotide
uguaccagcugacaaguuu

SEQ ID NO: 186114 - RNA, 19 nt, Artificial Sequence
  Description of Artificial Sequence: Synthetic oligonucleotide
caacggaauccucagacug

SEQ ID NO: 186115 - RNA, 19 nt, Artificial Sequence
  Description of Artificial Sequence: Synthetic oligonucleotide
uaacuuuguauugcauagg

SEQ ID NO: 186116 - RNA, 19 nt, Artificial Sequence
  Description of Artificial Sequence: Synthetic oligonucleotide
gggaaaaucaacuaaggua

SEQ ID NO: 186117 - RNA, 19 nt, Artificial Sequence
  Description of Artificial Sequence: Synthetic oligonucleotide
uuugcaaaagcaguauaau

SEQ ID NO: 186118 - RNA, 19 nt, Artificial Sequence
  Description of Artificial Sequence: Synthetic oligonucleotide
augccauuggggccguucc

SEQ ID NO: 186119 - RNA, 19 nt, Artificial Sequence
  Description of Artificial Sequence: Synthetic oligonucleotide
auguaauccaacucaucga

SEQ ID NO: 186120 - RNA, 19 nt, Artificial Sequence
  Description of Artificial Sequence: Synthetic oligonucleotide
aacggaauccucagacugg

SEQ ID NO: 186121 - RNA, 19 nt, Artificial Sequence
  Description of Artificial Sequence: Synthetic oligonucleotide
cuucagaugcaguggagac

SEQ ID NO: 186122 - RNA, 19 nt, Artificial Sequence
  Description of Artificial Sequence: Synthetic oligonucleotide
aucagcguguaccagcuga

SEQ ID NO: 186123 - RNA, 19 nt, Artificial Sequence
  Description of Artificial Sequence: Synthetic oligonucleotide
uugauaucaguguugccua

SEQ ID NO: 186124 - RNA, 19 nt, Artificial Sequence
  Description of Artificial Sequence: Synthetic oligonucleotide
cagccauaagaaaaggcug

SEQ ID NO: 186125 - RNA, 19 nt, Artificial Sequence
  Description of Artificial Sequence: Synthetic oligonucleotide
auugugucagcuuuugcua

SEQ ID NO: 186126 - RNA, 19 nt, Artificial Sequence
  Description of Artificial Sequence: Synthetic oligonucleotide
gcucuuuacaauuuggaca

SEQ ID NO: 186127 - RNA, 19 nt, Artificial Sequence
  Description of Artificial Sequence: Synthetic oligonucleotide
cauuguguuucacuucaag

SEQ ID NO: 186128 - RNA, 19 nt, Artificial Sequence
  Description of Artificial Sequence: Synthetic oligonucleotide
cauauccaagucauugaug

SEQ ID NO: 186129 - RNA, 19 nt, Artificial Sequence
  Description of Artificial Sequence: Synthetic oligonucleotide
ucuauugugucagcuuuug

SEQ ID NO: 186130 - RNA, 19 nt, Artificial Sequence
  Description of Artificial Sequence: Synthetic oligonucleotide
auuggggccguucccauug

SEQ ID NO: 186131 - RNA, 19 nt, Artificial Sequence
  Description of Artificial Sequence: Synthetic oligonucleotide
ugauagaaucauuucuuuu

SEQ ID NO: 186132 - RNA, 19 nt, Artificial Sequence
  Description of Artificial Sequence: Synthetic oligonucleotide
cucgcuauuggcucuuggc

SEQ ID NO: 186133 - RNA, 19 nt, Artificial Sequence
  Description of Artificial Sequence: Synthetic oligonucleotide
caucuugacauaccggcac

SEQ ID NO: 186134 - RNA, 19 nt, Artificial Sequence
  Description of Artificial Sequence: Synthetic oligonucleotide
agguuuauauuccacgcuu

SEQ ID NO: 186135 - RNA, 19 nt, Artificial Sequence
  Description of Artificial Sequence: Synthetic oligonucleotide
aucacuaacaccuguccuu

SEQ ID NO: 186136 - RNA, 19 nt, Artificial Sequence
  Description of Artificial Sequence: Synthetic oligonucleotide
gauagacauuuugaucucc

SEQ ID NO: 186137 - RNA, 19 nt, Artificial Sequence
  Description of Artificial Sequence: Synthetic oligonucleotide
agcggcucaaauguauuac

SEQ ID NO: 186138 - RNA, 19 nt, Artificial Sequence
  Description of Artificial Sequence: Synthetic oligonucleotide
ggaacaauaacuuuguauu

SEQ ID NO: 186139 - RNA, 19 nt, Artificial Sequence
  Description of Artificial Sequence: Synthetic oligonucleotide
acggaauccucagacuggc

SEQ ID NO: 186140 - RNA, 19 nt, Artificial Sequence
  Description of Artificial Sequence: Synthetic oligonucleotide
uccuaagggauugucaaaa

SEQ ID NO: 186141 - RNA, 19 nt, Artificial Sequence
  Description of Artificial Sequence: Synthetic oligonucleotide
cucauguaucuacuguaag

SEQ ID NO: 186142 - RNA, 19 nt, Artificial Sequence
  Description of Artificial Sequence: Synthetic oligonucleotide
aguacguaugcugcuuugg

SEQ ID NO: 186143 - RNA, 19 nt, Artificial Sequence
  Description of Artificial Sequence: Synthetic oligonucleotide
cagcauaugacuuagcuau

SEQ ID NO: 186144 - RNA, 19 nt, Artificial Sequence
  Description of Artificial Sequence: Synthetic oligonucleotide
cuaucaucgaaucuuauau

SEQ ID NO: 186145 - RNA, 19 nt, Artificial Sequence
  Description of Artificial Sequence: Synthetic oligonucleotide
guauuacucauauacuugu

SEQ ID NO: 186146 - RNA, 19 nt, Artificial Sequence
  Description of Artificial Sequence: Synthetic oligonucleotide
auaaacuuccaagcuacgu

SEQ ID NO: 186147 - RNA, 19 nt, Artificial Sequence
  Description of Artificial Sequence: Synthetic oligonucleotide
uacguaugcugcuuuggac

SEQ ID NO: 186148 - RNA, 19 nt, Artificial Sequence
  Description of Artificial Sequence: Synthetic oligonucleotide
agcgagaaaagaccuuuca

SEQ ID NO: 186149 - RNA, 19 nt, Artificial Sequence
  Description of Artificial Sequence: Synthetic oligonucleotide
aguuuauuccagcccucag

SEQ ID NO: 186150 - RNA, 19 nt, Artificial Sequence
  Description of Artificial Sequence: Synthetic oligonucleotide
cauaauacuacugagguuu

SEQ ID NO: 186151 - RNA, 19 nt, Artificial Sequence
  Description of Artificial Sequence: Synthetic oligonucleotide
uggauucaucaucugguuc

SEQ ID NO: 186152 - RNA, 19 nt, Artificial Sequence
  Description of Artificial Sequence: Synthetic oligonucleotide
guauuauuucuugguacag

SEQ ID NO: 186153 - RNA, 19 nt, Artificial Sequence
  Description of Artificial Sequence: Synthetic oligonucleotide
uucaaguacugcacaaguu

SEQ ID NO: 186154 - RNA, 19 nt, Artificial Sequence
  Description of Artificial Sequence: Synthetic oligonucleotide
uaaguggauccauucuaac

SEQ ID NO: 186155 - RNA, 19 nt, Artificial Sequence
  Description of Artificial Sequence: Synthetic oligonucleotide
aaaaucgcuugaggugcac

SEQ ID NO: 186156 - RNA, 19 nt, Artificial Sequence
  Description of Artificial Sequence: Synthetic oligonucleotide
ccaauaggaaagcuaagag

SEQ ID NO: 186157 - RNA, 19 nt, Artificial Sequence
  Description of Artificial Sequence: Synthetic oligonucleotide
cugaaacuccucaucucag

SEQ ID NO: 186158 - RNA, 19 nt, Artificial Sequence
  Description of Artificial Sequence: Synthetic oligonucleotide
agaguugucaaugggucca

SEQ ID NO: 186159 - RNA, 19 nt, Artificial Sequence
  Description of Artificial Sequence: Synthetic oligonucleotide
gccuaaauugaugaacugg

SEQ ID NO: 186160 - RNA, 19 nt, Artificial Sequence
  Description of Artificial Sequence: Synthetic oligonucleotide
agcugccuaucaucgaauc

SEQ ID NO: 186161 - RNA, 19 nt, Artificial Sequence
  Description of Artificial Sequence: Synthetic oligonucleotide
uucagcggcucaaauguau

SEQ ID NO: 186162 - RNA, 19 nt, Artificial Sequence
  Description of Artificial Sequence: Synthetic oligonucleotide
aguccaaagcgagaaaaga

SEQ ID NO: 186163 - RNA, 19 nt, Artificial Sequence
  Description of Artificial Sequence: Synthetic oligonucleotide
gguuacugagaucuuagca

SEQ ID NO: 186164 - RNA, 19 nt, Artificial Sequence
  Description of Artificial Sequence: Synthetic oligonucleotide
gaagcugccuaucaucgaa

SEQ ID NO: 186165 - RNA, 19 nt, Artificial Sequence
  Description of Artificial Sequence: Synthetic oligonucleotide
ucucaagaguaggagauua

SEQ ID NO: 186166 - RNA, 19 nt, Artificial Sequence
  Description of Artificial Sequence: Synthetic oligonucleotide
ucucgcuauuggcucuugg

SEQ ID NO: 186167 - RNA, 19 nt, Artificial Sequence
  Description of Artificial Sequence: Synthetic oligonucleotide
aguacugcacaaguuaaaa

SEQ ID NO: 186168 - RNA, 19 nt, Artificial Sequence
  Description of Artificial Sequence: Synthetic oligonucleotide
cauaugacuuagcuauuuc

SEQ ID NO: 186169 - RNA, 19 nt, Artificial Sequence
  Description of Artificial Sequence: Synthetic oligonucleotide
ugccuaaauugaugaacug

SEQ ID NO: 186170 - RNA, 19 nt, Artificial Sequence
  Description of Artificial Sequence: Synthetic oligonucleotide
aguaugguggguauaacuu

SEQ ID NO: 186171 - RNA, 19 nt, Artificial Sequence
  Description of Artificial Sequence: Synthetic oligonucleotide
ucaagaguaggagauuaua

SEQ ID NO: 186172 - RNA, 19 nt, Artificial Sequence
  Description of Artificial Sequence: Synthetic oligonucleotide
ggaagugucaaguaacaaa

SEQ ID NO: 186173 - RNA, 19 nt, Artificial Sequence
  Description of Artificial Sequence: Synthetic oligonucleotide
  modified_base (5)..(5): a, c, u, g, unknown or other
ugaunuaagccagcauccu

SEQ ID NO: 186174 - RNA, 19 nt, Artificial Sequence
  Description of Artificial Sequence: Synthetic oligonucleotide
uauuacucauauacuuguu

SEQ ID NO: 186175 - RNA, 19 nt, Artificial Sequence
  Description of Artificial Sequence: Synthetic oligonucleotide
ccuaaauugaugaacugga

SEQ ID NO: 186176 - RNA, 19 nt, Artificial Sequence
  Description of Artificial Sequence: Synthetic oligonucleotide
ggcuggauucaucaucugg

SEQ ID NO: 186177 - RNA, 19 nt, Artificial Sequence
  Description of Artificial Sequence: Synthetic oligonucleotide
auagguuuaauaaguggau

SEQ ID NO: 186178 - RNA, 19 nt, Artificial Sequence
  Description of Artificial Sequence: Synthetic oligonucleotide
uuaaaugcucuaggaguga

SEQ ID NO: 186179 - RNA, 19 nt, Artificial Sequence
  Description of Artificial Sequence: Synthetic oligonucleotide
uguccuguugauguuaauu

SEQ ID NO: 186180 - RNA, 19 nt, Artificial Sequence
  Description of Artificial Sequence: Synthetic oligonucleotide
aguugaccuuuacaagucu

SEQ ID NO: 186181 - RNA, 19 nt, Artificial Sequence
  Description of Artificial Sequence: Synthetic oligonucleotide
caauaggaaagcuaagagu

SEQ ID NO: 186182 - RNA, 19 nt, Artificial Sequence
  Description of Artificial Sequence: Synthetic oligonucleotide
cagcaaccacuuuaucugg

SEQ ID NO: 186183 - RNA, 19 nt, Artificial Sequence
  Description of Artificial Sequence: Synthetic oligonucleotide
ucaucucagacuuguguuu

SEQ ID NO: 186184 - RNA, 19 nt, Artificial Sequence
  Description of Artificial Sequence: Synthetic oligonucleotide
cuauaucauugucauuguc

SEQ ID NO: 186185 - RNA, 19 nt, Artificial Sequence
  Description of Artificial Sequence: Synthetic oligonucleotide
uaauguggugggcuacuuc

SEQ ID NO: 186186 - RNA, 19 nt, Artificial Sequence
  Description of Artificial Sequence: Synthetic oligonucleotide
acuuguguuuuaauguggu

SEQ ID NO: 186187 - RNA, 19 nt, Artificial Sequence
  Description of Artificial Sequence: Synthetic oligonucleotide
gacauaccggcacauucuc

SEQ ID NO: 186188 - RNA, 19 nt, Artificial Sequence
  Description of Artificial Sequence: Synthetic oligonucleotide
agacaucuugacauaccgg

SEQ ID NO: 186189 - RNA, 19 nt, Artificial Sequence
  Description of Artificial Sequence: Synthetic oligonucleotide
uggcaaauauccugugaaa

SEQ ID NO: 186190 - RNA, 19 nt, Artificial Sequence
  Description of Artificial Sequence: Synthetic oligonucleotide
cuauugugucagcuuuugc

SEQ ID NO: 186191 - RNA, 19 nt, Artificial Sequence
  Description of Artificial Sequence: Synthetic oligonucleotide
agaaaagaccuuucaucua

SEQ ID NO: 186192 - RNA, 19 nt, Artificial Sequence
  Description of Artificial Sequence: Synthetic oligonucleotide
agcuucaauucugugagau

SEQ ID NO: 186193 - RNA, 19 nt, Artificial Sequence
  Description of Artificial Sequence: Synthetic oligonucleotide
uccuaccugugucuuaaau

SEQ ID NO: 186194 - RNA, 19 nt, Artificial Sequence
  Description of Artificial Sequence: Synthetic oligonucleotide
ccgaguuacaacauuguuc

SEQ ID NO: 186195 - RNA, 19 nt, Artificial Sequence
  Description of Artificial Sequence: Synthetic oligonucleotide
agguaucuagcuugucucu

SEQ ID NO: 186196 - RNA, 19 nt, Artificial Sequence
  Description of Artificial Sequence: Synthetic oligonucleotide
gaguacguaugcugcuuug

SEQ ID NO: 186197 - RNA, 19 nt, Artificial Sequence
  Description of Artificial Sequence: Synthetic oligonucleotide
aagcguccuaccugugucu

SEQ ID NO: 186198 - RNA, 19 nt, Artificial Sequence
  Description of Artificial Sequence: Synthetic oligonucleotide
ccuuccaucagcguguacc

SEQ ID NO: 186199 - RNA, 19 nt, Artificial Sequence
  Description of Artificial Sequence: Synthetic oligonucleotide
ccuaccugugucuuaaaug

SEQ ID NO: 186200 - RNA, 19 nt, Artificial Sequence
  Description of Artificial Sequence: Synthetic oligonucleotide
uagugguuggaaacugcaa

SEQ ID NO: 186201 - RNA, 19 nt, Artificial Sequence
  Description of Artificial Sequence: Synthetic oligonucleotide
uccuuaagugacugggcau

SEQ ID NO: 186202 - RNA, 19 nt, Artificial Sequence
  Description of Artificial Sequence: Synthetic oligonucleotide
guagacaucuugacauacc

SEQ ID NO: 186203 - RNA, 19 nt, Artificial Sequence
  Description of Artificial Sequence: Synthetic oligonucleotide
ucgcuugaggugcaccaca

SEQ ID NO: 186204 - RNA, 19 nt, Artificial Sequence
  Description of Artificial Sequence: Synthetic oligonucleotide
caucgaaucuuauaugccu

SEQ ID NO: 186205 - RNA, 19 nt, Artificial Sequence
  Description of Artificial Sequence: Synthetic oligonucleotide
gaguugaccuuuacaaguc

SEQ ID NO: 186206 - RNA, 19 nt, Artificial Sequence
  Description of Artificial Sequence: Synthetic oligonucleotide
uauuccacgcuuucauguu

SEQ ID NO: 186207 - RNA, 19 nt, Artificial Sequence
  Description of Artificial Sequence: Synthetic oligonucleotide
uagccgaagcugccuauca

SEQ ID NO: 186208 - RNA, 19 nt, Artificial Sequence
  Description of Artificial Sequence: Synthetic oligonucleotide
cuaaauugaugaacuggaa

SEQ ID NO: 186209 - RNA, 19 nt, Artificial Sequence
  Description of Artificial Sequence: Synthetic oligonucleotide
guaccauuugccaucaucu

SEQ ID NO: 186210 - RNA, 19 nt, Artificial Sequence
  Description of Artificial Sequence: Synthetic oligonucleotide
gugcaaagcguccuaccug

SEQ ID NO: 186211 - RNA, 19 nt, Artificial Sequence
  Description of Artificial Sequence: Synthetic oligonucleotide
uccauuucacuuggugagc

SEQ ID NO: 186212 - RNA, 19 nt, Artificial Sequence
  Description of Artificial Sequence: Synthetic oligonucleotide
auuguauaugucagugacu

SEQ ID NO: 186213 - RNA, 19 nt, Artificial Sequence
  Description of Artificial Sequence: Synthetic oligonucleotide
augucuacuaugauagaau

SEQ ID NO: 186214 - RNA, 19 nt, Artificial Sequence
  Description of Artificial Sequence: Synthetic oligonucleotide
agcguguaccagcugacaa

SEQ ID NO: 186215 - RNA, 19 nt, Artificial Sequence
  Description of Artificial Sequence: Synthetic oligonucleotide
caauggguccaggauagac

SEQ ID NO: 186216 - RNA, 19 nt, Artificial Sequence
  Description of Artificial Sequence: Synthetic oligonucleotide
cauuaucuccuccaacgga

SEQ ID NO: 186217 - RNA, 19 nt, Artificial Sequence
  Description of Artificial Sequence: Synthetic oligonucleotide
auaaguggauccauucuaa

SEQ ID NO: 186218 - RNA, 19 nt, Artificial Sequence
  Description of Artificial Sequence: Synthetic oligonucleotide
uuauagaggcaagggccug

SEQ ID NO: 186219 - RNA, 19 nt, Artificial Sequence
  Description of Artificial Sequence: Synthetic oligonucleotide
agugacugggcaucgccau

SEQ ID NO: 186220 - RNA, 19 nt, Artificial Sequence
  Description of Artificial Sequence: Synthetic oligonucleotide
cauauaugucaucccgcuc

SEQ ID NO: 186221 - RNA, 19 nt, Artificial Sequence
  Description of Artificial Sequence: Synthetic oligonucleotide
uuauaugccuggugucauc

SEQ ID NO: 186222 - RNA, 19 nt, Artificial Sequence
  Description of Artificial Sequence: Synthetic oligonucleotide
uagcuauuucaccucucau

SEQ ID NO: 186223 - RNA, 19 nt, Artificial Sequence
  Description of Artificial Sequence: Synthetic oligonucleotide
auauccugugaaaucuaug

SEQ ID NO: 186224 - RNA, 19 nt, Artificial Sequence
  Description of Artificial Sequence: Synthetic oligonucleotide
uugaucaauucagcauaug

SEQ ID NO: 186225 - RNA, 19 nt, Artificial Sequence
  Description of Artificial Sequence: Synthetic oligonucleotide
auaccggcacauucucaag

SEQ ID NO: 186226 - RNA, 19 nt, Artificial Sequence
  Description of Artificial Sequence: Synthetic oligonucleotide
uggauccauucuaacuaaa

SEQ ID NO: 186227 - RNA, 19 nt, Artificial Sequence
  Description of Artificial Sequence: Synthetic oligonucleotide
guuuuaauguggugggcua

SEQ ID NO: 186228 - RNA, 19 nt, Artificial Sequence
  Description of Artificial Sequence: Synthetic oligonucleotide
agggauugucaaaauucag

SEQ ID NO: 186229 - RNA, 19 nt, Artificial Sequence
  Description of Artificial Sequence: Synthetic oligonucleotide
caugaaauaugucuacuau

SEQ ID NO: 186230 - RNA, 19 nt, Artificial Sequence
  Description of Artificial Sequence: Synthetic oligonucleotide
guacguaugcugcuuugga

SEQ ID NO: 186231 - RNA, 19 nt, Artificial Sequence
  Description of Artificial Sequence: Synthetic oligonucleotide
ucccaguccaaagcgagaa

SEQ ID NO: 186232 - RNA, 19 nt, Artificial Sequence
  Description of Artificial Sequence: Synthetic oligonucleotide
ugggcaucgccaucuuuga

SEQ ID NO: 186233 - RNA, 19 nt, Artificial Sequence
  Description of Artificial Sequence: Synthetic oligonucleotide
uacugagaucuuagcacau

SEQ ID NO: 186234 - RNA, 19 nt, Artificial Sequence
  Description of Artificial Sequence: Synthetic oligonucleotide
uguauaugucagugacuau

SEQ ID NO: 186235 - RNA, 19 nt, Artificial Sequence
  Description of Artificial Sequence: Synthetic oligonucleotide
cauucgguuaucugaaacu

SEQ ID NO: 186236 - RNA, 19 nt, Artificial Sequence
  Description of Artificial Sequence: Synthetic oligonucleotide
aaauauccugugaaaucua

SEQ ID NO: 186237 - RNA, 19 nt, Artificial Sequence
  Description of Artificial Sequence: Synthetic oligonucleotide
acuaagguaucuagcuugu

SEQ ID NO: 186238 - RNA, 19 nt, Artificial Sequence
  Description of Artificial Sequence: Synthetic oligonucleotide
aagaguacguaugcugcuu

SEQ ID NO: 186239 - RNA, 19 nt, Artificial Sequence
  Description of Artificial Sequence: Synthetic oligonucleotide
uuaagugacugggcaucgc

SEQ ID NO: 186240 - RNA, 19 nt, Artificial Sequence
  Description of Artificial Sequence: Synthetic oligonucleotide
cacaaggacuggaggcagg

SEQ ID NO: 186241 - RNA, 19 nt, Artificial Sequence
  Description of Artificial Sequence: Synthetic oligonucleotide
gagguuuauauuccacgcu

SEQ ID NO: 186242 - RNA, 19 nt, Artificial Sequence
  Description of Artificial Sequence: Synthetic oligonucleotide
ggcaucgccaucuuugaga

SEQ ID NO: 186243 - RNA, 19 nt, Artificial Sequence
  Description of Artificial Sequence: Synthetic oligonucleotide
ucagcggcucaaauguauu

SEQ ID NO: 186244 - RNA, 19 nt, Artificial Sequence
  Description of Artificial Sequence: Synthetic oligonucleotide
guauugcauagguuuaaua

SEQ ID NO: 186245 - RNA, 19 nt, Artificial Sequence
  Description of Artificial Sequence: Synthetic oligonucleotide
cggucaagagggaagaagc

SEQ ID NO: 186246 - RNA, 19 nt, Artificial Sequence
  Description of Artificial Sequence: Synthetic oligonucleotide
  modified_base (17)..(17): a, c, u, g, unknown or other
aacaccuguccuugaunua

SEQ ID NO: 186247 - RNA, 19 nt, Artificial Sequence
  Description of Artificial Sequence: Synthetic oligonucleotide
uuccacgcuuucauguuuu

SEQ ID NO: 186248 - RNA, 19 nt, Artificial Sequence
  Description of Artificial Sequence: Synthetic oligonucleotide
uaaccacauguuccguguc

SEQ ID NO: 186249 - RNA, 19 nt, Artificial Sequence
  Description of Artificial Sequence: Synthetic oligonucleotide
gguuuaauaaguggaucca

SEQ ID NO: 186250 - RNA, 19 nt, Artificial Sequence
  Description of Artificial Sequence: Synthetic oligonucleotide
uggugggcuacuucauuuc

SEQ ID NO: 186251 - RNA, 19 nt, Artificial Sequence
  Description of Artificial Sequence: Synthetic oligonucleotide
gaagaguacguaugcugcu

SEQ ID NO: 186252 - RNA, 19 nt, Artificial Sequence
  Description of Artificial Sequence: Synthetic oligonucleotide
auaugucagugacuaucau

SEQ ID NO: 186253 - RNA, 19 nt, Artificial Sequence
  Description of Artificial Sequence: Synthetic oligonucleotide
gggaacaauaacuuuguau

SEQ ID NO: 186254 - RNA, 19 nt, Artificial Sequence
  Description of Artificial Sequence: Synthetic oligonucleotide
agggaccacaaaucuaauu

SEQ ID NO: 186255 - RNA, 19 nt, Artificial Sequence
  Description of Artificial Sequence: Synthetic oligonucleotide
uacuugucauugagguauc

SEQ ID NO: 186256 - RNA, 19 nt, Artificial Sequence
  Description of Artificial Sequence: Synthetic oligonucleotide
uacauucgguuaucugaaa

SEQ ID NO: 186257 - RNA, 19 nt, Artificial Sequence
  Description of Artificial Sequence: Synthetic oligonucleotide
auuccacgcuuucauguuu

SEQ ID NO: 186258 - RNA, 19 nt, Artificial Sequence
  Description of Artificial Sequence: Synthetic oligonucleotide
cuacuguaagaaaaucgcu

SEQ ID NO: 186259 - RNA, 19 nt, Artificial Sequence
  Description of Artificial Sequence: Synthetic oligonucleotide
ugucaucccgcuccauaau

SEQ ID NO: 186260 - RNA, 19 nt, Artificial Sequence
  Description of Artificial Sequence: Synthetic oligonucleotide
accucccaucccuccauag

SEQ ID NO: 186261 - RNA, 19 nt, Artificial Sequence
  Description of Artificial Sequence: Synthetic oligonucleotide
agacaaugcugcacaaaga

SEQ ID NO: 186262 - RNA, 19 nt, Artificial Sequence
  Description of Artificial Sequence: Synthetic oligonucleotide
gcguguaccagcugacaag

SEQ ID NO: 186263 - RNA, 19 nt, Artificial Sequence
  Description of Artificial Sequence: Synthetic oligonucleotide
gguaucacuaacaccuguc

SEQ ID NO: 186264 - RNA, 19 nt, Artificial Sequence
  Description of Artificial Sequence: Synthetic oligonucleotide
guauaacuugagugucuga

SEQ ID NO: 186265 - RNA, 19 nt, Artificial Sequence
  Description of Artificial Sequence: Synthetic oligonucleotide
agagccaguauggugggua

SEQ ID NO: 186266 - RNA, 19 nt, Artificial Sequence
  Description of Artificial Sequence: Synthetic oligonucleotide
ucuagccgaagcugccuau

SEQ ID NO: 186267 - RNA, 19 nt, Artificial Sequence
  Description of Artificial Sequence: Synthetic oligonucleotide
guauaauguccaccuccca

SEQ ID NO: 186268 - RNA, 19 nt, Artificial Sequence
  Description of Artificial Sequence: Synthetic oligonucleotide
aaucuccgaguuacaacau

SEQ ID NO: 186269 - RNA, 19 nt, Artificial Sequence
  Description of Artificial Sequence: Synthetic oligonucleotide
aucuccgaguuacaacauu

SEQ ID NO: 186270 - RNA, 19 nt, Artificial Sequence
  Description of Artificial Sequence: Synthetic oligonucleotide
gcuaucugguuuauucagc

SEQ ID NO: 186271 - RNA, 19 nt, Artificial Sequence
  Description of Artificial Sequence: Synthetic oligonucleotide
gucaaagguuacugagauc

SEQ ID NO: 186272 - RNA, 19 nt, Artificial Sequence
  Description of Artificial Sequence: Synthetic oligonucleotide
cucagucggcagcaguaug

SEQ ID NO: 186273 - RNA, 19 nt, Artificial Sequence
  Description of Artificial Sequence: Synthetic oligonucleotide
caguaugguggguauaacu

SEQ ID NO: 186274 - RNA, 19 nt, Artificial Sequence
  Description of Artificial Sequence: Synthetic oligonucleotide
ucggcagcauuuucaucaa

SEQ ID NO: 186275 - RNA, 19 nt, Artificial Sequence
  Description of Artificial Sequence: Synthetic oligonucleotide
gauuuacauucgguuaucu

SEQ ID NO: 186276 - RNA, 19 nt, Artificial Sequence
  Description of Artificial Sequence: Synthetic oligonucleotide
cuccgacauauccaaguca

SEQ ID NO: 186277 - RNA, 19 nt, Artificial Sequence
  Description of Artificial Sequence: Synthetic oligonucleotide
gaacuccgacauauccaag

SEQ ID NO: 186278 - RNA, 19 nt, Artificial Sequence
  Description of Artificial Sequence: Synthetic oligonucleotide
cgacauauccaagucauug

SEQ ID NO: 186279 - RNA, 19 nt, Artificial Sequence
  Description of Artificial Sequence: Synthetic oligonucleotide
gugaaaucuaugauuguau

SEQ ID NO: 186280 - RNA, 19 nt, Artificial Sequence
  Description of Artificial Sequence: Synthetic oligonucleotide
guaucuacuguaagaaaau

SEQ ID NO: 186281 - RNA, 19 nt, Artificial Sequence
  Description of Artificial Sequence: Synthetic oligonucleotide
aucuagccgaagcugccua

SEQ ID NO: 186282 - RNA, 19 nt, Artificial Sequence
  Description of Artificial Sequence: Synthetic oligonucleotide
cucuaggagugacauagcu

SEQ ID NO: 186283 - RNA, 19 nt, Artificial Sequence
  Description of Artificial Sequence: Synthetic oligonucleotide
ccugcguuuggguuaauga

SEQ ID NO: 186284 - RNA, 19 nt, Artificial Sequence
  Description of Artificial Sequence: Synthetic oligonucleotide
aucaucuuaucugcaggua

SEQ ID NO: 186285 - RNA, 19 nt, Artificial Sequence
  Description of Artificial Sequence: Synthetic oligonucleotide
uucucaagaguaggagauu

SEQ ID NO: 186286 - RNA, 19 nt, Artificial Sequence
  Description of Artificial Sequence: Synthetic oligonucleotide
cuugaucaauucagcauau

SEQ ID NO: 186287 - RNA, 19 nt, Artificial Sequence
  Description of Artificial Sequence: Synthetic oligonucleotide
agucggcagcaguauguaa

SEQ ID NO: 186288 - RNA, 19 nt, Artificial Sequence
  Description of Artificial Sequence: Synthetic oligonucleotide
acgccuguggcagcugaag

SEQ ID NO: 186289 - RNA, 19 nt, Artificial Sequence
  Description of Artificial Sequence: Synthetic oligonucleotide
ggugcaaagcguccuaccu

SEQ ID NO: 186290 - RNA, 19 nt, Artificial Sequence
  Description of Artificial Sequence: Synthetic oligonucleotide
cacauucaggacacacuaa

SEQ ID NO: 186291 - RNA, 19 nt, Artificial Sequence
  Description of Artificial Sequence: Synthetic oligonucleotide
cauccugaauggugcuauc

SEQ ID NO: 186292 - RNA, 19 nt, Artificial Sequence
  Description of Artificial Sequence: Synthetic oligonucleotide
auaauacuacugagguuuu

SEQ ID NO: 186293 - RNA, 19 nt, Artificial Sequence
  Description of Artificial Sequence: Synthetic oligonucleotide
gguaucuagcuugucucuc

SEQ ID NO: 186294 - RNA, 19 nt, Artificial Sequence
  Description of Artificial Sequence: Synthetic oligonucleotide
augggcaauggaaguguca

SEQ ID NO: 186295 - RNA, 19 nt, Artificial Sequence
  Description of Artificial Sequence: Synthetic oligonucleotide
cuagccgaagcugccuauc

SEQ ID NO: 186296 - RNA, 19 nt, Artificial Sequence
  Description of Artificial Sequence: Synthetic oligonucleotide
cuaagguaucuagcuuguc

SEQ ID NO: 186297 - RNA, 19 nt, Artificial Sequence
  Description of Artificial Sequence: Synthetic oligonucleotide
gggccguucccauugaugu

SEQ ID NO: 186298 - RNA, 19 nt, Artificial Sequence
  Description of Artificial Sequence: Synthetic oligonucleotide
cguaugcugcuuuggacac

SEQ ID NO: 186299 - RNA, 19 nt, Artificial Sequence
  Description of Artificial Sequence: Synthetic oligonucleotide
uuggggccguucccauuga

SEQ ID NO: 186300 - RNA, 19 nt, Artificial Sequence
  Description of Artificial Sequence: Synthetic oligonucleotide
guguuucacuucaaguacu

SEQ ID NO: 186301 - RNA, 19 nt, Artificial Sequence
  Description of Artificial Sequence: Synthetic oligonucleotide
acagcaacgcaggggccca

SEQ ID NO: 186302 - RNA, 19 nt, Artificial Sequence
  Description of Artificial Sequence: Synthetic oligonucleotide
agcaacgcaggggcccauc

SEQ ID NO: 186303 - RNA, 19 nt, Artificial Sequence
  Description of Artificial Sequence: Synthetic oligonucleotide
gcuugaggugcaccacaag

SEQ ID NO: 186304 - RNA, 19 nt, Artificial Sequence
  Description of Artificial Sequence: Synthetic oligonucleotide
guaauccaacucaucgaua

SEQ ID NO: 186305 - RNA, 19 nt, Artificial Sequence
  Description of Artificial Sequence: Synthetic oligonucleotide
gucggcagcaguauguaau

SEQ ID NO: 186306 - RNA, 19 nt, Artificial Sequence
  Description of Artificial Sequence: Synthetic oligonucleotide
gcaagggccugcguuuggg

SEQ ID NO: 186307 - RNA, 19 nt, Artificial Sequence
  Description of Artificial Sequence: Synthetic oligonucleotide
ggauuuacauucgguuauc

SEQ ID NO: 186308 - RNA, 19 nt, Artificial Sequence
  Description of Artificial Sequence: Synthetic oligonucleotide
aucuauugugucagcuuuu

SEQ ID NO: 186309 - RNA, 19 nt, Artificial Sequence
  Description of Artificial Sequence: Synthetic oligonucleotide
cuuucucgcuauuggcucu

SEQ ID NO: 186310 - RNA, 19 nt, Artificial Sequence
  Description of Artificial Sequence: Synthetic oligonucleotide
gguuaaugaggaacuccga

SEQ ID NO: 186311 - RNA, 19 nt, Artificial Sequence
  Description of Artificial Sequence: Synthetic oligonucleotide
acacuaaaguagacuugaa

SEQ ID NO: 186312 - RNA, 19 nt, Artificial Sequence
  Description of Artificial Sequence: Synthetic oligonucleotide
ccauccaauaggaaagcua

SEQ ID NO: 186313 - RNA, 19 nt, Artificial Sequence
  Description of Artificial Sequence: Synthetic oligonucleotide
caaccacuuuaucuggccu

SEQ ID NO: 186314 - RNA, 19 nt, Artificial Sequence
  Description of Artificial Sequence: Synthetic oligonucleotide
uucucgcuauuggcucuug

SEQ ID NO: 186315 - RNA, 19 nt, Artificial Sequence
  Description of Artificial Sequence: Synthetic oligonucleotide
cauguuccgugucuucugu

SEQ ID NO: 186316 - RNA, 19 nt, Artificial Sequence
  Description of Artificial Sequence: Synthetic oligonucleotide
aggcaagggccugcguuug

SEQ ID NO: 186317 - RNA, 19 nt, Artificial Sequence
  Description of Artificial Sequence: Synthetic oligonucleotide
gcuaagaguucuuggcagu

SEQ ID NO: 186318 - RNA, 19 nt, Artificial Sequence
  Description of Artificial Sequence: Synthetic oligonucleotide
ggcaagggccugcguuugg

SEQ ID NO: 186319 - RNA, 19 nt, Artificial Sequence
  Description of Artificial Sequence: Synthetic oligonucleotide
caucccgcuccauaauacu

SEQ ID NO: 186320 - RNA, 19 nt, Artificial Sequence
  Description of Artificial Sequence: Synthetic oligonucleotide
cggcucaaauguauuacuc

SEQ ID NO: 186321 - RNA, 19 nt, Artificial Sequence
  Description of Artificial Sequence: Synthetic oligonucleotide
caucagcguguaccagcug

SEQ ID NO: 186322 - RNA, 19 nt, Artificial Sequence
  Description of Artificial Sequence: Synthetic oligonucleotide
uggggccguucccauugau

SEQ ID NO: 186323 - RNA, 19 nt, Artificial Sequence
  Description of Artificial Sequence: Synthetic oligonucleotide
cuuauaugccuggugucau

SEQ ID NO: 186324 - RNA, 19 nt, Artificial Sequence
  Description of Artificial Sequence: Synthetic oligonucleotide
cugugucuuaaaugcucua

SEQ ID NO: 186325 - RNA, 19 nt, Artificial Sequence
  Description of Artificial Sequence: Synthetic oligonucleotide
cuacuaugauagaaucauu

SEQ ID NO: 186326 - RNA, 19 nt, Artificial Sequence
  Description of Artificial Sequence: Synthetic oligonucleotide
accaaacagugaagagcca

SEQ ID NO: 186327 - RNA, 19 nt, Artificial Sequence
  Description of Artificial Sequence: Synthetic oligonucleotide
agcauaugacuuagcuauu

SEQ ID NO: 186328 - RNA, 19 nt, Artificial Sequence
  Description of Artificial Sequence: Synthetic oligonucleotide
gcgagaaaagaccuuucau

SEQ ID NO: 186329 - RNA, 19 nt, Artificial Sequence
  Description of Artificial Sequence: Synthetic oligonucleotide
ggggccguucccauugaug

SEQ ID NO: 186330 - RNA, 19 nt, Artificial Sequence
  Description of Artificial Sequence: Synthetic oligonucleotide
cgauaaggugcuccuuaag

SEQ ID NO: 186331 - RNA, 19 nt, Artificial Sequence
  Description of Artificial Sequence: Synthetic oligonucleotide
caaagcgagaaaagaccuu

SEQ ID NO: 186332 - RNA, 19 nt, Artificial Sequence
  Description of Artificial Sequence: Synthetic oligonucleotide
aggugcuccuuaagugacu

SEQ ID NO: 186333 - RNA, 19 nt, Artificial Sequence
  Description of Artificial Sequence: Synthetic oligonucleotide
uaguaccauuugccaucau

SEQ ID NO: 186334 - RNA, 19 nt, Artificial Sequence
  Description of Artificial Sequence: Synthetic oligonucleotide
auguggugggcuacuucau

SEQ ID NO: 186335 - RNA, 19 nt, Artificial Sequence
  Description of Artificial Sequence: Synthetic oligonucleotide
agcguccuaccugugucuu

SEQ ID NO: 186336 - RNA, 19 nt, Artificial Sequence
  Description of Artificial Sequence: Synthetic oligonucleotide
gcugccuaucaucgaaucu

SEQ ID NO: 186337 - RNA, 19 nt, Artificial Sequence
  Description of Artificial Sequence: Synthetic oligonucleotide
ggauccauucuaacuaaau

SEQ ID NO: 186338 - RNA, 19 nt, Artificial Sequence
  Description of Artificial Sequence: Synthetic oligonucleotide
auucagcggcucaaaugua

SEQ ID NO: 186339 - RNA, 19 nt, Artificial Sequence
  Description of Artificial Sequence: Synthetic oligonucleotide
gcuaaaucuccgaguuaca

SEQ ID NO: 186340 - RNA, 19 nt, Artificial Sequence
  Description of Artificial Sequence: Synthetic oligonucleotide
gcggcucaaauguauuacu

SEQ ID NO: 186341 - RNA, 19 nt, Artificial Sequence
  Description of Artificial Sequence: Synthetic oligonucleotide
gugcaccacaaggacugga

SEQ ID NO: 186342 - RNA, 19 nt, Artificial Sequence
  Description of Artificial Sequence: Synthetic oligonucleotide
ccgcuccauaauacuacug

SEQ ID NO: 186343 - RNA, 19 nt, Artificial Sequence
  Description of Artificial Sequence: Synthetic oligonucleotide
gucccaguccaaagcgaga

SEQ ID NO: 186344 - RNA, 19 nt, Artificial Sequence
  Description of Artificial Sequence: Synthetic oligonucleotide
ccucagacuggcuguucuc

SEQ ID NO: 186345 - RNA, 19 nt, Artificial Sequence
  Description of Artificial Sequence: Synthetic oligonucleotide
cuggaauacugaagauuuu

SEQ ID NO: 186346 - RNA, 19 nt, Artificial Sequence
  Description of Artificial Sequence: Synthetic oligonucleotide
gcucuaggagugacauagc

SEQ ID NO: 186347 - RNA, 19 nt, Artificial Sequence
  Description of Artificial Sequence: Synthetic oligonucleotide
gccugcguuuggguuaaug

SEQ ID NO: 186348 - RNA, 19 nt, Artificial Sequence
  Description of Artificial Sequence: Synthetic oligonucleotide
gcuauuggcucuuggccuu

SEQ ID NO: 186349 - RNA, 19 nt, Artificial Sequence
  Description of Artificial Sequence: Synthetic oligonucleotide
cagcguguaccagcugaca

SEQ ID NO: 186350 - RNA, 19 nt, Artificial Sequence
  Description of Artificial Sequence: Synthetic oligonucleotide
agccaguaugguggguaua

SEQ ID NO: 186351 - RNA, 19 nt, Artificial Sequence
  Description of Artificial Sequence: Synthetic oligonucleotide
ccaucagcguguaccagcu

SEQ ID NO: 186352 - RNA, 19 nt, Artificial Sequence
  Description of Artificial Sequence: Synthetic oligonucleotide
gcauaugacuuagcuauuu

SEQ ID NO: 186353 - RNA, 19 nt, Artificial Sequence
  Description of Artificial Sequence: Synthetic oligonucleotide
cagucggcagcaguaugua

SEQ ID NO: 186354 - RNA, 19 nt, Artificial Sequence
  Description of Artificial Sequence: Synthetic oligonucleotide
cacaaagaucuaguauauu

SEQ ID NO: 186355 - RNA, 19 nt, Artificial Sequence
  Description of Artificial Sequence: Synthetic oligonucleotide
cuugacauaccggcacauu

SEQ ID NO: 186356 - RNA, 19 nt, Artificial Sequence
  Description of Artificial Sequence: Synthetic oligonucleotide
cgcuauuggcucuuggccu

SEQ ID NO: 186357 - RNA, 19 nt, Artificial Sequence
  Description of Artificial Sequence: Synthetic oligonucleotide
cucauuccuaagggauugu

SEQ ID NO: 186358 - RNA, 19 nt, Artificial Sequence
  Description of Artificial Sequence: Synthetic oligonucleotide
  modified_base (8)..(8): a, c, u, g, unknown or other
ccuugaunuaagccagcau

SEQ ID NO: 186359 - RNA, 19 nt, Artificial Sequence
  Description of Artificial Sequence: Synthetic oligonucleotide
cguccuaccugugucuuaa

SEQ ID NO: 186360 - RNA, 19 nt, Artificial Sequence
  Description of Artificial Sequence: Synthetic oligonucleotide
cccgcuccauaauacuacu

SEQ ID NO: 186361 - RNA, 19 nt, Artificial Sequence
  Description of Artificial Sequence: Synthetic oligonucleotide
gcguccuaccugugucuua

SEQ ID NO: 186362 - RNA, 19 nt, Artificial Sequence
  Description of Artificial Sequence: Synthetic oligonucleotide
ggccguucccauugauguu

SEQ ID NO: 186363 - RNA, 19 nt, Artificial Sequence
  Description of Artificial Sequence: Synthetic oligonucleotide
gccuaucaucgaaucuuau

SEQ ID NO: 186364 - RNA, 19 nt, Artificial Sequence
  Description of Artificial Sequence: Synthetic oligonucleotide
ccgacauauccaagucauu

SEQ ID NO: 186365 - RNA, 19 nt, Artificial Sequence
  Description of Artificial Sequence: Synthetic oligonucleotide
ccucagucggcagcaguau

SEQ ID NO: 186366 - RNA, 19 nt, Artificial Sequence
  Description of Artificial Sequence: Synthetic oligonucleotide
cagcaacgcaggggcccau

SEQ ID NO: 186367 - RNA, 19 nt, Artificial Sequence
  Description of Artificial Sequence: Synthetic oligonucleotide
cgcaggggcccaucaguuu

SEQ ID NO: 186368 - RNA, 19 nt, Artificial Sequence
  Description of Artificial Sequence: Synthetic oligonucleotide
ggccugcguuuggguuaau

SEQ ID NO: 186369 - RNA, 19 nt, Artificial Sequence
  Description of Artificial Sequence: Synthetic oligonucleotide
auaguuaucaacgugaagc

SEQ ID NO: 186370 - RNA, 19 nt, Artificial Sequence
  Description of Artificial Sequence: Synthetic oligonucleotide
ucaacuaacaucaaguaga

SEQ ID NO: 186371 - RNA, 19 nt, Artificial Sequence
  Description of Artificial Sequence: Synthetic oligonucleotide
uccucauuaacaaagagca

SEQ ID NO: 186372 - RNA, 19 nt, Artificial Sequence
  Description of Artificial Sequence: Synthetic oligonucleotide
agaaacguaaaauaccugg

SEQ ID NO: 186373 - RNA, 19 nt, Artificial Sequence
  Description of Artificial Sequence: Synthetic oligonucleotide
ucuuguauauaauacaaug

SEQ ID NO: 186374 - RNA, 19 nt, Artificial Sequence
  Description of Artificial Sequence: Synthetic oligonucleotide
uggaaaguauuaaaggugg

SEQ ID NO: 186375 - RNA, 19 nt, Artificial Sequence
  Description of Artificial Sequence: Synthetic oligonucleotide
ugaucauuuucucaaacgc

SEQ ID NO: 186376 - RNA, 19 nt, Artificial Sequence
  Description of Artificial Sequence: Synthetic oligonucleotide
uuagugaauguccucaugc

SEQ ID NO: 186377 - RNA, 19 nt, Artificial Sequence
  Description of Artificial Sequence: Synthetic oligonucleotide
uauuuacagacuuaguuca

SEQ ID NO: 186378 - RNA, 19 nt, Artificial Sequence
  Description of Artificial Sequence: Synthetic oligonucleotide
acuauuaaaggcucgucac

SEQ ID NO: 186379 - RNA, 19 nt, Artificial Sequence
  Description of Artificial Sequence: Synthetic oligonucleotide
aaucgcgucaucuucacug

SEQ ID NO: 186380 - RNA, 19 nt, Artificial Sequence
  Description of Artificial Sequence: Synthetic oligonucleotide
aacguaaaauaccugguug

SEQ ID NO: 186381 - RNA, 19 nt, Artificial Sequence
  Description of Artificial Sequence: Synthetic oligonucleotide
ugaaguuaccauuuagcgg

SEQ ID NO: 186382 - RNA, 19 nt, Artificial Sequence
  Description of Artificial Sequence: Synthetic oligonucleotide
agggcaauaauauuuagca

SEQ ID NO: 186383 - RNA, 19 nt, Artificial Sequence
  Description of Artificial Sequence: Synthetic oligonucleotide
aacgcggugucauucagac

SEQ ID NO: 186384 - RNA, 19 nt, Artificial Sequence
  Description of Artificial Sequence: Synthetic oligonucleotide
uucaacuaacaucaaguag

SEQ ID NO: 186385 - RNA, 19 nt, Artificial Sequence
  Description of Artificial Sequence: Synthetic oligonucleotide
uuauuuacugucaaaccgu

SEQ ID NO: 186386 - RNA, 19 nt, Artificial Sequence
  Description of Artificial Sequence: Synthetic oligonucleotide
ugucccguagcucuuauag

SEQ ID NO: 186387 - RNA, 19 nt, Artificial Sequence
  Description of Artificial Sequence: Synthetic oligonucleotide
uauuuauuguacccuagca

SEQ ID NO: 186388 - RNA, 19 nt, Artificial Sequence
  Description of Artificial Sequence: Synthetic oligonucleotide
aauuuaguauacucugugu

SEQ ID NO: 186389 - RNA, 19 nt, Artificial Sequence
  Description of Artificial Sequence: Synthetic oligonucleotide
aagggcaauaauauuuagc

SEQ ID NO: 186390 - RNA, 19 nt, Artificial Sequence
  Description of Artificial Sequence: Synthetic oligonucleotide
gaaguuaccauuuagcggu

SEQ ID NO: 186391 - RNA, 19 nt, Artificial Sequence
  Description of Artificial Sequence: Synthetic oligonucleotide
aagaaaaggacuaacuggu

SEQ ID NO: 186392 - RNA, 19 nt, Artificial Sequence
  Description of Artificial Sequence: Synthetic oligonucleotide
uuauaucuuaguuggacac

SEQ ID NO: 186393 - RNA, 19 nt, Artificial Sequence
  Description of Artificial Sequence: Synthetic oligonucleotide
gaaauaguuaucaacguga

SEQ ID NO: 186394 - RNA, 19 nt, Artificial Sequence
  Description of Artificial Sequence: Synthetic oligonucleotide
auaacacacgcucuuuugg

SEQ ID NO: 186395 - RNA, 19 nt, Artificial Sequence
  Description of Artificial Sequence: Synthetic oligonucleotide
uuuccuaucgugugcaacc

SEQ ID NO: 186396 - RNA, 19 nt, Artificial Sequence
  Description of Artificial Sequence: Synthetic oligonucleotide
aacuacgagguucagucug

SEQ ID NO: 186397 - RNA, 19 nt, Artificial Sequence
  Description of Artificial Sequence: Synthetic oligonucleotide
agcagaaacguaaaauacc

SEQ ID NO: 186398 - RNA, 19 nt, Artificial Sequence
  Description of Artificial Sequence: Synthetic oligonucleotide
ugucaaaccguguuaaacu

SEQ ID NO: 186399 - RNA, 19 nt, Artificial Sequence
  Description of Artificial Sequence: Synthetic oligonucleotide
uggauauuagugaugggcu

SEQ ID NO: 186400 - RNA, 19 nt, Artificial Sequence
  Description of Artificial Sequence: Synthetic oligonucleotide
uuuacugucaaaccguguu

SEQ ID NO: 186401 - RNA, 19 nt, Artificial Sequence
  Description of Artificial Sequence: Synthetic oligonucleotide
aauaggcaccuuuuguuca

SEQ ID NO: 186402 - RNA, 19 nt, Artificial Sequence
  Description of Artificial Sequence: Synthetic oligonucleotide
ugcagggaagugcaaacgg

SEQ ID NO: 186403 - RNA, 19 nt, Artificial Sequence
  Description of Artificial Sequence: Synthetic oligonucleotide
uuaauggggaugauguaac

SEQ ID NO: 186404 - RNA, 19 nt, Artificial Sequence
  Description of Artificial Sequence: Synthetic oligonucleotide
ugagagccgacucuugagg

SEQ ID NO: 186405 - RNA, 19 nt, Artificial Sequence
  Description of Artificial Sequence: Synthetic oligonucleotide
aaauauaggcagaaggagu

SEQ ID NO: 186406 - RNA, 19 nt, Artificial Sequence
  Description of Artificial Sequence: Synthetic oligonucleotide
agcgguagaguauccaugg

SEQ ID NO: 186407 - RNA, 19 nt, Artificial Sequence
  Description of Artificial Sequence: Synthetic oligonucleotide
uuuaguauacucuguguau

SEQ ID NO: 186408 - RNA, 19 nt, Artificial Sequence
  Description of Artificial Sequence: Synthetic oligonucleotide
uuauagucaauagcagccg

SEQ ID NO: 186409 - RNA, 19 nt, Artificial Sequence
  Description of Artificial Sequence: Synthetic oligonucleotide
aauacuugcguguggcccu

SEQ ID NO: 186410 - RNA, 19 nt, Artificial Sequence
  Description of Artificial Sequence: Synthetic oligonucleotide
aauagcagccgaaacacca

SEQ ID NO: 186411 - RNA, 19 nt, Artificial Sequence
  Description of Artificial Sequence: Synthetic oligonucleotide
uccguuccagaauaaacag

SEQ ID NO: 186412 - RNA, 19 nt, Artificial Sequence
  Description of Artificial Sequence: Synthetic oligonucleotide
uauuguacccuagcaauag

SEQ ID NO: 186413 - RNA, 19 nt, Artificial Sequence
  Description of Artificial Sequence: Synthetic oligonucleotide
auuuaguauacucugugua

SEQ ID NO: 186414 - RNA, 19 nt, Artificial Sequence
  Description of Artificial Sequence: Synthetic oligonucleotide
uucacuagaaagguuguga

SEQ ID NO: 186415 - RNA, 19 nt, Artificial Sequence
  Description of Artificial Sequence: Synthetic oligonucleotide
cacuggauauuagugaugg

SEQ ID NO: 186416 - RNA, 19 nt, Artificial Sequence
  Description of Artificial Sequence: Synthetic oligonucleotide
uuaaaggcucgucaccagc

SEQ ID NO: 186417 - RNA, 19 nt, Artificial Sequence
  Description of Artificial Sequence: Synthetic oligonucleotide
gacuauuaaaggcucguca

SEQ ID NO: 186418 - RNA, 19 nt, Artificial Sequence
  Description of Artificial Sequence: Synthetic oligonucleotide
agacuuaguucaccaaccg

SEQ ID NO: 186419 - RNA, 19 nt, Artificial Sequence
  Description of Artificial Sequence: Synthetic oligonucleotide
aggccuacaaaacaaacaa

SEQ ID NO: 186420 - RNA, 19 nt, Artificial Sequence
  Description of Artificial Sequence: Synthetic oligonucleotide
uaauacuugcguguggccc

SEQ ID NO: 186421 - RNA, 19 nt, Artificial Sequence
  Description of Artificial Sequence: Synthetic oligonucleotide
accgauuaauacuugcgug

SEQ ID NO: 186422 - RNA, 19 nt, Artificial Sequence
  Description of Artificial Sequence: Synthetic oligonucleotide
cuuaguuggacacaaaugu

SEQ ID NO: 186423 - RNA, 19 nt, Artificial Sequence
  Description of Artificial Sequence: Synthetic oligonucleotide
aacacauuuccuaucgugu

SEQ ID NO: 186424 - RNA, 19 nt, Artificial Sequence
  Description of Artificial Sequence: Synthetic oligonucleotide
aauauaggcagaaggagua

SEQ ID NO: 186425 - RNA, 19 nt, Artificial Sequence
  Description of Artificial Sequence: Synthetic oligonucleotide
uguacccuagcaauagaac

SEQ ID NO: 186426 - RNA, 19 nt, Artificial Sequence
  Description of Artificial Sequence: Synthetic oligonucleotide
guauuuauuguacccuagc

SEQ ID NO: 186427 - RNA, 19 nt, Artificial Sequence
  Description of Artificial Sequence: Synthetic oligonucleotide
augaaauaguuaucaacgu

SEQ ID NO: 186428 - RNA, 19 nt, Artificial Sequence
  Description of Artificial Sequence: Synthetic oligonucleotide
aagcagaacgcugucuacg

SEQ ID NO: 186429 - RNA, 19 nt, Artificial Sequence
  Description of Artificial Sequence: Synthetic oligonucleotide
gaaagguugugagaagugc

SEQ ID NO: 186430 - RNA, 19 nt, Artificial Sequence
  Description of Artificial Sequence: Synthetic oligonucleotide
uauagucaauagcagccga

SEQ ID NO: 186431 - RNA, 19 nt, Artificial Sequence
  Description of Artificial Sequence: Synthetic oligonucleotide
ucuggaccgauuaauacuu

SEQ ID NO: 186432 - RNA, 19 nt, Artificial Sequence
  Description of Artificial Sequence: Synthetic oligonucleotide
aaaugaaaacucccuggaa

SEQ ID NO: 186433 - RNA, 19 nt, Artificial Sequence
  Description of Artificial Sequence: Synthetic oligonucleotide
ggaacaaguacccagcgac

SEQ ID NO: 186434 - RNA, 19 nt, Artificial Sequence
  Description of Artificial Sequence: Synthetic oligonucleotide
uuuacagacuuaguucacc

SEQ ID NO: 186435 - RNA, 19 nt, Artificial Sequence
  Description of Artificial Sequence: Synthetic oligonucleotide
cuacaguggagaaccacgg

SEQ ID NO: 186436 - RNA, 19 nt, Artificial Sequence
  Description of Artificial Sequence: Synthetic oligonucleotide
uacacuggauauuagugau

SEQ ID NO: 186437 - RNA, 19 nt, Artificial Sequence
  Description of Artificial Sequence: Synthetic oligonucleotide
aguauuaaagguggugaag

SEQ ID NO: 186438 - RNA, 19 nt, Artificial Sequence
  Description of Artificial Sequence: Synthetic oligonucleotide
uguaaccaucacuauugcc

SEQ ID NO: 186439 - RNA, 19 nt, Artificial Sequence
  Description of Artificial Sequence: Synthetic oligonucleotide
caugcucguguacagagag

SEQ ID NO: 186440 - RNA, 19 nt, Artificial Sequence
  Description of Artificial Sequence: Synthetic oligonucleotide
caacuaacaucaaguagag

SEQ ID NO: 186441 - RNA, 19 nt, Artificial Sequence
  Description of Artificial Sequence: Synthetic oligonucleotide
agacguagcugucgguugc

SEQ ID NO: 186442 - RNA, 19 nt, Artificial Sequence
  Description of Artificial Sequence: Synthetic oligonucleotide
guaguaaauguccucguuc

SEQ ID NO: 186443 - RNA, 19 nt, Artificial Sequence
  Description of Artificial Sequence: Synthetic oligonucleotide
agcagaacgcugucuacgg

SEQ ID NO: 186444 - RNA, 19 nt, Artificial Sequence
  Description of Artificial Sequence: Synthetic oligonucleotide
guuguuaugcacuaacucu

SEQ ID NO: 186445 - RNA, 19 nt, Artificial Sequence
  Description of Artificial Sequence: Synthetic oligonucleotide
aucgcgucaucuucacugc

SEQ ID NO: 186446 - RNA, 19 nt, Artificial Sequence
  Description of Artificial Sequence: Synthetic oligonucleotide
acgucuuguauauaauaca

SEQ ID NO: 186447 - RNA, 19 nt, Artificial Sequence
  Description of Artificial Sequence: Synthetic oligonucleotide
uuaucaacgugaagccagc

SEQ ID NO: 186448 - RNA, 19 nt, Artificial Sequence
  Description of Artificial Sequence: Synthetic oligonucleotide
auugggcaugcuuuuguag

SEQ ID NO: 186449 - RNA, 19 nt, Artificial Sequence
  Description of Artificial Sequence: Synthetic oligonucleotide
cauuguuuuagugaauguc

SEQ ID NO: 186450 - RNA, 19 nt, Artificial Sequence
  Description of Artificial Sequence: Synthetic oligonucleotide
aggaucuuaaagccuacgu

SEQ ID NO: 186451 - RNA, 19 nt, Artificial Sequence
  Description of Artificial Sequence: Synthetic oligonucleotide
accacgggucaugagagcc

SEQ ID NO: 186452 - RNA, 19 nt, Artificial Sequence
  Description of Artificial Sequence: Synthetic oligonucleotide
gacuuaguucaccaaccgc

SEQ ID NO: 186453 - RNA, 19 nt, Artificial Sequence
  Description of Artificial Sequence: Synthetic oligonucleotide
uuuaaccgggagcuugagc

SEQ ID NO: 186454 - RNA, 19 nt, Artificial Sequence
  Description of Artificial Sequence: Synthetic oligonucleotide
uagcucuuauagucaauag

SEQ ID NO: 186455 - RNA, 19 nt, Artificial Sequence
  Description of Artificial Sequence: Synthetic oligonucleotide
uggaccgauuaauacuugc

SEQ ID NO: 186456 - RNA, 19 nt, Artificial Sequence
  Description of Artificial Sequence: Synthetic oligonucleotide
uguucacuagaaagguugu

SEQ ID NO: 186457 - RNA, 19 nt, Artificial Sequence
  Description of Artificial Sequence: Synthetic oligonucleotide
ugauacgacucugugugcc

SEQ ID NO: 186458 - RNA, 19 nt, Artificial Sequence
  Description of Artificial Sequence: Synthetic oligonucleotide
ucauuagaacuuuaccaua

SEQ ID NO: 186459 - RNA, 19 nt, Artificial Sequence
  Description of Artificial Sequence: Synthetic oligonucleotide
aagagguuucuccccauaa

SEQ ID NO: 186460 - RNA, 19 nt, Artificial Sequence
  Description of Artificial Sequence: Synthetic oligonucleotide
ugcaaacgggugcagaauc

SEQ ID NO: 186461 - RNA, 19 nt, Artificial Sequence
  Description of Artificial Sequence: Synthetic oligonucleotide
acaaucgcgucaucuucac

SEQ ID NO: 186462 - RNA, 19 nt, Artificial Sequence
  Description of Artificial Sequence: Synthetic oligonucleotide
uuauuguacccuagcaaua

SEQ ID NO: 186463 - RNA, 19 nt, Artificial Sequence
  Description of Artificial Sequence: Synthetic oligonucleotide
uugcuacugguuaaacaug

SEQ ID NO: 186464 - RNA, 19 nt, Artificial Sequence
  Description of Artificial Sequence: Synthetic oligonucleotide
uaguauacucuguguaugu

SEQ ID NO: 186465 - RNA, 19 nt, Artificial Sequence
  Description of Artificial Sequence: Synthetic oligonucleotide
aaccacgggucaugagagc

SEQ ID NO: 186466 - RNA, 19 nt, Artificial Sequence
  Description of Artificial Sequence: Synthetic oligonucleotide
uauaucuuaguuggacaca

SEQ ID NO: 186467 - RNA, 19 nt, Artificial Sequence
  Description of Artificial Sequence: Synthetic oligonucleotide
auuuccuaucgugugcaac

SEQ ID NO: 186468 - RNA, 19 nt, Artificial Sequence
  Description of Artificial Sequence: Synthetic oligonucleotide
agucuugucaggaaaagaa

SEQ ID NO: 186469 - RNA, 19 nt, Artificial Sequence
  Description of Artificial Sequence: Synthetic oligonucleotide
guagcugucgguugccucc

SEQ ID NO: 186470 - RNA, 19 nt, Artificial Sequence
  Description of Artificial Sequence: Synthetic oligonucleotide
aaauaguuaucaacgugaa

SEQ ID NO: 186471 - RNA, 19 nt, Artificial Sequence
  Description of Artificial Sequence: Synthetic oligonucleotide
guagggagagucucuuagg

SEQ ID NO: 186472 - RNA, 19 nt, Artificial Sequence
  Description of Artificial Sequence: Synthetic oligonucleotide
gaaccacgggucaugagag

SEQ ID NO: 186473 - RNA, 19 nt, Artificial Sequence
  Description of Artificial Sequence: Synthetic oligonucleotide
acuuaguccgcaguccacg

SEQ ID NO: 186474 - RNA, 19 nt, Artificial Sequence
  Description of Artificial Sequence: Synthetic oligonucleotide
ugcagauuuccccacguuu

SEQ ID NO: 186475 - RNA, 19 nt, Artificial Sequence
  Description of Artificial Sequence: Synthetic oligonucleotide
agggaacaaguacccagcg

SEQ ID NO: 186476 - RNA, 19 nt, Artificial Sequence
  Description of Artificial Sequence: Synthetic oligonucleotide
ucucucguuuguuucacaa

SEQ ID NO: 186477 - RNA, 19 nt, Artificial Sequence
  Description of Artificial Sequence: Synthetic oligonucleotide
uguaguaaauguccucguu

SEQ ID NO: 186478 - RNA, 19 nt, Artificial Sequence
  Description of Artificial Sequence: Synthetic oligonucleotide
uagcgguagaguauccaug

SEQ ID NO: 186479 - RNA, 19 nt, Artificial Sequence
  Description of Artificial Sequence: Synthetic oligonucleotide
uacuaaauauaggcagaag

SEQ ID NO: 186480 - RNA, 19 nt, Artificial Sequence
  Description of Artificial Sequence: Synthetic oligonucleotide
ccgaucacggguuuaaccg

SEQ ID NO: 186481 - RNA, 19 nt, Artificial Sequence
  Description of Artificial Sequence: Synthetic oligonucleotide
aacgggugcagaaucucuc

SEQ ID NO: 186482 - RNA, 19 nt, Artificial Sequence
  Description of Artificial Sequence: Synthetic oligonucleotide
gagagccgacucuugaggc

SEQ ID NO: 186483 - RNA, 19 nt, Artificial Sequence
  Description of Artificial Sequence: Synthetic oligonucleotide
acuggacuauuaaaggcuc

SEQ ID NO: 186484 - RNA, 19 nt, Artificial Sequence
  Description of Artificial Sequence: Synthetic oligonucleotide
cagggaacaaguacccagc

SEQ ID NO: 186485 - RNA, 19 nt, Artificial Sequence
  Description of Artificial Sequence: Synthetic oligonucleotide
gaucacggguuuaaccggg

SEQ ID NO: 186486 - RNA, 19 nt, Artificial Sequence
  Description of Artificial Sequence: Synthetic oligonucleotide
gagucucuuagguugggca

SEQ ID NO: 186487 - RNA, 19 nt, Artificial Sequence
  Description of Artificial Sequence: Synthetic oligonucleotide
ucaaacgcggugucauuca

SEQ ID NO: 186488 - RNA, 19 nt, Artificial Sequence
  Description of Artificial Sequence: Synthetic oligonucleotide
guacagagagucucuguug

SEQ ID NO: 186489 - RNA, 19 nt, Artificial Sequence
  Description of Artificial Sequence: Synthetic oligonucleotide
ccuacaguggagaaccacg

SEQ ID NO: 186490 - RNA, 19 nt, Artificial Sequence
  Description of Artificial Sequence: Synthetic oligonucleotide
agugcaaacgggugcagaa

SEQ ID NO: 186491 - RNA, 19 nt, Artificial Sequence
  Description of Artificial Sequence: Synthetic oligonucleotide
uaaagccuacgucuuguau

SEQ ID NO: 186492 - RNA, 19 nt, Artificial Sequence
  Description of Artificial Sequence: Synthetic oligonucleotide
gcugccgcaagugacaugg

SEQ ID NO: 186493 - RNA, 19 nt, Artificial Sequence
  Description of Artificial Sequence: Synthetic oligonucleotide
cauuuucucaaacgcggug

SEQ ID NO: 186494 - RNA, 19 nt, Artificial Sequence
  Description of Artificial Sequence: Synthetic oligonucleotide
agauugggcaugcuuuugu

SEQ ID NO: 186495 - RNA, 19 nt, Artificial Sequence
  Description of Artificial Sequence: Synthetic oligonucleotide
accccggagguuguuaugc

SEQ ID NO: 186496 - RNA, 19 nt, Artificial Sequence
  Description of Artificial Sequence: Synthetic oligonucleotide
aacggugcggcccuauuua

SEQ ID NO: 186497 - RNA, 19 nt, Artificial Sequence
  Description of Artificial Sequence: Synthetic oligonucleotide
ugaugggcucauuauuaac

SEQ ID NO: 186498 - RNA, 19 nt, Artificial Sequence
  Description of Artificial Sequence: Synthetic oligonucleotide
auuuacagacuuaguucac

SEQ ID NO: 186499 - RNA, 19 nt, Artificial Sequence
  Description of Artificial Sequence: Synthetic oligonucleotide
gguuguuaugcacuaacuc

SEQ ID NO: 186500 - RNA, 19 nt, Artificial Sequence
  Description of Artificial Sequence: Synthetic oligonucleotide
aggaguagcgagcacuggu

SEQ ID NO: 186501 - RNA, 19 nt, Artificial Sequence
  Description of Artificial Sequence: Synthetic oligonucleotide
agacuuaguccgcagucca

SEQ ID NO: 186502 - RNA, 19 nt, Artificial Sequence
  Description of Artificial Sequence: Synthetic oligonucleotide
auaucuuaguuggacacaa

SEQ ID NO: 186503 - RNA, 19 nt, Artificial Sequence
  Description of Artificial Sequence: Synthetic oligonucleotide
acuaacuggucaaagcaga

SEQ ID NO: 186504 - RNA, 19 nt, Artificial Sequence
  Description of Artificial Sequence: Synthetic oligonucleotide
uuuagcgguagaguaucca

SEQ ID NO: 186505 - RNA, 19 nt, Artificial Sequence
  Description of Artificial Sequence: Synthetic oligonucleotide
acggguuuaaccgggagcu

SEQ ID NO: 186506 - RNA, 19 nt, Artificial Sequence
  Description of Artificial Sequence: Synthetic oligonucleotide
aacgacuguggcagggaac

SEQ ID NO: 186507 - RNA, 19 nt, Artificial Sequence
  Description of Artificial Sequence: Synthetic oligonucleotide
accccgucgugguaguccc

SEQ ID NO: 186508 - RNA, 19 nt, Artificial Sequence
  Description of Artificial Sequence: Synthetic oligonucleotide
cauuuagcgguagaguauc

SEQ ID NO: 186509 - RNA, 19 nt, Artificial Sequence
  Description of Artificial Sequence: Synthetic oligonucleotide
gagacguagcugucgguug

SEQ ID NO: 186510 - RNA, 19 nt, Artificial Sequence
  Description of Artificial Sequence: Synthetic oligonucleotide
ugguucgggugguugacgc

SEQ ID NO: 186511 - RNA, 19 nt, Artificial Sequence
  Description of Artificial Sequence: Synthetic oligonucleotide
agccgaaacaccaacgacu

SEQ ID NO: 186512 - RNA, 19 nt, Artificial Sequence
  Description of Artificial Sequence: Synthetic oligonucleotide
gguagaagugcuauugaug

SEQ ID NO: 186513 - RNA, 19 nt, Artificial Sequence
  Description of Artificial Sequence: Synthetic oligonucleotide
uggacuauuaaaggcucgu

SEQ ID NO: 186514 - RNA, 19 nt, Artificial Sequence
  Description of Artificial Sequence: Synthetic oligonucleotide
agaaggaguauggaagagu

SEQ ID NO: 186515 - RNA, 19 nt, Artificial Sequence
  Description of Artificial Sequence: Synthetic oligonucleotide
uagugaugggcucauuauu

SEQ ID NO: 186516 - RNA, 19 nt, Artificial Sequence
  Description of Artificial Sequence: Synthetic oligonucleotide
uugcgcagcgaguagcugu

SEQ ID NO: 186517 - RNA, 19 nt, Artificial Sequence
  Description of Artificial Sequence: Synthetic oligonucleotide
cagaaacguaaaauaccug

SEQ ID NO: 186518 - RNA, 19 nt, Artificial Sequence
  Description of Artificial Sequence: Synthetic oligonucleotide
agcaaaaccggggcgaacu

SEQ ID NO: 186519 - RNA, 19 nt, Artificial Sequence
  Description of Artificial Sequence: Synthetic oligonucleotide
ucacggguuuaaccgggag

SEQ ID NO: 186520 - RNA, 19 nt, Artificial Sequence
  Description of Artificial Sequence: Synthetic oligonucleotide
uaccauuuagcgguagagu

SEQ ID NO: 186521 - RNA, 19 nt, Artificial Sequence
  Description of Artificial Sequence: Synthetic oligonucleotide
gguagaguauccauggcac

SEQ ID NO: 186522 - RNA, 19 nt, Artificial Sequence
  Description of Artificial Sequence: Synthetic oligonucleotide
cacggguuuaaccgggagc

SEQ ID NO: 186523 - RNA, 19 nt, Artificial Sequence
  Description of Artificial Sequence: Synthetic oligonucleotide
caucaaguagagcuguaca

SEQ ID NO: 186524 - RNA, 19 nt, Artificial Sequence
  Description of Artificial Sequence: Synthetic oligonucleotide
agucucuuagguugggcau

SEQ ID NO: 186525 - RNA, 19 nt, Artificial Sequence
  Description of Artificial Sequence: Synthetic oligonucleotide
cccagcgacauaauaauac

SEQ ID NO: 186526 - RNA, 19 nt, Artificial Sequence
  Description of Artificial Sequence: Synthetic oligonucleotide
acguuugugcaaggcaugg

SEQ ID NO: 186527 - RNA, 19 nt, Artificial Sequence
  Description of Artificial Sequence: Synthetic oligonucleotide
aaacggugcggcccuauuu

SEQ ID NO: 186528 - RNA, 19 nt, Artificial Sequence
  Description of Artificial Sequence: Synthetic oligonucleotide
auuuagcgguagaguaucc

SEQ ID NO: 186529 - RNA, 19 nt, Artificial Sequence
  Description of Artificial Sequence: Synthetic oligonucleotide
aagauugggcaugcuuuug

SEQ ID NO: 186530 - RNA, 19 nt, Artificial Sequence
  Description of Artificial Sequence: Synthetic oligonucleotide
ucguguacagagagucucu

SEQ ID NO: 186531 - RNA, 19 nt, Artificial Sequence
  Description of Artificial Sequence: Synthetic oligonucleotide
ggcgaacuuaccauggcgg

SEQ ID NO: 186532 - RNA, 19 nt, Artificial Sequence
  Description of Artificial Sequence: Synthetic oligonucleotide
cuucaacuaacaucaagua

SEQ ID NO: 186533 - RNA, 19 nt, Artificial Sequence
  Description of Artificial Sequence: Synthetic oligonucleotide
cacagaacuacgagguuca

SEQ ID NO: 186534 - RNA, 19 nt, Artificial Sequence
  Description of Artificial Sequence: Synthetic oligonucleotide
ugggcaugcucguguacag

SEQ ID NO: 186535 - RNA, 19 nt, Artificial Sequence
  Description of Artificial Sequence: Synthetic oligonucleotide
auuguacccuagcaauaga

SEQ ID NO: 186536 - RNA, 19 nt, Artificial Sequence
  Description of Artificial Sequence: Synthetic oligonucleotide
gaccgauuaauacuugcgu

SEQ ID NO: 186537 - RNA, 19 nt, Artificial Sequence
  Description of Artificial Sequence: Synthetic oligonucleotide
guacagaagcgagugaguc

SEQ ID NO: 186538 - RNA, 19 nt, Artificial Sequence
  Description of Artificial Sequence: Synthetic oligonucleotide
cuugauugcuacugguuaa

SEQ ID NO: 186539 - RNA, 19 nt, Artificial Sequence
  Description of Artificial Sequence: Synthetic oligonucleotide
gauacgacucugugugcca

SEQ ID NO: 186540 - RNA, 19 nt, Artificial Sequence
  Description of Artificial Sequence: Synthetic oligonucleotide
caaaccguguuaaacuuua

SEQ ID NO: 186541 - RNA, 19 nt, Artificial Sequence
  Description of Artificial Sequence: Synthetic oligonucleotide
aguuaucaacgugaagcca

SEQ ID NO: 186542 - RNA, 19 nt, Artificial Sequence
  Description of Artificial Sequence: Synthetic oligonucleotide
aaacgggugcagaaucucu

SEQ ID NO: 186543 - RNA, 19 nt, Artificial Sequence
  Description of Artificial Sequence: Synthetic oligonucleotide
cuauugaugucaccugaga

SEQ ID NO: 186544 - RNA, 19 nt, Artificial Sequence
  Description of Artificial Sequence: Synthetic oligonucleotide
gagcucgucaacaagauuu

SEQ ID NO: 186545 - RNA, 19 nt, Artificial Sequence
  Description of Artificial Sequence: Synthetic oligonucleotide
uuaguccgcaguccacgac

SEQ ID NO: 186546 - RNA, 19 nt, Artificial Sequence
  Description of Artificial Sequence: Synthetic oligonucleotide
acggugcggcccuauuuac

SEQ ID NO: 186547 - RNA, 19 nt, Artificial Sequence
  Description of Artificial Sequence: Synthetic oligonucleotide
gagccgacucuugaggcag

SEQ ID NO: 186548 - RNA, 19 nt, Artificial Sequence
  Description of Artificial Sequence: Synthetic oligonucleotide
ugcccuccguuccagaaua

SEQ ID NO: 186549 - RNA, 19 nt, Artificial Sequence
  Description of Artificial Sequence: Synthetic oligonucleotide
gaguagcgagcacugguuc

SEQ ID NO: 186550 - RNA, 19 nt, Artificial Sequence
  Description of Artificial Sequence: Synthetic oligonucleotide
guccgcugagggaugagcg

SEQ ID NO: 186551 - RNA, 19 nt, Artificial Sequence
  Description of Artificial Sequence: Synthetic oligonucleotide
aagagcucgucaacaagau

SEQ ID NO: 186552 - RNA, 19 nt, Artificial Sequence
  Description of Artificial Sequence: Synthetic oligonucleotide
ccuaucgugugcaaccaag

SEQ ID NO: 186553 - RNA, 19 nt, Artificial Sequence
  Description of Artificial Sequence: Synthetic oligonucleotide
cuaucgugugcaaccaaga

SEQ ID NO: 186554 - RNA, 19 nt, Artificial Sequence
  Description of Artificial Sequence: Synthetic oligonucleotide
acaugaaauaaggccugug

SEQ ID NO: 186555 - RNA, 19 nt, Artificial Sequence
  Description of Artificial Sequence: Synthetic oligonucleotide
agcagccgaaacaccaacg

SEQ ID NO: 186556 - RNA, 19 nt, Artificial Sequence
  Description of Artificial Sequence: Synthetic oligonucleotide
agagccgacucuugaggca

SEQ ID NO: 186557 - RNA, 19 nt, Artificial Sequence
  Description of Artificial Sequence: Synthetic oligonucleotide
cacguuugugcaaggcaug

SEQ ID NO: 186558 - RNA, 19 nt, Artificial Sequence
  Description of Artificial Sequence: Synthetic oligonucleotide
gggcgaacuuaccauggcg

SEQ ID NO: 186559 - RNA, 19 nt, Artificial Sequence
  Description of Artificial Sequence: Synthetic oligonucleotide
accaacgacuguggcaggg

SEQ ID NO: 186560 - RNA, 19 nt, Artificial Sequence
  Description of Artificial Sequence: Synthetic oligonucleotide
gguuuacacaaagggcugg

SEQ ID NO: 186561 - RNA, 19 nt, Artificial Sequence
  Description of Artificial Sequence: Synthetic oligonucleotide
cacaaucgcgucaucuuca

SEQ ID NO: 186562 - RNA, 19 nt, Artificial Sequence
  Description of Artificial Sequence: Synthetic oligonucleotide
caaacgcggugucauucag

SEQ ID NO: 186563 - RNA, 19 nt, Artificial Sequence
  Description of Artificial Sequence: Synthetic oligonucleotide
gagggaugacccaagaccu

SEQ ID NO: 186564 - RNA, 19 nt, Artificial Sequence
  Description of Artificial Sequence: Synthetic oligonucleotide
agaggaguagcgagcacug

SEQ ID NO: 186565 - RNA, 19 nt, Artificial Sequence
  Description of Artificial Sequence: Synthetic oligonucleotide
ggauauuagugaugggcuc

SEQ ID NO: 186566 - RNA, 19 nt, Artificial Sequence
  Description of Artificial Sequence: Synthetic oligonucleotide
uguggcccuaggaguaacu

SEQ ID NO: 186567 - RNA, 19 nt, Artificial Sequence
  Description of Artificial Sequence: Synthetic oligonucleotide
acuugcguguggcccuagg

SEQ ID NO: 186568 - RNA, 19 nt, Artificial Sequence
  Description of Artificial Sequence: Synthetic oligonucleotide
cugauacgacucugugugc

SEQ ID NO: 186569 - RNA, 19 nt, Artificial Sequence
  Description of Artificial Sequence: Synthetic oligonucleotide
uuccuaucgugugcaacca

SEQ ID NO: 186570 - RNA, 19 nt, Artificial Sequence
  Description of Artificial Sequence: Synthetic oligonucleotide
cagagggaugacccaagac

SEQ ID NO: 186571 - RNA, 19 nt, Artificial Sequence
  Description of Artificial Sequence: Synthetic oligonucleotide
uaaggguagaagugcuauu

SEQ ID NO: 186572 - RNA, 19 nt, Artificial Sequence
  Description of Artificial Sequence: Synthetic oligonucleotide
gcagauuuccccacguuug

SEQ ID NO: 186573 - RNA, 19 nt, Artificial Sequence
  Description of Artificial Sequence: Synthetic oligonucleotide
uccucacggugucauucca

SEQ ID NO: 186574 - RNA, 19 nt, Artificial Sequence
  Description of Artificial Sequence: Synthetic oligonucleotide
auggcgggagucagaaaac

SEQ ID NO: 186575 - RNA, 19 nt, Artificial Sequence
  Description of Artificial Sequence: Synthetic oligonucleotide
gaacaaguacccagcgaca

SEQ ID NO: 186576 - RNA, 19 nt, Artificial Sequence
  Description of Artificial Sequence: Synthetic oligonucleotide
cagccgaaacaccaacgac

SEQ ID NO: 186577 - RNA, 19 nt, Artificial Sequence
  Description of Artificial Sequence: Synthetic oligonucleotide
agguuguuaugcacuaacu

SEQ ID NO: 186578 - RNA, 19 nt, Artificial Sequence
  Description of Artificial Sequence: Synthetic oligonucleotide
ugagcggcgccuccaguuc

SEQ ID NO: 186579 - RNA, 19 nt, Artificial Sequence
  Description of Artificial Sequence: Synthetic oligonucleotide
ggcaccuuuuguucacuag

SEQ ID NO: 186580 - RNA, 19 nt, Artificial Sequence
  Description of Artificial Sequence: Synthetic oligonucleotide
ggaguaacuggacuauuaa

SEQ ID NO: 186581 - RNA, 19 nt, Artificial Sequence
  Description of Artificial Sequence: Synthetic oligonucleotide
cuacggcugaaaagaagca

SEQ ID NO: 186582 - RNA, 19 nt, Artificial Sequence
  Description of Artificial Sequence: Synthetic oligonucleotide
ccuccguuccagaauaaac

SEQ ID NO: 186583 - RNA, 19 nt, Artificial Sequence
  Description of Artificial Sequence: Synthetic oligonucleotide
aguuaccauuuagcgguag

SEQ ID NO: 186584 - RNA, 19 nt, Artificial Sequence
  Description of Artificial Sequence: Synthetic oligonucleotide
gcaccuuuuguucacuaga

SEQ ID NO: 186585 - RNA, 19 nt, Artificial Sequence
  Description of Artificial Sequence: Synthetic oligonucleotide
accggggcgaacuuaccau

SEQ ID NO: 186586 - RNA, 19 nt, Artificial Sequence
  Description of Artificial Sequence: Synthetic oligonucleotide
uggcgggagucagaaaaca

SEQ ID NO: 186587 - RNA, 19 nt, Artificial Sequence
  Description of Artificial Sequence: Synthetic oligonucleotide
aaacgcggugucauucaga

SEQ ID NO: 186588 - RNA, 19 nt, Artificial Sequence
  Description of Artificial Sequence: Synthetic oligonucleotide
cugugugccagaggaguag

SEQ ID NO: 186589 - RNA, 19 nt, Artificial Sequence
  Description of Artificial Sequence: Synthetic oligonucleotide
agauuuccccacguuugug

SEQ ID NO: 186590 - RNA, 19 nt, Artificial Sequence
  Description of Artificial Sequence: Synthetic oligonucleotide
uagcugucgguugccuccg

SEQ ID NO: 186591 - RNA, 19 nt, Artificial Sequence
  Description of Artificial Sequence: Synthetic oligonucleotide
aaggaguauggaagaguaa

SEQ ID NO: 186592 - RNA, 19 nt, Artificial Sequence
  Description of Artificial Sequence: Synthetic oligonucleotide
gcagaaacguaaaauaccu

SEQ ID NO: 186593 - RNA, 19 nt, Artificial Sequence
  Description of Artificial Sequence: Synthetic oligonucleotide
uccuaucgugugcaaccaa

SEQ ID NO: 186594 - RNA, 19 nt, Artificial Sequence
  Description of Artificial Sequence: Synthetic oligonucleotide
uaaccgggagcuugagcuc

SEQ ID NO: 186595 - RNA, 19 nt, Artificial Sequence
  Description of Artificial Sequence: Synthetic oligonucleotide
uacgacucugugugccaga

SEQ ID NO: 186596 - RNA, 19 nt, Artificial Sequence
  Description of Artificial Sequence: Synthetic oligonucleotide
gccgaaacaccaacgacug

SEQ ID NO: 186597 - RNA, 19 nt, Artificial Sequence
  Description of Artificial Sequence: Synthetic oligonucleotide
cuggaccgauuaauacuug

SEQ ID NO: 186598 - RNA, 19 nt, Artificial Sequence
  Description of Artificial Sequence: Synthetic oligonucleotide
ggguuuaaccgggagcuug

SEQ ID NO: 186599 - RNA, 19 nt, Artificial Sequence
  Description of Artificial Sequence: Synthetic oligonucleotide
aacucccuggaaaguauua

SEQ ID NO: 186600 - RNA, 19 nt, Artificial Sequence
  Description of Artificial Sequence: Synthetic oligonucleotide
uugcccuccguuccagaau

SEQ ID NO: 186601 - RNA, 19 nt, Artificial Sequence
  Description of Artificial Sequence: Synthetic oligonucleotide
uccggguagggagagucuc

SEQ ID NO: 186602 - RNA, 19 nt, Artificial Sequence
  Description of Artificial Sequence: Synthetic oligonucleotide
gccuacgucuuguauauaa

SEQ ID NO: 186603 - RNA, 19 nt, Artificial Sequence
  Description of Artificial Sequence: Synthetic oligonucleotide
cuugcguguggcccuagga

SEQ ID NO: 186604 - RNA, 19 nt, Artificial Sequence
  Description of Artificial Sequence: Synthetic oligonucleotide
aggaguaacuggacuauua

SEQ ID NO: 186605 - RNA, 19 nt, Artificial Sequence
  Description of Artificial Sequence: Synthetic oligonucleotide
auauaggcagaaggaguau

SEQ ID NO: 186606 - RNA, 19 nt, Artificial Sequence
  Description of Artificial Sequence: Synthetic oligonucleotide
gcacccuucuuuguuaaug

SEQ ID NO: 186607 - RNA, 19 nt, Artificial Sequence
  Description of Artificial Sequence: Synthetic oligonucleotide
guuuaaccgggagcuugag

SEQ ID NO: 186608 - RNA, 19 nt, Artificial Sequence
  Description of Artificial Sequence: Synthetic oligonucleotide
agagcucgucaacaagauu

SEQ ID NO: 186609 - RNA, 19 nt, Artificial Sequence
  Description of Artificial Sequence: Synthetic oligonucleotide
ccuauuuacagacuuaguu

SEQ ID NO: 186610 - RNA, 19 nt, Artificial Sequence
  Description of Artificial Sequence: Synthetic oligonucleotide
agaagcgagugaguccgcu

SEQ ID NO: 186611 - RNA, 19 nt, Artificial Sequence
  Description of Artificial Sequence: Synthetic oligonucleotide
acaguugaggaaacaugaa

SEQ ID NO: 186612 - RNA, 19 nt, Artificial Sequence
  Description of Artificial Sequence: Synthetic oligonucleotide
cuaacucugaaaugaucau

SEQ ID NO: 186613 - RNA, 19 nt, Artificial Sequence
  Description of Artificial Sequence: Synthetic oligonucleotide
guggcccuaggaguaacug

SEQ ID NO: 186614 - RNA, 19 nt, Artificial Sequence
  Description of Artificial Sequence: Synthetic oligonucleotide
gacuuaguccgcaguccac

SEQ ID NO: 186615 - RNA, 19 nt, Artificial Sequence
  Description of Artificial Sequence: Synthetic oligonucleotide
gacguagcugucgguugcc

SEQ ID NO: 186616 - RNA, 19 nt, Artificial Sequence
  Description of Artificial Sequence: Synthetic oligonucleotide
acucgcgucccuggcauug

SEQ ID NO: 186617 - RNA, 19 nt, Artificial Sequence
  Description of Artificial Sequence: Synthetic oligonucleotide
ucgguugccuccggcuucc

SEQ ID NO: 186618 - RNA, 19 nt, Artificial Sequence
  Description of Artificial Sequence: Synthetic oligonucleotide
gaagcaaaaccggggcgaa

SEQ ID NO: 186619 - RNA, 19 nt, Artificial Sequence
  Description of Artificial Sequence: Synthetic oligonucleotide
ugaugucaccugagauaaa

SEQ ID NO: 186620 - RNA, 19 nt, Artificial Sequence
  Description of Artificial Sequence: Synthetic oligonucleotide
auagcagccgaaacaccaa

SEQ ID NO: 186621 - RNA, 19 nt, Artificial Sequence
  Description of Artificial Sequence: Synthetic oligonucleotide
cgaucacggguuuaaccgg

SEQ ID NO: 186622 - RNA, 19 nt, Artificial Sequence
  Description of Artificial Sequence: Synthetic oligonucleotide
cugcaccccgucgugguag

SEQ ID NO: 186623 - RNA, 19 nt, Artificial Sequence
  Description of Artificial Sequence: Synthetic oligonucleotide
ugacgccuucacagagcug

SEQ ID NO: 186624 - RNA, 19 nt, Artificial Sequence
  Description of Artificial Sequence: Synthetic oligonucleotide
agcgcucuggaccgauuaa

SEQ ID NO: 186625 - RNA, 19 nt, Artificial Sequence
  Description of Artificial Sequence: Synthetic oligonucleotide
agcgagcacugguucgggu

SEQ ID NO: 186626 - RNA, 19 nt, Artificial Sequence
  Description of Artificial Sequence: Synthetic oligonucleotide
gucgguugccuccggcuuc

SEQ ID NO: 186627 - RNA, 19 nt, Artificial Sequence
  Description of Artificial Sequence: Synthetic oligonucleotide
ccacaaucgcgucaucuuc

SEQ ID NO: 186628 - RNA, 19 nt, Artificial Sequence
  Description of Artificial Sequence: Synthetic oligonucleotide
gguucgggugguugacgcc

SEQ ID NO: 186629 - RNA, 19 nt, Artificial Sequence
  Description of Artificial Sequence: Synthetic oligonucleotide
ccacgggucaugagagccg

SEQ ID NO: 186630 - RNA, 19 nt, Artificial Sequence
  Description of Artificial Sequence: Synthetic oligonucleotide
gcagaacgcugucuacggc

SEQ ID NO: 186631 - RNA, 19 nt, Artificial Sequence
  Description of Artificial Sequence: Synthetic oligonucleotide
cagaagcgagugaguccgc

SEQ ID NO: 186632 - RNA, 19 nt, Artificial Sequence
  Description of Artificial Sequence: Synthetic oligonucleotide
ccgauuaauacuugcgugu

SEQ ID NO: 186633 - RNA, 19 nt, Artificial Sequence
  Description of Artificial Sequence: Synthetic oligonucleotide
agcucgucaacaagauuuu

SEQ ID NO: 186634 - RNA, 19 nt, Artificial Sequence
  Description of Artificial Sequence: Synthetic oligonucleotide
cgauuaauacuugcgugug

SEQ ID NO: 186635 - RNA, 19 nt, Artificial Sequence
  Description of Artificial Sequence: Synthetic oligonucleotide
gguuuaaccgggagcuuga

SEQ ID NO: 186636 - RNA, 19 nt, Artificial Sequence
  Description of Artificial Sequence: Synthetic oligonucleotide
ggacuauuaaaggcucguc

SEQ ID NO: 186637 - RNA, 19 nt, Artificial Sequence
  Description of Artificial Sequence: Synthetic oligonucleotide
guggcggaacuccagcgcu

SEQ ID NO: 186638 - RNA, 19 nt, Artificial Sequence
  Description of Artificial Sequence: Synthetic oligonucleotide
ugcaccccgucgugguagu

SEQ ID NO: 186639 - RNA, 19 nt, Artificial Sequence
  Description of Artificial Sequence: Synthetic oligonucleotide
aaguuaccauuuagcggua

SEQ ID NO: 186640 - RNA, 19 nt, Artificial Sequence
  Description of Artificial Sequence: Synthetic oligonucleotide
ccguguuaaacuuuacacu

SEQ ID NO: 186641 - RNA, 19 nt, Artificial Sequence
  Description of Artificial Sequence: Synthetic oligonucleotide
ccagaauaaacagagggau

SEQ ID NO: 186642 - RNA, 19 nt, Artificial Sequence
  Description of Artificial Sequence: Synthetic oligonucleotide
guucgggugguugacgccu

SEQ ID NO: 186643 - RNA, 19 nt, Artificial Sequence
  Description of Artificial Sequence: Synthetic oligonucleotide
uucgggugguugacgccuu

SEQ ID NO: 186644 - RNA, 19 nt, Artificial Sequence
  Description of Artificial Sequence: Synthetic oligonucleotide
uauuagugaugggcucauu

SEQ ID NO: 186645 - RNA, 19 nt, Artificial Sequence
  Description of Artificial Sequence: Synthetic oligonucleotide
cuaggaguaacuggacuau

SEQ ID NO: 186646 - RNA, 19 nt, Artificial Sequence
  Description of Artificial Sequence: Synthetic oligonucleotide
ggcgggagucagaaaacac

SEQ ID NO: 186647 - RNA, 19 nt, Artificial Sequence
  Description of Artificial Sequence: Synthetic oligonucleotide
gcgguagaguauccauggc

SEQ ID NO: 186648 - RNA, 19 nt, Artificial Sequence
  Description of Artificial Sequence: Synthetic oligonucleotide
ugccuugguuaaggguaga

SEQ ID NO: 186649 - RNA, 19 nt, Artificial Sequence
  Description of Artificial Sequence: Synthetic oligonucleotide
acgcggugucauucagacu

SEQ ID NO: 186650 - RNA, 19 nt, Artificial Sequence
  Description of Artificial Sequence: Synthetic oligonucleotide
ucgggugguugacgccuuc

SEQ ID NO: 186651 - RNA, 19 nt, Artificial Sequence
  Description of Artificial Sequence: Synthetic oligonucleotide
cauuuccuaucgugugcaa

SEQ ID NO: 186652 - RNA, 19 nt, Artificial Sequence
  Description of Artificial Sequence: Synthetic oligonucleotide
aucacggguuuaaccggga

SEQ ID NO: 186653 - RNA, 19 nt, Artificial Sequence
  Description of Artificial Sequence: Synthetic oligonucleotide
ggcauggcaggacugacuu

SEQ ID NO: 186654 - RNA, 19 nt, Artificial Sequence
  Description of Artificial Sequence: Synthetic oligonucleotide
gagggaugagcggcgccuc

SEQ ID NO: 186655 - RNA, 19 nt, Artificial Sequence
  Description of Artificial Sequence: Synthetic oligonucleotide
cccggagguuguuaugcac

SEQ ID NO: 186656 - RNA, 19 nt, Artificial Sequence
  Description of Artificial Sequence: Synthetic oligonucleotide
ccagcgacauaauaauacu

SEQ ID NO: 186657 - RNA, 19 nt, Artificial Sequence
  Description of Artificial Sequence: Synthetic oligonucleotide
gccgcuggcagcgcucugg

SEQ ID NO: 186658 - RNA, 19 nt, Artificial Sequence
  Description of Artificial Sequence: Synthetic oligonucleotide
cucucguuuguuucacaau

SEQ ID NO: 186659 - RNA, 19 nt, Artificial Sequence
  Description of Artificial Sequence: Synthetic oligonucleotide
ggccgggaagggucucucg

SEQ ID NO: 186660 - RNA, 19 nt, Artificial Sequence
  Description of Artificial Sequence: Synthetic oligonucleotide
gugaguccgcugagggaug

SEQ ID NO: 186661 - RNA, 19 nt, Artificial Sequence
  Description of Artificial Sequence: Synthetic oligonucleotide
cccuggcauuguuuuagug

SEQ ID NO: 186662 - RNA, 19 nt, Artificial Sequence
  Description of Artificial Sequence: Synthetic oligonucleotide
uacuugcguguggcccuag

SEQ ID NO: 186663 - RNA, 19 nt, Artificial Sequence
  Description of Artificial Sequence: Synthetic oligonucleotide
ccggggcgaacuuaccaug

SEQ ID NO: 186664 - RNA, 19 nt, Artificial Sequence
  Description of Artificial Sequence: Synthetic oligonucleotide
acccagcgacauaauaaua

SEQ ID NO: 186665 - RNA, 19 nt, Artificial Sequence
  Description of Artificial Sequence: Synthetic oligonucleotide
ucgcgucccuggcauuguu

SEQ ID NO: 186666 - RNA, 19 nt, Artificial Sequence
  Description of Artificial Sequence: Synthetic oligonucleotide
cagcgcucuggaccgauua

SEQ ID NO: 186667 - RNA, 19 nt, Artificial Sequence
  Description of Artificial Sequence: Synthetic oligonucleotide
ccacguuugugcaaggcau

SEQ ID NO: 186668 - RNA, 19 nt, Artificial Sequence
  Description of Artificial Sequence: Synthetic oligonucleotide
ggcacucgcgucccuggca

SEQ ID NO: 186669 - RNA, 19 nt, Artificial Sequence
  Description of Artificial Sequence: Synthetic oligonucleotide
gguacagaagcgagugagu

SEQ ID NO: 186670 - RNA, 19 nt, Artificial Sequence
  Description of Artificial Sequence: Synthetic oligonucleotide
auacuugcguguggcccua

SEQ ID NO: 186671 - RNA, 19 nt, Artificial Sequence
  Description of Artificial Sequence: Synthetic oligonucleotide
ccguagcucuuauagucaa

SEQ ID NO: 186672 - RNA, 19 nt, Artificial Sequence
  Description of Artificial Sequence: Synthetic oligonucleotide
gccgacucuugaggcagag

SEQ ID NO: 186673 - RNA, 19 nt, Artificial Sequence
  Description of Artificial Sequence: Synthetic oligonucleotide
ggagacguagcugucgguu

SEQ ID NO: 186674 - RNA, 19 nt, Artificial Sequence
  Description of Artificial Sequence: Synthetic oligonucleotide
gcucgucaacaagauuuuc

SEQ ID NO: 186675 - RNA, 19 nt, Artificial Sequence
  Description of Artificial Sequence: Synthetic oligonucleotide
gcgucagccacaaucgcgu

SEQ ID NO: 186676 - RNA, 19 nt, Artificial Sequence
  Description of Artificial Sequence: Synthetic oligonucleotide
acgcugucuacggcugaaa

SEQ ID NO: 186677 - RNA, 19 nt, Artificial Sequence
  Description of Artificial Sequence: Synthetic oligonucleotide
ccggagguuguuaugcacu

SEQ ID NO: 186678 - RNA, 19 nt, Artificial Sequence
  Description of Artificial Sequence: Synthetic oligonucleotide
gcaaacgggugcagaaucu

SEQ ID NO: 186679 - RNA, 19 nt, Artificial Sequence
  Description of Artificial Sequence: Synthetic oligonucleotide
gcaugcucguguacagaga

SEQ ID NO: 186680 - RNA, 19 nt, Artificial Sequence
  Description of Artificial Sequence: Synthetic oligonucleotide
cauggccgggaagggucuc

SEQ ID NO: 186681 - RNA, 19 nt, Artificial Sequence
  Description of Artificial Sequence: Synthetic oligonucleotide
gugcaaacgggugcagaau

SEQ ID NO: 186682 - RNA, 19 nt, Artificial Sequence
  Description of Artificial Sequence: Synthetic oligonucleotide
caaucgcgucaucuucacu

SEQ ID NO: 186683 - RNA, 19 nt, Artificial Sequence
  Description of Artificial Sequence: Synthetic oligonucleotide
gccuugguuaaggguagaa

SEQ ID NO: 186684 - RNA, 19 nt, Artificial Sequence
  Description of Artificial Sequence: Synthetic oligonucleotide
gccgggaagggucucucgu

SEQ ID NO: 186685 - RNA, 19 nt, Artificial Sequence
  Description of Artificial Sequence: Synthetic oligonucleotide
ccaucacaacagucuccuc

SEQ ID NO: 186686 - RNA, 19 nt, Artificial Sequence
  Description of Artificial Sequence: Synthetic oligonucleotide
ggcuugauugcuacugguu

SEQ ID NO: 186687 - RNA, 19 nt, Artificial Sequence
  Description of Artificial Sequence: Synthetic oligonucleotide
cuccggguagggagagucu

SEQ ID NO: 186688 - RNA, 19 nt, Artificial Sequence
  Description of Artificial Sequence: Synthetic oligonucleotide
ggguagggagagucucuua

SEQ ID NO: 186689 - RNA, 19 nt, Artificial Sequence
  Description of Artificial Sequence: Synthetic oligonucleotide
agccgacucuugaggcaga

SEQ ID NO: 186690 - RNA, 19 nt, Artificial Sequence
  Description of Artificial Sequence: Synthetic oligonucleotide
cccuauuuacagacuuagu

SEQ ID NO: 186691 - RNA, 19 nt, Artificial Sequence
  Description of Artificial Sequence: Synthetic oligonucleotide
gcacucgcgucccuggcau

SEQ ID NO: 186692 - RNA, 19 nt, Artificial Sequence
  Description of Artificial Sequence: Synthetic oligonucleotide
agccuacgucuuguauaua

SEQ ID NO: 186693 - RNA, 19 nt, Artificial Sequence
  Description of Artificial Sequence: Synthetic oligonucleotide
uggcagcgcucuggaccga

SEQ ID NO: 186694 - RNA, 19 nt, Artificial Sequence
  Description of Artificial Sequence: Synthetic oligonucleotide
cgcucuggaccgauuaaua

SEQ ID NO: 186695 - RNA, 19 nt, Artificial Sequence
  Description of Artificial Sequence: Synthetic oligonucleotide
cggagguuguuaugcacua

SEQ ID NO: 186696 - RNA, 19 nt, Artificial Sequence
  Description of Artificial Sequence: Synthetic oligonucleotide
gggagacguagcugucggu

SEQ ID NO: 186697 - RNA, 19 nt, Artificial Sequence
  Description of Artificial Sequence: Synthetic oligonucleotide
ccccggagguuguuaugca

SEQ ID NO: 186698 - RNA, 19 nt, Artificial Sequence
  Description of Artificial Sequence: Synthetic oligonucleotide
cggugcggcccuauuuaca

SEQ ID NO: 186699 - RNA, 19 nt, Artificial Sequence
  Description of Artificial Sequence: Synthetic oligonucleotide
gcgcucuggaccgauuaau

SEQ ID NO: 186700 - RNA, 19 nt, Artificial Sequence
  Description of Artificial Sequence: Synthetic oligonucleotide
ccccgucgugguagucccc

SEQ ID NO: 186701 - RNA, 19 nt, Artificial Sequence
  Description of Artificial Sequence: Synthetic oligonucleotide
ccccauaacacacgcucuu

SEQ ID NO: 186702 - RNA, 19 nt, Artificial Sequence
  Description of Artificial Sequence: Synthetic oligonucleotide
ccacgaccugcaccccguc

SEQ ID NO: 186703 - RNA, 19 nt, Artificial Sequence
  Description of Artificial Sequence: Synthetic oligonucleotide
cucgcgucccuggcauugu

SEQ ID NO: 186704 - RNA, 19 nt, Artificial Sequence
  Description of Artificial Sequence: Synthetic oligonucleotide
cucuuagguugggcaugcu

SEQ ID NO: 186705 - RNA, 19 nt, Artificial Sequence
  Description of Artificial Sequence: Synthetic oligonucleotide
ggaggccgccacagcagua

SEQ ID NO: 186706 - RNA, 19 nt, Artificial Sequence
  Description of Artificial Sequence: Synthetic oligonucleotide
ccgccgaucacggguuuaa

SEQ ID NO: 186707 - RNA, 19 nt, Artificial Sequence
  Description of Artificial Sequence: Synthetic oligonucleotide
cggcccuauuuacagacuu

SEQ ID NO: 186708 - RNA, 19 nt, Artificial Sequence
  Description of Artificial Sequence: Synthetic oligonucleotide
ccgggaagggucucucguu

SEQ ID NO: 186709 - RNA, 19 nt, Artificial Sequence
  Description of Artificial Sequence: Synthetic oligonucleotide
ccugcaccccgucguggua

SEQ ID NO: 186710 - RNA, 19 nt, Artificial Sequence
  Description of Artificial Sequence: Synthetic oligonucleotide
cacucgcgucccuggcauu

SEQ ID NO: 186711 - RNA, 19 nt, Artificial Sequence
  Description of Artificial Sequence: Synthetic oligonucleotide
gcccuccguuccagaauaa

SEQ ID NO: 186712 - RNA, 19 nt, Artificial Sequence
  Description of Artificial Sequence: Synthetic oligonucleotide
gcaccccgucgugguaguc

SEQ ID NO: 186713 - RNA, 19 nt, Artificial Sequence
  Description of Artificial Sequence: Synthetic oligonucleotide
ccgacucuugaggcagagu

SEQ ID NO: 186714 - RNA, 19 nt, Artificial Sequence
  Description of Artificial Sequence: Synthetic oligonucleotide
gcagcgcucuggaccgauu

SEQ ID NO: 186715 - RNA, 19 nt, Artificial Sequence
  Description of Artificial Sequence: Synthetic oligonucleotide
cggguuuaaccgggagcuu

SEQ ID NO: 186716 - RNA, 19 nt, Artificial Sequence
  Description of Artificial Sequence: Synthetic oligonucleotide
aagagagucaaccagaugg

SEQ ID NO: 186717 - RNA, 19 nt, Artificial Sequence
  Description of Artificial Sequence: Synthetic oligonucleotide
acuacuacugccuauaucc

SEQ ID NO: 186718 - RNA, 19 nt, Artificial Sequence
  Description of Artificial Sequence: Synthetic oligonucleotide
aauguaucagccuugaguc

SEQ ID NO: 186719 - RNA, 19 nt, Artificial Sequence
  Description of Artificial Sequence: Synthetic oligonucleotide
aauaacuagacacauccac

SEQ ID NO: 186720 - RNA, 19 nt, Artificial Sequence
  Description of Artificial Sequence: Synthetic oligonucleotide
uugaacuagagauauaugg

SEQ ID NO: 186721 - RNA, 19 nt, Artificial Sequence
  Description of Artificial Sequence: Synthetic oligonucleotide
uucaguaugaacauggaag

SEQ ID NO: 186722 - RNA, 19 nt, Artificial Sequence
  Description of Artificial Sequence: Synthetic oligonucleotide
aggacaaacaccuuaagac

SEQ ID NO: 186723 - RNA, 19 nt, Artificial Sequence
  Description of Artificial Sequence: Synthetic oligonucleotide
agauaacauauccagaccc

SEQ ID NO: 186724 - RNA, 19 nt, Artificial Sequence
  Description of Artificial Sequence: Synthetic oligonucleotide
uuaguuaaccugcaaaagg

SEQ ID NO: 186725 - RNA, 19 nt, Artificial Sequence
  Description of Artificial Sequence: Synthetic oligonucleotide
auacucacaaauuaacccc

SEQ ID NO: 186726 - RNA, 19 nt, Artificial Sequence
  Description of Artificial Sequence: Synthetic oligonucleotide
uuuugauacaauaagaauu

SEQ ID NO: 186727 - RNA, 19 nt, Artificial Sequence
  Description of Artificial Sequence: Synthetic oligonucleotide
uuaaagaucacauuuguau

SEQ ID NO: 186728 - RNA, 19 nt, Artificial Sequence
  Description of Artificial Sequence: Synthetic oligonucleotide
uuuguauuguccauggugc

SEQ ID NO: 186729 - RNA, 19 nt, Artificial Sequence
  Description of Artificial Sequence: Synthetic oligonucleotide
uuuggguuaguuuggaugg

SEQ ID NO: 186730 - RNA, 19 nt, Artificial Sequence
  Description of Artificial Sequence: Synthetic oligonucleotide
agagauaagugcuuguuac

SEQ ID NO: 186731 - RNA, 19 nt, Artificial Sequence
  Description of Artificial Sequence: Synthetic oligonucleotide
uuuauaacaucaagugugg

SEQ ID NO: 186732 - RNA, 19 nt, Artificial Sequence
  Description of Artificial Sequence: Synthetic oligonucleotide
uguacuagagccuuuagcu

SEQ ID NO: 186733 - RNA, 19 nt, Artificial Sequence
  Description of Artificial Sequence: Synthetic oligonucleotide
aauauguuaacuacuacug

SEQ ID NO: 186734 - RNA, 19 nt, Artificial Sequence
  Description of Artificial Sequence: Synthetic oligonucleotide
ugguaauugaacuagagau

SEQ ID NO: 186735 - RNA, 19 nt, Artificial Sequence
  Description of Artificial Sequence: Synthetic oligonucleotide
ugagauaacauauccagac

SEQ ID NO: 186736 - RNA, 19 nt, Artificial Sequence
  Description of Artificial Sequence: Synthetic oligonucleotide
uauuugauugcuaccaacc

SEQ ID NO: 186737 - RNA, 19 nt, Artificial Sequence
  Description of Artificial Sequence: Synthetic oligonucleotide
cauacucacaaauuaaccc

SEQ ID NO: 186738 - RNA, 19 nt, Artificial Sequence
  Description of Artificial Sequence: Synthetic oligonucleotide
ugguuauuggaucagagac

SEQ ID NO: 186739 - RNA, 19 nt, Artificial Sequence
  Description of Artificial Sequence: Synthetic oligonucleotide
agacauuccgaacagauug

SEQ ID NO: 186740 - RNA, 19 nt, Artificial Sequence
  Description of Artificial Sequence: Synthetic oligonucleotide
ugagugcacauauucaucg

SEQ ID NO: 186741 - RNA, 19 nt, Artificial Sequence
  Description of Artificial Sequence: Synthetic oligonucleotide
auuugauugcuaccaaccc

SEQ ID NO: 186742 - RNA, 19 nt, Artificial Sequence
  Description of Artificial Sequence: Synthetic oligonucleotide
ucgccuaacauaucgaagg

SEQ ID NO: 186743 - RNA, 19 nt, Artificial Sequence
  Description of Artificial Sequence: Synthetic oligonucleotide
aauugaacuagagauauau

SEQ ID NO: 186744 - RNA, 19 nt, Artificial Sequence
  Description of Artificial Sequence: Synthetic oligonucleotide
cuaaucgccuaacauaucg

SEQ ID NO: 186745 - RNA, 19 nt, Artificial Sequence
  Description of Artificial Sequence: Synthetic oligonucleotide
uauucaucgguaaauacau

SEQ ID NO: 186746 - RNA, 19 nt, Artificial Sequence
  Description of Artificial Sequence: Synthetic oligonucleotide
ugauuggugcauuugagug

SEQ ID NO: 186747 - RNA, 19 nt, Artificial Sequence
  Description of Artificial Sequence: Synthetic oligonucleotide
ugcauuacugggaugacug

SEQ ID NO: 186748 - RNA, 19 nt, Artificial Sequence
  Description of Artificial Sequence: Synthetic oligonucleotide
auuccgaacagauuguaag

SEQ ID NO: 186749 - RNA, 19 nt, Artificial Sequence
  Description of Artificial Sequence: Synthetic oligonucleotide
auuuggaagauaaagacca

SEQ ID NO: 186750 - RNA, 19 nt, Artificial Sequence
  Description of Artificial Sequence: Synthetic oligonucleotide
uaguuaaccugcaaaagga

SEQ ID NO: 186751 - RNA, 19 nt, Artificial Sequence
  Description of Artificial Sequence: Synthetic oligonucleotide
ucgguaaauacauguaucc

SEQ ID NO: 186752 - RNA, 19 nt, Artificial Sequence
  Description of Artificial Sequence: Synthetic oligonucleotide
agagccuuuagcuuaguag

SEQ ID NO: 186753 - RNA, 19 nt, Artificial Sequence
  Description of Artificial Sequence: Synthetic oligonucleotide
cuauuuggggcaauggagg

SEQ ID NO: 186754 - RNA, 19 nt, Artificial Sequence
  Description of Artificial Sequence: Synthetic oligonucleotide
auaagugcuuguuacccac

SEQ ID NO: 186755 - RNA, 19 nt, Artificial Sequence
  Description of Artificial Sequence: Synthetic oligonucleotide
uggguacuaauuauccugg

SEQ ID NO: 186756 - RNA, 19 nt, Artificial Sequence
  Description of Artificial Sequence: Synthetic oligonucleotide
ucuggaaucaaccugccua

SEQ ID NO: 186757 - RNA, 19 nt, Artificial Sequence
  Description of Artificial Sequence: Synthetic oligonucleotide
ucuauuggaggaaacauuu

SEQ ID NO: 186758 - RNA, 19 nt, Artificial Sequence
  Description of Artificial Sequence: Synthetic oligonucleotide
gucauguggguuuaggagg

SEQ ID NO: 186759 - RNA, 19 nt, Artificial Sequence
  Description of Artificial Sequence: Synthetic oligonucleotide
ugugguaauugaacuagag

SEQ ID NO: 186760 - RNA, 19 nt, Artificial Sequence
  Description of Artificial Sequence: Synthetic oligonucleotide
ucuacuaacuauuuugaua

SEQ ID NO: 186761 - RNA, 19 nt, Artificial Sequence
  Description of Artificial Sequence: Synthetic oligonucleotide
uuuuggaucgccacccucc

SEQ ID NO: 186762 - RNA, 19 nt, Artificial Sequence
  Description of Artificial Sequence: Synthetic oligonucleotide
uuuaacauuucuuggccac

SEQ ID NO: 186763 - RNA, 19 nt, Artificial Sequence
  Description of Artificial Sequence: Synthetic oligonucleotide
gaccaaauuccuuugagga

SEQ ID NO: 186764 - RNA, 19 nt, Artificial Sequence
  Description of Artificial Sequence: Synthetic oligonucleotide
gguaaauacauguaucccc

SEQ ID NO: 186765 - RNA, 19 nt, Artificial Sequence
  Description of Artificial Sequence: Synthetic oligonucleotide
aacccaaucauaggcauag

SEQ ID NO: 186766 - RNA, 19 nt, Artificial Sequence
  Description of Artificial Sequence: Synthetic oligonucleotide
cucgaguuauugcagaugc

SEQ ID NO: 186767 - RNA, 19 nt, Artificial Sequence
  Description of Artificial Sequence: Synthetic oligonucleotide
uuaaccugcaaaaggagua

SEQ ID NO: 186768 - RNA, 19 nt, Artificial Sequence
  Description of Artificial Sequence: Synthetic oligonucleotide
ggaucuacuaacuauuuug

SEQ ID NO: 186769 - RNA, 19 nt, Artificial Sequence
  Description of Artificial Sequence: Synthetic oligonucleotide
guaccaaaaugauucaccc

SEQ ID NO: 186770 - RNA, 19 nt, Artificial Sequence
  Description of Artificial Sequence: Synthetic oligonucleotide
auuucgaagaggcuguugu

SEQ ID NO: 186771 - RNA, 19 nt, Artificial Sequence
  Description of Artificial Sequence: Synthetic oligonucleotide
aguuauugcagaugcacca

SEQ ID NO: 186772 - RNA, 19 nt, Artificial Sequence
  Description of Artificial Sequence: Synthetic oligonucleotide
uacuaauuauccuggcucc

SEQ ID NO: 186773 - RNA, 19 nt, Artificial Sequence
  Description of Artificial Sequence: Synthetic oligonucleotide
uuguacuagagccuuuagc

SEQ ID NO: 186774 - RNA, 19 nt, Artificial Sequence
  Description of Artificial Sequence: Synthetic oligonucleotide
ucagcaugagccgugauug

SEQ ID NO: 186775 - RNA, 19 nt, Artificial Sequence
  Description of Artificial Sequence: Synthetic oligonucleotide
guccaaaucucucuauugg

SEQ ID NO: 186776 - RNA, 19 nt, Artificial Sequence
  Description of Artificial Sequence: Synthetic oligonucleotide
uuaccagggcaacaaaacc

SEQ ID NO: 186777 - RNA, 19 nt, Artificial Sequence
  Description of Artificial Sequence: Synthetic oligonucleotide
aauguugguuguaugacca

SEQ ID NO: 186778 - RNA, 19 nt, Artificial Sequence
  Description of Artificial Sequence: Synthetic oligonucleotide
uacuuaguuaaccugcaaa

SEQ ID NO: 186779 - RNA, 19 nt, Artificial Sequence
  Description of Artificial Sequence: Synthetic oligonucleotide
guacuaauuauccuggcuc

SEQ ID NO: 186780 - RNA, 19 nt, Artificial Sequence
  Description of Artificial Sequence: Synthetic oligonucleotide
ucuauucuucuguacuuag

SEQ ID NO: 186781 - RNA, 19 nt, Artificial Sequence
  Description of Artificial Sequence: Synthetic oligonucleotide
acuuaguuaaccugcaaaa

SEQ ID NO: 186782 - RNA, 19 nt, Artificial Sequence
  Description of Artificial Sequence: Synthetic oligonucleotide
ugagacauuccgaacagau

SEQ ID NO: 186783 - RNA, 19 nt, Artificial Sequence
  Description of Artificial Sequence: Synthetic oligonucleotide
aauggcucauguuuccuga

SEQ ID NO: 186784 - RNA, 19 nt, Artificial Sequence
  Description of Artificial Sequence: Synthetic oligonucleotide
ugaacauggaagagguggc

SEQ ID NO: 186785 - RNA, 19 nt, Artificial Sequence
  Description of Artificial Sequence: Synthetic oligonucleotide
agaggaguuuuccacaaug

SEQ ID NO: 186786 - RNA, 19 nt, Artificial Sequence
  Description of Artificial Sequence: Synthetic oligonucleotide
caagcaguggagaagcagc

SEQ ID NO: 186787 - RNA, 19 nt, Artificial Sequence
  Description of Artificial Sequence: Synthetic oligonucleotide
cuaccaacccaucaugggg

SEQ ID NO: 186788 - RNA, 19 nt, Artificial Sequence
  Description of Artificial Sequence: Synthetic oligonucleotide
ugauacaauaagaauucua

SEQ ID NO: 186789 - RNA, 19 nt, Artificial Sequence
  Description of Artificial Sequence: Synthetic oligonucleotide
acaaaaggguagcaaacug

SEQ ID NO: 186790 - RNA, 19 nt, Artificial Sequence
  Description of Artificial Sequence: Synthetic oligonucleotide
uuauuugauugcuaccaac

SEQ ID NO: 186791 - RNA, 19 nt, Artificial Sequence
  Description of Artificial Sequence: Synthetic oligonucleotide
gagauaacauauccagacc

SEQ ID NO: 186792 - RNA, 19 nt, Artificial Sequence
  Description of Artificial Sequence: Synthetic oligonucleotide
caaaaugauucacccaccc

SEQ ID NO: 186793 - RNA, 19 nt, Artificial Sequence
  Description of Artificial Sequence: Synthetic oligonucleotide
uguacuuaguuaaccugca

SEQ ID NO: 186794 - RNA, 19 nt, Artificial Sequence
  Description of Artificial Sequence: Synthetic oligonucleotide
ugccuaugagaacaaacca

SEQ ID NO: 186795 - RNA, 19 nt, Artificial Sequence
  Description of Artificial Sequence: Synthetic oligonucleotide
ccuaugagaacaaaccacg

SEQ ID NO: 186796 - RNA, 19 nt, Artificial Sequence
  Description of Artificial Sequence: Synthetic oligonucleotide
ugcgggugguguaagaacc

SEQ ID NO: 186797 - RNA, 19 nt, Artificial Sequence
  Description of Artificial Sequence: Synthetic oligonucleotide
aauccauuuggguacuaau

SEQ ID NO: 186798 - RNA, 19 nt, Artificial Sequence
  Description of Artificial Sequence: Synthetic oligonucleotide
ccuaacauaucgaagguag

SEQ ID NO: 186799 - RNA, 19 nt, Artificial Sequence
  Description of Artificial Sequence: Synthetic oligonucleotide
agauauauggagugcauuu

SEQ ID NO: 186800 - RNA, 19 nt, Artificial Sequence
  Description of Artificial Sequence: Synthetic oligonucleotide
uuaugcuuggagaggguug

SEQ ID NO: 186801 - RNA, 19 nt, Artificial Sequence
  Description of Artificial Sequence: Synthetic oligonucleotide
ugagaacaaaccacgcaca

SEQ ID NO: 186802 - RNA, 19 nt, Artificial Sequence
  Description of Artificial Sequence: Synthetic oligonucleotide
agaguaguaguccuugagu

SEQ ID NO: 186803 - RNA, 19 nt, Artificial Sequence
  Description of Artificial Sequence: Synthetic oligonucleotide
aaucgccuaacauaucgaa

SEQ ID NO: 186804 - RNA, 19 nt, Artificial Sequence
  Description of Artificial Sequence: Synthetic oligonucleotide
aaagaagucuaaucgccua

SEQ ID NO: 186805 - RNA, 19 nt, Artificial Sequence
  Description of Artificial Sequence: Synthetic oligonucleotide
ucacccacccugaaaagug

SEQ ID NO: 186806 - RNA, 19 nt, Artificial Sequence
  Description of Artificial Sequence: Synthetic oligonucleotide
cuuguuacccacauggcca

SEQ ID NO: 186807 - RNA, 19 nt, Artificial Sequence
  Description of Artificial Sequence: Synthetic oligonucleotide
agucuaaucgccuaacaua

SEQ ID NO: 186808 - RNA, 19 nt, Artificial Sequence
  Description of Artificial Sequence: Synthetic oligonucleotide
gugcauuugagugagcucc

SEQ ID NO: 186809 - RNA, 19 nt, Artificial Sequence
  Description of Artificial Sequence: Synthetic oligonucleotide
gagaguaguaguccuugag

SEQ ID NO: 186810 - RNA, 19 nt, Artificial Sequence
  Description of Artificial Sequence: Synthetic oligonucleotide
caauguugguuguaugacc

SEQ ID NO: 186811 - RNA, 19 nt, Artificial Sequence
  Description of Artificial Sequence: Synthetic oligonucleotide
cuaacauaucgaagguagg

SEQ ID NO: 186812 - RNA, 19 nt, Artificial Sequence
  Description of Artificial Sequence: Synthetic oligonucleotide
uaacauaucgaagguaggu

SEQ ID NO: 186813 - RNA, 19 nt, Artificial Sequence
  Description of Artificial Sequence: Synthetic oligonucleotide
uggugaugaaaacacugcu

SEQ ID NO: 186814 - RNA, 19 nt, Artificial Sequence
  Description of Artificial Sequence: Synthetic oligonucleotide
ugagcugaccaccuguacu

SEQ ID NO: 186815 - RNA, 19 nt, Artificial Sequence
  Description of Artificial Sequence: Synthetic oligonucleotide
gauguguaaauacuggagu

SEQ ID NO: 186816 - RNA, 19 nt, Artificial Sequence
  Description of Artificial Sequence: Synthetic oligonucleotide
ucaacguucagcucuccgu

SEQ ID NO: 186817 - RNA, 19 nt, Artificial Sequence
  Description of Artificial Sequence: Synthetic oligonucleotide
gaaaaguggauuuggguua

SEQ ID NO: 186818 - RNA, 19 nt, Artificial Sequence
  Description of Artificial Sequence: Synthetic oligonucleotide
gaagaggguccguaaauac

SEQ ID NO: 186819 - RNA, 19 nt, Artificial Sequence
  Description of Artificial Sequence: Synthetic oligonucleotide
cuuaguuaaccugcaaaag

SEQ ID NO: 186820 - RNA, 19 nt, Artificial Sequence
  Description of Artificial Sequence: Synthetic oligonucleotide
uugguuuuggaucgccacc

SEQ ID NO: 186821 - RNA, 19 nt, Artificial Sequence
  Description of Artificial Sequence: Synthetic oligonucleotide
guuauuggaucagagacuc

SEQ ID NO: 186822 - RNA, 19 nt, Artificial Sequence
  Description of Artificial Sequence: Synthetic oligonucleotide
uaagacugguuauuggauc

SEQ ID NO: 186823 - RNA, 19 nt, Artificial Sequence
  Description of Artificial Sequence: Synthetic oligonucleotide
cagaugagugcacauauuc

SEQ ID NO: 186824 - RNA, 19 nt, Artificial Sequence
  Description of Artificial Sequence: Synthetic oligonucleotide
aucgguaaauacauguauc

SEQ ID NO: 186825 - RNA, 19 nt, Artificial Sequence
  Description of Artificial Sequence: Synthetic oligonucleotide
accgagguuucuuuauaac

SEQ ID NO: 186826 - RNA, 19 nt, Artificial Sequence
  Description of Artificial Sequence: Synthetic oligonucleotide
aauguagccaagaaaggua

SEQ ID NO: 186827 - RNA, 19 nt, Artificial Sequence
  Description of Artificial Sequence: Synthetic oligonucleotide
uuuggguacuaauuauccu

SEQ ID NO: 186828 - RNA, 19 nt, Artificial Sequence
  Description of Artificial Sequence: Synthetic oligonucleotide
uccgaacagauuguaagcc

SEQ ID NO: 186829 - RNA, 19 nt, Artificial Sequence
  Description of Artificial Sequence: Synthetic oligonucleotide
accaccuguacugaacccc

SEQ ID NO: 186830 - RNA, 19 nt, Artificial Sequence
  Description of Artificial Sequence: Synthetic oligonucleotide
agagagucaaccagauggc

SEQ ID NO: 186831 - RNA, 19 nt, Artificial Sequence
  Description of Artificial Sequence: Synthetic oligonucleotide
acuaauuauccuggcuccc

SEQ ID NO: 186832 - RNA, 19 nt, Artificial Sequence
  Description of Artificial Sequence: Synthetic oligonucleotide
aagaagucuaaucgccuaa

SEQ ID NO: 186833 - RNA, 19 nt, Artificial Sequence
  Description of Artificial Sequence: Synthetic oligonucleotide
aauuauccuggcucccuga

SEQ ID NO: 186834 - RNA, 19 nt, Artificial Sequence
  Description of Artificial Sequence: Synthetic oligonucleotide
uuauugcagaugcaccaga

SEQ ID NO: 186835 - RNA, 19 nt, Artificial Sequence
  Description of Artificial Sequence: Synthetic oligonucleotide
ucugcggccaagugagacg

SEQ ID NO: 186836 - RNA, 19 nt, Artificial Sequence
  Description of Artificial Sequence: Synthetic oligonucleotide
aauuggaaccagagucccc

SEQ ID NO: 186837 - RNA, 19 nt, Artificial Sequence
  Description of Artificial Sequence: Synthetic oligonucleotide
ugauaaguugauguguaaa

SEQ ID NO: 186838 - RNA, 19 nt, Artificial Sequence
  Description of Artificial Sequence: Synthetic oligonucleotide
aaaacugguuucaguauga

SEQ ID NO: 186839 - RNA, 19 nt, Artificial Sequence
  Description of Artificial Sequence: Synthetic oligonucleotide
uacaaaaggguagcaaacu

SEQ ID NO: 186840 - RNA, 19 nt, Artificial Sequence
  Description of Artificial Sequence: Synthetic oligonucleotide
gauaaguugauguguaaau

SEQ ID NO: 186841 - RNA, 19 nt, Artificial Sequence
  Description of Artificial Sequence: Synthetic oligonucleotide
cuuccaacccaaucauagg

SEQ ID NO: 186842 - RNA, 19 nt, Artificial Sequence
  Description of Artificial Sequence: Synthetic oligonucleotide
uguaagaaccaggaguaaa

SEQ ID NO: 186843 - RNA, 19 nt, Artificial Sequence
  Description of Artificial Sequence: Synthetic oligonucleotide
ugauccuuagccaccacuu

SEQ ID NO: 186844 - RNA, 19 nt, Artificial Sequence
  Description of Artificial Sequence: Synthetic oligonucleotide
gauuggugcauuugaguga

SEQ ID NO: 186845 - RNA, 19 nt, Artificial Sequence
  Description of Artificial Sequence: Synthetic oligonucleotide
ucuccguugguugagcuga

SEQ ID NO: 186846 - RNA, 19 nt, Artificial Sequence
  Description of Artificial Sequence: Synthetic oligonucleotide
caacccaucauggggaagg

SEQ ID NO: 186847 - RNA, 19 nt, Artificial Sequence
  Description of Artificial Sequence: Synthetic oligonucleotide
uuuggggcaauggagggga

SEQ ID NO: 186848 - RNA, 19 nt, Artificial Sequence
  Description of Artificial Sequence: Synthetic oligonucleotide
gaucuacuaacuauuuuga

SEQ ID NO: 186849 - RNA, 19 nt, Artificial Sequence
  Description of Artificial Sequence: Synthetic oligonucleotide
uuaacuacuacugccuaua

SEQ ID NO: 186850 - RNA, 19 nt, Artificial Sequence
  Description of Artificial Sequence: Synthetic oligonucleotide
uaaucgccuaacauaucga

SEQ ID NO: 186851 - RNA, 19 nt, Artificial Sequence
  Description of Artificial Sequence: Synthetic oligonucleotide
aucaacguucagcucuccg

SEQ ID NO: 186852 - RNA, 19 nt, Artificial Sequence
  Description of Artificial Sequence: Synthetic oligonucleotide
auacaauaagaauucuauu

SEQ ID NO: 186853 - RNA, 19 nt, Artificial Sequence
  Description of Artificial Sequence: Synthetic oligonucleotide
ucaucgguaaauacaugua

SEQ ID NO: 186854 - RNA, 19 nt, Artificial Sequence
  Description of Artificial Sequence: Synthetic oligonucleotide
gaguuauugcagaugcacc

SEQ ID NO: 186855 - RNA, 19 nt, Artificial Sequence
  Description of Artificial Sequence: Synthetic oligonucleotide
uggaucagagacucccaag

SEQ ID NO: 186856 - RNA, 19 nt, Artificial Sequence
  Description of Artificial Sequence: Synthetic oligonucleotide
guagccuuuccguucaaac

SEQ ID NO: 186857 - RNA, 19 nt, Artificial Sequence
  Description of Artificial Sequence: Synthetic oligonucleotide
auaacuagacacauccaca

SEQ ID NO: 186858 - RNA, 19 nt, Artificial Sequence
  Description of Artificial Sequence: Synthetic oligonucleotide
acaaagcauuaccagggca

SEQ ID NO: 186859 - RNA, 19 nt, Artificial Sequence
  Description of Artificial Sequence: Synthetic oligonucleotide
acaucaagugugguaauug

SEQ ID NO: 186860 - RNA, 19 nt, Artificial Sequence
  Description of Artificial Sequence: Synthetic oligonucleotide
agguguagccuuuccguuc

SEQ ID NO: 186861 - RNA, 19 nt, Artificial Sequence
  Description of Artificial Sequence: Synthetic oligonucleotide
aaccgagguuucuuuauaa

SEQ ID NO: 186862 - RNA, 19 nt, Artificial Sequence
  Description of Artificial Sequence: Synthetic oligonucleotide
uaaccugcaaaaggaguag

SEQ ID NO: 186863 - RNA, 19 nt, Artificial Sequence
  Description of Artificial Sequence: Synthetic oligonucleotide
guugguuguaugaccaugc

SEQ ID NO: 186864 - RNA, 19 nt, Artificial Sequence
  Description of Artificial Sequence: Synthetic oligonucleotide
ugguuuuggaucgccaccc

SEQ ID NO: 186865 - RNA, 19 nt, Artificial Sequence
  Description of Artificial Sequence: Synthetic oligonucleotide
gauugcuaccaacccauca

SEQ ID NO: 186866 - RNA, 19 nt, Artificial Sequence
  Description of Artificial Sequence: Synthetic oligonucleotide
caugagccgugauuggugc

SEQ ID NO: 186867 - RNA, 19 nt, Artificial Sequence
  Description of Artificial Sequence: Synthetic oligonucleotide
ugcccuaugaaaugggcua

SEQ ID NO: 186868 - RNA, 19 nt, Artificial Sequence
  Description of Artificial Sequence: Synthetic oligonucleotide
uggccaauccauuugggua

SEQ ID NO: 186869 - RNA, 19 nt, Artificial Sequence
  Description of Artificial Sequence: Synthetic oligonucleotide
uuuggaucgccacccuccc

SEQ ID NO: 186870 - RNA, 19 nt, Artificial Sequence
  Description of Artificial Sequence: Synthetic oligonucleotide
gauaacauauccagaccca

SEQ ID NO: 186871 - RNA, 19 nt, Artificial Sequence
  Description of Artificial Sequence: Synthetic oligonucleotide
gagguauuggucugccggc

SEQ ID NO: 186872 - RNA, 19 nt, Artificial Sequence
  Description of Artificial Sequence: Synthetic oligonucleotide
gguaccaaaaugauucacc

SEQ ID NO: 186873 - RNA, 19 nt, Artificial Sequence
  Description of Artificial Sequence: Synthetic oligonucleotide
uguuaacuacuacugccua

SEQ ID NO: 186874 - RNA, 19 nt, Artificial Sequence
  Description of Artificial Sequence: Synthetic oligonucleotide
acguucagcucuccguugg

SEQ ID NO: 186875 - RNA, 19 nt, Artificial Sequence
  Description of Artificial Sequence: Synthetic oligonucleotide
uucgaugggaguauuccuu

SEQ ID NO: 186876 - RNA, 19 nt, Artificial Sequence
  Description of Artificial Sequence: Synthetic oligonucleotide
ccuauuuggggcaauggag

SEQ ID NO: 186877 - RNA, 19 nt, Artificial Sequence
  Description of Artificial Sequence: Synthetic oligonucleotide
guauuggucugccggcugg

SEQ ID NO: 186878 - RNA, 19 nt, Artificial Sequence
  Description of Artificial Sequence: Synthetic oligonucleotide
cuacugccuauauccaggg

SEQ ID NO: 186879 - RNA, 19 nt, Artificial Sequence
  Description of Artificial Sequence: Synthetic oligonucleotide
gaugagugcacauauucau

SEQ ID NO: 186880 - RNA, 19 nt, Artificial Sequence
  Description of Artificial Sequence: Synthetic oligonucleotide
gugguaauugaacuagaga

SEQ ID NO: 186881 - RNA, 19 nt, Artificial Sequence
  Description of Artificial Sequence: Synthetic oligonucleotide
caaagcauuaccagggcaa

SEQ ID NO: 186882 - RNA, 19 nt, Artificial Sequence
  Description of Artificial Sequence: Synthetic oligonucleotide
aacguucagcucuccguug

SEQ ID NO: 186883 - RNA, 19 nt, Artificial Sequence
  Description of Artificial Sequence: Synthetic oligonucleotide
ugguuguaugaccaugcaa

SEQ ID NO: 186884 - RNA, 19 nt, Artificial Sequence
  Description of Artificial Sequence: Synthetic oligonucleotide
gaauaggccuuccaaccca

SEQ ID NO: 186885 - RNA, 19 nt, Artificial Sequence
  Description of Artificial Sequence: Synthetic oligonucleotide
ggaguuauuugccaucaac

SEQ ID NO: 186886 - RNA, 19 nt, Artificial Sequence
  Description of Artificial Sequence: Synthetic oligonucleotide
uugguuguaugaccaugca

SEQ ID NO: 186887 - RNA, 19 nt, Artificial Sequence
  Description of Artificial Sequence: Synthetic oligonucleotide
aaaccacgcacagaugagu

SEQ ID NO: 186888 - RNA, 19 nt, Artificial Sequence
  Description of Artificial Sequence: Synthetic oligonucleotide
uggugcauuugagugagcu

SEQ ID NO: 186889 - RNA, 19 nt, Artificial Sequence
  Description of Artificial Sequence: Synthetic oligonucleotide
uguugugauggccgauccc

SEQ ID NO: 186890 - RNA, 19 nt, Artificial Sequence
  Description of Artificial Sequence: Synthetic oligonucleotide
aagaggguccguaaauacu

SEQ ID NO: 186891 - RNA, 19 nt, Artificial Sequence
  Description of Artificial Sequence: Synthetic oligonucleotide
augggaagagagucaacca

SEQ ID NO: 186892 - RNA, 19 nt, Artificial Sequence
  Description of Artificial Sequence: Synthetic oligonucleotide
gagucauguggguuuagga

SEQ ID NO: 186893 - RNA, 19 nt, Artificial Sequence
  Description of Artificial Sequence: Synthetic oligonucleotide
cuuuaacauuucuuggcca

SEQ ID NO: 186894 - RNA, 19 nt, Artificial Sequence
  Description of Artificial Sequence: Synthetic oligonucleotide
gaucugugaagaggguccg

SEQ ID NO: 186895 - RNA, 19 nt, Artificial Sequence
  Description of Artificial Sequence: Synthetic oligonucleotide
uggagcucccaaagagggg

SEQ ID NO: 186896 - RNA, 19 nt, Artificial Sequence
  Description of Artificial Sequence: Synthetic oligonucleotide
uuggaucagagacucccaa

SEQ ID NO: 186897 - RNA, 19 nt, Artificial Sequence
  Description of Artificial Sequence: Synthetic oligonucleotide
uuaacauuucuuggccaca

SEQ ID NO: 186898 - RNA, 19 nt, Artificial Sequence
  Description of Artificial Sequence: Synthetic oligonucleotide
aagguguagccuuuccguu

SEQ ID NO: 186899 - RNA, 19 nt, Artificial Sequence
  Description of Artificial Sequence: Synthetic oligonucleotide
ugcuguccacacaaccgag

SEQ ID NO: 186900 - RNA, 19 nt, Artificial Sequence
  Description of Artificial Sequence: Synthetic oligonucleotide
gaguaggacaaacaccuua

SEQ ID NO: 186901 - RNA, 19 nt, Artificial Sequence
  Description of Artificial Sequence: Synthetic oligonucleotide
acaccuuaagacugguuau

SEQ ID NO: 186902 - RNA, 19 nt, Artificial Sequence
  Description of Artificial Sequence: Synthetic oligonucleotide
aaccacgcacagaugagug

SEQ ID NO: 186903 - RNA, 19 nt, Artificial Sequence
  Description of Artificial Sequence: Synthetic oligonucleotide
augagugcacauauucauc

SEQ ID NO: 186904 - RNA, 19 nt, Artificial Sequence
  Description of Artificial Sequence: Synthetic oligonucleotide
guaggacaaacaccuuaag

SEQ ID NO: 186905 - RNA, 19 nt, Artificial Sequence
  Description of Artificial Sequence: Synthetic oligonucleotide
ugccuauuuggggcaaugg

SEQ ID NO: 186906 - RNA, 19 nt, Artificial Sequence
  Description of Artificial Sequence: Synthetic oligonucleotide
uagccugggauuuggucug

SEQ ID NO: 186907 - RNA, 19 nt, Artificial Sequence
  Description of Artificial Sequence: Synthetic oligonucleotide
cuuagccaccacuuuaaca

SEQ ID NO: 186908 - RNA, 19 nt, Artificial Sequence
  Description of Artificial Sequence: Synthetic oligonucleotide
auguuaacuacuacugccu

SEQ ID NO: 186909 - RNA, 19 nt, Artificial Sequence
  Description of Artificial Sequence: Synthetic oligonucleotide
aucuacuaacuauuuugau

SEQ ID NO: 186910 - RNA, 19 nt, Artificial Sequence
  Description of Artificial Sequence: Synthetic oligonucleotide
uggcaugacugacacugga

SEQ ID NO: 186911 - RNA, 19 nt, Artificial Sequence
  Description of Artificial Sequence: Synthetic oligonucleotide
uuauuggaucagagacucc

SEQ ID NO: 186912 - RNA, 19 nt, Artificial Sequence
  Description of Artificial Sequence: Synthetic oligonucleotide
uacugggaugacugcaaug

SEQ ID NO: 186913 - RNA, 19 nt, Artificial Sequence
  Description of Artificial Sequence: Synthetic oligonucleotide
uccguucaaacagaucugu

SEQ ID NO: 186914 - RNA, 19 nt, Artificial Sequence
  Description of Artificial Sequence: Synthetic oligonucleotide
agggcaacaaaaccaggaa

SEQ ID NO: 186915 - RNA, 19 nt, Artificial Sequence
  Description of Artificial Sequence: Synthetic oligonucleotide
ugcauuugagugagcucca

SEQ ID NO: 186916 - RNA, 19 nt, Artificial Sequence
  Description of Artificial Sequence: Synthetic oligonucleotide
auugaacuagagauauaug

SEQ ID NO: 186917 - RNA, 19 nt, Artificial Sequence
  Description of Artificial Sequence: Synthetic oligonucleotide
ucucucuauuggaggaaac

SEQ ID NO: 186918 - RNA, 19 nt, Artificial Sequence
  Description of Artificial Sequence: Synthetic oligonucleotide
uacuaacuauuuugauaca

SEQ ID NO: 186919 - RNA, 19 nt, Artificial Sequence
  Description of Artificial Sequence: Synthetic oligonucleotide
acaaccgagguuucuuuau

SEQ ID NO: 186920 - RNA, 19 nt, Artificial Sequence
  Description of Artificial Sequence: Synthetic oligonucleotide
auucacccacccugaaaag

SEQ ID NO: 186921 - RNA, 19 nt, Artificial Sequence
  Description of Artificial Sequence: Synthetic oligonucleotide
cuacaugggacuuccuuga

SEQ ID NO: 186922 - RNA, 19 nt, Artificial Sequence
  Description of Artificial Sequence: Synthetic oligonucleotide
cuuguacuagagccuuuag

SEQ ID NO: 186923 - RNA, 19 nt, Artificial Sequence
  Description of Artificial Sequence: Synthetic oligonucleotide
aguaggacaaacaccuuaa

SEQ ID NO: 186924 - RNA, 19 nt, Artificial Sequence
  Description of Artificial Sequence: Synthetic oligonucleotide
guuagccugggauuugguc

SEQ ID NO: 186925 - RNA, 19 nt, Artificial Sequence
  Description of Artificial Sequence: Synthetic oligonucleotide
augagguauuggucugccg

SEQ ID NO: 186926 - RNA, 19 nt, Artificial Sequence
  Description of Artificial Sequence: Synthetic oligonucleotide
caucaagugugguaauuga

SEQ ID NO: 186927 - RNA, 19 nt, Artificial Sequence
  Description of Artificial Sequence: Synthetic oligonucleotide
guaugaacauggaagaggu

SEQ ID NO: 186928 - RNA, 19 nt, Artificial Sequence
  Description of Artificial Sequence: Synthetic oligonucleotide
agaugagugcacauauuca

SEQ ID NO: 186929 - RNA, 19 nt, Artificial Sequence
  Description of Artificial Sequence: Synthetic oligonucleotide
ucgaguuauugcagaugca

SEQ ID NO: 186930 - RNA, 19 nt, Artificial Sequence
  Description of Artificial Sequence: Synthetic oligonucleotide
aacaucaagugugguaauu

SEQ ID NO: 186931 - RNA, 19 nt, Artificial Sequence
  Description of Artificial Sequence: Synthetic oligonucleotide
gguccguaaauacucauaa

SEQ ID NO: 186932 - RNA, 19 nt, Artificial Sequence
  Description of Artificial Sequence: Synthetic oligonucleotide
ccguaaauacucauaauca

SEQ ID NO: 186933 - RNA, 19 nt, Artificial Sequence
  Description of Artificial Sequence: Synthetic oligonucleotide
cugagauaacauauccaga

SEQ ID NO: 186934 - RNA, 19 nt, Artificial Sequence
  Description of Artificial Sequence: Synthetic oligonucleotide
uggcucauguuuccugaga

SEQ ID NO: 186935 - RNA, 19 nt, Artificial Sequence
  Description of Artificial Sequence: Synthetic oligonucleotide
agugagacgucaggaauga

SEQ ID NO: 186936 - RNA, 19 nt, Artificial Sequence
  Description of Artificial Sequence: Synthetic oligonucleotide
cugugcauuacugggauga

SEQ ID NO: 186937 - RNA, 19 nt, Artificial Sequence
  Description of Artificial Sequence: Synthetic oligonucleotide
ugugucgcugagcagucuu

SEQ ID NO: 186938 - RNA, 19 nt, Artificial Sequence
  Description of Artificial Sequence: Synthetic oligonucleotide
ggcuaugauccuuagccac

SEQ ID NO: 186939 - RNA, 19 nt, Artificial Sequence
  Description of Artificial Sequence: Synthetic oligonucleotide
aggcuaugauccuuagcca

SEQ ID NO: 186940 - RNA, 19 nt, Artificial Sequence
  Description of Artificial Sequence: Synthetic oligonucleotide
ucuuguacuagagccuuua

SEQ ID NO: 186941 - RNA, 19 nt, Artificial Sequence
  Description of Artificial Sequence: Synthetic oligonucleotide
ucuaaucgccuaacauauc

SEQ ID NO: 186942 - RNA, 19 nt, Artificial Sequence
  Description of Artificial Sequence: Synthetic oligonucleotide
aucgccuaacauaucgaag

SEQ ID NO: 186943 - RNA, 19 nt, Artificial Sequence
  Description of Artificial Sequence: Synthetic oligonucleotide
uuguuacccacauggccaa

SEQ ID NO: 186944 - RNA, 19 nt, Artificial Sequence
  Description of Artificial Sequence: Synthetic oligonucleotide
gaggggauugccacuggcc

SEQ ID NO: 186945 - RNA, 19 nt, Artificial Sequence
  Description of Artificial Sequence: Synthetic oligonucleotide
ugauggccgaucccugugu

SEQ ID NO: 186946 - RNA, 19 nt, Artificial Sequence
  Description of Artificial Sequence: Synthetic oligonucleotide
gauuucgaagaggcuguug

SEQ ID NO: 186947 - RNA, 19 nt, Artificial Sequence
  Description of Artificial Sequence: Synthetic oligonucleotide
cacccacccugaaaagugg

SEQ ID NO: 186948 - RNA, 19 nt, Artificial Sequence
  Description of Artificial Sequence: Synthetic oligonucleotide
auccuuagccaccacuuua

SEQ ID NO: 186949 - RNA, 19 nt, Artificial Sequence
  Description of Artificial Sequence: Synthetic oligonucleotide
ccuuccaaugagaaauggc

SEQ ID NO: 186950 - RNA, 19 nt, Artificial Sequence
  Description of Artificial Sequence: Synthetic oligonucleotide
gaccaccuguacugaaccc

SEQ ID NO: 186951 - RNA, 19 nt, Artificial Sequence
  Description of Artificial Sequence: Synthetic oligonucleotide
agaacaaaccacgcacaga

SEQ ID NO: 186952 - RNA, 19 nt, Artificial Sequence
  Description of Artificial Sequence: Synthetic oligonucleotide
ggcucauguuuccugagac

SEQ ID NO: 186953 - RNA, 19 nt, Artificial Sequence
  Description of Artificial Sequence: Synthetic oligonucleotide
ugggcuggauuucccacuc

SEQ ID NO: 186954 - RNA, 19 nt, Artificial Sequence
  Description of Artificial Sequence: Synthetic oligonucleotide
aaacugguuucaguaugaa

SEQ ID NO: 186955 - RNA, 19 nt, Artificial Sequence
  Description of Artificial Sequence: Synthetic oligonucleotide
cuugugucgcugagcaguc

SEQ ID NO: 186956 - RNA, 19 nt, Artificial Sequence
  Description of Artificial Sequence: Synthetic oligonucleotide
cgaucugcggccaagugag

SEQ ID NO: 186957 - RNA, 19 nt, Artificial Sequence
  Description of Artificial Sequence: Synthetic oligonucleotide
gguauacuuaaagaucaca

SEQ ID NO: 186958 - RNA, 19 nt, Artificial Sequence
  Description of Artificial Sequence: Synthetic oligonucleotide
uuucgaagaggcuguuguu

SEQ ID NO: 186959 - RNA, 19 nt, Artificial Sequence
  Description of Artificial Sequence: Synthetic oligonucleotide
guuuggauggcaguugucu

SEQ ID NO: 186960 - RNA, 19 nt, Artificial Sequence
  Description of Artificial Sequence: Synthetic oligonucleotide
cuccucggcgcucugauga

SEQ ID NO: 186961 - RNA, 19 nt, Artificial Sequence
  Description of Artificial Sequence: Synthetic oligonucleotide
gcuucgaugggaguauucc

SEQ ID NO: 186962 - RNA, 19 nt, Artificial Sequence
  Description of Artificial Sequence: Synthetic oligonucleotide
uagagccuuuagcuuagua

SEQ ID NO: 186963 - RNA, 19 nt, Artificial Sequence
  Description of Artificial Sequence: Synthetic oligonucleotide
ccuauauccagggaucuac

SEQ ID NO: 186964 - RNA, 19 nt, Artificial Sequence
  Description of Artificial Sequence: Synthetic oligonucleotide
ugccuauauccagggaucu

SEQ ID NO: 186965 - RNA, 19 nt, Artificial Sequence
  Description of Artificial Sequence: Synthetic oligonucleotide
ucauguuuccugagacauu

SEQ ID NO: 186966 - RNA, 19 nt, Artificial Sequence
  Description of Artificial Sequence: Synthetic oligonucleotide
cuacuggaguaggaauagg

SEQ ID NO: 186967 - RNA, 19 nt, Artificial Sequence
  Description of Artificial Sequence: Synthetic oligonucleotide
gucuaaucgccuaacauau

SEQ ID NO: 186968 - RNA, 19 nt, Artificial Sequence
  Description of Artificial Sequence: Synthetic oligonucleotide
gcuacucugagauaacaua

SEQ ID NO: 186969 - RNA, 19 nt, Artificial Sequence
  Description of Artificial Sequence: Synthetic oligonucleotide
guugugauggccgaucccu

SEQ ID NO: 186970 - RNA, 19 nt, Artificial Sequence
  Description of Artificial Sequence: Synthetic oligonucleotide
gccuaugagaacaaaccac

SEQ ID NO: 186971 - RNA, 19 nt, Artificial Sequence
  Description of Artificial Sequence: Synthetic oligonucleotide
uaugauccuuagccaccac

SEQ ID NO: 186972 - RNA, 19 nt, Artificial Sequence
  Description of Artificial Sequence: Synthetic oligonucleotide
ggagucauguggguuuagg

SEQ ID NO: 186973 - RNA, 19 nt, Artificial Sequence
  Description of Artificial Sequence: Synthetic oligonucleotide
ugucgcugagcagucuucu

SEQ ID NO: 186974 - RNA, 19 nt, Artificial Sequence
  Description of Artificial Sequence: Synthetic oligonucleotide
guuaaccugcaaaaggagu

SEQ ID NO: 186975 - RNA, 19 nt, Artificial Sequence
  Description of Artificial Sequence: Synthetic oligonucleotide
guuuuggaucgccacccuc

SEQ ID NO: 186976 - RNA, 19 nt, Artificial Sequence
  Description of Artificial Sequence: Synthetic oligonucleotide
caaagaagucuaaucgccu

SEQ ID NO: 186977 - RNA, 19 nt, Artificial Sequence
  Description of Artificial Sequence: Synthetic oligonucleotide
gugauuggugcauuugagu

SEQ ID NO: 186978 - RNA, 19 nt, Artificial Sequence
  Description of Artificial Sequence: Synthetic oligonucleotide
agcaugagccgugauuggu

SEQ ID NO: 186979 - RNA, 19 nt, Artificial Sequence
  Description of Artificial Sequence: Synthetic oligonucleotide
ugagccgugauuggugcau

SEQ ID NO: 186980 - RNA, 19 nt, Artificial Sequence
  Description of Artificial Sequence: Synthetic oligonucleotide
cacucaaaauugacauuca

SEQ ID NO: 186981 - RNA, 19 nt, Artificial Sequence
  Description of Artificial Sequence: Synthetic oligonucleotide
cucuccguugguugagcug

SEQ ID NO: 186982 - RNA, 19 nt, Artificial Sequence
  Description of Artificial Sequence: Synthetic oligonucleotide
augacugacacuggacaaa

SEQ ID NO: 186983 - RNA, 19 nt, Artificial Sequence
  Description of Artificial Sequence: Synthetic oligonucleotide
gaggcgacuggucacuugu

SEQ ID NO: 186984 - RNA, 19 nt, Artificial Sequence
  Description of Artificial Sequence: Synthetic oligonucleotide
cuugcucaacauggagggg

SEQ ID NO: 186985 - RNA, 19 nt, Artificial Sequence
  Description of Artificial Sequence: Synthetic oligonucleotide
agagauauauggagugcau

SEQ ID NO: 186986 - RNA, 19 nt, Artificial Sequence
  Description of Artificial Sequence: Synthetic oligonucleotide
agcucuccguugguugagc

SEQ ID NO: 186987 - RNA, 19 nt, Artificial Sequence
  Description of Artificial Sequence: Synthetic oligonucleotide
gguaauugaacuagagaua

SEQ ID NO: 186988 - RNA, 19 nt, Artificial Sequence
  Description of Artificial Sequence: Synthetic oligonucleotide
gaugcaccagaaucuacau

SEQ ID NO: 186989 - RNA, 19 nt, Artificial Sequence
  Description of Artificial Sequence: Synthetic oligonucleotide
cauuccgaacagauuguaa

SEQ ID NO: 186990 - RNA, 19 nt, Artificial Sequence
  Description of Artificial Sequence: Synthetic oligonucleotide
uuggaucgccacccucccc

SEQ ID NO: 186991 - RNA, 19 nt, Artificial Sequence
  Description of Artificial Sequence: Synthetic oligonucleotide
ugugcauuacugggaugac

SEQ ID NO: 186992 - RNA, 19 nt, Artificial Sequence
  Description of Artificial Sequence: Synthetic oligonucleotide
ccugagacauuccgaacag

SEQ ID NO: 186993 - RNA, 19 nt, Artificial Sequence
  Description of Artificial Sequence: Synthetic oligonucleotide
guuucaguaugaacaugga

SEQ ID NO: 186994 - RNA, 19 nt, Artificial Sequence
  Description of Artificial Sequence: Synthetic oligonucleotide
gacuccugggaggcgacug

SEQ ID NO: 186995 - RNA, 19 nt, Artificial Sequence
  Description of Artificial Sequence: Synthetic oligonucleotide
uguccacacaaccgagguu

SEQ ID NO: 186996 - RNA, 19 nt, Artificial Sequence
  Description of Artificial Sequence: Synthetic oligonucleotide
accugcaaaaggaguagga

SEQ ID NO: 186997 - RNA, 19 nt, Artificial Sequence
  Description of Artificial Sequence: Synthetic oligonucleotide
caucgguaaauacauguau

SEQ ID NO: 186998 - RNA, 19 nt, Artificial Sequence
  Description of Artificial Sequence: Synthetic oligonucleotide
gcuaugauccuuagccacc

SEQ ID NO: 186999 - RNA, 19 nt, Artificial Sequence
  Description of Artificial Sequence: Synthetic oligonucleotide
agagggguaccaaaaugau

SEQ ID NO: 187000 - RNA, 19 nt, Artificial Sequence
  Description of Artificial Sequence: Synthetic oligonucleotide
gauauauggagugcauuuu

SEQ ID NO: 187001 - RNA, 19 nt, Artificial Sequence
  Description of Artificial Sequence: Synthetic oligonucleotide
gguacuaauuauccuggcu

SEQ ID NO: 187002 - RNA, 19 nt, Artificial Sequence
  Description of Artificial Sequence: Synthetic oligonucleotide
agcuucgaugggaguauuc

SEQ ID NO: 187003 - RNA, 19 nt, Artificial Sequence
  Description of Artificial Sequence: Synthetic oligonucleotide
cuaugaaaugggcuacucu

SEQ ID NO: 187004 - RNA, 19 nt, Artificial Sequence
  Description of Artificial Sequence: Synthetic oligonucleotide
cagagauaagugcuuguua

SEQ ID NO: 187005 - RNA, 19 nt, Artificial Sequence
  Description of Artificial Sequence: Synthetic oligonucleotide
ccgagguuucuuuauaaca

SEQ ID NO: 187006 - RNA, 19 nt, Artificial Sequence
  Description of Artificial Sequence: Synthetic oligonucleotide
aucucucuauuggaggaaa

SEQ ID NO: 187007 - RNA, 19 nt, Artificial Sequence
  Description of Artificial Sequence: Synthetic oligonucleotide
auggguuagccugggauuu

SEQ ID NO: 187008 - RNA, 19 nt, Artificial Sequence
  Description of Artificial Sequence: Synthetic oligonucleotide
aggguccguaaauacucau

SEQ ID NO: 187009 - RNA, 19 nt, Artificial Sequence
  Description of Artificial Sequence: Synthetic oligonucleotide
guuacccacauggccaauc

SEQ ID NO: 187010 - RNA, 19 nt, Artificial Sequence
  Description of Artificial Sequence: Synthetic oligonucleotide
uguagccuuuccguucaaa

SEQ ID NO: 187011 - RNA, 19 nt, Artificial Sequence
  Description of Artificial Sequence: Synthetic oligonucleotide
cguucaaacagaucuguga

SEQ ID NO: 187012 - RNA, 19 nt, Artificial Sequence
  Description of Artificial Sequence: Synthetic oligonucleotide
cucccaagacuggugauga

SEQ ID NO: 187013 - RNA, 19 nt, Artificial Sequence
  Description of Artificial Sequence: Synthetic oligonucleotide
gguauuggucugccggcug

SEQ ID NO: 187014 - RNA, 19 nt, Artificial Sequence
  Description of Artificial Sequence: Synthetic oligonucleotide
guacuuaguuaaccugcaa

SEQ ID NO: 187015 - RNA, 19 nt, Artificial Sequence
  Description of Artificial Sequence: Synthetic oligonucleotide
auggccgaucccugugugu

SEQ ID NO: 187016 - RNA, 19 nt, Artificial Sequence
  Description of Artificial Sequence: Synthetic oligonucleotide
gaguaggaauaggccuucc

SEQ ID NO: 187017 - RNA, 19 nt, Artificial Sequence
  Description of Artificial Sequence: Synthetic oligonucleotide
augagccgugauuggugca

SEQ ID NO: 187018 - RNA, 19 nt, Artificial Sequence
  Description of Artificial Sequence: Synthetic oligonucleotide
cacgcacagaugagugcac

SEQ ID NO: 187019 - RNA, 19 nt, Artificial Sequence
  Description of Artificial Sequence: Synthetic oligonucleotide
agguauuggucugccggcu

SEQ ID NO: 187020 - RNA, 19 nt, Artificial Sequence
  Description of Artificial Sequence: Synthetic oligonucleotide
guugcgggugguguaagaa

SEQ ID NO: 187021 - RNA, 19 nt, Artificial Sequence
  Description of Artificial Sequence: Synthetic oligonucleotide
gauuuggguuaguuuggau

SEQ ID NO: 187022 - RNA, 19 nt, Artificial Sequence
  Description of Artificial Sequence: Synthetic oligonucleotide
uggguuagccugggauuug

SEQ ID NO: 187023 - RNA, 19 nt, Artificial Sequence
  Description of Artificial Sequence: Synthetic oligonucleotide
cuucgaugggaguauuccu

SEQ ID NO: 187024 - RNA, 19 nt, Artificial Sequence
  Description of Artificial Sequence: Synthetic oligonucleotide
ugggaggcgacuggucacu

SEQ ID NO: 187025 - RNA, 19 nt, Artificial Sequence
  Description of Artificial Sequence: Synthetic oligonucleotide
cucuauuggaggaaacauu

SEQ ID NO: 187026 - RNA, 19 nt, Artificial Sequence
  Description of Artificial Sequence: Synthetic oligonucleotide
acauuccgaacagauugua

SEQ ID NO: 187027 - RNA, 19 nt, Artificial Sequence
  Description of Artificial Sequence: Synthetic oligonucleotide
uuggugcauuugagugagc

SEQ ID NO: 187028 - RNA, 19 nt, Artificial Sequence
  Description of Artificial Sequence: Synthetic oligonucleotide
gacauuccgaacagauugu

SEQ ID NO: 187029 - RNA, 19 nt, Artificial Sequence
  Description of Artificial Sequence: Synthetic oligonucleotide
ggguuagccugggauuugg

SEQ ID NO: 187030 - RNA, 19 nt, Artificial Sequence
  Description of Artificial Sequence: Synthetic oligonucleotide
gcgaucugcggccaaguga

SEQ ID NO: 187031 - RNA, 19 nt, Artificial Sequence
  Description of Artificial Sequence: Synthetic oligonucleotide
gagauauauggagugcauu

SEQ ID NO: 187032 - RNA, 19 nt, Artificial Sequence
  Description of Artificial Sequence: Synthetic oligonucleotide
cagggaucuacuaacuauu

SEQ ID NO: 187033 - RNA, 19 nt, Artificial Sequence
  Description of Artificial Sequence: Synthetic oligonucleotide
cugccuauuuggggcaaug

SEQ ID NO: 187034 - RNA, 19 nt, Artificial Sequence
  Description of Artificial Sequence: Synthetic oligonucleotide
cuaggcuucugagaaagau

SEQ ID NO: 187035 - RNA, 19 nt, Artificial Sequence
  Description of Artificial Sequence: Synthetic oligonucleotide
acagaucugugaagagggu

SEQ ID NO: 187036 - RNA, 19 nt, Artificial Sequence
  Description of Artificial Sequence: Synthetic oligonucleotide
cgguaaauacauguauccc

SEQ ID NO: 187037 - RNA, 19 nt, Artificial Sequence
  Description of Artificial Sequence: Synthetic oligonucleotide
agggaucuacuaacuauuu

SEQ ID NO: 187038 - RNA, 19 nt, Artificial Sequence
  Description of Artificial Sequence: Synthetic oligonucleotide
guacuagagccuuuagcuu

SEQ ID NO: 187039 - RNA, 19 nt, Artificial Sequence
  Description of Artificial Sequence: Synthetic oligonucleotide
gguuauuggaucagagacu

SEQ ID NO: 187040 - RNA, 19 nt, Artificial Sequence
  Description of Artificial Sequence: Synthetic oligonucleotide
caaagagggguaccaaaau

SEQ ID NO: 187041 - RNA, 19 nt, Artificial Sequence
  Description of Artificial Sequence: Synthetic oligonucleotide
gucaaccagauggcccaag

SEQ ID NO: 187042 - RNA, 19 nt, Artificial Sequence
  Description of Artificial Sequence: Synthetic oligonucleotide
ccagggcaacaaaaccagg

SEQ ID NO: 187043 - RNA, 19 nt, Artificial Sequence
  Description of Artificial Sequence: Synthetic oligonucleotide
ggcaugacugacacuggac

SEQ ID NO: 187044 - RNA, 19 nt, Artificial Sequence
  Description of Artificial Sequence: Synthetic oligonucleotide
gcgacuggucacuuguguc

SEQ ID NO: 187045 - RNA, 19 nt, Artificial Sequence
  Description of Artificial Sequence: Synthetic oligonucleotide
cuaauuauccuggcucccu

SEQ ID NO: 187046 - RNA, 19 nt, Artificial Sequence
  Description of Artificial Sequence: Synthetic oligonucleotide
gguuaguuuggauggcagu

SEQ ID NO: 187047 - RNA, 19 nt, Artificial Sequence
  Description of Artificial Sequence: Synthetic oligonucleotide
cauggguuagccugggauu

SEQ ID NO: 187048 - RNA, 19 nt, Artificial Sequence
  Description of Artificial Sequence: Synthetic oligonucleotide
ggaccauaguggccucucc

SEQ ID NO: 187049 - RNA, 19 nt, Artificial Sequence
  Description of Artificial Sequence: Synthetic oligonucleotide
gauccuuagccaccacuuu

SEQ ID NO: 187050 - RNA, 19 nt, Artificial Sequence
  Description of Artificial Sequence: Synthetic oligonucleotide
cccuuccaaugagaaaugg

SEQ ID NO: 187051 - RNA, 19 nt, Artificial Sequence
  Description of Artificial Sequence: Synthetic oligonucleotide
agccuuuagcuuaguaguu

SEQ ID NO: 187052 - RNA, 19 nt, Artificial Sequence
  Description of Artificial Sequence: Synthetic oligonucleotide
gaggguugcggguggugua

SEQ ID NO: 187053 - RNA, 19 nt, Artificial Sequence
  Description of Artificial Sequence: Synthetic oligonucleotide
caaccgagguuucuuuaua

SEQ ID NO: 187054 - RNA, 19 nt, Artificial Sequence
  Description of Artificial Sequence: Synthetic oligonucleotide
ccguucaaacagaucugug

SEQ ID NO: 187055 - RNA, 19 nt, Artificial Sequence
  Description of Artificial Sequence: Synthetic oligonucleotide
ggagcucccaaagaggggu

SEQ ID NO: 187056 - RNA, 19 nt, Artificial Sequence
  Description of Artificial Sequence: Synthetic oligonucleotide
ggauuuggguuaguuugga

SEQ ID NO: 187057 - RNA, 19 nt, Artificial Sequence
  Description of Artificial Sequence: Synthetic oligonucleotide
agccgugauuggugcauuu

SEQ ID NO: 187058 - RNA, 19 nt, Artificial Sequence
  Description of Artificial Sequence: Synthetic oligonucleotide
ggcgaucugcggccaagug

SEQ ID NO: 187059 - RNA, 19 nt, Artificial Sequence
  Description of Artificial Sequence: Synthetic oligonucleotide
uugugucgcugagcagucu

SEQ ID NO: 187060 - RNA, 19 nt, Artificial Sequence
  Description of Artificial Sequence: Synthetic oligonucleotide
ggaguaggaauaggccuuc

SEQ ID NO: 187061 - RNA, 19 nt, Artificial Sequence
  Description of Artificial Sequence: Synthetic oligonucleotide
aggguugcgggugguguaa

SEQ ID NO: 187062 - RNA, 19 nt, Artificial Sequence
  Description of Artificial Sequence: Synthetic oligonucleotide
cucagcaugagccgugauu

SEQ ID NO: 187063 - RNA, 19 nt, Artificial Sequence
  Description of Artificial Sequence: Synthetic oligonucleotide
guccguaaauacucauaau

SEQ ID NO: 187064 - RNA, 19 nt, Artificial Sequence
  Description of Artificial Sequence: Synthetic oligonucleotide
gugcccuaugaaaugggcu

SEQ ID NO: 187065 - RNA, 19 nt, Artificial Sequence
  Description of Artificial Sequence: Synthetic oligonucleotide
ggaggcgacuggucacuug

SEQ ID NO: 187066 - RNA, 19 nt, Artificial Sequence
  Description of Artificial Sequence: Synthetic oligonucleotide
cugagacauuccgaacaga

SEQ ID NO: 187067 - RNA, 19 nt, Artificial Sequence
  Description of Artificial Sequence: Synthetic oligonucleotide
caacguucagcucuccguu

SEQ ID NO: 187068 - RNA, 19 nt, Artificial Sequence
  Description of Artificial Sequence: Synthetic oligonucleotide
ccacauucccaggagccug

SEQ ID NO: 187069 - RNA, 19 nt, Artificial Sequence
  Description of Artificial Sequence: Synthetic oligonucleotide
ccuuagccaccacuuuaac

SEQ ID NO: 187070 - RNA, 19 nt, Artificial Sequence
  Description of Artificial Sequence: Synthetic oligonucleotide
gccgugauuggugcauuug

SEQ ID NO: 187071 - RNA, 19 nt, Artificial Sequence
  Description of Artificial Sequence: Synthetic oligonucleotide
gugucgcugagcagucuuc

SEQ ID NO: 187072 - RNA, 19 nt, Artificial Sequence
  Description of Artificial Sequence: Synthetic oligonucleotide
gcccuaugaaaugggcuac

SEQ ID NO: 187073 - RNA, 19 nt, Artificial Sequence
  Description of Artificial Sequence: Synthetic oligonucleotide
uguuacccacauggccaau

SEQ ID NO: 187074 - RNA, 19 nt, Artificial Sequence
  Description of Artificial Sequence: Synthetic oligonucleotide
gguugcgggugguguaaga

SEQ ID NO: 187075 - RNA, 19 nt, Artificial Sequence
  Description of Artificial Sequence: Synthetic oligonucleotide
acccaaucauaggcauagu

SEQ ID NO: 187076 - RNA, 19 nt, Artificial Sequence
  Description of Artificial Sequence: Synthetic oligonucleotide
cacauucccaggagccugu

SEQ ID NO: 187077 - RNA, 19 nt, Artificial Sequence
  Description of Artificial Sequence: Synthetic oligonucleotide
ggcgacuggucacuugugu

SEQ ID NO: 187078 - RNA, 19 nt, Artificial Sequence
  Description of Artificial Sequence: Synthetic oligonucleotide
gggacauuuggaagauaaa

SEQ ID NO: 187079 - RNA, 19 nt, Artificial Sequence
  Description of Artificial Sequence: Synthetic oligonucleotide
gggaucuacuaacuauuuu

SEQ ID NO: 187080 - RNA, 19 nt, Artificial Sequence
  Description of Artificial Sequence: Synthetic oligonucleotide
cugcggccaagugagacgu

SEQ ID NO: 187081 - RNA, 19 nt, Artificial Sequence
  Description of Artificial Sequence: Synthetic oligonucleotide
ggguccguaaauacucaua

SEQ ID NO: 187082 - RNA, 19 nt, Artificial Sequence
  Description of Artificial Sequence: Synthetic oligonucleotide
ccgaacagauuguaagccu

SEQ ID NO: 187083 - RNA, 19 nt, Artificial Sequence
  Description of Artificial Sequence: Synthetic oligonucleotide
gaucugcggccaagugaga

SEQ ID NO: 187084 - RNA, 19 nt, Artificial Sequence
  Description of Artificial Sequence: Synthetic oligonucleotide
auaggccuuccaacccaau

SEQ ID NO: 187085 - RNA, 19 nt, Artificial Sequence
  Description of Artificial Sequence: Synthetic oligonucleotide
cacacaaccgagguuucuu

SEQ ID NO: 187086 - RNA, 19 nt, Artificial Sequence
  Description of Artificial Sequence: Synthetic oligonucleotide
ccaacccaaucauaggcau

SEQ ID NO: 187087 - RNA, 19 nt, Artificial Sequence
  Description of Artificial Sequence: Synthetic oligonucleotide
accugccuauuuggggcaa

SEQ ID NO: 187088 - RNA, 19 nt, Artificial Sequence
  Description of Artificial Sequence: Synthetic oligonucleotide
gguuuuggaucgccacccu

SEQ ID NO: 187089 - RNA, 19 nt, Artificial Sequence
  Description of Artificial Sequence: Synthetic oligonucleotide
ggguugcgggugguguaag

SEQ ID NO: 187090 - RNA, 19 nt, Artificial Sequence
  Description of Artificial Sequence: Synthetic oligonucleotide
gagcucccaaagaggggua

SEQ ID NO: 187091 - RNA, 19 nt, Artificial Sequence
  Description of Artificial Sequence: Synthetic oligonucleotide
caacaucuacaugggacuu

SEQ ID NO: 187092 - RNA, 19 nt, Artificial Sequence
  Description of Artificial Sequence: Synthetic oligonucleotide
gcgcucugaugaugcaguc

SEQ ID NO: 187093 - RNA, 19 nt, Artificial Sequence
  Description of Artificial Sequence: Synthetic oligonucleotide
gcgggugguguaagaacca

SEQ ID NO: 187094 - RNA, 19 nt, Artificial Sequence
  Description of Artificial Sequence: Synthetic oligonucleotide
cggccaagugagacgucag

SEQ ID NO: 187095 - RNA, 19 nt, Artificial Sequence
  Description of Artificial Sequence: Synthetic oligonucleotide
cgaacagauuguaagccuu

SEQ ID NO: 187096 - RNA, 19 nt, Artificial Sequence
  Description of Artificial Sequence: Synthetic oligonucleotide
gcucuccguugguugagcu

SEQ ID NO: 187097 - RNA, 19 nt, Artificial Sequence
  Description of Artificial Sequence: Synthetic oligonucleotide
gccuuuagcuuaguaguuu

SEQ ID NO: 187098 - RNA, 19 nt, Artificial Sequence
  Description of Artificial Sequence: Synthetic oligonucleotide
ccaccacuuuaacauuucu

SEQ ID NO: 187099 - RNA, 19 nt, Artificial Sequence
  Description of Artificial Sequence: Synthetic oligonucleotide
ccagagauaagugcuuguu

SEQ ID NO: 187100 - RNA, 19 nt, Artificial Sequence
  Description of Artificial Sequence: Synthetic oligonucleotide
cggcgcucugaugaugcag

SEQ ID NO: 187101 - RNA, 19 nt, Artificial Sequence
  Description of Artificial Sequence: Synthetic oligonucleotide
cgaagguagguugccaucu

SEQ ID NO: 187102 - RNA, 19 nt, Artificial Sequence
  Description of Artificial Sequence: Synthetic oligonucleotide
gccuauauccagggaucua

SEQ ID NO: 187103 - RNA, 19 nt, Artificial Sequence
  Description of Artificial Sequence: Synthetic oligonucleotide
ccacauggccaauccauuu

SEQ ID NO: 187104 - RNA, 19 nt, Artificial Sequence
  Description of Artificial Sequence: Synthetic oligonucleotide
gguuagccugggauuuggu

SEQ ID NO: 187105 - RNA, 19 nt, Artificial Sequence
  Description of Artificial Sequence: Synthetic oligonucleotide
gagcuucgaugggaguauu

SEQ ID NO: 187106 - RNA, 19 nt, Artificial Sequence
  Description of Artificial Sequence: Synthetic oligonucleotide
gagccgugauuggugcauu

SEQ ID NO: 187107 - RNA, 19 nt, Artificial Sequence
  Description of Artificial Sequence: Synthetic oligonucleotide
ggccgaucccugugugugu

SEQ ID NO: 187108 - RNA, 19 nt, Artificial Sequence
  Description of Artificial Sequence: Synthetic oligonucleotide
cuagagccuuuagcuuagu

SEQ ID NO: 187109 - RNA, 19 nt, Artificial Sequence
  Description of Artificial Sequence: Synthetic oligonucleotide
cgccuaacauaucgaaggu

SEQ ID NO: 187110 - RNA, 19 nt, Artificial Sequence
  Description of Artificial Sequence: Synthetic oligonucleotide
cccacauggccaauccauu

SEQ ID NO: 187111 - RNA, 19 nt, Artificial Sequence
  Description of Artificial Sequence: Synthetic oligonucleotide
gccggcugggcuggauuuc

SEQ ID NO: 187112 - RNA, 19 nt, Artificial Sequence
  Description of Artificial Sequence: Synthetic oligonucleotide
ccacccugaaaaguggauu

SEQ ID NO: 187113 - RNA, 19 nt, Artificial Sequence
  Description of Artificial Sequence: Synthetic oligonucleotide
gcggggacacaggagucau

SEQ ID NO: 187114 - RNA, 19 nt, Artificial Sequence
  Description of Artificial Sequence: Synthetic oligonucleotide
ccugccuauuuggggcaau

SEQ ID NO: 187115 - RNA, 19 nt, Artificial Sequence
  Description of Artificial Sequence: Synthetic oligonucleotide
aauacauugcacaaagucc

SEQ ID NO: 187116 - RNA, 19 nt, Artificial Sequence
  Description of Artificial Sequence: Synthetic oligonucleotide
agcuuugugauucauaagc

SEQ ID NO: 187117 - RNA, 19 nt, Artificial Sequence
  Description of Artificial Sequence: Synthetic oligonucleotide
aacaaauuagguaccaucc

SEQ ID NO: 187118 - RNA, 19 nt, Artificial Sequence
  Description of Artificial Sequence: Synthetic oligonucleotide
aauuccugaaauuccugcc

SEQ ID NO: 187119 - RNA, 19 nt, Artificial Sequence
  Description of Artificial Sequence: Synthetic oligonucleotide
uaaccaaugaaacuuaaca

SEQ ID NO: 187120 - RNA, 19 nt, Artificial Sequence
  Description of Artificial Sequence: Synthetic oligonucleotide
auuaagucagucuuagcac

SEQ ID NO: 187121 - RNA, 19 nt, Artificial Sequence
  Description of Artificial Sequence: Synthetic oligonucleotide
aagacaaauguucugaaaa

SEQ ID NO: 187122 - RNA, 19 nt, Artificial Sequence
  Description of Artificial Sequence: Synthetic oligonucleotide
uguauugaagcaaaucccc

SEQ ID NO: 187123 - RNA, 19 nt, Artificial Sequence
  Description of Artificial Sequence: Synthetic oligonucleotide
aagacugccugcaacaugc

SEQ ID NO: 187124 - RNA, 19 nt, Artificial Sequence
  Description of Artificial Sequence: Synthetic oligonucleotide
aauuagguaccauccacuc

SEQ ID NO: 187125 - RNA, 19 nt, Artificial Sequence
  Description of Artificial Sequence: Synthetic oligonucleotide
uaauauaggaaauucugcu

SEQ ID NO: 187126 - RNA, 19 nt, Artificial Sequence
  Description of Artificial Sequence: Synthetic oligonucleotide
aaugaugugugcuugcgcu

SEQ ID NO: 187127 - RNA, 19 nt, Artificial Sequence
  Description of Artificial Sequence: Synthetic oligonucleotide
uuugugauucauaagcucu

SEQ ID NO: 187128 - RNA, 19 nt, Artificial Sequence
  Description of Artificial Sequence: Synthetic oligonucleotide
auucauaagcucuggauuc

SEQ ID NO: 187129 - RNA, 19 nt, Artificial Sequence
  Description of Artificial Sequence: Synthetic oligonucleotide
ucacgaaccgagaagaaag

SEQ ID NO: 187130 - RNA, 19 nt, Artificial Sequence
  Description of Artificial Sequence: Synthetic oligonucleotide
ugcaauagccacucgaggg

SEQ ID NO: 187131 - RNA, 19 nt, Artificial Sequence
  Description of Artificial Sequence: Synthetic oligonucleotide
agcucuacuaucuggaagg

SEQ ID NO: 187132 - RNA, 19 nt, Artificial Sequence
  Description of Artificial Sequence: Synthetic oligonucleotide
ugcacuaaaucccaacucc

SEQ ID NO: 187133 - RNA, 19 nt, Artificial Sequence
  Description of Artificial Sequence: Synthetic oligonucleotide
auagucaaccuucagaggu

SEQ ID NO: 187134 - RNA, 19 nt, Artificial Sequence
  Description of Artificial Sequence: Synthetic oligonucleotide
aguuauaaagucugcucac

SEQ ID NO: 187135 - RNA, 19 nt, Artificial Sequence
  Description of Artificial Sequence: Synthetic oligonucleotide
uguuauggcaucuugguau

SEQ ID NO: 187136 - RNA, 19 nt, Artificial Sequence
  Description of Artificial Sequence: Synthetic oligonucleotide
aagucauuaagucagucuu

SEQ ID NO: 187137 - RNA, 19 nt, Artificial Sequence
  Description of Artificial Sequence: Synthetic oligonucleotide
uguaucaguuauaaagucu

SEQ ID NO: 187138 - RNA, 19 nt, Artificial Sequence
  Description of Artificial Sequence: Synthetic oligonucleotide
acuaucuaaccaaugaaac

SEQ ID NO: 187139 - RNA, 19 nt, Artificial Sequence
  Description of Artificial Sequence: Synthetic oligonucleotide
cuaaaucccaacuccaagc

SEQ ID NO: 187140 - RNA, 19 nt, Artificial Sequence
  Description of Artificial Sequence: Synthetic oligonucleotide
cuaccaaagacaaauguuc

SEQ ID NO: 187141 - RNA, 19 nt, Artificial Sequence
  Description of Artificial Sequence: Synthetic oligonucleotide
ucugccaagacuaucuaac

SEQ ID NO: 187142 - RNA, 19 nt, Artificial Sequence
  Description of Artificial Sequence: Synthetic oligonucleotide
aagggcuccaguguuaugg

SEQ ID NO: 187143 - RNA, 19 nt, Artificial Sequence
  Description of Artificial Sequence: Synthetic oligonucleotide
agugcuugaaccaagaggu

SEQ ID NO: 187144 - RNA, 19 nt, Artificial Sequence
  Description of Artificial Sequence: Synthetic oligonucleotide
uuaauuugguggcaguaga

SEQ ID NO: 187145 - RNA, 19 nt, Artificial Sequence
  Description of Artificial Sequence: Synthetic oligonucleotide
auuagguaccauccacucc

SEQ ID NO: 187146 - RNA, 19 nt, Artificial Sequence
  Description of Artificial Sequence: Synthetic oligonucleotide
aaguaccacagugggaucc

SEQ ID NO: 187147 - RNA, 19 nt, Artificial Sequence
  Description of Artificial Sequence: Synthetic oligonucleotide
auguaucaguuauaaaguc

SEQ ID NO: 187148 - RNA, 19 nt, Artificial Sequence
  Description of Artificial Sequence: Synthetic oligonucleotide
agaggcuaccuucuguccc

SEQ ID NO: 187149 - RNA, 19 nt, Artificial Sequence
  Description of Artificial Sequence: Synthetic oligonucleotide
uuuucguguaacuugcagu

SEQ ID NO: 187150 - RNA, 19 nt, Artificial Sequence
  Description of Artificial Sequence: Synthetic oligonucleotide
aagcaaauccccaaaacca

SEQ ID NO: 187151 - RNA, 19 nt, Artificial Sequence
  Description of Artificial Sequence: Synthetic oligonucleotide
agcagugacagccagccag

SEQ ID NO: 187152 - RNA, 19 nt, Artificial Sequence
  Description of Artificial Sequence: Synthetic oligonucleotide
uguaacuugcaguauguaa

SEQ ID NO: 187153 - RNA, 19 nt, Artificial Sequence
  Description of Artificial Sequence: Synthetic oligonucleotide
uacuaccaaagacaaaugu

SEQ ID NO: 187154 - RNA, 19 nt, Artificial Sequence
  Description of Artificial Sequence: Synthetic oligonucleotide
uggacaaccgcacuaccag

SEQ ID NO: 187155 - RNA, 19 nt, Artificial Sequence
  Description of Artificial Sequence: Synthetic oligonucleotide
guaaaaguaggagugggag

SEQ ID NO: 187156 - RNA, 19 nt, Artificial Sequence
  Description of Artificial Sequence: Synthetic oligonucleotide
uaucuaaccaaugaaacuu

SEQ ID NO: 187157 - RNA, 19 nt, Artificial Sequence
  Description of Artificial Sequence: Synthetic oligonucleotide
acauuuauugaaggguggc

SEQ ID NO: 187158 - RNA, 19 nt, Artificial Sequence
  Description of Artificial Sequence: Synthetic oligonucleotide
acuaaaucccaacuccaag

SEQ ID NO: 187159 - RNA, 19 nt, Artificial Sequence
  Description of Artificial Sequence: Synthetic oligonucleotide
guaucaguuauaaagucug

SEQ ID NO: 187160 - RNA, 19 nt, Artificial Sequence
  Description of Artificial Sequence: Synthetic oligonucleotide
uugaaugcccagcaauucc

SEQ ID NO: 187161 - RNA, 19 nt, Artificial Sequence
  Description of Artificial Sequence: Synthetic oligonucleotide
gaacaugagucucacaguc

SEQ ID NO: 187162 - RNA, 19 nt, Artificial Sequence
  Description of Artificial Sequence: Synthetic oligonucleotide
uagacugcgaagucucugg

SEQ ID NO: 187163 - RNA, 19 nt, Artificial Sequence
  Description of Artificial Sequence: Synthetic oligonucleotide
aaaguccuaucuugcaucu

SEQ ID NO: 187164 - RNA, 19 nt, Artificial Sequence
  Description of Artificial Sequence: Synthetic oligonucleotide
aguggcucuaacccuacgg

SEQ ID NO: 187165 - RNA, 19 nt, Artificial Sequence
  Description of Artificial Sequence: Synthetic oligonucleotide
uacauucaaaugaaucaga

SEQ ID NO: 187166 - RNA, 19 nt, Artificial Sequence
  Description of Artificial Sequence: Synthetic oligonucleotide
aucgcacauuuauugaagg

SEQ ID NO: 187167 - RNA, 19 nt, Artificial Sequence
  Description of Artificial Sequence: Synthetic oligonucleotide
aguguuauggcaucuuggu

SEQ ID NO: 187168 - RNA, 19 nt, Artificial Sequence
  Description of Artificial Sequence: Synthetic oligonucleotide
uuucguguaacuugcagua

SEQ ID NO: 187169 - RNA, 19 nt, Artificial Sequence
  Description of Artificial Sequence: Synthetic oligonucleotide
gguuccuaugcuuacgugg

SEQ ID NO: 187170 - RNA, 19 nt, Artificial Sequence
  Description of Artificial Sequence: Synthetic oligonucleotide
acaugcacuaaaucccaac

SEQ ID NO: 187171 - RNA, 19 nt, Artificial Sequence
  Description of Artificial Sequence: Synthetic oligonucleotide
uguccaaccacauccuuga

SEQ ID NO: 187172 - RNA, 19 nt, Artificial Sequence
  Description of Artificial Sequence: Synthetic oligonucleotide
ucgaaaggcaccugguaag

SEQ ID NO: 187173 - RNA, 19 nt, Artificial Sequence
  Description of Artificial Sequence: Synthetic oligonucleotide
uuauaggugaaccguccca

SEQ ID NO: 187174 - RNA, 19 nt, Artificial Sequence
  Description of Artificial Sequence: Synthetic oligonucleotide
uccccuuacagucaucaca

SEQ ID NO: 187175 - RNA, 19 nt, Artificial Sequence
  Description of Artificial Sequence: Synthetic oligonucleotide
ucguguaacuugcaguaug

SEQ ID NO: 187176 - RNA, 19 nt, Artificial Sequence
  Description of Artificial Sequence: Synthetic oligonucleotide
augcacuaaaucccaacuc

SEQ ID NO: 187177 - RNA, 19 nt, Artificial Sequence
  Description of Artificial Sequence: Synthetic oligonucleotide
aaguaggagugggaggagc

SEQ ID NO: 187178 - RNA, 19 nt, Artificial Sequence
  Description of Artificial Sequence: Synthetic oligonucleotide
uaccaaagacaaauguucu

SEQ ID NO: 187179 - RNA, 19 nt, Artificial Sequence
  Description of Artificial Sequence: Synthetic oligonucleotide
ucgcacauuuauugaaggg

SEQ ID NO: 187180 - RNA, 19 nt, Artificial Sequence
  Description of Artificial Sequence: Synthetic oligonucleotide
gucuaagaaccauacauuc

SEQ ID NO: 187181 - RNA, 19 nt, Artificial Sequence
  Description of Artificial Sequence: Synthetic oligonucleotide
uauaggugaaccgucccag

SEQ ID NO: 187182 - RNA, 19 nt, Artificial Sequence
  Description of Artificial Sequence: Synthetic oligonucleotide
aaauuagguaccauccacu

SEQ ID NO: 187183 - RNA, 19 nt, Artificial Sequence
  Description of Artificial Sequence: Synthetic oligonucleotide
acugcgcacucaaagaggc

SEQ ID NO: 187184 - RNA, 19 nt, Artificial Sequence
  Description of Artificial Sequence: Synthetic oligonucleotide
uccguaauuccugaaauuc

SEQ ID NO: 187185 - RNA, 19 nt, Artificial Sequence
  Description of Artificial Sequence: Synthetic oligonucleotide
ugccaagacuaucuaacca

SEQ ID NO: 187186 - RNA, 19 nt, Artificial Sequence
  Description of Artificial Sequence: Synthetic oligonucleotide
gauguuaccagugggugac

SEQ ID NO: 187187 - RNA, 19 nt, Artificial Sequence
  Description of Artificial Sequence: Synthetic oligonucleotide
ucgagagacgcacuugaug

SEQ ID NO: 187188 - RNA, 19 nt, Artificial Sequence
  Description of Artificial Sequence: Synthetic oligonucleotide
acucaacguguccucaugg

SEQ ID NO: 187189 - RNA, 19 nt, Artificial Sequence
  Description of Artificial Sequence: Synthetic oligonucleotide
acaaauuagguaccaucca

SEQ ID NO: 187190 - RNA, 19 nt, Artificial Sequence
  Description of Artificial Sequence: Synthetic oligonucleotide
aaccgcacuaccagguacc

SEQ ID NO: 187191 - RNA, 19 nt, Artificial Sequence
  Description of Artificial Sequence: Synthetic oligonucleotide
uaggugaaccgucccagag

SEQ ID NO: 187192 - RNA, 19 nt, Artificial Sequence
  Description of Artificial Sequence: Synthetic oligonucleotide
uaccagguaccccugggag

SEQ ID NO: 187193 - RNA, 19 nt, Artificial Sequence
  Description of Artificial Sequence: Synthetic oligonucleotide
gaaccgagaagaaaguuuc

SEQ ID NO: 187194 - RNA, 19 nt, Artificial Sequence
  Description of Artificial Sequence: Synthetic oligonucleotide
ugcugauccucagagaaca

SEQ ID NO: 187195 - RNA, 19 nt, Artificial Sequence
  Description of Artificial Sequence: Synthetic oligonucleotide
uggcacugcgcacucaaag

SEQ ID NO: 187196 - RNA, 19 nt, Artificial Sequence
  Description of Artificial Sequence: Synthetic oligonucleotide
ugaaccgucccagaggcug

SEQ ID NO: 187197 - RNA, 19 nt, Artificial Sequence
  Description of Artificial Sequence: Synthetic oligonucleotide
gauacuccguuuccagucc

SEQ ID NO: 187198 - RNA, 19 nt, Artificial Sequence
  Description of Artificial Sequence: Synthetic oligonucleotide
accaaagacaaauguucug

SEQ ID NO: 187199 - RNA, 19 nt, Artificial Sequence
  Description of Artificial Sequence: Synthetic oligonucleotide
uuccaaguucgagagacgc

SEQ ID NO: 187200 - RNA, 19 nt, Artificial Sequence
  Description of Artificial Sequence: Synthetic oligonucleotide
ucuccggcagucauucucc

SEQ ID NO: 187201 - RNA, 19 nt, Artificial Sequence
  Description of Artificial Sequence: Synthetic oligonucleotide
agcaccuaguaaaaguagg

SEQ ID NO: 187202 - RNA, 19 nt, Artificial Sequence
  Description of Artificial Sequence: Synthetic oligonucleotide
auagccacucgagggagcc

SEQ ID NO: 187203 - RNA, 19 nt, Artificial Sequence
  Description of Artificial Sequence: Synthetic oligonucleotide
agacuaucuaaccaaugaa

SEQ ID NO: 187204 - RNA, 19 nt, Artificial Sequence
  Description of Artificial Sequence: Synthetic oligonucleotide
agugggaugugcugcuacg

SEQ ID NO: 187205 - RNA, 19 nt, Artificial Sequence
  Description of Artificial Sequence: Synthetic oligonucleotide
agugacagccagccagagc

SEQ ID NO: 187206 - RNA, 19 nt, Artificial Sequence
  Description of Artificial Sequence: Synthetic oligonucleotide
ucuaaccaaugaaacuuaa

SEQ ID NO: 187207 - RNA, 19 nt, Artificial Sequence
  Description of Artificial Sequence: Synthetic oligonucleotide
cuuacguggucucuucccc

SEQ ID NO: 187208 - RNA, 19 nt, Artificial Sequence
  Description of Artificial Sequence: Synthetic oligonucleotide
guaacuugcaguauguaaa

SEQ ID NO: 187209 - RNA, 19 nt, Artificial Sequence
  Description of Artificial Sequence: Synthetic oligonucleotide
auggccaucgcacauuuau

SEQ ID NO: 187210 - RNA, 19 nt, Artificial Sequence
  Description of Artificial Sequence: Synthetic oligonucleotide
auagccuuucaauuuguaa

SEQ ID NO: 187211 - RNA, 19 nt, Artificial Sequence
  Description of Artificial Sequence: Synthetic oligonucleotide
uugcucacgaaccgagaag

SEQ ID NO: 187212 - RNA, 19 nt, Artificial Sequence
  Description of Artificial Sequence: Synthetic oligonucleotide
ggaacgucagcucugcaag

SEQ ID NO: 187213 - RNA, 19 nt, Artificial Sequence
  Description of Artificial Sequence: Synthetic oligonucleotide
gguggaaagucauuaaguc

SEQ ID NO: 187214 - RNA, 19 nt, Artificial Sequence
  Description of Artificial Sequence: Synthetic oligonucleotide
ugcucacgaaccgagaaga

SEQ ID NO: 187215 - RNA, 19 nt, Artificial Sequence
  Description of Artificial Sequence: Synthetic oligonucleotide
guuauaggugaaccguccc

SEQ ID NO: 187216 - RNA, 19 nt, Artificial Sequence
  Description of Artificial Sequence: Synthetic oligonucleotide
guggaaagucauuaaguca

SEQ ID NO: 187217 - RNA, 19 nt, Artificial Sequence
  Description of Artificial Sequence: Synthetic oligonucleotide
uagucaaccuucagaggug

SEQ ID NO: 187218 - RNA, 19 nt, Artificial Sequence
  Description of Artificial Sequence: Synthetic oligonucleotide
gucucaaggugcuucuucc

SEQ ID NO: 187219 - RNA, 19 nt, Artificial Sequence
  Description of Artificial Sequence: Synthetic oligonucleotide
aauagccacucgagggagc

SEQ ID NO: 187220 - RNA, 19 nt, Artificial Sequence
  Description of Artificial Sequence: Synthetic oligonucleotide
gacuaucuaaccaaugaaa

SEQ ID NO: 187221 - RNA, 19 nt, Artificial Sequence
  Description of Artificial Sequence: Synthetic oligonucleotide
uccagaugauguaucaguu

SEQ ID NO: 187222 - RNA, 19 nt, Artificial Sequence
  Description of Artificial Sequence: Synthetic oligonucleotide
uggcucuaacccuacggag

SEQ ID NO: 187223 - RNA, 19 nt, Artificial Sequence
  Description of Artificial Sequence: Synthetic oligonucleotide
gacugcgaagucucugggg

SEQ ID NO: 187224 - RNA, 19 nt, Artificial Sequence
  Description of Artificial Sequence: Synthetic oligonucleotide
ucauucucccacagugacc

SEQ ID NO: 187225 - RNA, 19 nt, Artificial Sequence
  Description of Artificial Sequence: Synthetic oligonucleotide
aaaguccaccaucccuguc

SEQ ID NO: 187226 - RNA, 19 nt, Artificial Sequence
  Description of Artificial Sequence: Synthetic oligonucleotide
uggagucuucuacugggca

SEQ ID NO: 187227 - RNA, 19 nt, Artificial Sequence
  Description of Artificial Sequence: Synthetic oligonucleotide
guugcacacggucuaggag

SEQ ID NO: 187228 - RNA, 19 nt, Artificial Sequence
  Description of Artificial Sequence: Synthetic oligonucleotide
ggugaaccgucccagaggc

SEQ ID NO: 187229 - RNA, 19 nt, Artificial Sequence
  Description of Artificial Sequence: Synthetic oligonucleotide
uguugcacacggucuagga

SEQ ID NO: 187230 - RNA, 19 nt, Artificial Sequence
  Description of Artificial Sequence: Synthetic oligonucleotide
gaucuucauggacaaccgc

SEQ ID NO: 187231 - RNA, 19 nt, Artificial Sequence
  Description of Artificial Sequence: Synthetic oligonucleotide
ugucucaaggugcuucuuc

SEQ ID NO: 187232 - RNA, 19 nt, Artificial Sequence
  Description of Artificial Sequence: Synthetic oligonucleotide
guaccauccacucccuagc

SEQ ID NO: 187233 - RNA, 19 nt, Artificial Sequence
  Description of Artificial Sequence: Synthetic oligonucleotide
cucaggaucguccacccuc

SEQ ID NO: 187234 - RNA, 19 nt, Artificial Sequence
  Description of Artificial Sequence: Synthetic oligonucleotide
gguaccauccacucccuag

SEQ ID NO: 187235 - RNA, 19 nt, Artificial Sequence
  Description of Artificial Sequence: Synthetic oligonucleotide
agauguuaccaguggguga

SEQ ID NO: 187236 - RNA, 19 nt, Artificial Sequence
  Description of Artificial Sequence: Synthetic oligonucleotide
cucaacguguccucauggc

SEQ ID NO: 187237 - RNA, 19 nt, Artificial Sequence
  Description of Artificial Sequence: Synthetic oligonucleotide
uggagcaguugcgaguggg

SEQ ID NO: 187238 - RNA, 19 nt, Artificial Sequence
  Description of Artificial Sequence: Synthetic oligonucleotide
cugcaauagccacucgagg

SEQ ID NO: 187239 - RNA, 19 nt, Artificial Sequence
  Description of Artificial Sequence: Synthetic oligonucleotide
gauacgggcaucagccugc

SEQ ID NO: 187240 - RNA, 19 nt, Artificial Sequence
  Description of Artificial Sequence: Synthetic oligonucleotide
cacugcgcacucaaagagg

SEQ ID NO: 187241 - RNA, 19 nt, Artificial Sequence
  Description of Artificial Sequence: Synthetic oligonucleotide
cuugcgcuuccguaauucc

SEQ ID NO: 187242 - RNA, 19 nt, Artificial Sequence
  Description of Artificial Sequence: Synthetic oligonucleotide
caccuaguaaaaguaggag

SEQ ID NO: 187243 - RNA, 19 nt, Artificial Sequence
  Description of Artificial Sequence: Synthetic oligonucleotide
cuccguuuccaguccauag

SEQ ID NO: 187244 - RNA, 19 nt, Artificial Sequence
  Description of Artificial Sequence: Synthetic oligonucleotide
aaguucgagagacgcacuu

SEQ ID NO: 187245 - RNA, 19 nt, Artificial Sequence
  Description of Artificial Sequence: Synthetic oligonucleotide
ucuuaauuugguggcagua

SEQ ID NO: 187246 - RNA, 19 nt, Artificial Sequence
  Description of Artificial Sequence: Synthetic oligonucleotide
agacugcgaagucucuggg

SEQ ID NO: 187247 - RNA, 19 nt, Artificial Sequence
  Description of Artificial Sequence: Synthetic oligonucleotide
uccacuuggucuacccgca

SEQ ID NO: 187248 - RNA, 19 nt, Artificial Sequence
  Description of Artificial Sequence: Synthetic oligonucleotide
ucuacccgcaucuggaguu

SEQ ID NO: 187249 - RNA, 19 nt, Artificial Sequence
  Description of Artificial Sequence: Synthetic oligonucleotide
ugugguuggguagaucuuc

SEQ ID NO: 187250 - RNA, 19 nt, Artificial Sequence
  Description of Artificial Sequence: Synthetic oligonucleotide
cauuucaaguguccagaug

SEQ ID NO: 187251 - RNA, 19 nt, Artificial Sequence
  Description of Artificial Sequence: Synthetic oligonucleotide
agucagucuuagcacugag

SEQ ID NO: 187252 - RNA, 19 nt, Artificial Sequence
  Description of Artificial Sequence: Synthetic oligonucleotide
ucauggacaaccgcacuac

SEQ ID NO: 187253 - RNA, 19 nt, Artificial Sequence
  Description of Artificial Sequence: Synthetic oligonucleotide
cacacgaggugacugugag

SEQ ID NO: 187254 - RNA, 19 nt, Artificial Sequence
  Description of Artificial Sequence: Synthetic oligonucleotide
uccuaugcuuacguggucu

SEQ ID NO: 187255 - RNA, 19 nt, Artificial Sequence
  Description of Artificial Sequence: Synthetic oligonucleotide
aggaacgucagcucugcaa

SEQ ID NO: 187256 - RNA, 19 nt, Artificial Sequence
  Description of Artificial Sequence: Synthetic oligonucleotide
gaagguuccagaggcugcc

SEQ ID NO: 187257 - RNA, 19 nt, Artificial Sequence
  Description of Artificial Sequence: Synthetic oligonucleotide
accgagaagaaaguuucug

SEQ ID NO: 187258 - RNA, 19 nt, Artificial Sequence
  Description of Artificial Sequence: Synthetic oligonucleotide
acacagggacuccccgucc

SEQ ID NO: 187259 - RNA, 19 nt, Artificial Sequence
  Description of Artificial Sequence: Synthetic oligonucleotide
guucgagagacgcacuuga

SEQ ID NO: 187260 - RNA, 19 nt, Artificial Sequence
  Description of Artificial Sequence: Synthetic oligonucleotide
agagcaccgaccacauggc

SEQ ID NO: 187261 - RNA, 19 nt, Artificial Sequence
  Description of Artificial Sequence: Synthetic oligonucleotide
ugggcuucggacccauggc

SEQ ID NO: 187262 - RNA, 19 nt, Artificial Sequence
  Description of Artificial Sequence: Synthetic oligonucleotide
gacucaacguguccucaug

SEQ ID NO: 187263 - RNA, 19 nt, Artificial Sequence
  Description of Artificial Sequence: Synthetic oligonucleotide
agccuuugaaugcccagca

SEQ ID NO: 187264 - RNA, 19 nt, Artificial Sequence
  Description of Artificial Sequence: Synthetic oligonucleotide
augcuuacguggucucuuc

SEQ ID NO: 187265 - RNA, 19 nt, Artificial Sequence
  Description of Artificial Sequence: Synthetic oligonucleotide
ugcuuacguggucucuucc

SEQ ID NO: 187266 - RNA, 19 nt, Artificial Sequence
  Description of Artificial Sequence: Synthetic oligonucleotide
ggccaucgcacauuuauug

SEQ ID NO: 187267 - RNA, 19 nt, Artificial Sequence
  Description of Artificial Sequence: Synthetic oligonucleotide
agaaacacauucagccaag

SEQ ID NO: 187268 - RNA, 19 nt, Artificial Sequence
  Description of Artificial Sequence: Synthetic oligonucleotide
cuaucuaaccaaugaaacu

SEQ ID NO: 187269 - RNA, 19 nt, Artificial Sequence
  Description of Artificial Sequence: Synthetic oligonucleotide
aucaugguuguggcacugc

SEQ ID NO: 187270 - RNA, 19 nt, Artificial Sequence
  Description of Artificial Sequence: Synthetic oligonucleotide
ugagugguucuguggugcc

SEQ ID NO: 187271 - RNA, 19 nt, Artificial Sequence
  Description of Artificial Sequence: Synthetic oligonucleotide
uuacguggucucuucccca

SEQ ID NO: 187272 - RNA, 19 nt, Artificial Sequence
  Description of Artificial Sequence: Synthetic oligonucleotide
cacgaggugacugugagaa

SEQ ID NO: 187273 - RNA, 19 nt, Artificial Sequence
  Description of Artificial Sequence: Synthetic oligonucleotide
caacaugcacuaaauccca

SEQ ID NO: 187274 - RNA, 19 nt, Artificial Sequence
  Description of Artificial Sequence: Synthetic oligonucleotide
gaaucagacucagaggacu

SEQ ID NO: 187275 - RNA, 19 nt, Artificial Sequence
  Description of Artificial Sequence: Synthetic oligonucleotide
ggaacaucuggagugaguc

SEQ ID NO: 187276 - RNA, 19 nt, Artificial Sequence
  Description of Artificial Sequence: Synthetic oligonucleotide
cacacggucuaggaggggc

SEQ ID NO: 187277 - RNA, 19 nt, Artificial Sequence
  Description of Artificial Sequence: Synthetic oligonucleotide
ugcgcacucaaagaggcua

SEQ ID NO: 187278 - RNA, 19 nt, Artificial Sequence
  Description of Artificial Sequence: Synthetic oligonucleotide
uccuaucuugcaucuuuaa

SEQ ID NO: 187279 - RNA, 19 nt, Artificial Sequence
  Description of Artificial Sequence: Synthetic oligonucleotide
cucagagaacaugagucuc

SEQ ID NO: 187280 - RNA, 19 nt, Artificial Sequence
  Description of Artificial Sequence: Synthetic oligonucleotide
uugcgagugggugacugug

SEQ ID NO: 187281 - RNA, 19 nt, Artificial Sequence
  Description of Artificial Sequence: Synthetic oligonucleotide
guggcucuaacccuacgga

SEQ ID NO: 187282 - RNA, 19 nt, Artificial Sequence
  Description of Artificial Sequence: Synthetic oligonucleotide
uaacccuacggagugggau

SEQ ID NO: 187283 - RNA, 19 nt, Artificial Sequence
  Description of Artificial Sequence: Synthetic oligonucleotide
acagggacuccccguccac

SEQ ID NO: 187284 - RNA, 19 nt, Artificial Sequence
  Description of Artificial Sequence: Synthetic oligonucleotide
uccugauacuccguuucca

SEQ ID NO: 187285 - RNA, 19 nt, Artificial Sequence
  Description of Artificial Sequence: Synthetic oligonucleotide
ccccuuacagucaucacac

SEQ ID NO: 187286 - RNA, 19 nt, Artificial Sequence
  Description of Artificial Sequence: Synthetic oligonucleotide
cugauccucagagaacaug

SEQ ID NO: 187287 - RNA, 19 nt, Artificial Sequence
  Description of Artificial Sequence: Synthetic oligonucleotide
gacucagaggacucaacgu

SEQ ID NO: 187288 - RNA, 19 nt, Artificial Sequence
  Description of Artificial Sequence: Synthetic oligonucleotide
gugggugacagcgucuuug

SEQ ID NO: 187289 - RNA, 19 nt, Artificial Sequence
  Description of Artificial Sequence: Synthetic oligonucleotide
uaugcuuacguggucucuu

SEQ ID NO: 187290 - RNA, 19 nt, Artificial Sequence
  Description of Artificial Sequence: Synthetic oligonucleotide
aggucaugcaaaagcaccu

SEQ ID NO: 187291 - RNA, 19 nt, Artificial Sequence
  Description of Artificial Sequence: Synthetic oligonucleotide
uauggcaucuugguauaua

SEQ ID NO: 187292 - RNA, 19 nt, Artificial Sequence
  Description of Artificial Sequence: Synthetic oligonucleotide
ggugacagcgucuuuggaa

SEQ ID NO: 187293 - RNA, 19 nt, Artificial Sequence
  Description of Artificial Sequence: Synthetic oligonucleotide
agcgucuuuggaaugugcu

SEQ ID NO: 187294 - RNA, 19 nt, Artificial Sequence
  Description of Artificial Sequence: Synthetic oligonucleotide
aguucgagagacgcacuug

SEQ ID NO: 187295 - RNA, 19 nt, Artificial Sequence
  Description of Artificial Sequence: Synthetic oligonucleotide
ggugacugugagaaguacc

SEQ ID NO: 187296 - RNA, 19 nt, Artificial Sequence
  Description of Artificial Sequence: Synthetic oligonucleotide
ucuuagcacugagugguuc

SEQ ID NO: 187297 - RNA, 19 nt, Artificial Sequence
  Description of Artificial Sequence: Synthetic oligonucleotide
caucacccaaccuggccac

SEQ ID NO: 187298 - RNA, 19 nt, Artificial Sequence
  Description of Artificial Sequence: Synthetic oligonucleotide
agguuccuaugcuuacgug

SEQ ID NO: 187299 - RNA, 19 nt, Artificial Sequence
  Description of Artificial Sequence: Synthetic oligonucleotide
gaggacucaacguguccuc

SEQ ID NO: 187300 - RNA, 19 nt, Artificial Sequence
  Description of Artificial Sequence: Synthetic oligonucleotide
gcucuaacccuacggagug

SEQ ID NO: 187301 - RNA, 19 nt, Artificial Sequence
  Description of Artificial Sequence: Synthetic oligonucleotide
ggauacgggcaucagccug

SEQ ID NO: 187302 - RNA, 19 nt, Artificial Sequence
  Description of Artificial Sequence: Synthetic oligonucleotide
ugcuacgggccacugucuc

SEQ ID NO: 187303 - RNA, 19 nt, Artificial Sequence
  Description of Artificial Sequence: Synthetic oligonucleotide
ugggugacugugugugucu

SEQ ID NO: 187304 - RNA, 19 nt, Artificial Sequence
  Description of Artificial Sequence: Synthetic oligonucleotide
accgcacuaccagguaccc

SEQ ID NO: 187305 - RNA, 19 nt, Artificial Sequence
  Description of Artificial Sequence: Synthetic oligonucleotide
gcuuacguggucucuuccc

SEQ ID NO: 187306 - RNA, 19 nt, Artificial Sequence
  Description of Artificial Sequence: Synthetic oligonucleotide
ggacaaccgcacuaccagg

SEQ ID NO: 187307 - RNA, 19 nt, Artificial Sequence
  Description of Artificial Sequence: Synthetic oligonucleotide
uacguggucucuuccccaa

SEQ ID NO: 187308 - RNA, 19 nt, Artificial Sequence
  Description of Artificial Sequence: Synthetic oligonucleotide
auacuccguuuccagucca

SEQ ID NO: 187309 - RNA, 19 nt, Artificial Sequence
  Description of Artificial Sequence: Synthetic oligonucleotide
aaccgagaagaaaguuucu

SEQ ID NO: 187310 - RNA, 19 nt, Artificial Sequence
  Description of Artificial Sequence: Synthetic oligonucleotide
cacuaaaucccaacuccaa

SEQ ID NO: 187311 - RNA, 19 nt, Artificial Sequence
  Description of Artificial Sequence: Synthetic oligonucleotide
ugaccaagaugggcuucgg

SEQ ID NO: 187312 - RNA, 19 nt, Artificial Sequence
  Description of Artificial Sequence: Synthetic oligonucleotide
gccgucuuggucucauagg

SEQ ID NO: 187313 - RNA, 19 nt, Artificial Sequence
  Description of Artificial Sequence: Synthetic oligonucleotide
agcaccgaccacauggccu

SEQ ID NO: 187314 - RNA, 19 nt, Artificial Sequence
  Description of Artificial Sequence: Synthetic oligonucleotide
agguguugcacacggucua

SEQ ID NO: 187315 - RNA, 19 nt, Artificial Sequence
  Description of Artificial Sequence: Synthetic oligonucleotide
ucguccaguucagcacugg

SEQ ID NO: 187316 - RNA, 19 nt, Artificial Sequence
  Description of Artificial Sequence: Synthetic oligonucleotide
ccaccagaagguuccagag

SEQ ID NO: 187317 - RNA, 19 nt, Artificial Sequence
  Description of Artificial Sequence: Synthetic oligonucleotide
cuuugaaugcccagcaauu

SEQ ID NO: 187318 - RNA, 19 nt, Artificial Sequence
  Description of Artificial Sequence: Synthetic oligonucleotide
agcaccgaguacucaggau

SEQ ID NO: 187319 - RNA, 19 nt, Artificial Sequence
  Description of Artificial Sequence: Synthetic oligonucleotide
auauuucgaaaggcaccug

SEQ ID NO: 187320 - RNA, 19 nt, Artificial Sequence
  Description of Artificial Sequence: Synthetic oligonucleotide
cacuaccagguaccccugg

SEQ ID NO: 187321 - RNA, 19 nt, Artificial Sequence
  Description of Artificial Sequence: Synthetic oligonucleotide
uggccaucgcacauuuauu

SEQ ID NO: 187322 - RNA, 19 nt, Artificial Sequence
  Description of Artificial Sequence: Synthetic oligonucleotide
ggcacuggagauguuacca

SEQ ID NO: 187323 - RNA, 19 nt, Artificial Sequence
  Description of Artificial Sequence: Synthetic oligonucleotide
gcacaaaguccuaucuugc

SEQ ID NO: 187324 - RNA, 19 nt, Artificial Sequence
  Description of Artificial Sequence: Synthetic oligonucleotide
gaccaagaugggcuucgga

SEQ ID NO: 187325 - RNA, 19 nt, Artificial Sequence
  Description of Artificial Sequence: Synthetic oligonucleotide
cugguuauaggugaaccgu

SEQ ID NO: 187326 - RNA, 19 nt, Artificial Sequence
  Description of Artificial Sequence: Synthetic oligonucleotide
agucauuaagucagucuua

SEQ ID NO: 187327 - RNA, 19 nt, Artificial Sequence
  Description of Artificial Sequence: Synthetic oligonucleotide
gccuuggucacagaccacc

SEQ ID NO: 187328 - RNA, 19 nt, Artificial Sequence
  Description of Artificial Sequence: Synthetic oligonucleotide
aggacccgaagcucuacua

SEQ ID NO: 187329 - RNA, 19 nt, Artificial Sequence
  Description of Artificial Sequence: Synthetic oligonucleotide
uucguguaacuugcaguau

SEQ ID NO: 187330 - RNA, 19 nt, Artificial Sequence
  Description of Artificial Sequence: Synthetic oligonucleotide
ccguuuccaguccauagac

SEQ ID NO: 187331 - RNA, 19 nt, Artificial Sequence
  Description of Artificial Sequence: Synthetic oligonucleotide
guguuauggcaucuuggua

SEQ ID NO: 187332 - RNA, 19 nt, Artificial Sequence
  Description of Artificial Sequence: Synthetic oligonucleotide
acacgaggugacugugaga

SEQ ID NO: 187333 - RNA, 19 nt, Artificial Sequence
  Description of Artificial Sequence: Synthetic oligonucleotide
uacuccguuuccaguccau

SEQ ID NO: 187334 - RNA, 19 nt, Artificial Sequence
  Description of Artificial Sequence: Synthetic oligonucleotide
agcaauucccuggguagau

SEQ ID NO: 187335 - RNA, 19 nt, Artificial Sequence
  Description of Artificial Sequence: Synthetic oligonucleotide
ggucuacccgcaucuggag

SEQ ID NO: 187336 - RNA, 19 nt, Artificial Sequence
  Description of Artificial Sequence: Synthetic oligonucleotide
acaaccgcacuaccaggua

SEQ ID NO: 187337 - RNA, 19 nt, Artificial Sequence
  Description of Artificial Sequence: Synthetic oligonucleotide
gacaaccgcacuaccaggu

SEQ ID NO: 187338 - RNA, 19 nt, Artificial Sequence
  Description of Artificial Sequence: Synthetic oligonucleotide
cucuaacccuacggagugg

SEQ ID NO: 187339 - RNA, 19 nt, Artificial Sequence
  Description of Artificial Sequence: Synthetic oligonucleotide
gcuuccguaauuccugaaa

SEQ ID NO: 187340 - RNA, 19 nt, Artificial Sequence
  Description of Artificial Sequence: Synthetic oligonucleotide
gacuccccguccacucugg

SEQ ID NO: 187341 - RNA, 19 nt, Artificial Sequence
  Description of Artificial Sequence: Synthetic oligonucleotide
cucacgaaccgagaagaaa

SEQ ID NO: 187342 - RNA, 19 nt, Artificial Sequence
  Description of Artificial Sequence: Synthetic oligonucleotide
gcagguuccuaugcuuacg

SEQ ID NO: 187343 - RNA, 19 nt, Artificial Sequence
  Description of Artificial Sequence: Synthetic oligonucleotide
ggaaggcuuggucaggucu

SEQ ID NO: 187344 - RNA, 19 nt, Artificial Sequence
  Description of Artificial Sequence: Synthetic oligonucleotide
agacauguacaaggcugga

SEQ ID NO: 187345 - RNA, 19 nt, Artificial Sequence
  Description of Artificial Sequence: Synthetic oligonucleotide
guuguggcacugcgcacuc

SEQ ID NO: 187346 - RNA, 19 nt, Artificial Sequence
  Description of Artificial Sequence: Synthetic oligonucleotide
gagagacgcacuugaugcu

SEQ ID NO: 187347 - RNA, 19 nt, Artificial Sequence
  Description of Artificial Sequence: Synthetic oligonucleotide
cccaaccuggccacguagg

SEQ ID NO: 187348 - RNA, 19 nt, Artificial Sequence
  Description of Artificial Sequence: Synthetic oligonucleotide
caaagaggcuaccuucugu

SEQ ID NO: 187349 - RNA, 19 nt, Artificial Sequence
  Description of Artificial Sequence: Synthetic oligonucleotide
cuccggcagucauucuccc

SEQ ID NO: 187350 - RNA, 19 nt, Artificial Sequence
  Description of Artificial Sequence: Synthetic oligonucleotide
aagaugggcuucggaccca

SEQ ID NO: 187351 - RNA, 19 nt, Artificial Sequence
  Description of Artificial Sequence: Synthetic oligonucleotide
aaggugcuucuuccccuua

SEQ ID NO: 187352 - RNA, 19 nt, Artificial Sequence
  Description of Artificial Sequence: Synthetic oligonucleotide
gucccacaucacucucccg

SEQ ID NO: 187353 - RNA, 19 nt, Artificial Sequence
  Description of Artificial Sequence: Synthetic oligonucleotide
cauggucguccaguucagc

SEQ ID NO: 187354 - RNA, 19 nt, Artificial Sequence
  Description of Artificial Sequence: Synthetic oligonucleotide
ccaaccuggccacguaggc

SEQ ID NO: 187355 - RNA, 19 nt, Artificial Sequence
  Description of Artificial Sequence: Synthetic oligonucleotide
agccacucgagggagccau

SEQ ID NO: 187356 - RNA, 19 nt, Artificial Sequence
  Description of Artificial Sequence: Synthetic oligonucleotide
gucucggagcaccgaguac

SEQ ID NO: 187357 - RNA, 19 nt, Artificial Sequence
  Description of Artificial Sequence: Synthetic oligonucleotide
aucacccaaccuggccacg

SEQ ID NO: 187358 - RNA, 19 nt, Artificial Sequence
  Description of Artificial Sequence: Synthetic oligonucleotide
gucuaggaggggcugcucu

SEQ ID NO: 187359 - RNA, 19 nt, Artificial Sequence
  Description of Artificial Sequence: Synthetic oligonucleotide
acccuacggagugggaugu

SEQ ID NO: 187360 - RNA, 19 nt, Artificial Sequence
  Description of Artificial Sequence: Synthetic oligonucleotide
gguguugcacacggucuag

SEQ ID NO: 187361 - RNA, 19 nt, Artificial Sequence
  Description of Artificial Sequence: Synthetic oligonucleotide
ggacucggaagcgguagag

SEQ ID NO: 187362 - RNA, 19 nt, Artificial Sequence
  Description of Artificial Sequence: Synthetic oligonucleotide
guagaucuucauggacaac

SEQ ID NO: 187363 - RNA, 19 nt, Artificial Sequence
  Description of Artificial Sequence: Synthetic oligonucleotide
gugugauauucugcagcac

SEQ ID NO: 187364 - RNA, 19 nt, Artificial Sequence
  Description of Artificial Sequence: Synthetic oligonucleotide
gaaguugcucuggccccac

SEQ ID NO: 187365 - RNA, 19 nt, Artificial Sequence
  Description of Artificial Sequence: Synthetic oligonucleotide
agugccgucuuggucucau

SEQ ID NO: 187366 - RNA, 19 nt, Artificial Sequence
  Description of Artificial Sequence: Synthetic oligonucleotide
agucuucuacugggcaggu

SEQ ID NO: 187367 - RNA, 19 nt, Artificial Sequence
  Description of Artificial Sequence: Synthetic oligonucleotide
ccuacggagugggaugugc

SEQ ID NO: 187368 - RNA, 19 nt, Artificial Sequence
  Description of Artificial Sequence: Synthetic oligonucleotide
agacgcacuugaugcucau

SEQ ID NO: 187369 - RNA, 19 nt, Artificial Sequence
  Description of Artificial Sequence: Synthetic oligonucleotide
ccuaugcuuacguggucuc

SEQ ID NO: 187370 - RNA, 19 nt, Artificial Sequence
  Description of Artificial Sequence: Synthetic oligonucleotide
aaguccuaucuugcaucuu

SEQ ID NO: 187371 - RNA, 19 nt, Artificial Sequence
  Description of Artificial Sequence: Synthetic oligonucleotide
cuuugucucauagcuuugu

SEQ ID NO: 187372 - RNA, 19 nt, Artificial Sequence
  Description of Artificial Sequence: Synthetic oligonucleotide
cacagggacuccccgucca

SEQ ID NO: 187373 - RNA, 19 nt, Artificial Sequence
  Description of Artificial Sequence: Synthetic oligonucleotide
ccaguucuagguguugcac

SEQ ID NO: 187374 - RNA, 19 nt, Artificial Sequence
  Description of Artificial Sequence: Synthetic oligonucleotide
ggacuccccguccacucug

SEQ ID NO: 187375 - RNA, 19 nt, Artificial Sequence
  Description of Artificial Sequence: Synthetic oligonucleotide
cuaacccuacggaguggga

SEQ ID NO: 187376 - RNA, 19 nt, Artificial Sequence
  Description of Artificial Sequence: Synthetic oligonucleotide
gaaugcccagcaauucccu

SEQ ID NO: 187377 - RNA, 19 nt, Artificial Sequence
  Description of Artificial Sequence: Synthetic oligonucleotide
acacggucuaggaggggcu

SEQ ID NO: 187378 - RNA, 19 nt, Artificial Sequence
  Description of Artificial Sequence: Synthetic oligonucleotide
cuacggagugggaugugcu

SEQ ID NO: 187379 - RNA, 19 nt, Artificial Sequence
  Description of Artificial Sequence: Synthetic oligonucleotide
cucccgaggccacugggaa

SEQ ID NO: 187380 - RNA, 19 nt, Artificial Sequence
  Description of Artificial Sequence: Synthetic oligonucleotide
ggggcacuggagauguuac

SEQ ID NO: 187381 - RNA, 19 nt, Artificial Sequence
  Description of Artificial Sequence: Synthetic oligonucleotide
gcucuacuaucuggaaggc

SEQ ID NO: 187382 - RNA, 19 nt, Artificial Sequence
  Description of Artificial Sequence: Synthetic oligonucleotide
cuacgggccacugucucaa

SEQ ID NO: 187383 - RNA, 19 nt, Artificial Sequence
  Description of Artificial Sequence: Synthetic oligonucleotide
gucguccaguucagcacug

SEQ ID NO: 187384 - RNA, 19 nt, Artificial Sequence
  Description of Artificial Sequence: Synthetic oligonucleotide
cacggucuaggaggggcug

SEQ ID NO: 187385 - RNA, 19 nt, Artificial Sequence
  Description of Artificial Sequence: Synthetic oligonucleotide
cauagacugcgaagucucu

SEQ ID NO: 187386 - RNA, 19 nt, Artificial Sequence
  Description of Artificial Sequence: Synthetic oligonucleotide
guaggagugggaggagcaa

SEQ ID NO: 187387 - RNA, 19 nt, Artificial Sequence
  Description of Artificial Sequence: Synthetic oligonucleotide
cauggacucggaagcggua

SEQ ID NO: 187388 - RNA, 19 nt, Artificial Sequence
  Description of Artificial Sequence: Synthetic oligonucleotide
acuccguuuccaguccaua

SEQ ID NO: 187389 - RNA, 19 nt, Artificial Sequence
  Description of Artificial Sequence: Synthetic oligonucleotide
guugcgagugggugacugu

SEQ ID NO: 187390 - RNA, 19 nt, Artificial Sequence
  Description of Artificial Sequence: Synthetic oligonucleotide
guguaacuugcaguaugua

SEQ ID NO: 187391 - RNA, 19 nt, Artificial Sequence
  Description of Artificial Sequence: Synthetic oligonucleotide
gugcuugaaccaagagguc

SEQ ID NO: 187392 - RNA, 19 nt, Artificial Sequence
  Description of Artificial Sequence: Synthetic oligonucleotide
aggccagcaccuaguaaaa

SEQ ID NO: 187393 - RNA, 19 nt, Artificial Sequence
  Description of Artificial Sequence: Synthetic oligonucleotide
auacgggcaucagccugcu

SEQ ID NO: 187394 - RNA, 19 nt, Artificial Sequence
  Description of Artificial Sequence: Synthetic oligonucleotide
gaugggcuucggacccaug

SEQ ID NO: 187395 - RNA, 19 nt, Artificial Sequence
  Description of Artificial Sequence: Synthetic oligonucleotide
agaugggcuucggacccau

SEQ ID NO: 187396 - RNA, 19 nt, Artificial Sequence
  Description of Artificial Sequence: Synthetic oligonucleotide
gcuacgggccacugucuca

SEQ ID NO: 187397 - RNA, 19 nt, Artificial Sequence
  Description of Artificial Sequence: Synthetic oligonucleotide
acguggucucuuccccaaa

SEQ ID NO: 187398 - RNA, 19 nt, Artificial Sequence
  Description of Artificial Sequence: Synthetic oligonucleotide
ccuucugucccacaucacu

SEQ ID NO: 187399 - RNA, 19 nt, Artificial Sequence
  Description of Artificial Sequence: Synthetic oligonucleotide
uagccacucgagggagcca

SEQ ID NO: 187400 - RNA, 19 nt, Artificial Sequence
  Description of Artificial Sequence: Synthetic oligonucleotide
cuccccguccacucuggaa

SEQ ID NO: 187401 - RNA, 19 nt, Artificial Sequence
  Description of Artificial Sequence: Synthetic oligonucleotide
ggcuucggacccauggcuc

SEQ ID NO: 187402 - RNA, 19 nt, Artificial Sequence
  Description of Artificial Sequence: Synthetic oligonucleotide
gcauggucguccaguucag

SEQ ID NO: 187403 - RNA, 19 nt, Artificial Sequence
  Description of Artificial Sequence: Synthetic oligonucleotide
cuggauagccucagauuuu

SEQ ID NO: 187404 - RNA, 19 nt, Artificial Sequence
  Description of Artificial Sequence: Synthetic oligonucleotide
cacugggaagccucauagu

SEQ ID NO: 187405 - RNA, 19 nt, Artificial Sequence
  Description of Artificial Sequence: Synthetic oligonucleotide
uacgggccacugucucaaa

SEQ ID NO: 187406 - RNA, 19 nt, Artificial Sequence
  Description of Artificial Sequence: Synthetic oligonucleotide
cucuacuaucuggaaggcu

SEQ ID NO: 187407 - RNA, 19 nt, Artificial Sequence
  Description of Artificial Sequence: Synthetic oligonucleotide
agacugccugcaacaugca

SEQ ID NO: 187408 - RNA, 19 nt, Artificial Sequence
  Description of Artificial Sequence: Synthetic oligonucleotide
cugugcacacccucaggau

SEQ ID NO: 187409 - RNA, 19 nt, Artificial Sequence
  Description of Artificial Sequence: Synthetic oligonucleotide
ccgucccagaggcugcccc

SEQ ID NO: 187410 - RNA, 19 nt, Artificial Sequence
  Description of Artificial Sequence: Synthetic oligonucleotide
cuaugcuuacguggucucu

SEQ ID NO: 187411 - RNA, 19 nt, Artificial Sequence
  Description of Artificial Sequence: Synthetic oligonucleotide
gcgcacucaaagaggcuac

SEQ ID NO: 187412 - RNA, 19 nt, Artificial Sequence
  Description of Artificial Sequence: Synthetic oligonucleotide
cgcacauuuauugaagggu

SEQ ID NO: 187413 - RNA, 19 nt, Artificial Sequence
  Description of Artificial Sequence: Synthetic oligonucleotide
gcuucggacccauggcucu

SEQ ID NO: 187414 - RNA, 19 nt, Artificial Sequence
  Description of Artificial Sequence: Synthetic oligonucleotide
ccacucgagggagccauug

SEQ ID NO: 187415 - RNA, 19 nt, Artificial Sequence
  Description of Artificial Sequence: Synthetic oligonucleotide
cguguaacuugcaguaugu

SEQ ID NO: 187416 - RNA, 19 nt, Artificial Sequence
  Description of Artificial Sequence: Synthetic oligonucleotide
uacccgcaucuggaguuuu

SEQ ID NO: 187417 - RNA, 19 nt, Artificial Sequence
  Description of Artificial Sequence: Synthetic oligonucleotide
caggaacgucagcucugca

SEQ ID NO: 187418 - RNA, 19 nt, Artificial Sequence
  Description of Artificial Sequence: Synthetic oligonucleotide
caaggugcuucuuccccuu

SEQ ID NO: 187419 - RNA, 19 nt, Artificial Sequence
  Description of Artificial Sequence: Synthetic oligonucleotide
cgaaccgagaagaaaguuu

SEQ ID NO: 187420 - RNA, 19 nt, Artificial Sequence
  Description of Artificial Sequence: Synthetic oligonucleotide
ccaccaucccugucuuguc

SEQ ID NO: 187421 - RNA, 19 nt, Artificial Sequence
  Description of Artificial Sequence: Synthetic oligonucleotide
ggucaccuguguaggugca

SEQ ID NO: 187422 - RNA, 19 nt, Artificial Sequence
  Description of Artificial Sequence: Synthetic oligonucleotide
gcaccgaccacauggccuu

SEQ ID NO: 187423 - RNA, 19 nt, Artificial Sequence
  Description of Artificial Sequence: Synthetic oligonucleotide
ggacucaacguguccucau

SEQ ID NO: 187424 - RNA, 19 nt, Artificial Sequence
  Description of Artificial Sequence: Synthetic oligonucleotide
gcacacggucuaggagggg

SEQ ID NO: 187425 - RNA, 19 nt, Artificial Sequence
  Description of Artificial Sequence: Synthetic oligonucleotide
ccauggacucggaagcggu

SEQ ID NO: 187426 - RNA, 19 nt, Artificial Sequence
  Description of Artificial Sequence: Synthetic oligonucleotide
ggagcaguugcgagugggu

SEQ ID NO: 187427 - RNA, 19 nt, Artificial Sequence
  Description of Artificial Sequence: Synthetic oligonucleotide
cugcgcacucaaagaggcu

SEQ ID NO: 187428 - RNA, 19 nt, Artificial Sequence
  Description of Artificial Sequence: Synthetic oligonucleotide
gcucacgaaccgagaagaa

SEQ ID NO: 187429 - RNA, 19 nt, Artificial Sequence
  Description of Artificial Sequence: Synthetic oligonucleotide
caccgaccacauggccuug

SEQ ID NO: 187430 - RNA, 19 nt, Artificial Sequence
  Description of Artificial Sequence: Synthetic oligonucleotide
cugugacauggugugugau

SEQ ID NO: 187431 - RNA, 19 nt, Artificial Sequence
  Description of Artificial Sequence: Synthetic oligonucleotide
ccgcacuaccagguacccc

SEQ ID NO: 187432 - RNA, 19 nt, Artificial Sequence
  Description of Artificial Sequence: Synthetic oligonucleotide
gugccgucuuggucucaua

SEQ ID NO: 187433 - RNA, 19 nt, Artificial Sequence
  Description of Artificial Sequence: Synthetic oligonucleotide
gucuuagcacugagugguu

SEQ ID NO: 187434 - RNA, 19 nt, Artificial Sequence
  Description of Artificial Sequence: Synthetic oligonucleotide
gugaaccgucccagaggcu

SEQ ID NO: 187435 - RNA, 19 nt, Artificial Sequence
  Description of Artificial Sequence: Synthetic oligonucleotide
ggagugggaugugcugcua

SEQ ID NO: 187436 - RNA, 19 nt, Artificial Sequence
  Description of Artificial Sequence: Synthetic oligonucleotide
ccagugggugacagcgucu

SEQ ID NO: 187437 - RNA, 19 nt, Artificial Sequence
  Description of Artificial Sequence: Synthetic oligonucleotide
cuacccgcaucuggaguuu

SEQ ID NO: 187438 - RNA, 19 nt, Artificial Sequence
  Description of Artificial Sequence: Synthetic oligonucleotide
cuucggacccauggcucuu

SEQ ID NO: 187439 - RNA, 19 nt, Artificial Sequence
  Description of Artificial Sequence: Synthetic oligonucleotide
cccuacggagugggaugug

SEQ ID NO: 187440 - RNA, 19 nt, Artificial Sequence
  Description of Artificial Sequence: Synthetic oligonucleotide
cgagugggugacugugugu

SEQ ID NO: 187441 - RNA, 19 nt, Artificial Sequence
  Description of Artificial Sequence: Synthetic oligonucleotide
cagugccgucuuggucuca

SEQ ID NO: 187442 - RNA, 19 nt, Artificial Sequence
  Description of Artificial Sequence: Synthetic oligonucleotide
cgcuuccguaauuccugaa

SEQ ID NO: 187443 - RNA, 19 nt, Artificial Sequence
  Description of Artificial Sequence: Synthetic oligonucleotide
ccgaccacauggccuuggu

SEQ ID NO: 187444 - RNA, 19 nt, Artificial Sequence
  Description of Artificial Sequence: Synthetic oligonucleotide
caguugcgagugggugacu

SEQ ID NO: 187445 - RNA, 19 nt, Artificial Sequence
  Description of Artificial Sequence: Synthetic oligonucleotide
cccuagccaccagaagguu

SEQ ID NO: 187446 - RNA, 19 nt, Artificial Sequence
  Description of Artificial Sequence: Synthetic oligonucleotide
aaaauuuggguugauaacc

SEQ ID NO: 187447 - RNA, 19 nt, Artificial Sequence
  Description of Artificial Sequence: Synthetic oligonucleotide
aagucgucgucacagaugg

SEQ ID NO: 187448 - RNA, 19 nt, Artificial Sequence
  Description of Artificial Sequence: Synthetic oligonucleotide
acucguaccucuuugagac

SEQ ID NO: 187449 - RNA, 19 nt, Artificial Sequence
  Description of Artificial Sequence: Synthetic oligonucleotide
uauaccuagcaacuguugg

SEQ ID NO: 187450 - RNA, 19 nt, Artificial Sequence
  Description of Artificial Sequence: Synthetic oligonucleotide
ucaauggaccuguagaggg

SEQ ID NO: 187451 - RNA, 19 nt, Artificial Sequence
  Description of Artificial Sequence: Synthetic oligonucleotide
uuuuagacgcacacgagcc

SEQ ID NO: 187452 - RNA, 19 nt, Artificial Sequence
  Description of Artificial Sequence: Synthetic oligonucleotide
auaccuagcaacuguuggc

SEQ ID NO: 187453 - RNA, 19 nt, Artificial Sequence
  Description of Artificial Sequence: Synthetic oligonucleotide
guugagguggaguaaagag

SEQ ID NO: 187454 - RNA, 19 nt, Artificial Sequence
  Description of Artificial Sequence: Synthetic oligonucleotide
guugauaaccaccugaaga

SEQ ID NO: 187455 - RNA, 19 nt, Artificial Sequence
  Description of Artificial Sequence: Synthetic oligonucleotide
uauaggggagguugcaucg

SEQ ID NO: 187456 - RNA, 19 nt, Artificial Sequence
  Description of Artificial Sequence: Synthetic oligonucleotide
gaccaaguugccuacaggc

SEQ ID NO: 187457 - RNA, 19 nt, Artificial Sequence
  Description of Artificial Sequence: Synthetic oligonucleotide
agagcaccgaacuucacuc

SEQ ID NO: 187458 - RNA, 19 nt, Artificial Sequence
  Description of Artificial Sequence: Synthetic oligonucleotide
cucauaacggcuucggccc

SEQ ID NO: 187459 - RNA, 19 nt, Artificial Sequence
  Description of Artificial Sequence: Synthetic oligonucleotide
auccguagugcacaggugg

SEQ ID NO: 187460 - RNA, 19 nt, Artificial Sequence
  Description of Artificial Sequence: Synthetic oligonucleotide
uguaccaacgccgagugca

SEQ ID NO: 187461 - RNA, 19 nt, Artificial Sequence
  Description of Artificial Sequence: Synthetic oligonucleotide
ucguacaccggcauccugg

SEQ ID NO: 187462 - RNA, 19 nt, Artificial Sequence
  Description of Artificial Sequence: Synthetic oligonucleotide
uguucgaacccaaucccag

SEQ ID NO: 187463 - RNA, 19 nt, Artificial Sequence
  Description of Artificial Sequence: Synthetic oligonucleotide
ucauccguagugcacaggu

SEQ ID NO: 187464 - RNA, 19 nt, Artificial Sequence
  Description of Artificial Sequence: Synthetic oligonucleotide
ucguauuugcaauugcacu

SEQ ID NO: 187465 - RNA, 19 nt, Artificial Sequence
  Description of Artificial Sequence: Synthetic oligonucleotide
cugguuaugggaacagucc

SEQ ID NO: 187466 - RNA, 19 nt, Artificial Sequence
  Description of Artificial Sequence: Synthetic oligonucleotide
aaugacuggacuagcaaga

SEQ ID NO: 187467 - RNA, 19 nt, Artificial Sequence
  Description of Artificial Sequence: Synthetic oligonucleotide
acgcacgccacucaucacc

SEQ ID NO: 187468 - RNA, 19 nt, Artificial Sequence
  Description of Artificial Sequence: Synthetic oligonucleotide
acguuguauuuccacacgg

SEQ ID NO: 187469 - RNA, 19 nt, Artificial Sequence
  Description of Artificial Sequence: Synthetic oligonucleotide
aacagaugacuccugcggu

SEQ ID NO: 187470 - RNA, 19 nt, Artificial Sequence
  Description of Artificial Sequence: Synthetic oligonucleotide
cacucaaguggauagcacc

SEQ ID NO: 187471 - RNA, 19 nt, Artificial Sequence
  Description of Artificial Sequence: Synthetic oligonucleotide
uaugaggcuguucgaaccc

SEQ ID NO: 187472 - RNA, 19 nt, Artificial Sequence
  Description of Artificial Sequence: Synthetic oligonucleotide
uuauaccuagcaacuguug

SEQ ID NO: 187473 - RNA, 19 nt, Artificial Sequence
  Description of Artificial Sequence: Synthetic oligonucleotide
cuagcaagagugugaaccc

SEQ ID NO: 187474 - RNA, 19 nt, Artificial Sequence
  Description of Artificial Sequence: Synthetic oligonucleotide
gacucgacccucauaacgg

SEQ ID NO: 187475 - RNA, 19 nt, Artificial Sequence
  Description of Artificial Sequence: Synthetic oligonucleotide
uuagucuccacuccaguau

SEQ ID NO: 187476 - RNA, 19 nt, Artificial Sequence
  Description of Artificial Sequence: Synthetic oligonucleotide
uuuaugaggcuguucgaac

SEQ ID NO: 187477 - RNA, 19 nt, Artificial Sequence
  Description of Artificial Sequence: Synthetic oligonucleotide
aucguauuugcaauugcac

SEQ ID NO: 187478 - RNA, 19 nt, Artificial Sequence
  Description of Artificial Sequence: Synthetic oligonucleotide
cauguauccuugaacgcag

SEQ ID NO: 187479 - RNA, 19 nt, Artificial Sequence
  Description of Artificial Sequence: Synthetic oligonucleotide
uggacuagcaagaguguga

SEQ ID NO: 187480 - RNA, 19 nt, Artificial Sequence
  Description of Artificial Sequence: Synthetic oligonucleotide
ugguuaugggaacaguccu

SEQ ID NO: 187481 - RNA, 19 nt, Artificial Sequence
  Description of Artificial Sequence: Synthetic oligonucleotide
aaauuuggguugauaacca

SEQ ID NO: 187482 - RNA, 19 nt, Artificial Sequence
  Description of Artificial Sequence: Synthetic oligonucleotide
uacaccggcauccugguua

SEQ ID NO: 187483 - RNA, 19 nt, Artificial Sequence
  Description of Artificial Sequence: Synthetic oligonucleotide
uguagcgugaagucgucgu

SEQ ID NO: 187484 - RNA, 19 nt, Artificial Sequence
  Description of Artificial Sequence: Synthetic oligonucleotide
augacuccugcggugaagc

SEQ ID NO: 187485 - RNA, 19 nt, Artificial Sequence
  Description of Artificial Sequence: Synthetic oligonucleotide
gaauggggugcauguaucc

SEQ ID NO: 187486 - RNA, 19 nt, Artificial Sequence
  Description of Artificial Sequence: Synthetic oligonucleotide
uguuugucauccguagugc

SEQ ID NO: 187487 - RNA, 19 nt, Artificial Sequence
  Description of Artificial Sequence: Synthetic oligonucleotide
uccggcggggaucagaaac

SEQ ID NO: 187488 - RNA, 19 nt, Artificial Sequence
  Description of Artificial Sequence: Synthetic oligonucleotide
cuuggagggacacuuccag

SEQ ID NO: 187489 - RNA, 19 nt, Artificial Sequence
  Description of Artificial Sequence: Synthetic oligonucleotide
gucgugucuguagagaucc

SEQ ID NO: 187490 - RNA, 19 nt, Artificial Sequence
  Description of Artificial Sequence: Synthetic oligonucleotide
uuggccaaagguacugaca

SEQ ID NO: 187491 - RNA, 19 nt, Artificial Sequence
  Description of Artificial Sequence: Synthetic oligonucleotide
gguacagucacuguuuccc

SEQ ID NO: 187492 - RNA, 19 nt, Artificial Sequence
  Description of Artificial Sequence: Synthetic oligonucleotide
gauucuccaugcuuggcca

SEQ ID NO: 187493 - RNA, 19 nt, Artificial Sequence
  Description of Artificial Sequence: Synthetic oligonucleotide
cuuauaugugaccccugag

SEQ ID NO: 187494 - RNA, 19 nt, Artificial Sequence
  Description of Artificial Sequence: Synthetic oligonucleotide
acucgucauggguacaguc

SEQ ID NO: 187495 - RNA, 19 nt, Artificial Sequence
  Description of Artificial Sequence: Synthetic oligonucleotide
uuuagacgcacacgagccu

SEQ ID NO: 187496 - RNA, 19 nt, Artificial Sequence
  Description of Artificial Sequence: Synthetic oligonucleotide
ucuuugagacauccuccug

SEQ ID NO: 187497 - RNA, 19 nt, Artificial Sequence
  Description of Artificial Sequence: Synthetic oligonucleotide
uguuuaugaggcuguucga

SEQ ID NO: 187498 - RNA, 19 nt, Artificial Sequence
  Description of Artificial Sequence: Synthetic oligonucleotide
ggcggaacuagccaggcag

SEQ ID NO: 187499 - RNA, 19 nt, Artificial Sequence
  Description of Artificial Sequence: Synthetic oligonucleotide
aggcuguucgaacccaauc

SEQ ID NO: 187500 - RNA, 19 nt, Artificial Sequence
  Description of Artificial Sequence: Synthetic oligonucleotide
ucuuccuagguuguggauc

SEQ ID NO: 187501 - RNA, 19 nt, Artificial Sequence
  Description of Artificial Sequence: Synthetic oligonucleotide
acacucguaccucuuugag

SEQ ID NO: 187502 - RNA, 19 nt, Artificial Sequence
  Description of Artificial Sequence: Synthetic oligonucleotide
gucggcucuuccuagguug

SEQ ID NO: 187503 - RNA, 19 nt, Artificial Sequence
  Description of Artificial Sequence: Synthetic oligonucleotide
caucguauuugcaauugca

SEQ ID NO: 187504 - RNA, 19 nt, Artificial Sequence
  Description of Artificial Sequence: Synthetic oligonucleotide
ggcuguucgaacccaaucc

SEQ ID NO: 187505 - RNA, 19 nt, Artificial Sequence
  Description of Artificial Sequence: Synthetic oligonucleotide
acagaugacuccugcggug

SEQ ID NO: 187506 - RNA, 19 nt, Artificial Sequence
  Description of Artificial Sequence: Synthetic oligonucleotide
aauggcgcccagccuuggg

SEQ ID NO: 187507 - RNA, 19 nt, Artificial Sequence
  Description of Artificial Sequence: Synthetic oligonucleotide
ucggagucgcaccucuucc

SEQ ID NO: 187508 - RNA, 19 nt, Artificial Sequence
  Description of Artificial Sequence: Synthetic oligonucleotide
cacguuguauuuccacacg

SEQ ID NO: 187509 - RNA, 19 nt, Artificial Sequence
  Description of Artificial Sequence: Synthetic oligonucleotide
ccucauaacggcuucggcc

SEQ ID NO: 187510 - RNA, 19 nt, Artificial Sequence
  Description of Artificial Sequence: Synthetic oligonucleotide
uagcgcucaaaccuccugu

SEQ ID NO: 187511 - RNA, 19 nt, Artificial Sequence
  Description of Artificial Sequence: Synthetic oligonucleotide
aaucggagcagacgccggu

SEQ ID NO: 187512 - RNA, 19 nt, Artificial Sequence
  Description of Artificial Sequence: Synthetic oligonucleotide
cucgacucgacccucauaa

SEQ ID NO: 187513 - RNA, 19 nt, Artificial Sequence
  Description of Artificial Sequence: Synthetic oligonucleotide
gaacuagccaggcaguucu

SEQ ID NO: 187514 - RNA, 19 nt, Artificial Sequence
  Description of Artificial Sequence: Synthetic oligonucleotide
cacgcuaccccaugcagac

SEQ ID NO: 187515 - RNA, 19 nt, Artificial Sequence
  Description of Artificial Sequence: Synthetic oligonucleotide
ucaccgaaugacuggacua

SEQ ID NO: 187516 - RNA, 19 nt, Artificial Sequence
  Description of Artificial Sequence: Synthetic oligonucleotide
ugacagucaaugucguguc

SEQ ID NO: 187517 - RNA, 19 nt, Artificial Sequence
  Description of Artificial Sequence: Synthetic oligonucleotide
guauaggggagguugcauc

SEQ ID NO: 187518 - RNA, 19 nt, Artificial Sequence
  Description of Artificial Sequence: Synthetic oligonucleotide
ucccaugcgagcaccacuc

SEQ ID NO: 187519 - RNA, 19 nt, Artificial Sequence
  Description of Artificial Sequence: Synthetic oligonucleotide
gucgguccucaauauaagc

SEQ ID NO: 187520 - RNA, 19 nt, Artificial Sequence
  Description of Artificial Sequence: Synthetic oligonucleotide
ucaaguggauagcacccau

SEQ ID NO: 187521 - RNA, 19 nt, Artificial Sequence
  Description of Artificial Sequence: Synthetic oligonucleotide
aguuguguacccagaugcg

SEQ ID NO: 187522 - RNA, 19 nt, Artificial Sequence
  Description of Artificial Sequence: Synthetic oligonucleotide
aagucggcucuuccuaggu

SEQ ID NO: 187523 - RNA, 19 nt, Artificial Sequence
  Description of Artificial Sequence: Synthetic oligonucleotide
caaaccuccuguuggcuuc

SEQ ID NO: 187524 - RNA, 19 nt, Artificial Sequence
  Description of Artificial Sequence: Synthetic oligonucleotide
augucgugucuguagagau

SEQ ID NO: 187525 - RNA, 19 nt, Artificial Sequence
  Description of Artificial Sequence: Synthetic oligonucleotide
ggugguauuucagacaauc

SEQ ID NO: 187526 - RNA, 19 nt, Artificial Sequence
  Description of Artificial Sequence: Synthetic oligonucleotide
ucgaacccaaucccagcug

SEQ ID NO: 187527 - RNA, 19 nt, Artificial Sequence
  Description of Artificial Sequence: Synthetic oligonucleotide
uccaaccagauccggccug

SEQ ID NO: 187528 - RNA, 19 nt, Artificial Sequence
  Description of Artificial Sequence: Synthetic oligonucleotide
gcucagauuguccaaccag

SEQ ID NO: 187529 - RNA, 19 nt, Artificial Sequence
  Description of Artificial Sequence: Synthetic oligonucleotide
uccguagugcacaggugga

SEQ ID NO: 187530 - RNA, 19 nt, Artificial Sequence
  Description of Artificial Sequence: Synthetic oligonucleotide
agcgggcggaacuagccag

SEQ ID NO: 187531 - RNA, 19 nt, Artificial Sequence
  Description of Artificial Sequence: Synthetic oligonucleotide
cacccuuuuagacgcacac

SEQ ID NO: 187532 - RNA, 19 nt, Artificial Sequence
  Description of Artificial Sequence: Synthetic oligonucleotide
caaguugccuacaggccac

SEQ ID NO: 187533 - RNA, 19 nt, Artificial Sequence
  Description of Artificial Sequence: Synthetic oligonucleotide
cucucgacacaccacgcug

SEQ ID NO: 187534 - RNA, 19 nt, Artificial Sequence
  Description of Artificial Sequence: Synthetic oligonucleotide
accgaaugacuggacuagc

SEQ ID NO: 187535 - RNA, 19 nt, Artificial Sequence
  Description of Artificial Sequence: Synthetic oligonucleotide
ccaagaauggcgcccagcc

SEQ ID NO: 187536 - RNA, 19 nt, Artificial Sequence
  Description of Artificial Sequence: Synthetic oligonucleotide
ugucauccguagugcacag

SEQ ID NO: 187537 - RNA, 19 nt, Artificial Sequence
  Description of Artificial Sequence: Synthetic oligonucleotide
acccaaucccagcuggcag

SEQ ID NO: 187538 - RNA, 19 nt, Artificial Sequence
  Description of Artificial Sequence: Synthetic oligonucleotide
uuagacgcacacgagccuc

SEQ ID NO: 187539 - RNA, 19 nt, Artificial Sequence
  Description of Artificial Sequence: Synthetic oligonucleotide
guauuugcaauugcacuuc

SEQ ID NO: 187540 - RNA, 19 nt, Artificial Sequence
  Description of Artificial Sequence: Synthetic oligonucleotide
agcaagagugugaacccuc

SEQ ID NO: 187541 - RNA, 19 nt, Artificial Sequence
  Description of Artificial Sequence: Synthetic oligonucleotide
ggaucuuagucuccacucc

SEQ ID NO: 187542 - RNA, 19 nt, Artificial Sequence
  Description of Artificial Sequence: Synthetic oligonucleotide
uuccacucgucauggguac

SEQ ID NO: 187543 - RNA, 19 nt, Artificial Sequence
  Description of Artificial Sequence: Synthetic oligonucleotide
gcgaccaaccaucuggaag

SEQ ID NO: 187544 - RNA, 19 nt, Artificial Sequence
  Description of Artificial Sequence: Synthetic oligonucleotide
cgaccaaccaucuggaagc

SEQ ID NO: 187545 - RNA, 19 nt, Artificial Sequence
  Description of Artificial Sequence: Synthetic oligonucleotide
agggguucuugugguaagc

SEQ ID NO: 187546 - RNA, 19 nt, Artificial Sequence
  Description of Artificial Sequence: Synthetic oligonucleotide
uagacgcacacgagccucc

SEQ ID NO: 187547 - RNA, 19 nt, Artificial Sequence
  Description of Artificial Sequence: Synthetic oligonucleotide
gaaaggguggugguauuuc

SEQ ID NO: 187548 - RNA, 19 nt, Artificial Sequence
  Description of Artificial Sequence: Synthetic oligonucleotide
augacuggacuagcaagag

SEQ ID NO: 187549 - RNA, 19 nt, Artificial Sequence
  Description of Artificial Sequence: Synthetic oligonucleotide
ugugcaacgcacgccacuc

SEQ ID NO: 187550 - RNA, 19 nt, Artificial Sequence
  Description of Artificial Sequence: Synthetic oligonucleotide
ugacuccugcggugaagcg

SEQ ID NO: 187551 - RNA, 19 nt, Artificial Sequence
  Description of Artificial Sequence: Synthetic oligonucleotide
agccuguagcgugaagucg

SEQ ID NO: 187552 - RNA, 19 nt, Artificial Sequence
  Description of Artificial Sequence: Synthetic oligonucleotide
gcaccacccuuuuagacgc

SEQ ID NO: 187553 - RNA, 19 nt, Artificial Sequence
  Description of Artificial Sequence: Synthetic oligonucleotide
cacacgcuaccccaugcag

SEQ ID NO: 187554 - RNA, 19 nt, Artificial Sequence
  Description of Artificial Sequence: Synthetic oligonucleotide
accaacgccgagugcagca

SEQ ID NO: 187555 - RNA, 19 nt, Artificial Sequence
  Description of Artificial Sequence: Synthetic oligonucleotide
ugcaacgcacgccacucau

SEQ ID NO: 187556 - RNA, 19 nt, Artificial Sequence
  Description of Artificial Sequence: Synthetic oligonucleotide
auaccgcagaccacauggc

SEQ ID NO: 187557 - RNA, 19 nt, Artificial Sequence
  Description of Artificial Sequence: Synthetic oligonucleotide
agcucagauuguccaacca

SEQ ID NO: 187558 - RNA, 19 nt, Artificial Sequence
  Description of Artificial Sequence: Synthetic oligonucleotide
guggaguaaagagggccgg

SEQ ID NO: 187559 - RNA, 19 nt, Artificial Sequence
  Description of Artificial Sequence: Synthetic oligonucleotide
caccgaaugacuggacuag

SEQ ID NO: 187560 - RNA, 19 nt, Artificial Sequence
  Description of Artificial Sequence: Synthetic oligonucleotide
caacgcacgccacucauca

SEQ ID NO: 187561 - RNA, 19 nt, Artificial Sequence
  Description of Artificial Sequence: Synthetic oligonucleotide
cuaaagucggcucuuccua

SEQ ID NO: 187562 - RNA, 19 nt, Artificial Sequence
  Description of Artificial Sequence: Synthetic oligonucleotide
ucgacccucauaacggcuu

SEQ ID NO: 187563 - RNA, 19 nt, Artificial Sequence
  Description of Artificial Sequence: Synthetic oligonucleotide
aaacuggcuuuguggcccu

SEQ ID NO: 187564 - RNA, 19 nt, Artificial Sequence
  Description of Artificial Sequence: Synthetic oligonucleotide
uguagugggccugcugaca

SEQ ID NO: 187565 - RNA, 19 nt, Artificial Sequence
  Description of Artificial Sequence: Synthetic oligonucleotide
guacccagaugcgaugacc

SEQ ID NO: 187566 - RNA, 19 nt, Artificial Sequence
  Description of Artificial Sequence: Synthetic oligonucleotide
gagaaucggagcagacgcc

SEQ ID NO: 187567 - RNA, 19 nt, Artificial Sequence
  Description of Artificial Sequence: Synthetic oligonucleotide
agaugcgaugaccaucgua

SEQ ID NO: 187568 - RNA, 19 nt, Artificial Sequence
  Description of Artificial Sequence: Synthetic oligonucleotide
ucgucacagauggugcccc

SEQ ID NO: 187569 - RNA, 19 nt, Artificial Sequence
  Description of Artificial Sequence: Synthetic oligonucleotide
guuguguacccagaugcga

SEQ ID NO: 187570 - RNA, 19 nt, Artificial Sequence
  Description of Artificial Sequence: Synthetic oligonucleotide
uggcccgauagaacuccag

SEQ ID NO: 187571 - RNA, 19 nt, Artificial Sequence
  Description of Artificial Sequence: Synthetic oligonucleotide
aggguagcgcucaaaccuc

SEQ ID NO: 187572 - RNA, 19 nt, Artificial Sequence
  Description of Artificial Sequence: Synthetic oligonucleotide
accacccuuuuagacgcac

SEQ ID NO: 187573 - RNA, 19 nt, Artificial Sequence
  Description of Artificial Sequence: Synthetic oligonucleotide
guaaagucacucucugcua

SEQ ID NO: 187574 - RNA, 19 nt, Artificial Sequence
  Description of Artificial Sequence: Synthetic oligonucleotide
cauuggcccgauagaacuc

SEQ ID NO: 187575 - RNA, 19 nt, Artificial Sequence
  Description of Artificial Sequence: Synthetic oligonucleotide
agucggaucuuagucucca

SEQ ID NO: 187576 - RNA, 19 nt, Artificial Sequence
  Description of Artificial Sequence: Synthetic oligonucleotide
gguggugguauuucagaca

SEQ ID NO: 187577 - RNA, 19 nt, Artificial Sequence
  Description of Artificial Sequence: Synthetic oligonucleotide
uagcaagagugugaacccu

SEQ ID NO: 187578 - RNA, 19 nt, Artificial Sequence
  Description of Artificial Sequence: Synthetic oligonucleotide
cuguucgaacccaauccca

SEQ ID NO: 187579 - RNA, 19 nt, Artificial Sequence
  Description of Artificial Sequence: Synthetic oligonucleotide
aguauaggggagguugcau

SEQ ID NO: 187580 - RNA, 19 nt, Artificial Sequence
  Description of Artificial Sequence: Synthetic oligonucleotide
cacucguaccucuuugaga

SEQ ID NO: 187581 - RNA, 19 nt, Artificial Sequence
  Description of Artificial Sequence: Synthetic oligonucleotide
acccugugcaacgcacgcc

SEQ ID NO: 187582 - RNA, 19 nt, Artificial Sequence
  Description of Artificial Sequence: Synthetic oligonucleotide
agaccgaaggagugcugcu

SEQ ID NO: 187583 - RNA, 19 nt, Artificial Sequence
  Description of Artificial Sequence: Synthetic oligonucleotide
acuugcgaccaaccaucug

SEQ ID NO: 187584 - RNA, 19 nt, Artificial Sequence
  Description of Artificial Sequence: Synthetic oligonucleotide
guagcgugaagucgucguc

SEQ ID NO: 187585 - RNA, 19 nt, Artificial Sequence
  Description of Artificial Sequence: Synthetic oligonucleotide
ggccauauuuggcacuaug

SEQ ID NO: 187586 - RNA, 19 nt, Artificial Sequence
  Description of Artificial Sequence: Synthetic oligonucleotide
cucagucggaucuuagucu

SEQ ID NO: 187587 - RNA, 19 nt, Artificial Sequence
  Description of Artificial Sequence: Synthetic oligonucleotide
ucuucggccuggugaugug

SEQ ID NO: 187588 - RNA, 19 nt, Artificial Sequence
  Description of Artificial Sequence: Synthetic oligonucleotide
aucguacaccggcauccug

SEQ ID NO: 187589 - RNA, 19 nt, Artificial Sequence
  Description of Artificial Sequence: Synthetic oligonucleotide
cgacucgacccucauaacg

SEQ ID NO: 187590 - RNA, 19 nt, Artificial Sequence
  Description of Artificial Sequence: Synthetic oligonucleotide
cagucggaucuuagucucc

SEQ ID NO: 187591 - RNA, 19 nt, Artificial Sequence
  Description of Artificial Sequence: Synthetic oligonucleotide
guugcaucguacaccggca

SEQ ID NO: 187592 - RNA, 19 nt, Artificial Sequence
  Description of Artificial Sequence: Synthetic oligonucleotide
uuggcccgauagaacucca

SEQ ID NO: 187593 - RNA, 19 nt, Artificial Sequence
  Description of Artificial Sequence: Synthetic oligonucleotide
uuuggcacuauggguccaa

SEQ ID NO: 187594 - RNA, 19 nt, Artificial Sequence
  Description of Artificial Sequence: Synthetic oligonucleotide
gacuagcaagagugugaac

SEQ ID NO: 187595 - RNA, 19 nt, Artificial Sequence
  Description of Artificial Sequence: Synthetic oligonucleotide
ugccccgguaccccuauuu

SEQ ID NO: 187596 - RNA, 19 nt, Artificial Sequence
  Description of Artificial Sequence: Synthetic oligonucleotide
cuguagcgugaagucgucg

SEQ ID NO: 187597 - RNA, 19 nt, Artificial Sequence
  Description of Artificial Sequence: Synthetic oligonucleotide
ucgugucuguagagauccc

SEQ ID NO: 187598 - RNA, 19 nt, Artificial Sequence
  Description of Artificial Sequence: Synthetic oligonucleotide
caguuggccgagcgggcgg

SEQ ID NO: 187599 - RNA, 19 nt, Artificial Sequence
  Description of Artificial Sequence: Synthetic oligonucleotide
auggguacagucacuguuu

SEQ ID NO: 187600 - RNA, 19 nt, Artificial Sequence
  Description of Artificial Sequence: Synthetic oligonucleotide
gucaccgaaugacuggacu

SEQ ID NO: 187601 - RNA, 19 nt, Artificial Sequence
  Description of Artificial Sequence: Synthetic oligonucleotide
cgcuaccccaugcagaccg

SEQ ID NO: 187602 - RNA, 19 nt, Artificial Sequence
  Description of Artificial Sequence: Synthetic oligonucleotide
cccagcauaccgcagacca

SEQ ID NO: 187603 - RNA, 19 nt, Artificial Sequence
  Description of Artificial Sequence: Synthetic oligonucleotide
guaccaacgccgagugcag

SEQ ID NO: 187604 - RNA, 19 nt, Artificial Sequence
  Description of Artificial Sequence: Synthetic oligonucleotide
ggugaagcggguuccuguc

SEQ ID NO: 187605 - RNA, 19 nt, Artificial Sequence
  Description of Artificial Sequence: Synthetic oligonucleotide
gauccggcggggaucagaa

SEQ ID NO: 187606 - RNA, 19 nt, Artificial Sequence
  Description of Artificial Sequence: Synthetic oligonucleotide
guugugggcacuccagccu

SEQ ID NO: 187607 - RNA, 19 nt, Artificial Sequence
  Description of Artificial Sequence: Synthetic oligonucleotide
acacgcuaccccaugcaga

SEQ ID NO: 187608 - RNA, 19 nt, Artificial Sequence
  Description of Artificial Sequence: Synthetic oligonucleotide
uucuccaugcuuggccaaa

SEQ ID NO: 187609 - RNA, 19 nt, Artificial Sequence
  Description of Artificial Sequence: Synthetic oligonucleotide
cacuauggguccaaccugu

SEQ ID NO: 187610 - RNA, 19 nt, Artificial Sequence
  Description of Artificial Sequence: Synthetic oligonucleotide
gacgcacacgagccucccc

SEQ ID NO: 187611 - RNA, 19 nt, Artificial Sequence
  Description of Artificial Sequence: Synthetic oligonucleotide
guacaacaugugcaggggu

SEQ ID NO: 187612 - RNA, 19 nt, Artificial Sequence
  Description of Artificial Sequence: Synthetic oligonucleotide
acgccacucaucaccaccu

SEQ ID NO: 187613 - RNA, 19 nt, Artificial Sequence
  Description of Artificial Sequence: Synthetic oligonucleotide
ggguacagucacuguuucc

SEQ ID NO: 187614 - RNA, 19 nt, Artificial Sequence
  Description of Artificial Sequence: Synthetic oligonucleotide
gagugaagauguccauacu

SEQ ID NO: 187615 - RNA, 19 nt, Artificial Sequence
  Description of Artificial Sequence: Synthetic oligonucleotide
gccuaaagucggcucuucc

SEQ ID NO: 187616 - RNA, 19 nt, Artificial Sequence
  Description of Artificial Sequence: Synthetic oligonucleotide
cugcggugaagcggguucc

SEQ ID NO: 187617 - RNA, 19 nt, Artificial Sequence
  Description of Artificial Sequence: Synthetic oligonucleotide
cagaugacuccugcgguga

SEQ ID NO: 187618 - RNA, 19 nt, Artificial Sequence
  Description of Artificial Sequence: Synthetic oligonucleotide
uaccaacgccgagugcagc

SEQ ID NO: 187619 - RNA, 19 nt, Artificial Sequence
  Description of Artificial Sequence: Synthetic oligonucleotide
ggcccgauagaacuccaga

SEQ ID NO: 187620 - RNA, 19 nt, Artificial Sequence
  Description of Artificial Sequence: Synthetic oligonucleotide
agaugacuccugcggugaa

SEQ ID NO: 187621 - RNA, 19 nt, Artificial Sequence
  Description of Artificial Sequence: Synthetic oligonucleotide
ggccaaagguacugacagc

SEQ ID NO: 187622 - RNA, 19 nt, Artificial Sequence
  Description of Artificial Sequence: Synthetic oligonucleotide
accuuauaugugaccccug

SEQ ID NO: 187623 - RNA, 19 nt, Artificial Sequence
  Description of Artificial Sequence: Synthetic oligonucleotide
ggacuagcaagagugugaa

SEQ ID NO: 187624 - RNA, 19 nt, Artificial Sequence
  Description of Artificial Sequence: Synthetic oligonucleotide
ugcggauccggcggggauc

SEQ ID NO: 187625 - RNA, 19 nt, Artificial Sequence
  Description of Artificial Sequence: Synthetic oligonucleotide
acccagaugcgaugaccau

SEQ ID NO: 187626 - RNA, 19 nt, Artificial Sequence
  Description of Artificial Sequence: Synthetic oligonucleotide
acgcuaccccaugcagacc

SEQ ID NO: 187627 - RNA, 19 nt, Artificial Sequence
  Description of Artificial Sequence: Synthetic oligonucleotide
ggguugauaaccaccugaa

SEQ ID NO: 187628 - RNA, 19 nt, Artificial Sequence
  Description of Artificial Sequence: Synthetic oligonucleotide
cuccuguaccaacgccgag

SEQ ID NO: 187629 - RNA, 19 nt, Artificial Sequence
  Description of Artificial Sequence: Synthetic oligonucleotide
ccccgguaccccuauuugc

SEQ ID NO: 187630 - RNA, 19 nt, Artificial Sequence
  Description of Artificial Sequence: Synthetic oligonucleotide
gcaacuguuggcugauucu

SEQ ID NO: 187631 - RNA, 19 nt, Artificial Sequence
  Description of Artificial Sequence: Synthetic oligonucleotide
uccacucgucauggguaca

SEQ ID NO: 187632 - RNA, 19 nt, Artificial Sequence
  Description of Artificial Sequence: Synthetic oligonucleotide
gccaugguuggcguagccc

SEQ ID NO: 187633 - RNA, 19 nt, Artificial Sequence
  Description of Artificial Sequence: Synthetic oligonucleotide
cucaccggcacguuguauu

SEQ ID NO: 187634 - RNA, 19 nt, Artificial Sequence
  Description of Artificial Sequence: Synthetic oligonucleotide
aguugccuacaggccacca

SEQ ID NO: 187635 - RNA, 19 nt, Artificial Sequence
  Description of Artificial Sequence: Synthetic oligonucleotide
ggugcuaugaugggcacau

SEQ ID NO: 187636 - RNA, 19 nt, Artificial Sequence
  Description of Artificial Sequence: Synthetic oligonucleotide
cguagcccagaccaaguug

SEQ ID NO: 187637 - RNA, 19 nt, Artificial Sequence
  Description of Artificial Sequence: Synthetic oligonucleotide
cagacgccgguggccauag

SEQ ID NO: 187638 - RNA, 19 nt, Artificial Sequence
  Description of Artificial Sequence: Synthetic oligonucleotide
cccgguaccccuauuugca

SEQ ID NO: 187639 - RNA, 19 nt, Artificial Sequence
  Description of Artificial Sequence: Synthetic oligonucleotide
gcgcucaaaccuccuguug

SEQ ID NO: 187640 - RNA, 19 nt, Artificial Sequence
  Description of Artificial Sequence: Synthetic oligonucleotide
augugaccccugaggucac

SEQ ID NO: 187641 - RNA, 19 nt, Artificial Sequence
  Description of Artificial Sequence: Synthetic oligonucleotide
ccgaaugacuggacuagca

SEQ ID NO: 187642 - RNA, 19 nt, Artificial Sequence
  Description of Artificial Sequence: Synthetic oligonucleotide
gcaccgaacuucacucaag

SEQ ID NO: 187643 - RNA, 19 nt, Artificial Sequence
  Description of Artificial Sequence: Synthetic oligonucleotide
cugagucgcacugggugga

SEQ ID NO: 187644 - RNA, 19 nt, Artificial Sequence
  Description of Artificial Sequence: Synthetic oligonucleotide
guugccuacaggccaccau

SEQ ID NO: 187645 - RNA, 19 nt, Artificial Sequence
  Description of Artificial Sequence: Synthetic oligonucleotide
gccccgguaccccuauuug

SEQ ID NO: 187646 - RNA, 19 nt, Artificial Sequence
  Description of Artificial Sequence: Synthetic oligonucleotide
accucgacucgacccucau

SEQ ID NO: 187647 - RNA, 19 nt, Artificial Sequence
  Description of Artificial Sequence: Synthetic oligonucleotide
ccuaaagucggcucuuccu

SEQ ID NO: 187648 - RNA, 19 nt, Artificial Sequence
  Description of Artificial Sequence: Synthetic oligonucleotide
gcauaccgcagaccacaug

SEQ ID NO: 187649 - RNA, 19 nt, Artificial Sequence
  Description of Artificial Sequence: Synthetic oligonucleotide
agugcggauccggcgggga

SEQ ID NO: 187650 - RNA, 19 nt, Artificial Sequence
  Description of Artificial Sequence: Synthetic oligonucleotide
ggguagcgcucaaaccucc

SEQ ID NO: 187651 - RNA, 19 nt, Artificial Sequence
  Description of Artificial Sequence: Synthetic oligonucleotide
cccugugcaacgcacgcca

SEQ ID NO: 187652 - RNA, 19 nt, Artificial Sequence
  Description of Artificial Sequence: Synthetic oligonucleotide
gugcaacgcacgccacuca

SEQ ID NO: 187653 - RNA, 19 nt, Artificial Sequence
  Description of Artificial Sequence: Synthetic oligonucleotide
cgguaccccuauuugcacc

SEQ ID NO: 187654 - RNA, 19 nt, Artificial Sequence
  Description of Artificial Sequence: Synthetic oligonucleotide
caagaauggcgcccagccu

SEQ ID NO: 187655 - RNA, 19 nt, Artificial Sequence
  Description of Artificial Sequence: Synthetic oligonucleotide
cccagaugcgaugaccauc

SEQ ID NO: 187656 - RNA, 19 nt, Artificial Sequence
  Description of Artificial Sequence: Synthetic oligonucleotide
cucgacccucauaacggcu

SEQ ID NO: 187657 - RNA, 19 nt, Artificial Sequence
  Description of Artificial Sequence: Synthetic oligonucleotide
cguagugcacagguggaug

SEQ ID NO: 187658 - RNA, 19 nt, Artificial Sequence
  Description of Artificial Sequence: Synthetic oligonucleotide
gcugaaaggguggugguau

SEQ ID NO: 187659 - RNA, 19 nt, Artificial Sequence
  Description of Artificial Sequence: Synthetic oligonucleotide
agacgccgguggccauagg

SEQ ID NO: 187660 - RNA, 19 nt, Artificial Sequence
  Description of Artificial Sequence: Synthetic oligonucleotide
cccacucaccggcacguug

SEQ ID NO: 187661 - RNA, 19 nt, Artificial Sequence
  Description of Artificial Sequence: Synthetic oligonucleotide
acucaccggcacguuguau

SEQ ID NO: 187662 - RNA, 19 nt, Artificial Sequence
  Description of Artificial Sequence: Synthetic oligonucleotide
ggggugcuaugaugggcac

SEQ ID NO: 187663 - RNA, 19 nt, Artificial Sequence
  Description of Artificial Sequence: Synthetic oligonucleotide
ccuguagcgugaagucguc

SEQ ID NO: 187664 - RNA, 19 nt, Artificial Sequence
  Description of Artificial Sequence: Synthetic oligonucleotide
gaugccccgguaccccuau

SEQ ID NO: 187665 - RNA, 19 nt, Artificial Sequence
  Description of Artificial Sequence: Synthetic oligonucleotide
gcgggcggaacuagccagg

SEQ ID NO: 187666 - RNA, 19 nt, Artificial Sequence
  Description of Artificial Sequence: Synthetic oligonucleotide
cccuauuugcaccucgacu

SEQ ID NO: 187667 - RNA, 19 nt, Artificial Sequence
  Description of Artificial Sequence: Synthetic oligonucleotide
ccuugaacgcagcugugua

SEQ ID NO: 187668 - RNA, 19 nt, Artificial Sequence
  Description of Artificial Sequence: Synthetic oligonucleotide
caccucgacucgacccuca

SEQ ID NO: 187669 - RNA, 19 nt, Artificial Sequence
  Description of Artificial Sequence: Synthetic oligonucleotide
cugugcaacgcacgccacu

SEQ ID NO: 187670 - RNA, 19 nt, Artificial Sequence
  Description of Artificial Sequence: Synthetic oligonucleotide
ccaacgccgagugcagcag

SEQ ID NO: 187671 - RNA, 19 nt, Artificial Sequence
  Description of Artificial Sequence: Synthetic oligonucleotide
ccgagcgggcggaacuagc

SEQ ID NO: 187672 - RNA, 19 nt, Artificial Sequence
  Description of Artificial Sequence: Synthetic oligonucleotide
ccugugcaacgcacgccac

SEQ ID NO: 187673 - RNA, 19 nt, Artificial Sequence
  Description of Artificial Sequence: Synthetic oligonucleotide
guaccccuauuugcaccuc

SEQ ID NO: 187674 - RNA, 19 nt, Artificial Sequence
  Description of Artificial Sequence: Synthetic oligonucleotide
gaccgaaggagugcugcuu

SEQ ID NO: 187675 - RNA, 19 nt, Artificial Sequence
  Description of Artificial Sequence: Synthetic oligonucleotide
gcucucgacacaccacgcu

SEQ ID NO: 187676 - RNA, 19 nt, Artificial Sequence
  Description of Artificial Sequence: Synthetic oligonucleotide
cccagcgaagaugccccgg

SEQ ID NO: 187677 - RNA, 19 nt, Artificial Sequence
  Description of Artificial Sequence: Synthetic oligonucleotide
cuaccccaugcagaccgaa

SEQ ID NO: 187678 - RNA, 19 nt, Artificial Sequence
  Description of Artificial Sequence: Synthetic oligonucleotide
ggauccggcggggaucaga

SEQ ID NO: 187679 - RNA, 19 nt, Artificial Sequence
  Description of Artificial Sequence: Synthetic oligonucleotide
cacuccacagcgggucgga

SEQ ID NO: 187680 - RNA, 19 nt, Artificial Sequence
  Description of Artificial Sequence: Synthetic oligonucleotide
gcaacgcacgccacucauc

SEQ ID NO: 187681 - RNA, 19 nt, Artificial Sequence
  Description of Artificial Sequence: Synthetic oligonucleotide
gggugcuaugaugggcaca

SEQ ID NO: 187682 - RNA, 19 nt, Artificial Sequence
  Description of Artificial Sequence: Synthetic oligonucleotide
cgugucuguagagauccca

SEQ ID NO: 187683 - RNA, 19 nt, Artificial Sequence
  Description of Artificial Sequence: Synthetic oligonucleotide
ccacccuuuuagacgcaca

SEQ ID NO: 187684 - RNA, 19 nt, Artificial Sequence
  Description of Artificial Sequence: Synthetic oligonucleotide
gggucggagucgcaccucu

SEQ ID NO: 187685 - RNA, 19 nt, Artificial Sequence
  Description of Artificial Sequence: Synthetic oligonucleotide
ccacucaccggcacguugu

SEQ ID NO: 187686 - RNA, 19 nt, Artificial Sequence
  Description of Artificial Sequence: Synthetic oligonucleotide
gcggugaagcggguuccug

SEQ ID NO: 187687 - RNA, 19 nt, Artificial Sequence
  Description of Artificial Sequence: Synthetic oligonucleotide
caccacccuuuuagacgca

SEQ ID NO: 187688 - RNA, 19 nt, Artificial Sequence
  Description of Artificial Sequence: Synthetic oligonucleotide
gggcggaacuagccaggca

SEQ ID NO: 187689 - RNA, 19 nt, Artificial Sequence
  Description of Artificial Sequence: Synthetic oligonucleotide
gccgagcgggcggaacuag

SEQ ID NO: 187690 - RNA, 19 nt, Artificial Sequence
  Description of Artificial Sequence: Synthetic oligonucleotide
gcgugaagucgucgucaca

SEQ ID NO: 187691 - RNA, 19 nt, Artificial Sequence
  Description of Artificial Sequence: Synthetic oligonucleotide
gcggauccggcggggauca

SEQ ID NO: 187692 - RNA, 19 nt, Artificial Sequence
  Description of Artificial Sequence: Synthetic oligonucleotide
agaugccccgguaccccua

SEQ ID NO: 187693 - RNA, 19 nt, Artificial Sequence
  Description of Artificial Sequence: Synthetic oligonucleotide
cacucaccggcacguugua

SEQ ID NO: 187694 - RNA, 19 nt, Artificial Sequence
  Description of Artificial Sequence: Synthetic oligonucleotide
ggugggcaccacccuuuua

SEQ ID NO: 187695 - RNA, 19 nt, Artificial Sequence
  Description of Artificial Sequence: Synthetic oligonucleotide
gugcggauccggcggggau

SEQ ID NO: 187696 - RNA, 19 nt, Artificial Sequence
  Description of Artificial Sequence: Synthetic oligonucleotide
cacucgucauggguacagu

SEQ ID NO: 187697 - RNA, 19 nt, Artificial Sequence
  Description of Artificial Sequence: Synthetic oligonucleotide
gguagcgcucaaaccuccu

SEQ ID NO: 187698 - RNA, 19 nt, Artificial Sequence
  Description of Artificial Sequence: Synthetic oligonucleotide
cgggcggaacuagccaggc

SEQ ID NO: 187699 - RNA, 19 nt, Artificial Sequence
  Description of Artificial Sequence: Synthetic oligonucleotide
cccgggaggcacauucugu

SEQ ID NO: 187700 - RNA, 19 nt, Artificial Sequence
  Description of Artificial Sequence: Synthetic oligonucleotide
gcggaacuagccaggcagu

SEQ ID NO: 187701 - RNA, 19 nt, Artificial Sequence
  Description of Artificial Sequence: Synthetic oligonucleotide
gcguagcccagaccaaguu

SEQ ID NO: 187702 - RNA, 19 nt, Artificial Sequence
  Description of Artificial Sequence: Synthetic oligonucleotide
guacaccggcauccugguu

SEQ ID NO: 187703 - RNA, 19 nt, Artificial Sequence
  Description of Artificial Sequence: Synthetic oligonucleotide
cagaugcgaugaccaucgu

SEQ ID NO: 187704 - RNA, 19 nt, Artificial Sequence
  Description of Artificial Sequence: Synthetic oligonucleotide
cguacaccggcauccuggu

SEQ ID NO: 187705 - RNA, 19 nt, Artificial Sequence
  Description of Artificial Sequence: Synthetic oligonucleotide
ccucgacucgacccucaua

SEQ ID NO: 187706 - RNA, 19 nt, Artificial Sequence
  Description of Artificial Sequence: Synthetic oligonucleotide
cuccaguauaggggagguu

SEQ ID NO: 187707 - RNA, 19 nt, Artificial Sequence
  Description of Artificial Sequence: Synthetic oligonucleotide
ccucucgagcagugccaaa

SEQ ID NO: 187708 - RNA, 19 nt, Artificial Sequence
  Description of Artificial Sequence: Synthetic oligonucleotide
caaccagauccggccuguu

SEQ ID NO: 187709 - RNA, 19 nt, Artificial Sequence
  Description of Artificial Sequence: Synthetic oligonucleotide
ccguagugcacagguggau

SEQ ID NO: 187710 - RNA, 19 nt, Artificial Sequence
  Description of Artificial Sequence: Synthetic oligonucleotide
cggauccggcggggaucag

SEQ ID NO: 187711 - RNA, 19 nt, Artificial Sequence
  Description of Artificial Sequence: Synthetic oligonucleotide
ccccacucaccggcacguu

SEQ ID NO: 187712 - RNA, 19 nt, Artificial Sequence
  Description of Artificial Sequence: Synthetic oligonucleotide
aaacaaguagcucagguac

SEQ ID NO: 187713 - RNA, 19 nt, Artificial Sequence
  Description of Artificial Sequence: Synthetic oligonucleotide
aaauuuaagucauaucuag

SEQ ID NO: 187714 - RNA, 19 nt, Artificial Sequence
  Description of Artificial Sequence: Synthetic oligonucleotide
uacaaaguugucuacacgg

SEQ ID NO: 187715 - RNA, 19 nt, Artificial Sequence
  Description of Artificial Sequence: Synthetic oligonucleotide
uguuaaaucacuuggucag

SEQ ID NO: 187716 - RNA, 19 nt, Artificial Sequence
  Description of Artificial Sequence: Synthetic oligonucleotide
acauauuucacccauucag

SEQ ID NO: 187717 - RNA, 19 nt, Artificial Sequence
  Description of Artificial Sequence: Synthetic oligonucleotide
ugaauauguaguuaguucu

SEQ ID NO: 187718 - RNA, 19 nt, Artificial Sequence
  Description of Artificial Sequence: Synthetic oligonucleotide
agcauaaaaccucacagag

SEQ ID NO: 187719 - RNA, 19 nt, Artificial Sequence
  Description of Artificial Sequence: Synthetic oligonucleotide
aauuaauacuguuaugaau

SEQ ID NO: 187720 - RNA, 19 nt, Artificial Sequence
  Description of Artificial Sequence: Synthetic oligonucleotide
gucaaagagauuuagagga

SEQ ID NO: 187721 - RNA, 19 nt, Artificial Sequence
  Description of Artificial Sequence: Synthetic oligonucleotide
uuaucaaagaguuucugac

SEQ ID NO: 187722 - RNA, 19 nt, Artificial Sequence
  Description of Artificial Sequence: Synthetic oligonucleotide
acgacuuaaauaaaguagc

SEQ ID NO: 187723 - RNA, 19 nt, Artificial Sequence
  Description of Artificial Sequence: Synthetic oligonucleotide
uauuagauaauggcgacag

SEQ ID NO: 187724 - RNA, 19 nt, Artificial Sequence
  Description of Artificial Sequence: Synthetic oligonucleotide
guugagacgacuuaaauaa

SEQ ID NO: 187725 - RNA, 19 nt, Artificial Sequence
  Description of Artificial Sequence: Synthetic oligonucleotide
uucauaggaaacuuuauuc

SEQ ID NO: 187726 - RNA, 19 nt, Artificial Sequence
  Description of Artificial Sequence: Synthetic oligonucleotide
ucaaacacgcacauuaacu

SEQ ID NO: 187727 - RNA, 19 nt, Artificial Sequence
  Description of Artificial Sequence: Synthetic oligonucleotide
auauaguaagaauucagcu

SEQ ID NO: 187728 - RNA, 19 nt, Artificial Sequence
  Description of Artificial Sequence: Synthetic oligonucleotide
uuaggaaagggucagccga

SEQ ID NO: 187729 - RNA, 19 nt, Artificial Sequence
  Description of Artificial Sequence: Synthetic oligonucleotide
uuauucgauuuacaaaagc

SEQ ID NO: 187730 - RNA, 19 nt, Artificial Sequence
  Description of Artificial Sequence: Synthetic oligonucleotide
cagaggaccaacuagaguc

SEQ ID NO: 187731 - RNA, 19 nt, Artificial Sequence
  Description of Artificial Sequence: Synthetic oligonucleotide
uucagcuugcucaaacacg

SEQ ID NO: 187732 - RNA, 19 nt, Artificial Sequence
  Description of Artificial Sequence: Synthetic oligonucleotide
acuagaguccagcugacuc

SEQ ID NO: 187733 - RNA, 19 nt, Artificial Sequence
  Description of Artificial Sequence: Synthetic oligonucleotide
uacuguuaugaauaauuag

SEQ ID NO: 187734 - RNA, 19 nt, Artificial Sequence
  Description of Artificial Sequence: Synthetic oligonucleotide
uuuauucgauuuacaaaag

SEQ ID NO: 187735 - RNA, 19 nt, Artificial Sequence
  Description of Artificial Sequence: Synthetic oligonucleotide
auaauggcgacaggaaagc

SEQ ID NO: 187736 - RNA, 19 nt, Artificial Sequence
  Description of Artificial Sequence: Synthetic oligonucleotide
uuucuaguggagcuuaagu

SEQ ID NO: 187737 - RNA, 19 nt, Artificial Sequence
  Description of Artificial Sequence: Synthetic oligonucleotide
agguccuuaacgcacaucu

SEQ ID NO: 187738 - RNA, 19 nt, Artificial Sequence
  Description of Artificial Sequence: Synthetic oligonucleotide
auguacauauucucagcac

SEQ ID NO: 187739 - RNA, 19 nt, Artificial Sequence
  Description of Artificial Sequence: Synthetic oligonucleotide
gaucccacagucuauuuac

SEQ ID NO: 187740 - RNA, 19 nt, Artificial Sequence
  Description of Artificial Sequence: Synthetic oligonucleotide
ugagccaauaaccugucuc

SEQ ID NO: 187741 - RNA, 19 nt, Artificial Sequence
  Description of Artificial Sequence: Synthetic oligonucleotide
aaauaguuggugaaaucug

SEQ ID NO: 187742 - RNA, 19 nt, Artificial Sequence
  Description of Artificial Sequence: Synthetic oligonucleotide
uuaccuguuaaaucacuug

SEQ ID NO: 187743 - RNA, 19 nt, Artificial Sequence
  Description of Artificial Sequence: Synthetic oligonucleotide
uguggcuuaaugauguuua

SEQ ID NO: 187744 - RNA, 19 nt, Artificial Sequence
  Description of Artificial Sequence: Synthetic oligonucleotide
aacaaguagcucagguacc

SEQ ID NO: 187745 - RNA, 19 nt, Artificial Sequence
  Description of Artificial Sequence: Synthetic oligonucleotide
ucuaguggagcuuaaguuu

SEQ ID NO: 187746 - RNA, 19 nt, Artificial Sequence
  Description of Artificial Sequence: Synthetic oligonucleotide
aaauaacgaagcuggacuu

SEQ ID NO: 187747 - RNA, 19 nt, Artificial Sequence
  Description of Artificial Sequence: Synthetic oligonucleotide
ugcucauuacuuucuagug

SEQ ID NO: 187748 - RNA, 19 nt, Artificial Sequence
  Description of Artificial Sequence: Synthetic oligonucleotide
ucuaagcuauaucugcacu

SEQ ID NO: 187749 - RNA, 19 nt, Artificial Sequence
  Description of Artificial Sequence: Synthetic oligonucleotide
uuuacauagugguacgaau

SEQ ID NO: 187750 - RNA, 19 nt, Artificial Sequence
  Description of Artificial Sequence: Synthetic oligonucleotide
agucuguagaggcccaucg

SEQ ID NO: 187751 - RNA, 19 nt, Artificial Sequence
  Description of Artificial Sequence: Synthetic oligonucleotide
ugcaaagccagcugauuag

SEQ ID NO: 187752 - RNA, 19 nt, Artificial Sequence
  Description of Artificial Sequence: Synthetic oligonucleotide
ugaucagugggacuacuac

SEQ ID NO: 187753 - RNA, 19 nt, Artificial Sequence
  Description of Artificial Sequence: Synthetic oligonucleotide
aauaaccugucucuaugaa

SEQ ID NO: 187754 - RNA, 19 nt, Artificial Sequence
  Description of Artificial Sequence: Synthetic oligonucleotide
uucuguaagcugaauuuac

SEQ ID NO: 187755 - RNA, 19 nt, Artificial Sequence
  Description of Artificial Sequence: Synthetic oligonucleotide
uaguuggugaaaucugaag

SEQ ID NO: 187756 - RNA, 19 nt, Artificial Sequence
  Description of Artificial Sequence: Synthetic oligonucleotide
uguuuagucugaagcaacu

SEQ ID NO: 187757 - RNA, 19 nt, Artificial Sequence
  Description of Artificial Sequence: Synthetic oligonucleotide
ugaagaccucucauuuugg

SEQ ID NO: 187758 - RNA, 19 nt, Artificial Sequence
  Description of Artificial Sequence: Synthetic oligonucleotide
ucuguaacauuucuccauc

SEQ ID NO: 187759 - RNA, 19 nt, Artificial Sequence
  Description of Artificial Sequence: Synthetic oligonucleotide
uccuuaacgcacaucucag

SEQ ID NO: 187760 - RNA, 19 nt, Artificial Sequence
  Description of Artificial Sequence: Synthetic oligonucleotide
accaauguugcuaagccag

SEQ ID NO: 187761 - RNA, 19 nt, Artificial Sequence
  Description of Artificial Sequence: Synthetic oligonucleotide
aauuuaguggugucagcau

SEQ ID NO: 187762 - RNA, 19 nt, Artificial Sequence
  Description of Artificial Sequence: Synthetic oligonucleotide
aaacacgcacauuaacuau

SEQ ID NO: 187763 - RNA, 19 nt, Artificial Sequence
  Description of Artificial Sequence: Synthetic oligonucleotide
ucuauguuaugcucauuac

SEQ ID NO: 187764 - RNA, 19 nt, Artificial Sequence
  Description of Artificial Sequence: Synthetic oligonucleotide
uccguuggauguuagagau

SEQ ID NO: 187765 - RNA, 19 nt, Artificial Sequence
  Description of Artificial Sequence: Synthetic oligonucleotide
uucuaguggagcuuaaguu

SEQ ID NO: 187766 - RNA, 19 nt, Artificial Sequence
  Description of Artificial Sequence: Synthetic oligonucleotide
aauaacgaagcuggacuug

SEQ ID NO: 187767 - RNA, 19 nt, Artificial Sequence
  Description of Artificial Sequence: Synthetic oligonucleotide
uggagcuuaaguuuucuua

SEQ ID NO: 187768 - RNA, 19 nt, Artificial Sequence
  Description of Artificial Sequence: Synthetic oligonucleotide
uuuaacagcugcucuccca

SEQ ID NO: 187769 - RNA, 19 nt, Artificial Sequence
  Description of Artificial Sequence: Synthetic oligonucleotide
accucacagaguauaauac

SEQ ID NO: 187770 - RNA, 19 nt, Artificial Sequence
  Description of Artificial Sequence: Synthetic oligonucleotide
cagcugacucuauacaagg

SEQ ID NO: 187771 - RNA, 19 nt, Artificial Sequence
  Description of Artificial Sequence: Synthetic oligonucleotide
cagagguuaggaaaggguc

SEQ ID NO: 187772 - RNA, 19 nt, Artificial Sequence
  Description of Artificial Sequence: Synthetic oligonucleotide
aacugauagaagaggccgg

SEQ ID NO: 187773 - RNA, 19 nt, Artificial Sequence
  Description of Artificial Sequence: Synthetic oligonucleotide
auauaagcuauaaguagug

SEQ ID NO: 187774 - RNA, 19 nt, Artificial Sequence
  Description of Artificial Sequence: Synthetic oligonucleotide
uauguaguuaguucugcuu

SEQ ID NO: 187775 - RNA, 19 nt, Artificial Sequence
  Description of Artificial Sequence: Synthetic oligonucleotide
ugauuagucaaagccuagc

SEQ ID NO: 187776 - RNA, 19 nt, Artificial Sequence
  Description of Artificial Sequence: Synthetic oligonucleotide
ugcacgacuagaagagccc

SEQ ID NO: 187777 - RNA, 19 nt, Artificial Sequence
  Description of Artificial Sequence: Synthetic oligonucleotide
uucuaagcuauaucugcac

SEQ ID NO: 187778 - RNA, 19 nt, Artificial Sequence
  Description of Artificial Sequence: Synthetic oligonucleotide
ccgacugagacuuuaacag

SEQ ID NO: 187779 - RNA, 19 nt, Artificial Sequence
  Description of Artificial Sequence: Synthetic oligonucleotide
ucggucuacggcaugcagc

SEQ ID NO: 187780 - RNA, 19 nt, Artificial Sequence
  Description of Artificial Sequence: Synthetic oligonucleotide
  modified_base (9)..(9): a, c, u, g, unknown or other
  modified_base (14)..(14): a, c, u, g, unknown or other
ugucuuugnuccancuuuu

SEQ ID NO: 187781 - RNA, 19 nt, Artificial Sequence
  Description of Artificial Sequence: Synthetic oligonucleotide
auuccggcugaccacacug

SEQ ID NO: 187782 - RNA, 19 nt, Artificial Sequence
  Description of Artificial Sequence: Synthetic oligonucleotide
auguaguuaguucugcuuu

SEQ ID NO: 187783 - RNA, 19 nt, Artificial Sequence
  Description of Artificial Sequence: Synthetic oligonucleotide
uguagaggcccaucggucu

SEQ ID NO: 187784 - RNA, 19 nt, Artificial Sequence
  Description of Artificial Sequence: Synthetic oligonucleotide
cuuaacgcacaucucagca

SEQ ID NO: 187785 - RNA, 19 nt, Artificial Sequence
  Description of Artificial Sequence: Synthetic oligonucleotide
gcucauuacuuucuagugg

SEQ ID NO: 187786 - RNA, 19 nt, Artificial Sequence
  Description of Artificial Sequence: Synthetic oligonucleotide
ugaagcaacugaauaugua

SEQ ID NO: 187787 - RNA, 19 nt, Artificial Sequence
  Description of Artificial Sequence: Synthetic oligonucleotide
uauaagcuauaaguaguga

SEQ ID NO: 187788 - RNA, 19 nt, Artificial Sequence
  Description of Artificial Sequence: Synthetic oligonucleotide
auauguaguuaguucugcu

SEQ ID NO: 187789 - RNA, 19 nt, Artificial Sequence
  Description of Artificial Sequence: Synthetic oligonucleotide
uacuacuacuuuacagcug

SEQ ID NO: 187790 - RNA, 19 nt, Artificial Sequence
  Description of Artificial Sequence: Synthetic oligonucleotide
uuaaaucacuuggucaggu

SEQ ID NO: 187791 - RNA, 19 nt, Artificial Sequence
  Description of Artificial Sequence: Synthetic oligonucleotide
uguaguuaguucugcuuuc

SEQ ID NO: 187792 - RNA, 19 nt, Artificial Sequence
  Description of Artificial Sequence: Synthetic oligonucleotide
caaauaacgaagcuggacu

SEQ ID NO: 187793 - RNA, 19 nt, Artificial Sequence
  Description of Artificial Sequence: Synthetic oligonucleotide
ugcauuugugggccagggg

SEQ ID NO: 187794 - RNA, 19 nt, Artificial Sequence
  Description of Artificial Sequence: Synthetic oligonucleotide
agggcuaacuacaaaguug

SEQ ID NO: 187795 - RNA, 19 nt, Artificial Sequence
  Description of Artificial Sequence: Synthetic oligonucleotide
ugggacuacuacuacuacu

SEQ ID NO: 187796 - RNA, 19 nt, Artificial Sequence
  Description of Artificial Sequence: Synthetic oligonucleotide
agucauaucuagaaauaca

SEQ ID NO: 187797 - RNA, 19 nt, Artificial Sequence
  Description of Artificial Sequence: Synthetic oligonucleotide
uguuauuggcuggaaggug

SEQ ID NO: 187798 - RNA, 19 nt, Artificial Sequence
  Description of Artificial Sequence: Synthetic oligonucleotide
guaagaauucagcuugcuc

SEQ ID NO: 187799 - RNA, 19 nt, Artificial Sequence
  Description of Artificial Sequence: Synthetic oligonucleotide
guccuuaacgcacaucuca

SEQ ID NO: 187800 - RNA, 19 nt, Artificial Sequence
  Description of Artificial Sequence: Synthetic oligonucleotide
gauuagucaaagccuagcu

SEQ ID NO: 187801 - RNA, 19 nt, Artificial Sequence
  Description of Artificial Sequence: Synthetic oligonucleotide
cuguaagcugaauuuacca

SEQ ID NO: 187802 - RNA, 19 nt, Artificial Sequence
  Description of Artificial Sequence: Synthetic oligonucleotide
aucucagagguuaggaaag

SEQ ID NO: 187803 - RNA, 19 nt, Artificial Sequence
  Description of Artificial Sequence: Synthetic oligonucleotide
gcuauaucugcacuauaag

SEQ ID NO: 187804 - RNA, 19 nt, Artificial Sequence
  Description of Artificial Sequence: Synthetic oligonucleotide
uaagcuauaucugcacuau

SEQ ID NO: 187805 - RNA, 19 nt, Artificial Sequence
  Description of Artificial Sequence: Synthetic oligonucleotide
auuuaguggugucagcaua

SEQ ID NO: 187806 - RNA, 19 nt, Artificial Sequence
  Description of Artificial Sequence: Synthetic oligonucleotide
ucuacacgggcagcuacgg

SEQ ID NO: 187807 - RNA, 19 nt, Artificial Sequence
  Description of Artificial Sequence: Synthetic oligonucleotide
aaugugcagcaaauaacga

SEQ ID NO: 187808 - RNA, 19 nt, Artificial Sequence
  Description of Artificial Sequence: Synthetic oligonucleotide
cuguaacauuucuccaucc

SEQ ID NO: 187809 - RNA, 19 nt, Artificial Sequence
  Description of Artificial Sequence: Synthetic oligonucleotide
gaaagggucagccgacuga

SEQ ID NO: 187810 - RNA, 19 nt, Artificial Sequence
  Description of Artificial Sequence: Synthetic oligonucleotide
aauggcgacaggaaagcau

SEQ ID NO: 187811 - RNA, 19 nt, Artificial Sequence
  Description of Artificial Sequence: Synthetic oligonucleotide
ugggugggaccaauguugc

SEQ ID NO: 187812 - RNA, 19 nt, Artificial Sequence
  Description of Artificial Sequence: Synthetic oligonucleotide
cuuuaucaaagaguuucug

SEQ ID NO: 187813 - RNA, 19 nt, Artificial Sequence
  Description of Artificial Sequence: Synthetic oligonucleotide
caggggaugagacuguguc

SEQ ID NO: 187814 - RNA, 19 nt, Artificial Sequence
  Description of Artificial Sequence: Synthetic oligonucleotide
agccgacugagacuuuaac

SEQ ID NO: 187815 - RNA, 19 nt, Artificial Sequence
  Description of Artificial Sequence: Synthetic oligonucleotide
gaugcuugcacgacuagaa

SEQ ID NO: 187816 - RNA, 19 nt, Artificial Sequence
  Description of Artificial Sequence: Synthetic oligonucleotide
agcugauuagucaaagccu

SEQ ID NO: 187817 - RNA, 19 nt, Artificial Sequence
  Description of Artificial Sequence: Synthetic oligonucleotide
cacacuguuacucccgguc

SEQ ID NO: 187818 - RNA, 19 nt, Artificial Sequence
  Description of Artificial Sequence: Synthetic oligonucleotide
auagaagaggccgggauaa

SEQ ID NO: 187819 - RNA, 19 nt, Artificial Sequence
  Description of Artificial Sequence: Synthetic oligonucleotide
uacgaauuugguccacauc

SEQ ID NO: 187820 - RNA, 19 nt, Artificial Sequence
  Description of Artificial Sequence: Synthetic oligonucleotide
cugauuagucaaagccuag

SEQ ID NO: 187821 - RNA, 19 nt, Artificial Sequence
  Description of Artificial Sequence: Synthetic oligonucleotide
caaacacgcacauuaacua

SEQ ID NO: 187822 - RNA, 19 nt, Artificial Sequence
  Description of Artificial Sequence: Synthetic oligonucleotide
gacuacuacuacuacuuua

SEQ ID NO: 187823 - RNA, 19 nt, Artificial Sequence
  Description of Artificial Sequence: Synthetic oligonucleotide
uccgauuccugaagaacuc

SEQ ID NO: 187824 - RNA, 19 nt, Artificial Sequence
  Description of Artificial Sequence: Synthetic oligonucleotide
ugcuuugauaccacauuuu

SEQ ID NO: 187825 - RNA, 19 nt, Artificial Sequence
  Description of Artificial Sequence: Synthetic oligonucleotide
acugaauauguaguuaguu

SEQ ID NO: 187826 - RNA, 19 nt, Artificial Sequence
  Description of Artificial Sequence: Synthetic oligonucleotide
gauagaagaggccgggaua

SEQ ID NO: 187827 - RNA, 19 nt, Artificial Sequence
  Description of Artificial Sequence: Synthetic oligonucleotide
agcuauaucugcacuauaa

SEQ ID NO: 187828 - RNA, 19 nt, Artificial Sequence
  Description of Artificial Sequence: Synthetic oligonucleotide
ucagugggacuacuacuac

SEQ ID NO: 187829 - RNA, 19 nt, Artificial Sequence
  Description of Artificial Sequence: Synthetic oligonucleotide
cauuaacuauucagaggac

SEQ ID NO: 187830 - RNA, 19 nt, Artificial Sequence
  Description of Artificial Sequence: Synthetic oligonucleotide
auaacgaagcuggacuuga

SEQ ID NO: 187831 - RNA, 19 nt, Artificial Sequence
  Description of Artificial Sequence: Synthetic oligonucleotide
uggucaggucaccauguac

SEQ ID NO: 187832 - RNA, 19 nt, Artificial Sequence
  Description of Artificial Sequence: Synthetic oligonucleotide
gucuguagaggcccaucgg

SEQ ID NO: 187833 - RNA, 19 nt, Artificial Sequence
  Description of Artificial Sequence: Synthetic oligonucleotide
cauacuuaguguuuucugu

SEQ ID NO: 187834 - RNA, 19 nt, Artificial Sequence
  Description of Artificial Sequence: Synthetic oligonucleotide
agauuuagaggaggaguug

SEQ ID NO: 187835 - RNA, 19 nt, Artificial Sequence
  Description of Artificial Sequence: Synthetic oligonucleotide
uccugagucguaggugugg

SEQ ID NO: 187836 - RNA, 19 nt, Artificial Sequence
  Description of Artificial Sequence: Synthetic oligonucleotide
acugaaccugaaaauauau

SEQ ID NO: 187837 - RNA, 19 nt, Artificial Sequence
  Description of Artificial Sequence: Synthetic oligonucleotide
uuauuggcuggaagguguc

SEQ ID NO: 187838 - RNA, 19 nt, Artificial Sequence
  Description of Artificial Sequence: Synthetic oligonucleotide
aacacgcacauuaacuauu

SEQ ID NO: 187839 - RNA, 19 nt, Artificial Sequence
  Description of Artificial Sequence: Synthetic oligonucleotide
agaagaggccgggauaaug

SEQ ID NO: 187840 - RNA, 19 nt, Artificial Sequence
  Description of Artificial Sequence: Synthetic oligonucleotide
gcauacuuaguguuuucug

SEQ ID NO: 187841 - RNA, 19 nt, Artificial Sequence
  Description of Artificial Sequence: Synthetic oligonucleotide
caaacaaguagcucaggua

SEQ ID NO: 187842 - RNA, 19 nt, Artificial Sequence
  Description of Artificial Sequence: Synthetic oligonucleotide
auacuguuaugaauaauua

SEQ ID NO: 187843 - RNA, 19 nt, Artificial Sequence
  Description of Artificial Sequence: Synthetic oligonucleotide
gucauaucuagaaauacau

SEQ ID NO: 187844 - RNA, 19 nt, Artificial Sequence
  Description of Artificial Sequence: Synthetic oligonucleotide
cguuggauguuagagaugc

SEQ ID NO: 187845 - RNA, 19 nt, Artificial Sequence
  Description of Artificial Sequence: Synthetic oligonucleotide
ucuacggcaugcagcccug

SEQ ID NO: 187846 - RNA, 19 nt, Artificial Sequence
  Description of Artificial Sequence: Synthetic oligonucleotide
cuauguuaugcucauuacu

SEQ ID NO: 187847 - RNA, 19 nt, Artificial Sequence
  Description of Artificial Sequence: Synthetic oligonucleotide
ccaacuagaguccagcuga

SEQ ID NO: 187848 - RNA, 19 nt, Artificial Sequence
  Description of Artificial Sequence: Synthetic oligonucleotide
uucaggagucuuacccacu

SEQ ID NO: 187849 - RNA, 19 nt, Artificial Sequence
  Description of Artificial Sequence: Synthetic oligonucleotide
ugugucacgauggguggga

SEQ ID NO: 187850 - RNA, 19 nt, Artificial Sequence
  Description of Artificial Sequence: Synthetic oligonucleotide
cacaucucagcaucauguc

SEQ ID NO: 187851 - RNA, 19 nt, Artificial Sequence
  Description of Artificial Sequence: Synthetic oligonucleotide
acggguacgcucuuugcaa

SEQ ID NO: 187852 - RNA, 19 nt, Artificial Sequence
  Description of Artificial Sequence: Synthetic oligonucleotide
acccacuguuauuggcugg

SEQ ID NO: 187853 - RNA, 19 nt, Artificial Sequence
  Description of Artificial Sequence: Synthetic oligonucleotide
cuacuacuacuuuacagcu

SEQ ID NO: 187854 - RNA, 19 nt, Artificial Sequence
  Description of Artificial Sequence: Synthetic oligonucleotide
guuccugagucguaggugu

SEQ ID NO: 187855 - RNA, 19 nt, Artificial Sequence
  Description of Artificial Sequence: Synthetic oligonucleotide
ccuguuaaaucacuugguc

SEQ ID NO: 187856 - RNA, 19 nt, Artificial Sequence
  Description of Artificial Sequence: Synthetic oligonucleotide
uggcuuaaugauguuuaaa

SEQ ID NO: 187857 - RNA, 19 nt, Artificial Sequence
  Description of Artificial Sequence: Synthetic oligonucleotide
cugacuacugaggauucuc

SEQ ID NO: 187858 - RNA, 19 nt, Artificial Sequence
  Description of Artificial Sequence: Synthetic oligonucleotide
aagcuauaucugcacuaua

SEQ ID NO: 187859 - RNA, 19 nt, Artificial Sequence
  Description of Artificial Sequence: Synthetic oligonucleotide
uguuacucccggucucacu

SEQ ID NO: 187860 - RNA, 19 nt, Artificial Sequence
  Description of Artificial Sequence: Synthetic oligonucleotide
agaugcuugcacgacuaga

SEQ ID NO: 187861 - RNA, 19 nt, Artificial Sequence
  Description of Artificial Sequence: Synthetic oligonucleotide
gagucuuacccacuguuau

SEQ ID NO: 187862 - RNA, 19 nt, Artificial Sequence
  Description of Artificial Sequence: Synthetic oligonucleotide
gucuacacgggcagcuacg

SEQ ID NO: 187863 - RNA, 19 nt, Artificial Sequence
  Description of Artificial Sequence: Synthetic oligonucleotide
agaaucugacugacuacug

SEQ ID NO: 187864 - RNA, 19 nt, Artificial Sequence
  Description of Artificial Sequence: Synthetic oligonucleotide
guuauuggcuggaaggugu

SEQ ID NO: 187865 - RNA, 19 nt, Artificial Sequence
  Description of Artificial Sequence: Synthetic oligonucleotide
ugacuccguuggauguuag

SEQ ID NO: 187866 - RNA, 19 nt, Artificial Sequence
  Description of Artificial Sequence: Synthetic oligonucleotide
uuccugagucguaggugug

SEQ ID NO: 187867 - RNA, 19 nt, Artificial Sequence
  Description of Artificial Sequence: Synthetic oligonucleotide
gcaaauaacgaagcuggac

SEQ ID NO: 187868 - RNA, 19 nt, Artificial Sequence
  Description of Artificial Sequence: Synthetic oligonucleotide
cuugcacgacuagaagagc

SEQ ID NO: 187869 - RNA, 19 nt, Artificial Sequence
  Description of Artificial Sequence: Synthetic oligonucleotide
acgacuagaagagccccug

SEQ ID NO: 187870 - RNA, 19 nt, Artificial Sequence
  Description of Artificial Sequence: Synthetic oligonucleotide
accuguuaaaucacuuggu

SEQ ID NO: 187871 - RNA, 19 nt, Artificial Sequence
  Description of Artificial Sequence: Synthetic oligonucleotide
uggugguugagacgacuua

SEQ ID NO: 187872 - RNA, 19 nt, Artificial Sequence
  Description of Artificial Sequence: Synthetic oligonucleotide
aacuagaguccagcugacu

SEQ ID NO: 187873 - RNA, 19 nt, Artificial Sequence
  Description of Artificial Sequence: Synthetic oligonucleotide
gccuaaaggacuaaaucuc

SEQ ID NO: 187874 - RNA, 19 nt, Artificial Sequence
  Description of Artificial Sequence: Synthetic oligonucleotide
gucaggucaccauguacuc

SEQ ID NO: 187875 - RNA, 19 nt, Artificial Sequence
  Description of Artificial Sequence: Synthetic oligonucleotide
uggugaguauguguuuagu

SEQ ID NO: 187876 - RNA, 19 nt, Artificial Sequence
  Description of Artificial Sequence: Synthetic oligonucleotide
uuauggagucaaagagauu

SEQ ID NO: 187877 - RNA, 19 nt, Artificial Sequence
  Description of Artificial Sequence: Synthetic oligonucleotide
aagagugaguagagucaug

SEQ ID NO: 187878 - RNA, 19 nt, Artificial Sequence
  Description of Artificial Sequence: Synthetic oligonucleotide
aguggagcuuaaguuuucu

SEQ ID NO: 187879 - RNA, 19 nt, Artificial Sequence
  Description of Artificial Sequence: Synthetic oligonucleotide
aagcaagccaagguccuua

SEQ ID NO: 187880 - RNA, 19 nt, Artificial Sequence
  Description of Artificial Sequence: Synthetic oligonucleotide
caacuagaguccagcugac

SEQ ID NO: 187881 - RNA, 19 nt, Artificial Sequence
  Description of Artificial Sequence: Synthetic oligonucleotide
gccgacugagacuuuaaca

SEQ ID NO: 187882 - RNA, 19 nt, Artificial Sequence
  Description of Artificial Sequence: Synthetic oligonucleotide
guuuuacauagugguacga

SEQ ID NO: 187883 - RNA, 19 nt, Artificial Sequence
  Description of Artificial Sequence: Synthetic oligonucleotide
uggcgacaggaaagcaucu

SEQ ID NO: 187884 - RNA, 19 nt, Artificial Sequence
  Description of Artificial Sequence: Synthetic oligonucleotide
ggaccaacuagaguccagc

SEQ ID NO: 187885 - RNA, 19 nt, Artificial Sequence
  Description of Artificial Sequence: Synthetic oligonucleotide
ccaagagugaguagaguca

SEQ ID NO: 187886 - RNA, 19 nt, Artificial Sequence
  Description of Artificial Sequence: Synthetic oligonucleotide
cuagaguccagcugacucu

SEQ ID NO: 187887 - RNA, 19 nt, Artificial Sequence
  Description of Artificial Sequence: Synthetic oligonucleotide
aagucucuucagggcuaac

SEQ ID NO: 187888 - RNA, 19 nt, Artificial Sequence
  Description of Artificial Sequence: Synthetic oligonucleotide
acuguucggcacuucccau

SEQ ID NO: 187889 - RNA, 19 nt, Artificial Sequence
  Description of Artificial Sequence: Synthetic oligonucleotide
gugggacuacuacuacuac

SEQ ID NO: 187890 - RNA, 19 nt, Artificial Sequence
  Description of Artificial Sequence: Synthetic oligonucleotide
ccagcugauuagucaaagc

SEQ ID NO: 187891 - RNA, 19 nt, Artificial Sequence
  Description of Artificial Sequence: Synthetic oligonucleotide
gacuccguuggauguuaga

SEQ ID NO: 187892 - RNA, 19 nt, Artificial Sequence
  Description of Artificial Sequence: Synthetic oligonucleotide
cuacuacuacuacuuuaca

SEQ ID NO: 187893 - RNA, 19 nt, Artificial Sequence
  Description of Artificial Sequence: Synthetic oligonucleotide
ucagccgacugagacuuua

SEQ ID NO: 187894 - RNA, 19 nt, Artificial Sequence
  Description of Artificial Sequence: Synthetic oligonucleotide
ccuuaacgcacaucucagc

SEQ ID NO: 187895 - RNA, 19 nt, Artificial Sequence
  Description of Artificial Sequence: Synthetic oligonucleotide
gacugacuacugaggauuc

SEQ ID NO: 187896 - RNA, 19 nt, Artificial Sequence
  Description of Artificial Sequence: Synthetic oligonucleotide
cagaaucugacugacuacu

SEQ ID NO: 187897 - RNA, 19 nt, Artificial Sequence
  Description of Artificial Sequence: Synthetic oligonucleotide
ccaauguugcuaagccagc

SEQ ID NO: 187898 - RNA, 19 nt, Artificial Sequence
  Description of Artificial Sequence: Synthetic oligonucleotide
agcaagccaagguccuuaa

SEQ ID NO: 187899 - RNA, 19 nt, Artificial Sequence
  Description of Artificial Sequence: Synthetic oligonucleotide
ggguacgcucuuugcaaag

SEQ ID NO: 187900 - RNA, 19 nt, Artificial Sequence
  Description of Artificial Sequence: Synthetic oligonucleotide
agcaaauaacgaagcugga

SEQ ID NO: 187901 - RNA, 19 nt, Artificial Sequence
  Description of Artificial Sequence: Synthetic oligonucleotide
gguacgcucuuugcaaagc

SEQ ID NO: 187902 - RNA, 19 nt, Artificial Sequence
  Description of Artificial Sequence: Synthetic oligonucleotide
aagcaccuuagcauuuauu

SEQ ID NO: 187903 - RNA, 19 nt, Artificial Sequence
  Description of Artificial Sequence: Synthetic oligonucleotide
ugagacuuaugagggccuu

SEQ ID NO: 187904 - RNA, 19 nt, Artificial Sequence
  Description of Artificial Sequence: Synthetic oligonucleotide
ggcagcuacggguacgcuc

SEQ ID NO: 187905 - RNA, 19 nt, Artificial Sequence
  Description of Artificial Sequence: Synthetic oligonucleotide
guucccucuaaacaauauu

SEQ ID NO: 187906 - RNA, 19 nt, Artificial Sequence
  Description of Artificial Sequence: Synthetic oligonucleotide
guagcugauaauacaggau

SEQ ID NO: 187907 - RNA, 19 nt, Artificial Sequence
  Description of Artificial Sequence: Synthetic oligonucleotide
guuggauguuagagaugcc

SEQ ID NO: 187908 - RNA, 19 nt, Artificial Sequence
  Description of Artificial Sequence: Synthetic oligonucleotide
cugaauuuaccaggaggaa

SEQ ID NO: 187909 - RNA, 19 nt, Artificial Sequence
  Description of Artificial Sequence: Synthetic oligonucleotide
gccagcugauuagucaaag

SEQ ID NO: 187910 - RNA, 19 nt, Artificial Sequence
  Description of Artificial Sequence: Synthetic oligonucleotide
acgggcagcuacggguacg

SEQ ID NO: 187911 - RNA, 19 nt, Artificial Sequence
  Description of Artificial Sequence: Synthetic oligonucleotide
acugggcaauacucagaau

SEQ ID NO: 187912 - RNA, 19 nt, Artificial Sequence
  Description of Artificial Sequence: Synthetic oligonucleotide
aggagaauagagggcugaa

SEQ ID NO: 187913 - RNA, 19 nt, Artificial Sequence
  Description of Artificial Sequence: Synthetic oligonucleotide
agaggcccaucggucuacg

SEQ ID NO: 187914 - RNA, 19 nt, Artificial Sequence
  Description of Artificial Sequence: Synthetic oligonucleotide
guuaccuguuaaaucacuu

SEQ ID NO: 187915 - RNA, 19 nt, Artificial Sequence
  Description of Artificial Sequence: Synthetic oligonucleotide
guacgaauuugguccacau

SEQ ID NO: 187916 - RNA, 19 nt, Artificial Sequence
  Description of Artificial Sequence: Synthetic oligonucleotide
uagaggcccaucggucuac

SEQ ID NO: 187917 - RNA, 19 nt, Artificial Sequence
  Description of Artificial Sequence: Synthetic oligonucleotide
cggcugaccacacuguuac

SEQ ID NO: 187918 - RNA, 19 nt, Artificial Sequence
  Description of Artificial Sequence: Synthetic oligonucleotide
gcacgacuagaagagcccc

SEQ ID NO: 187919 - RNA, 19 nt, Artificial Sequence
  Description of Artificial Sequence: Synthetic oligonucleotide
cacgcacauuaacuauuca

SEQ ID NO: 187920 - RNA, 19 nt, Artificial Sequence
  Description of Artificial Sequence: Synthetic oligonucleotide
gccgggauaaugggaagug

SEQ ID NO: 187921 - RNA, 19 nt, Artificial Sequence
  Description of Artificial Sequence: Synthetic oligonucleotide
cauuugugggccaggggau

SEQ ID NO: 187922 - RNA, 19 nt, Artificial Sequence
  Description of Artificial Sequence: Synthetic oligonucleotide
guagaggcccaucggucua

SEQ ID NO: 187923 - RNA, 19 nt, Artificial Sequence
  Description of Artificial Sequence: Synthetic oligonucleotide
acgaugggugggaccaaug

SEQ ID NO: 187924 - RNA, 19 nt, Artificial Sequence
  Description of Artificial Sequence: Synthetic oligonucleotide
cagaaggaccagguaacaa

SEQ ID NO: 187925 - RNA, 19 nt, Artificial Sequence
  Description of Artificial Sequence: Synthetic oligonucleotide
cuguuacucccggucucac

SEQ ID NO: 187926 - RNA, 19 nt, Artificial Sequence
  Description of Artificial Sequence: Synthetic oligonucleotide
uagaagaggccgggauaau

SEQ ID NO: 187927 - RNA, 19 nt, Artificial Sequence
  Description of Artificial Sequence: Synthetic oligonucleotide
caauguugcuaagccagcu

SEQ ID NO: 187928 - RNA, 19 nt, Artificial Sequence
  Description of Artificial Sequence: Synthetic oligonucleotide
gcagcuacggguacgcucu

SEQ ID NO: 187929 - RNA, 19 nt, Artificial Sequence
  Description of Artificial Sequence: Synthetic oligonucleotide
cacgggcagcuacggguac

SEQ ID NO: 187930 - RNA, 19 nt, Artificial Sequence
  Description of Artificial Sequence: Synthetic oligonucleotide
cacgacuagaagagccccu

SEQ ID NO: 187931 - RNA, 19 nt, Artificial Sequence
  Description of Artificial Sequence: Synthetic oligonucleotide
cugcacuauaagagaggcu

SEQ ID NO: 187932 - RNA, 19 nt, Artificial Sequence
  Description of Artificial Sequence: Synthetic oligonucleotide
gugucacgaugggugggac

SEQ ID NO: 187933 - RNA, 19 nt, Artificial Sequence
  Description of Artificial Sequence: Synthetic oligonucleotide
ccguuggauguuagagaug

SEQ ID NO: 187934 - RNA, 19 nt, Artificial Sequence
  Description of Artificial Sequence: Synthetic oligonucleotide
ggucagccgacugagacuu

SEQ ID NO: 187935 - RNA, 19 nt, Artificial Sequence
  Description of Artificial Sequence: Synthetic oligonucleotide
cagccgacugagacuuuaa

SEQ ID NO: 187936 - RNA, 19 nt, Artificial Sequence
  Description of Artificial Sequence: Synthetic oligonucleotide
cgacuagaagagccccugc

SEQ ID NO: 187937 - RNA, 19 nt, Artificial Sequence
  Description of Artificial Sequence: Synthetic oligonucleotide
cugagccaauaaccugucu

SEQ ID NO: 187938 - RNA, 19 nt, Artificial Sequence
  Description of Artificial Sequence: Synthetic oligonucleotide
agcuacggguacgcucuuu

SEQ ID NO: 187939 - RNA, 19 nt, Artificial Sequence
  Description of Artificial Sequence: Synthetic oligonucleotide
gguggugguugagacgacu

SEQ ID NO: 187940 - RNA, 19 nt, Artificial Sequence
  Description of Artificial Sequence: Synthetic oligonucleotide
cauuccggcugaccacacu

SEQ ID NO: 187941 - RNA, 19 nt, Artificial Sequence
  Description of Artificial Sequence: Synthetic oligonucleotide
ccgauuccugaagaacuca

SEQ ID NO: 187942 - RNA, 19 nt, Artificial Sequence
  Description of Artificial Sequence: Synthetic oligonucleotide
gcaagcaccuuagcauuua

SEQ ID NO: 187943 - RNA, 19 nt, Artificial Sequence
  Description of Artificial Sequence: Synthetic oligonucleotide
ggacuacuacuacuacuuu

SEQ ID NO: 187944 - RNA, 19 nt, Artificial Sequence
  Description of Artificial Sequence: Synthetic oligonucleotide
cuuuacucgccagcuccau

SEQ ID NO: 187945 - RNA, 19 nt, Artificial Sequence
  Description of Artificial Sequence: Synthetic oligonucleotide
ggccgggauaaugggaagu

SEQ ID NO: 187946 - RNA, 19 nt, Artificial Sequence
  Description of Artificial Sequence: Synthetic oligonucleotide
caucuauguuaugcucauu

SEQ ID NO: 187947 - RNA, 19 nt, Artificial Sequence
  Description of Artificial Sequence: Synthetic oligonucleotide
cggguacgcucuuugcaaa

SEQ ID NO: 187948 - RNA, 19 nt, Artificial Sequence
  Description of Artificial Sequence: Synthetic oligonucleotide
ggcgacaggaaagcaucuu

SEQ ID NO: 187949 - RNA, 19 nt, Artificial Sequence
  Description of Artificial Sequence: Synthetic oligonucleotide
cuacggcaugcagcccugu

SEQ ID NO: 187950 - RNA, 19 nt, Artificial Sequence
  Description of Artificial Sequence: Synthetic oligonucleotide
gcagucuguagaggcccau

SEQ ID NO: 187951 - RNA, 19 nt, Artificial Sequence
  Description of Artificial Sequence: Synthetic oligonucleotide
gcccaucggucuacggcau

SEQ ID NO: 187952 - RNA, 19 nt, Artificial Sequence
  Description of Artificial Sequence: Synthetic oligonucleotide
cagcuacggguacgcucuu

SEQ ID NO: 187953 - RNA, 19 nt, Artificial Sequence
  Description of Artificial Sequence: Synthetic oligonucleotide
gucagccgacugagacuuu

SEQ ID NO: 187954 - RNA, 19 nt, Artificial Sequence
  Description of Artificial Sequence: Synthetic oligonucleotide
ccacuugaacuggguuccu

SEQ ID NO: 187955 - RNA, 19 nt, Artificial Sequence
  Description of Artificial Sequence: Synthetic oligonucleotide
uuaguaaucacagugaugg

SEQ ID NO: 187956 - RNA, 19 nt, Artificial Sequence
  Description of Artificial Sequence: Synthetic oligonucleotide
aaucauaugacuaaaacuc

SEQ ID NO: 187957 - RNA, 19 nt, Artificial Sequence
  Description of Artificial Sequence: Synthetic oligonucleotide
uuuacaagcugucacaggg

SEQ ID NO: 187958 - RNA, 19 nt, Artificial Sequence
  Description of Artificial Sequence: Synthetic oligonucleotide
uaugauacuccccaaaccc

SEQ ID NO: 187959 - RNA, 19 nt, Artificial Sequence
  Description of Artificial Sequence: Synthetic oligonucleotide
aaucguuucuuguuacacc

SEQ ID NO: 187960 - RNA, 19 nt, Artificial Sequence
  Description of Artificial Sequence: Synthetic oligonucleotide
agagaugucaaccagguga

SEQ ID NO: 187961 - RNA, 19 nt, Artificial Sequence
  Description of Artificial Sequence: Synthetic oligonucleotide
uaucucguuacauuuaugc

SEQ ID NO: 187962 - RNA, 19 nt, Artificial Sequence
  Description of Artificial Sequence: Synthetic oligonucleotide
uuccacacaacacaucucg

SEQ ID NO: 187963 - RNA, 19 nt, Artificial Sequence
  Description of Artificial Sequence: Synthetic oligonucleotide
gaguuaggaacguacaagg

SEQ ID NO: 187964 - RNA, 19 nt, Artificial Sequence
  Description of Artificial Sequence: Synthetic oligonucleotide
uguaaauuacugcuuccgg

SEQ ID NO: 187965 - RNA, 19 nt, Artificial Sequence
  Description of Artificial Sequence: Synthetic oligonucleotide
auaugauacuccccaaacc

SEQ ID NO: 187966 - RNA, 19 nt, Artificial Sequence
  Description of Artificial Sequence: Synthetic oligonucleotide
guuaggaacguacaagggg

SEQ ID NO: 187967 - RNA, 19 nt, Artificial Sequence
  Description of Artificial Sequence: Synthetic oligonucleotide
uaaauuacugcuuccggga

SEQ ID NO: 187968 - RNA, 19 nt, Artificial Sequence
  Description of Artificial Sequence: Synthetic oligonucleotide
gaaauaacggauguucgag

SEQ ID NO: 187969 - RNA, 19 nt, Artificial Sequence
  Description of Artificial Sequence: Synthetic oligonucleotide
ucguuuuacuuguaaaagc

SEQ ID NO: 187970 - RNA, 19 nt, Artificial Sequence
  Description of Artificial Sequence: Synthetic oligonucleotide
aaacagugugccugguucg

SEQ ID NO: 187971 - RNA, 19 nt, Artificial Sequence
  Description of Artificial Sequence: Synthetic oligonucleotide
uucguuuuacuuguaaaag

SEQ ID NO: 187972 - RNA, 19 nt, Artificial Sequence
  Description of Artificial Sequence: Synthetic oligonucleotide
ugucacacauaaauguagc

SEQ ID NO: 187973 - RNA, 19 nt, Artificial Sequence
  Description of Artificial Sequence: Synthetic oligonucleotide
guauggaugaaaucugaag

SEQ ID NO: 187974 - RNA, 19 nt, Artificial Sequence
  Description of Artificial Sequence: Synthetic oligonucleotide
agaacgcacauugaaaggg

SEQ ID NO: 187975 - RNA, 19 nt, Artificial Sequence
  Description of Artificial Sequence: Synthetic oligonucleotide
uuuuaagucuuuccuggca

SEQ ID NO: 187976 - RNA, 19 nt, Artificial Sequence
  Description of Artificial Sequence: Synthetic oligonucleotide
aucauaugacuaaaacucc

SEQ ID NO: 187977 - RNA, 19 nt, Artificial Sequence
  Description of Artificial Sequence: Synthetic oligonucleotide
aaauaacggauguucgaga

SEQ ID NO: 187978 - RNA, 19 nt, Artificial Sequence
  Description of Artificial Sequence: Synthetic oligonucleotide
uuuaagucuuuccuggcau

SEQ ID NO: 187979 - RNA, 19 nt, Artificial Sequence
  Description of Artificial Sequence: Synthetic oligonucleotide
aacauugcgcuuugguuca

SEQ ID NO: 187980 - RNA, 19 nt, Artificial Sequence
  Description of Artificial Sequence: Synthetic oligonucleotide
caacauugcgcuuugguuc

SEQ ID NO: 187981 - RNA, 19 nt, Artificial Sequence
  Description of Artificial Sequence: Synthetic oligonucleotide
uugacauuugugcauccca

SEQ ID NO: 187982 - RNA, 19 nt, Artificial Sequence
  Description of Artificial Sequence: Synthetic oligonucleotide
agacucaugcuuuggaugu

SEQ ID NO: 187983 - RNA, 19 nt, Artificial Sequence
  Description of Artificial Sequence: Synthetic oligonucleotide
cacuucugaguuaggaacg

SEQ ID NO: 187984 - RNA, 19 nt, Artificial Sequence
  Description of Artificial Sequence: Synthetic oligonucleotide
agcgaguuguaggauaggc

SEQ ID NO: 187985 - RNA, 19 nt, Artificial Sequence
  Description of Artificial Sequence: Synthetic oligonucleotide
uaauccgcaagagauguca

SEQ ID NO: 187986 - RNA, 19 nt, Artificial Sequence
  Description of Artificial Sequence: Synthetic oligonucleotide
aguucccucgaugacaagg

SEQ ID NO: 187987 - RNA, 19 nt, Artificial Sequence
  Description of Artificial Sequence: Synthetic oligonucleotide
uguuacaccgcuugucaca

SEQ ID NO: 187988 - RNA, 19 nt, Artificial Sequence
  Description of Artificial Sequence: Synthetic oligonucleotide
uccgcaagagaugucaacc

SEQ ID NO: 187989 - RNA, 19 nt, Artificial Sequence
  Description of Artificial Sequence: Synthetic oligonucleotide
aucugcaggaaauaacgga

SEQ ID NO: 187990 - RNA, 19 nt, Artificial Sequence
  Description of Artificial Sequence: Synthetic oligonucleotide
ugcaggguaauccgcaaga

SEQ ID NO: 187991 - RNA, 19 nt, Artificial Sequence
  Description of Artificial Sequence: Synthetic oligonucleotide
agcauaucucguuacauuu

SEQ ID NO: 187992 - RNA, 19 nt, Artificial Sequence
  Description of Artificial Sequence: Synthetic oligonucleotide
gauguugcuucguaacuca

SEQ ID NO: 187993 - RNA, 19 nt, Artificial Sequence
  Description of Artificial Sequence: Synthetic oligonucleotide
caucugcaggaaauaacgg

SEQ ID NO: 187994 - RNA, 19 nt, Artificial Sequence
  Description of Artificial Sequence: Synthetic oligonucleotide
acuuaugcuccuuguccac

SEQ ID NO: 187995 - RNA, 19 nt, Artificial Sequence
  Description of Artificial Sequence: Synthetic oligonucleotide
cagaucaccauuucuuuuc

SEQ ID NO: 187996 - RNA, 19 nt, Artificial Sequence
  Description of Artificial Sequence: Synthetic oligonucleotide
cuuuacaagcugucacagg

SEQ ID NO: 187997 - RNA, 19 nt, Artificial Sequence
  Description of Artificial Sequence: Synthetic oligonucleotide
aacucuaccuuggcuuuac

SEQ ID NO: 187998 - RNA, 19 nt, Artificial Sequence
  Description of Artificial Sequence: Synthetic oligonucleotide
acacagcauaucucguuac

SEQ ID NO: 187999 - RNA, 19 nt, Artificial Sequence
  Description of Artificial Sequence: Synthetic oligonucleotide
gcaucugcaggaaauaacg

SEQ ID NO: 188000 - RNA, 19 nt, Artificial Sequence
  Description of Artificial Sequence: Synthetic oligonucleotide
cuucguaacucaugcuugc

SEQ ID NO: 188001 - RNA, 19 nt, Artificial Sequence
  Description of Artificial Sequence: Synthetic oligonucleotide
gccacauaucuuuaaacag

SEQ ID NO: 188002 - RNA, 19 nt, Artificial Sequence
  Description of Artificial Sequence: Synthetic oligonucleotide
acaacauugcgcuuugguu

SEQ ID NO: 188003 - RNA, 19 nt, Artificial Sequence
  Description of Artificial Sequence: Synthetic oligonucleotide
uauucacggccucuacaag

SEQ ID NO: 188004 - RNA, 19 nt, Artificial Sequence
  Description of Artificial Sequence: Synthetic oligonucleotide
ugaggcgccucuucaauca

SEQ ID NO: 188005 - RNA, 19 nt, Artificial Sequence
  Description of Artificial Sequence: Synthetic oligonucleotide
ugaccacaguucaaaauau

SEQ ID NO: 188006 - RNA, 19 nt, Artificial Sequence
  Description of Artificial Sequence: Synthetic oligonucleotide
uugcccaugcaccacuucu

SEQ ID NO: 188007 - RNA, 19 nt, Artificial Sequence
  Description of Artificial Sequence: Synthetic oligonucleotide
uuugguucacugucauagc

SEQ ID NO: 188008 - RNA, 19 nt, Artificial Sequence
  Description of Artificial Sequence: Synthetic oligonucleotide
uuacauuuaugccguccac

SEQ ID NO: 188009 - RNA, 19 nt, Artificial Sequence
  Description of Artificial Sequence: Synthetic oligonucleotide
uaguaaucacagugauggg

SEQ ID NO: 188010 - RNA, 19 nt, Artificial Sequence
  Description of Artificial Sequence: Synthetic oligonucleotide
uacauggaagcuccuuugu

SEQ ID NO: 188011 - RNA, 19 nt, Artificial Sequence
  Description of Artificial Sequence: Synthetic oligonucleotide
aguuaggaacguacaaggg

SEQ ID NO: 188012 - RNA, 19 nt, Artificial Sequence
  Description of Artificial Sequence: Synthetic oligonucleotide
gauguucgagagcaggguc

SEQ ID NO: 188013 - RNA, 19 nt, Artificial Sequence
  Description of Artificial Sequence: Synthetic oligonucleotide
auggguuagaacaguggac

SEQ ID NO: 188014 - RNA, 19 nt, Artificial Sequence
  Description of Artificial Sequence: Synthetic oligonucleotide
aaucacagugaugggguga

SEQ ID NO: 188015 - RNA, 19 nt, Artificial Sequence
  Description of Artificial Sequence: Synthetic oligonucleotide
caaucguuucuuguuacac

SEQ ID NO: 188016 - RNA, 19 nt, Artificial Sequence
  Description of Artificial Sequence: Synthetic oligonucleotide
auuuuagacgccauagaaa

SEQ ID NO: 188017 - RNA, 19 nt, Artificial Sequence
  Description of Artificial Sequence: Synthetic oligonucleotide
cacaaucguuucuuguuac

SEQ ID NO: 188018 - RNA, 19 nt, Artificial Sequence
  Description of Artificial Sequence: Synthetic oligonucleotide
uuaagucuuuccuggcauc

SEQ ID NO: 188019 - RNA, 19 nt, Artificial Sequence
  Description of Artificial Sequence: Synthetic oligonucleotide
uggacuucccucugauggc

SEQ ID NO: 188020 - RNA, 19 nt, Artificial Sequence
  Description of Artificial Sequence: Synthetic oligonucleotide
aacgucacugacaaauuuu

SEQ ID NO: 188021 - RNA, 19 nt, Artificial Sequence
  Description of Artificial Sequence: Synthetic oligonucleotide
agugauggggugaggcgcc

SEQ ID NO: 188022 - RNA, 19 nt, Artificial Sequence
  Description of Artificial Sequence: Synthetic oligonucleotide
gguucuagcacagguuugg

SEQ ID NO: 188023 - RNA, 19 nt, Artificial Sequence
  Description of Artificial Sequence: Synthetic oligonucleotide
cacauggguuagaacagug

SEQ ID NO: 188024 - RNA, 19 nt, Artificial Sequence
  Description of Artificial Sequence: Synthetic oligonucleotide
ugguucguuuuacuuguaa

SEQ ID NO: 188025 - RNA, 19 nt, Artificial Sequence
  Description of Artificial Sequence: Synthetic oligonucleotide
cugaagaacgcacauugaa

SEQ ID NO: 188026 - RNA, 19 nt, Artificial Sequence
  Description of Artificial Sequence: Synthetic oligonucleotide
uuuagacgccauagaaaua

SEQ ID NO: 188027 - RNA, 19 nt, Artificial Sequence
  Description of Artificial Sequence: Synthetic oligonucleotide
uuguuacaccgcuugucac

SEQ ID NO: 188028 - RNA, 19 nt, Artificial Sequence
  Description of Artificial Sequence: Synthetic oligonucleotide
acacaaucguuucuuguua

SEQ ID NO: 188029 - RNA, 19 nt, Artificial Sequence
  Description of Artificial Sequence: Synthetic oligonucleotide
ccacuucugaguuaggaac

SEQ ID NO: 188030 - RNA, 19 nt, Artificial Sequence
  Description of Artificial Sequence: Synthetic oligonucleotide
cacaacggaguuuccuccc

SEQ ID NO: 188031 - RNA, 19 nt, Artificial Sequence
  Description of Artificial Sequence: Synthetic oligonucleotide
ggaaauaacggauguucga

SEQ ID NO: 188032 - RNA, 19 nt, Artificial Sequence
  Description of Artificial Sequence: Synthetic oligonucleotide
gacaguucccucgaugaca

SEQ ID NO: 188033 - RNA, 19 nt, Artificial Sequence
  Description of Artificial Sequence: Synthetic oligonucleotide
cuacaaaccucaccacaac

SEQ ID NO: 188034 - RNA, 19 nt, Artificial Sequence
  Description of Artificial Sequence: Synthetic oligonucleotide
ugacaguucccucgaugac

SEQ ID NO: 188035 - RNA, 19 nt, Artificial Sequence
  Description of Artificial Sequence: Synthetic oligonucleotide
cacacaacacaucucggga

SEQ ID NO: 188036 - RNA, 19 nt, Artificial Sequence
  Description of Artificial Sequence: Synthetic oligonucleotide
cuuauucacggccucuaca

SEQ ID NO: 188037 - RNA, 19 nt, Artificial Sequence
  Description of Artificial Sequence: Synthetic oligonucleotide
aaccaagacuacagcuagg

SEQ ID NO: 188038 - RNA, 19 nt, Artificial Sequence
  Description of Artificial Sequence: Synthetic oligonucleotide
ugggacaaccaagacuaca

SEQ ID NO: 188039 - RNA, 19 nt, Artificial Sequence
  Description of Artificial Sequence: Synthetic oligonucleotide
cacuuaugcuccuugucca

SEQ ID NO: 188040 - RNA, 19 nt, Artificial Sequence
  Description of Artificial Sequence: Synthetic oligonucleotide
caugcauguuuuccgacca

SEQ ID NO: 188041 - RNA, 19 nt, Artificial Sequence
  Description of Artificial Sequence: Synthetic oligonucleotide
caccgaaacagugugccug

SEQ ID NO: 188042 - RNA, 19 nt, Artificial Sequence
  Description of Artificial Sequence: Synthetic oligonucleotide
ucaccaaauggggagccgu

SEQ ID NO: 188043 - RNA, 19 nt, Artificial Sequence
  Description of Artificial Sequence: Synthetic oligonucleotide
uccucacuaugacaagaau

SEQ ID NO: 188044 - RNA, 19 nt, Artificial Sequence
  Description of Artificial Sequence: Synthetic oligonucleotide
uucguaacucaugcuugcc

SEQ ID NO: 188045 - RNA, 19 nt, Artificial Sequence
  Description of Artificial Sequence: Synthetic oligonucleotide
ggauccaugcauguuuucc

SEQ ID NO: 188046 - RNA, 19 nt, Artificial Sequence
  Description of Artificial Sequence: Synthetic oligonucleotide
caacaccgaaacagugugc

SEQ ID NO: 188047 - RNA, 19 nt, Artificial Sequence
  Description of Artificial Sequence: Synthetic oligonucleotide
guuacaccgcuugucacac

SEQ ID NO: 188048 - RNA, 19 nt, Artificial Sequence
  Description of Artificial Sequence: Synthetic oligonucleotide
caagagaugucaaccaggu

SEQ ID NO: 188049 - RNA, 19 nt, Artificial Sequence
  Description of Artificial Sequence: Synthetic oligonucleotide
aggaggccuagucccacag

SEQ ID NO: 188050 - RNA, 19 nt, Artificial Sequence
  Description of Artificial Sequence: Synthetic oligonucleotide
agcacacuagucagcgugg

SEQ ID NO: 188051 - RNA, 19 nt, Artificial Sequence
  Description of Artificial Sequence: Synthetic oligonucleotide
ccaacaccgaaacagugug

SEQ ID NO: 188052 - RNA, 19 nt, Artificial Sequence
  Description of Artificial Sequence: Synthetic oligonucleotide
uggcagguuaauucaucaa

SEQ ID NO: 188053 - RNA, 19 nt, Artificial Sequence
  Description of Artificial Sequence: Synthetic oligonucleotide
accaacaccgaaacagugu

SEQ ID NO: 188054 - RNA, 19 nt, Artificial Sequence
  Description of Artificial Sequence: Synthetic oligonucleotide
cuacaagcaucuccauuuc

SEQ ID NO: 188055 - RNA, 19 nt, Artificial Sequence
  Description of Artificial Sequence: Synthetic oligonucleotide
acaacggaguuuccuccca

SEQ ID NO: 188056 - RNA, 19 nt, Artificial Sequence
  Description of Artificial Sequence: Synthetic oligonucleotide
uuuaugccguccacacaau

SEQ ID NO: 188057 - RNA, 19 nt, Artificial Sequence
  Description of Artificial Sequence: Synthetic oligonucleotide
acauggaagcuccuuuguu

SEQ ID NO: 188058 - RNA, 19 nt, Artificial Sequence
  Description of Artificial Sequence: Synthetic oligonucleotide
cucucuaggccauagacuu

SEQ ID NO: 188059 - RNA, 19 nt, Artificial Sequence
  Description of Artificial Sequence: Synthetic oligonucleotide
uccuucguggcagagcuuu

SEQ ID NO: 188060 - RNA, 19 nt, Artificial Sequence
  Description of Artificial Sequence: Synthetic oligonucleotide
agcuauucuuugauaggug

SEQ ID NO: 188061 - RNA, 19 nt, Artificial Sequence
  Description of Artificial Sequence: Synthetic oligonucleotide
ggggauguugcuucguaac

SEQ ID NO: 188062 - RNA, 19 nt, Artificial Sequence
  Description of Artificial Sequence: Synthetic oligonucleotide
gguucguuuuacuuguaaa

SEQ ID NO: 188063 - RNA, 19 nt, Artificial Sequence
  Description of Artificial Sequence: Synthetic oligonucleotide
ccaugcauguuuuccgacc

SEQ ID NO: 188064 - RNA, 19 nt, Artificial Sequence
  Description of Artificial Sequence: Synthetic oligonucleotide
ugcaaccuggcuuguugaa

SEQ ID NO: 188065 - RNA, 19 nt, Artificial Sequence
  Description of Artificial Sequence: Synthetic oligonucleotide
cugaguuaggaacguacaa

SEQ ID NO: 188066 - RNA, 19 nt, Artificial Sequence
  Description of Artificial Sequence: Synthetic oligonucleotide
auccgacuuuccaacaucu

SEQ ID NO: 188067 - RNA, 19 nt, Artificial Sequence
  Description of Artificial Sequence: Synthetic oligonucleotide
augcaucuaucuucucagu

SEQ ID NO: 188068 - RNA, 19 nt, Artificial Sequence
  Description of Artificial Sequence: Synthetic oligonucleotide
acggaguuuccucccacaa

SEQ ID NO: 188069 - RNA, 19 nt, Artificial Sequence
  Description of Artificial Sequence: Synthetic oligonucleotide
uugcuucguaacucaugcu

SEQ ID NO: 188070 - RNA, 19 nt, Artificial Sequence
  Description of Artificial Sequence: Synthetic oligonucleotide
aggggauguugcuucguaa

SEQ ID NO: 188071 - RNA, 19 nt, Artificial Sequence
  Description of Artificial Sequence: Synthetic oligonucleotide
gcuucguaacucaugcuug

SEQ ID NO: 188072 - RNA, 19 nt, Artificial Sequence
  Description of Artificial Sequence: Synthetic oligonucleotide
auaucucguuacauuuaug

SEQ ID NO: 188073 - RNA, 19 nt, Artificial Sequence
  Description of Artificial Sequence: Synthetic oligonucleotide
caccaaauggggagccgug

SEQ ID NO: 188074 - RNA, 19 nt, Artificial Sequence
  Description of Artificial Sequence: Synthetic oligonucleotide
cucaugcuuuggauguguc

SEQ ID NO: 188075 - RNA, 19 nt, Artificial Sequence
  Description of Artificial Sequence: Synthetic oligonucleotide
acaagacagcgugugugcu

SEQ ID NO: 188076 - RNA, 19 nt, Artificial Sequence
  Description of Artificial Sequence: Synthetic oligonucleotide
ccaccacacagaaucauuc

SEQ ID NO: 188077 - RNA, 19 nt, Artificial Sequence
  Description of Artificial Sequence: Synthetic oligonucleotide
acgucacugacaaauuuua

SEQ ID NO: 188078 - RNA, 19 nt, Artificial Sequence
  Description of Artificial Sequence: Synthetic oligonucleotide
cauaucucguuacauuuau

SEQ ID NO: 188079 - RNA, 19 nt, Artificial Sequence
  Description of Artificial Sequence: Synthetic oligonucleotide
aauccgcaagagaugucaa

SEQ ID NO: 188080 - RNA, 19 nt, Artificial Sequence
  Description of Artificial Sequence: Synthetic oligonucleotide
ccacaacggaguuuccucc

SEQ ID NO: 188081 - RNA, 19 nt, Artificial Sequence
  Description of Artificial Sequence: Synthetic oligonucleotide
acaccgaaacagugugccu

SEQ ID NO: 188082 - RNA, 19 nt, Artificial Sequence
  Description of Artificial Sequence: Synthetic oligonucleotide
gaacugguggguagaucac

SEQ ID NO: 188083 - RNA, 19 nt, Artificial Sequence
  Description of Artificial Sequence: Synthetic oligonucleotide
caggguaauccgcaagaga

SEQ ID NO: 188084 - RNA, 19 nt, Artificial Sequence
  Description of Artificial Sequence: Synthetic oligonucleotide
gaugauccggcgguggucu

SEQ ID NO: 188085 - RNA, 19 nt, Artificial Sequence
  Description of Artificial Sequence: Synthetic oligonucleotide
gguaauccgcaagagaugu

SEQ ID NO: 188086 - RNA, 19 nt, Artificial Sequence
  Description of Artificial Sequence: Synthetic oligonucleotide
cacacagcauaucucguua

SEQ ID NO: 188087 - RNA, 19 nt, Artificial Sequence
  Description of Artificial Sequence: Synthetic oligonucleotide
aacggauguucgagagcag

SEQ ID NO: 188088 - RNA, 19 nt, Artificial Sequence
  Description of Artificial Sequence: Synthetic oligonucleotide
gguggcauaccugggaaca

SEQ ID NO: 188089 - RNA, 19 nt, Artificial Sequence
  Description of Artificial Sequence: Synthetic oligonucleotide
cauuuaugccguccacaca

SEQ ID NO: 188090 - RNA, 19 nt, Artificial Sequence
  Description of Artificial Sequence: Synthetic oligonucleotide
uccccuuauucacggccuc

SEQ ID NO: 188091 - RNA, 19 nt, Artificial Sequence
  Description of Artificial Sequence: Synthetic oligonucleotide
ggugccauacauggguggc

SEQ ID NO: 188092 - RNA, 19 nt, Artificial Sequence
  Description of Artificial Sequence: Synthetic oligonucleotide
cauucacacuguaacucua

SEQ ID NO: 188093 - RNA, 19 nt, Artificial Sequence
  Description of Artificial Sequence: Synthetic oligonucleotide
caacucuaggugugguaca

SEQ ID NO: 188094 - RNA, 19 nt, Artificial Sequence
  Description of Artificial Sequence: Synthetic oligonucleotide
cugcaaccuggcuuguuga

SEQ ID NO: 188095 - RNA, 19 nt, Artificial Sequence
  Description of Artificial Sequence: Synthetic oligonucleotide
auacauggguggccacagu

SEQ ID NO: 188096 - RNA, 19 nt, Artificial Sequence
  Description of Artificial Sequence: Synthetic oligonucleotide
uucccucgaugacaagguu

SEQ ID NO: 188097 - RNA, 19 nt, Artificial Sequence
  Description of Artificial Sequence: Synthetic oligonucleotide
uggagaccgggcccauuuc

SEQ ID NO: 188098 - RNA, 19 nt, Artificial Sequence
  Description of Artificial Sequence: Synthetic oligonucleotide
cacgcucucuaggccauag

SEQ ID NO: 188099 - RNA, 19 nt, Artificial Sequence
  Description of Artificial Sequence: Synthetic oligonucleotide
agaccgggcccauuucuua

SEQ ID NO: 188100 - RNA, 19 nt, Artificial Sequence
  Description of Artificial Sequence: Synthetic oligonucleotide
gaucccgcaaaggcugaca

SEQ ID NO: 188101 - RNA, 19 nt, Artificial Sequence
  Description of Artificial Sequence: Synthetic oligonucleotide
uuacaccgcuugucacaca

SEQ ID NO: 188102 - RNA, 19 nt, Artificial Sequence
  Description of Artificial Sequence: Synthetic oligonucleotide
augauccggcgguggucuc

SEQ ID NO: 188103 - RNA, 19 nt, Artificial Sequence
  Description of Artificial Sequence: Synthetic oligonucleotide
ugauccggcgguggucucu

SEQ ID NO: 188104 - RNA, 19 nt, Artificial Sequence
  Description of Artificial Sequence: Synthetic oligonucleotide
ggaacagguauggcuacca

SEQ ID NO: 188105 - RNA, 19 nt, Artificial Sequence
  Description of Artificial Sequence: Synthetic oligonucleotide
aaagccaguuugggauaaa

SEQ ID NO: 188106 - RNA, 19 nt, Artificial Sequence
  Description of Artificial Sequence: Synthetic oligonucleotide
ggccuagucccacagggaa

SEQ ID NO: 188107 - RNA, 19 nt, Artificial Sequence
  Description of Artificial Sequence: Synthetic oligonucleotide
ugguggccgugucugcguc

SEQ ID NO: 188108 - RNA, 19 nt, Artificial Sequence
  Description of Artificial Sequence: Synthetic oligonucleotide
cguaacucaugcuugccca

SEQ ID NO: 188109 - RNA, 19 nt, Artificial Sequence
  Description of Artificial Sequence: Synthetic oligonucleotide
cugggacaaccaagacuac

SEQ ID NO: 188110 - RNA, 19 nt, Artificial Sequence
  Description of Artificial Sequence: Synthetic oligonucleotide
cuaccacauuucaaguccu

SEQ ID NO: 188111 - RNA, 19 nt, Artificial Sequence
  Description of Artificial Sequence: Synthetic oligonucleotide
cgcaagagaugucaaccag

SEQ ID NO: 188112 - RNA, 19 nt, Artificial Sequence
  Description of Artificial Sequence: Synthetic oligonucleotide
caagaaugauacacuggau

SEQ ID NO: 188113 - RNA, 19 nt, Artificial Sequence
  Description of Artificial Sequence: Synthetic oligonucleotide
guucccucgaugacaaggu

SEQ ID NO: 188114 - RNA, 19 nt, Artificial Sequence
  Description of Artificial Sequence: Synthetic oligonucleotide
ggguuugccacacacuuuu

SEQ ID NO: 188115 - RNA, 19 nt, Artificial Sequence
  Description of Artificial Sequence: Synthetic oligonucleotide
guaauccgcaagagauguc

SEQ ID NO: 188116 - RNA, 19 nt, Artificial Sequence
  Description of Artificial Sequence: Synthetic oligonucleotide
cccucugauggcagugacc

SEQ ID NO: 188117 - RNA, 19 nt, Artificial Sequence
  Description of Artificial Sequence: Synthetic oligonucleotide
guaacucaugcuugcccau

SEQ ID NO: 188118 - RNA, 19 nt, Artificial Sequence
  Description of Artificial Sequence: Synthetic oligonucleotide
cagcauaucucguuacauu

SEQ ID NO: 188119 - RNA, 19 nt, Artificial Sequence
  Description of Artificial Sequence: Synthetic oligonucleotide
caagggguucugagacuca

SEQ ID NO: 188120 - RNA, 19 nt, Artificial Sequence
  Description of Artificial Sequence: Synthetic oligonucleotide
cccaugcaccacuucugag

SEQ ID NO: 188121 - RNA, 19 nt, Artificial Sequence
  Description of Artificial Sequence: Synthetic oligonucleotide
auguugcuucguaacucau

SEQ ID NO: 188122 - RNA, 19 nt, Artificial Sequence
  Description of Artificial Sequence: Synthetic oligonucleotide
ccgcuugucacacauaaau

SEQ ID NO: 188123 - RNA, 19 nt, Artificial Sequence
  Description of Artificial Sequence: Synthetic oligonucleotide
aggccuagucccacaggga

SEQ ID NO: 188124 - RNA, 19 nt, Artificial Sequence
  Description of Artificial Sequence: Synthetic oligonucleotide
ccaugcaccacuucugagu

SEQ ID NO: 188125 - RNA, 19 nt, Artificial Sequence
  Description of Artificial Sequence: Synthetic oligonucleotide
ccgcaagagaugucaacca

SEQ ID NO: 188126 - RNA, 19 nt, Artificial Sequence
  Description of Artificial Sequence: Synthetic oligonucleotide
gcccaugcaccacuucuga

SEQ ID NO: 188127 - RNA, 19 nt, Artificial Sequence
  Description of Artificial Sequence: Synthetic oligonucleotide
ggacacuuaugcuccuugu

SEQ ID NO: 188128 - RNA, 19 nt, Artificial Sequence
  Description of Artificial Sequence: Synthetic oligonucleotide
ccuuaguaaucacagugau

SEQ ID NO: 188129 - RNA, 19 nt, Artificial Sequence
  Description of Artificial Sequence: Synthetic oligonucleotide
gaccacaguucaaaauauu

SEQ ID NO: 188130 - RNA, 19 nt, Artificial Sequence
  Description of Artificial Sequence: Synthetic oligonucleotide
ggagaccgggcccauuucu

SEQ ID NO: 188131 - RNA, 19 nt, Artificial Sequence
  Description of Artificial Sequence: Synthetic oligonucleotide
gcauaucucguuacauuua

SEQ ID NO: 188132 - RNA, 19 nt, Artificial Sequence
  Description of Artificial Sequence: Synthetic oligonucleotide
ggauguucgagagcagggu

SEQ ID NO: 188133 - RNA, 19 nt, Artificial Sequence
  Description of Artificial Sequence: Synthetic oligonucleotide
caccacaacuaugugggau

SEQ ID NO: 188134 - RNA, 19 nt, Artificial Sequence
  Description of Artificial Sequence: Synthetic oligonucleotide
ggaugauccggcggugguc

SEQ ID NO: 188135 - RNA, 19 nt, Artificial Sequence
  Description of Artificial Sequence: Synthetic oligonucleotide
cacacuagucagcguggua

SEQ ID NO: 188136 - RNA, 19 nt, Artificial Sequence
  Description of Artificial Sequence: Synthetic oligonucleotide
cuucugaguuaggaacgua

SEQ ID NO: 188137 - RNA, 19 nt, Artificial Sequence
  Description of Artificial Sequence: Synthetic oligonucleotide
ggugucggugaugaggaau

SEQ ID NO: 188138 - RNA, 19 nt, Artificial Sequence
  Description of Artificial Sequence: Synthetic oligonucleotide
ggcauaccugggaacaggu

SEQ ID NO: 188139 - RNA, 19 nt, Artificial Sequence
  Description of Artificial Sequence: Synthetic oligonucleotide
gcgaguuguaggauaggcu

SEQ ID NO: 188140 - RNA, 19 nt, Artificial Sequence
  Description of Artificial Sequence: Synthetic oligonucleotide
gggugaggcgccucuucaa

SEQ ID NO: 188141 - RNA, 19 nt, Artificial Sequence
  Description of Artificial Sequence: Synthetic oligonucleotide
cugguucguuuuacuugua

SEQ ID NO: 188142 - RNA, 19 nt, Artificial Sequence
  Description of Artificial Sequence: Synthetic oligonucleotide
ggcgccucuucaaucauau

SEQ ID NO: 188143 - RNA, 19 nt, Artificial Sequence
  Description of Artificial Sequence: Synthetic oligonucleotide
ucacgcucucuaggccaua

SEQ ID NO: 188144 - RNA, 19 nt, Artificial Sequence
  Description of Artificial Sequence: Synthetic oligonucleotide
aggcgccucuucaaucaua

SEQ ID NO: 188145 - RNA, 19 nt, Artificial Sequence
  Description of Artificial Sequence: Synthetic oligonucleotide
ccacaacauugcgcuuugg

SEQ ID NO: 188146 - RNA, 19 nt, Artificial Sequence
  Description of Artificial Sequence: Synthetic oligonucleotide
ccauuauuuuagacgccau

SEQ ID NO: 188147 - RNA, 19 nt, Artificial Sequence
  Description of Artificial Sequence: Synthetic oligonucleotide
gcauaccugggaacaggua

SEQ ID NO: 188148 - RNA, 19 nt, Artificial Sequence
  Description of Artificial Sequence: Synthetic oligonucleotide
ccgcaaaggcugacauuga

SEQ ID NO: 188149 - RNA, 19 nt, Artificial Sequence
  Description of Artificial Sequence: Synthetic oligonucleotide
gguggccgugucugcgucu

SEQ ID NO: 188150 - RNA, 19 nt, Artificial Sequence
  Description of Artificial Sequence: Synthetic oligonucleotide
gcacacuagucagcguggu

SEQ ID NO: 188151 - RNA, 19 nt, Artificial Sequence
  Description of Artificial Sequence: Synthetic oligonucleotide
ccccuuauucacggccucu

SEQ ID NO: 188152 - RNA, 19 nt, Artificial Sequence
  Description of Artificial Sequence: Synthetic oligonucleotide
ccuucguggcagagcuuuu

SEQ ID NO: 188153 - RNA, 19 nt, Artificial Sequence
  Description of Artificial Sequence: Synthetic oligonucleotide
aauaaacacgauuacuagc

SEQ ID NO: 188154 - RNA, 19 nt, Artificial Sequence
  Description of Artificial Sequence: Synthetic oligonucleotide
gaugcauucacauagucug

SEQ ID NO: 188155 - RNA, 19 nt, Artificial Sequence
  Description of Artificial Sequence: Synthetic oligonucleotide
aauaauuggcgucucaucu

SEQ ID NO: 188156 - RNA, 19 nt, Artificial Sequence
  Description of Artificial Sequence: Synthetic oligonucleotide
gauagugggauguaggagg

SEQ ID NO: 188157 - RNA, 19 nt, Artificial Sequence
  Description of Artificial Sequence: Synthetic oligonucleotide
uuuaauuccccaauaaaac

SEQ ID NO: 188158 - RNA, 19 nt, Artificial Sequence
  Description of Artificial Sequence: Synthetic oligonucleotide
aauccauuguugcuagucc

SEQ ID NO: 188159 - RNA, 19 nt, Artificial Sequence
  Description of Artificial Sequence: Synthetic oligonucleotide
guuaccauaacaaugguag

SEQ ID NO: 188160 - RNA, 19 nt, Artificial Sequence
  Description of Artificial Sequence: Synthetic oligonucleotide
uauaugaagacguacugca

SEQ ID NO: 188161 - RNA, 19 nt, Artificial Sequence
  Description of Artificial Sequence: Synthetic oligonucleotide
aacuaugauaauaaacacg

SEQ ID NO: 188162 - RNA, 19 nt, Artificial Sequence
  Description of Artificial Sequence: Synthetic oligonucleotide
uaauagaagccuaugugcc

SEQ ID NO: 188163 - RNA, 19 nt, Artificial Sequence
  Description of Artificial Sequence: Synthetic oligonucleotide
guaauagaagccuaugugc

SEQ ID NO: 188164 - RNA, 19 nt, Artificial Sequence
  Description of Artificial Sequence: Synthetic oligonucleotide
ucgaugacaacaaauguac

SEQ ID NO: 188165 - RNA, 19 nt, Artificial Sequence
  Description of Artificial Sequence: Synthetic oligonucleotide
uaucaauccaaauaucaca

SEQ ID NO: 188166 - RNA, 19 nt, Artificial Sequence
  Description of Artificial Sequence: Synthetic oligonucleotide
uuuuaguuggcaccgagcu

SEQ ID NO: 188167 - RNA, 19 nt, Artificial Sequence
  Description of Artificial Sequence: Synthetic oligonucleotide
aauuggaauggcucccagc

SEQ ID NO: 188168 - RNA, 19 nt, Artificial Sequence
  Description of Artificial Sequence: Synthetic oligonucleotide
acuaugauaauaaacacga

SEQ ID NO: 188169 - RNA, 19 nt, Artificial Sequence
  Description of Artificial Sequence: Synthetic oligonucleotide
auugggcacauuuacacuc

SEQ ID NO: 188170 - RNA, 19 nt, Artificial Sequence
  Description of Artificial Sequence: Synthetic oligonucleotide
uucaacaggugucaggugc

SEQ ID NO: 188171 - RNA, 19 nt, Artificial Sequence
  Description of Artificial Sequence: Synthetic oligonucleotide
uugauugaaguuaacuucu

SEQ ID NO: 188172 - RNA, 19 nt, Artificial Sequence
  Description of Artificial Sequence: Synthetic oligonucleotide
gacaguuuggaagacaucc

SEQ ID NO: 188173 - RNA, 19 nt, Artificial Sequence
  Description of Artificial Sequence: Synthetic oligonucleotide
uccaguacgcaucuuauca

SEQ ID NO: 188174 - RNA, 19 nt, Artificial Sequence
  Description of Artificial Sequence: Synthetic oligonucleotide
aacacgauuacuagcagag

SEQ ID NO: 188175 - RNA, 19 nt, Artificial Sequence
  Description of Artificial Sequence: Synthetic oligonucleotide
uucuugguagccauuaaug

SEQ ID NO: 188176 - RNA, 19 nt, Artificial Sequence
  Description of Artificial Sequence: Synthetic oligonucleotide
ucuguuaaauucauaugga

SEQ ID NO: 188177 - RNA, 19 nt, Artificial Sequence
  Description of Artificial Sequence: Synthetic oligonucleotide
uuuuaguucaguccuugca

SEQ ID NO: 188178 - RNA, 19 nt, Artificial Sequence
  Description of Artificial Sequence: Synthetic oligonucleotide
aucaauccaaauaucacac

SEQ ID NO: 188179 - RNA, 19 nt, Artificial Sequence
  Description of Artificial Sequence: Synthetic oligonucleotide
aaugauuacucuguuaaau

SEQ ID NO: 188180 - RNA, 19 nt, Artificial Sequence
  Description of Artificial Sequence: Synthetic oligonucleotide
uuagcauuacgauggagca

SEQ ID NO: 188181 - RNA, 19 nt, Artificial Sequence
  Description of Artificial Sequence: Synthetic oligonucleotide
acguuuaucuucuuuagga

SEQ ID NO: 188182 - RNA, 19 nt, Artificial Sequence
  Description of Artificial Sequence: Synthetic oligonucleotide
aacuugagcaugccaauug

SEQ ID NO: 188183 - RNA, 19 nt, Artificial Sequence
  Description of Artificial Sequence: Synthetic oligonucleotide
cuggauaggacaagcaggg

SEQ ID NO: 188184 - RNA, 19 nt, Artificial Sequence
  Description of Artificial Sequence: Synthetic oligonucleotide
uuuauuaccugaugauccc

SEQ ID NO: 188185 - RNA, 19 nt, Artificial Sequence
  Description of Artificial Sequence: Synthetic oligonucleotide
auuggaauggcucccagcu

SEQ ID NO: 188186 - RNA, 19 nt, Artificial Sequence
  Description of Artificial Sequence: Synthetic oligonucleotide
ucuggucucauuauucccc

SEQ ID NO: 188187 - RNA, 19 nt, Artificial Sequence
  Description of Artificial Sequence: Synthetic oligonucleotide
uguauccccguacagauaa

SEQ ID NO: 188188 - RNA, 19 nt, Artificial Sequence
  Description of Artificial Sequence: Synthetic oligonucleotide
gaacuaugauaauaaacac

SEQ ID NO: 188189 - RNA, 19 nt, Artificial Sequence
  Description of Artificial Sequence: Synthetic oligonucleotide
auuaaaggcaauucuccug

SEQ ID NO: 188190 - RNA, 19 nt, Artificial Sequence
  Description of Artificial Sequence: Synthetic oligonucleotide
ggguauauuaacaaaacag

SEQ ID NO: 188191 - RNA, 19 nt, Artificial Sequence
  Description of Artificial Sequence: Synthetic oligonucleotide
agcauuacgauggagcagg

SEQ ID NO: 188192 - RNA, 19 nt, Artificial Sequence
  Description of Artificial Sequence: Synthetic oligonucleotide
guuagcauuacgauggagc

SEQ ID NO: 188193 - RNA, 19 nt, Artificial Sequence
  Description of Artificial Sequence: Synthetic oligonucleotide
ucaauuguguggagaagag

SEQ ID NO: 188194 - RNA, 19 nt, Artificial Sequence
  Description of Artificial Sequence: Synthetic oligonucleotide
agagaugccgcucuggucu

SEQ ID NO: 188195 - RNA, 19 nt, Artificial Sequence
  Description of Artificial Sequence: Synthetic oligonucleotide
uguaccaucuggcagcgcu

SEQ ID NO: 188196 - RNA, 19 nt, Artificial Sequence
  Description of Artificial Sequence: Synthetic oligonucleotide
auaucaauccaaauaucac

SEQ ID NO: 188197 - RNA, 19 nt, Artificial Sequence
  Description of Artificial Sequence: Synthetic oligonucleotide
uagugaggcaaccauuucc

SEQ ID NO: 188198 - RNA, 19 nt, Artificial Sequence
  Description of Artificial Sequence: Synthetic oligonucleotide
cuaguagguaauagaagcc

SEQ ID NO: 188199 - RNA, 19 nt, Artificial Sequence
  Description of Artificial Sequence: Synthetic oligonucleotide
gaauuuucguacuguguag

SEQ ID NO: 188200 - RNA, 19 nt, Artificial Sequence
  Description of Artificial Sequence: Synthetic oligonucleotide
gaaugaucuguaaaacccg

SEQ ID NO: 188201 - RNA, 19 nt, Artificial Sequence
  Description of Artificial Sequence: Synthetic oligonucleotide
uuucguacuguguagucca

SEQ ID NO: 188202 - RNA, 19 nt, Artificial Sequence
  Description of Artificial Sequence: Synthetic oligonucleotide
uuaguuggcaccgagcuac

SEQ ID NO: 188203 - RNA, 19 nt, Artificial Sequence
  Description of Artificial Sequence: Synthetic oligonucleotide
uggguauauuaacaaaaca

SEQ ID NO: 188204 - RNA, 19 nt, Artificial Sequence
  Description of Artificial Sequence: Synthetic oligonucleotide
uuggguauauuaacaaaac

SEQ ID NO: 188205 - RNA, 19 nt, Artificial Sequence
  Description of Artificial Sequence: Synthetic oligonucleotide
ccuaguagguaauagaagc

SEQ ID NO: 188206 - RNA, 19 nt, Artificial Sequence
  Description of Artificial Sequence: Synthetic oligonucleotide
cacgauuacuagcagagag

SEQ ID NO: 188207 - RNA, 19 nt, Artificial Sequence
  Description of Artificial Sequence: Synthetic oligonucleotide
ugaggauuucaugauauca

SEQ ID NO: 188208 - RNA, 19 nt, Artificial Sequence
  Description of Artificial Sequence: Synthetic oligonucleotide
uaauuggcgucucaucugc

SEQ ID NO: 188209 - RNA, 19 nt, Artificial Sequence
  Description of Artificial Sequence: Synthetic oligonucleotide
aaacacgauuacuagcaga

SEQ ID NO: 188210 - RNA, 19 nt, Artificial Sequence
  Description of Artificial Sequence: Synthetic oligonucleotide
ucucugaagagcuuauugu

SEQ ID NO: 188211 - RNA, 19 nt, Artificial Sequence
  Description of Artificial Sequence: Synthetic oligonucleotide
uuuucauguuggcuggaag

SEQ ID NO: 188212 - RNA, 19 nt, Artificial Sequence
  Description of Artificial Sequence: Synthetic oligonucleotide
guauugggcacauuuacac

SEQ ID NO: 188213 - RNA, 19 nt, Artificial Sequence
  Description of Artificial Sequence: Synthetic oligonucleotide
cacacggacauuuccauag

SEQ ID NO: 188214 - RNA, 19 nt, Artificial Sequence
  Description of Artificial Sequence: Synthetic oligonucleotide
aaauguaccagugcgccca

SEQ ID NO: 188215 - RNA, 19 nt, Artificial Sequence
  Description of Artificial Sequence: Synthetic oligonucleotide
uguuuuaguuggcaccgag

SEQ ID NO: 188216 - RNA, 19 nt, Artificial Sequence
  Description of Artificial Sequence: Synthetic oligonucleotide
ggaaugaucuguaaaaccc

SEQ ID NO: 188217 - RNA, 19 nt, Artificial Sequence
  Description of Artificial Sequence: Synthetic oligonucleotide
ugcuuguaauuucuuaaac

SEQ ID NO: 188218 - RNA, 19 nt, Artificial Sequence
  Description of Artificial Sequence: Synthetic oligonucleotide
caaaaucuccaccuaguag

SEQ ID NO: 188219 - RNA, 19 nt, Artificial Sequence
  Description of Artificial Sequence: Synthetic oligonucleotide
auuucaugauaucaaucca

SEQ ID NO: 188220 - RNA, 19 nt, Artificial Sequence
  Description of Artificial Sequence: Synthetic oligonucleotide
uuucuguuggucacgucgc

SEQ ID NO: 188221 - RNA, 19 nt, Artificial Sequence
  Description of Artificial Sequence: Synthetic oligonucleotide
aaagacuaucagugcuaac

SEQ ID NO: 188222 - RNA, 19 nt, Artificial Sequence
  Description of Artificial Sequence: Synthetic oligonucleotide
aguucuguuagcauuacga

SEQ ID NO: 188223 - RNA, 19 nt, Artificial Sequence
  Description of Artificial Sequence: Synthetic oligonucleotide
uuugacuggaaugauuacu

SEQ ID NO: 188224 - RNA, 19 nt, Artificial Sequence
  Description of Artificial Sequence: Synthetic oligonucleotide
cugaugaucccuagugugg

SEQ ID NO: 188225 - RNA, 19 nt, Artificial Sequence
  Description of Artificial Sequence: Synthetic oligonucleotide
ugucaucagccauucuucg

SEQ ID NO: 188226 - RNA, 19 nt, Artificial Sequence
  Description of Artificial Sequence: Synthetic oligonucleotide
auuuucguacuguguaguc

SEQ ID NO: 188227 - RNA, 19 nt, Artificial Sequence
  Description of Artificial Sequence: Synthetic oligonucleotide
uuuuggguauauuaacaaa

SEQ ID NO: 188228 - RNA, 19 nt, Artificial Sequence
  Description of Artificial Sequence: Synthetic oligonucleotide
uuaacauguacagaacuau

SEQ ID NO: 188229 - RNA, 19 nt, Artificial Sequence
  Description of Artificial Sequence: Synthetic oligonucleotide
ucuguauccccguacagau

SEQ ID NO: 188230 - RNA, 19 nt, Artificial Sequence
  Description of Artificial Sequence: Synthetic oligonucleotide
aucacacuauuuaauuccc

SEQ ID NO: 188231 - RNA, 19 nt, Artificial Sequence
  Description of Artificial Sequence: Synthetic oligonucleotide
aauuuucguacuguguagu

SEQ ID NO: 188232 - RNA, 19 nt, Artificial Sequence
  Description of Artificial Sequence: Synthetic oligonucleotide
ucuccguaggauaccaggc

SEQ ID NO: 188233 - RNA, 19 nt, Artificial Sequence
  Description of Artificial Sequence: Synthetic oligonucleotide
uagacauccacuuuccguu

SEQ ID NO: 188234 - RNA, 19 nt, Artificial Sequence
  Description of Artificial Sequence: Synthetic oligonucleotide
uuaguucaguccuugcacu

SEQ ID NO: 188235 - RNA, 19 nt, Artificial Sequence
  Description of Artificial Sequence: Synthetic oligonucleotide
uuccauagguccagcagcc

SEQ ID NO: 188236 - RNA, 19 nt, Artificial Sequence
  Description of Artificial Sequence: Synthetic oligonucleotide
aaugguagcuguguuuugu

SEQ ID NO: 188237 - RNA, 19 nt, Artificial Sequence
  Description of Artificial Sequence: Synthetic oligonucleotide
uuuucguacuguguagucc

SEQ ID NO: 188238 - RNA, 19 nt, Artificial Sequence
  Description of Artificial Sequence: Synthetic oligonucleotide
agaaggucccuguccgucc

SEQ ID NO: 188239 - RNA, 19 nt, Artificial Sequence
  Description of Artificial Sequence: Synthetic oligonucleotide
auaauuggcgucucaucug

SEQ ID NO: 188240 - RNA, 19 nt, Artificial Sequence
  Description of Artificial Sequence: Synthetic oligonucleotide
acauuuggcgaaaugguag

SEQ ID NO: 188241 - RNA, 19 nt, Artificial Sequence
  Description of Artificial Sequence: Synthetic oligonucleotide
guguuuuguucccagauca

SEQ ID NO: 188242 - RNA, 19 nt, Artificial Sequence
  Description of Artificial Sequence: Synthetic oligonucleotide
agguaauagaagccuaugu

SEQ ID NO: 188243 - RNA, 19 nt, Artificial Sequence
  Description of Artificial Sequence: Synthetic oligonucleotide
ugccaauuggggugaaagg

SEQ ID NO: 188244 - RNA, 19 nt, Artificial Sequence
  Description of Artificial Sequence: Synthetic oligonucleotide
uacgcaucuuaucauucug

SEQ ID NO: 188245 - RNA, 19 nt, Artificial Sequence
  Description of Artificial Sequence: Synthetic oligonucleotide
auaacaaugguagcugugu

SEQ ID NO: 188246 - RNA, 19 nt, Artificial Sequence
  Description of Artificial Sequence: Synthetic oligonucleotide
caguguagcucucacauuc

SEQ ID NO: 188247 - RNA, 19 nt, Artificial Sequence
  Description of Artificial Sequence: Synthetic oligonucleotide
gucuccguaggauaccagg

SEQ ID NO: 188248 - RNA, 19 nt, Artificial Sequence
  Description of Artificial Sequence: Synthetic oligonucleotide
uaguagguaauagaagccu

SEQ ID NO: 188249 - RNA, 19 nt, Artificial Sequence
  Description of Artificial Sequence: Synthetic oligonucleotide
uacagauaauguuccagaa

SEQ ID NO: 188250 - RNA, 19 nt, Artificial Sequence
  Description of Artificial Sequence: Synthetic oligonucleotide
ugaucuguaaaacccgguu

SEQ ID NO: 188251 - RNA, 19 nt, Artificial Sequence
  Description of Artificial Sequence: Synthetic oligonucleotide
guauaugaagacguacugc

SEQ ID NO: 188252 - RNA, 19 nt, Artificial Sequence
  Description of Artificial Sequence: Synthetic oligonucleotide
uucuuuaggaaaagauuua

SEQ ID NO: 188253 - RNA, 19 nt, Artificial Sequence
  Description of Artificial Sequence: Synthetic oligonucleotide
aguuuuacguuuaucuucu

SEQ ID NO: 188254 - RNA, 19 nt, Artificial Sequence
  Description of Artificial Sequence: Synthetic oligonucleotide
aauuccccaauaaaacacu

SEQ ID NO: 188255 - RNA, 19 nt, Artificial Sequence
  Description of Artificial Sequence: Synthetic oligonucleotide
acuauuuaauuccccaaua

SEQ ID NO: 188256 - RNA, 19 nt, Artificial Sequence
  Description of Artificial Sequence: Synthetic oligonucleotide
guacagauaauguuccaga

SEQ ID NO: 188257 - RNA, 19 nt, Artificial Sequence
  Description of Artificial Sequence: Synthetic oligonucleotide
acugcaauaauuggcgucu

SEQ ID NO: 188258 - RNA, 19 nt, Artificial Sequence
  Description of Artificial Sequence: Synthetic oligonucleotide
uauauacaauuuuggguau

SEQ ID NO: 188259 - RNA, 19 nt, Artificial Sequence
  Description of Artificial Sequence: Synthetic oligonucleotide
auuaccugaugaucccuag

SEQ ID NO: 188260 - RNA, 19 nt, Artificial Sequence
  Description of Artificial Sequence: Synthetic oligonucleotide
uccguaggauaccaggcca

SEQ ID NO: 188261 - RNA, 19 nt, Artificial Sequence
  Description of Artificial Sequence: Synthetic oligonucleotide
ucacacuauuuaauucccc

SEQ ID NO: 188262 - RNA, 19 nt, Artificial Sequence
  Description of Artificial Sequence: Synthetic oligonucleotide
aguucuguauccccguaca

SEQ ID NO: 188263 - RNA, 19 nt, Artificial Sequence
  Description of Artificial Sequence: Synthetic oligonucleotide
augauuacucuguuaaauu

SEQ ID NO: 188264 - RNA, 19 nt, Artificial Sequence
  Description of Artificial Sequence: Synthetic oligonucleotide
ugacaggcggaaagaauug

SEQ ID NO: 188265 - RNA, 19 nt, Artificial Sequence
  Description of Artificial Sequence: Synthetic oligonucleotide
auuguguggagaagagggc

SEQ ID NO: 188266 - RNA, 19 nt, Artificial Sequence
  Description of Artificial Sequence: Synthetic oligonucleotide
aaaagacuaucagugcuaa

SEQ ID NO: 188267 - RNA, 19 nt, Artificial Sequence
  Description of Artificial Sequence: Synthetic oligonucleotide
gaacugagugaugaggcgc

SEQ ID NO: 188268 - RNA, 19 nt, Artificial Sequence
  Description of Artificial Sequence: Synthetic oligonucleotide
uuggcgaaaugguagugcu

SEQ ID NO: 188269 - RNA, 19 nt, Artificial Sequence
  Description of Artificial Sequence: Synthetic oligonucleotide
aaccccuucaacagguguc

SEQ ID NO: 188270 - RNA, 19 nt, Artificial Sequence
  Description of Artificial Sequence: Synthetic oligonucleotide
uaauccauuguugcuaguc

SEQ ID NO: 188271 - RNA, 19 nt, Artificial Sequence
  Description of Artificial Sequence: Synthetic oligonucleotide
uuugacaggcggaaagaau

SEQ ID NO: 188272 - RNA, 19 nt, Artificial Sequence
  Description of Artificial Sequence: Synthetic oligonucleotide
ugaaguuggcauagucuga

SEQ ID NO: 188273 - RNA, 19 nt, Artificial Sequence
  Description of Artificial Sequence: Synthetic oligonucleotide
gcaaagaauaauugagccc

SEQ ID NO: 188274 - RNA, 19 nt, Artificial Sequence
  Description of Artificial Sequence: Synthetic oligonucleotide
ucaacaggugucaggugca

SEQ ID NO: 188275 - RNA, 19 nt, Artificial Sequence
  Description of Artificial Sequence: Synthetic oligonucleotide
uauacaauuuuggguauau

SEQ ID NO: 188276 - RNA, 19 nt, Artificial Sequence
  Description of Artificial Sequence: Synthetic oligonucleotide
uccaccuaguagguaauag

SEQ ID NO: 188277 - RNA, 19 nt, Artificial Sequence
  Description of Artificial Sequence: Synthetic oligonucleotide
acgauuacuagcagagagg

SEQ ID NO: 188278 - RNA, 19 nt, Artificial Sequence
  Description of Artificial Sequence: Synthetic oligonucleotide
uucuaauccauuguugcua

SEQ ID NO: 188279 - RNA, 19 nt, Artificial Sequence
  Description of Artificial Sequence: Synthetic oligonucleotide
gaagacguacugcauaucu

SEQ ID NO: 188280 - RNA, 19 nt, Artificial Sequence
  Description of Artificial Sequence: Synthetic oligonucleotide
ccuggauaggacaagcagg

SEQ ID NO: 188281 - RNA, 19 nt, Artificial Sequence
  Description of Artificial Sequence: Synthetic oligonucleotide
cacgauagccccugcauac

SEQ ID NO: 188282 - RNA, 19 nt, Artificial Sequence
  Description of Artificial Sequence: Synthetic oligonucleotide
uucagggaaucaaaaguuu

SEQ ID NO: 188283 - RNA, 19 nt, Artificial Sequence
  Description of Artificial Sequence: Synthetic oligonucleotide
augccaauuggggugaaag

SEQ ID NO: 188284 - RNA, 19 nt, Artificial Sequence
  Description of Artificial Sequence: Synthetic oligonucleotide
uuccguucugaaugcauca

SEQ ID NO: 188285 - RNA, 19 nt, Artificial Sequence
  Description of Artificial Sequence: Synthetic oligonucleotide
uggucccauugucagagug

SEQ ID NO: 188286 - RNA, 19 nt, Artificial Sequence
  Description of Artificial Sequence: Synthetic oligonucleotide
aguacgcaucuuaucauuc

SEQ ID NO: 188287 - RNA, 19 nt, Artificial Sequence
  Description of Artificial Sequence: Synthetic oligonucleotide
uucuguauccccguacaga

SEQ ID NO: 188288 - RNA, 19 nt, Artificial Sequence
  Description of Artificial Sequence: Synthetic oligonucleotide
accaccuuguagcagaauu

SEQ ID NO: 188289 - RNA, 19 nt, Artificial Sequence
  Description of Artificial Sequence: Synthetic oligonucleotide
auagccccugcauacugag

SEQ ID NO: 188290 - RNA, 19 nt, Artificial Sequence
  Description of Artificial Sequence: Synthetic oligonucleotide
cuguguucucuucaccccg

SEQ ID NO: 188291 - RNA, 19 nt, Artificial Sequence
  Description of Artificial Sequence: Synthetic oligonucleotide
auguuuacguuauucgauu

SEQ ID NO: 188292 - RNA, 19 nt, Artificial Sequence
  Description of Artificial Sequence: Synthetic oligonucleotide
uauuaccugaugaucccua

SEQ ID NO: 188293 - RNA, 19 nt, Artificial Sequence
  Description of Artificial Sequence: Synthetic oligonucleotide
gagcccaauuuccaggcug

SEQ ID NO: 188294 - RNA, 19 nt, Artificial Sequence
  Description of Artificial Sequence: Synthetic oligonucleotide
gacaguguagcucucacau

SEQ ID NO: 188295 - RNA, 19 nt, Artificial Sequence
  Description of Artificial Sequence: Synthetic oligonucleotide
gagggauauuuacaguaca

SEQ ID NO: 188296 - RNA, 19 nt, Artificial Sequence
  Description of Artificial Sequence: Synthetic oligonucleotide
ugcaauaauuggcgucuca

SEQ ID NO: 188297 - RNA, 19 nt, Artificial Sequence
  Description of Artificial Sequence: Synthetic oligonucleotide
aagacguacugcauaucug

SEQ ID NO: 188298 - RNA, 19 nt, Artificial Sequence
  Description of Artificial Sequence: Synthetic oligonucleotide
cagacacacggacauuucc

SEQ ID NO: 188299 - RNA, 19 nt, Artificial Sequence
  Description of Artificial Sequence: Synthetic oligonucleotide
ugcgaugauguugaucaug

SEQ ID NO: 188300 - RNA, 19 nt, Artificial Sequence
  Description of Artificial Sequence: Synthetic oligonucleotide
gaauuggaauggcucccag

SEQ ID NO: 188301 - RNA, 19 nt, Artificial Sequence
  Description of Artificial Sequence: Synthetic oligonucleotide
auagugggauguaggaggg

SEQ ID NO: 188302 - RNA, 19 nt, Artificial Sequence
  Description of Artificial Sequence: Synthetic oligonucleotide
gacaggcggaaagaauugg

SEQ ID NO: 188303 - RNA, 19 nt, Artificial Sequence
  Description of Artificial Sequence: Synthetic oligonucleotide
acguacugcauaucugucu

SEQ ID NO: 188304 - RNA, 19 nt, Artificial Sequence
  Description of Artificial Sequence: Synthetic oligonucleotide
aguguagcucucacauucc

SEQ ID NO: 188305 - RNA, 19 nt, Artificial Sequence
  Description of Artificial Sequence: Synthetic oligonucleotide
cagaagugguacacuuugg

SEQ ID NO: 188306 - RNA, 19 nt, Artificial Sequence
  Description of Artificial Sequence: Synthetic oligonucleotide
aacugccggaucugccgac

SEQ ID NO: 188307 - RNA, 19 nt, Artificial Sequence
  Description of Artificial Sequence: Synthetic oligonucleotide
uauccccguacagauaaug

SEQ ID NO: 188308 - RNA, 19 nt, Artificial Sequence
  Description of Artificial Sequence: Synthetic oligonucleotide
caucuuaucauucuggauu

SEQ ID NO: 188309 - RNA, 19 nt, Artificial Sequence
  Description of Artificial Sequence: Synthetic oligonucleotide
uuauugucaucagccauuc

SEQ ID NO: 188310 - RNA, 19 nt, Artificial Sequence
  Description of Artificial Sequence: Synthetic oligonucleotide
agugaggcaaccauuuccu

SEQ ID NO: 188311 - RNA, 19 nt, Artificial Sequence
  Description of Artificial Sequence: Synthetic oligonucleotide
uuaccugaugaucccuagu

SEQ ID NO: 188312 - RNA, 19 nt, Artificial Sequence
  Description of Artificial Sequence: Synthetic oligonucleotide
ggaacugagugaugaggcg

SEQ ID NO: 188313 - RNA, 19 nt, Artificial Sequence
  Description of Artificial Sequence: Synthetic oligonucleotide
caccuaguagguaauagaa

SEQ ID NO: 188314 - RNA, 19 nt, Artificial Sequence
  Description of Artificial Sequence: Synthetic oligonucleotide
uggggaccuggccagaagu

SEQ ID NO: 188315 - RNA, 19 nt, Artificial Sequence
  Description of Artificial Sequence: Synthetic oligonucleotide
cucaauuguguggagaaga

SEQ ID NO: 188316 - RNA, 19 nt, Artificial Sequence
  Description of Artificial Sequence: Synthetic oligonucleotide
uguuuacguuauucgauuu

SEQ ID NO: 188317 - RNA, 19 nt, Artificial Sequence
  Description of Artificial Sequence: Synthetic oligonucleotide
accccguuugacuggaaug

SEQ ID NO: 188318 - RNA, 19 nt, Artificial Sequence
  Description of Artificial Sequence: Synthetic oligonucleotide
ugaugaucccuaguguggu

SEQ ID NO: 188319 - RNA, 19 nt, Artificial Sequence
  Description of Artificial Sequence: Synthetic oligonucleotide
cuugaaguuggcauagucu

SEQ ID NO: 188320 - RNA, 19 nt, Artificial Sequence
  Description of Artificial Sequence: Synthetic oligonucleotide
cuccguaggauaccaggcc

SEQ ID NO: 188321 - RNA, 19 nt, Artificial Sequence
  Description of Artificial Sequence: Synthetic oligonucleotide
uguagccgcaggcucuuga

SEQ ID NO: 188322 - RNA, 19 nt, Artificial Sequence
  Description of Artificial Sequence: Synthetic oligonucleotide
cacugcaauaauuggcguc

SEQ ID NO: 188323 - RNA, 19 nt, Artificial Sequence
  Description of Artificial Sequence: Synthetic oligonucleotide
aucgaugacaacaaaugua

SEQ ID NO: 188324 - RNA, 19 nt, Artificial Sequence
  Description of Artificial Sequence: Synthetic oligonucleotide
gauugaaguuaacuucuua

SEQ ID NO: 188325 - RNA, 19 nt, Artificial Sequence
  Description of Artificial Sequence: Synthetic oligonucleotide
uuauuaccugaugaucccu

SEQ ID NO: 188326 - RNA, 19 nt, Artificial Sequence
  Description of Artificial Sequence: Synthetic oligonucleotide
uuuaguuggcaccgagcua

SEQ ID NO: 188327 - RNA, 19 nt, Artificial Sequence
  Description of Artificial Sequence: Synthetic oligonucleotide
aacugagugaugaggcgcu

SEQ ID NO: 188328 - RNA, 19 nt, Artificial Sequence
  Description of Artificial Sequence: Synthetic oligonucleotide
cacuuuccguucugaaugc

SEQ ID NO: 188329 - RNA, 19 nt, Artificial Sequence
  Description of Artificial Sequence: Synthetic oligonucleotide
cacugugaugucuccguag

SEQ ID NO: 188330 - RNA, 19 nt, Artificial Sequence
  Description of Artificial Sequence: Synthetic oligonucleotide
accuaguagguaauagaag

SEQ ID NO: 188331 - RNA, 19 nt, Artificial Sequence
  Description of Artificial Sequence: Synthetic oligonucleotide
acgcaucuuaucauucugg

SEQ ID NO: 188332 - RNA, 19 nt, Artificial Sequence
  Description of Artificial Sequence: Synthetic oligonucleotide
uccucgacagacacacgga

SEQ ID NO: 188333 - RNA, 19 nt, Artificial Sequence
  Description of Artificial Sequence: Synthetic oligonucleotide
caccgagcuaccuggaaug

SEQ ID NO: 188334 - RNA, 19 nt, Artificial Sequence
  Description of Artificial Sequence: Synthetic oligonucleotide
gaaugauuacucuguuaaa

SEQ ID NO: 188335 - RNA, 19 nt, Artificial Sequence
  Description of Artificial Sequence: Synthetic oligonucleotide
auaggacaagcagggagag

SEQ ID NO: 188336 - RNA, 19 nt, Artificial Sequence
  Description of Artificial Sequence: Synthetic oligonucleotide
augcagaauuuucguacug

SEQ ID NO: 188337 - RNA, 19 nt, Artificial Sequence
  Description of Artificial Sequence: Synthetic oligonucleotide
gcggaaagaauuggaaugg

SEQ ID NO: 188338 - RNA, 19 nt, Artificial Sequence
  Description of Artificial Sequence: Synthetic oligonucleotide
cauaucugucuguaccauc

SEQ ID NO: 188339 - RNA, 19 nt, Artificial Sequence
  Description of Artificial Sequence: Synthetic oligonucleotide
guuggcaccgagcuaccug

SEQ ID NO: 188340 - RNA, 19 nt, Artificial Sequence
  Description of Artificial Sequence: Synthetic oligonucleotide
ugguuuucuguuggucacg

SEQ ID NO: 188341 - RNA, 19 nt, Artificial Sequence
  Description of Artificial Sequence: Synthetic oligonucleotide
aguauugggcacauuuaca

SEQ ID NO: 188342 - RNA, 19 nt, Artificial Sequence
  Description of Artificial Sequence: Synthetic oligonucleotide
guugcuagucccugggauc

SEQ ID NO: 188343 - RNA, 19 nt, Artificial Sequence
  Description of Artificial Sequence: Synthetic oligonucleotide
accugaugaucccuagugu

SEQ ID NO: 188344 - RNA, 19 nt, Artificial Sequence
  Description of Artificial Sequence: Synthetic oligonucleotide
uggcgucucaucugcagga

SEQ ID NO: 188345 - RNA, 19 nt, Artificial Sequence
  Description of Artificial Sequence: Synthetic oligonucleotide
uguguucucuucaccccgu

SEQ ID NO: 188346 - RNA, 19 nt, Artificial Sequence
  Description of Artificial Sequence: Synthetic oligonucleotide
guucaguccuugcacuggc

SEQ ID NO: 188347 - RNA, 19 nt, Artificial Sequence
  Description of Artificial Sequence: Synthetic oligonucleotide
uggggugguuccccgacug

SEQ ID NO: 188348 - RNA, 19 nt, Artificial Sequence
  Description of Artificial Sequence: Synthetic oligonucleotide
guucuguauccccguacag

SEQ ID NO: 188349 - RNA, 19 nt, Artificial Sequence
  Description of Artificial Sequence: Synthetic oligonucleotide
ugguuaccauaacaauggu

SEQ ID NO: 188350 - RNA, 19 nt, Artificial Sequence
  Description of Artificial Sequence: Synthetic oligonucleotide
uagcauuacgauggagcag

SEQ ID NO: 188351 - RNA, 19 nt, Artificial Sequence
  Description of Artificial Sequence: Synthetic oligonucleotide
gauguuuacguuauucgau

SEQ ID NO: 188352 - RNA, 19 nt, Artificial Sequence
  Description of Artificial Sequence: Synthetic oligonucleotide
gccaauuggggugaaaggc

SEQ ID NO: 188353 - RNA, 19 nt, Artificial Sequence
  Description of Artificial Sequence: Synthetic oligonucleotide
uacugaggguuacaggcuu

SEQ ID NO: 188354 - RNA, 19 nt, Artificial Sequence
  Description of Artificial Sequence: Synthetic oligonucleotide
gauggggugguuccccgac

SEQ ID NO: 188355 - RNA, 19 nt, Artificial Sequence
  Description of Artificial Sequence: Synthetic oligonucleotide
accacgauagccccugcau

SEQ ID NO: 188356 - RNA, 19 nt, Artificial Sequence
  Description of Artificial Sequence: Synthetic oligonucleotide
ugaugaggcgcugugguuu

SEQ ID NO: 188357 - RNA, 19 nt, Artificial Sequence
  Description of Artificial Sequence: Synthetic oligonucleotide
uuacaggcuuucaccuucu

SEQ ID NO: 188358 - RNA, 19 nt, Artificial Sequence
  Description of Artificial Sequence: Synthetic oligonucleotide
accagugcgcccaacaccu

SEQ ID NO: 188359 - RNA, 19 nt, Artificial Sequence
  Description of Artificial Sequence: Synthetic oligonucleotide
uagcagaauucauacuguu

SEQ ID NO: 188360 - RNA, 19 nt, Artificial Sequence
  Description of Artificial Sequence: Synthetic oligonucleotide
gaugucuccguaggauacc

SEQ ID NO: 188361 - RNA, 19 nt, Artificial Sequence
  Description of Artificial Sequence: Synthetic oligonucleotide
gauccggcucacaaaacca

SEQ ID NO: 188362 - RNA, 19 nt, Artificial Sequence
  Description of Artificial Sequence: Synthetic oligonucleotide
uuacucuguuaaauucaua

SEQ ID NO: 188363 - RNA, 19 nt, Artificial Sequence
  Description of Artificial Sequence: Synthetic oligonucleotide
agacacacggacauuucca

SEQ ID NO: 188364 - RNA, 19 nt, Artificial Sequence
  Description of Artificial Sequence: Synthetic oligonucleotide
gaggucucggacaguguag

SEQ ID NO: 188365 - RNA, 19 nt, Artificial Sequence
  Description of Artificial Sequence: Synthetic oligonucleotide
aggcaauucuccugucugu

SEQ ID NO: 188366 - RNA, 19 nt, Artificial Sequence
  Description of Artificial Sequence: Synthetic oligonucleotide
cccguacagauaauguucc

SEQ ID NO: 188367 - RNA, 19 nt, Artificial Sequence
  Description of Artificial Sequence: Synthetic oligonucleotide
uggaccacgauagccccug

SEQ ID NO: 188368 - RNA, 19 nt, Artificial Sequence
  Description of Artificial Sequence: Synthetic oligonucleotide
uuccaguacgcaucuuauc

SEQ ID NO: 188369 - RNA, 19 nt, Artificial Sequence
  Description of Artificial Sequence: Synthetic oligonucleotide
ucagaaucuggaaccccuu

SEQ ID NO: 188370 - RNA, 19 nt, Artificial Sequence
  Description of Artificial Sequence: Synthetic oligonucleotide
gccauguuacauuuggcga

SEQ ID NO: 188371 - RNA, 19 nt, Artificial Sequence
  Description of Artificial Sequence: Synthetic oligonucleotide
agaauuggaauggcuccca

SEQ ID NO: 188372 - RNA, 19 nt, Artificial Sequence
  Description of Artificial Sequence: Synthetic oligonucleotide
gcucacaaaaccauagaca

SEQ ID NO: 188373 - RNA, 19 nt, Artificial Sequence
  Description of Artificial Sequence: Synthetic oligonucleotide
ggcuuucaccuucuugagg

SEQ ID NO: 188374 - RNA, 19 nt, Artificial Sequence
  Description of Artificial Sequence: Synthetic oligonucleotide
caguucuguauccccguac

SEQ ID NO: 188375 - RNA, 19 nt, Artificial Sequence
  Description of Artificial Sequence: Synthetic oligonucleotide
ugaaugcaucauguccagc

SEQ ID NO: 188376 - RNA, 19 nt, Artificial Sequence
  Description of Artificial Sequence: Synthetic oligonucleotide
uauugucaucagccauucu

SEQ ID NO: 188377 - RNA, 19 nt, Artificial Sequence
  Description of Artificial Sequence: Synthetic oligonucleotide
gauuacuagcagagaggac

SEQ ID NO: 188378 - RNA, 19 nt, Artificial Sequence
  Description of Artificial Sequence: Synthetic oligonucleotide
gaaguggaacugccggauc

SEQ ID NO: 188379 - RNA, 19 nt, Artificial Sequence
  Description of Artificial Sequence: Synthetic oligonucleotide
guagcugauagugggaugu

SEQ ID NO: 188380 - RNA, 19 nt, Artificial Sequence
  Description of Artificial Sequence: Synthetic oligonucleotide
cuuauugucaucagccauu

SEQ ID NO: 188381 - RNA, 19 nt, Artificial Sequence
  Description of Artificial Sequence: Synthetic oligonucleotide
ucuccaccuaguagguaau

SEQ ID NO: 188382 - RNA, 19 nt, Artificial Sequence
  Description of Artificial Sequence: Synthetic oligonucleotide
aguagguaauagaagccua

SEQ ID NO: 188383 - RNA, 19 nt, Artificial Sequence
  Description of Artificial Sequence: Synthetic oligonucleotide
cugccgugcuggaauuucc

SEQ ID NO: 188384 - RNA, 19 nt, Artificial Sequence
  Description of Artificial Sequence: Synthetic oligonucleotide
cagggagagcguugaauuc

SEQ ID NO: 188385 - RNA, 19 nt, Artificial Sequence
  Description of Artificial Sequence: Synthetic oligonucleotide
cagaaucuggaaccccuuc

SEQ ID NO: 188386 - RNA, 19 nt, Artificial Sequence
  Description of Artificial Sequence: Synthetic oligonucleotide
gaacugccggaucugccga

SEQ ID NO: 188387 - RNA, 19 nt, Artificial Sequence
  Description of Artificial Sequence: Synthetic oligonucleotide
agguggccuggauaggaca

SEQ ID NO: 188388 - RNA, 19 nt, Artificial Sequence
  Description of Artificial Sequence: Synthetic oligonucleotide
cagugcgcccaacaccugc

SEQ ID NO: 188389 - RNA, 19 nt, Artificial Sequence
  Description of Artificial Sequence: Synthetic oligonucleotide
uuucugccgguagccauca

SEQ ID NO: 188390 - RNA, 19 nt, Artificial Sequence
  Description of Artificial Sequence: Synthetic oligonucleotide
uggggauagugaggcaacc

SEQ ID NO: 188391 - RNA, 19 nt, Artificial Sequence
  Description of Artificial Sequence: Synthetic oligonucleotide
ccccguacagauaauguuc

SEQ ID NO: 188392 - RNA, 19 nt, Artificial Sequence
  Description of Artificial Sequence: Synthetic oligonucleotide
uggaccauguguggucucu

SEQ ID NO: 188393 - RNA, 19 nt, Artificial Sequence
  Description of Artificial Sequence: Synthetic oligonucleotide
uaguuggcaccgagcuacc

SEQ ID NO: 188394 - RNA, 19 nt, Artificial Sequence
  Description of Artificial Sequence: Synthetic oligonucleotide
ggagggauauuuacaguac

SEQ ID NO: 188395 - RNA, 19 nt, Artificial Sequence
  Description of Artificial Sequence: Synthetic oligonucleotide
gauagccccugcauacuga

SEQ ID NO: 188396 - RNA, 19 nt, Artificial Sequence
  Description of Artificial Sequence: Synthetic oligonucleotide
gacguacugcauaucuguc

SEQ ID NO: 188397 - RNA, 19 nt, Artificial Sequence
  Description of Artificial Sequence: Synthetic oligonucleotide
cuaguguggugccagagau

SEQ ID NO: 188398 - RNA, 19 nt, Artificial Sequence
  Description of Artificial Sequence: Synthetic oligonucleotide
auccccguacagauaaugu

SEQ ID NO: 188399 - RNA, 19 nt, Artificial Sequence
  Description of Artificial Sequence: Synthetic oligonucleotide
ucccauugucagaguguga

SEQ ID NO: 188400 - RNA, 19 nt, Artificial Sequence
  Description of Artificial Sequence: Synthetic oligonucleotide
auauacaauuuuggguaua

SEQ ID NO: 188401 - RNA, 19 nt, Artificial Sequence
  Description of Artificial Sequence: Synthetic oligonucleotide
ccggcucacaaaaccauag

SEQ ID NO: 188402 - RNA, 19 nt, Artificial Sequence
  Description of Artificial Sequence: Synthetic oligonucleotide
augaucuguaaaacccggu

SEQ ID NO: 188403 - RNA, 19 nt, Artificial Sequence
  Description of Artificial Sequence: Synthetic oligonucleotide
uaggagucuuucugccggu

SEQ ID NO: 188404 - RNA, 19 nt, Artificial Sequence
  Description of Artificial Sequence: Synthetic oligonucleotide
cauuuggcgaaaugguagu

SEQ ID NO: 188405 - RNA, 19 nt, Artificial Sequence
  Description of Artificial Sequence: Synthetic oligonucleotide
ucuguaaaacccgguucuu

SEQ ID NO: 188406 - RNA, 19 nt, Artificial Sequence
  Description of Artificial Sequence: Synthetic oligonucleotide
ugccggaucugccgacucu

SEQ ID NO: 188407 - RNA, 19 nt, Artificial Sequence
  Description of Artificial Sequence: Synthetic oligonucleotide
guaggauaccaggccauca

SEQ ID NO: 188408 - RNA, 19 nt, Artificial Sequence
  Description of Artificial Sequence: Synthetic oligonucleotide
gaaccccuucaacaggugu

SEQ ID NO: 188409 - RNA, 19 nt, Artificial Sequence
  Description of Artificial Sequence: Synthetic oligonucleotide
ugaagacguacugcauauc

SEQ ID NO: 188410 - RNA, 19 nt, Artificial Sequence
  Description of Artificial Sequence: Synthetic oligonucleotide
cagagaugccgcucugguc

SEQ ID NO: 188411 - RNA, 19 nt, Artificial Sequence
  Description of Artificial Sequence: Synthetic oligonucleotide
aauuggcgucucaucugca

SEQ ID NO: 188412 - RNA, 19 nt, Artificial Sequence
  Description of Artificial Sequence: Synthetic oligonucleotide
cauuacgauggagcaggac

SEQ ID NO: 188413 - RNA, 19 nt, Artificial Sequence
  Description of Artificial Sequence: Synthetic oligonucleotide
ggugucaggugcacucugg

SEQ ID NO: 188414 - RNA, 19 nt, Artificial Sequence
  Description of Artificial Sequence: Synthetic oligonucleotide
cacuauuuaauuccccaau

SEQ ID NO: 188415 - RNA, 19 nt, Artificial Sequence
  Description of Artificial Sequence: Synthetic oligonucleotide
acgcgcuccaggacugugc

SEQ ID NO: 188416 - RNA, 19 nt, Artificial Sequence
  Description of Artificial Sequence: Synthetic oligonucleotide
aggcgcugugguuuucugu

SEQ ID NO: 188417 - RNA, 19 nt, Artificial Sequence
  Description of Artificial Sequence: Synthetic oligonucleotide
cugggaucuuguuauaaau

SEQ ID NO: 188418 - RNA, 19 nt, Artificial Sequence
  Description of Artificial Sequence: Synthetic oligonucleotide
acaguguagcucucacauu

SEQ ID NO: 188419 - RNA, 19 nt, Artificial Sequence
  Description of Artificial Sequence: Synthetic oligonucleotide
ugaggcgcugugguuuucu

SEQ ID NO: 188420 - RNA, 19 nt, Artificial Sequence
  Description of Artificial Sequence: Synthetic oligonucleotide
guacgcaucuuaucauucu

SEQ ID NO: 188421 - RNA, 19 nt, Artificial Sequence
  Description of Artificial Sequence: Synthetic oligonucleotide
cugccgacucuuguucucc

SEQ ID NO: 188422 - RNA, 19 nt, Artificial Sequence
  Description of Artificial Sequence: Synthetic oligonucleotide
gggugaacuggaaagggga

SEQ ID NO: 188423 - RNA, 19 nt, Artificial Sequence
  Description of Artificial Sequence: Synthetic oligonucleotide
uaccuggaaugaguuuuac

SEQ ID NO: 188424 - RNA, 19 nt, Artificial Sequence
  Description of Artificial Sequence: Synthetic oligonucleotide
guuuacguuauucgauuuu

SEQ ID NO: 188425 - RNA, 19 nt, Artificial Sequence
  Description of Artificial Sequence: Synthetic oligonucleotide
uccguucugaaugcaucau

SEQ ID NO: 188426 - RNA, 19 nt, Artificial Sequence
  Description of Artificial Sequence: Synthetic oligonucleotide
gaccacgauagccccugca

SEQ ID NO: 188427 - RNA, 19 nt, Artificial Sequence
  Description of Artificial Sequence: Synthetic oligonucleotide
ggugacgaggaggucucgg

SEQ ID NO: 188428 - RNA, 19 nt, Artificial Sequence
  Description of Artificial Sequence: Synthetic oligonucleotide
gguacuuccuguuggugcu

SEQ ID NO: 188429 - RNA, 19 nt, Artificial Sequence
  Description of Artificial Sequence: Synthetic oligonucleotide
ggcauagucugagaaggca

SEQ ID NO: 188430 - RNA, 19 nt, Artificial Sequence
  Description of Artificial Sequence: Synthetic oligonucleotide
agaguccgugcuuguugcu

SEQ ID NO: 188431 - RNA, 19 nt, Artificial Sequence
  Description of Artificial Sequence: Synthetic oligonucleotide
ccauguuacauuuggcgaa

SEQ ID NO: 188432 - RNA, 19 nt, Artificial Sequence
  Description of Artificial Sequence: Synthetic oligonucleotide
gccuaugugccauuucuaa

SEQ ID NO: 188433 - RNA, 19 nt, Artificial Sequence
  Description of Artificial Sequence: Synthetic oligonucleotide
acacgauuacuagcagaga

SEQ ID NO: 188434 - RNA, 19 nt, Artificial Sequence
  Description of Artificial Sequence: Synthetic oligonucleotide
auacaauuuuggguauauu

SEQ ID NO: 188435 - RNA, 19 nt, Artificial Sequence
  Description of Artificial Sequence: Synthetic oligonucleotide
cauguuggcuggaagguuu

SEQ ID NO: 188436 - RNA, 19 nt, Artificial Sequence
  Description of Artificial Sequence: Synthetic oligonucleotide
gguagccauuaaugaauga

SEQ ID NO: 188437 - RNA, 19 nt, Artificial Sequence
  Description of Artificial Sequence: Synthetic oligonucleotide
cuguguuuuguucccagau

SEQ ID NO: 188438 - RNA, 19 nt, Artificial Sequence
  Description of Artificial Sequence: Synthetic oligonucleotide
ccaccuaguagguaauaga

SEQ ID NO: 188439 - RNA, 19 nt, Artificial Sequence
  Description of Artificial Sequence: Synthetic oligonucleotide
guagguaauagaagccuau

SEQ ID NO: 188440 - RNA, 19 nt, Artificial Sequence
  Description of Artificial Sequence: Synthetic oligonucleotide
ggaggucucggacagugua

SEQ ID NO: 188441 - RNA, 19 nt, Artificial Sequence
  Description of Artificial Sequence: Synthetic oligonucleotide
agaagccuaugugccauuu

SEQ ID NO: 188442 - RNA, 19 nt, Artificial Sequence
  Description of Artificial Sequence: Synthetic oligonucleotide
gguugguuaccauaacaau

SEQ ID NO: 188443 - RNA, 19 nt, Artificial Sequence
  Description of Artificial Sequence: Synthetic oligonucleotide
auggggugguuccccgacu

SEQ ID NO: 188444 - RNA, 19 nt, Artificial Sequence
  Description of Artificial Sequence: Synthetic oligonucleotide
ccucgacagacacacggac

SEQ ID NO: 188445 - RNA, 19 nt, Artificial Sequence
  Description of Artificial Sequence: Synthetic oligonucleotide
cuguuacuugaaguuggca

SEQ ID NO: 188446 - RNA, 19 nt, Artificial Sequence
  Description of Artificial Sequence: Synthetic oligonucleotide
gguuaccauaacaauggua

SEQ ID NO: 188447 - RNA, 19 nt, Artificial Sequence
  Description of Artificial Sequence: Synthetic oligonucleotide
uuggucccauugucagagu

SEQ ID NO: 188448 - RNA, 19 nt, Artificial Sequence
  Description of Artificial Sequence: Synthetic oligonucleotide
cuaugauaauaaacacgau

SEQ ID NO: 188449 - RNA, 19 nt, Artificial Sequence
  Description of Artificial Sequence: Synthetic oligonucleotide
cacauagucuguguucucu

SEQ ID NO: 188450 - RNA, 19 nt, Artificial Sequence
  Description of Artificial Sequence: Synthetic oligonucleotide
auccggcucacaaaaccau

SEQ ID NO: 188451 - RNA, 19 nt, Artificial Sequence
  Description of Artificial Sequence: Synthetic oligonucleotide
acugugcucaaggcacaga

SEQ ID NO: 188452 - RNA, 19 nt, Artificial Sequence
  Description of Artificial Sequence: Synthetic oligonucleotide
accgagcuaccuggaauga

SEQ ID NO: 188453 - RNA, 19 nt, Artificial Sequence
  Description of Artificial Sequence: Synthetic oligonucleotide
cgauuacuagcagagagga

SEQ ID NO: 188454 - RNA, 19 nt, Artificial Sequence
  Description of Artificial Sequence: Synthetic oligonucleotide
cgcugugguuuucuguugg

SEQ ID NO: 188455 - RNA, 19 nt, Artificial Sequence
  Description of Artificial Sequence: Synthetic oligonucleotide
ggaauuucccucccauggu

SEQ ID NO: 188456 - RNA, 19 nt, Artificial Sequence
  Description of Artificial Sequence: Synthetic oligonucleotide
ggcucuugacaguuuggaa

SEQ ID NO: 188457 - RNA, 19 nt, Artificial Sequence
  Description of Artificial Sequence: Synthetic oligonucleotide
cuucgguuaaucuccucuu

SEQ ID NO: 188458 - RNA, 19 nt, Artificial Sequence
  Description of Artificial Sequence: Synthetic oligonucleotide
ggaaugaguuuuacguuua

SEQ ID NO: 188459 - RNA, 19 nt, Artificial Sequence
  Description of Artificial Sequence: Synthetic oligonucleotide
aguuggcaccgagcuaccu

SEQ ID NO: 188460 - RNA, 19 nt, Artificial Sequence
  Description of Artificial Sequence: Synthetic oligonucleotide
cugcaauaauuggcgucuc

SEQ ID NO: 188461 - RNA, 19 nt, Artificial Sequence
  Description of Artificial Sequence: Synthetic oligonucleotide
gccugguauaugaagacgu

SEQ ID NO: 188462 - RNA, 19 nt, Artificial Sequence
  Description of Artificial Sequence: Synthetic oligonucleotide
acgucgcccaccugcugaa

SEQ ID NO: 188463 - RNA, 19 nt, Artificial Sequence
  Description of Artificial Sequence: Synthetic oligonucleotide
gaugaggcgcugugguuuu

SEQ ID NO: 188464 - RNA, 19 nt, Artificial Sequence
  Description of Artificial Sequence: Synthetic oligonucleotide
gagugguugcugccgugcu

SEQ ID NO: 188465 - RNA, 19 nt, Artificial Sequence
  Description of Artificial Sequence: Synthetic oligonucleotide
ggcaucgaugacaacaaau

SEQ ID NO: 188466 - RNA, 19 nt, Artificial Sequence
  Description of Artificial Sequence: Synthetic oligonucleotide
caguacgcaucuuaucauu

SEQ ID NO: 188467 - RNA, 19 nt, Artificial Sequence
  Description of Artificial Sequence: Synthetic oligonucleotide
cgcaucuuaucauucugga

SEQ ID NO: 188468 - RNA, 19 nt, Artificial Sequence
  Description of Artificial Sequence: Synthetic oligonucleotide
ccugggaucuuguuauaaa

SEQ ID NO: 188469 - RNA, 19 nt, Artificial Sequence
  Description of Artificial Sequence: Synthetic oligonucleotide
ggcgucucaucugcaggag

SEQ ID NO: 188470 - RNA, 19 nt, Artificial Sequence
  Description of Artificial Sequence: Synthetic oligonucleotide
cugccggaucugccgacuc

SEQ ID NO: 188471 - RNA, 19 nt, Artificial Sequence
  Description of Artificial Sequence: Synthetic oligonucleotide
ucccugggaucuuguuaua

SEQ ID NO: 188472 - RNA, 19 nt, Artificial Sequence
  Description of Artificial Sequence: Synthetic oligonucleotide
gccugcauggggauaguga

SEQ ID NO: 188473 - RNA, 19 nt, Artificial Sequence
  Description of Artificial Sequence: Synthetic oligonucleotide
gcuagucccugggaucuug

SEQ ID NO: 188474 - RNA, 19 nt, Artificial Sequence
  Description of Artificial Sequence: Synthetic oligonucleotide
ccccaauaaaacacuggaa

SEQ ID NO: 188475 - RNA, 19 nt, Artificial Sequence
  Description of Artificial Sequence: Synthetic oligonucleotide
augaggcgcugugguuuuc

SEQ ID NO: 188476 - RNA, 19 nt, Artificial Sequence
  Description of Artificial Sequence: Synthetic oligonucleotide
gaagguuucuggagugguu

SEQ ID NO: 188477 - RNA, 19 nt, Artificial Sequence
  Description of Artificial Sequence: Synthetic oligonucleotide
gacaagcagggagagcguu

SEQ ID NO: 188478 - RNA, 19 nt, Artificial Sequence
  Description of Artificial Sequence: Synthetic oligonucleotide
caauuuccaggcugaggau

SEQ ID NO: 188479 - RNA, 19 nt, Artificial Sequence
  Description of Artificial Sequence: Synthetic oligonucleotide
gagcuaccuggaaugaguu

SEQ ID NO: 188480 - RNA, 19 nt, Artificial Sequence
  Description of Artificial Sequence: Synthetic oligonucleotide
ggccauuugacaggcggaa

SEQ ID NO: 188481 - RNA, 19 nt, Artificial Sequence
  Description of Artificial Sequence: Synthetic oligonucleotide
ggggugguuccccgacugc

SEQ ID NO: 188482 - RNA, 19 nt, Artificial Sequence
  Description of Artificial Sequence: Synthetic oligonucleotide
ggaagguuucuggaguggu

SEQ ID NO: 188483 - RNA, 19 nt, Artificial Sequence
  Description of Artificial Sequence: Synthetic oligonucleotide
ccccguuugacuggaauga

SEQ ID NO: 188484 - RNA, 19 nt, Artificial Sequence
  Description of Artificial Sequence: Synthetic oligonucleotide
gcaucuuaucauucuggau

SEQ ID NO: 188485 - RNA, 19 nt, Artificial Sequence
  Description of Artificial Sequence: Synthetic oligonucleotide
gguuuucuguuggucacgu

SEQ ID NO: 188486 - RNA, 19 nt, Artificial Sequence
  Description of Artificial Sequence: Synthetic oligonucleotide
ggaccauguguggucucug

SEQ ID NO: 188487 - RNA, 19 nt, Artificial Sequence
  Description of Artificial Sequence: Synthetic oligonucleotide
ccaucagauggccaguacu

SEQ ID NO: 188488 - RNA, 19 nt, Artificial Sequence
  Description of Artificial Sequence: Synthetic oligonucleotide
cuuuggggcuccacauccu

SEQ ID NO: 188489 - RNA, 19 nt, Artificial Sequence
  Description of Artificial Sequence: Synthetic oligonucleotide
cgauagccccugcauacug

SEQ ID NO: 188490 - RNA, 19 nt, Artificial Sequence
  Description of Artificial Sequence: Synthetic oligonucleotide
gcugccgugcuggaauuuc

SEQ ID NO: 188491 - RNA, 19 nt, Artificial Sequence
  Description of Artificial Sequence: Synthetic oligonucleotide
ucaccccguuugacuggaa

SEQ ID NO: 188492 - RNA, 19 nt, Artificial Sequence
  Description of Artificial Sequence: Synthetic oligonucleotide
cacgcgcuccaggacugug

SEQ ID NO: 188493 - RNA, 19 nt, Artificial Sequence
  Description of Artificial Sequence: Synthetic oligonucleotide
aggaggucucggacagugu

SEQ ID NO: 188494 - RNA, 19 nt, Artificial Sequence
  Description of Artificial Sequence: Synthetic oligonucleotide
ccugguauaugaagacgua

SEQ ID NO: 188495 - RNA, 19 nt, Artificial Sequence
  Description of Artificial Sequence: Synthetic oligonucleotide
agaugccgcucuggucuca

SEQ ID NO: 188496 - RNA, 19 nt, Artificial Sequence
  Description of Artificial Sequence: Synthetic oligonucleotide
ccgagcuaccuggaaugag

SEQ ID NO: 188497 - RNA, 19 nt, Artificial Sequence
  Description of Artificial Sequence: Synthetic oligonucleotide
cuguaaaacccgguucuuu

SEQ ID NO: 188498 - RNA, 19 nt, Artificial Sequence
  Description of Artificial Sequence: Synthetic oligonucleotide
gcaccgagcuaccuggaau

SEQ ID NO: 188499 - RNA, 19 nt, Artificial Sequence
  Description of Artificial Sequence: Synthetic oligonucleotide
caucagccauucuucgguu

SEQ ID NO: 188500 - RNA, 19 nt, Artificial Sequence
  Description of Artificial Sequence: Synthetic oligonucleotide
cgagcuaccuggaaugagu

SEQ ID NO: 188501 - RNA, 19 nt, Artificial Sequence
  Description of Artificial Sequence: Synthetic oligonucleotide
ggcaccgagcuaccuggaa

SEQ ID NO: 188502 - RNA, 19 nt, Artificial Sequence
  Description of Artificial Sequence: Synthetic oligonucleotide
gcccggauccggcucacaa

SEQ ID NO: 188503 - RNA, 19 nt, Artificial Sequence
  Description of Artificial Sequence: Synthetic oligonucleotide
ggaccacgauagccccugc

SEQ ID NO: 188504 - RNA, 19 nt, Artificial Sequence
  Description of Artificial Sequence: Synthetic oligonucleotide
ccguacagauaauguucca

SEQ ID NO: 188505 - RNA, 19 nt, Artificial Sequence
  Description of Artificial Sequence: Synthetic oligonucleotide
cgaaaugguagugcuucca

SEQ ID NO: 188506 - RNA, 19 nt, Artificial Sequence
  Description of Artificial Sequence: Synthetic oligonucleotide
cccuguccguccugccccg

SEQ ID NO: 188507 - RNA, 19 nt, Artificial Sequence
  Description of Artificial Sequence: Synthetic oligonucleotide
ccgucacuggggaugccca

SEQ ID NO: 188508 - RNA, 19 nt, Artificial Sequence
  Description of Artificial Sequence: Synthetic oligonucleotide
ccacgauagccccugcaua

SEQ ID NO: 188509 - RNA, 19 nt, Artificial Sequence
  Description of Artificial Sequence: Synthetic oligonucleotide
ccaguacgcaucuuaucau

SEQ ID NO: 188510 - RNA, 19 nt, Artificial Sequence
  Description of Artificial Sequence: Synthetic oligonucleotide
cuccaccuaguagguaaua

SEQ ID NO: 188511 - RNA, 19 nt, Artificial Sequence
  Description of Artificial Sequence: Synthetic oligonucleotide
cguaggauaccaggccauc

SEQ ID NO: 188512 - RNA, 19 nt, Artificial Sequence
  Description of Artificial Sequence: Synthetic oligonucleotide
caggugucaggugcacucu

SEQ ID NO: 188513 - RNA, 19 nt, Artificial Sequence
  Description of Artificial Sequence: Synthetic oligonucleotide
ggcuauccugaagccaugu

SEQ ID NO: 188514 - RNA, 19 nt, Artificial Sequence
  Description of Artificial Sequence: Synthetic oligonucleotide
gcauuacgauggagcagga

SEQ ID NO: 188515 - RNA, 19 nt, Artificial Sequence
  Description of Artificial Sequence: Synthetic oligonucleotide
gcuauccugaagccauguu

SEQ ID NO: 188516 - RNA, 19 nt, Artificial Sequence
  Description of Artificial Sequence: Synthetic oligonucleotide
cagucacguccucgacaga

SEQ ID NO: 188517 - RNA, 19 nt, Artificial Sequence
  Description of Artificial Sequence: Synthetic oligonucleotide
ccagugcgcccaacaccug

SEQ ID NO: 188518 - RNA, 19 nt, Artificial Sequence
  Description of Artificial Sequence: Synthetic oligonucleotide
gccgcucuggucucauuau

SEQ ID NO: 188519 - RNA, 19 nt, Artificial Sequence
  Description of Artificial Sequence: Synthetic oligonucleotide
cccugggaucuuguuauaa

SEQ ID NO: 188520 - RNA, 19 nt, Artificial Sequence
  Description of Artificial Sequence: Synthetic oligonucleotide
cccggauccggcucacaaa

SEQ ID NO: 188521 - RNA, 19 nt, Artificial Sequence
  Description of Artificial Sequence: Synthetic oligonucleotide
cggccauuugacaggcgga

SEQ ID NO: 188522 - RNA, 19 nt, Artificial Sequence
  Description of Artificial Sequence: Synthetic oligonucleotide
ccaguucuguauccccgua

SEQ ID NO: 188523 - RNA, 19 nt, Artificial Sequence
  Description of Artificial Sequence: Synthetic oligonucleotide
ggacaagcagggagagcgu

SEQ ID NO: 188524 - RNA, 19 nt, Artificial Sequence
  Description of Artificial Sequence: Synthetic oligonucleotide
ccguuugacuggaaugauu

SEQ ID NO: 188525 - RNA, 19 nt, Artificial Sequence
  Description of Artificial Sequence: Synthetic oligonucleotide
guauccccguacagauaau

SEQ ID NO: 188526 - RNA, 19 nt, Artificial Sequence
  Description of Artificial Sequence: Synthetic oligonucleotide
ccguaggauaccaggccau

SEQ ID NO: 188527 - RNA, 19 nt, Artificial Sequence
  Description of Artificial Sequence: Synthetic oligonucleotide
gccggaucugccgacucuu

SEQ ID NO: 188528 - RNA, 19 nt, Artificial Sequence
  Description of Artificial Sequence: Synthetic oligonucleotide
cugcugcgaugauguugau

SEQ ID NO: 188529 - RNA, 19 nt, Artificial Sequence
  Description of Artificial Sequence: Synthetic oligonucleotide
cccguuugacuggaaugau

SEQ ID NO: 188530 - RNA, 19 nt, Artificial Sequence
  Description of Artificial Sequence: Synthetic oligonucleotide
ccgcucuggucucauuauu

SEQ ID NO: 188531 - RNA, 19 nt, Artificial Sequence
  Description of Artificial Sequence: Synthetic oligonucleotide
ccgugcuuguugcucucuu

SEQ ID NO: 188532 - RNA, 19 nt, Artificial Sequence
  Description of Artificial Sequence: Synthetic oligonucleotide
aaauugauuaccucagucc

SEQ ID NO: 188533 - RNA, 19 nt, Artificial Sequence
  Description of Artificial Sequence: Synthetic oligonucleotide
aaagguagcaaauugauua

SEQ ID NO: 188534 - RNA, 19 nt, Artificial Sequence
  Description of Artificial Sequence: Synthetic oligonucleotide
ucucuuauggauaugcagg

SEQ ID NO: 188535 - RNA, 19 nt, Artificial Sequence
  Description of Artificial Sequence: Synthetic oligonucleotide
uuaagaaugaccugggucu

SEQ ID NO: 188536 - RNA, 19 nt, Artificial Sequence
  Description of Artificial Sequence: Synthetic oligonucleotide
caggcuucaaacaagaugc

SEQ ID NO: 188537 - RNA, 19 nt, Artificial Sequence
  Description of Artificial Sequence: Synthetic oligonucleotide
ucuagaaugcgccagaagu

SEQ ID NO: 188538 - RNA, 19 nt, Artificial Sequence
  Description of Artificial Sequence: Synthetic oligonucleotide
aauugauuaccucaguccu

SEQ ID NO: 188539 - RNA, 19 nt, Artificial Sequence
  Description of Artificial Sequence: Synthetic oligonucleotide
uuacccacagcucucaagg

SEQ ID NO: 188540 - RNA, 19 nt, Artificial Sequence
  Description of Artificial Sequence: Synthetic oligonucleotide
uguuucauccaccugagga

SEQ ID NO: 188541 - RNA, 19 nt, Artificial Sequence
  Description of Artificial Sequence: Synthetic oligonucleotide
gaaagcaaaaccugugagg

SEQ ID NO: 188542 - RNA, 19 nt, Artificial Sequence
  Description of Artificial Sequence: Synthetic oligonucleotide
auaucauuugucuggacuc

SEQ ID NO: 188543 - RNA, 19 nt, Artificial Sequence
  Description of Artificial Sequence: Synthetic oligonucleotide
uguauuugagcccuauugc

SEQ ID NO: 188544 - RNA, 19 nt, Artificial Sequence
  Description of Artificial Sequence: Synthetic oligonucleotide
cuuugaauccauuacaguc

SEQ ID NO: 188545 - RNA, 19 nt, Artificial Sequence
  Description of Artificial Sequence: Synthetic oligonucleotide
agggauugaccccugagcc

SEQ ID NO: 188546 - RNA, 19 nt, Artificial Sequence
  Description of Artificial Sequence: Synthetic oligonucleotide
aauguacaauucucacucc

SEQ ID NO: 188547 - RNA, 19 nt, Artificial Sequence
  Description of Artificial Sequence: Synthetic oligonucleotide
auaguuugcaggcagucuc

SEQ ID NO: 188548 - RNA, 19 nt, Artificial Sequence
  Description of Artificial Sequence: Synthetic oligonucleotide
aauacccaccuccagcuuc

SEQ ID NO: 188549 - RNA, 19 nt, Artificial Sequence
  Description of Artificial Sequence: Synthetic oligonucleotide
aaaccggucaacuacuccu

SEQ ID NO: 188550 - RNA, 19 nt, Artificial Sequence
  Description of Artificial Sequence: Synthetic oligonucleotide
uggguuaaagacaugugug

SEQ ID NO: 188551 - RNA, 19 nt, Artificial Sequence
  Description of Artificial Sequence: Synthetic oligonucleotide
ucuaugacugccuggaucu

SEQ ID NO: 188552 - RNA, 19 nt, Artificial Sequence
  Description of Artificial Sequence: Synthetic oligonucleotide
ucuccuacgguucagugca

SEQ ID NO: 188553 - RNA, 19 nt, Artificial Sequence
  Description of Artificial Sequence: Synthetic oligonucleotide
uuaaagguagcaaauugau

SEQ ID NO: 188554 - RNA, 19 nt, Artificial Sequence
  Description of Artificial Sequence: Synthetic oligonucleotide
agguagguaagcccaagcc

SEQ ID NO: 188555 - RNA, 19 nt, Artificial Sequence
  Description of Artificial Sequence: Synthetic oligonucleotide
aauucucacuccuuuucag

SEQ ID NO: 188556 - RNA, 19 nt, Artificial Sequence
  Description of Artificial Sequence: Synthetic oligonucleotide
cuucuuuccggauugauuc

SEQ ID NO: 188557 - RNA, 19 nt, Artificial Sequence
  Description of Artificial Sequence: Synthetic oligonucleotide
uggcaauggaaccaguuag

SEQ ID NO: 188558 - RNA, 19 nt, Artificial Sequence
  Description of Artificial Sequence: Synthetic oligonucleotide
ugaggaguguuaacaaagg

SEQ ID NO: 188559 - RNA, 19 nt, Artificial Sequence
  Description of Artificial Sequence: Synthetic oligonucleotide
ucugagucacuacugaaga

SEQ ID NO: 188560 - RNA, 19 nt, Artificial Sequence
  Description of Artificial Sequence: Synthetic oligonucleotide
aaugaccugggucuggaug

SEQ ID NO: 188561 - RNA, 19 nt, Artificial Sequence
  Description of Artificial Sequence: Synthetic oligonucleotide
aucguugugcaucagaagu

SEQ ID NO: 188562 - RNA, 19 nt, Artificial Sequence
  Description of Artificial Sequence: Synthetic oligonucleotide
aaugacaauuuuggucugc

SEQ ID NO: 188563 - RNA, 19 nt, Artificial Sequence
  Description of Artificial Sequence: Synthetic oligonucleotide
aacccaagcuaucuuuggg

SEQ ID NO: 188564 - RNA, 19 nt, Artificial Sequence
  Description of Artificial Sequence: Synthetic oligonucleotide
uuuguaaucguugugcauc

SEQ ID NO: 188565 - RNA, 19 nt, Artificial Sequence
  Description of Artificial Sequence: Synthetic oligonucleotide
aagcuuuguuugucuaccc

SEQ ID NO: 188566 - RNA, 19 nt, Artificial Sequence
  Description of Artificial Sequence: Synthetic oligonucleotide
ugacauaguuugcaggcag

SEQ ID NO: 188567 - RNA, 19 nt, Artificial Sequence
  Description of Artificial Sequence: Synthetic oligonucleotide
cuguauuugagcccuauug

SEQ ID NO: 188568 - RNA, 19 nt, Artificial Sequence
  Description of Artificial Sequence: Synthetic oligonucleotide
gaauccauuacagucagca

SEQ ID NO: 188569 - RNA, 19 nt, Artificial Sequence
  Description of Artificial Sequence: Synthetic oligonucleotide
uaaucguugugcaucagaa

SEQ ID NO: 188570 - RNA, 19 nt, Artificial Sequence
  Description of Artificial Sequence: Synthetic oligonucleotide
ugagucacuacugaagagc

SEQ ID NO: 188571 - RNA, 19 nt, Artificial Sequence
  Description of Artificial Sequence: Synthetic oligonucleotide
cucuuauggauaugcaggg

SEQ ID NO: 188572 - RNA, 19 nt, Artificial Sequence
  Description of Artificial Sequence: Synthetic oligonucleotide
aggucaagagcacagucuc

SEQ ID NO: 188573 - RNA, 19 nt, Artificial Sequence
  Description of Artificial Sequence: Synthetic oligonucleotide
ugggacuagggaauagacg

SEQ ID NO: 188574 - RNA, 19 nt, Artificial Sequence
  Description of Artificial Sequence: Synthetic oligonucleotide
agugacaccagguaccuga

SEQ ID NO: 188575 - RNA, 19 nt, Artificial Sequence
  Description of Artificial Sequence: Synthetic oligonucleotide
gucguguggacuuagugag

SEQ ID NO: 188576 - RNA, 19 nt, Artificial Sequence
  Description of Artificial Sequence: Synthetic oligonucleotide
guauuugagcccuauugcc

SEQ ID NO: 188577 - RNA, 19 nt, Artificial Sequence
  Description of Artificial Sequence: Synthetic oligonucleotide
acuacgcuugcccucuugc

SEQ ID NO: 188578 - RNA, 19 nt, Artificial Sequence
  Description of Artificial Sequence: Synthetic oligonucleotide
aaucguugugcaucagaag

SEQ ID NO: 188579 - RNA, 19 nt, Artificial Sequence
  Description of Artificial Sequence: Synthetic oligonucleotide
auaaugggaaggaagucac

SEQ ID NO: 188580 - RNA, 19 nt, Artificial Sequence
  Description of Artificial Sequence: Synthetic oligonucleotide
gugugaaucuuugacauag

SEQ ID NO: 188581 - RNA, 19 nt, Artificial Sequence
  Description of Artificial Sequence: Synthetic oligonucleotide
uuggaaagcaaaaccugug

SEQ ID NO: 188582 - RNA, 19 nt, Artificial Sequence
  Description of Artificial Sequence: Synthetic oligonucleotide
ucugcucgcaucuaugaca

SEQ ID NO: 188583 - RNA, 19 nt, Artificial Sequence
  Description of Artificial Sequence: Synthetic oligonucleotide
caaguacccaagauaagag

SEQ ID NO: 188584 - RNA, 19 nt, Artificial Sequence
  Description of Artificial Sequence: Synthetic oligonucleotide
aaguacccaagauaagagu

SEQ ID NO: 188585 - RNA, 19 nt, Artificial Sequence
  Description of Artificial Sequence: Synthetic oligonucleotide
uuguuuuggacuucucccc

SEQ ID NO: 188586 - RNA, 19 nt, Artificial Sequence
  Description of Artificial Sequence: Synthetic oligonucleotide
agaauaaugggaaggaagu

SEQ ID NO: 188587 - RNA, 19 nt, Artificial Sequence
  Description of Artificial Sequence: Synthetic oligonucleotide
accaaucuccggcagacuc

SEQ ID NO: 188588 - RNA, 19 nt, Artificial Sequence
  Description of Artificial Sequence: Synthetic oligonucleotide
acguaaucucugcaaaccg

SEQ ID NO: 188589 - RNA, 19 nt, Artificial Sequence
  Description of Artificial Sequence: Synthetic oligonucleotide
agguuucccaaguuauggc

SEQ ID NO: 188590 - RNA, 19 nt, Artificial Sequence
  Description of Artificial Sequence: Synthetic oligonucleotide
agaccucauacccacauca

SEQ ID NO: 188591 - RNA, 19 nt, Artificial Sequence
  Description of Artificial Sequence: Synthetic oligonucleotide
uagggauugaccccugagc

SEQ ID NO: 188592 - RNA, 19 nt, Artificial Sequence
  Description of Artificial Sequence: Synthetic oligonucleotide
gaagcaagaauaaugggaa

SEQ ID NO: 188593 - RNA, 19 nt, Artificial Sequence
  Description of Artificial Sequence: Synthetic oligonucleotide
caaauugauuaccucaguc

SEQ ID NO: 188594 - RNA, 19 nt, Artificial Sequence
  Description of Artificial Sequence: Synthetic oligonucleotide
aaaccugugaggauuaaau

SEQ ID NO: 188595 - RNA, 19 nt, Artificial Sequence
  Description of Artificial Sequence: Synthetic oligonucleotide
gaguuaagcagcucuauaa

SEQ ID NO: 188596 - RNA, 19 nt, Artificial Sequence
  Description of Artificial Sequence: Synthetic oligonucleotide
aagucugagucacuacuga

SEQ ID NO: 188597 - RNA, 19 nt, Artificial Sequence
  Description of Artificial Sequence: Synthetic oligonucleotide
acauuauagcuggaagccc

SEQ ID NO: 188598 - RNA, 19 nt, Artificial Sequence
  Description of Artificial Sequence: Synthetic oligonucleotide
agcuauuccccucuggugu

SEQ ID NO: 188599 - RNA, 19 nt, Artificial Sequence
  Description of Artificial Sequence: Synthetic oligonucleotide
gacguaaucucugcaaacc

SEQ ID NO: 188600 - RNA, 19 nt, Artificial Sequence
  Description of Artificial Sequence: Synthetic oligonucleotide
agcagcuaguguccaauac

SEQ ID NO: 188601 - RNA, 19 nt, Artificial Sequence
  Description of Artificial Sequence: Synthetic oligonucleotide
agggaauagacggacgugg

SEQ ID NO: 188602 - RNA, 19 nt, Artificial Sequence
  Description of Artificial Sequence: Synthetic oligonucleotide
agucguguggacuuaguga

SEQ ID NO: 188603 - RNA, 19 nt, Artificial Sequence
  Description of Artificial Sequence: Synthetic oligonucleotide
caauucaggacguaaucuc

SEQ ID NO: 188604 - RNA, 19 nt, Artificial Sequence
  Description of Artificial Sequence: Synthetic oligonucleotide
agugugagcaucagaaauc

SEQ ID NO: 188605 - RNA, 19 nt, Artificial Sequence
  Description of Artificial Sequence: Synthetic oligonucleotide
auugccuuaacaaaagaau

SEQ ID NO: 188606 - RNA, 19 nt, Artificial Sequence
  Description of Artificial Sequence: Synthetic oligonucleotide
ugccaugcaugucugauuc

SEQ ID NO: 188607 - RNA, 19 nt, Artificial Sequence
  Description of Artificial Sequence: Synthetic oligonucleotide
ugaggauuaaauucagcuu

SEQ ID NO: 188608 - RNA, 19 nt, Artificial Sequence
  Description of Artificial Sequence: Synthetic oligonucleotide
agcccaagcccuuggagac

SEQ ID NO: 188609 - RNA, 19 nt, Artificial Sequence
  Description of Artificial Sequence: Synthetic oligonucleotide
aauucaggacguaaucucu

SEQ ID NO: 188610 - RNA, 19 nt, Artificial Sequence
  Description of Artificial Sequence: Synthetic oligonucleotide
uuucccaaguuauggcugc

SEQ ID NO: 188611 - RNA, 19 nt, Artificial Sequence
  Description of Artificial Sequence: Synthetic oligonucleotide
auacccacaucauuuauuu

SEQ ID NO: 188612 - RNA, 19 nt, Artificial Sequence
  Description of Artificial Sequence: Synthetic oligonucleotide
acuuuguaaucguugugca

SEQ ID NO: 188613 - RNA, 19 nt, Artificial Sequence
  Description of Artificial Sequence: Synthetic oligonucleotide
aucacacaagcuauucccc

SEQ ID NO: 188614 - RNA, 19 nt, Artificial Sequence
  Description of Artificial Sequence: Synthetic oligonucleotide
uccggauugauuccuuaga

SEQ ID NO: 188615 - RNA, 19 nt, Artificial Sequence
  Description of Artificial Sequence: Synthetic oligonucleotide
agagucuaugacugccugg

SEQ ID NO: 188616 - RNA, 19 nt, Artificial Sequence
  Description of Artificial Sequence: Synthetic oligonucleotide
cuacugaagagcaggcgag

SEQ ID NO: 188617 - RNA, 19 nt, Artificial Sequence
  Description of Artificial Sequence: Synthetic oligonucleotide
ucaagcuuuguuugucuac

SEQ ID NO: 188618 - RNA, 19 nt, Artificial Sequence
  Description of Artificial Sequence: Synthetic oligonucleotide
uuguaaucguugugcauca

SEQ ID NO: 188619 - RNA, 19 nt, Artificial Sequence
  Description of Artificial Sequence: Synthetic oligonucleotide
gaggauuaaauucagcuuu

SEQ ID NO: 188620 - RNA, 19 nt, Artificial Sequence
  Description of Artificial Sequence: Synthetic oligonucleotide
caguuaagaaugaccuggg

SEQ ID NO: 188621 - RNA, 19 nt, Artificial Sequence
  Description of Artificial Sequence: Synthetic oligonucleotide
gagaccuuugcaaauucug

SEQ ID NO: 188622 - RNA, 19 nt, Artificial Sequence
  Description of Artificial Sequence: Synthetic oligonucleotide
auguacaauucucacuccu

SEQ ID NO: 188623 - RNA, 19 nt, Artificial Sequence
  Description of Artificial Sequence: Synthetic oligonucleotide
ugacucugaagaaacucaa

SEQ ID NO: 188624 - RNA, 19 nt, Artificial Sequence
  Description of Artificial Sequence: Synthetic oligonucleotide
caagcuuuguuugucuacc

SEQ ID NO: 188625 - RNA, 19 nt, Artificial Sequence
  Description of Artificial Sequence: Synthetic oligonucleotide
uccggcagacuccagaguc

SEQ ID NO: 188626 - RNA, 19 nt, Artificial Sequence
  Description of Artificial Sequence: Synthetic oligonucleotide
cugucucuuauggauaugc

SEQ ID NO: 188627 - RNA, 19 nt, Artificial Sequence
  Description of Artificial Sequence: Synthetic oligonucleotide
ugaucugcucgcaucuaug

SEQ ID NO: 188628 - RNA, 19 nt, Artificial Sequence
  Description of Artificial Sequence: Synthetic oligonucleotide
gguagguaagcccaagccc

SEQ ID NO: 188629 - RNA, 19 nt, Artificial Sequence
  Description of Artificial Sequence: Synthetic oligonucleotide
gaguuacacacaucagggc

SEQ ID NO: 188630 - RNA, 19 nt, Artificial Sequence
  Description of Artificial Sequence: Synthetic oligonucleotide
cugcucgcaucuaugacag

SEQ ID NO: 188631 - RNA, 19 nt, Artificial Sequence
  Description of Artificial Sequence: Synthetic oligonucleotide
uuccggauugauuccuuag

SEQ ID NO: 188632 - RNA, 19 nt, Artificial Sequence
  Description of Artificial Sequence: Synthetic oligonucleotide
aucugcucgcaucuaugac

SEQ ID NO: 188633 - RNA, 19 nt, Artificial Sequence
  Description of Artificial Sequence: Synthetic oligonucleotide
ucuaccaaucuccggcaga

SEQ ID NO: 188634 - RNA, 19 nt, Artificial Sequence
  Description of Artificial Sequence: Synthetic oligonucleotide
cuucaaacaagaugcucuc

SEQ ID NO: 188635 - RNA, 19 nt, Artificial Sequence
  Description of Artificial Sequence: Synthetic oligonucleotide
uagaaugcgccagaagucu

SEQ ID NO: 188636 - RNA, 19 nt, Artificial Sequence
  Description of Artificial Sequence: Synthetic oligonucleotide
aggaucgagcaauucagga

SEQ ID NO: 188637 - RNA, 19 nt, Artificial Sequence
  Description of Artificial Sequence: Synthetic oligonucleotide
acaagcuauuccccucugg

SEQ ID NO: 188638 - RNA, 19 nt, Artificial Sequence
  Description of Artificial Sequence: Synthetic oligonucleotide
aaccugugaggauuaaauu

SEQ ID NO: 188639 - RNA, 19 nt, Artificial Sequence
  Description of Artificial Sequence: Synthetic oligonucleotide
uccaauacauggaucgcua

SEQ ID NO: 188640 - RNA, 19 nt, Artificial Sequence
  Description of Artificial Sequence: Synthetic oligonucleotide
ugucucuuauggauaugca

SEQ ID NO: 188641 - RNA, 19 nt, Artificial Sequence
  Description of Artificial Sequence: Synthetic oligonucleotide
ucuuaccuggaaacccaag

SEQ ID NO: 188642 - RNA, 19 nt, Artificial Sequence
  Description of Artificial Sequence: Synthetic oligonucleotide
ggacucagcacacucaaug

SEQ ID NO: 188643 - RNA, 19 nt, Artificial Sequence
  Description of Artificial Sequence: Synthetic oligonucleotide
aauagacggacguggcaau

SEQ ID NO: 188644 - RNA, 19 nt, Artificial Sequence
  Description of Artificial Sequence: Synthetic oligonucleotide
uggagacacaucacacaag

SEQ ID NO: 188645 - RNA, 19 nt, Artificial Sequence
  Description of Artificial Sequence: Synthetic oligonucleotide
agaggacugggauggauga

SEQ ID NO: 188646 - RNA, 19 nt, Artificial Sequence
  Description of Artificial Sequence: Synthetic oligonucleotide
aucagaaguucuaccaauc

SEQ ID NO: 188647 - RNA, 19 nt, Artificial Sequence
  Description of Artificial Sequence: Synthetic oligonucleotide
acggacguggcaauggaac

SEQ ID NO: 188648 - RNA, 19 nt, Artificial Sequence
  Description of Artificial Sequence: Synthetic oligonucleotide
ggguuaaagacaugugugc

SEQ ID NO: 188649 - RNA, 19 nt, Artificial Sequence
  Description of Artificial Sequence: Synthetic oligonucleotide
cuuauggauaugcagggaa

SEQ ID NO: 188650 - RNA, 19 nt, Artificial Sequence
  Description of Artificial Sequence: Synthetic oligonucleotide
gagucguguggacuuagug

SEQ ID NO: 188651 - RNA, 19 nt, Artificial Sequence
  Description of Artificial Sequence: Synthetic oligonucleotide
uucaaacuguaauguacaa

SEQ ID NO: 188652 - RNA, 19 nt, Artificial Sequence
  Description of Artificial Sequence: Synthetic oligonucleotide
acauggaucgcuagagggg

SEQ ID NO: 188653 - RNA, 19 nt, Artificial Sequence
  Description of Artificial Sequence: Synthetic oligonucleotide
cauggaucgcuagaggggc

SEQ ID NO: 188654 - RNA, 19 nt, Artificial Sequence
  Description of Artificial Sequence: Synthetic oligonucleotide
ucaggacguaaucucugca

SEQ ID NO: 188655 - RNA, 19 nt, Artificial Sequence
  Description of Artificial Sequence: Synthetic oligonucleotide
ggaagugccaccuuaaacu

SEQ ID NO: 188656 - RNA, 19 nt, Artificial Sequence
  Description of Artificial Sequence: Synthetic oligonucleotide
cauugccuuaacaaaagaa

SEQ ID NO: 188657 - RNA, 19 nt, Artificial Sequence
  Description of Artificial Sequence: Synthetic oligonucleotide
uuggucuagaaugcgccag

SEQ ID NO: 188658 - RNA, 19 nt, Artificial Sequence
  Description of Artificial Sequence: Synthetic oligonucleotide
gaggcggguucuuuccucg

SEQ ID NO: 188659 - RNA, 19 nt, Artificial Sequence
  Description of Artificial Sequence: Synthetic oligonucleotide
ugucagagcccaagcagcu

SEQ ID NO: 188660 - RNA, 19 nt, Artificial Sequence
  Description of Artificial Sequence: Synthetic oligonucleotide
aagaaugaccugggucugg

SEQ ID NO: 188661 - RNA, 19 nt, Artificial Sequence
  Description of Artificial Sequence: Synthetic oligonucleotide
uagacggacguggcaaugg

SEQ ID NO: 188662 - RNA, 19 nt, Artificial Sequence
  Description of Artificial Sequence: Synthetic oligonucleotide
gaggaguguuaacaaagga

SEQ ID NO: 188663 - RNA, 19 nt, Artificial Sequence
  Description of Artificial Sequence: Synthetic oligonucleotide
guuacccacagcucucaag

SEQ ID NO: 188664 - RNA, 19 nt, Artificial Sequence
  Description of Artificial Sequence: Synthetic oligonucleotide
aaugcgccagaagucuguc

SEQ ID NO: 188665 - RNA, 19 nt, Artificial Sequence
  Description of Artificial Sequence: Synthetic oligonucleotide
ucauugugagucgugugga

SEQ ID NO: 188666 - RNA, 19 nt, Artificial Sequence
  Description of Artificial Sequence: Synthetic oligonucleotide
gaauagacggacguggcaa

SEQ ID NO: 188667 - RNA, 19 nt, Artificial Sequence
  Description of Artificial Sequence: Synthetic oligonucleotide
agugaggaguguuaacaaa

SEQ ID NO: 188668 - RNA, 19 nt, Artificial Sequence
  Description of Artificial Sequence: Synthetic oligonucleotide
augugugcagccaaaauaa

SEQ ID NO: 188669 - RNA, 19 nt, Artificial Sequence
  Description of Artificial Sequence: Synthetic oligonucleotide
gaucugcucgcaucuauga

SEQ ID NO: 188670 - RNA, 19 nt, Artificial Sequence
  Description of Artificial Sequence: Synthetic oligonucleotide
aggaguguuaacaaaggau

SEQ ID NO: 188671 - RNA, 19 nt, Artificial Sequence
  Description of Artificial Sequence: Synthetic oligonucleotide
ucgcuagaggggcaaauuc

SEQ ID NO: 188672 - RNA, 19 nt, Artificial Sequence
  Description of Artificial Sequence: Synthetic oligonucleotide
aguacccaagauaagaguu

SEQ ID NO: 188673 - RNA, 19 nt, Artificial Sequence
  Description of Artificial Sequence: Synthetic oligonucleotide
guagggauugaccccugag

SEQ ID NO: 188674 - RNA, 19 nt, Artificial Sequence
  Description of Artificial Sequence: Synthetic oligonucleotide
ucuaggguucuuaccugga

SEQ ID NO: 188675 - RNA, 19 nt, Artificial Sequence
  Description of Artificial Sequence: Synthetic oligonucleotide
agguuggucuagaaugcgc

SEQ ID NO: 188676 - RNA, 19 nt, Artificial Sequence
  Description of Artificial Sequence: Synthetic oligonucleotide
ucgcaucuaugacagccug

SEQ ID NO: 188677 - RNA, 19 nt, Artificial Sequence
  Description of Artificial Sequence: Synthetic oligonucleotide
auugauuaccucaguccuc

SEQ ID NO: 188678 - RNA, 19 nt, Artificial Sequence
  Description of Artificial Sequence: Synthetic oligonucleotide
aguuaagaaugaccugggu

SEQ ID NO: 188679 - RNA, 19 nt, Artificial Sequence
  Description of Artificial Sequence: Synthetic oligonucleotide
uacccaagauaagaguuac

SEQ ID NO: 188680 - RNA, 19 nt, Artificial Sequence
  Description of Artificial Sequence: Synthetic oligonucleotide
aggguucauggugugaauc

SEQ ID NO: 188681 - RNA, 19 nt, Artificial Sequence
  Description of Artificial Sequence: Synthetic oligonucleotide
gagucuaugacugccugga

SEQ ID NO: 188682 - RNA, 19 nt, Artificial Sequence
  Description of Artificial Sequence: Synthetic oligonucleotide
cugcaaaccgaacugucuc

SEQ ID NO: 188683 - RNA, 19 nt, Artificial Sequence
  Description of Artificial Sequence: Synthetic oligonucleotide
ucguguggacuuagugagg

SEQ ID NO: 188684 - RNA, 19 nt, Artificial Sequence
  Description of Artificial Sequence: Synthetic oligonucleotide
uugucuaccccugggcucc

SEQ ID NO: 188685 - RNA, 19 nt, Artificial Sequence
  Description of Artificial Sequence: Synthetic oligonucleotide
ugguguucagguuucccaa

SEQ ID NO: 188686 - RNA, 19 nt, Artificial Sequence
  Description of Artificial Sequence: Synthetic oligonucleotide
agaaguuccggaggcaaug

SEQ ID NO: 188687 - RNA, 19 nt, Artificial Sequence
  Description of Artificial Sequence: Synthetic oligonucleotide
guuugaugcagcccaguga

SEQ ID NO: 188688 - RNA, 19 nt, Artificial Sequence
  Description of Artificial Sequence: Synthetic oligonucleotide
cugagucacuacugaagag

SEQ ID NO: 188689 - RNA, 19 nt, Artificial Sequence
  Description of Artificial Sequence: Synthetic oligonucleotide
caaaccggucaacuacucc

SEQ ID NO: 188690 - RNA, 19 nt, Artificial Sequence
  Description of Artificial Sequence: Synthetic oligonucleotide
aggacguaaucucugcaaa

SEQ ID NO: 188691 - RNA, 19 nt, Artificial Sequence
  Description of Artificial Sequence: Synthetic oligonucleotide
agcaaaaccugugaggauu

SEQ ID NO: 188692 - RNA, 19 nt, Artificial Sequence
  Description of Artificial Sequence: Synthetic oligonucleotide
ucucacuccuuuucagaac

SEQ ID NO: 188693 - RNA, 19 nt, Artificial Sequence
  Description of Artificial Sequence: Synthetic oligonucleotide
acacaagcuauuccccucu

SEQ ID NO: 188694 - RNA, 19 nt, Artificial Sequence
  Description of Artificial Sequence: Synthetic oligonucleotide
uuugucuacccaggggccc

SEQ ID NO: 188695 - RNA, 19 nt, Artificial Sequence
  Description of Artificial Sequence: Synthetic oligonucleotide
uggucuagaaugcgccaga

SEQ ID NO: 188696 - RNA, 19 nt, Artificial Sequence
  Description of Artificial Sequence: Synthetic oligonucleotide
gguucuuaccuggaaaccc

SEQ ID NO: 188697 - RNA, 19 nt, Artificial Sequence
  Description of Artificial Sequence: Synthetic oligonucleotide
acaguagggauugaccccu

SEQ ID NO: 188698 - RNA, 19 nt, Artificial Sequence
  Description of Artificial Sequence: Synthetic oligonucleotide
cauucagauucaguuggag

SEQ ID NO: 188699 - RNA, 19 nt, Artificial Sequence
  Description of Artificial Sequence: Synthetic oligonucleotide
aaacccaugugagccucag

SEQ ID NO: 188700 - RNA, 19 nt, Artificial Sequence
  Description of Artificial Sequence: Synthetic oligonucleotide
caauguuugucagagccca

SEQ ID NO: 188701 - RNA, 19 nt, Artificial Sequence
  Description of Artificial Sequence: Synthetic oligonucleotide
accguccccuucuugucac

SEQ ID NO: 188702 - RNA, 19 nt, Artificial Sequence
  Description of Artificial Sequence: Synthetic oligonucleotide
ucguugugcaucagaaguu

SEQ ID NO: 188703 - RNA, 19 nt, Artificial Sequence
  Description of Artificial Sequence: Synthetic oligonucleotide
uugugagucguguggacuu

SEQ ID NO: 188704 - RNA, 19 nt, Artificial Sequence
  Description of Artificial Sequence: Synthetic oligonucleotide
aggcaauguuugucagagc

SEQ ID NO: 188705 - RNA, 19 nt, Artificial Sequence
  Description of Artificial Sequence: Synthetic oligonucleotide
aagcaaaaccugugaggau

SEQ ID NO: 188706 - RNA, 19 nt, Artificial Sequence
  Description of Artificial Sequence: Synthetic oligonucleotide
cuugcacccuuccccagcc

SEQ ID NO: 188707 - RNA, 19 nt, Artificial Sequence
  Description of Artificial Sequence: Synthetic oligonucleotide
ucuuauggauaugcaggga

SEQ ID NO: 188708 - RNA, 19 nt, Artificial Sequence
  Description of Artificial Sequence: Synthetic oligonucleotide
uccuuagagcugcucagua

SEQ ID NO: 188709 - RNA, 19 nt, Artificial Sequence
  Description of Artificial Sequence: Synthetic oligonucleotide
gucuagaaugcgccagaag

SEQ ID NO: 188710 - RNA, 19 nt, Artificial Sequence
  Description of Artificial Sequence: Synthetic oligonucleotide
cauuauagcuggaagcccu

SEQ ID NO: 188711 - RNA, 19 nt, Artificial Sequence
  Description of Artificial Sequence: Synthetic oligonucleotide
ggcgagacaacacaggcaa

SEQ ID NO: 188712 - RNA, 19 nt, Artificial Sequence
  Description of Artificial Sequence: Synthetic oligonucleotide
uucuuaccuggaaacccaa

SEQ ID NO: 188713 - RNA, 19 nt, Artificial Sequence
  Description of Artificial Sequence: Synthetic oligonucleotide
uagggaauagacggacgug

SEQ ID NO: 188714 - RNA, 19 nt, Artificial Sequence
  Description of Artificial Sequence: Synthetic oligonucleotide
gaaccaguuaggaaggccu

SEQ ID NO: 188715 - RNA, 19 nt, Artificial Sequence
  Description of Artificial Sequence: Synthetic oligonucleotide
acaccguccccuucuuguc

SEQ ID NO: 188716 - RNA, 19 nt, Artificial Sequence
  Description of Artificial Sequence: Synthetic oligonucleotide
gguuggucuagaaugcgcc

SEQ ID NO: 188717 - RNA, 19 nt, Artificial Sequence
  Description of Artificial Sequence: Synthetic oligonucleotide
acaugugugcagccaaaau

SEQ ID NO: 188718 - RNA, 19 nt, Artificial Sequence
  Description of Artificial Sequence: Synthetic oligonucleotide
gguuugaugcagcccagug

SEQ ID NO: 188719 - RNA, 19 nt, Artificial Sequence
  Description of Artificial Sequence: Synthetic oligonucleotide
cuucuacaccaaaguagug

SEQ ID NO: 188720 - RNA, 19 nt, Artificial Sequence
  Description of Artificial Sequence: Synthetic oligonucleotide
uucucgugacucugaagaa

SEQ ID NO: 188721 - RNA, 19 nt, Artificial Sequence
  Description of Artificial Sequence: Synthetic oligonucleotide
auucaggacguaaucucug

SEQ ID NO: 188722 - RNA, 19 nt, Artificial Sequence
  Description of Artificial Sequence: Synthetic oligonucleotide
ggagaugccacuuuguaau

SEQ ID NO: 188723 - RNA, 19 nt, Artificial Sequence
  Description of Artificial Sequence: Synthetic oligonucleotide
gccaauacccaccuccagc

SEQ ID NO: 188724 - RNA, 19 nt, Artificial Sequence
  Description of Artificial Sequence: Synthetic oligonucleotide
ggcaauggaaccaguuagg

SEQ ID NO: 188725 - RNA, 19 nt, Artificial Sequence
  Description of Artificial Sequence: Synthetic oligonucleotide
uggaugaagcaagaauaau

SEQ ID NO: 188726 - RNA, 19 nt, Artificial Sequence
  Description of Artificial Sequence: Synthetic oligonucleotide
ugcuauugcucagaaucuc

SEQ ID NO: 188727 - RNA, 19 nt, Artificial Sequence
  Description of Artificial Sequence: Synthetic oligonucleotide
ugcucaguagguggaggag

SEQ ID NO: 188728 - RNA, 19 nt, Artificial Sequence
  Description of Artificial Sequence: Synthetic oligonucleotide
cacuacugaagagcaggcg

SEQ ID NO: 188729 - RNA, 19 nt, Artificial Sequence
  Description of Artificial Sequence: Synthetic oligonucleotide
agccacuacgcuugcccuc

SEQ ID NO: 188730 - RNA, 19 nt, Artificial Sequence
  Description of Artificial Sequence: Synthetic oligonucleotide
acuuagugaggaguguuaa

SEQ ID NO: 188731 - RNA, 19 nt, Artificial Sequence
  Description of Artificial Sequence: Synthetic oligonucleotide
gcucgcaucuaugacagcc

SEQ ID NO: 188732 - RNA, 19 nt, Artificial Sequence
  Description of Artificial Sequence: Synthetic oligonucleotide
uuacacacaucagggcaga

SEQ ID NO: 188733 - RNA, 19 nt, Artificial Sequence
  Description of Artificial Sequence: Synthetic oligonucleotide
aucaagcuuuguuugucua

SEQ ID NO: 188734 - RNA, 19 nt, Artificial Sequence
  Description of Artificial Sequence: Synthetic oligonucleotide
guagguaagcccaagcccu

SEQ ID NO: 188735 - RNA, 19 nt, Artificial Sequence
  Description of Artificial Sequence: Synthetic oligonucleotide
ccuauugccagcagugaug

SEQ ID NO: 188736 - RNA, 19 nt, Artificial Sequence
  Description of Artificial Sequence: Synthetic oligonucleotide
cuagaggggcaaauucuca

SEQ ID NO: 188737 - RNA, 19 nt, Artificial Sequence
  Description of Artificial Sequence: Synthetic oligonucleotide
accucauacccacaucauu

SEQ ID NO: 188738 - RNA, 19 nt, Artificial Sequence
  Description of Artificial Sequence: Synthetic oligonucleotide
ugguucucgugacucugaa

SEQ ID NO: 188739 - RNA, 19 nt, Artificial Sequence
  Description of Artificial Sequence: Synthetic oligonucleotide
acaaaccggucaacuacuc

SEQ ID NO: 188740 - RNA, 19 nt, Artificial Sequence
  Description of Artificial Sequence: Synthetic oligonucleotide
guuggucuagaaugcgcca

SEQ ID NO: 188741 - RNA, 19 nt, Artificial Sequence
  Description of Artificial Sequence: Synthetic oligonucleotide
uguaaucguugugcaucag

SEQ ID NO: 188742 - RNA, 19 nt, Artificial Sequence
  Description of Artificial Sequence: Synthetic oligonucleotide
caguucaggcuucaaacaa

SEQ ID NO: 188743 - RNA, 19 nt, Artificial Sequence
  Description of Artificial Sequence: Synthetic oligonucleotide
agccuugcacccuucccca

SEQ ID NO: 188744 - RNA, 19 nt, Artificial Sequence
  Description of Artificial Sequence: Synthetic oligonucleotide
ccggauugauuccuuagag

SEQ ID NO: 188745 - RNA, 19 nt, Artificial Sequence
  Description of Artificial Sequence: Synthetic oligonucleotide
gcagcuaguguccaauaca

SEQ ID NO: 188746 - RNA, 19 nt, Artificial Sequence
  Description of Artificial Sequence: Synthetic oligonucleotide
gucuggacucagcacacuc

SEQ ID NO: 188747 - RNA, 19 nt, Artificial Sequence
  Description of Artificial Sequence: Synthetic oligonucleotide
gguguucagguuucccaag

SEQ ID NO: 188748 - RNA, 19 nt, Artificial Sequence
  Description of Artificial Sequence: Synthetic oligonucleotide
caauggaaccaguuaggaa

SEQ ID NO: 188749 - RNA, 19 nt, Artificial Sequence
  Description of Artificial Sequence: Synthetic oligonucleotide
uuggccuauuucugcucug

SEQ ID NO: 188750 - RNA, 19 nt, Artificial Sequence
  Description of Artificial Sequence: Synthetic oligonucleotide
aaguuccggaggcaauguu

SEQ ID NO: 188751 - RNA, 19 nt, Artificial Sequence
  Description of Artificial Sequence: Synthetic oligonucleotide
accuggaaacccaagcuau

SEQ ID NO: 188752 - RNA, 19 nt, Artificial Sequence
  Description of Artificial Sequence: Synthetic oligonucleotide
gugggacuagggaauagac

SEQ ID NO: 188753 - RNA, 19 nt, Artificial Sequence
  Description of Artificial Sequence: Synthetic oligonucleotide
ggacguaaucucugcaaac

SEQ ID NO: 188754 - RNA, 19 nt, Artificial Sequence
  Description of Artificial Sequence: Synthetic oligonucleotide
agacggacguggcaaugga

SEQ ID NO: 188755 - RNA, 19 nt, Artificial Sequence
  Description of Artificial Sequence: Synthetic oligonucleotide
cuagggaauagacggacgu

SEQ ID NO: 188756 - RNA, 19 nt, Artificial Sequence
  Description of Artificial Sequence: Synthetic oligonucleotide
cuacaccaaaguagugcuc

SEQ ID NO: 188757 - RNA, 19 nt, Artificial Sequence
  Description of Artificial Sequence: Synthetic oligonucleotide
cuccagcuauguuucccag

SEQ ID NO: 188758 - RNA, 19 nt, Artificial Sequence
  Description of Artificial Sequence: Synthetic oligonucleotide
uggccuauuucugcucuga

SEQ ID NO: 188759 - RNA, 19 nt, Artificial Sequence
  Description of Artificial Sequence: Synthetic oligonucleotide
ggauugaccccugagccac

SEQ ID NO: 188760 - RNA, 19 nt, Artificial Sequence
  Description of Artificial Sequence: Synthetic oligonucleotide
cuaccccugggcuccuggg

SEQ ID NO: 188761 - RNA, 19 nt, Artificial Sequence
  Description of Artificial Sequence: Synthetic oligonucleotide
caggacguaaucucugcaa

SEQ ID NO: 188762 - RNA, 19 nt, Artificial Sequence
  Description of Artificial Sequence: Synthetic oligonucleotide
guuucccugcccaccagug

SEQ ID NO: 188763 - RNA, 19 nt, Artificial Sequence
  Description of Artificial Sequence: Synthetic oligonucleotide
auagacggacguggcaaug

SEQ ID NO: 188764 - RNA, 19 nt, Artificial Sequence
  Description of Artificial Sequence: Synthetic oligonucleotide
ucuuuccucggcagagguu

SEQ ID NO: 188765 - RNA, 19 nt, Artificial Sequence
  Description of Artificial Sequence: Synthetic oligonucleotide
cuuugucuaccccugggcu

SEQ ID NO: 188766 - RNA, 19 nt, Artificial Sequence
  Description of Artificial Sequence: Synthetic oligonucleotide
cugcucaguagguggagga

SEQ ID NO: 188767 - RNA, 19 nt, Artificial Sequence
  Description of Artificial Sequence: Synthetic oligonucleotide
ccaauacauggaucgcuag

SEQ ID NO: 188768 - RNA, 19 nt, Artificial Sequence
  Description of Artificial Sequence: Synthetic oligonucleotide
guguggacuuagugaggag

SEQ ID NO: 188769 - RNA, 19 nt, Artificial Sequence
  Description of Artificial Sequence: Synthetic oligonucleotide
gcaauguuugucagagccc

SEQ ID NO: 188770 - RNA, 19 nt, Artificial Sequence
  Description of Artificial Sequence: Synthetic oligonucleotide
agaaugcgccagaagucug

SEQ ID NO: 188771 - RNA, 19 nt, Artificial Sequence
  Description of Artificial Sequence: Synthetic oligonucleotide
cucauacccacaucauuua

SEQ ID NO: 188772 - RNA, 19 nt, Artificial Sequence
  Description of Artificial Sequence: Synthetic oligonucleotide
agggaagugccaccuuaaa

SEQ ID NO: 188773 - RNA, 19 nt, Artificial Sequence
  Description of Artificial Sequence: Synthetic oligonucleotide
uguccagaggguggcuccc

SEQ ID NO: 188774 - RNA, 19 nt, Artificial Sequence
  Description of Artificial Sequence: Synthetic oligonucleotide
ugacaccagguaccugauc

SEQ ID NO: 188775 - RNA, 19 nt, Artificial Sequence
  Description of Artificial Sequence: Synthetic oligonucleotide
ucaguagguggaggagaca

SEQ ID NO: 188776 - RNA, 19 nt, Artificial Sequence
  Description of Artificial Sequence: Synthetic oligonucleotide
agucagcaagucacacagg

SEQ ID NO: 188777 - RNA, 19 nt, Artificial Sequence
  Description of Artificial Sequence: Synthetic oligonucleotide
uugucuacccaggggcccu

SEQ ID NO: 188778 - RNA, 19 nt, Artificial Sequence
  Description of Artificial Sequence: Synthetic oligonucleotide
caagucacacagggguuug

SEQ ID NO: 188779 - RNA, 19 nt, Artificial Sequence
  Description of Artificial Sequence: Synthetic oligonucleotide
caaacaaggagagaccuuu

SEQ ID NO: 188780 - RNA, 19 nt, Artificial Sequence
  Description of Artificial Sequence: Synthetic oligonucleotide
aagucacacagggguuuga

SEQ ID NO: 188781 - RNA, 19 nt, Artificial Sequence
  Description of Artificial Sequence: Synthetic oligonucleotide
ggauuaaggaucgagcaau

SEQ ID NO: 188782 - RNA, 19 nt, Artificial Sequence
  Description of Artificial Sequence: Synthetic oligonucleotide
guccauugagggccacuug

SEQ ID NO: 188783 - RNA, 19 nt, Artificial Sequence
  Description of Artificial Sequence: Synthetic oligonucleotide
gggaagcuugucaucauca

SEQ ID NO: 188784 - RNA, 19 nt, Artificial Sequence
  Description of Artificial Sequence: Synthetic oligonucleotide
agcuaucuuugggcgaugu

SEQ ID NO: 188785 - RNA, 19 nt, Artificial Sequence
  Description of Artificial Sequence: Synthetic oligonucleotide
gcccagacugcauuccuug

SEQ ID NO: 188786 - RNA, 19 nt, Artificial Sequence
  Description of Artificial Sequence: Synthetic oligonucleotide
uggaucgcuagaggggcaa

SEQ ID NO: 188787 - RNA, 19 nt, Artificial Sequence
  Description of Artificial Sequence: Synthetic oligonucleotide
ugauuaccucaguccuccu

SEQ ID NO: 188788 - RNA, 19 nt, Artificial Sequence
  Description of Artificial Sequence: Synthetic oligonucleotide
cacaaaccggucaacuacu

SEQ ID NO: 188789 - RNA, 19 nt, Artificial Sequence
  Description of Artificial Sequence: Synthetic oligonucleotide
cacagucucagggcagcag

SEQ ID NO: 188790 - RNA, 19 nt, Artificial Sequence
  Description of Artificial Sequence: Synthetic oligonucleotide
agcuaguguccaauacaug

SEQ ID NO: 188791 - RNA, 19 nt, Artificial Sequence
  Description of Artificial Sequence: Synthetic oligonucleotide
cacaagcuauuccccucug

SEQ ID NO: 188792 - RNA, 19 nt, Artificial Sequence
  Description of Artificial Sequence: Synthetic oligonucleotide
ccaaguuauggcugcuuuc

SEQ ID NO: 188793 - RNA, 19 nt, Artificial Sequence
  Description of Artificial Sequence: Synthetic oligonucleotide
cuaggguucuuaccuggaa

SEQ ID NO: 188794 - RNA, 19 nt, Artificial Sequence
  Description of Artificial Sequence: Synthetic oligonucleotide
gcuagaggggcaaauucuc

SEQ ID NO: 188795 - RNA, 19 nt, Artificial Sequence
  Description of Artificial Sequence: Synthetic oligonucleotide
cuuggccuauuucugcucu

SEQ ID NO: 188796 - RNA, 19 nt, Artificial Sequence
  Description of Artificial Sequence: Synthetic oligonucleotide
gauuaccucaguccuccuu

SEQ ID NO: 188797 - RNA, 19 nt, Artificial Sequence
  Description of Artificial Sequence: Synthetic oligonucleotide
aagcuaucuuugggcgaug

SEQ ID NO: 188798 - RNA, 19 nt, Artificial Sequence
  Description of Artificial Sequence: Synthetic oligonucleotide
aggcgagacaacacaggca

SEQ ID NO: 188799 - RNA, 19 nt, Artificial Sequence
  Description of Artificial Sequence: Synthetic oligonucleotide
aucgcuagaggggcaaauu

SEQ ID NO: 188800 - RNA, 19 nt, Artificial Sequence
  Description of Artificial Sequence: Synthetic oligonucleotide
uccucggcagagguuugac

SEQ ID NO: 188801 - RNA, 19 nt, Artificial Sequence
  Description of Artificial Sequence: Synthetic oligonucleotide
acaaaggauuaaggaucga

SEQ ID NO: 188802 - RNA, 19 nt, Artificial Sequence
  Description of Artificial Sequence: Synthetic oligonucleotide
ugugagucguguggacuua

SEQ ID NO: 188803 - RNA, 19 nt, Artificial Sequence
  Description of Artificial Sequence: Synthetic oligonucleotide
cuuuguaaucguugugcau

SEQ ID NO: 188804 - RNA, 19 nt, Artificial Sequence
  Description of Artificial Sequence: Synthetic oligonucleotide
ggguucauggugugaaucu

SEQ ID NO: 188805 - RNA, 19 nt, Artificial Sequence
  Description of Artificial Sequence: Synthetic oligonucleotide
ccuacgguucagugcaaug

SEQ ID NO: 188806 - RNA, 19 nt, Artificial Sequence
  Description of Artificial Sequence: Synthetic oligonucleotide
ggaaacccaagcuaucuuu

SEQ ID NO: 188807 - RNA, 19 nt, Artificial Sequence
  Description of Artificial Sequence: Synthetic oligonucleotide
ugucuggacucagcacacu

SEQ ID NO: 188808 - RNA, 19 nt, Artificial Sequence
  Description of Artificial Sequence: Synthetic oligonucleotide
cucaggcuguuggaagaug

SEQ ID NO: 188809 - RNA, 19 nt, Artificial Sequence
  Description of Artificial Sequence: Synthetic oligonucleotide
uccuacgguucagugcaau

SEQ ID NO: 188810 - RNA, 19 nt, Artificial Sequence
  Description of Artificial Sequence: Synthetic oligonucleotide
gcaauucaggacguaaucu

SEQ ID NO: 188811 - RNA, 19 nt, Artificial Sequence
  Description of Artificial Sequence: Synthetic oligonucleotide
agguaagcccaagcccuug

SEQ ID NO: 188812 - RNA, 19 nt, Artificial Sequence
  Description of Artificial Sequence: Synthetic oligonucleotide
gagcaauucaggacguaau

SEQ ID NO: 188813 - RNA, 19 nt, Artificial Sequence
  Description of Artificial Sequence: Synthetic oligonucleotide
cugugugcaguucaggcuu

SEQ ID NO: 188814 - RNA, 19 nt, Artificial Sequence
  Description of Artificial Sequence: Synthetic oligonucleotide
gagcccuauugccagcagu

SEQ ID NO: 188815 - RNA, 19 nt, Artificial Sequence
  Description of Artificial Sequence: Synthetic oligonucleotide
gaaugcgccagaagucugu

SEQ ID NO: 188816 - RNA, 19 nt, Artificial Sequence
  Description of Artificial Sequence: Synthetic oligonucleotide
cacuacgcuugcccucuug

SEQ ID NO: 188817 - RNA, 19 nt, Artificial Sequence
  Description of Artificial Sequence: Synthetic oligonucleotide
gaaguuccggaggcaaugu

SEQ ID NO: 188818 - RNA, 19 nt, Artificial Sequence
  Description of Artificial Sequence: Synthetic oligonucleotide
cuggaaacccaagcuaucu

SEQ ID NO: 188819 - RNA, 19 nt, Artificial Sequence
  Description of Artificial Sequence: Synthetic oligonucleotide
cagggaagugccaccuuaa

SEQ ID NO: 188820 - RNA, 19 nt, Artificial Sequence
  Description of Artificial Sequence: Synthetic oligonucleotide
cugccuguucuuguacauc

SEQ ID NO: 188821 - RNA, 19 nt, Artificial Sequence
  Description of Artificial Sequence: Synthetic oligonucleotide
accgaacugucuccagcua

SEQ ID NO: 188822 - RNA, 19 nt, Artificial Sequence
  Description of Artificial Sequence: Synthetic oligonucleotide
ugcucgcaucuaugacagc

SEQ ID NO: 188823 - RNA, 19 nt, Artificial Sequence
  Description of Artificial Sequence: Synthetic oligonucleotide
gagccacuacgcuugcccu

SEQ ID NO: 188824 - RNA, 19 nt, Artificial Sequence
  Description of Artificial Sequence: Synthetic oligonucleotide
ggcggguucuuuccucggc

SEQ ID NO: 188825 - RNA, 19 nt, Artificial Sequence
  Description of Artificial Sequence: Synthetic oligonucleotide
ccaguuaggaaggccuuug

SEQ ID NO: 188826 - RNA, 19 nt, Artificial Sequence
  Description of Artificial Sequence: Synthetic oligonucleotide
cauaguuugcaggcagucu

SEQ ID NO: 188827 - RNA, 19 nt, Artificial Sequence
  Description of Artificial Sequence: Synthetic oligonucleotide
uaccaaucuccggcagacu

SEQ ID NO: 188828 - RNA, 19 nt, Artificial Sequence
  Description of Artificial Sequence: Synthetic oligonucleotide
aggcuucaaacaagaugcu

SEQ ID NO: 188829 - RNA, 19 nt, Artificial Sequence
  Description of Artificial Sequence: Synthetic oligonucleotide
cggacguggcaauggaacc

SEQ ID NO: 188830 - RNA, 19 nt, Artificial Sequence
  Description of Artificial Sequence: Synthetic oligonucleotide
gccgcaggauguucucuag

SEQ ID NO: 188831 - RNA, 19 nt, Artificial Sequence
  Description of Artificial Sequence: Synthetic oligonucleotide
caguagggauugaccccug

SEQ ID NO: 188832 - RNA, 19 nt, Artificial Sequence
  Description of Artificial Sequence: Synthetic oligonucleotide
ccuugcacccuuccccagc

SEQ ID NO: 188833 - RNA, 19 nt, Artificial Sequence
  Description of Artificial Sequence: Synthetic oligonucleotide
caagcuaucuuugggcgau

SEQ ID NO: 188834 - RNA, 19 nt, Artificial Sequence
  Description of Artificial Sequence: Synthetic oligonucleotide
gacggacguggcaauggaa

SEQ ID NO: 188835 - RNA, 19 nt, Artificial Sequence
  Description of Artificial Sequence: Synthetic oligonucleotide
cuauuccccucugguguuc

SEQ ID NO: 188836 - RNA, 19 nt, Artificial Sequence
  Description of Artificial Sequence: Synthetic oligonucleotide
ccucauacccacaucauuu

SEQ ID NO: 188837 - RNA, 19 nt, Artificial Sequence
  Description of Artificial Sequence: Synthetic oligonucleotide
guugugcaucagaaguucu

SEQ ID NO: 188838 - RNA, 19 nt, Artificial Sequence
  Description of Artificial Sequence: Synthetic oligonucleotide
ggugugaaucuuugacaua

SEQ ID NO: 188839 - RNA, 19 nt, Artificial Sequence
  Description of Artificial Sequence: Synthetic oligonucleotide
caccguccccuucuuguca

SEQ ID NO: 188840 - RNA, 19 nt, Artificial Sequence
  Description of Artificial Sequence: Synthetic oligonucleotide
ucgagcaauucaggacgua

SEQ ID NO: 188841 - RNA, 19 nt, Artificial Sequence
  Description of Artificial Sequence: Synthetic oligonucleotide
cuacgcuugcccucuugcu

SEQ ID NO: 188842 - RNA, 19 nt, Artificial Sequence
  Description of Artificial Sequence: Synthetic oligonucleotide
cguugugcaucagaaguuc

SEQ ID NO: 188843 - RNA, 19 nt, Artificial Sequence
  Description of Artificial Sequence: Synthetic oligonucleotide
ggacuagggaauagacgga

SEQ ID NO: 188844 - RNA, 19 nt, Artificial Sequence
  Description of Artificial Sequence: Synthetic oligonucleotide
gaggacugggauggaugaa

SEQ ID NO: 188845 - RNA, 19 nt, Artificial Sequence
  Description of Artificial Sequence: Synthetic oligonucleotide
ggauuaaauucagcuuucu

SEQ ID NO: 188846 - RNA, 19 nt, Artificial Sequence
  Description of Artificial Sequence: Synthetic oligonucleotide
cugaucugcucgcaucuau

SEQ ID NO: 188847 - RNA, 19 nt, Artificial Sequence
  Description of Artificial Sequence: Synthetic oligonucleotide
auggaucgcuagaggggca

SEQ ID NO: 188848 - RNA, 19 nt, Artificial Sequence
  Description of Artificial Sequence: Synthetic oligonucleotide
gaucgcuagaggggcaaau

SEQ ID NO: 188849 - RNA, 19 nt, Artificial Sequence
  Description of Artificial Sequence: Synthetic oligonucleotide
ggucaagagcacagucuca

SEQ ID NO: 188850 - RNA, 19 nt, Artificial Sequence
  Description of Artificial Sequence: Synthetic oligonucleotide
cacacucaaugccaugguu

SEQ ID NO: 188851 - RNA, 19 nt, Artificial Sequence
  Description of Artificial Sequence: Synthetic oligonucleotide
ggucuagaaugcgccagaa

SEQ ID NO: 188852 - RNA, 19 nt, Artificial Sequence
  Description of Artificial Sequence: Synthetic oligonucleotide
cguguggacuuagugagga

SEQ ID NO: 188853 - RNA, 19 nt, Artificial Sequence
  Description of Artificial Sequence: Synthetic oligonucleotide
cggguucuuuccucggcag

SEQ ID NO: 188854 - RNA, 19 nt, Artificial Sequence
  Description of Artificial Sequence: Synthetic oligonucleotide
ccugagccacuacgcuugc

SEQ ID NO: 188855 - RNA, 19 nt, Artificial Sequence
  Description of Artificial Sequence: Synthetic oligonucleotide
ggacuuagugaggaguguu

SEQ ID NO: 188856 - RNA, 19 nt, Artificial Sequence
  Description of Artificial Sequence: Synthetic oligonucleotide
cgcuagaggggcaaauucu

SEQ ID NO: 188857 - RNA, 19 nt, Artificial Sequence
  Description of Artificial Sequence: Synthetic oligonucleotide
gcccuauugccagcaguga

SEQ ID NO: 188858 - RNA, 19 nt, Artificial Sequence
  Description of Artificial Sequence: Synthetic oligonucleotide
gauugaccccugagccacu

SEQ ID NO: 188859 - RNA, 19 nt, Artificial Sequence
  Description of Artificial Sequence: Synthetic oligonucleotide
cccggaggcagacauuaua

SEQ ID NO: 188860 - RNA, 19 nt, Artificial Sequence
  Description of Artificial Sequence: Synthetic oligonucleotide
cuccuacgguucagugcaa

SEQ ID NO: 188861 - RNA, 19 nt, Artificial Sequence
  Description of Artificial Sequence: Synthetic oligonucleotide
gcuauuccccucugguguu

SEQ ID NO: 188862 - RNA, 19 nt, Artificial Sequence
  Description of Artificial Sequence: Synthetic oligonucleotide
gccacuacgcuugcccucu

SEQ ID NO: 188863 - RNA, 19 nt, Artificial Sequence
  Description of Artificial Sequence: Synthetic oligonucleotide
ccacaccguccccuucuug

SEQ ID NO: 188864 - RNA, 19 nt, Artificial Sequence
  Description of Artificial Sequence: Synthetic oligonucleotide
gucuaccccugggcuccug

SEQ ID NO: 188865 - RNA, 19 nt, Artificial Sequence
  Description of Artificial Sequence: Synthetic oligonucleotide
gcgccagaagucugucucu

SEQ ID NO: 188866 - RNA, 19 nt, Artificial Sequence
  Description of Artificial Sequence: Synthetic oligonucleotide
cccuauugccagcagugau

SEQ ID NO: 188867 - RNA, 19 nt, Artificial Sequence
  Description of Artificial Sequence: Synthetic oligonucleotide
ggaucgcuagaggggcaaa

SEQ ID NO: 188868 - RNA, 19 nt, Artificial Sequence
  Description of Artificial Sequence: Synthetic oligonucleotide
ccggcagacuccagagucu

SEQ ID NO: 188869 - RNA, 19 nt, Artificial Sequence
  Description of Artificial Sequence: Synthetic oligonucleotide
gcgagacaacacaggcaaa

SEQ ID NO: 188870 - RNA, 19 nt, Artificial Sequence
  Description of Artificial Sequence: Synthetic oligonucleotide
agccuguauuugagcccua

SEQ ID NO: 188871 - RNA, 19 nt, Artificial Sequence
  Description of Artificial Sequence: Synthetic oligonucleotide
caggugugugguggcugcu

SEQ ID NO: 188872 - RNA, 19 nt, Artificial Sequence
  Description of Artificial Sequence: Synthetic oligonucleotide
cagggaccuggagaagcuu

SEQ ID NO: 188873 - RNA, 19 nt, Artificial Sequence
  Description of Artificial Sequence: Synthetic oligonucleotide
ccugaucugcucgcaucua

SEQ ID NO: 188874 - RNA, 19 nt, Artificial Sequence
  Description of Artificial Sequence: Synthetic oligonucleotide
ccguccccuucuugucaca

SEQ ID NO: 188875 - RNA, 19 nt, Artificial Sequence
  Description of Artificial Sequence: Synthetic oligonucleotide
cccuccccggaggcagaca

SEQ ID NO: 188876 - RNA, 19 nt, Artificial Sequence
  Description of Artificial Sequence: Synthetic oligonucleotide
ccacuacgcuugcccucuu

SEQ ID NO: 188877 - RNA, 19 nt, Artificial Sequence
  Description of Artificial Sequence: Synthetic oligonucleotide
uucuauuauacucuuaaag

SEQ ID NO: 188878 - RNA, 19 nt, Artificial Sequence
  Description of Artificial Sequence: Synthetic oligonucleotide
gaugaaauuggguagcugg

SEQ ID NO: 188879 - RNA, 19 nt, Artificial Sequence
  Description of Artificial Sequence: Synthetic oligonucleotide
uauuaauauauuaugcuac

SEQ ID NO: 188880 - RNA, 19 nt, Artificial Sequence
  Description of Artificial Sequence: Synthetic oligonucleotide
uuacaaaugagccccauag

SEQ ID NO: 188881 - RNA, 19 nt, Artificial Sequence
  Description of Artificial Sequence: Synthetic oligonucleotide
auaacaauguuuaaagaac

SEQ ID NO: 188882 - RNA, 19 nt, Artificial Sequence
  Description of Artificial Sequence: Synthetic oligonucleotide
gaagauguaauuuggguac

SEQ ID NO: 188883 - RNA, 19 nt, Artificial Sequence
  Description of Artificial Sequence: Synthetic oligonucleotide
agcgccaugacucucuucc

SEQ ID NO: 188884 - RNA, 19 nt, Artificial Sequence
  Description of Artificial Sequence: Synthetic oligonucleotide
ugucuuaggacaucgauga

SEQ ID NO: 188885 - RNA, 19 nt, Artificial Sequence
  Description of Artificial Sequence: Synthetic oligonucleotide
uuugcuacuuaguaaacug

SEQ ID NO: 188886 - RNA, 19 nt, Artificial Sequence
  Description of Artificial Sequence: Synthetic oligonucleotide
uagccaacaaaucugagac

SEQ ID NO: 188887 - RNA, 19 nt, Artificial Sequence
  Description of Artificial Sequence: Synthetic oligonucleotide
uacaauguggugcccaugg

SEQ ID NO: 188888 - RNA, 19 nt, Artificial Sequence
  Description of Artificial Sequence: Synthetic oligonucleotide
uuuggguacaauaaagcuc

SEQ ID NO: 188889 - RNA, 19 nt, Artificial Sequence
  Description of Artificial Sequence: Synthetic oligonucleotide
uuuguguuacucuuauugc

SEQ ID NO: 188890 - RNA, 19 nt, Artificial Sequence
  Description of Artificial Sequence: Synthetic oligonucleotide
aauucugccgccugccagg

SEQ ID NO: 188891 - RNA, 19 nt, Artificial Sequence
  Description of Artificial Sequence: Synthetic oligonucleotide
auuaauauauuaugcuaca

SEQ ID NO: 188892 - RNA, 19 nt, Artificial Sequence
  Description of Artificial Sequence: Synthetic oligonucleotide
aaccaggcgccaucgagcc

SEQ ID NO: 188893 - RNA, 19 nt, Artificial Sequence
  Description of Artificial Sequence: Synthetic oligonucleotide
ugacuauccaaugaguugc

SEQ ID NO: 188894 - RNA, 19 nt, Artificial Sequence
  Description of Artificial Sequence: Synthetic oligonucleotide
cuacuuaguaaacugacuc

SEQ ID NO: 188895 - RNA, 19 nt, Artificial Sequence
  Description of Artificial Sequence: Synthetic oligonucleotide
uauccaaugaguugcccag

SEQ ID NO: 188896 - RNA, 19 nt, Artificial Sequence
  Description of Artificial Sequence: Synthetic oligonucleotide
cuucaugacaauucacagg

SEQ ID NO: 188897 - RNA, 19 nt, Artificial Sequence
  Description of Artificial Sequence: Synthetic oligonucleotide
cuggaaagaauucugccgc

SEQ ID NO: 188898 - RNA, 19 nt, Artificial Sequence
  Description of Artificial Sequence: Synthetic oligonucleotide
augggcagggguucaaucc

SEQ ID NO: 188899 - RNA, 19 nt, Artificial Sequence
  Description of Artificial Sequence: Synthetic oligonucleotide
uuuacaccaguccuuugcc

SEQ ID NO: 188900 - RNA, 19 nt, Artificial Sequence
  Description of Artificial Sequence: Synthetic oligonucleotide
agcccgcacacuuucaugc

SEQ ID NO: 188901 - RNA, 19 nt, Artificial Sequence
  Description of Artificial Sequence: Synthetic oligonucleotide
caaugaguugcccagaauc

SEQ ID NO: 188902 - RNA, 19 nt, Artificial Sequence
  Description of Artificial Sequence: Synthetic oligonucleotide
ugugucaugguugaagaug

SEQ ID NO: 188903 - RNA, 19 nt, Artificial Sequence
  Description of Artificial Sequence: Synthetic oligonucleotide
ucugccaaccagagcaugg

SEQ ID NO: 188904 - RNA, 19 nt, Artificial Sequence
  Description of Artificial Sequence: Synthetic oligonucleotide
uuaguaaacugacuccagu

SEQ ID NO: 188905 - RNA, 19 nt, Artificial Sequence
  Description of Artificial Sequence: Synthetic oligonucleotide
ugaggugucagcaccuuug

SEQ ID NO: 188906 - RNA, 19 nt, Artificial Sequence
  Description of Artificial Sequence: Synthetic oligonucleotide
aguucaguuuacaaugugg

SEQ ID NO: 188907 - RNA, 19 nt, Artificial Sequence
  Description of Artificial Sequence: Synthetic oligonucleotide
agcuauggcaccuuggaga

SEQ ID NO: 188908 - RNA, 19 nt, Artificial Sequence
  Description of Artificial Sequence: Synthetic oligonucleotide
ugcuacuuaguaaacugac

SEQ ID NO: 188909 - RNA, 19 nt, Artificial Sequence
  Description of Artificial Sequence: Synthetic oligonucleotide
aaaagggagaugucugcca

SEQ ID NO: 188910 - RNA, 19 nt, Artificial Sequence
  Description of Artificial Sequence: Synthetic oligonucleotide
guaggugccgaguugcugg

SEQ ID NO: 188911 - RNA, 19 nt, Artificial Sequence
  Description of Artificial Sequence: Synthetic oligonucleotide
uauggcgagagcugaagcc

SEQ ID NO: 188912 - RNA, 19 nt, Artificial Sequence
  Description of Artificial Sequence: Synthetic oligonucleotide
auagccaacaaaucugaga

SEQ ID NO: 188913 - RNA, 19 nt, Artificial Sequence
  Description of Artificial Sequence: Synthetic oligonucleotide
uuguguuacucuuauugcu

SEQ ID NO: 188914 - RNA, 19 nt, Artificial Sequence
  Description of Artificial Sequence: Synthetic oligonucleotide
gauggagggagccuuuaag

SEQ ID NO: 188915 - RNA, 19 nt, Artificial Sequence
  Description of Artificial Sequence: Synthetic oligonucleotide
agaauggggagggugaagg

SEQ ID NO: 188916 - RNA, 19 nt, Artificial Sequence
  Description of Artificial Sequence: Synthetic oligonucleotide
cuaacauucccuggaaagg

SEQ ID NO: 188917 - RNA, 19 nt, Artificial Sequence
  Description of Artificial Sequence: Synthetic oligonucleotide
acugccuugaggugucagc

SEQ ID NO: 188918 - RNA, 19 nt, Artificial Sequence
  Description of Artificial Sequence: Synthetic oligonucleotide
agggguucaauccaguccu

SEQ ID NO: 188919 - RNA, 19 nt, Artificial Sequence
  Description of Artificial Sequence: Synthetic oligonucleotide
agaucccaugcccaagggc

SEQ ID NO: 188920 - RNA, 19 nt, Artificial Sequence
  Description of Artificial Sequence: Synthetic oligonucleotide
ucgaugcggacccagaggu

SEQ ID NO: 188921 - RNA, 19 nt, Artificial Sequence
  Description of Artificial Sequence: Synthetic oligonucleotide
uaaguaaugcuuucuuguc

SEQ ID NO: 188922 - RNA, 19 nt, Artificial Sequence
  Description of Artificial Sequence: Synthetic oligonucleotide
uguguuacucuuauugcua

SEQ ID NO: 188923 - RNA, 19 nt, Artificial Sequence
  Description of Artificial Sequence: Synthetic oligonucleotide
ugggaaauuaagaccuucu

SEQ ID NO: 188924 - RNA, 19 nt, Artificial Sequence
  Description of Artificial Sequence: Synthetic oligonucleotide
cacggcuuuagccaguggg

SEQ ID NO: 188925 - RNA, 19 nt, Artificial Sequence
  Description of Artificial Sequence: Synthetic oligonucleotide
ucucaaaagggagaugucu

SEQ ID NO: 188926 - RNA, 19 nt, Artificial Sequence
  Description of Artificial Sequence: Synthetic oligonucleotide
ucacaugcucccgucaugg

SEQ ID NO: 188927 - RNA, 19 nt, Artificial Sequence
  Description of Artificial Sequence: Synthetic oligonucleotide
cuaugggaaauuaagaccu

SEQ ID NO: 188928 - RNA, 19 nt, Artificial Sequence
  Description of Artificial Sequence: Synthetic oligonucleotide
ugacaauucacagggguga

SEQ ID NO: 188929 - RNA, 19 nt, Artificial Sequence
  Description of Artificial Sequence: Synthetic oligonucleotide
caauguggugcccaugggg

SEQ ID NO: 188930 - RNA, 19 nt, Artificial Sequence
  Description of Artificial Sequence: Synthetic oligonucleotide
cugacuauccaaugaguug

SEQ ID NO: 188931 - RNA, 19 nt, Artificial Sequence
  Description of Artificial Sequence: Synthetic oligonucleotide
uguuuagucucuugcgcca

SEQ ID NO: 188932 - RNA, 19 nt, Artificial Sequence
  Description of Artificial Sequence: Synthetic oligonucleotide
aggacuguggaugucuugg

SEQ ID NO: 188933 - RNA, 19 nt, Artificial Sequence
  Description of Artificial Sequence: Synthetic oligonucleotide
guucaauccaguccucucc

SEQ ID NO: 188934 - RNA, 19 nt, Artificial Sequence
  Description of Artificial Sequence: Synthetic oligonucleotide
gacuccuuaaauaauucuc

SEQ ID NO: 188935 - RNA, 19 nt, Artificial Sequence
  Description of Artificial Sequence: Synthetic oligonucleotide
aggucucaggcuuaaaccu

SEQ ID NO: 188936 - RNA, 19 nt, Artificial Sequence
  Description of Artificial Sequence: Synthetic oligonucleotide
agccccauagcacuauggg

SEQ ID NO: 188937 - RNA, 19 nt, Artificial Sequence
  Description of Artificial Sequence: Synthetic oligonucleotide
uuacucuuauugcuauuga

SEQ ID NO: 188938 - RNA, 19 nt, Artificial Sequence
  Description of Artificial Sequence: Synthetic oligonucleotide
uuuugcuacuuaguaaacu

SEQ ID NO: 188939 - RNA, 19 nt, Artificial Sequence
  Description of Artificial Sequence: Synthetic oligonucleotide
cuuaguaaacugacuccag

SEQ ID NO: 188940 - RNA, 19 nt, Artificial Sequence
  Description of Artificial Sequence: Synthetic oligonucleotide
ugugaagcagaguuccaga

SEQ ID NO: 188941 - RNA, 19 nt, Artificial Sequence
  Description of Artificial Sequence: Synthetic oligonucleotide
uuuaaagaaccugagccuu

SEQ ID NO: 188942 - RNA, 19 nt, Artificial Sequence
  Description of Artificial Sequence: Synthetic oligonucleotide
ucuaccggcuuagacagcc

SEQ ID NO: 188943 - RNA, 19 nt, Artificial Sequence
  Description of Artificial Sequence: Synthetic oligonucleotide
ugaguugcccagaauccug

SEQ ID NO: 188944 - RNA, 19 nt, Artificial Sequence
  Description of Artificial Sequence: Synthetic oligonucleotide
acuggagucaacaugccug

SEQ ID NO: 188945 - RNA, 19 nt, Artificial Sequence
  Description of Artificial Sequence: Synthetic oligonucleotide
caugcucccgucauggcag

SEQ ID NO: 188946 - RNA, 19 nt, Artificial Sequence
  Description of Artificial Sequence: Synthetic oligonucleotide
guugaugaaauuggguagc

SEQ ID NO: 188947 - RNA, 19 nt, Artificial Sequence
  Description of Artificial Sequence: Synthetic oligonucleotide
acucuuauugcuauugaca

SEQ ID NO: 188948 - RNA, 19 nt, Artificial Sequence
  Description of Artificial Sequence: Synthetic oligonucleotide
uuauaagcccugccuuucc

SEQ ID NO: 188949 - RNA, 19 nt, Artificial Sequence
  Description of Artificial Sequence: Synthetic oligonucleotide
auccugccaggucucaggc

SEQ ID NO: 188950 - RNA, 19 nt, Artificial Sequence
  Description of Artificial Sequence: Synthetic oligonucleotide
ugcaucuaccggcuuagac

SEQ ID NO: 188951 - RNA, 19 nt, Artificial Sequence
  Description of Artificial Sequence: Synthetic oligonucleotide
gagccuuacagagccaggg

SEQ ID NO: 188952 - RNA, 19 nt, Artificial Sequence
  Description of Artificial Sequence: Synthetic oligonucleotide
uaaagcucuaguguuuuaa

SEQ ID NO: 188953 - RNA, 19 nt, Artificial Sequence
  Description of Artificial Sequence: Synthetic oligonucleotide
uggcaagucugucugggcu

SEQ ID NO: 188954 - RNA, 19 nt, Artificial Sequence
  Description of Artificial Sequence: Synthetic oligonucleotide
aguugagcccguugagagg

SEQ ID NO: 188955 - RNA, 19 nt, Artificial Sequence
  Description of Artificial Sequence: Synthetic oligonucleotide
agacugcugccuaagaguc

SEQ ID NO: 188956 - RNA, 19 nt, Artificial Sequence
  Description of Artificial Sequence: Synthetic oligonucleotide
uuagccagugggccuuggg

SEQ ID NO: 188957 - RNA, 19 nt, Artificial Sequence
  Description of Artificial Sequence: Synthetic oligonucleotide
guuaaggccagccucccca

SEQ ID NO: 188958 - RNA, 19 nt, Artificial Sequence
  Description of Artificial Sequence: Synthetic oligonucleotide
cuuauugcuauugacaggu

SEQ ID NO: 188959 - RNA, 19 nt, Artificial Sequence
  Description of Artificial Sequence: Synthetic oligonucleotide
ugagccuuacagagccagg

SEQ ID NO: 188960 - RNA, 19 nt, Artificial Sequence
  Description of Artificial Sequence: Synthetic oligonucleotide
cuggcuaaggcuguccggg

SEQ ID NO: 188961 - RNA, 19 nt, Artificial Sequence
  Description of Artificial Sequence: Synthetic oligonucleotide
gcuauugacaggugagggg

SEQ ID NO: 188962 - RNA, 19 nt, Artificial Sequence
  Description of Artificial Sequence: Synthetic oligonucleotide
ucuuaggauggagggagcc

SEQ ID NO: 188963 - RNA, 19 nt, Artificial Sequence
  Description of Artificial Sequence: Synthetic oligonucleotide
acuauccaaugaguugccc

SEQ ID NO: 188964 - RNA, 19 nt, Artificial Sequence
  Description of Artificial Sequence: Synthetic oligonucleotide
uggaaagaauucugccgcc

SEQ ID NO: 188965 - RNA, 19 nt, Artificial Sequence
  Description of Artificial Sequence: Synthetic oligonucleotide
auggucacuccugugguuc

SEQ ID NO: 188966 - RNA, 19 nt, Artificial Sequence
  Description of Artificial Sequence: Synthetic oligonucleotide
guuuaaagaaccugagccu

SEQ ID NO: 188967 - RNA, 19 nt, Artificial Sequence
  Description of Artificial Sequence: Synthetic oligonucleotide
uaccggcuuagacagccag

SEQ ID NO: 188968 - RNA, 19 nt, Artificial Sequence
  Description of Artificial Sequence: Synthetic oligonucleotide
gauggcacuguuccucuac

SEQ ID NO: 188969 - RNA, 19 nt, Artificial Sequence
  Description of Artificial Sequence: Synthetic oligonucleotide
acggcuuuagccagugggc

SEQ ID NO: 188970 - RNA, 19 nt, Artificial Sequence
  Description of Artificial Sequence: Synthetic oligonucleotide
uugccguccgaacuccucc

SEQ ID NO: 188971 - RNA, 19 nt, Artificial Sequence
  Description of Artificial Sequence: Synthetic oligonucleotide
uuaaagaaccugagccuua

SEQ ID NO: 188972 - RNA, 19 nt, Artificial Sequence
  Description of Artificial Sequence: Synthetic oligonucleotide
agcaaaacccaugugcagu

SEQ ID NO: 188973 - RNA, 19 nt, Artificial Sequence
  Description of Artificial Sequence: Synthetic oligonucleotide
cuauccaaugaguugccca

SEQ ID NO: 188974 - RNA, 19 nt, Artificial Sequence
  Description of Artificial Sequence: Synthetic oligonucleotide
uucuggaccuuuguguuac

SEQ ID NO: 188975 - RNA, 19 nt, Artificial Sequence
  Description of Artificial Sequence: Synthetic oligonucleotide
gaagggaggcuugacugag

SEQ ID NO: 188976 - RNA, 19 nt, Artificial Sequence
  Description of Artificial Sequence: Synthetic oligonucleotide
acaugcucccgucauggca

SEQ ID NO: 188977 - RNA, 19 nt, Artificial Sequence
  Description of Artificial Sequence: Synthetic oligonucleotide
gagaucccaugcccaaggg

SEQ ID NO: 188978 - RNA, 19 nt, Artificial Sequence
  Description of Artificial Sequence: Synthetic oligonucleotide
uaaagaaccugagccuuac

SEQ ID NO: 188979 - RNA, 19 nt, Artificial Sequence
  Description of Artificial Sequence: Synthetic oligonucleotide
uuacaccaguccuuugcca

SEQ ID NO: 188980 - RNA, 19 nt, Artificial Sequence
  Description of Artificial Sequence: Synthetic oligonucleotide
cuguggaugucuuggccag

SEQ ID NO: 188981 - RNA, 19 nt, Artificial Sequence
  Description of Artificial Sequence: Synthetic oligonucleotide
caggcuuaaaccugcccac

SEQ ID NO: 188982 - RNA, 19 nt, Artificial Sequence
  Description of Artificial Sequence: Synthetic oligonucleotide
gagacugcugccuaagagu

SEQ ID NO: 188983 - RNA, 19 nt, Artificial Sequence
  Description of Artificial Sequence: Synthetic oligonucleotide
ugucacaugcucccgucau

SEQ ID NO: 188984 - RNA, 19 nt, Artificial Sequence
  Description of Artificial Sequence: Synthetic oligonucleotide
aguauggcgagagcugaag

SEQ ID NO: 188985 - RNA, 19 nt, Artificial Sequence
  Description of Artificial Sequence: Synthetic oligonucleotide
gagcuggaaagaauucugc

SEQ ID NO: 188986 - RNA, 19 nt, Artificial Sequence
  Description of Artificial Sequence: Synthetic oligonucleotide
ggcacuguuccucuacccg

SEQ ID NO: 188987 - RNA, 19 nt, Artificial Sequence
  Description of Artificial Sequence: Synthetic oligonucleotide
augacaauucacaggggug

SEQ ID NO: 188988 - RNA, 19 nt, Artificial Sequence
  Description of Artificial Sequence: Synthetic oligonucleotide
guauggcgagagcugaagc

SEQ ID NO: 188989 - RNA, 19 nt, Artificial Sequence
  Description of Artificial Sequence: Synthetic oligonucleotide
acaaguauggcgagagcug

SEQ ID NO: 188990 - RNA, 19 nt, Artificial Sequence
  Description of Artificial Sequence: Synthetic oligonucleotide
gguacaauaaagcucuagu

SEQ ID NO: 188991 - RNA, 19 nt, Artificial Sequence
  Description of Artificial Sequence: Synthetic oligonucleotide
aaagaaccugagccuuaca

SEQ ID NO: 188992 - RNA, 19 nt, Artificial Sequence
  Description of Artificial Sequence: Synthetic oligonucleotide
aagaauggggagggugaag

SEQ ID NO: 188993 - RNA, 19 nt, Artificial Sequence
  Description of Artificial Sequence: Synthetic oligonucleotide
uguuccccagaaagugacc

SEQ ID NO: 188994 - RNA, 19 nt, Artificial Sequence
  Description of Artificial Sequence: Synthetic oligonucleotide
ugggucugccuuuggagac

SEQ ID NO: 188995 - RNA, 19 nt, Artificial Sequence
  Description of Artificial Sequence: Synthetic oligonucleotide
uggcgagagcugaagccag

SEQ ID NO: 188996 - RNA, 19 nt, Artificial Sequence
  Description of Artificial Sequence: Synthetic oligonucleotide
guugagcccguugagagga

SEQ ID NO: 188997 - RNA, 19 nt, Artificial Sequence
  Description of Artificial Sequence: Synthetic oligonucleotide
gcaucuaccggcuuagaca

SEQ ID NO: 188998 - RNA, 19 nt, Artificial Sequence
  Description of Artificial Sequence: Synthetic oligonucleotide
gggauagccaacaaaucug

SEQ ID NO: 188999 - RNA, 19 nt, Artificial Sequence
  Description of Artificial Sequence: Synthetic oligonucleotide
uuuagucucuugcgccacu

SEQ ID NO: 189000 - RNA, 19 nt, Artificial Sequence
  Description of Artificial Sequence: Synthetic oligonucleotide
gugugaggacuugacaaag

SEQ ID NO: 189001 - RNA, 19 nt, Artificial Sequence
  Description of Artificial Sequence: Synthetic oligonucleotide
cuuauaagcccugccuuuc

SEQ ID NO: 189002 - RNA, 19 nt, Artificial Sequence
  Description of Artificial Sequence: Synthetic oligonucleotide
guggaugucuuggccagcg

SEQ ID NO: 189003 - RNA, 19 nt, Artificial Sequence
  Description of Artificial Sequence: Synthetic oligonucleotide
ugaguucaccaugagcauc

SEQ ID NO: 189004 - RNA, 19 nt, Artificial Sequence
  Description of Artificial Sequence: Synthetic oligonucleotide
cugagccuuacagagccag

SEQ ID NO: 189005 - RNA, 19 nt, Artificial Sequence
  Description of Artificial Sequence: Synthetic oligonucleotide
ucugucacaugcucccguc

SEQ ID NO: 189006 - RNA, 19 nt, Artificial Sequence
  Description of Artificial Sequence: Synthetic oligonucleotide
uggagcgcacaucugucuc

SEQ ID NO: 189007 - RNA, 19 nt, Artificial Sequence
  Description of Artificial Sequence: Synthetic oligonucleotide
ccagcuugguacauugagg

SEQ ID NO: 189008 - RNA, 19 nt, Artificial Sequence
  Description of Artificial Sequence: Synthetic oligonucleotide
caucucaaaagggagaugu

SEQ ID NO: 189009 - RNA, 19 nt, Artificial Sequence
  Description of Artificial Sequence: Synthetic oligonucleotide
caugacaauucacaggggu

SEQ ID NO: 189010 - RNA, 19 nt, Artificial Sequence
  Description of Artificial Sequence: Synthetic oligonucleotide
uaagcccugccuuuccauc

SEQ ID NO: 189011 - RNA, 19 nt, Artificial Sequence
  Description of Artificial Sequence: Synthetic oligonucleotide
agagagacugcugccuaag

SEQ ID NO: 189012 - RNA, 19 nt, Artificial Sequence
  Description of Artificial Sequence: Synthetic oligonucleotide
uggcacuguuccucuaccc

SEQ ID NO: 189013 - RNA, 19 nt, Artificial Sequence
  Description of Artificial Sequence: Synthetic oligonucleotide
caagacuuccagcuggcga

SEQ ID NO: 189014 - RNA, 19 nt, Artificial Sequence
  Description of Artificial Sequence: Synthetic oligonucleotide
agaugucugccaaccagag

SEQ ID NO: 189015 - RNA, 19 nt, Artificial Sequence
  Description of Artificial Sequence: Synthetic oligonucleotide
uugcgcucccaguugccag

SEQ ID NO: 189016 - RNA, 19 nt, Artificial Sequence
  Description of Artificial Sequence: Synthetic oligonucleotide
cuugguacauugaggcaca

SEQ ID NO: 189017 - RNA, 19 nt, Artificial Sequence
  Description of Artificial Sequence: Synthetic oligonucleotide
uuugccguccgaacuccuc

SEQ ID NO: 189018 - RNA, 19 nt, Artificial Sequence
  Description of Artificial Sequence: Synthetic oligonucleotide
agucucuugcgccacuuuu

SEQ ID NO: 189019 - RNA, 19 nt, Artificial Sequence
  Description of Artificial Sequence: Synthetic oligonucleotide
auggcgagagcugaagcca

SEQ ID NO: 189020 - RNA, 19 nt, Artificial Sequence
  Description of Artificial Sequence: Synthetic oligonucleotide
uggguagcugggauguguc

SEQ ID NO: 189021 - RNA, 19 nt, Artificial Sequence
  Description of Artificial Sequence: Synthetic oligonucleotide
auacucuuaaagaacucuu

SEQ ID NO: 189022 - RNA, 19 nt, Artificial Sequence
  Description of Artificial Sequence: Synthetic oligonucleotide
gaccccugacuauccaaug

SEQ ID NO: 189023 - RNA, 19 nt, Artificial Sequence
  Description of Artificial Sequence: Synthetic oligonucleotide
agaauucugccgccugcca

SEQ ID NO: 189024 - RNA, 19 nt, Artificial Sequence
  Description of Artificial Sequence: Synthetic oligonucleotide
ugccuaagagucccugguc

SEQ ID NO: 189025 - RNA, 19 nt, Artificial Sequence
  Description of Artificial Sequence: Synthetic oligonucleotide
ggugccgaguugcugguag

SEQ ID NO: 189026 - RNA, 19 nt, Artificial Sequence
  Description of Artificial Sequence: Synthetic oligonucleotide
acucucuuccccaugcgcu

SEQ ID NO: 189027 - RNA, 19 nt, Artificial Sequence
  Description of Artificial Sequence: Synthetic oligonucleotide
aucucaaaagggagauguc

SEQ ID NO: 189028 - RNA, 19 nt, Artificial Sequence
  Description of Artificial Sequence: Synthetic oligonucleotide
ugaacugccuuggccuuug

SEQ ID NO: 189029 - RNA, 19 nt, Artificial Sequence
  Description of Artificial Sequence: Synthetic oligonucleotide
gacuauccaaugaguugcc

SEQ ID NO: 189030 - RNA, 19 nt, Artificial Sequence
  Description of Artificial Sequence: Synthetic oligonucleotide
uuucuggaccuuuguguua

SEQ ID NO: 189031 - RNA, 19 nt, Artificial Sequence
  Description of Artificial Sequence: Synthetic oligonucleotide
agcuaacauucccuggaaa

SEQ ID NO: 189032 - RNA, 19 nt, Artificial Sequence
  Description of Artificial Sequence: Synthetic oligonucleotide
cuuagagcugggcaaaggu

SEQ ID NO: 189033 - RNA, 19 nt, Artificial Sequence
  Description of Artificial Sequence: Synthetic oligonucleotide
caugggcagggguucaauc

SEQ ID NO: 189034 - RNA, 19 nt, Artificial Sequence
  Description of Artificial Sequence: Synthetic oligonucleotide
agcccguugagaggauggc

SEQ ID NO: 189035 - RNA, 19 nt, Artificial Sequence
  Description of Artificial Sequence: Synthetic oligonucleotide
ggucguugaacugccuugg

SEQ ID NO: 189036 - RNA, 19 nt, Artificial Sequence
  Description of Artificial Sequence: Synthetic oligonucleotide
auagcacuaugggaaauua

SEQ ID NO: 189037 - RNA, 19 nt, Artificial Sequence
  Description of Artificial Sequence: Synthetic oligonucleotide
cccaagagaucccaugccc

SEQ ID NO: 189038 - RNA, 19 nt, Artificial Sequence
  Description of Artificial Sequence: Synthetic oligonucleotide
cuauugacaggugaggggu

SEQ ID NO: 189039 - RNA, 19 nt, Artificial Sequence
  Description of Artificial Sequence: Synthetic oligonucleotide
agguccucugugguguagg

SEQ ID NO: 189040 - RNA, 19 nt, Artificial Sequence
  Description of Artificial Sequence: Synthetic oligonucleotide
cagcuauggcaccuuggag

SEQ ID NO: 189041 - RNA, 19 nt, Artificial Sequence
  Description of Artificial Sequence: Synthetic oligonucleotide
ggauccuccuccucaggag

SEQ ID NO: 189042 - RNA, 19 nt, Artificial Sequence
  Description of Artificial Sequence: Synthetic oligonucleotide
gcaaagguuaaggccagcc

SEQ ID NO: 189043 - RNA, 19 nt, Artificial Sequence
  Description of Artificial Sequence: Synthetic oligonucleotide
ggcgaccacggcuuuagcc

SEQ ID NO: 189044 - RNA, 19 nt, Artificial Sequence
  Description of Artificial Sequence: Synthetic oligonucleotide
gucucuugcgccacuuuug

SEQ ID NO: 189045 - RNA, 19 nt, Artificial Sequence
  Description of Artificial Sequence: Synthetic oligonucleotide
cauuuacaccaguccuuug

SEQ ID NO: 189046 - RNA, 19 nt, Artificial Sequence
  Description of Artificial Sequence: Synthetic oligonucleotide
gacuuagagcugggcaaag

SEQ ID NO: 189047 - RNA, 19 nt, Artificial Sequence
  Description of Artificial Sequence: Synthetic oligonucleotide
ugccgaguugcugguaggc

SEQ ID NO: 189048 - RNA, 19 nt, Artificial Sequence
  Description of Artificial Sequence: Synthetic oligonucleotide
uuuugccguccgaacuccu

SEQ ID NO: 189049 - RNA, 19 nt, Artificial Sequence
  Description of Artificial Sequence: Synthetic oligonucleotide
gcacuguuccucuacccgc

SEQ ID NO: 189050 - RNA, 19 nt, Artificial Sequence
  Description of Artificial Sequence: Synthetic oligonucleotide
ggacuggcagaagaggugc

SEQ ID NO: 189051 - RNA, 19 nt, Artificial Sequence
  Description of Artificial Sequence: Synthetic oligonucleotide
cacaaguauggcgagagcu

SEQ ID NO: 189052 - RNA, 19 nt, Artificial Sequence
  Description of Artificial Sequence: Synthetic oligonucleotide
ggagggagccuuuaaguaa

SEQ ID NO: 189053 - RNA, 19 nt, Artificial Sequence
  Description of Artificial Sequence: Synthetic oligonucleotide
caaguauggcgagagcuga

SEQ ID NO: 189054 - RNA, 19 nt, Artificial Sequence
  Description of Artificial Sequence: Synthetic oligonucleotide
uccucgaugcggacccaga

SEQ ID NO: 189055 - RNA, 19 nt, Artificial Sequence
  Description of Artificial Sequence: Synthetic oligonucleotide
agaauccugccaucucaaa

SEQ ID NO: 189056 - RNA, 19 nt, Artificial Sequence
  Description of Artificial Sequence: Synthetic oligonucleotide
ccaggucucaggcuuaaac

SEQ ID NO: 189057 - RNA, 19 nt, Artificial Sequence
  Description of Artificial Sequence: Synthetic oligonucleotide
cauccucuguguugggcuc

SEQ ID NO: 189058 - RNA, 19 nt, Artificial Sequence
  Description of Artificial Sequence: Synthetic oligonucleotide
uuuagccagugggccuugg

SEQ ID NO: 189059 - RNA, 19 nt, Artificial Sequence
  Description of Artificial Sequence: Synthetic oligonucleotide
ugcgccacuuuugccgucc

SEQ ID NO: 189060 - RNA, 19 nt, Artificial Sequence
  Description of Artificial Sequence: Synthetic oligonucleotide
auguggugcccauggggcu

SEQ ID NO: 189061 - RNA, 19 nt, Artificial Sequence
  Description of Artificial Sequence: Synthetic oligonucleotide
gcgaccacggcuuuagcca

SEQ ID NO: 189062 - RNA, 19 nt, Artificial Sequence
  Description of Artificial Sequence: Synthetic oligonucleotide
cagaauccugccaggucuc

SEQ ID NO: 189063 - RNA, 19 nt, Artificial Sequence
  Description of Artificial Sequence: Synthetic oligonucleotide
cccguugagaggauggcac

SEQ ID NO: 189064 - RNA, 19 nt, Artificial Sequence
  Description of Artificial Sequence: Synthetic oligonucleotide
ggguacaauaaagcucuag

SEQ ID NO: 189065 - RNA, 19 nt, Artificial Sequence
  Description of Artificial Sequence: Synthetic oligonucleotide
cuggcgaccacggcuuuag

SEQ ID NO: 189066 - RNA, 19 nt, Artificial Sequence
  Description of Artificial Sequence: Synthetic oligonucleotide
ggauagccaacaaaucuga

SEQ ID NO: 189067 - RNA, 19 nt, Artificial Sequence
  Description of Artificial Sequence: Synthetic oligonucleotide
gguucaauccaguccucuc

SEQ ID NO: 189068 - RNA, 19 nt, Artificial Sequence
  Description of Artificial Sequence: Synthetic oligonucleotide
gcuaaggcuguccgggagc

SEQ ID NO: 189069 - RNA, 19 nt, Artificial Sequence
  Description of Artificial Sequence: Synthetic oligonucleotide
agacuuagagcugggcaaa

SEQ ID NO: 189070 - RNA, 19 nt, Artificial Sequence
  Description of Artificial Sequence: Synthetic oligonucleotide
ugcugccuaagagucccug

SEQ ID NO: 189071 - RNA, 19 nt, Artificial Sequence
  Description of Artificial Sequence: Synthetic oligonucleotide
agauguaauuuggguacaa

SEQ ID NO: 189072 - RNA, 19 nt, Artificial Sequence
  Description of Artificial Sequence: Synthetic oligonucleotide
gugccgaguugcugguagg

SEQ ID NO: 189073 - RNA, 19 nt, Artificial Sequence
  Description of Artificial Sequence: Synthetic oligonucleotide
gucguugaacugccuuggc

SEQ ID NO: 189074 - RNA, 19 nt, Artificial Sequence
  Description of Artificial Sequence: Synthetic oligonucleotide
aacaaugguggcagcgauu

SEQ ID NO: 189075 - RNA, 19 nt, Artificial Sequence
  Description of Artificial Sequence: Synthetic oligonucleotide
gguaggccccgcaaggucc

SEQ ID NO: 189076 - RNA, 19 nt, Artificial Sequence
  Description of Artificial Sequence: Synthetic oligonucleotide
ggagcgcacaucugucucc

SEQ ID NO: 189077 - RNA, 19 nt, Artificial Sequence
  Description of Artificial Sequence: Synthetic oligonucleotide
gaagaauggggagggugaa

SEQ ID NO: 189078 - RNA, 19 nt, Artificial Sequence
  Description of Artificial Sequence: Synthetic oligonucleotide
ugccguccgaacuccucca

SEQ ID NO: 189079 - RNA, 19 nt, Artificial Sequence
  Description of Artificial Sequence: Synthetic oligonucleotide
gcuggcuaaggcuguccgg

SEQ ID NO: 189080 - RNA, 19 nt, Artificial Sequence
  Description of Artificial Sequence: Synthetic oligonucleotide
agcgggugugugguccacc

SEQ ID NO: 189081 - RNA, 19 nt, Artificial Sequence
  Description of Artificial Sequence: Synthetic oligonucleotide
uugguacauugaggcacag

SEQ ID NO: 189082 - RNA, 19 nt, Artificial Sequence
  Description of Artificial Sequence: Synthetic oligonucleotide
cuggugugaggacuugaca

SEQ ID NO: 189083 - RNA, 19 nt, Artificial Sequence
  Description of Artificial Sequence: Synthetic oligonucleotide
cacaugcucccgucauggc

SEQ ID NO: 189084 - RNA, 19 nt, Artificial Sequence
  Description of Artificial Sequence: Synthetic oligonucleotide
uaggugccgaguugcuggu

SEQ ID NO: 189085 - RNA, 19 nt, Artificial Sequence
  Description of Artificial Sequence: Synthetic oligonucleotide
uggcuaaggcuguccggga

SEQ ID NO: 189086 - RNA, 19 nt, Artificial Sequence
  Description of Artificial Sequence: Synthetic oligonucleotide
uggcugcuuagaugaauuu

SEQ ID NO: 189087 - RNA, 19 nt, Artificial Sequence
  Description of Artificial Sequence: Synthetic oligonucleotide
ccaaccaggcgccaucgag

SEQ ID NO: 189088 - RNA, 19 nt, Artificial Sequence
  Description of Artificial Sequence: Synthetic oligonucleotide
ggcuaaggcuguccgggag

SEQ ID NO: 189089 - RNA, 19 nt, Artificial Sequence
  Description of Artificial Sequence: Synthetic oligonucleotide
uguggaugucuuggccagc

SEQ ID NO: 189090 - RNA, 19 nt, Artificial Sequence
  Description of Artificial Sequence: Synthetic oligonucleotide
gugaacugccuugaggugu

SEQ ID NO: 189091 - RNA, 19 nt, Artificial Sequence
  Description of Artificial Sequence: Synthetic oligonucleotide
ggucucaggcuuaaaccug

SEQ ID NO: 189092 - RNA, 19 nt, Artificial Sequence
  Description of Artificial Sequence: Synthetic oligonucleotide
cagaauccugccaucucaa

SEQ ID NO: 189093 - RNA, 19 nt, Artificial Sequence
  Description of Artificial Sequence: Synthetic oligonucleotide
gugcccucgggagaaggag

SEQ ID NO: 189094 - RNA, 19 nt, Artificial Sequence
  Description of Artificial Sequence: Synthetic oligonucleotide
uggccagcggguguguggu

SEQ ID NO: 189095 - RNA, 19 nt, Artificial Sequence
  Description of Artificial Sequence: Synthetic oligonucleotide
ccgcacacuuucaugcugc

SEQ ID NO: 189096 - RNA, 19 nt, Artificial Sequence
  Description of Artificial Sequence: Synthetic oligonucleotide
ccggcuuagacagccagcc

SEQ ID NO: 189097 - RNA, 19 nt, Artificial Sequence
  Description of Artificial Sequence: Synthetic oligonucleotide
gucuuaggacaucgaugac

SEQ ID NO: 189098 - RNA, 19 nt, Artificial Sequence
  Description of Artificial Sequence: Synthetic oligonucleotide
caucgagccugccagcaaa

SEQ ID NO: 189099 - RNA, 19 nt, Artificial Sequence
  Description of Artificial Sequence: Synthetic oligonucleotide
cagcccgcacacuuucaug

SEQ ID NO: 189100 - RNA, 19 nt, Artificial Sequence
  Description of Artificial Sequence: Synthetic oligonucleotide
uggcgagacaguggugcug

SEQ ID NO: 189101 - RNA, 19 nt, Artificial Sequence
  Description of Artificial Sequence: Synthetic oligonucleotide
caggacuccuuaaauaauu

SEQ ID NO: 189102 - RNA, 19 nt, Artificial Sequence
  Description of Artificial Sequence: Synthetic oligonucleotide
cuggaccuuuguguuacuc

SEQ ID NO: 189103 - RNA, 19 nt, Artificial Sequence
  Description of Artificial Sequence: Synthetic oligonucleotide
gagggagccuuuaaguaau

SEQ ID NO: 189104 - RNA, 19 nt, Artificial Sequence
  Description of Artificial Sequence: Synthetic oligonucleotide
aggcuuaaaccugcccacu

SEQ ID NO: 189105 - RNA, 19 nt, Artificial Sequence
  Description of Artificial Sequence: Synthetic oligonucleotide
cagugggauagccaacaaa

SEQ ID NO: 189106 - RNA, 19 nt, Artificial Sequence
  Description of Artificial Sequence: Synthetic oligonucleotide
aucuaccggcuuagacagc

SEQ ID NO: 189107 - RNA, 19 nt, Artificial Sequence
  Description of Artificial Sequence: Synthetic oligonucleotide
augcugugaggagcuaaca

SEQ ID NO: 189108 - RNA, 19 nt, Artificial Sequence
  Description of Artificial Sequence: Synthetic oligonucleotide
ucuggaccuuuguguuacu

SEQ ID NO: 189109 - RNA, 19 nt, Artificial Sequence
  Description of Artificial Sequence: Synthetic oligonucleotide
ccaagagaucccaugccca

SEQ ID NO: 189110 - RNA, 19 nt, Artificial Sequence
  Description of Artificial Sequence: Synthetic oligonucleotide
gcgcacaucugucuccgug

SEQ ID NO: 189111 - RNA, 19 nt, Artificial Sequence
  Description of Artificial Sequence: Synthetic oligonucleotide
gaggucguugaacugccuu

SEQ ID NO: 189112 - RNA, 19 nt, Artificial Sequence
  Description of Artificial Sequence: Synthetic oligonucleotide
aggccccgcaagguccugc

SEQ ID NO: 189113 - RNA, 19 nt, Artificial Sequence
  Description of Artificial Sequence: Synthetic oligonucleotide
gcugucaaucuccugggcu

SEQ ID NO: 189114 - RNA, 19 nt, Artificial Sequence
  Description of Artificial Sequence: Synthetic oligonucleotide
gugucagauggugggcaug

SEQ ID NO: 189115 - RNA, 19 nt, Artificial Sequence
  Description of Artificial Sequence: Synthetic oligonucleotide
ccccgcaagguccugcugc

SEQ ID NO: 189116 - RNA, 19 nt, Artificial Sequence
  Description of Artificial Sequence: Synthetic oligonucleotide
gggaggcuugacugagucc

SEQ ID NO: 189117 - RNA, 19 nt, Artificial Sequence
  Description of Artificial Sequence: Synthetic oligonucleotide
ccagcuauggcaccuugga

SEQ ID NO: 189118 - RNA, 19 nt, Artificial Sequence
  Description of Artificial Sequence: Synthetic oligonucleotide
gccccauagcacuauggga

SEQ ID NO: 189119 - RNA, 19 nt, Artificial Sequence
  Description of Artificial Sequence: Synthetic oligonucleotide
uggcgaccacggcuuuagc

SEQ ID NO: 189120 - RNA, 19 nt, Artificial Sequence
  Description of Artificial Sequence: Synthetic oligonucleotide
gucauuuacaccaguccuu

SEQ ID NO: 189121 - RNA, 19 nt, Artificial Sequence
  Description of Artificial Sequence: Synthetic oligonucleotide
ugcgcucauuccucuugua

SEQ ID NO: 189122 - RNA, 19 nt, Artificial Sequence
  Description of Artificial Sequence: Synthetic oligonucleotide
gcuggcgggacccugugaa

SEQ ID NO: 189123 - RNA, 19 nt, Artificial Sequence
  Description of Artificial Sequence: Synthetic oligonucleotide
ccacuuuugccguccgaac

SEQ ID NO: 189124 - RNA, 19 nt, Artificial Sequence
  Description of Artificial Sequence: Synthetic oligonucleotide
gcagggguucaauccaguc

SEQ ID NO: 189125 - RNA, 19 nt, Artificial Sequence
  Description of Artificial Sequence: Synthetic oligonucleotide
cugucacaugcucccguca

SEQ ID NO: 189126 - RNA, 19 nt, Artificial Sequence
  Description of Artificial Sequence: Synthetic oligonucleotide
gugggaccccugacuaucc

SEQ ID NO: 189127 - RNA, 19 nt, Artificial Sequence
  Description of Artificial Sequence: Synthetic oligonucleotide
cugccuaagagucccuggu

SEQ ID NO: 189128 - RNA, 19 nt, Artificial Sequence
  Description of Artificial Sequence: Synthetic oligonucleotide
uugaacugccuuggccuuu

SEQ ID NO: 189129 - RNA, 19 nt, Artificial Sequence
  Description of Artificial Sequence: Synthetic oligonucleotide
cuugcgcucccaguugcca

SEQ ID NO: 189130 - RNA, 19 nt, Artificial Sequence
  Description of Artificial Sequence: Synthetic oligonucleotide
cccgcaguuguaguguuug

SEQ ID NO: 189131 - RNA, 19 nt, Artificial Sequence
  Description of Artificial Sequence: Synthetic oligonucleotide
uacccgcuccacagcccca

SEQ ID NO: 189132 - RNA, 19 nt, Artificial Sequence
  Description of Artificial Sequence: Synthetic oligonucleotide
cuggguccuuauaagcccu

SEQ ID NO: 189133 - RNA, 19 nt, Artificial Sequence
  Description of Artificial Sequence: Synthetic oligonucleotide
aggaugccugugggacccc

SEQ ID NO: 189134 - RNA, 19 nt, Artificial Sequence
  Description of Artificial Sequence: Synthetic oligonucleotide
guugaacugccuuggccuu

SEQ ID NO: 189135 - RNA, 19 nt, Artificial Sequence
  Description of Artificial Sequence: Synthetic oligonucleotide
cuuuagccagugggccuug

SEQ ID NO: 189136 - RNA, 19 nt, Artificial Sequence
  Description of Artificial Sequence: Synthetic oligonucleotide
gcuacuuaguaaacugacu

SEQ ID NO: 189137 - RNA, 19 nt, Artificial Sequence
  Description of Artificial Sequence: Synthetic oligonucleotide
cguugaacugccuuggccu

SEQ ID NO: 189138 - RNA, 19 nt, Artificial Sequence
  Description of Artificial Sequence: Synthetic oligonucleotide
ggcgccaucgagccugcca

SEQ ID NO: 189139 - RNA, 19 nt, Artificial Sequence
  Description of Artificial Sequence: Synthetic oligonucleotide
gccacuuuugccguccgaa

SEQ ID NO: 189140 - RNA, 19 nt, Artificial Sequence
  Description of Artificial Sequence: Synthetic oligonucleotide
ugcucccgucauggcagcc

SEQ ID NO: 189141 - RNA, 19 nt, Artificial Sequence
  Description of Artificial Sequence: Synthetic oligonucleotide
ggacuggagucaacaugcc

SEQ ID NO: 189142 - RNA, 19 nt, Artificial Sequence
  Description of Artificial Sequence: Synthetic oligonucleotide
cuggagcgcacaucugucu

SEQ ID NO: 189143 - RNA, 19 nt, Artificial Sequence
  Description of Artificial Sequence: Synthetic oligonucleotide
gcugggaugugucaugguu

SEQ ID NO: 189144 - RNA, 19 nt, Artificial Sequence
  Description of Artificial Sequence: Synthetic oligonucleotide
ccacaaguauggcgagagc

SEQ ID NO: 189145 - RNA, 19 nt, Artificial Sequence
  Description of Artificial Sequence: Synthetic oligonucleotide
cgccaugacucucuucccc

SEQ ID NO: 189146 - RNA, 19 nt, Artificial Sequence
  Description of Artificial Sequence: Synthetic oligonucleotide
caccuuugaggugguguca

SEQ ID NO: 189147 - RNA, 19 nt, Artificial Sequence
  Description of Artificial Sequence: Synthetic oligonucleotide
cauagcacuaugggaaauu

SEQ ID NO: 189148 - RNA, 19 nt, Artificial Sequence
  Description of Artificial Sequence: Synthetic oligonucleotide
ccugacuauccaaugaguu

SEQ ID NO: 189149 - RNA, 19 nt, Artificial Sequence
  Description of Artificial Sequence: Synthetic oligonucleotide
gccagguguaggugccgag

SEQ ID NO: 189150 - RNA, 19 nt, Artificial Sequence
  Description of Artificial Sequence: Synthetic oligonucleotide
cccagaaagugaccugcuc

SEQ ID NO: 189151 - RNA, 19 nt, Artificial Sequence
  Description of Artificial Sequence: Synthetic oligonucleotide
cccgcacacuuucaugcug

SEQ ID NO: 189152 - RNA, 19 nt, Artificial Sequence
  Description of Artificial Sequence: Synthetic oligonucleotide
cuaccggcuuagacagcca

SEQ ID NO: 189153 - RNA, 19 nt, Artificial Sequence
  Description of Artificial Sequence: Synthetic oligonucleotide
gucacuccugugguuccuc

SEQ ID NO: 189154 - RNA, 19 nt, Artificial Sequence
  Description of Artificial Sequence: Synthetic oligonucleotide
aucgagccugccagcaaaa

SEQ ID NO: 189155 - RNA, 19 nt, Artificial Sequence
  Description of Artificial Sequence: Synthetic oligonucleotide
ccaagacuuccagcuggcg

SEQ ID NO: 189156 - RNA, 19 nt, Artificial Sequence
  Description of Artificial Sequence: Synthetic oligonucleotide
ggauggagggagccuuuaa

SEQ ID NO: 189157 - RNA, 19 nt, Artificial Sequence
  Description of Artificial Sequence: Synthetic oligonucleotide
gcauggucacuccuguggu

SEQ ID NO: 189158 - RNA, 19 nt, Artificial Sequence
  Description of Artificial Sequence: Synthetic oligonucleotide
cgaccacggcuuuagccag

SEQ ID NO: 189159 - RNA, 19 nt, Artificial Sequence
  Description of Artificial Sequence: Synthetic oligonucleotide
agaggucguugaacugccu

SEQ ID NO: 189160 - RNA, 19 nt, Artificial Sequence
  Description of Artificial Sequence: Synthetic oligonucleotide
gggaccccugacuauccaa

SEQ ID NO: 189161 - RNA, 19 nt, Artificial Sequence
  Description of Artificial Sequence: Synthetic oligonucleotide
ccguccgaacuccuccagc

SEQ ID NO: 189162 - RNA, 19 nt, Artificial Sequence
  Description of Artificial Sequence: Synthetic oligonucleotide
uguccucgaugcggaccca

SEQ ID NO: 189163 - RNA, 19 nt, Artificial Sequence
  Description of Artificial Sequence: Synthetic oligonucleotide
uugcgccacuuuugccguc

SEQ ID NO: 189164 - RNA, 19 nt, Artificial Sequence
  Description of Artificial Sequence: Synthetic oligonucleotide
ugacugcauugaggucccc

SEQ ID NO: 189165 - RNA, 19 nt, Artificial Sequence
  Description of Artificial Sequence: Synthetic oligonucleotide
cagcgccaugacucucuuc

SEQ ID NO: 189166 - RNA, 19 nt, Artificial Sequence
  Description of Artificial Sequence: Synthetic oligonucleotide
ccaaccagagcauggcagu

SEQ ID NO: 189167 - RNA, 19 nt, Artificial Sequence
  Description of Artificial Sequence: Synthetic oligonucleotide
ggcgagagcugaagccagc

SEQ ID NO: 189168 - RNA, 19 nt, Artificial Sequence
  Description of Artificial Sequence: Synthetic oligonucleotide
ccugucuuaggacaucgau

SEQ ID NO: 189169 - RNA, 19 nt, Artificial Sequence
  Description of Artificial Sequence: Synthetic oligonucleotide
augcggacccagaggucgu

SEQ ID NO: 189170 - RNA, 19 nt, Artificial Sequence
  Description of Artificial Sequence: Synthetic oligonucleotide
ggcaaccagagagacugcu

SEQ ID NO: 189171 - RNA, 19 nt, Artificial Sequence
  Description of Artificial Sequence: Synthetic oligonucleotide
gcgccacuuuugccguccg

SEQ ID NO: 189172 - RNA, 19 nt, Artificial Sequence
  Description of Artificial Sequence: Synthetic oligonucleotide
ggugucagauggugggcau

SEQ ID NO: 189173 - RNA, 19 nt, Artificial Sequence
  Description of Artificial Sequence: Synthetic oligonucleotide
ccuuauaagcccugccuuu

SEQ ID NO: 189174 - RNA, 19 nt, Artificial Sequence
  Description of Artificial Sequence: Synthetic oligonucleotide
cauggucacuccugugguu

SEQ ID NO: 189175 - RNA, 19 nt, Artificial Sequence
  Description of Artificial Sequence: Synthetic oligonucleotide
gccugugggaccccugacu

SEQ ID NO: 189176 - RNA, 19 nt, Artificial Sequence
  Description of Artificial Sequence: Synthetic oligonucleotide
gcccguugagaggauggca

SEQ ID NO: 189177 - RNA, 19 nt, Artificial Sequence
  Description of Artificial Sequence: Synthetic oligonucleotide
gcucccaguugccagcaau

SEQ ID NO: 189178 - RNA, 19 nt, Artificial Sequence
  Description of Artificial Sequence: Synthetic oligonucleotide
gugaggggucuucccugcu

SEQ ID NO: 189179 - RNA, 19 nt, Artificial Sequence
  Description of Artificial Sequence: Synthetic oligonucleotide
ggaccccugacuauccaau

SEQ ID NO: 189180 - RNA, 19 nt, Artificial Sequence
  Description of Artificial Sequence: Synthetic oligonucleotide
guaggccccgcaagguccu

SEQ ID NO: 189181 - RNA, 19 nt, Artificial Sequence
  Description of Artificial Sequence: Synthetic oligonucleotide
cagcgggugugugguccac

SEQ ID NO: 189182 - RNA, 19 nt, Artificial Sequence
  Description of Artificial Sequence: Synthetic oligonucleotide
cagugggccuugggccuug

SEQ ID NO: 189183 - RNA, 19 nt, Artificial Sequence
  Description of Artificial Sequence: Synthetic oligonucleotide
ccccagcuauggcaccuug

SEQ ID NO: 189184 - RNA, 19 nt, Artificial Sequence
  Description of Artificial Sequence: Synthetic oligonucleotide
gaccacggcuuuagccagu

SEQ ID NO: 189185 - RNA, 19 nt, Artificial Sequence
  Description of Artificial Sequence: Synthetic oligonucleotide
gcuuuagccagugggccuu

SEQ ID NO: 189186 - RNA, 19 nt, Artificial Sequence
  Description of Artificial Sequence: Synthetic oligonucleotide
gccugucuuaggacaucga

SEQ ID NO: 189187 - RNA, 19 nt, Artificial Sequence
  Description of Artificial Sequence: Synthetic oligonucleotide
ccgcaguuguaguguuuga

SEQ ID NO: 189188 - RNA, 19 nt, Artificial Sequence
  Description of Artificial Sequence: Synthetic oligonucleotide
aggugccgaguugcuggua

SEQ ID NO: 189189 - RNA, 19 nt, Artificial Sequence
  Description of Artificial Sequence: Synthetic oligonucleotide
cgaugcggacccagagguc

SEQ ID NO: 189190 - RNA, 19 nt, Artificial Sequence
  Description of Artificial Sequence: Synthetic oligonucleotide
ccguugagaggauggcacu

SEQ ID NO: 189191 - RNA, 19 nt, Artificial Sequence
  Description of Artificial Sequence: Synthetic oligonucleotide
cgccaucgagccugccagc

SEQ ID NO: 189192 - RNA, 19 nt, Artificial Sequence
  Description of Artificial Sequence: Synthetic oligonucleotide
gcccgcacacuuucaugcu

SEQ ID NO: 189193 - RNA, 19 nt, Artificial Sequence
  Description of Artificial Sequence: Synthetic oligonucleotide
ggucugccuuuggagacau

SEQ ID NO: 189194 - RNA, 19 nt, Artificial Sequence
  Description of Artificial Sequence: Synthetic oligonucleotide
gcgagacaguggugcuguc

SEQ ID NO: 189195 - RNA, 19 nt, Artificial Sequence
  Description of Artificial Sequence: Synthetic oligonucleotide
gggaugugucaugguugaa

SEQ ID NO: 189196 - RNA, 19 nt, Artificial Sequence
  Description of Artificial Sequence: Synthetic oligonucleotide
gcucccgucauggcagccu

SEQ ID NO: 189197 - RNA, 19 nt, Artificial Sequence
  Description of Artificial Sequence: Synthetic oligonucleotide
ccaucgagccugccagcaa

SEQ ID NO: 189198 - RNA, 19 nt, Artificial Sequence
  Description of Artificial Sequence: Synthetic oligonucleotide
ccaaugaguugcccagaau

SEQ ID NO: 189199 - RNA, 19 nt, Artificial Sequence
  Description of Artificial Sequence: Synthetic oligonucleotide
ccccagaaagugaccugcu

SEQ ID NO: 189200 - RNA, 19 nt, Artificial Sequence
  Description of Artificial Sequence: Synthetic oligonucleotide
ggccagcgggugugugguc

SEQ ID NO: 189201 - RNA, 19 nt, Artificial Sequence
  Description of Artificial Sequence: Synthetic oligonucleotide
ggacccugugaagcagagu

SEQ ID NO: 189202 - RNA, 19 nt, Artificial Sequence
  Description of Artificial Sequence: Synthetic oligonucleotide
ccgcaagguccugcugcug

SEQ ID NO: 189203 - RNA, 19 nt, Artificial Sequence
  Description of Artificial Sequence: Synthetic oligonucleotide
gcuggcgaccacggcuuua

SEQ ID NO: 189204 - RNA, 19 nt, Artificial Sequence
  Description of Artificial Sequence: Synthetic oligonucleotide
cggcuuagacagccagcca

SEQ ID NO: 189205 - RNA, 19 nt, Artificial Sequence
  Description of Artificial Sequence: Synthetic oligonucleotide
gcagcgccaugacucucuu

SEQ ID NO: 189206 - RNA, 19 nt, Artificial Sequence
  Description of Artificial Sequence: Synthetic oligonucleotide
cgccacuuuugccguccga

SEQ ID NO: 189207 - RNA, 19 nt, Artificial Sequence
  Description of Artificial Sequence: Synthetic oligonucleotide
ccccgcaguuguaguguuu

SEQ ID NO: 189208 - RNA, 19 nt, Artificial Sequence
  Description of Artificial Sequence: Synthetic oligonucleotide
aauauauuaacgcugcagg

SEQ ID NO: 189209 - RNA, 19 nt, Artificial Sequence
  Description of Artificial Sequence: Synthetic oligonucleotide
uuucacuaaaugcugaugg

SEQ ID NO: 189210 - RNA, 19 nt, Artificial Sequence
  Description of Artificial Sequence: Synthetic oligonucleotide
aaagauccgucccugagcc

SEQ ID NO: 189211 - RNA, 19 nt, Artificial Sequence
  Description of Artificial Sequence: Synthetic oligonucleotide
uguacaauuucccugaucu

SEQ ID NO: 189212 - RNA, 19 nt, Artificial Sequence
  Description of Artificial Sequence: Synthetic oligonucleotide
uguuaguucaacucaaagg

SEQ ID NO: 189213 - RNA, 19 nt, Artificial Sequence
  Description of Artificial Sequence: Synthetic oligonucleotide
auaccaauggaccucaccc

SEQ ID NO: 189214 - RNA, 19 nt, Artificial Sequence
  Description of Artificial Sequence: Synthetic oligonucleotide
uucuaaaauauauuaacgc

SEQ ID NO: 189215 - RNA, 19 nt, Artificial Sequence
  Description of Artificial Sequence: Synthetic oligonucleotide
uguugauagacacagguga

SEQ ID NO: 189216 - RNA, 19 nt, Artificial Sequence
  Description of Artificial Sequence: Synthetic oligonucleotide
aguggcuucuuacauaacc

SEQ ID NO: 189217 - RNA, 19 nt, Artificial Sequence
  Description of Artificial Sequence: Synthetic oligonucleotide
cuuucuauaccaauggacc

SEQ ID NO: 189218 - RNA, 19 nt, Artificial Sequence
  Description of Artificial Sequence: Synthetic oligonucleotide
uuacauaaccagaacgugg

SEQ ID NO: 189219 - RNA, 19 nt, Artificial Sequence
  Description of Artificial Sequence: Synthetic oligonucleotide
gauuucgagaaucaugcgg

SEQ ID NO: 189220 - RNA, 19 nt, Artificial Sequence
  Description of Artificial Sequence: Synthetic oligonucleotide
auauauuaacgcugcaggc

SEQ ID NO: 189221 - RNA, 19 nt, Artificial Sequence
  Description of Artificial Sequence: Synthetic oligonucleotide
aaaucucuaagggaaacac

SEQ ID NO: 189222 - RNA, 19 nt, Artificial Sequence
  Description of Artificial Sequence: Synthetic oligonucleotide
aaauauauuaacgcugcag

SEQ ID NO: 189223 - RNA, 19 nt, Artificial Sequence
  Description of Artificial Sequence: Synthetic oligonucleotide
ucuuacauaaccagaacgu

SEQ ID NO: 189224 - RNA, 19 nt, Artificial Sequence
  Description of Artificial Sequence: Synthetic oligonucleotide
ugagacgacucccugaggg

SEQ ID NO: 189225 - RNA, 19 nt, Artificial Sequence
  Description of Artificial Sequence: Synthetic oligonucleotide
ucuaagggaaacacaagag

SEQ ID NO: 189226 - RNA, 19 nt, Artificial Sequence
  Description of Artificial Sequence: Synthetic oligonucleotide
aguuaguugaguuauuuga

SEQ ID NO: 189227 - RNA, 19 nt, Artificial Sequence
  Description of Artificial Sequence: Synthetic oligonucleotide
uuugauauauuacuucuaa

SEQ ID NO: 189228 - RNA, 19 nt, Artificial Sequence
  Description of Artificial Sequence: Synthetic oligonucleotide
auauuaacgcugcaggcac

SEQ ID NO: 189229 - RNA, 19 nt, Artificial Sequence
  Description of Artificial Sequence: Synthetic oligonucleotide
uaucaguuuuacaaaaucu

SEQ ID NO: 189230 - RNA, 19 nt, Artificial Sequence
  Description of Artificial Sequence: Synthetic oligonucleotide
auuucgagaaucaugcggc

SEQ ID NO: 189231 - RNA, 19 nt, Artificial Sequence
  Description of Artificial Sequence: Synthetic oligonucleotide
guaaauuuaacgcccuggg

SEQ ID NO: 189232 - RNA, 19 nt, Artificial Sequence
  Description of Artificial Sequence: Synthetic oligonucleotide
uguacagagacaacuuucc

SEQ ID NO: 189233 - RNA, 19 nt, Artificial Sequence
  Description of Artificial Sequence: Synthetic oligonucleotide
ugcccgauaauucugacga

SEQ ID NO: 189234 - RNA, 19 nt, Artificial Sequence
  Description of Artificial Sequence: Synthetic oligonucleotide
aauauauagcaguaugcaa

SEQ ID NO: 189235 - RNA, 19 nt, Artificial Sequence
  Description of Artificial Sequence: Synthetic oligonucleotide
uuugguuugcucccgaucu

SEQ ID NO: 189236 - RNA, 19 nt, Artificial Sequence
  Description of Artificial Sequence: Synthetic oligonucleotide
aaccagaacguggucaucc

SEQ ID NO: 189237 - RNA, 19 nt, Artificial Sequence
  Description of Artificial Sequence: Synthetic oligonucleotide
cauaagaaggccacguagg

SEQ ID NO: 189238 - RNA, 19 nt, Artificial Sequence
  Description of Artificial Sequence: Synthetic oligonucleotide
cuugacaagauuucccucc

SEQ ID NO: 189239 - RNA, 19 nt, Artificial Sequence
  Description of Artificial Sequence: Synthetic oligonucleotide
cuauugaaauucaggacgg

SEQ ID NO: 189240 - RNA, 19 nt, Artificial Sequence
  Description of Artificial Sequence: Synthetic oligonucleotide
cauccuucagcucaaaagc

SEQ ID NO: 189241 - RNA, 19 nt, Artificial Sequence
  Description of Artificial Sequence: Synthetic oligonucleotide
aauuuaacgcccugggcca

SEQ ID NO: 189242 - RNA, 19 nt, Artificial Sequence
  Description of Artificial Sequence: Synthetic oligonucleotide
ugaugaggguacauguugg

SEQ ID NO: 189243 - RNA, 19 nt, Artificial Sequence
  Description of Artificial Sequence: Synthetic oligonucleotide
agcaaaucgagccagcugu

SEQ ID NO: 189244 - RNA, 19 nt, Artificial Sequence
  Description of Artificial Sequence: Synthetic oligonucleotide
ugugagacgacucccugag

SEQ ID NO: 189245 - RNA, 19 nt, Artificial Sequence
  Description of Artificial Sequence: Synthetic oligonucleotide
aauuuuguguggguggcuc

SEQ ID NO: 189246 - RNA, 19 nt, Artificial Sequence
  Description of Artificial Sequence: Synthetic oligonucleotide
ucaggguuauauaugcuca

SEQ ID NO: 189247 - RNA, 19 nt, Artificial Sequence
  Description of Artificial Sequence: Synthetic oligonucleotide
aacuaucaguuuuacaaaa

SEQ ID NO: 189248 - RNA, 19 nt, Artificial Sequence
  Description of Artificial Sequence: Synthetic oligonucleotide
uaaauuuaacgcccugggc

SEQ ID NO: 189249 - RNA, 19 nt, Artificial Sequence
  Description of Artificial Sequence: Synthetic oligonucleotide
uccuuuauggaauuuuccu

SEQ ID NO: 189250 - RNA, 19 nt, Artificial Sequence
  Description of Artificial Sequence: Synthetic oligonucleotide
ugggaaugggccgaaaugg

SEQ ID NO: 189251 - RNA, 19 nt, Artificial Sequence
  Description of Artificial Sequence: Synthetic oligonucleotide
aaaucgagccagcuguuug

SEQ ID NO: 189252 - RNA, 19 nt, Artificial Sequence
  Description of Artificial Sequence: Synthetic oligonucleotide
acccuauugaaauucagga

SEQ ID NO: 189253 - RNA, 19 nt, Artificial Sequence
  Description of Artificial Sequence: Synthetic oligonucleotide
uccaaccaagccauugugg

SEQ ID NO: 189254 - RNA, 19 nt, Artificial Sequence
  Description of Artificial Sequence: Synthetic oligonucleotide
ggguauaugggacaaacag

SEQ ID NO: 189255 - RNA, 19 nt, Artificial Sequence
  Description of Artificial Sequence: Synthetic oligonucleotide
uuuguccauaagaaggcca

SEQ ID NO: 189256 - RNA, 19 nt, Artificial Sequence
  Description of Artificial Sequence: Synthetic oligonucleotide
uauauagcaguaugcaaaa

SEQ ID NO: 189257 - RNA, 19 nt, Artificial Sequence
  Description of Artificial Sequence: Synthetic oligonucleotide
aauuggaguuaguugaguu

SEQ ID NO: 189258 - RNA, 19 nt, Artificial Sequence
  Description of Artificial Sequence: Synthetic oligonucleotide
uacagagacaacuuuccac

SEQ ID NO: 189259 - RNA, 19 nt, Artificial Sequence
  Description of Artificial Sequence: Synthetic oligonucleotide
ugagguucaacccuggcuu

SEQ ID NO: 189260 - RNA, 19 nt, Artificial Sequence
  Description of Artificial Sequence: Synthetic oligonucleotide
ucagucuuccaaccaagcc

SEQ ID NO: 189261 - RNA, 19 nt, Artificial Sequence
  Description of Artificial Sequence: Synthetic oligonucleotide
aaugcccgauaauucugac

SEQ ID NO: 189262 - RNA, 19 nt, Artificial Sequence
  Description of Artificial Sequence: Synthetic oligonucleotide
uccccuucuaauauguaca

SEQ ID NO: 189263 - RNA, 19 nt, Artificial Sequence
  Description of Artificial Sequence: Synthetic oligonucleotide
uuaguucaacucaaaggga

SEQ ID NO: 189264 - RNA, 19 nt, Artificial Sequence
  Description of Artificial Sequence: Synthetic oligonucleotide
uuucuauaccaauggaccu

SEQ ID NO: 189265 - RNA, 19 nt, Artificial Sequence
  Description of Artificial Sequence: Synthetic oligonucleotide
uauaccaauggaccucacc

SEQ ID NO: 189266 - RNA, 19 nt, Artificial Sequence
  Description of Artificial Sequence: Synthetic oligonucleotide
uaguucaacucaaagggau

SEQ ID NO: 189267 - RNA, 19 nt, Artificial Sequence
  Description of Artificial Sequence: Synthetic oligonucleotide
auagacacaggugacccac

SEQ ID NO: 189268 - RNA, 19 nt, Artificial Sequence
  Description of Artificial Sequence: Synthetic oligonucleotide
ucgaguuuguuccuugugu

SEQ ID NO: 189269 - RNA, 19 nt, Artificial Sequence
  Description of Artificial Sequence: Synthetic oligonucleotide
auggguauaugggacaaac

SEQ ID NO: 189270 - RNA, 19 nt, Artificial Sequence
  Description of Artificial Sequence: Synthetic oligonucleotide
ugaguaaccaagugucagc

SEQ ID NO: 189271 - RNA, 19 nt, Artificial Sequence
  Description of Artificial Sequence: Synthetic oligonucleotide
uugaguaaccaagugucag

SEQ ID NO: 189272 - RNA, 19 nt, Artificial Sequence
  Description of Artificial Sequence: Synthetic oligonucleotide
aaaauuggaguuaguugag

SEQ ID NO: 189273 - RNA, 19 nt, Artificial Sequence
  Description of Artificial Sequence: Synthetic oligonucleotide
ucgagaaucaugcggcaug

SEQ ID NO: 189274 - RNA, 19 nt, Artificial Sequence
  Description of Artificial Sequence: Synthetic oligonucleotide
uauaugcucaaauccugca

SEQ ID NO: 189275 - RNA, 19 nt, Artificial Sequence
  Description of Artificial Sequence: Synthetic oligonucleotide
gaugaggguacauguuggg

SEQ ID NO: 189276 - RNA, 19 nt, Artificial Sequence
  Description of Artificial Sequence: Synthetic oligonucleotide
uucaggacggcuccaauaa

SEQ ID NO: 189277 - RNA, 19 nt, Artificial Sequence
  Description of Artificial Sequence: Synthetic oligonucleotide
uucaucuggcguuuggucu

SEQ ID NO: 189278 - RNA, 19 nt, Artificial Sequence
  Description of Artificial Sequence: Synthetic oligonucleotide
aaucaugcggcaugccuca

SEQ ID NO: 189279 - RNA, 19 nt, Artificial Sequence
  Description of Artificial Sequence: Synthetic oligonucleotide
ugcaugauuucgagaauca

SEQ ID NO: 189280 - RNA, 19 nt, Artificial Sequence
  Description of Artificial Sequence: Synthetic oligonucleotide
uggcguuuggucucgaggc

SEQ ID NO: 189281 - RNA, 19 nt, Artificial Sequence
  Description of Artificial Sequence: Synthetic oligonucleotide
gacgggucagcacaguugc

SEQ ID NO: 189282 - RNA, 19 nt, Artificial Sequence
  Description of Artificial Sequence: Synthetic oligonucleotide
aaccaagccauugugggcu

SEQ ID NO: 189283 - RNA, 19 nt, Artificial Sequence
  Description of Artificial Sequence: Synthetic oligonucleotide
ucugcgcuugucaaguucu

SEQ ID NO: 189284 - RNA, 19 nt, Artificial Sequence
  Description of Artificial Sequence: Synthetic oligonucleotide
aaaugcugauggcuuauau

SEQ ID NO: 189285 - RNA, 19 nt, Artificial Sequence
  Description of Artificial Sequence: Synthetic oligonucleotide
ugaccauccguucacugac

SEQ ID NO: 189286 - RNA, 19 nt, Artificial Sequence
  Description of Artificial Sequence: Synthetic oligonucleotide
uccaauaaucucucugugu

SEQ ID NO: 189287 - RNA, 19 nt, Artificial Sequence
  Description of Artificial Sequence: Synthetic oligonucleotide
uccgcauuuucaucuggcg

SEQ ID NO: 189288 - RNA, 19 nt, Artificial Sequence
  Description of Artificial Sequence: Synthetic oligonucleotide
ggcggagauaaacagagag

SEQ ID NO: 189289 - RNA, 19 nt, Artificial Sequence
  Description of Artificial Sequence: Synthetic oligonucleotide
aaaaugcccgauaauucug

SEQ ID NO: 189290 - RNA, 19 nt, Artificial Sequence
  Description of Artificial Sequence: Synthetic oligonucleotide
gugaugaggguacauguug

SEQ ID NO: 189291 - RNA, 19 nt, Artificial Sequence
  Description of Artificial Sequence: Synthetic oligonucleotide
aacuucugcgcuugucaag

SEQ ID NO: 189292 - RNA, 19 nt, Artificial Sequence
  Description of Artificial Sequence: Synthetic oligonucleotide
ugauuucgagaaucaugcg

SEQ ID NO: 189293 - RNA, 19 nt, Artificial Sequence
  Description of Artificial Sequence: Synthetic oligonucleotide
cauguugggaaaguauccg

SEQ ID NO: 189294 - RNA, 19 nt, Artificial Sequence
  Description of Artificial Sequence: Synthetic oligonucleotide
uuccccuucuaauauguac

SEQ ID NO: 189295 - RNA, 19 nt, Artificial Sequence
  Description of Artificial Sequence: Synthetic oligonucleotide
uugccgaucacccggccag

SEQ ID NO: 189296 - RNA, 19 nt, Artificial Sequence
  Description of Artificial Sequence: Synthetic oligonucleotide
gguuauauaugcucaaauc

SEQ ID NO: 189297 - RNA, 19 nt, Artificial Sequence
  Description of Artificial Sequence: Synthetic oligonucleotide
uggaccucacccaagacuu

SEQ ID NO: 189298 - RNA, 19 nt, Artificial Sequence
  Description of Artificial Sequence: Synthetic oligonucleotide
accgugaugguucucucag

SEQ ID NO: 189299 - RNA, 19 nt, Artificial Sequence
  Description of Artificial Sequence: Synthetic oligonucleotide
cugaggguauuucugcucc

SEQ ID NO: 189300 - RNA, 19 nt, Artificial Sequence
  Description of Artificial Sequence: Synthetic oligonucleotide
accuguuguacaauuuccc

SEQ ID NO: 189301 - RNA, 19 nt, Artificial Sequence
  Description of Artificial Sequence: Synthetic oligonucleotide
cuguuaguucaacucaaag

SEQ ID NO: 189302 - RNA, 19 nt, Artificial Sequence
  Description of Artificial Sequence: Synthetic oligonucleotide
uugauauauuacuucuaaa

SEQ ID NO: 189303 - RNA, 19 nt, Artificial Sequence
  Description of Artificial Sequence: Synthetic oligonucleotide
aggcacgauaacuucugcg

SEQ ID NO: 189304 - RNA, 19 nt, Artificial Sequence
  Description of Artificial Sequence: Synthetic oligonucleotide
gaaauggguauaugggaca

SEQ ID NO: 189305 - RNA, 19 nt, Artificial Sequence
  Description of Artificial Sequence: Synthetic oligonucleotide
ggagcuaucuugauggagg

SEQ ID NO: 189306 - RNA, 19 nt, Artificial Sequence
  Description of Artificial Sequence: Synthetic oligonucleotide
guucaacucaaagggauag

SEQ ID NO: 189307 - RNA, 19 nt, Artificial Sequence
  Description of Artificial Sequence: Synthetic oligonucleotide
ugagggaacccggaugugg

SEQ ID NO: 189308 - RNA, 19 nt, Artificial Sequence
  Description of Artificial Sequence: Synthetic oligonucleotide
accuuguauaaauugcuau

SEQ ID NO: 189309 - RNA, 19 nt, Artificial Sequence
  Description of Artificial Sequence: Synthetic oligonucleotide
cuuggucccugucucaugc

SEQ ID NO: 189310 - RNA, 19 nt, Artificial Sequence
  Description of Artificial Sequence: Synthetic oligonucleotide
acaacugccucgaaguguc

SEQ ID NO: 189311 - RNA, 19 nt, Artificial Sequence
  Description of Artificial Sequence: Synthetic oligonucleotide
gccgaaauggugaugaggg

SEQ ID NO: 189312 - RNA, 19 nt, Artificial Sequence
  Description of Artificial Sequence: Synthetic oligonucleotide
aaguauccggaguggcuag

SEQ ID NO: 189313 - RNA, 19 nt, Artificial Sequence
  Description of Artificial Sequence: Synthetic oligonucleotide
ucuuguucgcuugaguaac

SEQ ID NO: 189314 - RNA, 19 nt, Artificial Sequence
  Description of Artificial Sequence: Synthetic oligonucleotide
uuccaaccaagccauugug

SEQ ID NO: 189315 - RNA, 19 nt, Artificial Sequence
  Description of Artificial Sequence: Synthetic oligonucleotide
cuuacauaaccagaacgug

SEQ ID NO: 189316 - RNA, 19 nt, Artificial Sequence
  Description of Artificial Sequence: Synthetic oligonucleotide
ucuauaccaauggaccuca

SEQ ID NO: 189317 - RNA, 19 nt, Artificial Sequence
  Description of Artificial Sequence: Synthetic oligonucleotide
caccuguuguacaauuucc

SEQ ID NO: 189318 - RNA, 19 nt, Artificial Sequence
  Description of Artificial Sequence: Synthetic oligonucleotide
uccuguugaaaagaugcca

SEQ ID NO: 189319 - RNA, 19 nt, Artificial Sequence
  Description of Artificial Sequence: Synthetic oligonucleotide
auggaccucacccaagacu

SEQ ID NO: 189320 - RNA, 19 nt, Artificial Sequence
  Description of Artificial Sequence: Synthetic oligonucleotide
auaaccagaacguggucau

SEQ ID NO: 189321 - RNA, 19 nt, Artificial Sequence
  Description of Artificial Sequence: Synthetic oligonucleotide
uucgaguuuguuccuugug

SEQ ID NO: 189322 - RNA, 19 nt, Artificial Sequence
  Description of Artificial Sequence: Synthetic oligonucleotide
auggcuuauauaccaaaau

SEQ ID NO: 189323 - RNA, 19 nt, Artificial Sequence
  Description of Artificial Sequence: Synthetic oligonucleotide
aaaguauccggaguggcua

SEQ ID NO: 189324 - RNA, 19 nt, Artificial Sequence
  Description of Artificial Sequence: Synthetic oligonucleotide
uccuuucuauaccaaugga

SEQ ID NO: 189325 - RNA, 19 nt, Artificial Sequence
  Description of Artificial Sequence: Synthetic oligonucleotide
uuguguggguggcucaaag

SEQ ID NO: 189326 - RNA, 19 nt, Artificial Sequence
  Description of Artificial Sequence: Synthetic oligonucleotide
auucugacgaucacuuccg

SEQ ID NO: 189327 - RNA, 19 nt, Artificial Sequence
  Description of Artificial Sequence: Synthetic oligonucleotide
aucucuaagggaaacacaa

SEQ ID NO: 189328 - RNA, 19 nt, Artificial Sequence
  Description of Artificial Sequence: Synthetic oligonucleotide
caaagggauagcgccaugg

SEQ ID NO: 189329 - RNA, 19 nt, Artificial Sequence
  Description of Artificial Sequence: Synthetic oligonucleotide
ugaguggaugggcaguaga

SEQ ID NO: 189330 - RNA, 19 nt, Artificial Sequence
  Description of Artificial Sequence: Synthetic oligonucleotide
uuccgcauuuucaucuggc

SEQ ID NO: 189331 - RNA, 19 nt, Artificial Sequence
  Description of Artificial Sequence: Synthetic oligonucleotide
cucgaaguguccuugacaa

SEQ ID NO: 189332 - RNA, 19 nt, Artificial Sequence
  Description of Artificial Sequence: Synthetic oligonucleotide
augcccgauaauucugacg

SEQ ID NO: 189333 - RNA, 19 nt, Artificial Sequence
  Description of Artificial Sequence: Synthetic oligonucleotide
acguacccuauugaaauuc

SEQ ID NO: 189334 - RNA, 19 nt, Artificial Sequence
  Description of Artificial Sequence: Synthetic oligonucleotide
ucuuuccccuucuaauaug

SEQ ID NO: 189335 - RNA, 19 nt, Artificial Sequence
  Description of Artificial Sequence: Synthetic oligonucleotide
ugggccgaaauggugauga

SEQ ID NO: 189336 - RNA, 19 nt, Artificial Sequence
  Description of Artificial Sequence: Synthetic oligonucleotide
ccaaccaagccauuguggg

SEQ ID NO: 189337 - RNA, 19 nt, Artificial Sequence
  Description of Artificial Sequence: Synthetic oligonucleotide
ugcaaggaugagaugguua

SEQ ID NO: 189338 - RNA, 19 nt, Artificial Sequence
  Description of Artificial Sequence: Synthetic oligonucleotide
uggguauaugggacaaaca

SEQ ID NO: 189339 - RNA, 19 nt, Artificial Sequence
  Description of Artificial Sequence: Synthetic oligonucleotide
uagaaaagccugcuuucuc

SEQ ID NO: 189340 - RNA, 19 nt, Artificial Sequence
  Description of Artificial Sequence: Synthetic oligonucleotide
guuugcuggcgccuguggg

SEQ ID NO: 189341 - RNA, 19 nt, Artificial Sequence
  Description of Artificial Sequence: Synthetic oligonucleotide
aaucucuaagggaaacaca

SEQ ID NO: 189342 - RNA, 19 nt, Artificial Sequence
  Description of Artificial Sequence: Synthetic oligonucleotide
caauaauagcacccacagc

SEQ ID NO: 189343 - RNA, 19 nt, Artificial Sequence
  Description of Artificial Sequence: Synthetic oligonucleotide
aaauggguauaugggacaa

SEQ ID NO: 189344 - RNA, 19 nt, Artificial Sequence
  Description of Artificial Sequence: Synthetic oligonucleotide
ucuuggcuagcggaagacg

SEQ ID NO: 189345 - RNA, 19 nt, Artificial Sequence
  Description of Artificial Sequence: Synthetic oligonucleotide
uccggaguggcuagcgaag

SEQ ID NO: 189346 - RNA, 19 nt, Artificial Sequence
  Description of Artificial Sequence: Synthetic oligonucleotide
cagucuuccaaccaagcca

SEQ ID NO: 189347 - RNA, 19 nt, Artificial Sequence
  Description of Artificial Sequence: Synthetic oligonucleotide
cuggcguuuggucucgagg

SEQ ID NO: 189348 - RNA, 19 nt, Artificial Sequence
  Description of Artificial Sequence: Synthetic oligonucleotide
aaccaagugucagcugagg

SEQ ID NO: 189349 - RNA, 19 nt, Artificial Sequence
  Description of Artificial Sequence: Synthetic oligonucleotide
agcacggacaguccuguug

SEQ ID NO: 189350 - RNA, 19 nt, Artificial Sequence
  Description of Artificial Sequence: Synthetic oligonucleotide
ucucauggcacguacccua

SEQ ID NO: 189351 - RNA, 19 nt, Artificial Sequence
  Description of Artificial Sequence: Synthetic oligonucleotide
ccuuucuauaccaauggac

SEQ ID NO: 189352 - RNA, 19 nt, Artificial Sequence
  Description of Artificial Sequence: Synthetic oligonucleotide
acgguaucccuucuguuga

SEQ ID NO: 189353 - RNA, 19 nt, Artificial Sequence
  Description of Artificial Sequence: Synthetic oligonucleotide
aaaugcccgauaauucuga

SEQ ID NO: 189354 - RNA, 19 nt, Artificial Sequence
  Description of Artificial Sequence: Synthetic oligonucleotide
accugugaagcaaagaaau

SEQ ID NO: 189355 - RNA, 19 nt, Artificial Sequence
  Description of Artificial Sequence: Synthetic oligonucleotide
gaaugggccgaaaugguga

SEQ ID NO: 189356 - RNA, 19 nt, Artificial Sequence
  Description of Artificial Sequence: Synthetic oligonucleotide
gugggaaugggccgaaaug

SEQ ID NO: 189357 - RNA, 19 nt, Artificial Sequence
  Description of Artificial Sequence: Synthetic oligonucleotide
gaaucaugcggcaugccuc

SEQ ID NO: 189358 - RNA, 19 nt, Artificial Sequence
  Description of Artificial Sequence: Synthetic oligonucleotide
aaugggccgaaauggugau

SEQ ID NO: 189359 - RNA, 19 nt, Artificial Sequence
  Description of Artificial Sequence: Synthetic oligonucleotide
ggaugagaugguuaucuug

SEQ ID NO: 189360 - RNA, 19 nt, Artificial Sequence
  Description of Artificial Sequence: Synthetic oligonucleotide
ucacguguugggaaggcua

SEQ ID NO: 189361 - RNA, 19 nt, Artificial Sequence
  Description of Artificial Sequence: Synthetic oligonucleotide
acgcccugggccaacaacc

SEQ ID NO: 189362 - RNA, 19 nt, Artificial Sequence
  Description of Artificial Sequence: Synthetic oligonucleotide
aaaggcuauggaguuugcu

SEQ ID NO: 189363 - RNA, 19 nt, Artificial Sequence
  Description of Artificial Sequence: Synthetic oligonucleotide
uuugccgaucacccggcca

SEQ ID NO: 189364 - RNA, 19 nt, Artificial Sequence
  Description of Artificial Sequence: Synthetic oligonucleotide
cuaucuugauggaggcacc

SEQ ID NO: 189365 - RNA, 19 nt, Artificial Sequence
  Description of Artificial Sequence: Synthetic oligonucleotide
uggaugggcaguagauggc

SEQ ID NO: 189366 - RNA, 19 nt, Artificial Sequence
  Description of Artificial Sequence: Synthetic oligonucleotide
guuucgaguuuguuccuug

SEQ ID NO: 189367 - RNA, 19 nt, Artificial Sequence
  Description of Artificial Sequence: Synthetic oligonucleotide
uuauggaauuuuccuguuu

SEQ ID NO: 189368 - RNA, 19 nt, Artificial Sequence
  Description of Artificial Sequence: Synthetic oligonucleotide
uaacuucugcgcuugucaa

SEQ ID NO: 189369 - RNA, 19 nt, Artificial Sequence
  Description of Artificial Sequence: Synthetic oligonucleotide
uugggaugaagagauucac

SEQ ID NO: 189370 - RNA, 19 nt, Artificial Sequence
  Description of Artificial Sequence: Synthetic oligonucleotide
uuucgagaaucaugcggca

SEQ ID NO: 189371 - RNA, 19 nt, Artificial Sequence
  Description of Artificial Sequence: Synthetic oligonucleotide
uggagcuaucuugauggag

SEQ ID NO: 189372 - RNA, 19 nt, Artificial Sequence
  Description of Artificial Sequence: Synthetic oligonucleotide
cuuuccgacucuuguucgc

SEQ ID NO: 189373 - RNA, 19 nt, Artificial Sequence
  Description of Artificial Sequence: Synthetic oligonucleotide
aguuuagugucuucagcuu

SEQ ID NO: 189374 - RNA, 19 nt, Artificial Sequence
  Description of Artificial Sequence: Synthetic oligonucleotide
uguguggguggcucaaagu

SEQ ID NO: 189375 - RNA, 19 nt, Artificial Sequence
  Description of Artificial Sequence: Synthetic oligonucleotide
caaccaagccauugugggc

SEQ ID NO: 189376 - RNA, 19 nt, Artificial Sequence
  Description of Artificial Sequence: Synthetic oligonucleotide
acuaaaugcugauggcuua

SEQ ID NO: 189377 - RNA, 19 nt, Artificial Sequence
  Description of Artificial Sequence: Synthetic oligonucleotide
caggacggcuccaauaauc

SEQ ID NO: 189378 - RNA, 19 nt, Artificial Sequence
  Description of Artificial Sequence: Synthetic oligonucleotide
gcuugaguaaccaaguguc

SEQ ID NO: 189379 - RNA, 19 nt, Artificial Sequence
  Description of Artificial Sequence: Synthetic oligonucleotide
uaucccuucuguugauaga

SEQ ID NO: 189380 - RNA, 19 nt, Artificial Sequence
  Description of Artificial Sequence: Synthetic oligonucleotide
aaccugugaagcaaagaaa

SEQ ID NO: 189381 - RNA, 19 nt, Artificial Sequence
  Description of Artificial Sequence: Synthetic oligonucleotide
gguggguucccacuuuccg

SEQ ID NO: 189382 - RNA, 19 nt, Artificial Sequence
  Description of Artificial Sequence: Synthetic oligonucleotide
cuuguucgcuugaguaacc

SEQ ID NO: 189383 - RNA, 19 nt, Artificial Sequence
  Description of Artificial Sequence: Synthetic oligonucleotide
uuguacaauuucccugauc

SEQ ID NO: 189384 - RNA, 19 nt, Artificial Sequence
  Description of Artificial Sequence: Synthetic oligonucleotide
ucccaauaauagcacccac

SEQ ID NO: 189385 - RNA, 19 nt, Artificial Sequence
  Description of Artificial Sequence: Synthetic oligonucleotide
guugauagacacaggugac

SEQ ID NO: 189386 - RNA, 19 nt, Artificial Sequence
  Description of Artificial Sequence: Synthetic oligonucleotide
ccauaagaaggccacguag

SEQ ID NO: 189387 - RNA, 19 nt, Artificial Sequence
  Description of Artificial Sequence: Synthetic oligonucleotide
gcuaucuugauggaggcac

SEQ ID NO: 189388 - RNA, 19 nt, Artificial Sequence
  Description of Artificial Sequence: Synthetic oligonucleotide
aggauggucuuugguuugc

SEQ ID NO: 189389 - RNA, 19 nt, Artificial Sequence
  Description of Artificial Sequence: Synthetic oligonucleotide
aguaaccaagugucagcug

SEQ ID NO: 189390 - RNA, 19 nt, Artificial Sequence
  Description of Artificial Sequence: Synthetic oligonucleotide
agggaacccggaugugggc

SEQ ID NO: 189391 - RNA, 19 nt, Artificial Sequence
  Description of Artificial Sequence: Synthetic oligonucleotide
uggggaaccaggcccuccc

SEQ ID NO: 189392 - RNA, 19 nt, Artificial Sequence
  Description of Artificial Sequence: Synthetic oligonucleotide
uccauaagaaggccacgua

SEQ ID NO: 189393 - RNA, 19 nt, Artificial Sequence
  Description of Artificial Sequence: Synthetic oligonucleotide
uucugcgcuugucaaguuc

SEQ ID NO: 189394 - RNA, 19 nt, Artificial Sequence
  Description of Artificial Sequence: Synthetic oligonucleotide
aagacgggucagcacaguu

SEQ ID NO: 189395 - RNA, 19 nt, Artificial Sequence
  Description of Artificial Sequence: Synthetic oligonucleotide
guggcuagcgaaggggugg

SEQ ID NO: 189396 - RNA, 19 nt, Artificial Sequence
  Description of Artificial Sequence: Synthetic oligonucleotide
uugguuugcucccgaucug

SEQ ID NO: 189397 - RNA, 19 nt, Artificial Sequence
  Description of Artificial Sequence: Synthetic oligonucleotide
auuuuguguggguggcuca

SEQ ID NO: 189398 - RNA, 19 nt, Artificial Sequence
  Description of Artificial Sequence: Synthetic oligonucleotide
ccaagugaauuuugugugg

SEQ ID NO: 189399 - RNA, 19 nt, Artificial Sequence
  Description of Artificial Sequence: Synthetic oligonucleotide
ggggcggagauaaacagag

SEQ ID NO: 189400 - RNA, 19 nt, Artificial Sequence
  Description of Artificial Sequence: Synthetic oligonucleotide
ucgaaguguccuugacaag

SEQ ID NO: 189401 - RNA, 19 nt, Artificial Sequence
  Description of Artificial Sequence: Synthetic oligonucleotide
ugguuugcucccgaucugc

SEQ ID NO: 189402 - RNA, 19 nt, Artificial Sequence
  Description of Artificial Sequence: Synthetic oligonucleotide
cacguguugggaaggcuac

SEQ ID NO: 189403 - RNA, 19 nt, Artificial Sequence
  Description of Artificial Sequence: Synthetic oligonucleotide
guaggcucuuggcuagcgg

SEQ ID NO: 189404 - RNA, 19 nt, Artificial Sequence
  Description of Artificial Sequence: Synthetic oligonucleotide
cacguaggcucuuggcuag

SEQ ID NO: 189405 - RNA, 19 nt, Artificial Sequence
  Description of Artificial Sequence: Synthetic oligonucleotide
uggcacguacccuauugaa

SEQ ID NO: 189406 - RNA, 19 nt, Artificial Sequence
  Description of Artificial Sequence: Synthetic oligonucleotide
gauagacacaggugaccca

SEQ ID NO: 189407 - RNA, 19 nt, Artificial Sequence
  Description of Artificial Sequence: Synthetic oligonucleotide
aguauccggaguggcuagc

SEQ ID NO: 189408 - RNA, 19 nt, Artificial Sequence
  Description of Artificial Sequence: Synthetic oligonucleotide
cuauggaguuugcuuucag

SEQ ID NO: 189409 - RNA, 19 nt, Artificial Sequence
  Description of Artificial Sequence: Synthetic oligonucleotide
agcguuggcacaagcauca

SEQ ID NO: 189410 - RNA, 19 nt, Artificial Sequence
  Description of Artificial Sequence: Synthetic oligonucleotide
acgauaacuucugcgcuug

SEQ ID NO: 189411 - RNA, 19 nt, Artificial Sequence
  Description of Artificial Sequence: Synthetic oligonucleotide
cuguaaauuuaacgcccug

SEQ ID NO: 189412 - RNA, 19 nt, Artificial Sequence
  Description of Artificial Sequence: Synthetic oligonucleotide
aaccuuguauaaauugcua

SEQ ID NO: 189413 - RNA, 19 nt, Artificial Sequence
  Description of Artificial Sequence: Synthetic oligonucleotide
gguacaggggucugcagac

SEQ ID NO: 189414 - RNA, 19 nt, Artificial Sequence
  Description of Artificial Sequence: Synthetic oligonucleotide
auggcacguacccuauuga

SEQ ID NO: 189415 - RNA, 19 nt, Artificial Sequence
  Description of Artificial Sequence: Synthetic oligonucleotide
uauccggaguggcuagcga

SEQ ID NO: 189416 - RNA, 19 nt, Artificial Sequence
  Description of Artificial Sequence: Synthetic oligonucleotide
ugguggguucccacuuucc

SEQ ID NO: 189417 - RNA, 19 nt, Artificial Sequence
  Description of Artificial Sequence: Synthetic oligonucleotide
uuguucgcuugaguaacca

SEQ ID NO: 189418 - RNA, 19 nt, Artificial Sequence
  Description of Artificial Sequence: Synthetic oligonucleotide
uugguggguucccacuuuc

SEQ ID NO: 189419 - RNA, 19 nt, Artificial Sequence
  Description of Artificial Sequence: Synthetic oligonucleotide
gcucucauggcacguaccc

SEQ ID NO: 189420 - RNA, 19 nt, Artificial Sequence
  Description of Artificial Sequence: Synthetic oligonucleotide
uuuccgacucuuguucgcu

SEQ ID NO: 189421 - RNA, 19 nt, Artificial Sequence
  Description of Artificial Sequence: Synthetic oligonucleotide
gaggcacgauaacuucugc

SEQ ID NO: 189422 - RNA, 19 nt, Artificial Sequence
  Description of Artificial Sequence: Synthetic oligonucleotide
guacccuauugaaauucag

SEQ ID NO: 189423 - RNA, 19 nt, Artificial Sequence
  Description of Artificial Sequence: Synthetic oligonucleotide
gacggcuccaauaaucucu

SEQ ID NO: 189424 - RNA, 19 nt, Artificial Sequence
  Description of Artificial Sequence: Synthetic oligonucleotide
guauccggaguggcuagcg

SEQ ID NO: 189425 - RNA, 19 nt, Artificial Sequence
  Description of Artificial Sequence: Synthetic oligonucleotide
auuugauauauuacuucua

SEQ ID NO: 189426 - RNA, 19 nt, Artificial Sequence
  Description of Artificial Sequence: Synthetic oligonucleotide
guacagagacaacuuucca

SEQ ID NO: 189427 - RNA, 19 nt, Artificial Sequence
  Description of Artificial Sequence: Synthetic oligonucleotide
gccaagugguguuucuggg

SEQ ID NO: 189428 - RNA, 19 nt, Artificial Sequence
  Description of Artificial Sequence: Synthetic oligonucleotide
ucuuggucccugucucaug

SEQ ID NO: 189429 - RNA, 19 nt, Artificial Sequence
  Description of Artificial Sequence: Synthetic oligonucleotide
ucacuuccgcauuuucauc

SEQ ID NO: 189430 - RNA, 19 nt, Artificial Sequence
  Description of Artificial Sequence: Synthetic oligonucleotide
agcgccaugggagcugagg

SEQ ID NO: 189431 - RNA, 19 nt, Artificial Sequence
  Description of Artificial Sequence: Synthetic oligonucleotide
caucuuuccccuucuaaua

SEQ ID NO: 189432 - RNA, 19 nt, Artificial Sequence
  Description of Artificial Sequence: Synthetic oligonucleotide
cccuauugaaauucaggac

SEQ ID NO: 189433 - RNA, 19 nt, Artificial Sequence
  Description of Artificial Sequence: Synthetic oligonucleotide
agcucucauggcacguacc

SEQ ID NO: 189434 - RNA, 19 nt, Artificial Sequence
  Description of Artificial Sequence: Synthetic oligonucleotide
gauagcgccaugggagcug

SEQ ID NO: 189435 - RNA, 19 nt, Artificial Sequence
  Description of Artificial Sequence: Synthetic oligonucleotide
caauggaccucacccaaga

SEQ ID NO: 189436 - RNA, 19 nt, Artificial Sequence
  Description of Artificial Sequence: Synthetic oligonucleotide
cagcaaaucgagccagcug

SEQ ID NO: 189437 - RNA, 19 nt, Artificial Sequence
  Description of Artificial Sequence: Synthetic oligonucleotide
aggacggcuccaauaaucu

SEQ ID NO: 189438 - RNA, 19 nt, Artificial Sequence
  Description of Artificial Sequence: Synthetic oligonucleotide
agcugucgaugagggaacc

SEQ ID NO: 189439 - RNA, 19 nt, Artificial Sequence
  Description of Artificial Sequence: Synthetic oligonucleotide
aacgcugcaggcacccugu

SEQ ID NO: 189440 - RNA, 19 nt, Artificial Sequence
  Description of Artificial Sequence: Synthetic oligonucleotide
gguucguguguguuucgag

SEQ ID NO: 189441 - RNA, 19 nt, Artificial Sequence
  Description of Artificial Sequence: Synthetic oligonucleotide
agucuagaaaagccugcuu

SEQ ID NO: 189442 - RNA, 19 nt, Artificial Sequence
  Description of Artificial Sequence: Synthetic oligonucleotide
ggaaaguauccggaguggc

SEQ ID NO: 189443 - RNA, 19 nt, Artificial Sequence
  Description of Artificial Sequence: Synthetic oligonucleotide
cagcguuggcacaagcauc

SEQ ID NO: 189444 - RNA, 19 nt, Artificial Sequence
  Description of Artificial Sequence: Synthetic oligonucleotide
ugucacguguugggaaggc

SEQ ID NO: 189445 - RNA, 19 nt, Artificial Sequence
  Description of Artificial Sequence: Synthetic oligonucleotide
cacugagguucaacccugg

SEQ ID NO: 189446 - RNA, 19 nt, Artificial Sequence
  Description of Artificial Sequence: Synthetic oligonucleotide
cacggggcccugcuggugg

SEQ ID NO: 189447 - RNA, 19 nt, Artificial Sequence
  Description of Artificial Sequence: Synthetic oligonucleotide
agacgggucagcacaguug

SEQ ID NO: 189448 - RNA, 19 nt, Artificial Sequence
  Description of Artificial Sequence: Synthetic oligonucleotide
gggaaaguauccggagugg

SEQ ID NO: 189449 - RNA, 19 nt, Artificial Sequence
  Description of Artificial Sequence: Synthetic oligonucleotide
cugacgaucacuuccgcau

SEQ ID NO: 189450 - RNA, 19 nt, Artificial Sequence
  Description of Artificial Sequence: Synthetic oligonucleotide
ugacgaucacuuccgcauu

SEQ ID NO: 189451 - RNA, 19 nt, Artificial Sequence
  Description of Artificial Sequence: Synthetic oligonucleotide
aauggguauaugggacaaa

SEQ ID NO: 189452 - RNA, 19 nt, Artificial Sequence
  Description of Artificial Sequence: Synthetic oligonucleotide
gagguucaacccuggcuuc

SEQ ID NO: 189453 - RNA, 19 nt, Artificial Sequence
  Description of Artificial Sequence: Synthetic oligonucleotide
ggccgaaauggugaugagg

SEQ ID NO: 189454 - RNA, 19 nt, Artificial Sequence
  Description of Artificial Sequence: Synthetic oligonucleotide
uuaccucuucuuugggauu

SEQ ID NO: 189455 - RNA, 19 nt, Artificial Sequence
  Description of Artificial Sequence: Synthetic oligonucleotide
ucaggacggcuccaauaau

SEQ ID NO: 189456 - RNA, 19 nt, Artificial Sequence
  Description of Artificial Sequence: Synthetic oligonucleotide
cagcugucgaugagggaac

SEQ ID NO: 189457 - RNA, 19 nt, Artificial Sequence
  Description of Artificial Sequence: Synthetic oligonucleotide
uucgagaaucaugcggcau

SEQ ID NO: 189458 - RNA, 19 nt, Artificial Sequence
  Description of Artificial Sequence: Synthetic oligonucleotide
gggccaacaaccuuguaua

SEQ ID NO: 189459 - RNA, 19 nt, Artificial Sequence
  Description of Artificial Sequence: Synthetic oligonucleotide
ugccucagaugucccuucu

SEQ ID NO: 189460 - RNA, 19 nt, Artificial Sequence
  Description of Artificial Sequence: Synthetic oligonucleotide
aagauccgucccugagccu

SEQ ID NO: 189461 - RNA, 19 nt, Artificial Sequence
  Description of Artificial Sequence: Synthetic oligonucleotide
ugguucguguguguuucga

SEQ ID NO: 189462 - RNA, 19 nt, Artificial Sequence
  Description of Artificial Sequence: Synthetic oligonucleotide
agggacgguaucccuucug

SEQ ID NO: 189463 - RNA, 19 nt, Artificial Sequence
  Description of Artificial Sequence: Synthetic oligonucleotide
cuagcggaagacgggucag

SEQ ID NO: 189464 - RNA, 19 nt, Artificial Sequence
  Description of Artificial Sequence: Synthetic oligonucleotide
ucccugaucuugcgcugug

SEQ ID NO: 189465 - RNA, 19 nt, Artificial Sequence
  Description of Artificial Sequence: Synthetic oligonucleotide
gcuguuugaugugugcccc

SEQ ID NO: 189466 - RNA, 19 nt, Artificial Sequence
  Description of Artificial Sequence: Synthetic oligonucleotide
uggcuagcggaagacgggu

SEQ ID NO: 189467 - RNA, 19 nt, Artificial Sequence
  Description of Artificial Sequence: Synthetic oligonucleotide
ccgauaauucugacgauca

SEQ ID NO: 189468 - RNA, 19 nt, Artificial Sequence
  Description of Artificial Sequence: Synthetic oligonucleotide
aaggccacguaggcucuug

SEQ ID NO: 189469 - RNA, 19 nt, Artificial Sequence
  Description of Artificial Sequence: Synthetic oligonucleotide
aggguuauauaugcucaaa

SEQ ID NO: 189470 - RNA, 19 nt, Artificial Sequence
  Description of Artificial Sequence: Synthetic oligonucleotide
cugguucguguguguuucg

SEQ ID NO: 189471 - RNA, 19 nt, Artificial Sequence
  Description of Artificial Sequence: Synthetic oligonucleotide
uaaaugcugauggcuuaua

SEQ ID NO: 189472 - RNA, 19 nt, Artificial Sequence
  Description of Artificial Sequence: Synthetic oligonucleotide
caggcacccuguguaaccc

SEQ ID NO: 189473 - RNA, 19 nt, Artificial Sequence
  Description of Artificial Sequence: Synthetic oligonucleotide
gugagacgacucccugagg

SEQ ID NO: 189474 - RNA, 19 nt, Artificial Sequence
  Description of Artificial Sequence: Synthetic oligonucleotide
ucuccuuucuguggauguc

SEQ ID NO: 189475 - RNA, 19 nt, Artificial Sequence
  Description of Artificial Sequence: Synthetic oligonucleotide
ggaaugggccgaaauggug

SEQ ID NO: 189476 - RNA, 19 nt, Artificial Sequence
  Description of Artificial Sequence: Synthetic oligonucleotide
gcuagcgaaggggugguag

SEQ ID NO: 189477 - RNA, 19 nt, Artificial Sequence
  Description of Artificial Sequence: Synthetic oligonucleotide
uugucaaguucugcagcuc

SEQ ID NO: 189478 - RNA, 19 nt, Artificial Sequence
  Description of Artificial Sequence: Synthetic oligonucleotide
caagccauugugggcuaag

SEQ ID NO: 189479 - RNA, 19 nt, Artificial Sequence
  Description of Artificial Sequence: Synthetic oligonucleotide
cugugagacgacucccuga

SEQ ID NO: 189480 - RNA, 19 nt, Artificial Sequence
  Description of Artificial Sequence: Synthetic oligonucleotide
ugccucgaaguguccuuga

SEQ ID NO: 189481 - RNA, 19 nt, Artificial Sequence
  Description of Artificial Sequence: Synthetic oligonucleotide
agcggaagacgggucagca

SEQ ID NO: 189482 - RNA, 19 nt, Artificial Sequence
  Description of Artificial Sequence: Synthetic oligonucleotide
cccaauaauagcacccaca

SEQ ID NO: 189483 - RNA, 19 nt, Artificial Sequence
  Description of Artificial Sequence: Synthetic oligonucleotide
ggcuacauucaucuguugu

SEQ ID NO: 189484 - RNA, 19 nt, Artificial Sequence
  Description of Artificial Sequence: Synthetic oligonucleotide
gcaggcacccuguguaacc

SEQ ID NO: 189485 - RNA, 19 nt, Artificial Sequence
  Description of Artificial Sequence: Synthetic oligonucleotide
cacuaaaugcugauggcuu

SEQ ID NO: 189486 - RNA, 19 nt, Artificial Sequence
  Description of Artificial Sequence: Synthetic oligonucleotide
uuuaacgcccugggccaac

SEQ ID NO: 189487 - RNA, 19 nt, Artificial Sequence
  Description of Artificial Sequence: Synthetic oligonucleotide
gugaagcaaagaaaugggu

SEQ ID NO: 189488 - RNA, 19 nt, Artificial Sequence
  Description of Artificial Sequence: Synthetic oligonucleotide
cuuccaaccaagccauugu

SEQ ID NO: 189489 - RNA, 19 nt, Artificial Sequence
  Description of Artificial Sequence: Synthetic oligonucleotide
cuauaccaauggaccucac

SEQ ID NO: 189490 - RNA, 19 nt, Artificial Sequence
  Description of Artificial Sequence: Synthetic oligonucleotide
gacucuuguucgcuugagu

SEQ ID NO: 189491 - RNA, 19 nt, Artificial Sequence
  Description of Artificial Sequence: Synthetic oligonucleotide
caggguuauauaugcucaa

SEQ ID NO: 189492 - RNA, 19 nt, Artificial Sequence
  Description of Artificial Sequence: Synthetic oligonucleotide
gcacguacccuauugaaau

SEQ ID NO: 189493 - RNA, 19 nt, Artificial Sequence
  Description of Artificial Sequence: Synthetic oligonucleotide
gcuagcggaagacggguca

SEQ ID NO: 189494 - RNA, 19 nt, Artificial Sequence
  Description of Artificial Sequence: Synthetic oligonucleotide
auccggaccuucugcugga

SEQ ID NO: 189495 - RNA, 19 nt, Artificial Sequence
  Description of Artificial Sequence: Synthetic oligonucleotide
uagcggaagacgggucagc

SEQ ID NO: 189496 - RNA, 19 nt, Artificial Sequence
  Description of Artificial Sequence: Synthetic oligonucleotide
auccguucacugacauccg

SEQ ID NO: 189497 - RNA, 19 nt, Artificial Sequence
  Description of Artificial Sequence: Synthetic oligonucleotide
gcugugagacgacucccug

SEQ ID NO: 189498 - RNA, 19 nt, Artificial Sequence
  Description of Artificial Sequence: Synthetic oligonucleotide
ggguuauauaugcucaaau

SEQ ID NO: 189499 - RNA, 19 nt, Artificial Sequence
  Description of Artificial Sequence: Synthetic oligonucleotide
gagacgacucccugagggu

SEQ ID NO: 189500 - RNA, 19 nt, Artificial Sequence
  Description of Artificial Sequence: Synthetic oligonucleotide
agguucaacccuggcuuca

SEQ ID NO: 189501 - RNA, 19 nt, Artificial Sequence
  Description of Artificial Sequence: Synthetic oligonucleotide
gguuaucuuggucccuguc

SEQ ID NO: 189502 - RNA, 19 nt, Artificial Sequence
  Description of Artificial Sequence: Synthetic oligonucleotide
cagagacaacuuuccacaa

SEQ ID NO: 189503 - RNA, 19 nt, Artificial Sequence
  Description of Artificial Sequence: Synthetic oligonucleotide
cugcgcuugucaaguucug

SEQ ID NO: 189504 - RNA, 19 nt, Artificial Sequence
  Description of Artificial Sequence: Synthetic oligonucleotide
cugcgcugugagacgacuc

SEQ ID NO: 189505 - RNA, 19 nt, Artificial Sequence
  Description of Artificial Sequence: Synthetic oligonucleotide
agacgacucccugagggua

SEQ ID NO: 189506 - RNA, 19 nt, Artificial Sequence
  Description of Artificial Sequence: Synthetic oligonucleotide
gcugguucguguguguuuc

SEQ ID NO: 189507 - RNA, 19 nt, Artificial Sequence
  Description of Artificial Sequence: Synthetic oligonucleotide
cugccucgaaguguccuug

SEQ ID NO: 189508 - RNA, 19 nt, Artificial Sequence
  Description of Artificial Sequence: Synthetic oligonucleotide
ccauugugggcuaagauuu

SEQ ID NO: 189509 - RNA, 19 nt, Artificial Sequence
  Description of Artificial Sequence: Synthetic oligonucleotide
gaguggaugggcaguagau

SEQ ID NO: 189510 - RNA, 19 nt, Artificial Sequence
  Description of Artificial Sequence: Synthetic oligonucleotide
ccaauggaccucacccaag

SEQ ID NO: 189511 - RNA, 19 nt, Artificial Sequence
  Description of Artificial Sequence: Synthetic oligonucleotide
cccgauaauucugacgauc

SEQ ID NO: 189512 - RNA, 19 nt, Artificial Sequence
  Description of Artificial Sequence: Synthetic oligonucleotide
gcggagauaaacagagaga

SEQ ID NO: 189513 - RNA, 19 nt, Artificial Sequence
  Description of Artificial Sequence: Synthetic oligonucleotide
ucauggcacguacccuauu

SEQ ID NO: 189514 - RNA, 19 nt, Artificial Sequence
  Description of Artificial Sequence: Synthetic oligonucleotide
ccaauaaucucucuguguu

SEQ ID NO: 189515 - RNA, 19 nt, Artificial Sequence
  Description of Artificial Sequence: Synthetic oligonucleotide
gaccucacccaagacuuua

SEQ ID NO: 189516 - RNA, 19 nt, Artificial Sequence
  Description of Artificial Sequence: Synthetic oligonucleotide
gaucuccaucucagcguug

SEQ ID NO: 189517 - RNA, 19 nt, Artificial Sequence
  Description of Artificial Sequence: Synthetic oligonucleotide
caccgugaugguucucuca

SEQ ID NO: 189518 - RNA, 19 nt, Artificial Sequence
  Description of Artificial Sequence: Synthetic oligonucleotide
caucugucacguguuggga

SEQ ID NO: 189519 - RNA, 19 nt, Artificial Sequence
  Description of Artificial Sequence: Synthetic oligonucleotide
cgaaguguccuugacaaga

SEQ ID NO: 189520 - RNA, 19 nt, Artificial Sequence
  Description of Artificial Sequence: Synthetic oligonucleotide
uggcuagcgaagggguggu

SEQ ID NO: 189521 - RNA, 19 nt, Artificial Sequence
  Description of Artificial Sequence: Synthetic oligonucleotide
gucgaugagggaacccgga

SEQ ID NO: 189522 - RNA, 19 nt, Artificial Sequence
  Description of Artificial Sequence: Synthetic oligonucleotide
gccauugugggcuaagauu

SEQ ID NO: 189523 - RNA, 19 nt, Artificial Sequence
  Description of Artificial Sequence: Synthetic oligonucleotide
ugcugcgcugugagacgac

SEQ ID NO: 189524 - RNA, 19 nt, Artificial Sequence
  Description of Artificial Sequence: Synthetic oligonucleotide
cguuuggucucgaggcacg

SEQ ID NO: 189525 - RNA, 19 nt, Artificial Sequence
  Description of Artificial Sequence: Synthetic oligonucleotide
cgaggcacgauaacuucug

SEQ ID NO: 189526 - RNA, 19 nt, Artificial Sequence
  Description of Artificial Sequence: Synthetic oligonucleotide
augguucucucaggguuau

SEQ ID NO: 189527 - RNA, 19 nt, Artificial Sequence
  Description of Artificial Sequence: Synthetic oligonucleotide
gguucucucaggguuauau

SEQ ID NO: 189528 - RNA, 19 nt, Artificial Sequence
  Description of Artificial Sequence: Synthetic oligonucleotide
caguggcuucuuacauaac

SEQ ID NO: 189529 - RNA, 19 nt, Artificial Sequence
  Description of Artificial Sequence: Synthetic oligonucleotide
cuggagcuaucuugaugga

SEQ ID NO: 189530 - RNA, 19 nt, Artificial Sequence
  Description of Artificial Sequence: Synthetic oligonucleotide
aagcacggacaguccuguu

SEQ ID NO: 189531 - RNA, 19 nt, Artificial Sequence
  Description of Artificial Sequence: Synthetic oligonucleotide
uugcgcugugcggucuggc

SEQ ID NO: 189532 - RNA, 19 nt, Artificial Sequence
  Description of Artificial Sequence: Synthetic oligonucleotide
auuuaacgcccugggccaa

SEQ ID NO: 189533 - RNA, 19 nt, Artificial Sequence
  Description of Artificial Sequence: Synthetic oligonucleotide
caauaaucucucuguguuu

SEQ ID NO: 189534 - RNA, 19 nt, Artificial Sequence
  Description of Artificial Sequence: Synthetic oligonucleotide
cugagccuugaacugggcu

SEQ ID NO: 189535 - RNA, 19 nt, Artificial Sequence
  Description of Artificial Sequence: Synthetic oligonucleotide
gacgaucacuuccgcauuu

SEQ ID NO: 189536 - RNA, 19 nt, Artificial Sequence
  Description of Artificial Sequence: Synthetic oligonucleotide
cuggggaaccaggcccucc

SEQ ID NO: 189537 - RNA, 19 nt, Artificial Sequence
  Description of Artificial Sequence: Synthetic oligonucleotide
ggcacguacccuauugaaa

SEQ ID NO: 189538 - RNA, 19 nt, Artificial Sequence
  Description of Artificial Sequence: Synthetic oligonucleotide
gaugugggaaugggccgaa

SEQ ID NO: 189539 - RNA, 19 nt, Artificial Sequence
  Description of Artificial Sequence: Synthetic oligonucleotide
caaugguacccuucaccgu

SEQ ID NO: 189540 - RNA, 19 nt, Artificial Sequence
  Description of Artificial Sequence: Synthetic oligonucleotide
guuuggucucgaggcacga

SEQ ID NO: 189541 - RNA, 19 nt, Artificial Sequence
  Description of Artificial Sequence: Synthetic oligonucleotide
ccuuguauaaauugcuauu

SEQ ID NO: 189542 - RNA, 19 nt, Artificial Sequence
  Description of Artificial Sequence: Synthetic oligonucleotide
ggacggcuccaauaaucuc

SEQ ID NO: 189543 - RNA, 19 nt, Artificial Sequence
  Description of Artificial Sequence: Synthetic oligonucleotide
agcaaggugcugagguaaa

SEQ ID NO: 189544 - RNA, 19 nt, Artificial Sequence
  Description of Artificial Sequence: Synthetic oligonucleotide
acguguugggaaggcuaca

SEQ ID NO: 189545 - RNA, 19 nt, Artificial Sequence
  Description of Artificial Sequence: Synthetic oligonucleotide
ggcguuuggucucgaggca

SEQ ID NO: 189546 - RNA, 19 nt, Artificial Sequence
  Description of Artificial Sequence: Synthetic oligonucleotide
cuaaaugcugauggcuuau

SEQ ID NO: 189547 - RNA, 19 nt, Artificial Sequence
  Description of Artificial Sequence: Synthetic oligonucleotide
cacgauaacuucugcgcuu

SEQ ID NO: 189548 - RNA, 19 nt, Artificial Sequence
  Description of Artificial Sequence: Synthetic oligonucleotide
gcacgauaacuucugcgcu

SEQ ID NO: 189549 - RNA, 19 nt, Artificial Sequence
  Description of Artificial Sequence: Synthetic oligonucleotide
ccucgaaguguccuugaca

SEQ ID NO: 189550 - RNA, 19 nt, Artificial Sequence
  Description of Artificial Sequence: Synthetic oligonucleotide
gggacgguaucccuucugu

SEQ ID NO: 189551 - RNA, 19 nt, Artificial Sequence
  Description of Artificial Sequence: Synthetic oligonucleotide
aucuugcgcugugcggucu

SEQ ID NO: 189552 - RNA, 19 nt, Artificial Sequence
  Description of Artificial Sequence: Synthetic oligonucleotide
ugccgaucacccggccagc

SEQ ID NO: 189553 - RNA, 19 nt, Artificial Sequence
  Description of Artificial Sequence: Synthetic oligonucleotide
aucaugcggcaugccucag

SEQ ID NO: 189554 - RNA, 19 nt, Artificial Sequence
  Description of Artificial Sequence: Synthetic oligonucleotide
gccucgaaguguccuugac

SEQ ID NO: 189555 - RNA, 19 nt, Artificial Sequence
  Description of Artificial Sequence: Synthetic oligonucleotide
uagcgccaugggagcugag

SEQ ID NO: 189556 - RNA, 19 nt, Artificial Sequence
  Description of Artificial Sequence: Synthetic oligonucleotide
ggccaacaaccuuguauaa

SEQ ID NO: 189557 - RNA, 19 nt, Artificial Sequence
  Description of Artificial Sequence: Synthetic oligonucleotide
gcguuuggucucgaggcac

SEQ ID NO: 189558 - RNA, 19 nt, Artificial Sequence
  Description of Artificial Sequence: Synthetic oligonucleotide
gcggaagacgggucagcac

SEQ ID NO: 189559 - RNA, 19 nt, Artificial Sequence
  Description of Artificial Sequence: Synthetic oligonucleotide
guguuucgaguuuguuccu

SEQ ID NO: 189560 - RNA, 19 nt, Artificial Sequence
  Description of Artificial Sequence: Synthetic oligonucleotide
ggaugggcaguagauggcu

SEQ ID NO: 189561 - RNA, 19 nt, Artificial Sequence
  Description of Artificial Sequence: Synthetic oligonucleotide
gaagacgggucagcacagu

SEQ ID NO: 189562 - RNA, 19 nt, Artificial Sequence
  Description of Artificial Sequence: Synthetic oligonucleotide
acggggcccugcuggugga

SEQ ID NO: 189563 - RNA, 19 nt, Artificial Sequence
  Description of Artificial Sequence: Synthetic oligonucleotide
gacgacucccugaggguau

SEQ ID NO: 189564 - RNA, 19 nt, Artificial Sequence
  Description of Artificial Sequence: Synthetic oligonucleotide
cucauggcacguacccuau

SEQ ID NO: 189565 - RNA, 19 nt, Artificial Sequence
  Description of Artificial Sequence: Synthetic oligonucleotide
cauugugggcuaagauuuu

SEQ ID NO: 189566 - RNA, 19 nt, Artificial Sequence
  Description of Artificial Sequence: Synthetic oligonucleotide
cguaggcucuuggcuagcg

SEQ ID NO: 189567 - RNA, 19 nt, Artificial Sequence
  Description of Artificial Sequence: Synthetic oligonucleotide
gucacguguugggaaggcu

SEQ ID NO: 189568 - RNA, 19 nt, Artificial Sequence
  Description of Artificial Sequence: Synthetic oligonucleotide
cucucauggcacguacccu

SEQ ID NO: 189569 - RNA, 19 nt, Artificial Sequence
  Description of Artificial Sequence: Synthetic oligonucleotide
cgcuugaguaaccaagugu

SEQ ID NO: 189570 - RNA, 19 nt, Artificial Sequence
  Description of Artificial Sequence: Synthetic oligonucleotide
cacguacccuauugaaauu

SEQ ID NO: 189571 - RNA, 19 nt, Artificial Sequence
  Description of Artificial Sequence: Synthetic oligonucleotide
gggcaguagauggcuguga

SEQ ID NO: 189572 - RNA, 19 nt, Artificial Sequence
  Description of Artificial Sequence: Synthetic oligonucleotide
cuucaccgugaugguucuc

SEQ ID NO: 189573 - RNA, 19 nt, Artificial Sequence
  Description of Artificial Sequence: Synthetic oligonucleotide
ccgcauuuucaucuggcgu

SEQ ID NO: 189574 - RNA, 19 nt, Artificial Sequence
  Description of Artificial Sequence: Synthetic oligonucleotide
acgggucagcacaguugcu

SEQ ID NO: 189575 - RNA, 19 nt, Artificial Sequence
  Description of Artificial Sequence: Synthetic oligonucleotide
gacccacaacugccucgaa

SEQ ID NO: 189576 - RNA, 19 nt, Artificial Sequence
  Description of Artificial Sequence: Synthetic oligonucleotide
ccgaucacccggccagcug

SEQ ID NO: 189577 - RNA, 19 nt, Artificial Sequence
  Description of Artificial Sequence: Synthetic oligonucleotide
ugguucucucaggguuaua

SEQ ID NO: 189578 - RNA, 19 nt, Artificial Sequence
  Description of Artificial Sequence: Synthetic oligonucleotide
gggaacccggaugugggcu

SEQ ID NO: 189579 - RNA, 19 nt, Artificial Sequence
  Description of Artificial Sequence: Synthetic oligonucleotide
gauuucccuccaagugaau

SEQ ID NO: 189580 - RNA, 19 nt, Artificial Sequence
  Description of Artificial Sequence: Synthetic oligonucleotide
augugggaaugggccgaaa

SEQ ID NO: 189581 - RNA, 19 nt, Artificial Sequence
  Description of Artificial Sequence: Synthetic oligonucleotide
acgacucccugaggguauu

SEQ ID NO: 189582 - RNA, 19 nt, Artificial Sequence
  Description of Artificial Sequence: Synthetic oligonucleotide
caaaucgagccagcuguuu

SEQ ID NO: 189583 - RNA, 19 nt, Artificial Sequence
  Description of Artificial Sequence: Synthetic oligonucleotide
ggcuagcggaagacggguc

SEQ ID NO: 189584 - RNA, 19 nt, Artificial Sequence
  Description of Artificial Sequence: Synthetic oligonucleotide
ccgacucuuguucgcuuga

SEQ ID NO: 189585 - RNA, 19 nt, Artificial Sequence
  Description of Artificial Sequence: Synthetic oligonucleotide
cgacucuuguucgcuugag

SEQ ID NO: 189586 - RNA, 19 nt, Artificial Sequence
  Description of Artificial Sequence: Synthetic oligonucleotide
ccccuucuaauauguacau

SEQ ID NO: 189587 - RNA, 19 nt, Artificial Sequence
  Description of Artificial Sequence: Synthetic oligonucleotide
cuucugcgcuugucaaguu

SEQ ID NO: 189588 - RNA, 19 nt, Artificial Sequence
  Description of Artificial Sequence: Synthetic oligonucleotide
cacccggccagcugucgau

SEQ ID NO: 189589 - RNA, 19 nt, Artificial Sequence
  Description of Artificial Sequence: Synthetic oligonucleotide
ccgaaauggugaugagggu

SEQ ID NO: 189590 - RNA, 19 nt, Artificial Sequence
  Description of Artificial Sequence: Synthetic oligonucleotide
gcugcgcugugagacgacu

SEQ ID NO: 189591 - RNA, 19 nt, Artificial Sequence
  Description of Artificial Sequence: Synthetic oligonucleotide
cccggccagcugucgauga

SEQ ID NO: 189592 - RNA, 19 nt, Artificial Sequence
  Description of Artificial Sequence: Synthetic oligonucleotide
gcaaaucgagccagcuguu

SEQ ID NO: 189593 - RNA, 19 nt, Artificial Sequence
  Description of Artificial Sequence: Synthetic oligonucleotide
gcccgauaauucugacgau

SEQ ID NO: 189594 - RNA, 19 nt, Artificial Sequence
  Description of Artificial Sequence: Synthetic oligonucleotide
ggguggcucaaaguuccuu

SEQ ID NO: 189595 - RNA, 19 nt, Artificial Sequence
  Description of Artificial Sequence: Synthetic oligonucleotide
cgcugugagacgacucccu

SEQ ID NO: 189596 - RNA, 19 nt, Artificial Sequence
  Description of Artificial Sequence: Synthetic oligonucleotide
cguguugggaaggcuacau

SEQ ID NO: 189597 - RNA, 19 nt, Artificial Sequence
  Description of Artificial Sequence: Synthetic oligonucleotide
gcagcucguuuacgguuuu

SEQ ID NO: 189598 - RNA, 19 nt, Artificial Sequence
  Description of Artificial Sequence: Synthetic oligonucleotide
gcguuggcacaagcaucaa

SEQ ID NO: 189599 - RNA, 19 nt, Artificial Sequence
  Description of Artificial Sequence: Synthetic oligonucleotide
gccgaucacccggccagcu

SEQ ID NO: 189600 - RNA, 19 nt, Artificial Sequence
  Description of Artificial Sequence: Synthetic oligonucleotide
ggcuagcgaagggguggua

SEQ ID NO: 189601 - RNA, 19 nt, Artificial Sequence
  Description of Artificial Sequence: Synthetic oligonucleotide
cgauaacuucugcgcuugu

SEQ ID NO: 189602 - RNA, 19 nt, Artificial Sequence
  Description of Artificial Sequence: Synthetic oligonucleotide
cccgaucugcuggcuguuu

SEQ ID NO: 189603 - RNA, 19 nt, Artificial Sequence
  Description of Artificial Sequence: Synthetic oligonucleotide
aauucuauaauacaggaga

SEQ ID NO: 189604 - RNA, 19 nt, Artificial Sequence
  Description of Artificial Sequence: Synthetic oligonucleotide
agauauauaucuuaugucg

SEQ ID NO: 189605 - RNA, 19 nt, Artificial Sequence
  Description of Artificial Sequence: Synthetic oligonucleotide
uguacuacuauguaaauca

SEQ ID NO: 189606 - RNA, 19 nt, Artificial Sequence
  Description of Artificial Sequence: Synthetic oligonucleotide
uauuagaugguauaaauga

SEQ ID NO: 189607 - RNA, 19 nt, Artificial Sequence
  Description of Artificial Sequence: Synthetic oligonucleotide
aaaauucuauaauacagga

SEQ ID NO: 189608 - RNA, 19 nt, Artificial Sequence
  Description of Artificial Sequence: Synthetic oligonucleotide
acaacgguuacuucuaggc

SEQ ID NO: 189609 - RNA, 19 nt, Artificial Sequence
  Description of Artificial Sequence: Synthetic oligonucleotide
acugguagcauguaugccc

SEQ ID NO: 189610 - RNA, 19 nt, Artificial Sequence
  Description of Artificial Sequence: Synthetic oligonucleotide
aaaccaaucuaugacgggc

SEQ ID NO: 189611 - RNA, 19 nt, Artificial Sequence
  Description of Artificial Sequence: Synthetic oligonucleotide
cuagauauagcauuuauca

SEQ ID NO: 189612 - RNA, 19 nt, Artificial Sequence
  Description of Artificial Sequence: Synthetic oligonucleotide
ugaccuaauacucuagaag

SEQ ID NO: 189613 - RNA, 19 nt, Artificial Sequence
  Description of Artificial Sequence: Synthetic oligonucleotide
aacuaagucuguccaaagg

SEQ ID NO: 189614 - RNA, 19 nt, Artificial Sequence
  Description of Artificial Sequence: Synthetic oligonucleotide
aaccaaacaucuuaccgag

SEQ ID NO: 189615 - RNA, 19 nt, Artificial Sequence
  Description of Artificial Sequence: Synthetic oligonucleotide
auagccauagacuggcggc

SEQ ID NO: 189616 - RNA, 19 nt, Artificial Sequence
  Description of Artificial Sequence: Synthetic oligonucleotide
guugcaagauuguacaagg

SEQ ID NO: 189617 - RNA, 19 nt, Artificial Sequence
  Description of Artificial Sequence: Synthetic oligonucleotide
uuuaucacacagcaagggc

SEQ ID NO: 189618 - RNA, 19 nt, Artificial Sequence
  Description of Artificial Sequence: Synthetic oligonucleotide
aucacuugaggucuaaaag

SEQ ID NO: 189619 - RNA, 19 nt, Artificial Sequence
  Description of Artificial Sequence: Synthetic oligonucleotide
acauuaagcacaauacagc

SEQ ID NO: 189620 - RNA, 19 nt, Artificial Sequence
  Description of Artificial Sequence: Synthetic oligonucleotide
aaaaccaaucuaugacggg

SEQ ID NO: 189621 - RNA, 19 nt, Artificial Sequence
  Description of Artificial Sequence: Synthetic oligonucleotide
acaauuguaaugucaagga

SEQ ID NO: 189622 - RNA, 19 nt, Artificial Sequence
  Description of Artificial Sequence: Synthetic oligonucleotide
auauaucuuaugucgcugg

SEQ ID NO: 189623 - RNA, 19 nt, Artificial Sequence
  Description of Artificial Sequence: Synthetic oligonucleotide
ucacuugaggucuaaaaga

SEQ ID NO: 189624 - RNA, 19 nt, Artificial Sequence
  Description of Artificial Sequence: Synthetic oligonucleotide
augacgggcacacaguaac

SEQ ID NO: 189625 - RNA, 19 nt, Artificial Sequence
  Description of Artificial Sequence: Synthetic oligonucleotide
uucgugugcccaaucaugg

SEQ ID NO: 189626 - RNA, 19 nt, Artificial Sequence
  Description of Artificial Sequence: Synthetic oligonucleotide
acuaagucuguccaaaggu

SEQ ID NO: 189627 - RNA, 19 nt, Artificial Sequence
  Description of Artificial Sequence: Synthetic oligonucleotide
ucacaugucauagacuuag

SEQ ID NO: 189628 - RNA, 19 nt, Artificial Sequence
  Description of Artificial Sequence: Synthetic oligonucleotide
uaucuuaugucgcuggccu

SEQ ID NO: 189629 - RNA, 19 nt, Artificial Sequence
  Description of Artificial Sequence: Synthetic oligonucleotide
guagcuguaaaaucaauuc

SEQ ID NO: 189630 - RNA, 19 nt, Artificial Sequence
  Description of Artificial Sequence: Synthetic oligonucleotide
aauuuuaggcucaacuuca

SEQ ID NO: 189631 - RNA, 19 nt, Artificial Sequence
  Description of Artificial Sequence: Synthetic oligonucleotide
cauacuacaacaguguguc

SEQ ID NO: 189632 - RNA, 19 nt, Artificial Sequence
  Description of Artificial Sequence: Synthetic oligonucleotide
ucaccaucugcugugacgg

SEQ ID NO: 189633 - RNA, 19 nt, Artificial Sequence
  Description of Artificial Sequence: Synthetic oligonucleotide
cauaggaccucccauuucc

SEQ ID NO: 189634 - RNA, 19 nt, Artificial Sequence
  Description of Artificial Sequence: Synthetic oligonucleotide
guaaugaacugcuuuuccc

SEQ ID NO: 189635 - RNA, 19 nt, Artificial Sequence
  Description of Artificial Sequence: Synthetic oligonucleotide
uguuacugaaaugggaagc

SEQ ID NO: 189636 - RNA, 19 nt, Artificial Sequence
  Description of Artificial Sequence: Synthetic oligonucleotide
aaccaaucacaugucauag

SEQ ID NO: 189637 - RNA, 19 nt, Artificial Sequence
  Description of Artificial Sequence: Synthetic oligonucleotide
uacauacuacaacagugug

SEQ ID NO: 189638 - RNA, 19 nt, Artificial Sequence
  Description of Artificial Sequence: Synthetic oligonucleotide
uuagcuuaaaaggucucag

SEQ ID NO: 189639 - RNA, 19 nt, Artificial Sequence
  Description of Artificial Sequence: Synthetic oligonucleotide
uggccuacagauuugacuc

SEQ ID NO: 189640 - RNA, 19 nt, Artificial Sequence
  Description of Artificial Sequence: Synthetic oligonucleotide
acucaacugcgcuugcugc

SEQ ID NO: 189641 - RNA, 19 nt, Artificial Sequence
  Description of Artificial Sequence: Synthetic oligonucleotide
aaguccgagaucuguuggg

SEQ ID NO: 189642 - RNA, 19 nt, Artificial Sequence
  Description of Artificial Sequence: Synthetic oligonucleotide
aacgguuacuucuaggcuu

SEQ ID NO: 189643 - RNA, 19 nt, Artificial Sequence
  Description of Artificial Sequence: Synthetic oligonucleotide
uacuuuagcuuaaaagguc

SEQ ID NO: 189644 - RNA, 19 nt, Artificial Sequence
  Description of Artificial Sequence: Synthetic oligonucleotide
acuagcauugacucuugag

SEQ ID NO: 189645 - RNA, 19 nt, Artificial Sequence
  Description of Artificial Sequence: Synthetic oligonucleotide
uauaucuuaugucgcuggc

SEQ ID NO: 189646 - RNA, 19 nt, Artificial Sequence
  Description of Artificial Sequence: Synthetic oligonucleotide
agcaaugucacucuuccau

SEQ ID NO: 189647 - RNA, 19 nt, Artificial Sequence
  Description of Artificial Sequence: Synthetic oligonucleotide
caaagguccauacuaucgc

SEQ ID NO: 189648 - RNA, 19 nt, Artificial Sequence
  Description of Artificial Sequence: Synthetic oligonucleotide
cagauauauaucuuauguc

SEQ ID NO: 189649 - RNA, 19 nt, Artificial Sequence
  Description of Artificial Sequence: Synthetic oligonucleotide
aaacaucuuaccgagggaa

SEQ ID NO: 189650 - RNA, 19 nt, Artificial Sequence
  Description of Artificial Sequence: Synthetic oligonucleotide
caacuauucagaaugaaua

SEQ ID NO: 189651 - RNA, 19 nt, Artificial Sequence
  Description of Artificial Sequence: Synthetic oligonucleotide
ugacugguagcauguaugc

SEQ ID NO: 189652 - RNA, 19 nt, Artificial Sequence
  Description of Artificial Sequence: Synthetic oligonucleotide
uuaccuucgguacaugcuc

SEQ ID NO: 189653 - RNA, 19 nt, Artificial Sequence
  Description of Artificial Sequence: Synthetic oligonucleotide
uaaacaacgguuacuucua

SEQ ID NO: 189654 - RNA, 19 nt, Artificial Sequence
  Description of Artificial Sequence: Synthetic oligonucleotide
ucuauaguggucacauguc

SEQ ID NO: 189655 - RNA, 19 nt, Artificial Sequence
  Description of Artificial Sequence: Synthetic oligonucleotide
aacaacauucgugugccca

SEQ ID NO: 189656 - RNA, 19 nt, Artificial Sequence
  Description of Artificial Sequence: Synthetic oligonucleotide
ugcaaggaguaccuggcug

SEQ ID NO: 189657 - RNA, 19 nt, Artificial Sequence
  Description of Artificial Sequence: Synthetic oligonucleotide
cugacugguagcauguaug

SEQ ID NO: 189658 - RNA, 19 nt, Artificial Sequence
  Description of Artificial Sequence: Synthetic oligonucleotide
gacccuuggggucuaaagc

SEQ ID NO: 189659 - RNA, 19 nt, Artificial Sequence
  Description of Artificial Sequence: Synthetic oligonucleotide
aacauucgugugcccaauc

SEQ ID NO: 189660 - RNA, 19 nt, Artificial Sequence
  Description of Artificial Sequence: Synthetic oligonucleotide
caggaauuaccuucgguac

SEQ ID NO: 189661 - RNA, 19 nt, Artificial Sequence
  Description of Artificial Sequence: Synthetic oligonucleotide
uuggucuaguuucucagaa

SEQ ID NO: 189662 - RNA, 19 nt, Artificial Sequence
  Description of Artificial Sequence: Synthetic oligonucleotide
ugacaauuguaaugucaag

SEQ ID NO: 189663 - RNA, 19 nt, Artificial Sequence
  Description of Artificial Sequence: Synthetic oligonucleotide
auucuauaauacaggagag

SEQ ID NO: 189664 - RNA, 19 nt, Artificial Sequence
  Description of Artificial Sequence: Synthetic oligonucleotide
uguaugcccgcccuguacu

SEQ ID NO: 189665 - RNA, 19 nt, Artificial Sequence
  Description of Artificial Sequence: Synthetic oligonucleotide
ggcgcgaucagcaucaagg

SEQ ID NO: 189666 - RNA, 19 nt, Artificial Sequence
  Description of Artificial Sequence: Synthetic oligonucleotide
aaugucaaggauacucaga

SEQ ID NO: 189667 - RNA, 19 nt, Artificial Sequence
  Description of Artificial Sequence: Synthetic oligonucleotide
ucacggacacacuucuucc

SEQ ID NO: 189668 - RNA, 19 nt, Artificial Sequence
  Description of Artificial Sequence: Synthetic oligonucleotide
caaucuaugacgggcacac

SEQ ID NO: 189669 - RNA, 19 nt, Artificial Sequence
  Description of Artificial Sequence: Synthetic oligonucleotide
uugguaagcgcucugcauu

SEQ ID NO: 189670 - RNA, 19 nt, Artificial Sequence
  Description of Artificial Sequence: Synthetic oligonucleotide
agucuuacuagcauugacu

SEQ ID NO: 189671 - RNA, 19 nt, Artificial Sequence
  Description of Artificial Sequence: Synthetic oligonucleotide
gucuacuagacacaccuga

SEQ ID NO: 189672 - RNA, 19 nt, Artificial Sequence
  Description of Artificial Sequence: Synthetic oligonucleotide
auguaugcccgcccuguac

SEQ ID NO: 189673 - RNA, 19 nt, Artificial Sequence
  Description of Artificial Sequence: Synthetic oligonucleotide
uaauuugguugguuccuca

SEQ ID NO: 189674 - RNA, 19 nt, Artificial Sequence
  Description of Artificial Sequence: Synthetic oligonucleotide
uauugacagucgauucacc

SEQ ID NO: 189675 - RNA, 19 nt, Artificial Sequence
  Description of Artificial Sequence: Synthetic oligonucleotide
ugguauugacagucgauuc

SEQ ID NO: 189676 - RNA, 19 nt, Artificial Sequence
  Description of Artificial Sequence: Synthetic oligonucleotide
caaaguccgagaucuguug

SEQ ID NO: 189677 - RNA, 19 nt, Artificial Sequence
  Description of Artificial Sequence: Synthetic oligonucleotide
cuagaagccugugacuggg

SEQ ID NO: 189678 - RNA, 19 nt, Artificial Sequence
  Description of Artificial Sequence: Synthetic oligonucleotide
uccauacuaucgcaggguc

SEQ ID NO: 189679 - RNA, 19 nt, Artificial Sequence
  Description of Artificial Sequence: Synthetic oligonucleotide
aguuaagcugccaugcaug

SEQ ID NO: 189680 - RNA, 19 nt, Artificial Sequence
  Description of Artificial Sequence: Synthetic oligonucleotide
ucuuacuagcauugacucu

SEQ ID NO: 189681 - RNA, 19 nt, Artificial Sequence
  Description of Artificial Sequence: Synthetic oligonucleotide
acuaucgcagggucaagcu

SEQ ID NO: 189682 - RNA, 19 nt, Artificial Sequence
  Description of Artificial Sequence: Synthetic oligonucleotide
gcaucaaggguuuggcucg

SEQ ID NO: 189683 - RNA, 19 nt, Artificial Sequence
  Description of Artificial Sequence: Synthetic oligonucleotide
acauucgugugcccaauca

SEQ ID NO: 189684 - RNA, 19 nt, Artificial Sequence
  Description of Artificial Sequence: Synthetic oligonucleotide
cugaguuuaaguuaggcuu

SEQ ID NO: 189685 - RNA, 19 nt, Artificial Sequence
  Description of Artificial Sequence: Synthetic oligonucleotide
cauuacugagucuaccaga

SEQ ID NO: 189686 - RNA, 19 nt, Artificial Sequence
  Description of Artificial Sequence: Synthetic oligonucleotide
ugugacggcaaagaccgga

SEQ ID NO: 189687 - RNA, 19 nt, Artificial Sequence
  Description of Artificial Sequence: Synthetic oligonucleotide
uaguccauaggaccuccca

SEQ ID NO: 189688 - RNA, 19 nt, Artificial Sequence
  Description of Artificial Sequence: Synthetic oligonucleotide
ugggaagacucaucagacc

SEQ ID NO: 189689 - RNA, 19 nt, Artificial Sequence
  Description of Artificial Sequence: Synthetic oligonucleotide
ucuuaugucgcuggccucu

SEQ ID NO: 189690 - RNA, 19 nt, Artificial Sequence
  Description of Artificial Sequence: Synthetic oligonucleotide
cuucucgucaugauuuuca

SEQ ID NO: 189691 - RNA, 19 nt, Artificial Sequence
  Description of Artificial Sequence: Synthetic oligonucleotide
cuggccaacaccguaacuc

SEQ ID NO: 189692 - RNA, 19 nt, Artificial Sequence
  Description of Artificial Sequence: Synthetic oligonucleotide
ugugucuucuugcaccgua

SEQ ID NO: 189693 - RNA, 19 nt, Artificial Sequence
  Description of Artificial Sequence: Synthetic oligonucleotide
uguugacuccugcugaguu

SEQ ID NO: 189694 - RNA, 19 nt, Artificial Sequence
  Description of Artificial Sequence: Synthetic oligonucleotide
ugguugguuccucagucaa

SEQ ID NO: 189695 - RNA, 19 nt, Artificial Sequence
  Description of Artificial Sequence: Synthetic oligonucleotide
uaccuucgguacaugcucc

SEQ ID NO: 189696 - RNA, 19 nt, Artificial Sequence
  Description of Artificial Sequence: Synthetic oligonucleotide
uacuaucgcagggucaagc

SEQ ID NO: 189697 - RNA, 19 nt, Artificial Sequence
  Description of Artificial Sequence: Synthetic oligonucleotide
cuuucauguuaaagccuag

SEQ ID NO: 189698 - RNA, 19 nt, Artificial Sequence
  Description of Artificial Sequence: Synthetic oligonucleotide
auuagaugguauaaaugaa

SEQ ID NO: 189699 - RNA, 19 nt, Artificial Sequence
  Description of Artificial Sequence: Synthetic oligonucleotide
ucaucagaccagguucccg

SEQ ID NO: 189700 - RNA, 19 nt, Artificial Sequence
  Description of Artificial Sequence: Synthetic oligonucleotide
uuacuagcauugacucuug

SEQ ID NO: 189701 - RNA, 19 nt, Artificial Sequence
  Description of Artificial Sequence: Synthetic oligonucleotide
ugacuggccaacaccguaa

SEQ ID NO: 189702 - RNA, 19 nt, Artificial Sequence
  Description of Artificial Sequence: Synthetic oligonucleotide
auuaccuucgguacaugcu

SEQ ID NO: 189703 - RNA, 19 nt, Artificial Sequence
  Description of Artificial Sequence: Synthetic oligonucleotide
aguagcuguaaaaucaauu

SEQ ID NO: 189704 - RNA, 19 nt, Artificial Sequence
  Description of Artificial Sequence: Synthetic oligonucleotide
uggccaacaccguaacucu

SEQ ID NO: 189705 - RNA, 19 nt, Artificial Sequence
  Description of Artificial Sequence: Synthetic oligonucleotide
acauacuacaacagugugu

SEQ ID NO: 189706 - RNA, 19 nt, Artificial Sequence
  Description of Artificial Sequence: Synthetic oligonucleotide
cauuggacaucauguugac

SEQ ID NO: 189707 - RNA, 19 nt, Artificial Sequence
  Description of Artificial Sequence: Synthetic oligonucleotide
caacauggcccaugugccg

SEQ ID NO: 189708 - RNA, 19 nt, Artificial Sequence
  Description of Artificial Sequence: Synthetic oligonucleotide
guagcauguaugcccgccc

SEQ ID NO: 189709 - RNA, 19 nt, Artificial Sequence
  Description of Artificial Sequence: Synthetic oligonucleotide
aucuuaugucgcuggccuc

SEQ ID NO: 189710 - RNA, 19 nt, Artificial Sequence
  Description of Artificial Sequence: Synthetic oligonucleotide
agucuaccagagaaggguc

SEQ ID NO: 189711 - RNA, 19 nt, Artificial Sequence
  Description of Artificial Sequence: Synthetic oligonucleotide
guacuacuauguaaaucag

SEQ ID NO: 189712 - RNA, 19 nt, Artificial Sequence
  Description of Artificial Sequence: Synthetic oligonucleotide
uagcauguaugcccgcccu

SEQ ID NO: 189713 - RNA, 19 nt, Artificial Sequence
  Description of Artificial Sequence: Synthetic oligonucleotide
uucucgucaugauuuucaa

SEQ ID NO: 189714 - RNA, 19 nt, Artificial Sequence
  Description of Artificial Sequence: Synthetic oligonucleotide
ucgucaugauuuucaaaua

SEQ ID NO: 189715 - RNA, 19 nt, Artificial Sequence
  Description of Artificial Sequence: Synthetic oligonucleotide
aguccauaggaccucccau

SEQ ID NO: 189716 - RNA, 19 nt, Artificial Sequence
  Description of Artificial Sequence: Synthetic oligonucleotide
acuacaacagugugucaua

SEQ ID NO: 189717 - RNA, 19 nt, Artificial Sequence
  Description of Artificial Sequence: Synthetic oligonucleotide
accaaucacaugucauaga

SEQ ID NO: 189718 - RNA, 19 nt, Artificial Sequence
  Description of Artificial Sequence: Synthetic oligonucleotide
gagucuaccagagaagggu

SEQ ID NO: 189719 - RNA, 19 nt, Artificial Sequence
  Description of Artificial Sequence: Synthetic oligonucleotide
cacucaacugcgcuugcug

SEQ ID NO: 189720 - RNA, 19 nt, Artificial Sequence
  Description of Artificial Sequence: Synthetic oligonucleotide
gggucuaaagcuaaacaac

SEQ ID NO: 189721 - RNA, 19 nt, Artificial Sequence
  Description of Artificial Sequence: Synthetic oligonucleotide
gaugcaacauggcccaugu

SEQ ID NO: 189722 - RNA, 19 nt, Artificial Sequence
  Description of Artificial Sequence: Synthetic oligonucleotide
cuccaguuaagcugccaug

SEQ ID NO: 189723 - RNA, 19 nt, Artificial Sequence
  Description of Artificial Sequence: Synthetic oligonucleotide
acgguuacuucuaggcuuc

SEQ ID NO: 189724 - RNA, 19 nt, Artificial Sequence
  Description of Artificial Sequence: Synthetic oligonucleotide
augaauacacccggcggug

SEQ ID NO: 189725 - RNA, 19 nt, Artificial Sequence
  Description of Artificial Sequence: Synthetic oligonucleotide
ugacgggcacacaguaaca

SEQ ID NO: 189726 - RNA, 19 nt, Artificial Sequence
  Description of Artificial Sequence: Synthetic oligonucleotide
ggagcauugccaccuagac

SEQ ID NO: 189727 - RNA, 19 nt, Artificial Sequence
  Description of Artificial Sequence: Synthetic oligonucleotide
uucccgucuucauuucaca

SEQ ID NO: 189728 - RNA, 19 nt, Artificial Sequence
  Description of Artificial Sequence: Synthetic oligonucleotide
ugacggcaaagaccggaca

SEQ ID NO: 189729 - RNA, 19 nt, Artificial Sequence
  Description of Artificial Sequence: Synthetic oligonucleotide
aggcaucaugcauuaauuu

SEQ ID NO: 189730 - RNA, 19 nt, Artificial Sequence
  Description of Artificial Sequence: Synthetic oligonucleotide
cauacuaucgcagggucaa

SEQ ID NO: 189731 - RNA, 19 nt, Artificial Sequence
  Description of Artificial Sequence: Synthetic oligonucleotide
aacaucuuaccgagggaaa

SEQ ID NO: 189732 - RNA, 19 nt, Artificial Sequence
  Description of Artificial Sequence: Synthetic oligonucleotide
ugcauucaugagccaccag

SEQ ID NO: 189733 - RNA, 19 nt, Artificial Sequence
  Description of Artificial Sequence: Synthetic oligonucleotide
caaccaaucacaugucaua

SEQ ID NO: 189734 - RNA, 19 nt, Artificial Sequence
  Description of Artificial Sequence: Synthetic oligonucleotide
uacuagcauugacucuuga

SEQ ID NO: 189735 - RNA, 19 nt, Artificial Sequence
  Description of Artificial Sequence: Synthetic oligonucleotide
caacaccguaacucuggcc

SEQ ID NO: 189736 - RNA, 19 nt, Artificial Sequence
  Description of Artificial Sequence: Synthetic oligonucleotide
ucccgucuucauuucacaa

SEQ ID NO: 189737 - RNA, 19 nt, Artificial Sequence
  Description of Artificial Sequence: Synthetic oligonucleotide
auacaggagaguccagaua

SEQ ID NO: 189738 - RNA, 19 nt, Artificial Sequence
  Description of Artificial Sequence: Synthetic oligonucleotide
aggauacucagaacaagaa

SEQ ID NO: 189739 - RNA, 19 nt, Artificial Sequence
  Description of Artificial Sequence: Synthetic oligonucleotide
gaguaccuggcugcugccg

SEQ ID NO: 189740 - RNA, 19 nt, Artificial Sequence
  Description of Artificial Sequence: Synthetic oligonucleotide
uacaacagugugucauaua

SEQ ID NO: 189741 - RNA, 19 nt, Artificial Sequence
  Description of Artificial Sequence: Synthetic oligonucleotide
ugggauagggcuguuuguu

SEQ ID NO: 189742 - RNA, 19 nt, Artificial Sequence
  Description of Artificial Sequence: Synthetic oligonucleotide
agcaagggcaacacuaaaa

SEQ ID NO: 189743 - RNA, 19 nt, Artificial Sequence
  Description of Artificial Sequence: Synthetic oligonucleotide
cuugggcgcgaucagcauc

SEQ ID NO: 189744 - RNA, 19 nt, Artificial Sequence
  Description of Artificial Sequence: Synthetic oligonucleotide
cacuccauuacugagucua

SEQ ID NO: 189745 - RNA, 19 nt, Artificial Sequence
  Description of Artificial Sequence: Synthetic oligonucleotide
cuaguccauaggaccuccc

SEQ ID NO: 189746 - RNA, 19 nt, Artificial Sequence
  Description of Artificial Sequence: Synthetic oligonucleotide
ccauuacugagucuaccag

SEQ ID NO: 189747 - RNA, 19 nt, Artificial Sequence
  Description of Artificial Sequence: Synthetic oligonucleotide
gaugcuggaaaggcaagua

SEQ ID NO: 189748 - RNA, 19 nt, Artificial Sequence
  Description of Artificial Sequence: Synthetic oligonucleotide
augcaugggaucagcaacu

SEQ ID NO: 189749 - RNA, 19 nt, Artificial Sequence
  Description of Artificial Sequence: Synthetic oligonucleotide
gacuggccaacaccguaac

SEQ ID NO: 189750 - RNA, 19 nt, Artificial Sequence
  Description of Artificial Sequence: Synthetic oligonucleotide
ccuagacccagccucacug

SEQ ID NO: 189751 - RNA, 19 nt, Artificial Sequence
  Description of Artificial Sequence: Synthetic oligonucleotide
ucggaggcaucaugcauua

SEQ ID NO: 189752 - RNA, 19 nt, Artificial Sequence
  Description of Artificial Sequence: Synthetic oligonucleotide
aguaacuguuucacagacu

SEQ ID NO: 189753 - RNA, 19 nt, Artificial Sequence
  Description of Artificial Sequence: Synthetic oligonucleotide
gcgcgaucagcaucaaggg

SEQ ID NO: 189754 - RNA, 19 nt, Artificial Sequence
  Description of Artificial Sequence: Synthetic oligonucleotide
aggcucaacuucaaagaca

SEQ ID NO: 189755 - RNA, 19 nt, Artificial Sequence
  Description of Artificial Sequence: Synthetic oligonucleotide
accuaguccauaggaccuc

SEQ ID NO: 189756 - RNA, 19 nt, Artificial Sequence
  Description of Artificial Sequence: Synthetic oligonucleotide
gggcacaacaacauucgug

SEQ ID NO: 189757 - RNA, 19 nt, Artificial Sequence
  Description of Artificial Sequence: Synthetic oligonucleotide
gguuugguaagcgcucugc

SEQ ID NO: 189758 - RNA, 19 nt, Artificial Sequence
  Description of Artificial Sequence: Synthetic oligonucleotide
auacuacaacaguguguca

SEQ ID NO: 189759 - RNA, 19 nt, Artificial Sequence
  Description of Artificial Sequence: Synthetic oligonucleotide
gggauagggcuguuuguug

SEQ ID NO: 189760 - RNA, 19 nt, Artificial Sequence
  Description of Artificial Sequence: Synthetic oligonucleotide
gcugaguuuaaguuaggcu

SEQ ID NO: 189761 - RNA, 19 nt, Artificial Sequence
  Description of Artificial Sequence: Synthetic oligonucleotide
gacggcaaagaccggacau

SEQ ID NO: 189762 - RNA, 19 nt, Artificial Sequence
  Description of Artificial Sequence: Synthetic oligonucleotide
gguagcauguaugcccgcc

SEQ ID NO: 189763 - RNA, 19 nt, Artificial Sequence
  Description of Artificial Sequence: Synthetic oligonucleotide
caucaugcauuaauuuggu

SEQ ID NO: 189764 - RNA, 19 nt, Artificial Sequence
  Description of Artificial Sequence: Synthetic oligonucleotide
uuaugucgcuggccucugu

SEQ ID NO: 189765 - RNA, 19 nt, Artificial Sequence
  Description of Artificial Sequence: Synthetic oligonucleotide
caacaacauucgugugccc

SEQ ID NO: 189766 - RNA, 19 nt, Artificial Sequence
  Description of Artificial Sequence: Synthetic oligonucleotide
aguuaggcuuugguauuga

SEQ ID NO: 189767 - RNA, 19 nt, Artificial Sequence
  Description of Artificial Sequence: Synthetic oligonucleotide
gaacugauucuugguggga

SEQ ID NO: 189768 - RNA, 19 nt, Artificial Sequence
  Description of Artificial Sequence: Synthetic oligonucleotide
caucagaccagguucccgu

SEQ ID NO: 189769 - RNA, 19 nt, Artificial Sequence
  Description of Artificial Sequence: Synthetic oligonucleotide
uccuccuccucuccuccuc

SEQ ID NO: 189770 - RNA, 19 nt, Artificial Sequence
  Description of Artificial Sequence: Synthetic oligonucleotide
ggccucuguugcaagauug

SEQ ID NO: 189771 - RNA, 19 nt, Artificial Sequence
  Description of Artificial Sequence: Synthetic oligonucleotide
caauuguaaugucaaggau

SEQ ID NO: 189772 - RNA, 19 nt, Artificial Sequence
  Description of Artificial Sequence: Synthetic oligonucleotide
cuagacccagccucacuga

SEQ ID NO: 189773 - RNA, 19 nt, Artificial Sequence
  Description of Artificial Sequence: Synthetic oligonucleotide
uaugcccgcccuguacuac

SEQ ID NO: 189774 - RNA, 19 nt, Artificial Sequence
  Description of Artificial Sequence: Synthetic oligonucleotide
uccuucucgucaugauuuu

SEQ ID NO: 189775 - RNA, 19 nt, Artificial Sequence
  Description of Artificial Sequence: Synthetic oligonucleotide
cuggcggcuaacuucucaa

SEQ ID NO: 189776 - RNA, 19 nt, Artificial Sequence
  Description of Artificial Sequence: Synthetic oligonucleotide
cuacagauuugacuccaua

SEQ ID NO: 189777 - RNA, 19 nt, Artificial Sequence
  Description of Artificial Sequence: Synthetic oligonucleotide
caucaaggguuuggcucgg

SEQ ID NO: 189778 - RNA, 19 nt, Artificial Sequence
  Description of Artificial Sequence: Synthetic oligonucleotide
gaggcaucaugcauuaauu

SEQ ID NO: 189779 - RNA, 19 nt, Artificial Sequence
  Description of Artificial Sequence: Synthetic oligonucleotide
auacuaucgcagggucaag

SEQ ID NO: 189780 - RNA, 19 nt, Artificial Sequence
  Description of Artificial Sequence: Synthetic oligonucleotide
uggcggcuaacuucucaau

SEQ ID NO: 189781 - RNA, 19 nt, Artificial Sequence
  Description of Artificial Sequence: Synthetic oligonucleotide
cuuaugucgcuggccucug

SEQ ID NO: 189782 - RNA, 19 nt, Artificial Sequence
  Description of Artificial Sequence: Synthetic oligonucleotide
uccuccucuccuccuccuc

SEQ ID NO: 189783 - RNA, 19 nt, Artificial Sequence
  Description of Artificial Sequence: Synthetic oligonucleotide
ccgagaucuguugggaacc

SEQ ID NO: 189784 - RNA, 19 nt, Artificial Sequence
  Description of Artificial Sequence: Synthetic oligonucleotide
gguaaacuagauauagcau

SEQ ID NO: 189785 - RNA, 19 nt, Artificial Sequence
  Description of Artificial Sequence: Synthetic oligonucleotide
gcccaugugccguggugcg

SEQ ID NO: 189786 - RNA, 19 nt, Artificial Sequence
  Description of Artificial Sequence: Synthetic oligonucleotide
acaccguaacucuggccua

SEQ ID NO: 189787 - RNA, 19 nt, Artificial Sequence
  Description of Artificial Sequence: Synthetic oligonucleotide
ccaacaccguaacucuggc

SEQ ID NO: 189788 - RNA, 19 nt, Artificial Sequence
  Description of Artificial Sequence: Synthetic oligonucleotide
caccguaacucuggccuac

SEQ ID NO: 189789 - RNA, 19 nt, Artificial Sequence
  Description of Artificial Sequence: Synthetic oligonucleotide
guccagauauauaucuuau

SEQ ID NO: 189790 - RNA, 19 nt, Artificial Sequence
  Description of Artificial Sequence: Synthetic oligonucleotide
ccacuuacagauggugaag

SEQ ID NO: 189791 - RNA, 19 nt, Artificial Sequence
  Description of Artificial Sequence: Synthetic oligonucleotide
acacccggcggugcucaac

SEQ ID NO: 189792 - RNA, 19 nt, Artificial Sequence
  Description of Artificial Sequence: Synthetic oligonucleotide
acggcaaagaccggacauu

SEQ ID NO: 189793 - RNA, 19 nt, Artificial Sequence
  Description of Artificial Sequence: Synthetic oligonucleotide
ggcccaugugccguggugc

SEQ ID NO: 189794 - RNA, 19 nt, Artificial Sequence
  Description of Artificial Sequence: Synthetic oligonucleotide
cucaacugcgcuugcugcu

SEQ ID NO: 189795 - RNA, 19 nt, Artificial Sequence
  Description of Artificial Sequence: Synthetic oligonucleotide
gugucauauauuagauggu

SEQ ID NO: 189796 - RNA, 19 nt, Artificial Sequence
  Description of Artificial Sequence: Synthetic oligonucleotide
caguuaagcugccaugcau

SEQ ID NO: 189797 - RNA, 19 nt, Artificial Sequence
  Description of Artificial Sequence: Synthetic oligonucleotide
ccaugugccguggugcgcc

SEQ ID NO: 189798 - RNA, 19 nt, Artificial Sequence
  Description of Artificial Sequence: Synthetic oligonucleotide
cauucgugugcccaaucau

SEQ ID NO: 189799 - RNA, 19 nt, Artificial Sequence
  Description of Artificial Sequence: Synthetic oligonucleotide
ggaaccagguccacuuaca

SEQ ID NO: 189800 - RNA, 19 nt, Artificial Sequence
  Description of Artificial Sequence: Synthetic oligonucleotide
guccauacuaucgcagggu

SEQ ID NO: 189801 - RNA, 19 nt, Artificial Sequence
  Description of Artificial Sequence: Synthetic oligonucleotide
ggugcgccaggcccucagg

SEQ ID NO: 189802 - RNA, 19 nt, Artificial Sequence
  Description of Artificial Sequence: Synthetic oligonucleotide
aucgcagggucaagcuucu

SEQ ID NO: 189803 - RNA, 19 nt, Artificial Sequence
  Description of Artificial Sequence: Synthetic oligonucleotide
gcgaucagcaucaaggguu

SEQ ID NO: 189804 - RNA, 19 nt, Artificial Sequence
  Description of Artificial Sequence: Synthetic oligonucleotide
cacaaguguuauccucaaa

SEQ ID NO: 189805 - RNA, 19 nt, Artificial Sequence
  Description of Artificial Sequence: Synthetic oligonucleotide
ccauacuaucgcaggguca

SEQ ID NO: 189806 - RNA, 19 nt, Artificial Sequence
  Description of Artificial Sequence: Synthetic oligonucleotide
ugcccgcccuguacuacua

SEQ ID NO: 189807 - RNA, 19 nt, Artificial Sequence
  Description of Artificial Sequence: Synthetic oligonucleotide
ccuaauacucuagaagccu

SEQ ID NO: 189808 - RNA, 19 nt, Artificial Sequence
  Description of Artificial Sequence: Synthetic oligonucleotide
cauagacuggcggcuaacu

SEQ ID NO: 189809 - RNA, 19 nt, Artificial Sequence
  Description of Artificial Sequence: Synthetic oligonucleotide
cagcaagggcaacacuaaa

SEQ ID NO: 189810 - RNA, 19 nt, Artificial Sequence
  Description of Artificial Sequence: Synthetic oligonucleotide
guaugcccgcccuguacua

SEQ ID NO: 189811 - RNA, 19 nt, Artificial Sequence
  Description of Artificial Sequence: Synthetic oligonucleotide
accguaacucuggccuaca

SEQ ID NO: 189812 - RNA, 19 nt, Artificial Sequence
  Description of Artificial Sequence: Synthetic oligonucleotide
gucggaggcaucaugcauu

SEQ ID NO: 189813 - RNA, 19 nt, Artificial Sequence
  Description of Artificial Sequence: Synthetic oligonucleotide
gcggcuaacuucucaauuu

SEQ ID NO: 189814 - RNA, 19 nt, Artificial Sequence
  Description of Artificial Sequence: Synthetic oligonucleotide
cuacaacagugugucauau

SEQ ID NO: 189815 - RNA, 19 nt, Artificial Sequence
  Description of Artificial Sequence: Synthetic oligonucleotide
cguaacucuggccuacaga

SEQ ID NO: 189816 - RNA, 19 nt, Artificial Sequence
  Description of Artificial Sequence: Synthetic oligonucleotide
cagcaucaaggguuuggcu

SEQ ID NO: 189817 - RNA, 19 nt, Artificial Sequence
  Description of Artificial Sequence: Synthetic oligonucleotide
ccuccuccucuccuccucc

SEQ ID NO: 189818 - RNA, 19 nt, Artificial Sequence
  Description of Artificial Sequence: Synthetic oligonucleotide
ccguaacucuggccuacag

SEQ ID NO: 189819 - RNA, 19 nt, Artificial Sequence
  Description of Artificial Sequence: Synthetic oligonucleotide
gugccguggugcgccaggc

SEQ ID NO: 189820 - RNA, 19 nt, Artificial Sequence
  Description of Artificial Sequence: Synthetic oligonucleotide
guuuggcucggggcacaac

SEQ ID NO: 189821 - RNA, 19 nt, Artificial Sequence
  Description of Artificial Sequence: Synthetic oligonucleotide
gggcgcgaucagcaucaag

SEQ ID NO: 189822 - RNA, 19 nt, Artificial Sequence
  Description of Artificial Sequence: Synthetic oligonucleotide
ggcggcuaacuucucaauu

SEQ ID NO: 189823 - RNA, 19 nt, Artificial Sequence
  Description of Artificial Sequence: Synthetic oligonucleotide
uacacccggcggugcucaa

SEQ ID NO: 189824 - RNA, 19 nt, Artificial Sequence
  Description of Artificial Sequence: Synthetic oligonucleotide
cacccggcggugcucaacu

SEQ ID NO: 189825 - RNA, 19 nt, Artificial Sequence
  Description of Artificial Sequence: Synthetic oligonucleotide
cggcggugcucaacuaaag

SEQ ID NO: 189826 - RNA, 19 nt, Artificial Sequence
  Description of Artificial Sequence: Synthetic oligonucleotide
gacuggcggcuaacuucuc

SEQ ID NO: 189827 - RNA, 19 nt, Artificial Sequence
  Description of Artificial Sequence: Synthetic oligonucleotide
ccggcggugcucaacuaaa

SEQ ID NO: 189828 - RNA, 19 nt, Artificial Sequence
  Description of Artificial Sequence: Synthetic oligonucleotide
cucggggcacaacaacauu

SEQ ID NO: 189829 - RNA, 19 nt, Artificial Sequence
  Description of Artificial Sequence: Synthetic oligonucleotide
caacauucgugugcccaau

SEQ ID NO: 189830 - RNA, 19 nt, Artificial Sequence
  Description of Artificial Sequence: Synthetic oligonucleotide
ugggcgcgaucagcaucaa

SEQ ID NO: 189831 - RNA, 19 nt, Artificial Sequence
  Description of Artificial Sequence: Synthetic oligonucleotide
cuccuccucuccuccuccu

SEQ ID NO: 189832 - RNA, 19 nt, Artificial Sequence
  Description of Artificial Sequence: Synthetic oligonucleotide
cccggcggugcucaacuaa

SEQ ID NO: 189833 - RNA, 19 nt, Artificial Sequence
  Description of Artificial Sequence: Synthetic oligonucleotide
ccuccucuccuccuccucu

SEQ ID NO: 189834 - RNA, 19 nt, Artificial Sequence
  Description of Artificial Sequence: Synthetic oligonucleotide
cacugucaauugugcuauu

SEQ ID NO: 189835 - RNA, 19 nt, Artificial Sequence
  Description of Artificial Sequence: Synthetic oligonucleotide
cgcgaucagcaucaagggu

SEQ ID NO: 189836 - RNA, 19 nt, Artificial Sequence
  Description of Artificial Sequence: Synthetic oligonucleotide
guggugcgccaggcccuca

SEQ ID NO: 189837 - RNA, 19 nt, Artificial Sequence
  Description of Artificial Sequence: Synthetic oligonucleotide
ggugaacauuggacaucau

SEQ ID NO: 189838 - RNA, 19 nt, Artificial Sequence
  Description of Artificial Sequence: Synthetic oligonucleotide
gcccgcccuguacuacuau

SEQ ID NO: 189839 - RNA, 19 nt, Artificial Sequence
  Description of Artificial Sequence: Synthetic oligonucleotide
cgguuacuucuaggcuucu

SEQ ID NO: 189840 - RNA, 19 nt, Artificial Sequence
  Description of Artificial Sequence: Synthetic oligonucleotide
aaaauguccccacacaggc

SEQ ID NO: 189841 - RNA, 19 nt, Artificial Sequence
  Description of Artificial Sequence: Synthetic oligonucleotide
aacacgaugacacagaaga

SEQ ID NO: 189842 - RNA, 19 nt, Artificial Sequence
  Description of Artificial Sequence: Synthetic oligonucleotide
acuuaaagaccauagaucg

SEQ ID NO: 189843 - RNA, 19 nt, Artificial Sequence
  Description of Artificial Sequence: Synthetic oligonucleotide
ucaauaucgaaaucgaucc

SEQ ID NO: 189844 - RNA, 19 nt, Artificial Sequence
  Description of Artificial Sequence: Synthetic oligonucleotide
aauaccaccaguuuaccug

SEQ ID NO: 189845 - RNA, 19 nt, Artificial Sequence
  Description of Artificial Sequence: Synthetic oligonucleotide
aacgcuauaugaugaaugg

SEQ ID NO: 189846 - RNA, 19 nt, Artificial Sequence
  Description of Artificial Sequence: Synthetic oligonucleotide
ucuaagaagaaguuuaagu

SEQ ID NO: 189847 - RNA, 19 nt, Artificial Sequence
  Description of Artificial Sequence: Synthetic oligonucleotide
aaaugcauccgucugagca

SEQ ID NO: 189848 - RNA, 19 nt, Artificial Sequence
  Description of Artificial Sequence: Synthetic oligonucleotide
augaaugggacacaacagc

SEQ ID NO: 189849 - RNA, 19 nt, Artificial Sequence
  Description of Artificial Sequence: Synthetic oligonucleotide
uguuauuagcccauuuccg

SEQ ID NO: 189850 - RNA, 19 nt, Artificial Sequence
  Description of Artificial Sequence: Synthetic oligonucleotide
ugacgauuccaaaacauag

SEQ ID NO: 189851 - RNA, 19 nt, Artificial Sequence
  Description of Artificial Sequence: Synthetic oligonucleotide
uuucuaaacauacaaggaa

SEQ ID NO: 189852 - RNA, 19 nt, Artificial Sequence
  Description of Artificial Sequence: Synthetic oligonucleotide
ugggcaauagcuaugaauc

SEQ ID NO: 189853 - RNA, 19 nt, Artificial Sequence
  Description of Artificial Sequence: Synthetic oligonucleotide
aaguuaaggcuuuaugucu

SEQ ID NO: 189854 - RNA, 19 nt, Artificial Sequence
  Description of Artificial Sequence: Synthetic oligonucleotide
uuguacaccaaucuugugu

SEQ ID NO: 189855 - RNA, 19 nt, Artificial Sequence
  Description of Artificial Sequence: Synthetic oligonucleotide
ugauuaucugucauguucu

SEQ ID NO: 189856 - RNA, 19 nt, Artificial Sequence
  Description of Artificial Sequence: Synthetic oligonucleotide
uuaaagaccauagaucgcu

SEQ ID NO: 189857 - RNA, 19 nt, Artificial Sequence
  Description of Artificial Sequence: Synthetic oligonucleotide
agaccaugagcagacaugc

SEQ ID NO: 189858 - RNA, 19 nt, Artificial Sequence
  Description of Artificial Sequence: Synthetic oligonucleotide
uguguuauuagcccauuuc

SEQ ID NO: 189859 - RNA, 19 nt, Artificial Sequence
  Description of Artificial Sequence: Synthetic oligonucleotide
uauaugaugaauggacacc

SEQ ID NO: 189860 - RNA, 19 nt, Artificial Sequence
  Description of Artificial Sequence: Synthetic oligonucleotide
guguuauuagcccauuucc

SEQ ID NO: 189861 - RNA, 19 nt, Artificial Sequence
  Description of Artificial Sequence: Synthetic oligonucleotide
cugauuaucugucauguuc

SEQ ID NO: 189862 - RNA, 19 nt, Artificial Sequence
  Description of Artificial Sequence: Synthetic oligonucleotide
aacgucuggguguggacac

SEQ ID NO: 189863 - RNA, 19 nt, Artificial Sequence
  Description of Artificial Sequence: Synthetic oligonucleotide
cuauaugaugaauggacac

SEQ ID NO: 189864 - RNA, 19 nt, Artificial Sequence
  Description of Artificial Sequence: Synthetic oligonucleotide
caugagugcggaaagaguc

SEQ ID NO: 189865 - RNA, 19 nt, Artificial Sequence
  Description of Artificial Sequence: Synthetic oligonucleotide
gauguuguccgugggaacg

SEQ ID NO: 189866 - RNA, 19 nt, Artificial Sequence
  Description of Artificial Sequence: Synthetic oligonucleotide
cucaugucguuucaggucc

SEQ ID NO: 189867 - RNA, 19 nt, Artificial Sequence
  Description of Artificial Sequence: Synthetic oligonucleotide
acgauuccaaaacauagca

SEQ ID NO: 189868 - RNA, 19 nt, Artificial Sequence
  Description of Artificial Sequence: Synthetic oligonucleotide
cagaccaugaguuacuguc

SEQ ID NO: 189869 - RNA, 19 nt, Artificial Sequence
  Description of Artificial Sequence: Synthetic oligonucleotide
uuuggcagcacaagcauau

SEQ ID NO: 189870 - RNA, 19 nt, Artificial Sequence
  Description of Artificial Sequence: Synthetic oligonucleotide
agaguucacguuuggcagc

SEQ ID NO: 189871 - RNA, 19 nt, Artificial Sequence
  Description of Artificial Sequence: Synthetic oligonucleotide
ucuuauggucauucugagg

SEQ ID NO: 189872 - RNA, 19 nt, Artificial Sequence
  Description of Artificial Sequence: Synthetic oligonucleotide
aagaccauagaucgcugca

SEQ ID NO: 189873 - RNA, 19 nt, Artificial Sequence
  Description of Artificial Sequence: Synthetic oligonucleotide
ugcagagaaccuaaacagc

SEQ ID NO: 189874 - RNA, 19 nt, Artificial Sequence
  Description of Artificial Sequence: Synthetic oligonucleotide
acuacugucuaagaagaag

SEQ ID NO: 189875 - RNA, 19 nt, Artificial Sequence
  Description of Artificial Sequence: Synthetic oligonucleotide
agaaggaagucacccauug

SEQ ID NO: 189876 - RNA, 19 nt, Artificial Sequence
  Description of Artificial Sequence: Synthetic oligonucleotide
acuacuacucaugauguug

SEQ ID NO: 189877 - RNA, 19 nt, Artificial Sequence
  Description of Artificial Sequence: Synthetic oligonucleotide
aucgaaaucgaucccagaa

SEQ ID NO: 189878 - RNA, 19 nt, Artificial Sequence
  Description of Artificial Sequence: Synthetic oligonucleotide
gaacuuaaauagaugcuug

SEQ ID NO: 189879 - RNA, 19 nt, Artificial Sequence
  Description of Artificial Sequence: Synthetic oligonucleotide
aaguuuaagucugucugug

SEQ ID NO: 189880 - RNA, 19 nt, Artificial Sequence
  Description of Artificial Sequence: Synthetic oligonucleotide
uggcuuaauaucuuauggu

SEQ ID NO: 189881 - RNA, 19 nt, Artificial Sequence
  Description of Artificial Sequence: Synthetic oligonucleotide
guuugcgucggacagaaga

SEQ ID NO: 189882 - RNA, 19 nt, Artificial Sequence
  Description of Artificial Sequence: Synthetic oligonucleotide
ugaccuuugagcugggcac

SEQ ID NO: 189883 - RNA, 19 nt, Artificial Sequence
  Description of Artificial Sequence: Synthetic oligonucleotide
gaacgcuauaugaugaaug

SEQ ID NO: 189884 - RNA, 19 nt, Artificial Sequence
  Description of Artificial Sequence: Synthetic oligonucleotide
caaaacgucaagaacugca

SEQ ID NO: 189885 - RNA, 19 nt, Artificial Sequence
  Description of Artificial Sequence: Synthetic oligonucleotide
auaauacacucacauuugu

SEQ ID NO: 189886 - RNA, 19 nt, Artificial Sequence
  Description of Artificial Sequence: Synthetic oligonucleotide
ucgauccacaccuaacacc

SEQ ID NO: 189887 - RNA, 19 nt, Artificial Sequence
  Description of Artificial Sequence: Synthetic oligonucleotide
uuugcgucggacagaagac

SEQ ID NO: 189888 - RNA, 19 nt, Artificial Sequence
  Description of Artificial Sequence: Synthetic oligonucleotide
uagaucuaugguuuggguc

SEQ ID NO: 189889 - RNA, 19 nt, Artificial Sequence
  Description of Artificial Sequence: Synthetic oligonucleotide
acaccuuacacuuuauaau

SEQ ID NO: 189890 - RNA, 19 nt, Artificial Sequence
  Description of Artificial Sequence: Synthetic oligonucleotide
auuagcccauuuccgaguc

SEQ ID NO: 189891 - RNA, 19 nt, Artificial Sequence
  Description of Artificial Sequence: Synthetic oligonucleotide
aguagaucuaugguuuggg

SEQ ID NO: 189892 - RNA, 19 nt, Artificial Sequence
  Description of Artificial Sequence: Synthetic oligonucleotide
uggcucagugcucaugccg

SEQ ID NO: 189893 - RNA, 19 nt, Artificial Sequence
  Description of Artificial Sequence: Synthetic oligonucleotide
uucgaaagagguaggcucu

SEQ ID NO: 189894 - RNA, 19 nt, Artificial Sequence
  Description of Artificial Sequence: Synthetic oligonucleotide
uguacaccaaucuuguguu

SEQ ID NO: 189895 - RNA, 19 nt, Artificial Sequence
  Description of Artificial Sequence: Synthetic oligonucleotide
auaugaugaauggacaccu

SEQ ID NO: 189896 - RNA, 19 nt, Artificial Sequence
  Description of Artificial Sequence: Synthetic oligonucleotide
ucaaacgacaggucagucu

SEQ ID NO: 189897 - RNA, 19 nt, Artificial Sequence
  Description of Artificial Sequence: Synthetic oligonucleotide
gaagacuccgguugucuag

SEQ ID NO: 189898 - RNA, 19 nt, Artificial Sequence
  Description of Artificial Sequence: Synthetic oligonucleotide
ggagguguaggacagauca

SEQ ID NO: 189899 - RNA, 19 nt, Artificial Sequence
  Description of Artificial Sequence: Synthetic oligonucleotide
uagaucgcugcacuuauau

SEQ ID NO: 189900 - RNA, 19 nt, Artificial Sequence
  Description of Artificial Sequence: Synthetic oligonucleotide
ucggcuguaggcacaaaga

SEQ ID NO: 189901 - RNA, 19 nt, Artificial Sequence
  Description of Artificial Sequence: Synthetic oligonucleotide
gacuggaugguuccccagg

SEQ ID NO: 189902 - RNA, 19 nt, Artificial Sequence
  Description of Artificial Sequence: Synthetic oligonucleotide
aaucaaacgacaggucagu

SEQ ID NO: 189903 - RNA, 19 nt, Artificial Sequence
  Description of Artificial Sequence: Synthetic oligonucleotide
gacauugccacaagaaaca

SEQ ID NO: 189904 - RNA, 19 nt, Artificial Sequence
  Description of Artificial Sequence: Synthetic oligonucleotide
aacccguaggacugugcgg

SEQ ID NO: 189905 - RNA, 19 nt, Artificial Sequence
  Description of Artificial Sequence: Synthetic oligonucleotide
ugacuggcucaacaauagg

SEQ ID NO: 189906 - RNA, 19 nt, Artificial Sequence
  Description of Artificial Sequence: Synthetic oligonucleotide
ucgaaaucgaucccagaau

SEQ ID NO: 189907 - RNA, 19 nt, Artificial Sequence
  Description of Artificial Sequence: Synthetic oligonucleotide
gcagaagguaucaaguugg

SEQ ID NO: 189908 - RNA, 19 nt, Artificial Sequence
  Description of Artificial Sequence: Synthetic oligonucleotide
aaacugcaugacuggaagu

SEQ ID NO: 189909 - RNA, 19 nt, Artificial Sequence
  Description of Artificial Sequence: Synthetic oligonucleotide
auucggcuuugucugagag

SEQ ID NO: 189910 - RNA, 19 nt, Artificial Sequence
  Description of Artificial Sequence: Synthetic oligonucleotide
ucugcacguugauugagga

SEQ ID NO: 189911 - RNA, 19 nt, Artificial Sequence
  Description of Artificial Sequence: Synthetic oligonucleotide
accaugagcagacaugcau

SEQ ID NO: 189912 - RNA, 19 nt, Artificial Sequence
  Description of Artificial Sequence: Synthetic oligonucleotide
gguaggcucuccuucauag

SEQ ID NO: 189913 - RNA, 19 nt, Artificial Sequence
  Description of Artificial Sequence: Synthetic oligonucleotide
accuuacacuuuauaauac

SEQ ID NO: 189914 - RNA, 19 nt, Artificial Sequence
  Description of Artificial Sequence: Synthetic oligonucleotide
ucaguagaucuaugguuug

SEQ ID NO: 189915 - RNA, 19 nt, Artificial Sequence
  Description of Artificial Sequence: Synthetic oligonucleotide
aguucaugaacgucuuggu

SEQ ID NO: 189916 - RNA, 19 nt, Artificial Sequence
  Description of Artificial Sequence: Synthetic oligonucleotide
gugggaacgcuauaugaug

SEQ ID NO: 189917 - RNA, 19 nt, Artificial Sequence
  Description of Artificial Sequence: Synthetic oligonucleotide
ucucgaauccugcugguuu

SEQ ID NO: 189918 - RNA, 19 nt, Artificial Sequence
  Description of Artificial Sequence: Synthetic oligonucleotide
ggaucucauggccaguucg

SEQ ID NO: 189919 - RNA, 19 nt, Artificial Sequence
  Description of Artificial Sequence: Synthetic oligonucleotide
gaucgcugcacuuauauuu

SEQ ID NO: 189920 - RNA, 19 nt, Artificial Sequence
  Description of Artificial Sequence: Synthetic oligonucleotide
ucacccauugcugucugag

SEQ ID NO: 189921 - RNA, 19 nt, Artificial Sequence
  Description of Artificial Sequence: Synthetic oligonucleotide
uggccaguucgguagaugu

SEQ ID NO: 189922 - RNA, 19 nt, Artificial Sequence
  Description of Artificial Sequence: Synthetic oligonucleotide
uggacacuaacgggaaggg

SEQ ID NO: 189923 - RNA, 19 nt, Artificial Sequence
  Description of Artificial Sequence: Synthetic oligonucleotide
ugugucgagauggggaggc

SEQ ID NO: 189924 - RNA, 19 nt, Artificial Sequence
  Description of Artificial Sequence: Synthetic oligonucleotide
cucugaacccguaggacug

SEQ ID NO: 189925 - RNA, 19 nt, Artificial Sequence
  Description of Artificial Sequence: Synthetic oligonucleotide
aacgacaggucagucugag

SEQ ID NO: 189926 - RNA, 19 nt, Artificial Sequence
  Description of Artificial Sequence: Synthetic oligonucleotide
ugucguuucaggucccacu

SEQ ID NO: 189927 - RNA, 19 nt, Artificial Sequence
  Description of Artificial Sequence: Synthetic oligonucleotide
agaccauagaucgcugcac

SEQ ID NO: 189928 - RNA, 19 nt, Artificial Sequence
  Description of Artificial Sequence: Synthetic oligonucleotide
gacuggcucaacaauagga

SEQ ID NO: 189929 - RNA, 19 nt, Artificial Sequence
  Description of Artificial Sequence: Synthetic oligonucleotide
uuccuacugacaaggggac

SEQ ID NO: 189930 - RNA, 19 nt, Artificial Sequence
  Description of Artificial Sequence: Synthetic oligonucleotide
caccuaacaccacaggcug

SEQ ID NO: 189931 - RNA, 19 nt, Artificial Sequence
  Description of Artificial Sequence: Synthetic oligonucleotide
caauaucgaaaucgauccc

SEQ ID NO: 189932 - RNA, 19 nt, Artificial Sequence
  Description of Artificial Sequence: Synthetic oligonucleotide
cagaagguaucaaguuggg

SEQ ID NO: 189933 - RNA, 19 nt, Artificial Sequence
  Description of Artificial Sequence: Synthetic oligonucleotide
gucggcuguaggcacaaag

SEQ ID NO: 189934 - RNA, 19 nt, Artificial Sequence
  Description of Artificial Sequence: Synthetic oligonucleotide
ggacuaagugcacagcacc

SEQ ID NO: 189935 - RNA, 19 nt, Artificial Sequence
  Description of Artificial Sequence: Synthetic oligonucleotide
agaacacgaugacacagaa

SEQ ID NO: 189936 - RNA, 19 nt, Artificial Sequence
  Description of Artificial Sequence: Synthetic oligonucleotide
uuuguacaccaaucuugug

SEQ ID NO: 189937 - RNA, 19 nt, Artificial Sequence
  Description of Artificial Sequence: Synthetic oligonucleotide
gucacucaaugguucaaug

SEQ ID NO: 189938 - RNA, 19 nt, Artificial Sequence
  Description of Artificial Sequence: Synthetic oligonucleotide
gaggacuacugucuaagaa

SEQ ID NO: 189939 - RNA, 19 nt, Artificial Sequence
  Description of Artificial Sequence: Synthetic oligonucleotide
acuacauccccagucggug

SEQ ID NO: 189940 - RNA, 19 nt, Artificial Sequence
  Description of Artificial Sequence: Synthetic oligonucleotide
gaaguuuaagucugucugu

SEQ ID NO: 189941 - RNA, 19 nt, Artificial Sequence
  Description of Artificial Sequence: Synthetic oligonucleotide
caggguuugcgucggacag

SEQ ID NO: 189942 - RNA, 19 nt, Artificial Sequence
  Description of Artificial Sequence: Synthetic oligonucleotide
uggcuuugcagguagcuuu

SEQ ID NO: 189943 - RNA, 19 nt, Artificial Sequence
  Description of Artificial Sequence: Synthetic oligonucleotide
cuacugucuaagaagaagu

SEQ ID NO: 189944 - RNA, 19 nt, Artificial Sequence
  Description of Artificial Sequence: Synthetic oligonucleotide
ugcgucggacagaagacuc

SEQ ID NO: 189945 - RNA, 19 nt, Artificial Sequence
  Description of Artificial Sequence: Synthetic oligonucleotide
uucguugcuggugaagaac

SEQ ID NO: 189946 - RNA, 19 nt, Artificial Sequence
  Description of Artificial Sequence: Synthetic oligonucleotide
caccuuacacuuuauaaua

SEQ ID NO: 189947 - RNA, 19 nt, Artificial Sequence
  Description of Artificial Sequence: Synthetic oligonucleotide
aggcagauugcuugacaag

SEQ ID NO: 189948 - RNA, 19 nt, Artificial Sequence
  Description of Artificial Sequence: Synthetic oligonucleotide
cgcuauaugaugaauggac

SEQ ID NO: 189949 - RNA, 19 nt, Artificial Sequence
  Description of Artificial Sequence: Synthetic oligonucleotide
cucgaauccugcugguuug

SEQ ID NO: 189950 - RNA, 19 nt, Artificial Sequence
  Description of Artificial Sequence: Synthetic oligonucleotide
ucugcuggguguguuauua

SEQ ID NO: 189951 - RNA, 19 nt, Artificial Sequence
  Description of Artificial Sequence: Synthetic oligonucleotide
caaucuuguguucacaagu

SEQ ID NO: 189952 - RNA, 19 nt, Artificial Sequence
  Description of Artificial Sequence: Synthetic oligonucleotide
ugaacccguaggacugugc

SEQ ID NO: 189953 - RNA, 19 nt, Artificial Sequence
  Description of Artificial Sequence: Synthetic oligonucleotide
agugcggaaagagucuuca

SEQ ID NO: 189954 - RNA, 19 nt, Artificial Sequence
  Description of Artificial Sequence: Synthetic oligonucleotide
ugcaugacuggaaguuuaa

SEQ ID NO: 189955 - RNA, 19 nt, Artificial Sequence
  Description of Artificial Sequence: Synthetic oligonucleotide
aagacuccgguugucuagu

SEQ ID NO: 189956 - RNA, 19 nt, Artificial Sequence
  Description of Artificial Sequence: Synthetic oligonucleotide
uuguccgugggaacgcuau

SEQ ID NO: 189957 - RNA, 19 nt, Artificial Sequence
  Description of Artificial Sequence: Synthetic oligonucleotide
aggggucggcuguaggcac

SEQ ID NO: 189958 - RNA, 19 nt, Artificial Sequence
  Description of Artificial Sequence: Synthetic oligonucleotide
acugucuaagaagaaguuu

SEQ ID NO: 189959 - RNA, 19 nt, Artificial Sequence
  Description of Artificial Sequence: Synthetic oligonucleotide
uucggcuuugucugagagu

SEQ ID NO: 189960 - RNA, 19 nt, Artificial Sequence
  Description of Artificial Sequence: Synthetic oligonucleotide
uaaaugcauccgucugagc

SEQ ID NO: 189961 - RNA, 19 nt, Artificial Sequence
  Description of Artificial Sequence: Synthetic oligonucleotide
agcuauggaugaagugacc

SEQ ID NO: 189962 - RNA, 19 nt, Artificial Sequence
  Description of Artificial Sequence: Synthetic oligonucleotide
uagcccauuuccgaguccu

SEQ ID NO: 189963 - RNA, 19 nt, Artificial Sequence
  Description of Artificial Sequence: Synthetic oligonucleotide
cuggcguauggacagccac

SEQ ID NO: 189964 - RNA, 19 nt, Artificial Sequence
  Description of Artificial Sequence: Synthetic oligonucleotide
agcauauaccacagaaaga

SEQ ID NO: 189965 - RNA, 19 nt, Artificial Sequence
  Description of Artificial Sequence: Synthetic oligonucleotide
uaggacagaucagucugca

SEQ ID NO: 189966 - RNA, 19 nt, Artificial Sequence
  Description of Artificial Sequence: Synthetic oligonucleotide
ucguuucaggucccacuca

SEQ ID NO: 189967 - RNA, 19 nt, Artificial Sequence
  Description of Artificial Sequence: Synthetic oligonucleotide
ucaugucguuucagguccc

SEQ ID NO: 189968 - RNA, 19 nt, Artificial Sequence
  Description of Artificial Sequence: Synthetic oligonucleotide
auuacugcauuuacugcau

SEQ ID NO: 189969 - RNA, 19 nt, Artificial Sequence
  Description of Artificial Sequence: Synthetic oligonucleotide
aggggacuaagugcacagc

SEQ ID NO: 189970 - RNA, 19 nt, Artificial Sequence
  Description of Artificial Sequence: Synthetic oligonucleotide
cugcacguugauugaggag

SEQ ID NO: 189971 - RNA, 19 nt, Artificial Sequence
  Description of Artificial Sequence: Synthetic oligonucleotide
cagaaccucgauccacacc

SEQ ID NO: 189972 - RNA, 19 nt, Artificial Sequence
  Description of Artificial Sequence: Synthetic oligonucleotide
acccguaggacugugcgga

SEQ ID NO: 189973 - RNA, 19 nt, Artificial Sequence
  Description of Artificial Sequence: Synthetic oligonucleotide
uaggacugugcggaggggu

SEQ ID NO: 189974 - RNA, 19 nt, Artificial Sequence
  Description of Artificial Sequence: Synthetic oligonucleotide
ggacuacugucuaagaaga

SEQ ID NO: 189975 - RNA, 19 nt, Artificial Sequence
  Description of Artificial Sequence: Synthetic oligonucleotide
guaggacagaucagucugc

SEQ ID NO: 189976 - RNA, 19 nt, Artificial Sequence
  Description of Artificial Sequence: Synthetic oligonucleotide
gcuauaugaugaauggaca

SEQ ID NO: 189977 - RNA, 19 nt, Artificial Sequence
  Description of Artificial Sequence: Synthetic oligonucleotide
ggggacuaagugcacagca

SEQ ID NO: 189978 - RNA, 19 nt, Artificial Sequence
  Description of Artificial Sequence: Synthetic oligonucleotide
uacugacaaggggacuaag

SEQ ID NO: 189979 - RNA, 19 nt, Artificial Sequence
  Description of Artificial Sequence: Synthetic oligonucleotide
ucgcugcacuuauauuuac

SEQ ID NO: 189980 - RNA, 19 nt, Artificial Sequence
  Description of Artificial Sequence: Synthetic oligonucleotide
gaguucacguuuggcagca

SEQ ID NO: 189981 - RNA, 19 nt, Artificial Sequence
  Description of Artificial Sequence: Synthetic oligonucleotide
augagugcggaaagagucu

SEQ ID NO: 189982 - RNA, 19 nt, Artificial Sequence
  Description of Artificial Sequence: Synthetic oligonucleotide
uugcgucggacagaagacu

SEQ ID NO: 189983 - RNA, 19 nt, Artificial Sequence
  Description of Artificial Sequence: Synthetic oligonucleotide
uuuagcuacuggggugaac

SEQ ID NO: 189984 - RNA, 19 nt, Artificial Sequence
  Description of Artificial Sequence: Synthetic oligonucleotide
acgcuauaugaugaaugga

SEQ ID NO: 189985 - RNA, 19 nt, Artificial Sequence
  Description of Artificial Sequence: Synthetic oligonucleotide
agaucgcugcacuuauauu

SEQ ID NO: 189986 - RNA, 19 nt, Artificial Sequence
  Description of Artificial Sequence: Synthetic oligonucleotide
ugagugcggaaagagucuu

SEQ ID NO: 189987 - RNA, 19 nt, Artificial Sequence
  Description of Artificial Sequence: Synthetic oligonucleotide
cugcuggguguguuauuag

SEQ ID NO: 189988 - RNA, 19 nt, Artificial Sequence
  Description of Artificial Sequence: Synthetic oligonucleotide
aggacugugcggagggguc

SEQ ID NO: 189989 - RNA, 19 nt, Artificial Sequence
  Description of Artificial Sequence: Synthetic oligonucleotide
cuugaacauuaaggcagug

SEQ ID NO: 189990 - RNA, 19 nt, Artificial Sequence
  Description of Artificial Sequence: Synthetic oligonucleotide
gccagcguggcccaccugc

SEQ ID NO: 189991 - RNA, 19 nt, Artificial Sequence
  Description of Artificial Sequence: Synthetic oligonucleotide
accauagaucgcugcacuu

SEQ ID NO: 189992 - RNA, 19 nt, Artificial Sequence
  Description of Artificial Sequence: Synthetic oligonucleotide
acaagggugcaggcuuuuc

SEQ ID NO: 189993 - RNA, 19 nt, Artificial Sequence
  Description of Artificial Sequence: Synthetic oligonucleotide
ccaccaacuacauccccag

SEQ ID NO: 189994 - RNA, 19 nt, Artificial Sequence
  Description of Artificial Sequence: Synthetic oligonucleotide
agagccggugugugucgag

SEQ ID NO: 189995 - RNA, 19 nt, Artificial Sequence
  Description of Artificial Sequence: Synthetic oligonucleotide
acauugccacaagaaacaa

SEQ ID NO: 189996 - RNA, 19 nt, Artificial Sequence
  Description of Artificial Sequence: Synthetic oligonucleotide
gacuaagugcacagcaccu

SEQ ID NO: 189997 - RNA, 19 nt, Artificial Sequence
  Description of Artificial Sequence: Synthetic oligonucleotide
ggggucucgaauccugcug

SEQ ID NO: 189998 - RNA, 19 nt, Artificial Sequence
  Description of Artificial Sequence: Synthetic oligonucleotide
acgggaagggacacuugag

SEQ ID NO: 189999 - RNA, 19 nt, Artificial Sequence
  Description of Artificial Sequence: Synthetic oligonucleotide
cauaggaauuacugcauuu

SEQ ID NO: 190000 - RNA, 19 nt, Artificial Sequence
  Description of Artificial Sequence: Synthetic oligonucleotide
cacucaguagaucuauggu

SEQ ID NO: 190001 - RNA, 19 nt, Artificial Sequence
  Description of Artificial Sequence: Synthetic oligonucleotide
ucugaacccguaggacugu

SEQ ID NO: 190002 - RNA, 19 nt, Artificial Sequence
  Description of Artificial Sequence: Synthetic oligonucleotide
acuaacgggaagggacacu

SEQ ID NO: 190003 - RNA, 19 nt, Artificial Sequence
  Description of Artificial Sequence: Synthetic oligonucleotide
uguuguccgugggaacgcu

SEQ ID NO: 190004 - RNA, 19 nt, Artificial Sequence
  Description of Artificial Sequence: Synthetic oligonucleotide
ucgaaagagguaggcucuc

SEQ ID NO: 190005 - RNA, 19 nt, Artificial Sequence
  Description of Artificial Sequence: Synthetic oligonucleotide
agacuccgguugucuagug

SEQ ID NO: 190006 - RNA, 19 nt, Artificial Sequence
  Description of Artificial Sequence: Synthetic oligonucleotide
cacuaacgggaagggacac

SEQ ID NO: 190007 - RNA, 19 nt, Artificial Sequence
  Description of Artificial Sequence: Synthetic oligonucleotide
gcggaaagagucuucaaau

SEQ ID NO: 190008 - RNA, 19 nt, Artificial Sequence
  Description of Artificial Sequence: Synthetic oligonucleotide
acgacaggucagucugaga

SEQ ID NO: 190009 - RNA, 19 nt, Artificial Sequence
  Description of Artificial Sequence: Synthetic oligonucleotide
gccaguucgguagauguga

SEQ ID NO: 190010 - RNA, 19 nt, Artificial Sequence
  Description of Artificial Sequence: Synthetic oligonucleotide
gaggcgccuucaguuuggg

SEQ ID NO: 190011 - RNA, 19 nt, Artificial Sequence
  Description of Artificial Sequence: Synthetic oligonucleotide
cauagaucgcugcacuuau

SEQ ID NO: 190012 - RNA, 19 nt, Artificial Sequence
  Description of Artificial Sequence: Synthetic oligonucleotide
uguccgugggaacgcuaua

SEQ ID NO: 190013 - RNA, 19 nt, Artificial Sequence
  Description of Artificial Sequence: Synthetic oligonucleotide
gggacuaagugcacagcac

SEQ ID NO: 190014 - RNA, 19 nt, Artificial Sequence
  Description of Artificial Sequence: Synthetic oligonucleotide
gacugugcggaggggucug

SEQ ID NO: 190015 - RNA, 19 nt, Artificial Sequence
  Description of Artificial Sequence: Synthetic oligonucleotide
gcuauggaugaagugaccu

SEQ ID NO: 190016 - RNA, 19 nt, Artificial Sequence
  Description of Artificial Sequence: Synthetic oligonucleotide
acaccuguacugacuggcu

SEQ ID NO: 190017 - RNA, 19 nt, Artificial Sequence
  Description of Artificial Sequence: Synthetic oligonucleotide
ccaguucgguagaugugag

SEQ ID NO: 190018 - RNA, 19 nt, Artificial Sequence
  Description of Artificial Sequence: Synthetic oligonucleotide
cacaagcauauaccacaga

SEQ ID NO: 190019 - RNA, 19 nt, Artificial Sequence
  Description of Artificial Sequence: Synthetic oligonucleotide
guauggacagccacacgua

SEQ ID NO: 190020 - RNA, 19 nt, Artificial Sequence
  Description of Artificial Sequence: Synthetic oligonucleotide
ggcucaacaauaggacuga

SEQ ID NO: 190021 - RNA, 19 nt, Artificial Sequence
  Description of Artificial Sequence: Synthetic oligonucleotide
caccaacuuuguguuaaca

SEQ ID NO: 190022 - RNA, 19 nt, Artificial Sequence
  Description of Artificial Sequence: Synthetic oligonucleotide
cuauggaugaagugaccuu

SEQ ID NO: 190023 - RNA, 19 nt, Artificial Sequence
  Description of Artificial Sequence: Synthetic oligonucleotide
ggaagggacacuugagaau

SEQ ID NO: 190024 - RNA, 19 nt, Artificial Sequence
  Description of Artificial Sequence: Synthetic oligonucleotide
gugucgagauggggaggcg

SEQ ID NO: 190025 - RNA, 19 nt, Artificial Sequence
  Description of Artificial Sequence: Synthetic oligonucleotide
gagugcggaaagagucuuc

SEQ ID NO: 190026 - RNA, 19 nt, Artificial Sequence
  Description of Artificial Sequence: Synthetic oligonucleotide
caacaauaggacugauaau

SEQ ID NO: 190027 - RNA, 19 nt, Artificial Sequence
  Description of Artificial Sequence: Synthetic oligonucleotide
aggguuugcgucggacaga

SEQ ID NO: 190028 - RNA, 19 nt, Artificial Sequence
  Description of Artificial Sequence: Synthetic oligonucleotide
cugaacccguaggacugug

SEQ ID NO: 190029 - RNA, 19 nt, Artificial Sequence
  Description of Artificial Sequence: Synthetic oligonucleotide
gaccaugagcagacaugca

SEQ ID NO: 190030 - RNA, 19 nt, Artificial Sequence
  Description of Artificial Sequence: Synthetic oligonucleotide
gaguuucguugcuggugaa

SEQ ID NO: 190031 - RNA, 19 nt, Artificial Sequence
  Description of Artificial Sequence: Synthetic oligonucleotide
cuaacgggaagggacacuu

SEQ ID NO: 190032 - RNA, 19 nt, Artificial Sequence
  Description of Artificial Sequence: Synthetic oligonucleotide
gggaacgcuauaugaugaa

SEQ ID NO: 190033 - RNA, 19 nt, Artificial Sequence
  Description of Artificial Sequence: Synthetic oligonucleotide
ccgugggaacgcuauauga

SEQ ID NO: 190034 - RNA, 19 nt, Artificial Sequence
  Description of Artificial Sequence: Synthetic oligonucleotide
cacguugauugaggagaug

SEQ ID NO: 190035 - RNA, 19 nt, Artificial Sequence
  Description of Artificial Sequence: Synthetic oligonucleotide
cagccacacguacacugga

SEQ ID NO: 190036 - RNA, 19 nt, Artificial Sequence
  Description of Artificial Sequence: Synthetic oligonucleotide
cgucggacagaagacuccg

SEQ ID NO: 190037 - RNA, 19 nt, Artificial Sequence
  Description of Artificial Sequence: Synthetic oligonucleotide
cauccgucugagcagcuau

SEQ ID NO: 190038 - RNA, 19 nt, Artificial Sequence
  Description of Artificial Sequence: Synthetic oligonucleotide
agccacacguacacuggaa

SEQ ID NO: 190039 - RNA, 19 nt, Artificial Sequence
  Description of Artificial Sequence: Synthetic oligonucleotide
gcaccaacgucugggugug

SEQ ID NO: 190040 - RNA, 19 nt, Artificial Sequence
  Description of Artificial Sequence: Synthetic oligonucleotide
gaggaccaggguuccuacu

SEQ ID NO: 190041 - RNA, 19 nt, Artificial Sequence
  Description of Artificial Sequence: Synthetic oligonucleotide
gucacccauugcugucuga

SEQ ID NO: 190042 - RNA, 19 nt, Artificial Sequence
  Description of Artificial Sequence: Synthetic oligonucleotide
cuacauccccagucggugu

SEQ ID NO: 190043 - RNA, 19 nt, Artificial Sequence
  Description of Artificial Sequence: Synthetic oligonucleotide
acagaucagucugcacguu

SEQ ID NO: 190044 - RNA, 19 nt, Artificial Sequence
  Description of Artificial Sequence: Synthetic oligonucleotide
ggccaguucgguagaugug

SEQ ID NO: 190045 - RNA, 19 nt, Artificial Sequence
  Description of Artificial Sequence: Synthetic oligonucleotide
cagcguggcccaccugcac

SEQ ID NO: 190046 - RNA, 19 nt, Artificial Sequence
  Description of Artificial Sequence: Synthetic oligonucleotide
auagaucgcugcacuuaua

SEQ ID NO: 190047 - RNA, 19 nt, Artificial Sequence
  Description of Artificial Sequence: Synthetic oligonucleotide
caugucguuucagguccca

SEQ ID NO: 190048 - RNA, 19 nt, Artificial Sequence
  Description of Artificial Sequence: Synthetic oligonucleotide
gcgucggacagaagacucc

SEQ ID NO: 190049 - RNA, 19 nt, Artificial Sequence
  Description of Artificial Sequence: Synthetic oligonucleotide
ggcaggugaggacuacugu

SEQ ID NO: 190050 - RNA, 19 nt, Artificial Sequence
  Description of Artificial Sequence: Synthetic oligonucleotide
guccgugggaacgcuauau

SEQ ID NO: 190051 - RNA, 19 nt, Artificial Sequence
  Description of Artificial Sequence: Synthetic oligonucleotide
guuuagcuacuggggugaa

SEQ ID NO: 190052 - RNA, 19 nt, Artificial Sequence
  Description of Artificial Sequence: Synthetic oligonucleotide
ggaacgcuauaugaugaau

SEQ ID NO: 190053 - RNA, 19 nt, Artificial Sequence
  Description of Artificial Sequence: Synthetic oligonucleotide
ccauagaucgcugcacuua

SEQ ID NO: 190054 - RNA, 19 nt, Artificial Sequence
  Description of Artificial Sequence: Synthetic oligonucleotide
ggaugguuccccaggcugu

SEQ ID NO: 190055 - RNA, 19 nt, Artificial Sequence
  Description of Artificial Sequence: Synthetic oligonucleotide
gcaugagugcggaaagagu

SEQ ID NO: 190056 - RNA, 19 nt, Artificial Sequence
  Description of Artificial Sequence: Synthetic oligonucleotide
cgguucugcuggcguaugg

SEQ ID NO: 190057 - RNA, 19 nt, Artificial Sequence
  Description of Artificial Sequence: Synthetic oligonucleotide
gcugugcucauucggcuuu

SEQ ID NO: 190058 - RNA, 19 nt, Artificial Sequence
  Description of Artificial Sequence: Synthetic oligonucleotide
ccgagcacgucuggguuuc

SEQ ID NO: 190059 - RNA, 19 nt, Artificial Sequence
  Description of Artificial Sequence: Synthetic oligonucleotide
cuccgagcacgucuggguu

SEQ ID NO: 190060 - RNA, 19 nt, Artificial Sequence
  Description of Artificial Sequence: Synthetic oligonucleotide
gguuugcgucggacagaag

SEQ ID NO: 190061 - RNA, 19 nt, Artificial Sequence
  Description of Artificial Sequence: Synthetic oligonucleotide
cguugauugaggagaugcu

SEQ ID NO: 190062 - RNA, 19 nt, Artificial Sequence
  Description of Artificial Sequence: Synthetic oligonucleotide
gcuggcguauggacagcca

SEQ ID NO: 190063 - RNA, 19 nt, Artificial Sequence
  Description of Artificial Sequence: Synthetic oligonucleotide
ccagcguggcccaccugca

SEQ ID NO: 190064 - RNA, 19 nt, Artificial Sequence
  Description of Artificial Sequence: Synthetic oligonucleotide
cuccgguugucuagugcuu

SEQ ID NO: 190065 - RNA, 19 nt, Artificial Sequence
  Description of Artificial Sequence: Synthetic oligonucleotide
gucucgaauccugcugguu

SEQ ID NO: 190066 - RNA, 19 nt, Artificial Sequence
  Description of Artificial Sequence: Synthetic oligonucleotide
ggggucggcuguaggcaca

SEQ ID NO: 190067 - RNA, 19 nt, Artificial Sequence
  Description of Artificial Sequence: Synthetic oligonucleotide
ggggaggcgccuucaguuu

SEQ ID NO: 190068 - RNA, 19 nt, Artificial Sequence
  Description of Artificial Sequence: Synthetic oligonucleotide
gugcagcuccgagcacguc

SEQ ID NO: 190069 - RNA, 19 nt, Artificial Sequence
  Description of Artificial Sequence: Synthetic oligonucleotide
cgagcacgucuggguuucc

SEQ ID NO: 190070 - RNA, 19 nt, Artificial Sequence
  Description of Artificial Sequence: Synthetic oligonucleotide
cccagucgguguggcuguc

SEQ ID NO: 190071 - RNA, 19 nt, Artificial Sequence
  Description of Artificial Sequence: Synthetic oligonucleotide
aaaguuggggcuuuucugg

SEQ ID NO: 190072 - RNA, 19 nt, Artificial Sequence
  Description of Artificial Sequence: Synthetic oligonucleotide
agagauuucucuauuaccc

SEQ ID NO: 190073 - RNA, 19 nt, Artificial Sequence
  Description of Artificial Sequence: Synthetic oligonucleotide
aaagagagcaggccgggcc

SEQ ID NO: 190074 - RNA, 19 nt, Artificial Sequence
  Description of Artificial Sequence: Synthetic oligonucleotide
aauggggcuaagcaggcgg

SEQ ID NO: 190075 - RNA, 19 nt, Artificial Sequence
  Description of Artificial Sequence: Synthetic oligonucleotide
aacagugagaccccagggg

SEQ ID NO: 190076 - RNA, 19 nt, Artificial Sequence
  Description of Artificial Sequence: Synthetic oligonucleotide
agaccucuaagacuggagc

SEQ ID NO: 190077 - RNA, 19 nt, Artificial Sequence
  Description of Artificial Sequence: Synthetic oligonucleotide
uacacuaggaagcagcgcu

SEQ ID NO: 190078 - RNA, 19 nt, Artificial Sequence
  Description of Artificial Sequence: Synthetic oligonucleotide
uuagaaaauccucuuccgc

SEQ ID NO: 190079 - RNA, 19 nt, Artificial Sequence
  Description of Artificial Sequence: Synthetic oligonucleotide
uguacacuaggaagcagcg

SEQ ID NO: 190080 - RNA, 19 nt, Artificial Sequence
  Description of Artificial Sequence: Synthetic oligonucleotide
ugauugggaaaauagggcu

SEQ ID NO: 190081 - RNA, 19 nt, Artificial Sequence
  Description of Artificial Sequence: Synthetic oligonucleotide
ucgaaggcggcucuggugg

SEQ ID NO: 190082 - RNA, 19 nt, Artificial Sequence
  Description of Artificial Sequence: Synthetic oligonucleotide
cacaaaucggacuuggccc

SEQ ID NO: 190083 - RNA, 19 nt, Artificial Sequence
  Description of Artificial Sequence: Synthetic oligonucleotide
gaugcgguaguccuuuggg

SEQ ID NO: 190084 - RNA, 19 nt, Artificial Sequence
  Description of Artificial Sequence: Synthetic oligonucleotide
aaaaugagagagggguccc

SEQ ID NO: 190085 - RNA, 19 nt, Artificial Sequence
  Description of Artificial Sequence: Synthetic oligonucleotide
agguguggccccuagacac

SEQ ID NO: 190086 - RNA, 19 nt, Artificial Sequence
  Description of Artificial Sequence: Synthetic oligonucleotide
aaagcuauaccugcagcag

SEQ ID NO: 190087 - RNA, 19 nt, Artificial Sequence
  Description of Artificial Sequence: Synthetic oligonucleotide
uaagcuguuggaaaccgga

SEQ ID NO: 190088 - RNA, 19 nt, Artificial Sequence
  Description of Artificial Sequence: Synthetic oligonucleotide
cauacaaugugcgugggcc

SEQ ID NO: 190089 - RNA, 19 nt, Artificial Sequence
  Description of Artificial Sequence: Synthetic oligonucleotide
ugguuggucagcaaagucu

SEQ ID NO: 190090 - RNA, 19 nt, Artificial Sequence
  Description of Artificial Sequence: Synthetic oligonucleotide
guggcuugcccacaaaucg

SEQ ID NO: 190091 - RNA, 19 nt, Artificial Sequence
  Description of Artificial Sequence: Synthetic oligonucleotide
gagucuuucuuccauguac

SEQ ID NO: 190092 - RNA, 19 nt, Artificial Sequence
  Description of Artificial Sequence: Synthetic oligonucleotide
cucgcuguacacuaggaag

SEQ ID NO: 190093 - RNA, 19 nt, Artificial Sequence
  Description of Artificial Sequence: Synthetic oligonucleotide
ugcaacugaacugacagcu

SEQ ID NO: 190094 - RNA, 19 nt, Artificial Sequence
  Description of Artificial Sequence: Synthetic oligonucleotide
ucgaaaggccagaacacag

SEQ ID NO: 190095 - RNA, 19 nt, Artificial Sequence
  Description of Artificial Sequence: Synthetic oligonucleotide
gaaagcuauaccugcagca

SEQ ID NO: 190096 - RNA, 19 nt, Artificial Sequence
  Description of Artificial Sequence: Synthetic oligonucleotide
gaggcuaggaguuggggag

SEQ ID NO: 190097 - RNA, 19 nt, Artificial Sequence
  Description of Artificial Sequence: Synthetic oligonucleotide
uuuggcuccaggagcaagc

SEQ ID NO: 190098 - RNA, 19 nt, Artificial Sequence
  Description of Artificial Sequence: Synthetic oligonucleotide
uuuaaggcaucagaaggca

SEQ ID NO: 190099 - RNA, 19 nt, Artificial Sequence
  Description of Artificial Sequence: Synthetic oligonucleotide
ugguuagaggcccagugac

SEQ ID NO: 190100 - RNA, 19 nt, Artificial Sequence
  Description of Artificial Sequence: Synthetic oligonucleotide
acauacaaugugcgugggc

SEQ ID NO: 190101 - RNA, 19 nt, Artificial Sequence
  Description of Artificial Sequence: Synthetic oligonucleotide
ucggguacuggccagagua

SEQ ID NO: 190102 - RNA, 19 nt, Artificial Sequence
  Description of Artificial Sequence: Synthetic oligonucleotide
cuuagaguggccuguucgc

SEQ ID NO: 190103 - RNA, 19 nt, Artificial Sequence
  Description of Artificial Sequence: Synthetic oligonucleotide
aaaugagagaggggucccc

SEQ ID NO: 190104 - RNA, 19 nt, Artificial Sequence
  Description of Artificial Sequence: Synthetic oligonucleotide
ucgauugagagccguggcc

SEQ ID NO: 190105 - RNA, 19 nt, Artificial Sequence
  Description of Artificial Sequence: Synthetic oligonucleotide
aacugaacugacagcuccc

SEQ ID NO: 190106 - RNA, 19 nt, Artificial Sequence
  Description of Artificial Sequence: Synthetic oligonucleotide
cagugcacauacaaugugc

SEQ ID NO: 190107 - RNA, 19 nt, Artificial Sequence
  Description of Artificial Sequence: Synthetic oligonucleotide
caauggucagcuuucauga

SEQ ID NO: 190108 - RNA, 19 nt, Artificial Sequence
  Description of Artificial Sequence: Synthetic oligonucleotide
uuccgcuucagguaggagu

SEQ ID NO: 190109 - RNA, 19 nt, Artificial Sequence
  Description of Artificial Sequence: Synthetic oligonucleotide
uggcuugcccacaaaucgg

SEQ ID NO: 190110 - RNA, 19 nt, Artificial Sequence
  Description of Artificial Sequence: Synthetic oligonucleotide
uugggucccggccuggagg

SEQ ID NO: 190111 - RNA, 19 nt, Artificial Sequence
  Description of Artificial Sequence: Synthetic oligonucleotide
acgucuuuagaaaauccuc

SEQ ID NO: 190112 - RNA, 19 nt, Artificial Sequence
  Description of Artificial Sequence: Synthetic oligonucleotide
uggcaauggggcuaagcag

SEQ ID NO: 190113 - RNA, 19 nt, Artificial Sequence
  Description of Artificial Sequence: Synthetic oligonucleotide
aagcuauaccugcagcaga

SEQ ID NO: 190114 - RNA, 19 nt, Artificial Sequence
  Description of Artificial Sequence: Synthetic oligonucleotide
agcaucgguaggcugcaac

SEQ ID NO: 190115 - RNA, 19 nt, Artificial Sequence
  Description of Artificial Sequence: Synthetic oligonucleotide
cacucgaaaggccagaaca

SEQ ID NO: 190116 - RNA, 19 nt, Artificial Sequence
  Description of Artificial Sequence: Synthetic oligonucleotide
uaggucagagcucuuuggu

SEQ ID NO: 190117 - RNA, 19 nt, Artificial Sequence
  Description of Artificial Sequence: Synthetic oligonucleotide
acaaaucggacuuggcccu

SEQ ID NO: 190118 - RNA, 19 nt, Artificial Sequence
  Description of Artificial Sequence: Synthetic oligonucleotide
ucagguaggaguccgcgua

SEQ ID NO: 190119 - RNA, 19 nt, Artificial Sequence
  Description of Artificial Sequence: Synthetic oligonucleotide
ugggugaaccggaauaaaa

SEQ ID NO: 190120 - RNA, 19 nt, Artificial Sequence
  Description of Artificial Sequence: Synthetic oligonucleotide
cuccgaggcucauugaagc

SEQ ID NO: 190121 - RNA, 19 nt, Artificial Sequence
  Description of Artificial Sequence: Synthetic oligonucleotide
gugaccauugggcccaggg

SEQ ID NO: 190122 - RNA, 19 nt, Artificial Sequence
  Description of Artificial Sequence: Synthetic oligonucleotide
acucgaaaggccagaacac

SEQ ID NO: 190123 - RNA, 19 nt, Artificial Sequence
  Description of Artificial Sequence: Synthetic oligonucleotide
aaacugcgcuucuggccgc

SEQ ID NO: 190124 - RNA, 19 nt, Artificial Sequence
  Description of Artificial Sequence: Synthetic oligonucleotide
caagaccaaggcuuuggcc

SEQ ID NO: 190125 - RNA, 19 nt, Artificial Sequence
  Description of Artificial Sequence: Synthetic oligonucleotide
gacgaggcaggcgaggagg

SEQ ID NO: 190126 - RNA, 19 nt, Artificial Sequence
  Description of Artificial Sequence: Synthetic oligonucleotide
acccaaaagcaauucggug

SEQ ID NO: 190127 - RNA, 19 nt, Artificial Sequence
  Description of Artificial Sequence: Synthetic oligonucleotide
gagucccuugccucgauug

SEQ ID NO: 190128 - RNA, 19 nt, Artificial Sequence
  Description of Artificial Sequence: Synthetic oligonucleotide
gcacauacaaugugcgugg

SEQ ID NO: 190129 - RNA, 19 nt, Artificial Sequence
  Description of Artificial Sequence: Synthetic oligonucleotide
guuggaaaccggaagugug

SEQ ID NO: 190130 - RNA, 19 nt, Artificial Sequence
  Description of Artificial Sequence: Synthetic oligonucleotide
gggguaaucaaagccauag

SEQ ID NO: 190131 - RNA, 19 nt, Artificial Sequence
  Description of Artificial Sequence: Synthetic oligonucleotide
aaccggaaguguggaaugg

SEQ ID NO: 190132 - RNA, 19 nt, Artificial Sequence
  Description of Artificial Sequence: Synthetic oligonucleotide
ucgaggucccacauccgag

SEQ ID NO: 190133 - RNA, 19 nt, Artificial Sequence
  Description of Artificial Sequence: Synthetic oligonucleotide
caggauguuuggcucaggc

SEQ ID NO: 190134 - RNA, 19 nt, Artificial Sequence
  Description of Artificial Sequence: Synthetic oligonucleotide
agcucggcaucugagcagc

SEQ ID NO: 190135 - RNA, 19 nt, Artificial Sequence
  Description of Artificial Sequence: Synthetic oligonucleotide
ugaccuggguacaaugguc

SEQ ID NO: 190136 - RNA, 19 nt, Artificial Sequence
  Description of Artificial Sequence: Synthetic oligonucleotide
gagaucugggaucggguac

SEQ ID NO: 190137 - RNA, 19 nt, Artificial Sequence
  Description of Artificial Sequence: Synthetic oligonucleotide
uccauguacucugcaaagc

SEQ ID NO: 190138 - RNA, 19 nt, Artificial Sequence
  Description of Artificial Sequence: Synthetic oligonucleotide
ucgcucgcuguacacuagg

SEQ ID NO: 190139 - RNA, 19 nt, Artificial Sequence
  Description of Artificial Sequence: Synthetic oligonucleotide
uguuggaaaccggaagugu

SEQ ID NO: 190140 - RNA, 19 nt, Artificial Sequence
  Description of Artificial Sequence: Synthetic oligonucleotide
augguuagaggcccaguga

SEQ ID NO: 190141 - RNA, 19 nt, Artificial Sequence
  Description of Artificial Sequence: Synthetic oligonucleotide
ucgggagaccucuaagacu

SEQ ID NO: 190142 - RNA, 19 nt, Artificial Sequence
  Description of Artificial Sequence: Synthetic oligonucleotide
acugaacugacagcucccg

SEQ ID NO: 190143 - RNA, 19 nt, Artificial Sequence
  Description of Artificial Sequence: Synthetic oligonucleotide
ugucccugauccucacagg

SEQ ID NO: 190144 - RNA, 19 nt, Artificial Sequence
  Description of Artificial Sequence: Synthetic oligonucleotide
agggacuacugaagaagcc

SEQ ID NO: 190145 - RNA, 19 nt, Artificial Sequence
  Description of Artificial Sequence: Synthetic oligonucleotide
caccgggagugcaacaagg

SEQ ID NO: 190146 - RNA, 19 nt, Artificial Sequence
  Description of Artificial Sequence: Synthetic oligonucleotide
gguggagugagcugggaug

SEQ ID NO: 190147 - RNA, 19 nt, Artificial Sequence
  Description of Artificial Sequence: Synthetic oligonucleotide
uucaaggggaugcgguagu

SEQ ID NO: 190148 - RNA, 19 nt, Artificial Sequence
  Description of Artificial Sequence: Synthetic oligonucleotide
cacguagcugcccucuggg

SEQ ID NO: 190149 - RNA, 19 nt, Artificial Sequence
  Description of Artificial Sequence: Synthetic oligonucleotide
aaaucggacuuggcccugg

SEQ ID NO: 190150 - RNA, 19 nt, Artificial Sequence
  Description of Artificial Sequence: Synthetic oligonucleotide
aucagaaggcaagaagacu

SEQ ID NO: 190151 - RNA, 19 nt, Artificial Sequence
  Description of Artificial Sequence: Synthetic oligonucleotide
uuuggccuucuguccacag

SEQ ID NO: 190152 - RNA, 19 nt, Artificial Sequence
  Description of Artificial Sequence: Synthetic oligonucleotide
gagaccucuaagacuggag

SEQ ID NO: 190153 - RNA, 19 nt, Artificial Sequence
  Description of Artificial Sequence: Synthetic oligonucleotide
aucgguaggcugcaacuga

SEQ ID NO: 190154 - RNA, 19 nt, Artificial Sequence
  Description of Artificial Sequence: Synthetic oligonucleotide
agguuggccacgcacaaua

SEQ ID NO: 190155 - RNA, 19 nt, Artificial Sequence
  Description of Artificial Sequence: Synthetic oligonucleotide
cugggaucggguacuggcc

SEQ ID NO: 190156 - RNA, 19 nt, Artificial Sequence
  Description of Artificial Sequence: Synthetic oligonucleotide
cucgauugagagccguggc

SEQ ID NO: 190157 - RNA, 19 nt, Artificial Sequence
  Description of Artificial Sequence: Synthetic oligonucleotide
agugcuggcccacguagcu

SEQ ID NO: 190158 - RNA, 19 nt, Artificial Sequence
  Description of Artificial Sequence: Synthetic oligonucleotide
agucuuucuuccauguacu

SEQ ID NO: 190159 - RNA, 19 nt, Artificial Sequence
  Description of Artificial Sequence: Synthetic oligonucleotide
cuucgggagaccucuaaga

SEQ ID NO: 190160 - RNA, 19 nt, Artificial Sequence
  Description of Artificial Sequence: Synthetic oligonucleotide
acccaaagaaaggauauua

SEQ ID NO: 190161 - RNA, 19 nt, Artificial Sequence
  Description of Artificial Sequence: Synthetic oligonucleotide
accgggagugcaacaaggc

SEQ ID NO: 190162 - RNA, 19 nt, Artificial Sequence
  Description of Artificial Sequence: Synthetic oligonucleotide
cuaccauuguugcuaccac

SEQ ID NO: 190163 - RNA, 19 nt, Artificial Sequence
  Description of Artificial Sequence: Synthetic oligonucleotide
guucaaggggaugcgguag

SEQ ID NO: 190164 - RNA, 19 nt, Artificial Sequence
  Description of Artificial Sequence: Synthetic oligonucleotide
ggaguuggcagguuggguc

SEQ ID NO: 190165 - RNA, 19 nt, Artificial Sequence
  Description of Artificial Sequence: Synthetic oligonucleotide
agcaguggugguaguaagg

SEQ ID NO: 190166 - RNA, 19 nt, Artificial Sequence
  Description of Artificial Sequence: Synthetic oligonucleotide
uggcagguuggccacgcac

SEQ ID NO: 190167 - RNA, 19 nt, Artificial Sequence
  Description of Artificial Sequence: Synthetic oligonucleotide
cacgcacaauagagcaucg

SEQ ID NO: 190168 - RNA, 19 nt, Artificial Sequence
  Description of Artificial Sequence: Synthetic oligonucleotide
auagggcuaagcuguugga

SEQ ID NO: 190169 - RNA, 19 nt, Artificial Sequence
  Description of Artificial Sequence: Synthetic oligonucleotide
uucagguaggaguccgcgu

SEQ ID NO: 190170 - RNA, 19 nt, Artificial Sequence
  Description of Artificial Sequence: Synthetic oligonucleotide
uucgcucgcuguacacuag

SEQ ID NO: 190171 - RNA, 19 nt, Artificial Sequence
  Description of Artificial Sequence: Synthetic oligonucleotide
ucgguaggcugcaacugaa

SEQ ID NO: 190172 - RNA, 19 nt, Artificial Sequence
  Description of Artificial Sequence: Synthetic oligonucleotide
auccgagggguaaucaaag

SEQ ID NO: 190173 - RNA, 19 nt, Artificial Sequence
  Description of Artificial Sequence: Synthetic oligonucleotide
caucauccugguuuuaaaa

SEQ ID NO: 190174 - RNA, 19 nt, Artificial Sequence
  Description of Artificial Sequence: Synthetic oligonucleotide
gcuaagcuguuggaaaccg

SEQ ID NO: 190175 - RNA, 19 nt, Artificial Sequence
  Description of Artificial Sequence: Synthetic oligonucleotide
gcucugaccugguaggacc

SEQ ID NO: 190176 - RNA, 19 nt, Artificial Sequence
  Description of Artificial Sequence: Synthetic oligonucleotide
gacgucuuuagaaaauccu

SEQ ID NO: 190177 - RNA, 19 nt, Artificial Sequence
  Description of Artificial Sequence: Synthetic oligonucleotide
cuguuggaaaccggaagug

SEQ ID NO: 190178 - RNA, 19 nt, Artificial Sequence
  Description of Artificial Sequence: Synthetic oligonucleotide
cugguuggucagcaaaguc

SEQ ID NO: 190179 - RNA, 19 nt, Artificial Sequence
  Description of Artificial Sequence: Synthetic oligonucleotide
gggaaagagagcaggccgg

SEQ ID NO: 190180 - RNA, 19 nt, Artificial Sequence
  Description of Artificial Sequence: Synthetic oligonucleotide
ggacuacugaagaagccag

SEQ ID NO: 190181 - RNA, 19 nt, Artificial Sequence
  Description of Artificial Sequence: Synthetic oligonucleotide
gggagugcaacaaggcagg

SEQ ID NO: 190182 - RNA, 19 nt, Artificial Sequence
  Description of Artificial Sequence: Synthetic oligonucleotide
uguaggccacuggugaagu

SEQ ID NO: 190183 - RNA, 19 nt, Artificial Sequence
  Description of Artificial Sequence: Synthetic oligonucleotide
uugcuaccauuguugcuac

SEQ ID NO: 190184 - RNA, 19 nt, Artificial Sequence
  Description of Artificial Sequence: Synthetic oligonucleotide
cugaacugacagcucccgc

SEQ ID NO: 190185 - RNA, 19 nt, Artificial Sequence
  Description of Artificial Sequence: Synthetic oligonucleotide
agaggguugaggagcagcu

SEQ ID NO: 190186 - RNA, 19 nt, Artificial Sequence
  Description of Artificial Sequence: Synthetic oligonucleotide
acccagacccaugggcucc

SEQ ID NO: 190187 - RNA, 19 nt, Artificial Sequence
  Description of Artificial Sequence: Synthetic oligonucleotide
gagccucggagccccacag

SEQ ID NO: 190188 - RNA, 19 nt, Artificial Sequence
  Description of Artificial Sequence: Synthetic oligonucleotide
uagggcuaagcuguuggaa

SEQ ID NO: 190189 - RNA, 19 nt, Artificial Sequence
  Description of Artificial Sequence: Synthetic oligonucleotide
acaucuugugucggcuggg

SEQ ID NO: 190190 - RNA, 19 nt, Artificial Sequence
  Description of Artificial Sequence: Synthetic oligonucleotide
gugguuugccaagaccaag

SEQ ID NO: 190191 - RNA, 19 nt, Artificial Sequence
  Description of Artificial Sequence: Synthetic oligonucleotide
uugagagccguggccuggg

SEQ ID NO: 190192 - RNA, 19 nt, Artificial Sequence
  Description of Artificial Sequence: Synthetic oligonucleotide
cacuggugccuccaugcag

SEQ ID NO: 190193 - RNA, 19 nt, Artificial Sequence
  Description of Artificial Sequence: Synthetic oligonucleotide
gaaaccggaaguguggaau

SEQ ID NO: 190194 - RNA, 19 nt, Artificial Sequence
  Description of Artificial Sequence: Synthetic oligonucleotide
agucccuugccucgauuga

SEQ ID NO: 190195 - RNA, 19 nt, Artificial Sequence
  Description of Artificial Sequence: Synthetic oligonucleotide
agguuguucaauagcugca

SEQ ID NO: 190196 - RNA, 19 nt, Artificial Sequence
  Description of Artificial Sequence: Synthetic oligonucleotide
ggaggaaccaacagccuug

SEQ ID NO: 190197 - RNA, 19 nt, Artificial Sequence
  Description of Artificial Sequence: Synthetic oligonucleotide
ugucggcuggguccaugag

SEQ ID NO: 190198 - RNA, 19 nt, Artificial Sequence
  Description of Artificial Sequence: Synthetic oligonucleotide
gggugguuugccaagacca

SEQ ID NO: 190199 - RNA, 19 nt, Artificial Sequence
  Description of Artificial Sequence: Synthetic oligonucleotide
cuaaggggugguuugccaa

SEQ ID NO: 190200 - RNA, 19 nt, Artificial Sequence
  Description of Artificial Sequence: Synthetic oligonucleotide
gggacccagacccaugggc

SEQ ID NO: 190201 - RNA, 19 nt, Artificial Sequence
  Description of Artificial Sequence: Synthetic oligonucleotide
caaggggaugcgguagucc

SEQ ID NO: 190202 - RNA, 19 nt, Artificial Sequence
  Description of Artificial Sequence: Synthetic oligonucleotide
ccgucgaggucccacaucc

SEQ ID NO: 190203 - RNA, 19 nt, Artificial Sequence
  Description of Artificial Sequence: Synthetic oligonucleotide
ggccacgcacaauagagca

SEQ ID NO: 190204 - RNA, 19 nt, Artificial Sequence
  Description of Artificial Sequence: Synthetic oligonucleotide
guuggccacgcacaauaga

SEQ ID NO: 190205 - RNA, 19 nt, Artificial Sequence
  Description of Artificial Sequence: Synthetic oligonucleotide
gucgaggucccacauccga

SEQ ID NO: 190206 - RNA, 19 nt, Artificial Sequence
  Description of Artificial Sequence: Synthetic oligonucleotide
gugguccacacagaggcac

SEQ ID NO: 190207 - RNA, 19 nt, Artificial Sequence
  Description of Artificial Sequence: Synthetic oligonucleotide
agcuauaccugcagcagau

SEQ ID NO: 190208 - RNA, 19 nt, Artificial Sequence
  Description of Artificial Sequence: Synthetic oligonucleotide
acgcacaauagagcaucgg

SEQ ID NO: 190209 - RNA, 19 nt, Artificial Sequence
  Description of Artificial Sequence: Synthetic oligonucleotide
aaggggugguuugccaaga

SEQ ID NO: 190210 - RNA, 19 nt, Artificial Sequence
  Description of Artificial Sequence: Synthetic oligonucleotide
cacauacaaugugcguggg

SEQ ID NO: 190211 - RNA, 19 nt, Artificial Sequence
  Description of Artificial Sequence: Synthetic oligonucleotide
uaagcaggcgggacuucau

SEQ ID NO: 190212 - RNA, 19 nt, Artificial Sequence
  Description of Artificial Sequence: Synthetic oligonucleotide
uugccaagaccaaggcuuu

SEQ ID NO: 190213 - RNA, 19 nt, Artificial Sequence
  Description of Artificial Sequence: Synthetic oligonucleotide
cgggagugcaacaaggcag

SEQ ID NO: 190214 - RNA, 19 nt, Artificial Sequence
  Description of Artificial Sequence: Synthetic oligonucleotide
caucgguaggcugcaacug

SEQ ID NO: 190215 - RNA, 19 nt, Artificial Sequence
  Description of Artificial Sequence: Synthetic oligonucleotide
ggaaagagagcaggccggg

SEQ ID NO: 190216 - RNA, 19 nt, Artificial Sequence
  Description of Artificial Sequence: Synthetic oligonucleotide
auguggucaucauccuggu

SEQ ID NO: 190217 - RNA, 19 nt, Artificial Sequence
  Description of Artificial Sequence: Synthetic oligonucleotide
aaaauagggcuaagcuguu

SEQ ID NO: 190218 - RNA, 19 nt, Artificial Sequence
  Description of Artificial Sequence: Synthetic oligonucleotide
guugggugaaccggaauaa

SEQ ID NO: 190219 - RNA, 19 nt, Artificial Sequence
  Description of Artificial Sequence: Synthetic oligonucleotide
caaagggccgcaccagcuc

SEQ ID NO: 190220 - RNA, 19 nt, Artificial Sequence
  Description of Artificial Sequence: Synthetic oligonucleotide
gcuaccauuguugcuacca

SEQ ID NO: 190221 - RNA, 19 nt, Artificial Sequence
  Description of Artificial Sequence: Synthetic oligonucleotide
ugccaaagggccgcaccag

SEQ ID NO: 190222 - RNA, 19 nt, Artificial Sequence
  Description of Artificial Sequence: Synthetic oligonucleotide
gggcuaagcuguuggaaac

SEQ ID NO: 190223 - RNA, 19 nt, Artificial Sequence
  Description of Artificial Sequence: Synthetic oligonucleotide
agucaagcuuccagagcuc

SEQ ID NO: 190224 - RNA, 19 nt, Artificial Sequence
  Description of Artificial Sequence: Synthetic oligonucleotide
gggacuacugaagaagcca

SEQ ID NO: 190225 - RNA, 19 nt, Artificial Sequence
  Description of Artificial Sequence: Synthetic oligonucleotide
gggccccucucucuuaagg

SEQ ID NO: 190226 - RNA, 19 nt, Artificial Sequence
  Description of Artificial Sequence: Synthetic oligonucleotide
uugccucgauugagagccg

SEQ ID NO: 190227 - RNA, 19 nt, Artificial Sequence
  Description of Artificial Sequence: Synthetic oligonucleotide
gucccuugccucgauugag

SEQ ID NO: 190228 - RNA, 19 nt, Artificial Sequence
  Description of Artificial Sequence: Synthetic oligonucleotide
uugggugaaccggaauaaa

SEQ ID NO: 190229 - RNA, 19 nt, Artificial Sequence
  Description of Artificial Sequence: Synthetic oligonucleotide
auggggcuaagcaggcggg

SEQ ID NO: 190230 - RNA, 19 nt, Artificial Sequence
  Description of Artificial Sequence: Synthetic oligonucleotide
gacccagacccaugggcuc

SEQ ID NO: 190231 - RNA, 19 nt, Artificial Sequence
  Description of Artificial Sequence: Synthetic oligonucleotide
guucgcucgcuguacacua

SEQ ID NO: 190232 - RNA, 19 nt, Artificial Sequence
  Description of Artificial Sequence: Synthetic oligonucleotide
cggaaguguggaauggagg

SEQ ID NO: 190233 - RNA, 19 nt, Artificial Sequence
  Description of Artificial Sequence: Synthetic oligonucleotide
cucgaaaggccagaacaca

SEQ ID NO: 190234 - RNA, 19 nt, Artificial Sequence
  Description of Artificial Sequence: Synthetic oligonucleotide
ugggagugcuggcccacgu

SEQ ID NO: 190235 - RNA, 19 nt, Artificial Sequence
  Description of Artificial Sequence: Synthetic oligonucleotide
guuugccaagaccaaggcu

SEQ ID NO: 190236 - RNA, 19 nt, Artificial Sequence
  Description of Artificial Sequence: Synthetic oligonucleotide
agccucggagccccacagg

SEQ ID NO: 190237 - RNA, 19 nt, Artificial Sequence
  Description of Artificial Sequence: Synthetic oligonucleotide
gaguccgcguaguggccgc

SEQ ID NO: 190238 - RNA, 19 nt, Artificial Sequence
  Description of Artificial Sequence: Synthetic oligonucleotide
uacccaaagaaaggauauu

SEQ ID NO: 190239 - RNA, 19 nt, Artificial Sequence
  Description of Artificial Sequence: Synthetic oligonucleotide
ugcuaccauuguugcuacc

SEQ ID NO: 190240 - RNA, 19 nt, Artificial Sequence
  Description of Artificial Sequence: Synthetic oligonucleotide
gaggguugaggagcagcug

SEQ ID NO: 190241 - RNA, 19 nt, Artificial Sequence
  Description of Artificial Sequence: Synthetic oligonucleotide
ccggaaguguggaauggag

SEQ ID NO: 190242 - RNA, 19 nt, Artificial Sequence
  Description of Artificial Sequence: Synthetic oligonucleotide
ugggcaacgguggcucagc

SEQ ID NO: 190243 - RNA, 19 nt, Artificial Sequence
  Description of Artificial Sequence: Synthetic oligonucleotide
agagcaucgguaggcugca

SEQ ID NO: 190244 - RNA, 19 nt, Artificial Sequence
  Description of Artificial Sequence: Synthetic oligonucleotide
ggcgccgacgucuuuagaa

SEQ ID NO: 190245 - RNA, 19 nt, Artificial Sequence
  Description of Artificial Sequence: Synthetic oligonucleotide
cgacgucuuuagaaaaucc

SEQ ID NO: 190246 - RNA, 19 nt, Artificial Sequence
  Description of Artificial Sequence: Synthetic oligonucleotide
aggaccuguggcccaacuu

SEQ ID NO: 190247 - RNA, 19 nt, Artificial Sequence
  Description of Artificial Sequence: Synthetic oligonucleotide
ccucgauugagagccgugg

SEQ ID NO: 190248 - RNA, 19 nt, Artificial Sequence
  Description of Artificial Sequence: Synthetic oligonucleotide
ggcuaagcuguuggaaacc

SEQ ID NO: 190249 - RNA, 19 nt, Artificial Sequence
  Description of Artificial Sequence: Synthetic oligonucleotide
cacuaagcaguggcauggc

SEQ ID NO: 190250 - RNA, 19 nt, Artificial Sequence
  Description of Artificial Sequence: Synthetic oligonucleotide
uccgcguaguggccgccga

SEQ ID NO: 190251 - RNA, 19 nt, Artificial Sequence
  Description of Artificial Sequence: Synthetic oligonucleotide
ggaguccgcguaguggccg

SEQ ID NO: 190252 - RNA, 19 nt, Artificial Sequence
  Description of Artificial Sequence: Synthetic oligonucleotide
acaaugugcgugggcccag

SEQ ID NO: 190253 - RNA, 19 nt, Artificial Sequence
  Description of Artificial Sequence: Synthetic oligonucleotide
caaagucaauugucuaagu

SEQ ID NO: 190254 - RNA, 19 nt, Artificial Sequence
  Description of Artificial Sequence: Synthetic oligonucleotide
ucuccuugccugccagguu

SEQ ID NO: 190255 - RNA, 19 nt, Artificial Sequence
  Description of Artificial Sequence: Synthetic oligonucleotide
gacagcucccgcucucgaa

SEQ ID NO: 190256 - RNA, 19 nt, Artificial Sequence
  Description of Artificial Sequence: Synthetic oligonucleotide
gguuguggcuucccucggc

SEQ ID NO: 190257 - RNA, 19 nt, Artificial Sequence
  Description of Artificial Sequence: Synthetic oligonucleotide
cuaagacuggagccucgga

SEQ ID NO: 190258 - RNA, 19 nt, Artificial Sequence
  Description of Artificial Sequence: Synthetic oligonucleotide
gugucggcuggguccauga

SEQ ID NO: 190259 - RNA, 19 nt, Artificial Sequence
  Description of Artificial Sequence: Synthetic oligonucleotide
gcaaugagugcugccagca

SEQ ID NO: 190260 - RNA, 19 nt, Artificial Sequence
  Description of Artificial Sequence: Synthetic oligonucleotide
ugcccacaaaucggacuug

SEQ ID NO: 190261 - RNA, 19 nt, Artificial Sequence
  Description of Artificial Sequence: Synthetic oligonucleotide
gagccgucgaggucccaca

SEQ ID NO: 190262 - RNA, 19 nt, Artificial Sequence
  Description of Artificial Sequence: Synthetic oligonucleotide
cauagcugucaggcagccc

SEQ ID NO: 190263 - RNA, 19 nt, Artificial Sequence
  Description of Artificial Sequence: Synthetic oligonucleotide
gcgggacuucaucuggaag

SEQ ID NO: 190264 - RNA, 19 nt, Artificial Sequence
  Description of Artificial Sequence: Synthetic oligonucleotide
aguccgcguaguggccgcc

SEQ ID NO: 190265 - RNA, 19 nt, Artificial Sequence
  Description of Artificial Sequence: Synthetic oligonucleotide
agccuguaggccacuggug

SEQ ID NO: 190266 - RNA, 19 nt, Artificial Sequence
  Description of Artificial Sequence: Synthetic oligonucleotide
ggcuagcugcaguagugca

SEQ ID NO: 190267 - RNA, 19 nt, Artificial Sequence
  Description of Artificial Sequence: Synthetic oligonucleotide
cugggcaacgguggcucag

SEQ ID NO: 190268 - RNA, 19 nt, Artificial Sequence
  Description of Artificial Sequence: Synthetic oligonucleotide
gguucaaggggaugcggua

SEQ ID NO: 190269 - RNA, 19 nt, Artificial Sequence
  Description of Artificial Sequence: Synthetic oligonucleotide
gggauggauguggucauca

SEQ ID NO: 190270 - RNA, 19 nt, Artificial Sequence
  Description of Artificial Sequence: Synthetic oligonucleotide
agcagaugauugggaaaau

SEQ ID NO: 190271 - RNA, 19 nt, Artificial Sequence
  Description of Artificial Sequence: Synthetic oligonucleotide
caaaucggacuuggcccug

SEQ ID NO: 190272 - RNA, 19 nt, Artificial Sequence
  Description of Artificial Sequence: Synthetic oligonucleotide
gguuggccacgcacaauag

SEQ ID NO: 190273 - RNA, 19 nt, Artificial Sequence
  Description of Artificial Sequence: Synthetic oligonucleotide
gcaauggggcuaagcaggc

SEQ ID NO: 190274 - RNA, 19 nt, Artificial Sequence
  Description of Artificial Sequence: Synthetic oligonucleotide
uggugccuccaugcagcag

SEQ ID NO: 190275 - RNA, 19 nt, Artificial Sequence
  Description of Artificial Sequence: Synthetic oligonucleotide
ggguacaauggucagcuuu

SEQ ID NO: 190276 - RNA, 19 nt, Artificial Sequence
  Description of Artificial Sequence: Synthetic oligonucleotide
gcuugaggccagccuguag

SEQ ID NO: 190277 - RNA, 19 nt, Artificial Sequence
  Description of Artificial Sequence: Synthetic oligonucleotide
cccacaaaucggacuuggc

SEQ ID NO: 190278 - RNA, 19 nt, Artificial Sequence
  Description of Artificial Sequence: Synthetic oligonucleotide
cuuccgcuucagguaggag

SEQ ID NO: 190279 - RNA, 19 nt, Artificial Sequence
  Description of Artificial Sequence: Synthetic oligonucleotide
gggacaccuccaaaggcac

SEQ ID NO: 190280 - RNA, 19 nt, Artificial Sequence
  Description of Artificial Sequence: Synthetic oligonucleotide
cacauccgagggguaauca

SEQ ID NO: 190281 - RNA, 19 nt, Artificial Sequence
  Description of Artificial Sequence: Synthetic oligonucleotide
gcccaguggggucuuuagc

SEQ ID NO: 190282 - RNA, 19 nt, Artificial Sequence
  Description of Artificial Sequence: Synthetic oligonucleotide
ggaucagagggacaugguu

SEQ ID NO: 190283 - RNA, 19 nt, Artificial Sequence
  Description of Artificial Sequence: Synthetic oligonucleotide
gcaucgguaggcugcaacu

SEQ ID NO: 190284 - RNA, 19 nt, Artificial Sequence
  Description of Artificial Sequence: Synthetic oligonucleotide
ggaccuguggcccaacuuu

SEQ ID NO: 190285 - RNA, 19 nt, Artificial Sequence
  Description of Artificial Sequence: Synthetic oligonucleotide
agccgucgaggucccacau

SEQ ID NO: 190286 - RNA, 19 nt, Artificial Sequence
  Description of Artificial Sequence: Synthetic oligonucleotide
ccgacgucuuuagaaaauc

SEQ ID NO: 190287 - RNA, 19 nt, Artificial Sequence
  Description of Artificial Sequence: Synthetic oligonucleotide
gcggcggccucucccagag

SEQ ID NO: 190288 - RNA, 19 nt, Artificial Sequence
  Description of Artificial Sequence: Synthetic oligonucleotide
uggcgccgacgucuuuaga

SEQ ID NO: 190289 - RNA, 19 nt, Artificial Sequence
  Description of Artificial Sequence: Synthetic oligonucleotide
guccgcguaguggccgccg

SEQ ID NO: 190290 - RNA, 19 nt, Artificial Sequence
  Description of Artificial Sequence: Synthetic oligonucleotide
gaggaaccaacagccuugu

SEQ ID NO: 190291 - RNA, 19 nt, Artificial Sequence
  Description of Artificial Sequence: Synthetic oligonucleotide
aggcaccgggagugcaaca

SEQ ID NO: 190292 - RNA, 19 nt, Artificial Sequence
  Description of Artificial Sequence: Synthetic oligonucleotide
ggaaaccggaaguguggaa

SEQ ID NO: 190293 - RNA, 19 nt, Artificial Sequence
  Description of Artificial Sequence: Synthetic oligonucleotide
cagaggugauucuggcucu

SEQ ID NO: 190294 - RNA, 19 nt, Artificial Sequence
  Description of Artificial Sequence: Synthetic oligonucleotide
uggccgcccaguggggucu

SEQ ID NO: 190295 - RNA, 19 nt, Artificial Sequence
  Description of Artificial Sequence: Synthetic oligonucleotide
cagccccgggucuccuugc

SEQ ID NO: 190296 - RNA, 19 nt, Artificial Sequence
  Description of Artificial Sequence: Synthetic oligonucleotide
cugcagggcugggcaacgg

SEQ ID NO: 190297 - RNA, 19 nt, Artificial Sequence
  Description of Artificial Sequence: Synthetic oligonucleotide
uggguacaauggucagcuu

SEQ ID NO: 190298 - RNA, 19 nt, Artificial Sequence
  Description of Artificial Sequence: Synthetic oligonucleotide
ggucccacauccgaggggu

SEQ ID NO: 190299 - RNA, 19 nt, Artificial Sequence
  Description of Artificial Sequence: Synthetic oligonucleotide
gguuggucagcaaagucuu

SEQ ID NO: 190300 - RNA, 19 nt, Artificial Sequence
  Description of Artificial Sequence: Synthetic oligonucleotide
aggcucauugaagcugcua

SEQ ID NO: 190301 - RNA, 19 nt, Artificial Sequence
  Description of Artificial Sequence: Synthetic oligonucleotide
aggagucccuugccucgau

SEQ ID NO: 190302 - RNA, 19 nt, Artificial Sequence
  Description of Artificial Sequence: Synthetic oligonucleotide
cacagguguggccccuaga

SEQ ID NO: 190303 - RNA, 19 nt, Artificial Sequence
  Description of Artificial Sequence: Synthetic oligonucleotide
gcgccgacgucuuuagaaa

SEQ ID NO: 190304 - RNA, 19 nt, Artificial Sequence
  Description of Artificial Sequence: Synthetic oligonucleotide
accuguggcccaacuuuaa

SEQ ID NO: 190305 - RNA, 19 nt, Artificial Sequence
  Description of Artificial Sequence: Synthetic oligonucleotide
aggaaccaacagccuuguu

SEQ ID NO: 190306 - RNA, 19 nt, Artificial Sequence
  Description of Artificial Sequence: Synthetic oligonucleotide
ccgggagugcaacaaggca

SEQ ID NO: 190307 - RNA, 19 nt, Artificial Sequence
  Description of Artificial Sequence: Synthetic oligonucleotide
ggcaccgggagugcaacaa

SEQ ID NO: 190308 - RNA, 19 nt, Artificial Sequence
  Description of Artificial Sequence: Synthetic oligonucleotide
aggguacccagaggugauu

SEQ ID NO: 190309 - RNA, 19 nt, Artificial Sequence
  Description of Artificial Sequence: Synthetic oligonucleotide
cagaguaggcaggcaggaa

SEQ ID NO: 190310 - RNA, 19 nt, Artificial Sequence
  Description of Artificial Sequence: Synthetic oligonucleotide
gccucgauugagagccgug

SEQ ID NO: 190311 - RNA, 19 nt, Artificial Sequence
  Description of Artificial Sequence: Synthetic oligonucleotide
gggcuaagcaggcgggacu

SEQ ID NO: 190312 - RNA, 19 nt, Artificial Sequence
  Description of Artificial Sequence: Synthetic oligonucleotide
guaggaccuguggcccaac

SEQ ID NO: 190313 - RNA, 19 nt, Artificial Sequence
  Description of Artificial Sequence: Synthetic oligonucleotide
gccuguucgcucgcuguac

SEQ ID NO: 190314 - RNA, 19 nt, Artificial Sequence
  Description of Artificial Sequence: Synthetic oligonucleotide
aagagccgucgagguccca

SEQ ID NO: 190315 - RNA, 19 nt, Artificial Sequence
  Description of Artificial Sequence: Synthetic oligonucleotide
cgcguaguggccgccgagg

SEQ ID NO: 190316 - RNA, 19 nt, Artificial Sequence
  Description of Artificial Sequence: Synthetic oligonucleotide
caggagucccuugccucga

SEQ ID NO: 190317 - RNA, 19 nt, Artificial Sequence
  Description of Artificial Sequence: Synthetic oligonucleotide
cuuugggcuaagggguggu

SEQ ID NO: 190318 - RNA, 19 nt, Artificial Sequence
  Description of Artificial Sequence: Synthetic oligonucleotide
cgucgaggucccacauccg

SEQ ID NO: 190319 - RNA, 19 nt, Artificial Sequence
  Description of Artificial Sequence: Synthetic oligonucleotide
ccgagucuuucuuccaugu

SEQ ID NO: 190320 - RNA, 19 nt, Artificial Sequence
  Description of Artificial Sequence: Synthetic oligonucleotide
gccgucgaggucccacauc

SEQ ID NO: 190321 - RNA, 19 nt, Artificial Sequence
  Description of Artificial Sequence: Synthetic oligonucleotide
gcgugggcccaguggcuug

SEQ ID NO: 190322 - RNA, 19 nt, Artificial Sequence
  Description of Artificial Sequence: Synthetic oligonucleotide
caauagcugcaggauguuu

SEQ ID NO: 190323 - RNA, 19 nt, Artificial Sequence
  Description of Artificial Sequence: Synthetic oligonucleotide
ggccuguucgcucgcugua

SEQ ID NO: 190324 - RNA, 19 nt, Artificial Sequence
  Description of Artificial Sequence: Synthetic oligonucleotide
gcucccgagggugggagaa

SEQ ID NO: 190325 - RNA, 19 nt, Artificial Sequence
  Description of Artificial Sequence: Synthetic oligonucleotide
caggcccuuggagcaucuc

SEQ ID NO: 190326 - RNA, 19 nt, Artificial Sequence
  Description of Artificial Sequence: Synthetic oligonucleotide
cccacguagcugcccucug

SEQ ID NO: 190327 - RNA, 19 nt, Artificial Sequence
  Description of Artificial Sequence: Synthetic oligonucleotide
cgauugagagccguggccu

SEQ ID NO: 190328 - RNA, 19 nt, Artificial Sequence
  Description of Artificial Sequence: Synthetic oligonucleotide
ccgcguaguggccgccgag

SEQ ID NO: 190329 - RNA, 19 nt, Artificial Sequence
  Description of Artificial Sequence: Synthetic oligonucleotide
ggcuaagcaggcgggacuu

SEQ ID NO: 190330 - RNA, 19 nt, Artificial Sequence
  Description of Artificial Sequence: Synthetic oligonucleotide
gccgacgucuuuagaaaau

SEQ ID NO: 190331 - RNA, 19 nt, Artificial Sequence
  Description of Artificial Sequence: Synthetic oligonucleotide
ggggcaugagaaagcuaua

SEQ ID NO: 190332 - RNA, 19 nt, Artificial Sequence
  Description of Artificial Sequence: Synthetic oligonucleotide
gcccacuaagcaguggcau

SEQ ID NO: 190333 - RNA, 19 nt, Artificial Sequence
  Description of Artificial Sequence: Synthetic oligonucleotide
cccauuggggaggaaccaa

SEQ ID NO: 190334 - RNA, 19 nt, Artificial Sequence
  Description of Artificial Sequence: Synthetic oligonucleotide
gagcaucgguaggcugcaa

SEQ ID NO: 190335 - RNA, 19 nt, Artificial Sequence
  Description of Artificial Sequence: Synthetic oligonucleotide
ugcggccgccuggcgcaga

SEQ ID NO: 190336 - RNA, 19 nt, Artificial Sequence
  Description of Artificial Sequence: Synthetic oligonucleotide
ggucccggccuggagggua

SEQ ID NO: 190337 - RNA, 19 nt, Artificial Sequence
  Description of Artificial Sequence: Synthetic oligonucleotide
cgccgacgucuuuagaaaa

SEQ ID NO: 190338 - RNA, 19 nt, Artificial Sequence
  Description of Artificial Sequence: Synthetic oligonucleotide
cccugcagacagcucccca

SEQ ID NO: 190339 - RNA, 19 nt, Artificial Sequence
  Description of Artificial Sequence: Synthetic oligonucleotide
caaugugcgugggcccagu

SEQ ID NO: 190340 - RNA, 19 nt, Artificial Sequence
  Description of Artificial Sequence: Synthetic oligonucleotide
gugcgugggcccaguggcu

SEQ ID NO: 190341 - RNA, 19 nt, Artificial Sequence
  Description of Artificial Sequence: Synthetic oligonucleotide
ggagucccuugccucgauu

SEQ ID NO: 190342 - RNA, 19 nt, Artificial Sequence
  Description of Artificial Sequence: Synthetic oligonucleotide
gccacgcacaauagagcau

SEQ ID NO: 190343 - RNA, 19 nt, Artificial Sequence
  Description of Artificial Sequence: Synthetic oligonucleotide
gucccacauccgaggggua

SEQ ID NO: 190344 - RNA, 19 nt, Artificial Sequence
  Description of Artificial Sequence: Synthetic oligonucleotide
gcccacguagcugcccucu

SEQ ID NO: 190345 - RNA, 19 nt, Artificial Sequence
  Description of Artificial Sequence: Synthetic oligonucleotide
cggcggggcggcaguuccg

SEQ ID NO: 190346 - RNA, 19 nt, Artificial Sequence
  Description of Artificial Sequence: Synthetic oligonucleotide
ccccaacagugagacccca

SEQ ID NO: 190347 - RNA, 19 nt, Artificial Sequence
  Description of Artificial Sequence: Synthetic oligonucleotide
gcccaguggcuugcccaca

SEQ ID NO: 190348 - RNA, 19 nt, Artificial Sequence
  Description of Artificial Sequence: Synthetic oligonucleotide
ccggcugguuggucagcaa

SEQ ID NO: 190349 - RNA, 19 nt, Artificial Sequence
  Description of Artificial Sequence: Synthetic oligonucleotide
ccauugggcccagggccaa

SEQ ID NO: 190350 - RNA, 19 nt, Artificial Sequence
  Description of Artificial Sequence: Synthetic oligonucleotide
ccgccgaggcccugggagu

SEQ ID NO: 190351 - RNA, 19 nt, Artificial Sequence
  Description of Artificial Sequence: Synthetic oligonucleotide
ggccgcccaguggggucuu

SEQ ID NO: 190352 - RNA, 19 nt, Artificial Sequence
  Description of Artificial Sequence: Synthetic oligonucleotide
gccgcccaguggggucuuu

SEQ ID NO: 190353 - RNA, 19 nt, Artificial Sequence
  Description of Artificial Sequence: Synthetic oligonucleotide
aaaugucucaccuugggcc

SEQ ID NO: 190354 - RNA, 19 nt, Artificial Sequence
  Description of Artificial Sequence: Synthetic oligonucleotide
  modified_base (9)..(9): a, c, u, g, unknown or other
agugaaacngcucagauug

SEQ ID NO: 190355 - RNA, 19 nt, Artificial Sequence
  Description of Artificial Sequence: Synthetic oligonucleotide
uuagcuaccgaucaccagg

SEQ ID NO: 190356 - RNA, 19 nt, Artificial Sequence
  Description of Artificial Sequence: Synthetic oligonucleotide
aaucuuacagcuccgauca

SEQ ID NO: 190357 - RNA, 19 nt, Artificial Sequence
  Description of Artificial Sequence: Synthetic oligonucleotide
uaauuuauagguaauaauu

SEQ ID NO: 190358 - RNA, 19 nt, Artificial Sequence
  Description of Artificial Sequence: Synthetic oligonucleotide
aacuaaagcuuccagaacu

SEQ ID NO: 190359 - RNA, 19 nt, Artificial Sequence
  Description of Artificial Sequence: Synthetic oligonucleotide
guauccuauguuuagaagg

SEQ ID NO: 190360 - RNA, 19 nt, Artificial Sequence
  Description of Artificial Sequence: Synthetic oligonucleotide
aauucugugagcucgguga

SEQ ID NO: 190361 - RNA, 19 nt, Artificial Sequence
  Description of Artificial Sequence: Synthetic oligonucleotide
aguguuaugacacuguaga

SEQ ID NO: 190362 - RNA, 19 nt, Artificial Sequence
  Description of Artificial Sequence: Synthetic oligonucleotide
  modified_base (5)..(5): a, c, u, g, unknown or other
aaacngcucagauugccac

SEQ ID NO: 190363 - RNA, 19 nt, Artificial Sequence
  Description of Artificial Sequence: Synthetic oligonucleotide
uuucuaauugccuggaacc

SEQ ID NO: 190364 - RNA, 19 nt, Artificial Sequence
  Description of Artificial Sequence: Synthetic oligonucleotide
acauauucgacacucaaug

SEQ ID NO: 190365 - RNA, 19 nt, Artificial Sequence
  Description of Artificial Sequence: Synthetic oligonucleotide
ucuccuauggagaaaacga

SEQ ID NO: 190366 - RNA, 19 nt, Artificial Sequence
  Description of Artificial Sequence: Synthetic oligonucleotide
uuaguuucaggccugacaa

SEQ ID NO: 190367 - RNA, 19 nt, Artificial Sequence
  Description of Artificial Sequence: Synthetic oligonucleotide
gagaaaacgaagaagacuc

SEQ ID NO: 190368 - RNA, 19 nt, Artificial Sequence
  Description of Artificial Sequence: Synthetic oligonucleotide
uauccuauguuuagaaggc

SEQ ID NO: 190369 - RNA, 19 nt, Artificial Sequence
  Description of Artificial Sequence: Synthetic oligonucleotide
aguggcauucauuugaugu

SEQ ID NO: 190370 - RNA, 19 nt, Artificial Sequence
  Description of Artificial Sequence: Synthetic oligonucleotide
uaguccgugaaacuaaagc

SEQ ID NO: 190371 - RNA, 19 nt, Artificial Sequence
  Description of Artificial Sequence: Synthetic oligonucleotide
uugucaacuacuuguauca

SEQ ID NO: 190372 - RNA, 19 nt, Artificial Sequence
  Description of Artificial Sequence: Synthetic oligonucleotide
auacacaccguacuuuagc

SEQ ID NO: 190373 - RNA, 19 nt, Artificial Sequence
  Description of Artificial Sequence: Synthetic oligonucleotide
uacacuuaguuucaggccu

SEQ ID NO: 190374 - RNA, 19 nt, Artificial Sequence
  Description of Artificial Sequence: Synthetic oligonucleotide
auuaccuaggcucagcccu

SEQ ID NO: 190375 - RNA, 19 nt, Artificial Sequence
  Description of Artificial Sequence: Synthetic oligonucleotide
cauauaccagcuuuagccg

SEQ ID NO: 190376 - RNA, 19 nt, Artificial Sequence
  Description of Artificial Sequence: Synthetic oligonucleotide
aaacgaagaagacucaauu

SEQ ID NO: 190377 - RNA, 19 nt, Artificial Sequence
  Description of Artificial Sequence: Synthetic oligonucleotide
uacgcuaucagcaucccgu

SEQ ID NO: 190378 - RNA, 19 nt, Artificial Sequence
  Description of Artificial Sequence: Synthetic oligonucleotide
gaaccaaucaguucaugug

SEQ ID NO: 190379 - RNA, 19 nt, Artificial Sequence
  Description of Artificial Sequence: Synthetic oligonucleotide
uauucgacacucaauguuc

SEQ ID NO: 190380 - RNA, 19 nt, Artificial Sequence
  Description of Artificial Sequence: Synthetic oligonucleotide
uuggcgauuagacacacau

SEQ ID NO: 190381 - RNA, 19 nt, Artificial Sequence
  Description of Artificial Sequence: Synthetic oligonucleotide
uuugcgaagccugggaugg

SEQ ID NO: 190382 - RNA, 19 nt, Artificial Sequence
  Description of Artificial Sequence: Synthetic oligonucleotide
agaucuuagaggguguuac

SEQ ID NO: 190383 - RNA, 19 nt, Artificial Sequence
  Description of Artificial Sequence: Synthetic oligonucleotide
uagcuauaaagauaauucu

SEQ ID NO: 190384 - RNA, 19 nt, Artificial Sequence
  Description of Artificial Sequence: Synthetic oligonucleotide
uccuauuagcuaccgauca

SEQ ID NO: 190385 - RNA, 19 nt, Artificial Sequence
  Description of Artificial Sequence: Synthetic oligonucleotide
acauggguaauacugacau

SEQ ID NO: 190386 - RNA, 19 nt, Artificial Sequence
  Description of Artificial Sequence: Synthetic oligonucleotide
auaguucgccgaaagaagc

SEQ ID NO: 190387 - RNA, 19 nt, Artificial Sequence
  Description of Artificial Sequence: Synthetic oligonucleotide
acgaagaagacucaauuau

SEQ ID NO: 190388 - RNA, 19 nt, Artificial Sequence
  Description of Artificial Sequence: Synthetic oligonucleotide
aacgaagaagacucaauua

SEQ ID NO: 190389 - RNA, 19 nt, Artificial Sequence
  Description of Artificial Sequence: Synthetic oligonucleotide
aaugucucaccuugggcca

SEQ ID NO: 190390 - RNA, 19 nt, Artificial Sequence
  Description of Artificial Sequence: Synthetic oligonucleotide
uccuauguuuagaaggcca

SEQ ID NO: 190391 - RNA, 19 nt, Artificial Sequence
  Description of Artificial Sequence: Synthetic oligonucleotide
aagccccuaggucugagag

SEQ ID NO: 190392 - RNA, 19 nt, Artificial Sequence
  Description of Artificial Sequence: Synthetic oligonucleotide
auuaagggcaaauuauaaa

SEQ ID NO: 190393 - RNA, 19 nt, Artificial Sequence
  Description of Artificial Sequence: Synthetic oligonucleotide
uguuaugacacuguagauc

SEQ ID NO: 190394 - RNA, 19 nt, Artificial Sequence
  Description of Artificial Sequence: Synthetic oligonucleotide
cuuagaggguguuacgaag

SEQ ID NO: 190395 - RNA, 19 nt, Artificial Sequence
  Description of Artificial Sequence: Synthetic oligonucleotide
uuagccgaauaguucgccg

SEQ ID NO: 190396 - RNA, 19 nt, Artificial Sequence
  Description of Artificial Sequence: Synthetic oligonucleotide
guuaugacacuguagaucu

SEQ ID NO: 190397 - RNA, 19 nt, Artificial Sequence
  Description of Artificial Sequence: Synthetic oligonucleotide
cuugucaacuacuuguauc

SEQ ID NO: 190398 - RNA, 19 nt, Artificial Sequence
  Description of Artificial Sequence: Synthetic oligonucleotide
gguguuggcgauuagacac

SEQ ID NO: 190399 - RNA, 19 nt, Artificial Sequence
  Description of Artificial Sequence: Synthetic oligonucleotide
  modified_base (7)..(7): a, c, u, g, unknown or other
ugaaacngcucagauugcc

SEQ ID NO: 190400 - RNA, 19 nt, Artificial Sequence
  Description of Artificial Sequence: Synthetic oligonucleotide
ucuaguguuaugacacugu

SEQ ID NO: 190401 - RNA, 19 nt, Artificial Sequence
  Description of Artificial Sequence: Synthetic oligonucleotide
uugagcacgugcacgauac

SEQ ID NO: 190402 - RNA, 19 nt, Artificial Sequence
  Description of Artificial Sequence: Synthetic oligonucleotide
ucaauguauccuauguuua

SEQ ID NO: 190403 - RNA, 19 nt, Artificial Sequence
  Description of Artificial Sequence: Synthetic oligonucleotide
cacaccguacuuuagcaag

SEQ ID NO: 190404 - RNA, 19 nt, Artificial Sequence
  Description of Artificial Sequence: Synthetic oligonucleotide
uccgauaagggacucucca

SEQ ID NO: 190405 - RNA, 19 nt, Artificial Sequence
  Description of Artificial Sequence: Synthetic oligonucleotide
gaauaguucgccgaaagaa

SEQ ID NO: 190406 - RNA, 19 nt, Artificial Sequence
  Description of Artificial Sequence: Synthetic oligonucleotide
guuacgaagacacaccaaa

SEQ ID NO: 190407 - RNA, 19 nt, Artificial Sequence
  Description of Artificial Sequence: Synthetic oligonucleotide
ggcgauuagacacacauca

SEQ ID NO: 190408 - RNA, 19 nt, Artificial Sequence
  Description of Artificial Sequence: Synthetic oligonucleotide
gaucuuagaggguguuacg

SEQ ID NO: 190409 - RNA, 19 nt, Artificial Sequence
  Description of Artificial Sequence: Synthetic oligonucleotide
acaugcauguacuccguag

SEQ ID NO: 190410 - RNA, 19 nt, Artificial Sequence
  Description of Artificial Sequence: Synthetic oligonucleotide
auauucgacacucaauguu

SEQ ID NO: 190411 - RNA, 19 nt, Artificial Sequence
  Description of Artificial Sequence: Synthetic oligonucleotide
gguuacacguuaauuaagg

SEQ ID NO: 190412 - RNA, 19 nt, Artificial Sequence
  Description of Artificial Sequence: Synthetic oligonucleotide
aaacauacagguucccaua

SEQ ID NO: 190413 - RNA, 19 nt, Artificial Sequence
  Description of Artificial Sequence: Synthetic oligonucleotide
uccgugaaacuaaagcuuc

SEQ ID NO: 190414 - RNA, 19 nt, Artificial Sequence
  Description of Artificial Sequence: Synthetic oligonucleotide
  modified_base (15)..(15): a, c, u, g, unknown or other
auguucagugcacunccgg

SEQ ID NO: 190415 - RNA, 19 nt, Artificial Sequence
  Description of Artificial Sequence: Synthetic oligonucleotide
guacacuuaguuucaggcc

SEQ ID NO: 190416 - RNA, 19 nt, Artificial Sequence
  Description of Artificial Sequence: Synthetic oligonucleotide
uaacauggguaauacugac

SEQ ID NO: 190417 - RNA, 19 nt, Artificial Sequence
  Description of Artificial Sequence: Synthetic oligonucleotide
  modified_base (4)..(4): a, c, u, g, unknown or other
aacngcucagauugccaca

SEQ ID NO: 190418 - RNA, 19 nt, Artificial Sequence
  Description of Artificial Sequence: Synthetic oligonucleotide
ugaauccuauuagcuaccg

SEQ ID NO: 190419 - RNA, 19 nt, Artificial Sequence
  Description of Artificial Sequence: Synthetic oligonucleotide
uaguucgccgaaagaagcc

SEQ ID NO: 190420 - RNA, 19 nt, Artificial Sequence
  Description of Artificial Sequence: Synthetic oligonucleotide
cagguguuggcgauuagac

SEQ ID NO: 190421 - RNA, 19 nt, Artificial Sequence
  Description of Artificial Sequence: Synthetic oligonucleotide
uguagaucuuagagggugu

SEQ ID NO: 190422 - RNA, 19 nt, Artificial Sequence
  Description of Artificial Sequence: Synthetic oligonucleotide
cuucacaugcauguacucc

SEQ ID NO: 190423 - RNA, 19 nt, Artificial Sequence
  Description of Artificial Sequence: Synthetic oligonucleotide
uuugagguuacacguuaau

SEQ ID NO: 190424 - RNA, 19 nt, Artificial Sequence
  Description of Artificial Sequence: Synthetic oligonucleotide
uuacgaagacacaccaaaa

SEQ ID NO: 190425 - RNA, 19 nt, Artificial Sequence
  Description of Artificial Sequence: Synthetic oligonucleotide
cuguagaucuuagagggug

SEQ ID NO: 190426 - RNA, 19 nt, Artificial Sequence
  Description of Artificial Sequence: Synthetic oligonucleotide
ucuuagaggguguuacgaa

SEQ ID NO: 190427 - RNA, 19 nt, Artificial Sequence
  Description of Artificial Sequence: Synthetic oligonucleotide
uucuaauugccuggaacca

SEQ ID NO: 190428 - RNA, 19 nt, Artificial Sequence
  Description of Artificial Sequence: Synthetic oligonucleotide
aagaucagacuggggauug

SEQ ID NO: 190429 - RNA, 19 nt, Artificial Sequence
  Description of Artificial Sequence: Synthetic oligonucleotide
gacauggagaugcagugaa

SEQ ID NO: 190430 - RNA, 19 nt, Artificial Sequence
  Description of Artificial Sequence: Synthetic oligonucleotide
caacaaucccuauucagga

SEQ ID NO: 190431 - RNA, 19 nt, Artificial Sequence
  Description of Artificial Sequence: Synthetic oligonucleotide
ugcacgauacccuccugca

SEQ ID NO: 190432 - RNA, 19 nt, Artificial Sequence
  Description of Artificial Sequence: Synthetic oligonucleotide
uauaccagcuuuagccgaa

SEQ ID NO: 190433 - RNA, 19 nt, Artificial Sequence
  Description of Artificial Sequence: Synthetic oligonucleotide
caaauuauagcagccacaa

SEQ ID NO: 190434 - RNA, 19 nt, Artificial Sequence
  Description of Artificial Sequence: Synthetic oligonucleotide
uuuagccgaauaguucgcc

SEQ ID NO: 190435 - RNA, 19 nt, Artificial Sequence
  Description of Artificial Sequence: Synthetic oligonucleotide
uacugguaguccgugaaac

SEQ ID NO: 190436 - RNA, 19 nt, Artificial Sequence
  Description of Artificial Sequence: Synthetic oligonucleotide
uguucuuagaagugcccau

SEQ ID NO: 190437 - RNA, 19 nt, Artificial Sequence
  Description of Artificial Sequence: Synthetic oligonucleotide
cuuuagccgaauaguucgc

SEQ ID NO: 190438 - RNA, 19 nt, Artificial Sequence
  Description of Artificial Sequence: Synthetic oligonucleotide
cauuaccuaggcucagccc

SEQ ID NO: 190439 - RNA, 19 nt, Artificial Sequence
  Description of Artificial Sequence: Synthetic oligonucleotide
uucaccuccgaaggguagg

SEQ ID NO: 190440 - RNA, 19 nt, Artificial Sequence
  Description of Artificial Sequence: Synthetic oligonucleotide
agcgucuucucagccauac

SEQ ID NO: 190441 - RNA, 19 nt, Artificial Sequence
  Description of Artificial Sequence: Synthetic oligonucleotide
auacgcuaucagcaucccg

SEQ ID NO: 190442 - RNA, 19 nt, Artificial Sequence
  Description of Artificial Sequence: Synthetic oligonucleotide
uguuacgaagacacaccaa

SEQ ID NO: 190443 - RNA, 19 nt, Artificial Sequence
  Description of Artificial Sequence: Synthetic oligonucleotide
uguuuuggaugccguuggc

SEQ ID NO: 190444 - RNA, 19 nt, Artificial Sequence
  Description of Artificial Sequence: Synthetic oligonucleotide
acuuaacauggguaauacu

SEQ ID NO: 190445 - RNA, 19 nt, Artificial Sequence
  Description of Artificial Sequence: Synthetic oligonucleotide
  modified_base (3)..(3): a, c, u, g, unknown or other
acngcucagauugccacag

SEQ ID NO: 190446 - RNA, 19 nt, Artificial Sequence
  Description of Artificial Sequence: Synthetic oligonucleotide
cacgauacccuccugcauc

SEQ ID NO: 190447 - RNA, 19 nt, Artificial Sequence
  Description of Artificial Sequence: Synthetic oligonucleotide
uagccgaauaguucgccga

SEQ ID NO: 190448 - RNA, 19 nt, Artificial Sequence
  Description of Artificial Sequence: Synthetic oligonucleotide
uucuagggcauugaacuuc

SEQ ID NO: 190449 - RNA, 19 nt, Artificial Sequence
  Description of Artificial Sequence: Synthetic oligonucleotide
aucuuagaggguguuacga

SEQ ID NO: 190450 - RNA, 19 nt, Artificial Sequence
  Description of Artificial Sequence: Synthetic oligonucleotide
uagcuaccgaucaccagga

SEQ ID NO: 190451 - RNA, 19 nt, Artificial Sequence
  Description of Artificial Sequence: Synthetic oligonucleotide
uucgacacucaauguucag

SEQ ID NO: 190452 - RNA, 19 nt, Artificial Sequence
  Description of Artificial Sequence: Synthetic oligonucleotide
cacuuaacauggguaauac

SEQ ID NO: 190453 - RNA, 19 nt, Artificial Sequence
  Description of Artificial Sequence: Synthetic oligonucleotide
uuuggaugccguuggccac

SEQ ID NO: 190454 - RNA, 19 nt, Artificial Sequence
  Description of Artificial Sequence: Synthetic oligonucleotide
caaucccuauucaggacug

SEQ ID NO: 190455 - RNA, 19 nt, Artificial Sequence
  Description of Artificial Sequence: Synthetic oligonucleotide
uguacuccguagugguagc

SEQ ID NO: 190456 - RNA, 19 nt, Artificial Sequence
  Description of Artificial Sequence: Synthetic oligonucleotide
gacgggaaucacaggacag

SEQ ID NO: 190457 - RNA, 19 nt, Artificial Sequence
  Description of Artificial Sequence: Synthetic oligonucleotide
aguuugcgaagccugggau

SEQ ID NO: 190458 - RNA, 19 nt, Artificial Sequence
  Description of Artificial Sequence: Synthetic oligonucleotide
acuccguagugguagccug

SEQ ID NO: 190459 - RNA, 19 nt, Artificial Sequence
  Description of Artificial Sequence: Synthetic oligonucleotide
guuuuggaugccguuggcc

SEQ ID NO: 190460 - RNA, 19 nt, Artificial Sequence
  Description of Artificial Sequence: Synthetic oligonucleotide
uuccgauaagggacucucc

SEQ ID NO: 190461 - RNA, 19 nt, Artificial Sequence
  Description of Artificial Sequence: Synthetic oligonucleotide
cugaaagccccuaggucug

SEQ ID NO: 190462 - RNA, 19 nt, Artificial Sequence
  Description of Artificial Sequence: Synthetic oligonucleotide
uugagguuacacguuaauu

SEQ ID NO: 190463 - RNA, 19 nt, Artificial Sequence
  Description of Artificial Sequence: Synthetic oligonucleotide
gcugacgggaaucacagga

SEQ ID NO: 190464 - RNA, 19 nt, Artificial Sequence
  Description of Artificial Sequence: Synthetic oligonucleotide
cugacgggaaucacaggac

SEQ ID NO: 190465 - RNA, 19 nt, Artificial Sequence
  Description of Artificial Sequence: Synthetic oligonucleotide
agccauacacaaggucucc

SEQ ID NO: 190466 - RNA, 19 nt, Artificial Sequence
  Description of Artificial Sequence: Synthetic oligonucleotide
acugaaccucaacuuagaa

SEQ ID NO: 190467 - RNA, 19 nt, Artificial Sequence
  Description of Artificial Sequence: Synthetic oligonucleotide
caccaaggacaguagugag

SEQ ID NO: 190468 - RNA, 19 nt, Artificial Sequence
  Description of Artificial Sequence: Synthetic oligonucleotide
ccuugcuuuggaaaugagc

SEQ ID NO: 190469 - RNA, 19 nt, Artificial Sequence
  Description of Artificial Sequence: Synthetic oligonucleotide
ccuauguuuagaaggccag

SEQ ID NO: 190470 - RNA, 19 nt, Artificial Sequence
  Description of Artificial Sequence: Synthetic oligonucleotide
ccauacgcuaucagcaucc

SEQ ID NO: 190471 - RNA, 19 nt, Artificial Sequence
  Description of Artificial Sequence: Synthetic oligonucleotide
  modified_base (6)..(6): a, c, u, g, unknown or other
gaaacngcucagauugcca

SEQ ID NO: 190472 - RNA, 19 nt, Artificial Sequence
  Description of Artificial Sequence: Synthetic oligonucleotide
acgcuaucagcaucccguc

SEQ ID NO: 190473 - RNA, 19 nt, Artificial Sequence
  Description of Artificial Sequence: Synthetic oligonucleotide
agguguuggcgauuagaca

SEQ ID NO: 190474 - RNA, 19 nt, Artificial Sequence
  Description of Artificial Sequence: Synthetic oligonucleotide
caugugacuaggaaauucu

SEQ ID NO: 190475 - RNA, 19 nt, Artificial Sequence
  Description of Artificial Sequence: Synthetic oligonucleotide
gcauucauuugaugugagg

SEQ ID NO: 190476 - RNA, 19 nt, Artificial Sequence
  Description of Artificial Sequence: Synthetic oligonucleotide
gguguuacgaagacacacc

SEQ ID NO: 190477 - RNA, 19 nt, Artificial Sequence
  Description of Artificial Sequence: Synthetic oligonucleotide
aacuucgguuccaggaugu

SEQ ID NO: 190478 - RNA, 19 nt, Artificial Sequence
  Description of Artificial Sequence: Synthetic oligonucleotide
ugggauuuacaagggugca

SEQ ID NO: 190479 - RNA, 19 nt, Artificial Sequence
  Description of Artificial Sequence: Synthetic oligonucleotide
acaccguacuuuagcaagg

SEQ ID NO: 190480 - RNA, 19 nt, Artificial Sequence
  Description of Artificial Sequence: Synthetic oligonucleotide
ugacauggagaugcaguga

SEQ ID NO: 190481 - RNA, 19 nt, Artificial Sequence
  Description of Artificial Sequence: Synthetic oligonucleotide
acgauacccuccugcaucu

SEQ ID NO: 190482 - RNA, 19 nt, Artificial Sequence
  Description of Artificial Sequence: Synthetic oligonucleotide
gguaagaagugggaagagc

SEQ ID NO: 190483 - RNA, 19 nt, Artificial Sequence
  Description of Artificial Sequence: Synthetic oligonucleotide
uaagaucagacuggggauu

SEQ ID NO: 190484 - RNA, 19 nt, Artificial Sequence
  Description of Artificial Sequence: Synthetic oligonucleotide
cuaccgaucaccaggauuu

SEQ ID NO: 190485 - RNA, 19 nt, Artificial Sequence
  Description of Artificial Sequence: Synthetic oligonucleotide
gaauccuauuagcuaccga

SEQ ID NO: 190486 - RNA, 19 nt, Artificial Sequence
  Description of Artificial Sequence: Synthetic oligonucleotide
ugcauuaccuaggcucagc

SEQ ID NO: 190487 - RNA, 19 nt, Artificial Sequence
  Description of Artificial Sequence: Synthetic oligonucleotide
uggauucucuuggccagag

SEQ ID NO: 190488 - RNA, 19 nt, Artificial Sequence
  Description of Artificial Sequence: Synthetic oligonucleotide
agauugccacaguucuuug

SEQ ID NO: 190489 - RNA, 19 nt, Artificial Sequence
  Description of Artificial Sequence: Synthetic oligonucleotide
cauugccauacgcuaucag

SEQ ID NO: 190490 - RNA, 19 nt, Artificial Sequence
  Description of Artificial Sequence: Synthetic oligonucleotide
ggcuuuaaacauaaaccac

SEQ ID NO: 190491 - RNA, 19 nt, Artificial Sequence
  Description of Artificial Sequence: Synthetic oligonucleotide
aagugcccauccagaaagg

SEQ ID NO: 190492 - RNA, 19 nt, Artificial Sequence
  Description of Artificial Sequence: Synthetic oligonucleotide
gugacuaggaaauucuauu

SEQ ID NO: 190493 - RNA, 19 nt, Artificial Sequence
  Description of Artificial Sequence: Synthetic oligonucleotide
uuaccuaggcucagcccuc

SEQ ID NO: 190494 - RNA, 19 nt, Artificial Sequence
  Description of Artificial Sequence: Synthetic oligonucleotide
gcauuaccuaggcucagcc

SEQ ID NO: 190495 - RNA, 19 nt, Artificial Sequence
  Description of Artificial Sequence: Synthetic oligonucleotide
accguacuuuagcaaggug

SEQ ID NO: 190496 - RNA, 19 nt, Artificial Sequence
  Description of Artificial Sequence: Synthetic oligonucleotide
cacggacaugcacuggcag

SEQ ID NO: 190497 - RNA, 19 nt, Artificial Sequence
  Description of Artificial Sequence: Synthetic oligonucleotide
gccucaaguggggagaggg

SEQ ID NO: 190498 - RNA, 19 nt, Artificial Sequence
  Description of Artificial Sequence: Synthetic oligonucleotide
ggacuuugagguuacacgu

SEQ ID NO: 190499 - RNA, 19 nt, Artificial Sequence
  Description of Artificial Sequence: Synthetic oligonucleotide
caaacauacagguucccau

SEQ ID NO: 190500 - RNA, 19 nt, Artificial Sequence
  Description of Artificial Sequence: Synthetic oligonucleotide
acgugcacgauacccuccu

SEQ ID NO: 190501 - RNA, 19 nt, Artificial Sequence
  Description of Artificial Sequence: Synthetic oligonucleotide
ccgaucaccaggauuugag

SEQ ID NO: 190502 - RNA, 19 nt, Artificial Sequence
  Description of Artificial Sequence: Synthetic oligonucleotide
ggccuuggcaaauucugug

SEQ ID NO: 190503 - RNA, 19 nt, Artificial Sequence
  Description of Artificial Sequence: Synthetic oligonucleotide
gcauugugaauauggcuuc

SEQ ID NO: 190504 - RNA, 19 nt, Artificial Sequence
  Description of Artificial Sequence: Synthetic oligonucleotide
guaguccgugaaacuaaag

SEQ ID NO: 190505 - RNA, 19 nt, Artificial Sequence
  Description of Artificial Sequence: Synthetic oligonucleotide
cacgugcacgauacccucc

SEQ ID NO: 190506 - RNA, 19 nt, Artificial Sequence
  Description of Artificial Sequence: Synthetic oligonucleotide
cucaagggacugagaaauc

SEQ ID NO: 190507 - RNA, 19 nt, Artificial Sequence
  Description of Artificial Sequence: Synthetic oligonucleotide
ccgaauaguucgccgaaag

SEQ ID NO: 190508 - RNA, 19 nt, Artificial Sequence
  Description of Artificial Sequence: Synthetic oligonucleotide
cauauucgacacucaaugu

SEQ ID NO: 190509 - RNA, 19 nt, Artificial Sequence
  Description of Artificial Sequence: Synthetic oligonucleotide
agcacgugcacgauacccu

SEQ ID NO: 190510 - RNA, 19 nt, Artificial Sequence
  Description of Artificial Sequence: Synthetic oligonucleotide
agaggguguuacgaagaca

SEQ ID NO: 190511 - RNA, 19 nt, Artificial Sequence
  Description of Artificial Sequence: Synthetic oligonucleotide
ugggccacauggugacuug

SEQ ID NO: 190512 - RNA, 19 nt, Artificial Sequence
  Description of Artificial Sequence: Synthetic oligonucleotide
agccgaauaguucgccgaa

SEQ ID NO: 190513 - RNA, 19 nt, Artificial Sequence
  Description of Artificial Sequence: Synthetic oligonucleotide
cauacgcuaucagcauccc

SEQ ID NO: 190514 - RNA, 19 nt, Artificial Sequence
  Description of Artificial Sequence: Synthetic oligonucleotide
cuuugagguuacacguuaa

SEQ ID NO: 190515 - RNA, 19 nt, Artificial Sequence
  Description of Artificial Sequence: Synthetic oligonucleotide
uucgccgaaagaagcccuu

SEQ ID NO: 190516 - RNA, 19 nt, Artificial Sequence
  Description of Artificial Sequence: Synthetic oligonucleotide
agcgcugcgucagucucag

SEQ ID NO: 190517 - RNA, 19 nt, Artificial Sequence
  Description of Artificial Sequence: Synthetic oligonucleotide
ggacucauccgugcugacg

SEQ ID NO: 190518 - RNA, 19 nt, Artificial Sequence
  Description of Artificial Sequence: Synthetic oligonucleotide
uccccacauauucgacacu

SEQ ID NO: 190519 - RNA, 19 nt, Artificial Sequence
  Description of Artificial Sequence: Synthetic oligonucleotide
ccgauaagggacucuccag

SEQ ID NO: 190520 - RNA, 19 nt, Artificial Sequence
  Description of Artificial Sequence: Synthetic oligonucleotide
  modified_base (8)..(8): a, c, u, g, unknown or other
gugaaacngcucagauugc

SEQ ID NO: 190521 - RNA, 19 nt, Artificial Sequence
  Description of Artificial Sequence: Synthetic oligonucleotide
agccccuaggucugagaga

SEQ ID NO: 190522 - RNA, 19 nt, Artificial Sequence
  Description of Artificial Sequence: Synthetic oligonucleotide
uacuuguaucagaguguuu

SEQ ID NO: 190523 - RNA, 19 nt, Artificial Sequence
  Description of Artificial Sequence: Synthetic oligonucleotide
acuguagaucuuagagggu

SEQ ID NO: 190524 - RNA, 19 nt, Artificial Sequence
  Description of Artificial Sequence: Synthetic oligonucleotide
cagaccuugcuuuggaaau

SEQ ID NO: 190525 - RNA, 19 nt, Artificial Sequence
  Description of Artificial Sequence: Synthetic oligonucleotide
agucuuacaguaggacauu

SEQ ID NO: 190526 - RNA, 19 nt, Artificial Sequence
  Description of Artificial Sequence: Synthetic oligonucleotide
uaccgaucaccaggauuug

SEQ ID NO: 190527 - RNA, 19 nt, Artificial Sequence
  Description of Artificial Sequence: Synthetic oligonucleotide
guacuccguagugguagcc

SEQ ID NO: 190528 - RNA, 19 nt, Artificial Sequence
  Description of Artificial Sequence: Synthetic oligonucleotide
cuguacccugaaauuaacu

SEQ ID NO: 190529 - RNA, 19 nt, Artificial Sequence
  Description of Artificial Sequence: Synthetic oligonucleotide
acacuggaaaugacaugga

SEQ ID NO: 190530 - RNA, 19 nt, Artificial Sequence
  Description of Artificial Sequence: Synthetic oligonucleotide
augugacuaggaaauucua

SEQ ID NO: 190531 - RNA, 19 nt, Artificial Sequence
  Description of Artificial Sequence: Synthetic oligonucleotide
accgaucaccaggauuuga

SEQ ID NO: 190532 - RNA, 19 nt, Artificial Sequence
  Description of Artificial Sequence: Synthetic oligonucleotide
gcucagauugccacaguuc

SEQ ID NO: 190533 - RNA, 19 nt, Artificial Sequence
  Description of Artificial Sequence: Synthetic oligonucleotide
gccauacgcuaucagcauc

SEQ ID NO: 190534 - RNA, 19 nt, Artificial Sequence
  Description of Artificial Sequence: Synthetic oligonucleotide
cgcugcgucagucucaguc

SEQ ID NO: 190535 - RNA, 19 nt, Artificial Sequence
  Description of Artificial Sequence: Synthetic oligonucleotide
guggccgucugugcaaauc

SEQ ID NO: 190536 - RNA, 19 nt, Artificial Sequence
  Description of Artificial Sequence: Synthetic oligonucleotide
gccccuaggucugagagaa

SEQ ID NO: 190537 - RNA, 19 nt, Artificial Sequence
  Description of Artificial Sequence: Synthetic oligonucleotide
ccagaucauguucacaugu

SEQ ID NO: 190538 - RNA, 19 nt, Artificial Sequence
  Description of Artificial Sequence: Synthetic oligonucleotide
cugcgaggaugacccgggc

SEQ ID NO: 190539 - RNA, 19 nt, Artificial Sequence
  Description of Artificial Sequence: Synthetic oligonucleotide
  modified_base (11)..(11): a, c, u, g, unknown or other
gcagugaaacngcucagau

SEQ ID NO: 190540 - RNA, 19 nt, Artificial Sequence
  Description of Artificial Sequence: Synthetic oligonucleotide
agcuuccuaaguacuggua

SEQ ID NO: 190541 - RNA, 19 nt, Artificial Sequence
  Description of Artificial Sequence: Synthetic oligonucleotide
gcgauuagacacacaucac

SEQ ID NO: 190542 - RNA, 19 nt, Artificial Sequence
  Description of Artificial Sequence: Synthetic oligonucleotide
gacgcuggagagagggugu

SEQ ID NO: 190543 - RNA, 19 nt, Artificial Sequence
  Description of Artificial Sequence: Synthetic oligonucleotide
gguaguccgugaaacuaaa

SEQ ID NO: 190544 - RNA, 19 nt, Artificial Sequence
  Description of Artificial Sequence: Synthetic oligonucleotide
ggguuauugcuggucuuuc

SEQ ID NO: 190545 - RNA, 19 nt, Artificial Sequence
  Description of Artificial Sequence: Synthetic oligonucleotide
gcugcgucagucucagucu

SEQ ID NO: 190546 - RNA, 19 nt, Artificial Sequence
  Description of Artificial Sequence: Synthetic oligonucleotide
auaccagcuuuagccgaau

SEQ ID NO: 190547 - RNA, 19 nt, Artificial Sequence
  Description of Artificial Sequence: Synthetic oligonucleotide
agcuaccgaucaccaggau

SEQ ID NO: 190548 - RNA, 19 nt, Artificial Sequence
  Description of Artificial Sequence: Synthetic oligonucleotide
aggccgaucuccacagcaa

SEQ ID NO: 190549 - RNA, 19 nt, Artificial Sequence
  Description of Artificial Sequence: Synthetic oligonucleotide
cuagcccuguauccacaaa

SEQ ID NO: 190550 - RNA, 19 nt, Artificial Sequence
  Description of Artificial Sequence: Synthetic oligonucleotide
cacuuaguuucaggccuga

SEQ ID NO: 190551 - RNA, 19 nt, Artificial Sequence
  Description of Artificial Sequence: Synthetic oligonucleotide
agguuaaguuauagccauu

SEQ ID NO: 190552 - RNA, 19 nt, Artificial Sequence
  Description of Artificial Sequence: Synthetic oligonucleotide
guuggcgauuagacacaca

SEQ ID NO: 190553 - RNA, 19 nt, Artificial Sequence
  Description of Artificial Sequence: Synthetic oligonucleotide
gcuaccgaucaccaggauu

SEQ ID NO: 190554 - RNA, 19 nt, Artificial Sequence
  Description of Artificial Sequence: Synthetic oligonucleotide
cacaugcauguacuccgua

SEQ ID NO: 190555 - RNA, 19 nt, Artificial Sequence
  Description of Artificial Sequence: Synthetic oligonucleotide
cgaauaguucgccgaaaga

SEQ ID NO: 190556 - RNA, 19 nt, Artificial Sequence
  Description of Artificial Sequence: Synthetic oligonucleotide
guagaucuuagaggguguu

SEQ ID NO: 190557 - RNA, 19 nt, Artificial Sequence
  Description of Artificial Sequence: Synthetic oligonucleotide
ggggauugccacucucugu

SEQ ID NO: 190558 - RNA, 19 nt, Artificial Sequence
  Description of Artificial Sequence: Synthetic oligonucleotide
cugucagaccccuccccgu

SEQ ID NO: 190559 - RNA, 19 nt, Artificial Sequence
  Description of Artificial Sequence: Synthetic oligonucleotide
gcuugucaacuacuuguau

SEQ ID NO: 190560 - RNA, 19 nt, Artificial Sequence
  Description of Artificial Sequence: Synthetic oligonucleotide
caccguacuuuagcaaggu

SEQ ID NO: 190561 - RNA, 19 nt, Artificial Sequence
  Description of Artificial Sequence: Synthetic oligonucleotide
accuaggcucagcccucuu

SEQ ID NO: 190562 - RNA, 19 nt, Artificial Sequence
  Description of Artificial Sequence: Synthetic oligonucleotide
caguagcgggugcagcgcu

SEQ ID NO: 190563 - RNA, 19 nt, Artificial Sequence
  Description of Artificial Sequence: Synthetic oligonucleotide
cugcgucagucucagucuu

SEQ ID NO: 190564 - RNA, 19 nt, Artificial Sequence
  Description of Artificial Sequence: Synthetic oligonucleotide
gccgaauaguucgccgaaa

SEQ ID NO: 190565 - RNA, 19 nt, Artificial Sequence
  Description of Artificial Sequence: Synthetic oligonucleotide
cauccgugcugacgggaau

SEQ ID NO: 190566 - RNA, 19 nt, Artificial Sequence
  Description of Artificial Sequence: Synthetic oligonucleotide
gcaugcguccaaaucuuuu

SEQ ID NO: 190567 - RNA, 19 nt, Artificial Sequence
  Description of Artificial Sequence: Synthetic oligonucleotide
gcacgauacccuccugcau

SEQ ID NO: 190568 - RNA, 19 nt, Artificial Sequence
  Description of Artificial Sequence: Synthetic oligonucleotide
cgaucaccaggauuugagu

SEQ ID NO: 190569 - RNA, 19 nt, Artificial Sequence
  Description of Artificial Sequence: Synthetic oligonucleotide
  modified_base (2)..(2): a, c, u, g, unknown or other
cngcucagauugccacagu

SEQ ID NO: 190570 - RNA, 19 nt, Artificial Sequence
  Description of Artificial Sequence: Synthetic oligonucleotide
cuagggcauugaacuucau

SEQ ID NO: 190571 - RNA, 19 nt, Artificial Sequence
  Description of Artificial Sequence: Synthetic oligonucleotide
cgugggcucuaguguuaug

SEQ ID NO: 190572 - RNA, 19 nt, Artificial Sequence
  Description of Artificial Sequence: Synthetic oligonucleotide
ccgaucuccacagcaaauu

SEQ ID NO: 190573 - RNA, 19 nt, Artificial Sequence
  Description of Artificial Sequence: Synthetic oligonucleotide
ccgugcugacgggaaucac

SEQ ID NO: 190574 - RNA, 19 nt, Artificial Sequence
  Description of Artificial Sequence: Synthetic oligonucleotide
gccgaucuccacagcaaau

SEQ ID NO: 190575 - RNA, 19 nt, Artificial Sequence
  Description of Artificial Sequence: Synthetic oligonucleotide
gguggccgucugugcaaau

SEQ ID NO: 190576 - RNA, 19 nt, Artificial Sequence
  Description of Artificial Sequence: Synthetic oligonucleotide
caguggcaauugccgccau

SEQ ID NO: 190577 - RNA, 19 nt, Artificial Sequence
  Description of Artificial Sequence: Synthetic oligonucleotide
ccgugggcucuaguguuau

SEQ ID NO: 190578 - RNA, 19 nt, Artificial Sequence
  Description of Artificial Sequence: Synthetic oligonucleotide
ccuccccgugggcucuagu

SEQ ID NO: 190579 - RNA, 19 nt, Artificial Sequence
  Description of Artificial Sequence: Synthetic oligonucleotide
ccccuaggucugagagaau

SEQ ID NO: 190580 - RNA, 19 nt, Artificial Sequence
  Description of Artificial Sequence: Synthetic oligonucleotide
  modified_base (1)..(1): a, c, u, g, unknown or other
ngcucagauugccacaguu

SEQ ID NO: 190581 - RNA, 19 nt, Artificial Sequence
  Description of Artificial Sequence: Synthetic oligonucleotide
aagauuagcauaaugaacc

SEQ ID NO: 190582 - RNA, 19 nt, Artificial Sequence
  Description of Artificial Sequence: Synthetic oligonucleotide
aaaucauugacggaaagcc

SEQ ID NO: 190583 - RNA, 19 nt, Artificial Sequence
  Description of Artificial Sequence: Synthetic oligonucleotide
uguaauuuuagacucuagg

SEQ ID NO: 190584 - RNA, 19 nt, Artificial Sequence
  Description of Artificial Sequence: Synthetic oligonucleotide
agaaaagauacguauauuc

SEQ ID NO: 190585 - RNA, 19 nt, Artificial Sequence
  Description of Artificial Sequence: Synthetic oligonucleotide
aaguauuacagauauaggu

SEQ ID NO: 190586 - RNA, 19 nt, Artificial Sequence
  Description of Artificial Sequence: Synthetic oligonucleotide
auaaugaacugucagcugc

SEQ ID NO: 190587 - RNA, 19 nt, Artificial Sequence
  Description of Artificial Sequence: Synthetic oligonucleotide
aauccaacaagagcgagcc

SEQ ID NO: 190588 - RNA, 19 nt, Artificial Sequence
  Description of Artificial Sequence: Synthetic oligonucleotide
aaagaaaccguauuuggcu

SEQ ID NO: 190589 - RNA, 19 nt, Artificial Sequence
  Description of Artificial Sequence: Synthetic oligonucleotide
acagaauaaacaaugaccg

SEQ ID NO: 190590 - RNA, 19 nt, Artificial Sequence
  Description of Artificial Sequence: Synthetic oligonucleotide
aaaacuacaaccugaugga

SEQ ID NO: 190591 - RNA, 19 nt, Artificial Sequence
  Description of Artificial Sequence: Synthetic oligonucleotide
aaauaaugaacugucagcu

SEQ ID NO: 190592 - RNA, 19 nt, Artificial Sequence
  Description of Artificial Sequence: Synthetic oligonucleotide
auuacgauuuacuggaguc

SEQ ID NO: 190593 - RNA, 19 nt, Artificial Sequence
  Description of Artificial Sequence: Synthetic oligonucleotide
uuauauaaggucuuacgga

SEQ ID NO: 190594 - RNA, 19 nt, Artificial Sequence
  Description of Artificial Sequence: Synthetic oligonucleotide
ugggucaccguccaaaugg

SEQ ID NO: 190595 - RNA, 19 nt, Artificial Sequence
  Description of Artificial Sequence: Synthetic oligonucleotide
aguuauaaguaguuagcac

SEQ ID NO: 190596 - RNA, 19 nt, Artificial Sequence
  Description of Artificial Sequence: Synthetic oligonucleotide
ugcuauacaucccaaaaca

SEQ ID NO: 190597 - RNA, 19 nt, Artificial Sequence
  Description of Artificial Sequence: Synthetic oligonucleotide
aacaagagcgagccgaggg

SEQ ID NO: 190598 - RNA, 19 nt, Artificial Sequence
  Description of Artificial Sequence: Synthetic oligonucleotide
aucgacaacauacauguag

SEQ ID NO: 190599 - RNA, 19 nt, Artificial Sequence
  Description of Artificial Sequence: Synthetic oligonucleotide
uguccgaucaaacugguga

SEQ ID NO: 190600 - RNA, 19 nt, Artificial Sequence
  Description of Artificial Sequence: Synthetic oligonucleotide
cacaguaccgauuaucugg

SEQ ID NO: 190601 - RNA, 19 nt, Artificial Sequence
  Description of Artificial Sequence: Synthetic oligonucleotide
uuagccauugcauucagcu

SEQ ID NO: 190602 - RNA, 19 nt, Artificial Sequence
  Description of Artificial Sequence: Synthetic oligonucleotide
uguugguacauuaaccggc

SEQ ID NO: 190603 - RNA, 19 nt, Artificial Sequence
  Description of Artificial Sequence: Synthetic oligonucleotide
aagugugucauucacugga

SEQ ID NO: 190604 - RNA, 19 nt, Artificial Sequence
  Description of Artificial Sequence: Synthetic oligonucleotide
acgacuacauauuucuuac

SEQ ID NO: 190605 - RNA, 19 nt, Artificial Sequence
  Description of Artificial Sequence: Synthetic oligonucleotide
auuauaagaagucugccau

SEQ ID NO: 190606 - RNA, 19 nt, Artificial Sequence
  Description of Artificial Sequence: Synthetic oligonucleotide
agauacguauauucaagac

SEQ ID NO: 190607 - RNA, 19 nt, Artificial Sequence
  Description of Artificial Sequence: Synthetic oligonucleotide
aaagauacguauauucaag

SEQ ID NO: 190608 - RNA, 19 nt, Artificial Sequence
  Description of Artificial Sequence: Synthetic oligonucleotide
guagagaggauuuaaguac

SEQ ID NO: 190609 - RNA, 19 nt, Artificial Sequence
  Description of Artificial Sequence: Synthetic oligonucleotide
augauuauaagaagucugc

SEQ ID NO: 190610 - RNA, 19 nt, Artificial Sequence
  Description of Artificial Sequence: Synthetic oligonucleotide
uuucauaaccuuuuccggc

SEQ ID NO: 190611 - RNA, 19 nt, Artificial Sequence
  Description of Artificial Sequence: Synthetic oligonucleotide
cauaacuccaauuuuauaa

SEQ ID NO: 190612 - RNA, 19 nt, Artificial Sequence
  Description of Artificial Sequence: Synthetic oligonucleotide
aacuguaccucacacagaa

SEQ ID NO: 190613 - RNA, 19 nt, Artificial Sequence
  Description of Artificial Sequence: Synthetic oligonucleotide
aguaccgauuaucuggugg

SEQ ID NO: 190614 - RNA, 19 nt, Artificial Sequence
  Description of Artificial Sequence: Synthetic oligonucleotide
guacuaauggcuuuaagca

SEQ ID NO: 190615 - RNA, 19 nt, Artificial Sequence
  Description of Artificial Sequence: Synthetic oligonucleotide
aauaaugaacugucagcug

SEQ ID NO: 190616 - RNA, 19 nt, Artificial Sequence
  Description of Artificial Sequence: Synthetic oligonucleotide
aagauacguauauucaaga

SEQ ID NO: 190617 - RNA, 19 nt, Artificial Sequence
  Description of Artificial Sequence: Synthetic oligonucleotide
agaagucugccauagaaga

SEQ ID NO: 190618 - RNA, 19 nt, Artificial Sequence
  Description of Artificial Sequence: Synthetic oligonucleotide
uguaaauaaugaacuguca

SEQ ID NO: 190619 - RNA, 19 nt, Artificial Sequence
  Description of Artificial Sequence: Synthetic oligonucleotide
agaagaaacgcuucguuga

SEQ ID NO: 190620 - RNA, 19 nt, Artificial Sequence
  Description of Artificial Sequence: Synthetic oligonucleotide
uauaaggucuuacggaagu

SEQ ID NO: 190621 - RNA, 19 nt, Artificial Sequence
  Description of Artificial Sequence: Synthetic oligonucleotide
aauuacgauuuacuggagu

SEQ ID NO: 190622 - RNA, 19 nt, Artificial Sequence
  Description of Artificial Sequence: Synthetic oligonucleotide
uguagagaggauuuaagua

SEQ ID NO: 190623 - RNA, 19 nt, Artificial Sequence
  Description of Artificial Sequence: Synthetic oligonucleotide
cuuagaaaacuccuccggg

SEQ ID NO: 190624 - RNA, 19 nt, Artificial Sequence
  Description of Artificial Sequence: Synthetic oligonucleotide
aauugccuuuaaauaauac

SEQ ID NO: 190625 - RNA, 19 nt, Artificial Sequence
  Description of Artificial Sequence: Synthetic oligonucleotide
aaauuuaugcccaaaugau

SEQ ID NO: 190626 - RNA, 19 nt, Artificial Sequence
  Description of Artificial Sequence: Synthetic oligonucleotide
acauguagcaaguccuucg

SEQ ID NO: 190627 - RNA, 19 nt, Artificial Sequence
  Description of Artificial Sequence: Synthetic oligonucleotide
uuguugguacauuaaccgg

SEQ ID NO: 190628 - RNA, 19 nt, Artificial Sequence
  Description of Artificial Sequence: Synthetic oligonucleotide
ucuaaaacuacaaccugau

SEQ ID NO: 190629 - RNA, 19 nt, Artificial Sequence
  Description of Artificial Sequence: Synthetic oligonucleotide
augaguaucacucuugcua

SEQ ID NO: 190630 - RNA, 19 nt, Artificial Sequence
  Description of Artificial Sequence: Synthetic oligonucleotide
aacuacaaccugauggaac

SEQ ID NO: 190631 - RNA, 19 nt, Artificial Sequence
  Description of Artificial Sequence: Synthetic oligonucleotide
guaggaauccaacaagagc

SEQ ID NO: 190632 - RNA, 19 nt, Artificial Sequence
  Description of Artificial Sequence: Synthetic oligonucleotide
ugguacauuaaccggcucc

SEQ ID NO: 190633 - RNA, 19 nt, Artificial Sequence
  Description of Artificial Sequence: Synthetic oligonucleotide
guaucgacaacauacaugu

SEQ ID NO: 190634 - RNA, 19 nt, Artificial Sequence
  Description of Artificial Sequence: Synthetic oligonucleotide
agccauugcauucagcuug

SEQ ID NO: 190635 - RNA, 19 nt, Artificial Sequence
  Description of Artificial Sequence: Synthetic oligonucleotide
ugaguaucacucuugcuac

SEQ ID NO: 190636 - RNA, 19 nt, Artificial Sequence
  Description of Artificial Sequence: Synthetic oligonucleotide
aguggaccaguacacuugc

SEQ ID NO: 190637 - RNA, 19 nt, Artificial Sequence
  Description of Artificial Sequence: Synthetic oligonucleotide
ugacuacaucgacaaaugg

SEQ ID NO: 190638 - RNA, 19 nt, Artificial Sequence
  Description of Artificial Sequence: Synthetic oligonucleotide
gacuacaucgacaaauggc

SEQ ID NO: 190639 - RNA, 19 nt, Artificial Sequence
  Description of Artificial Sequence: Synthetic oligonucleotide
gaaagaaaccguauuuggc

SEQ ID NO: 190640 - RNA, 19 nt, Artificial Sequence
  Description of Artificial Sequence: Synthetic oligonucleotide
ucgacaacauacauguagu

SEQ ID NO: 190641 - RNA, 19 nt, Artificial Sequence
  Description of Artificial Sequence: Synthetic oligonucleotide
uaggcucggacuuagaaaa

SEQ ID NO: 190642 - RNA, 19 nt, Artificial Sequence
  Description of Artificial Sequence: Synthetic oligonucleotide
acuaauauaagaaguauua

SEQ ID NO: 190643 - RNA, 19 nt, Artificial Sequence
  Description of Artificial Sequence: Synthetic oligonucleotide
ucaaguaaugagagugcag

SEQ ID NO: 190644 - RNA, 19 nt, Artificial Sequence
  Description of Artificial Sequence: Synthetic oligonucleotide
gaaaucauugacggaaagc

SEQ ID NO: 190645 - RNA, 19 nt, Artificial Sequence
  Description of Artificial Sequence: Synthetic oligonucleotide
uuagaaaacuccuccgggu

SEQ ID NO: 190646 - RNA, 19 nt, Artificial Sequence
  Description of Artificial Sequence: Synthetic oligonucleotide
guaccgauuaucugguggg

SEQ ID NO: 190647 - RNA, 19 nt, Artificial Sequence
  Description of Artificial Sequence: Synthetic oligonucleotide
ucaaccacuauugccuugg

SEQ ID NO: 190648 - RNA, 19 nt, Artificial Sequence
  Description of Artificial Sequence: Synthetic oligonucleotide
ugauccuuuucucaacugu

SEQ ID NO: 190649 - RNA, 19 nt, Artificial Sequence
  Description of Artificial Sequence: Synthetic oligonucleotide
uauguacaugugaaguuga

SEQ ID NO: 190650 - RNA, 19 nt, Artificial Sequence
  Description of Artificial Sequence: Synthetic oligonucleotide
acauauguacaugugaagu

SEQ ID NO: 190651 - RNA, 19 nt, Artificial Sequence
  Description of Artificial Sequence: Synthetic oligonucleotide
ucccgaacuggcaugaaug

SEQ ID NO: 190652 - RNA, 19 nt, Artificial Sequence
  Description of Artificial Sequence: Synthetic oligonucleotide
gauacguauauucaagacu

SEQ ID NO: 190653 - RNA, 19 nt, Artificial Sequence
  Description of Artificial Sequence: Synthetic oligonucleotide
aggaguaaagccaaccagg

SEQ ID NO: 190654 - RNA, 19 nt, Artificial Sequence
  Description of Artificial Sequence: Synthetic oligonucleotide
uugcauuguguaauuuuag

SEQ ID NO: 190655 - RNA, 19 nt, Artificial Sequence
  Description of Artificial Sequence: Synthetic oligonucleotide
uuauauggcgaagccaucc

SEQ ID NO: 190656 - RNA, 19 nt, Artificial Sequence
  Description of Artificial Sequence: Synthetic oligonucleotide
gccaauuacgauuuacugg

SEQ ID NO: 190657 - RNA, 19 nt, Artificial Sequence
  Description of Artificial Sequence: Synthetic oligonucleotide
agauauaggugcaaucagg

SEQ ID NO: 190658 - RNA, 19 nt, Artificial Sequence
  Description of Artificial Sequence: Synthetic oligonucleotide
guagaaaucauugacggaa

SEQ ID NO: 190659 - RNA, 19 nt, Artificial Sequence
  Description of Artificial Sequence: Synthetic oligonucleotide
uacaucgacaaauggcagc

SEQ ID NO: 190660 - RNA, 19 nt, Artificial Sequence
  Description of Artificial Sequence: Synthetic oligonucleotide
ugaugauuauaagaagucu

SEQ ID NO: 190661 - RNA, 19 nt, Artificial Sequence
  Description of Artificial Sequence: Synthetic oligonucleotide
uuagcauaaugaaccaaaa

SEQ ID NO: 190662 - RNA, 19 nt, Artificial Sequence
  Description of Artificial Sequence: Synthetic oligonucleotide
uccaacaagagcgagccga

SEQ ID NO: 190663 - RNA, 19 nt, Artificial Sequence
  Description of Artificial Sequence: Synthetic oligonucleotide
guaauuuuagacucuaggu

SEQ ID NO: 190664 - RNA, 19 nt, Artificial Sequence
  Description of Artificial Sequence: Synthetic oligonucleotide
ugugcuuauacuugucuaa

SEQ ID NO: 190665 - RNA, 19 nt, Artificial Sequence
  Description of Artificial Sequence: Synthetic oligonucleotide
guaugaguuaacagaaugc

SEQ ID NO: 190666 - RNA, 19 nt, Artificial Sequence
  Description of Artificial Sequence: Synthetic oligonucleotide
agaauaaacaaugaccgua

SEQ ID NO: 190667 - RNA, 19 nt, Artificial Sequence
  Description of Artificial Sequence: Synthetic oligonucleotide
aagucugccauagaagagu

SEQ ID NO: 190668 - RNA, 19 nt, Artificial Sequence
  Description of Artificial Sequence: Synthetic oligonucleotide
uguagcaaguccuucguua

SEQ ID NO: 190669 - RNA, 19 nt, Artificial Sequence
  Description of Artificial Sequence: Synthetic oligonucleotide
uacauguagugguuucccg

SEQ ID NO: 190670 - RNA, 19 nt, Artificial Sequence
  Description of Artificial Sequence: Synthetic oligonucleotide
uauggcgaagccauccuga

SEQ ID NO: 190671 - RNA, 19 nt, Artificial Sequence
  Description of Artificial Sequence: Synthetic oligonucleotide
gauauaggugcaaucagga

SEQ ID NO: 190672 - RNA, 19 nt, Artificial Sequence
  Description of Artificial Sequence: Synthetic oligonucleotide
aagacuaauauaagaagua

SEQ ID NO: 190673 - RNA, 19 nt, Artificial Sequence
  Description of Artificial Sequence: Synthetic oligonucleotide
ugcaguaaucugaaaguaa

SEQ ID NO: 190674 - RNA, 19 nt, Artificial Sequence
  Description of Artificial Sequence: Synthetic oligonucleotide
aaugaaccaaaaugaugau

SEQ ID NO: 190675 - RNA, 19 nt, Artificial Sequence
  Description of Artificial Sequence: Synthetic oligonucleotide
auacguauauucaagacua

SEQ ID NO: 190676 - RNA, 19 nt, Artificial Sequence
  Description of Artificial Sequence: Synthetic oligonucleotide
cauucuugccacaccauac

SEQ ID NO: 190677 - RNA, 19 nt, Artificial Sequence
  Description of Artificial Sequence: Synthetic oligonucleotide
agcuguaaauaaugaacug

SEQ ID NO: 190678 - RNA, 19 nt, Artificial Sequence
  Description of Artificial Sequence: Synthetic oligonucleotide
ucuaaacaucauuaauuau

SEQ ID NO: 190679 - RNA, 19 nt, Artificial Sequence
  Description of Artificial Sequence: Synthetic oligonucleotide
uggccaauuacgauuuacu

SEQ ID NO: 190680 - RNA, 19 nt, Artificial Sequence
  Description of Artificial Sequence: Synthetic oligonucleotide
aaccguauuuggcuccaag

SEQ ID NO: 190681 - RNA, 19 nt, Artificial Sequence
  Description of Artificial Sequence: Synthetic oligonucleotide
uacaugugaaguugaagau

SEQ ID NO: 190682 - RNA, 19 nt, Artificial Sequence
  Description of Artificial Sequence: Synthetic oligonucleotide
gucuaaacaucauuaauua

SEQ ID NO: 190683 - RNA, 19 nt, Artificial Sequence
  Description of Artificial Sequence: Synthetic oligonucleotide
cuaagaagauugcagcauc

SEQ ID NO: 190684 - RNA, 19 nt, Artificial Sequence
  Description of Artificial Sequence: Synthetic oligonucleotide
uccuaucccacccauccga

SEQ ID NO: 190685 - RNA, 19 nt, Artificial Sequence
  Description of Artificial Sequence: Synthetic oligonucleotide
agucacaguaccgauuauc

SEQ ID NO: 190686 - RNA, 19 nt, Artificial Sequence
  Description of Artificial Sequence: Synthetic oligonucleotide
ugacaugaauauuuucuau

SEQ ID NO: 190687 - RNA, 19 nt, Artificial Sequence
  Description of Artificial Sequence: Synthetic oligonucleotide
caagacuaauauaagaagu

SEQ ID NO: 190688 - RNA, 19 nt, Artificial Sequence
  Description of Artificial Sequence: Synthetic oligonucleotide
acauaugcccucuauguua

SEQ ID NO: 190689 - RNA, 19 nt, Artificial Sequence
  Description of Artificial Sequence: Synthetic oligonucleotide
caugugaaguugaagauua

SEQ ID NO: 190690 - RNA, 19 nt, Artificial Sequence
  Description of Artificial Sequence: Synthetic oligonucleotide
ggaguguccgaucaaacug

SEQ ID NO: 190691 - RNA, 19 nt, Artificial Sequence
  Description of Artificial Sequence: Synthetic oligonucleotide
uauauggcgaagccauccu

SEQ ID NO: 190692 - RNA, 19 nt, Artificial Sequence
  Description of Artificial Sequence: Synthetic oligonucleotide
aauuuaugcccaaaugaua

SEQ ID NO: 190693 - RNA, 19 nt, Artificial Sequence
  Description of Artificial Sequence: Synthetic oligonucleotide
cuuacacuacagucagucc

SEQ ID NO: 190694 - RNA, 19 nt, Artificial Sequence
  Description of Artificial Sequence: Synthetic oligonucleotide
uaugcccucuauguuaccc

SEQ ID NO: 190695 - RNA, 19 nt, Artificial Sequence
  Description of Artificial Sequence: Synthetic oligonucleotide
ccaauuacgauuuacugga

SEQ ID NO: 190696 - RNA, 19 nt, Artificial Sequence
  Description of Artificial Sequence: Synthetic oligonucleotide
cuuccuacagagaugagua

SEQ ID NO: 190697 - RNA, 19 nt, Artificial Sequence
  Description of Artificial Sequence: Synthetic oligonucleotide
uacaacuuucuaugcagaa

SEQ ID NO: 190698 - RNA, 19 nt, Artificial Sequence
  Description of Artificial Sequence: Synthetic oligonucleotide
accguaacaaggcaacuaa

SEQ ID NO: 190699 - RNA, 19 nt, Artificial Sequence
  Description of Artificial Sequence: Synthetic oligonucleotide
ugcuccggaaguuggagcu

SEQ ID NO: 190700 - RNA, 19 nt, Artificial Sequence
  Description of Artificial Sequence: Synthetic oligonucleotide
uuacgauuuacuggagucu

SEQ ID NO: 190701 - RNA, 19 nt, Artificial Sequence
  Description of Artificial Sequence: Synthetic oligonucleotide
acuuccuacagagaugagu

SEQ ID NO: 190702 - RNA, 19 nt, Artificial Sequence
  Description of Artificial Sequence: Synthetic oligonucleotide
cauacauguagugguuucc

SEQ ID NO: 190703 - RNA, 19 nt, Artificial Sequence
  Description of Artificial Sequence: Synthetic oligonucleotide
aguaggcucggacuuagaa

SEQ ID NO: 190704 - RNA, 19 nt, Artificial Sequence
  Description of Artificial Sequence: Synthetic oligonucleotide
cuacaucgacaaauggcag

SEQ ID NO: 190705 - RNA, 19 nt, Artificial Sequence
  Description of Artificial Sequence: Synthetic oligonucleotide
caugcuauacaucccaaaa

SEQ ID NO: 190706 - RNA, 19 nt, Artificial Sequence
  Description of Artificial Sequence: Synthetic oligonucleotide
ucauugacggaaagccccu

SEQ ID NO: 190707 - RNA, 19 nt, Artificial Sequence
  Description of Artificial Sequence: Synthetic oligonucleotide
acagccuuuauauggcgaa

SEQ ID NO: 190708 - RNA, 19 nt, Artificial Sequence
  Description of Artificial Sequence: Synthetic oligonucleotide
uuuauauggcgaagccauc

SEQ ID NO: 190709 - RNA, 19 nt, Artificial Sequence
  Description of Artificial Sequence: Synthetic oligonucleotide
cucacgacuacauauuucu

SEQ ID NO: 190710 - RNA, 19 nt, Artificial Sequence
  Description of Artificial Sequence: Synthetic oligonucleotide
cuacagucaguccaggaga

SEQ ID NO: 190711 - RNA, 19 nt, Artificial Sequence
  Description of Artificial Sequence: Synthetic oligonucleotide
gauuuacuggagucuacaa

SEQ ID NO: 190712 - RNA, 19 nt, Artificial Sequence
  Description of Artificial Sequence: Synthetic oligonucleotide
auauggcgaagccauccug

SEQ ID NO: 190713 - RNA, 19 nt, Artificial Sequence
  Description of Artificial Sequence: Synthetic oligonucleotide
gguaucgacaacauacaug

SEQ ID NO: 190714 - RNA, 19 nt, Artificial Sequence
  Description of Artificial Sequence: Synthetic oligonucleotide
ugguaucgacaacauacau

SEQ ID NO: 190715 - RNA, 19 nt, Artificial Sequence
  Description of Artificial Sequence: Synthetic oligonucleotide
ggccaauuacgauuuacug

SEQ ID NO: 190716 - RNA, 19 nt, Artificial Sequence
  Description of Artificial Sequence: Synthetic oligonucleotide
acaagagcgagccgaggga

SEQ ID NO: 190717 - RNA, 19 nt, Artificial Sequence
  Description of Artificial Sequence: Synthetic oligonucleotide
ucguggaucugaagaagaa

SEQ ID NO: 190718 - RNA, 19 nt, Artificial Sequence
  Description of Artificial Sequence: Synthetic oligonucleotide
gacugucgaggauggagug

SEQ ID NO: 190719 - RNA, 19 nt, Artificial Sequence
  Description of Artificial Sequence: Synthetic oligonucleotide
caguggaccaguacacuug

SEQ ID NO: 190720 - RNA, 19 nt, Artificial Sequence
  Description of Artificial Sequence: Synthetic oligonucleotide
gugucauucacuggaagca

SEQ ID NO: 190721 - RNA, 19 nt, Artificial Sequence
  Description of Artificial Sequence: Synthetic oligonucleotide
uugaacucaaaggcuugug

SEQ ID NO: 190722 - RNA, 19 nt, Artificial Sequence
  Description of Artificial Sequence: Synthetic oligonucleotide
agcccgaagugugucauuc

SEQ ID NO: 190723 - RNA, 19 nt, Artificial Sequence
  Description of Artificial Sequence: Synthetic oligonucleotide
uacgauuuacuggagucua

SEQ ID NO: 190724 - RNA, 19 nt, Artificial Sequence
  Description of Artificial Sequence: Synthetic oligonucleotide
aacagccuuuauauggcga

SEQ ID NO: 190725 - RNA, 19 nt, Artificial Sequence
  Description of Artificial Sequence: Synthetic oligonucleotide
agcccucaaguaaugagag

SEQ ID NO: 190726 - RNA, 19 nt, Artificial Sequence
  Description of Artificial Sequence: Synthetic oligonucleotide
cacuuuaaauggacaguuc

SEQ ID NO: 190727 - RNA, 19 nt, Artificial Sequence
  Description of Artificial Sequence: Synthetic oligonucleotide
auggcgaagccauccugag

SEQ ID NO: 190728 - RNA, 19 nt, Artificial Sequence
  Description of Artificial Sequence: Synthetic oligonucleotide
gaagaaacgcuucguugaa

SEQ ID NO: 190729 - RNA, 19 nt, Artificial Sequence
  Description of Artificial Sequence: Synthetic oligonucleotide
caguuauaaguaguuagca

SEQ ID NO: 190730 - RNA, 19 nt, Artificial Sequence
  Description of Artificial Sequence: Synthetic oligonucleotide
uacguauauucaagacuaa

SEQ ID NO: 190731 - RNA, 19 nt, Artificial Sequence
  Description of Artificial Sequence: Synthetic oligonucleotide
uucaaccacuauugccuug

SEQ ID NO: 190732 - RNA, 19 nt, Artificial Sequence
  Description of Artificial Sequence: Synthetic oligonucleotide
caauuacgauuuacuggag

SEQ ID NO: 190733 - RNA, 19 nt, Artificial Sequence
  Description of Artificial Sequence: Synthetic oligonucleotide
aacuugaguuccucucuuu

SEQ ID NO: 190734 - RNA, 19 nt, Artificial Sequence
  Description of Artificial Sequence: Synthetic oligonucleotide
uugcuccggaaguuggagc

SEQ ID NO: 190735 - RNA, 19 nt, Artificial Sequence
  Description of Artificial Sequence: Synthetic oligonucleotide
aaacuacaaccugauggaa

SEQ ID NO: 190736 - RNA, 19 nt, Artificial Sequence
  Description of Artificial Sequence: Synthetic oligonucleotide
uauuuggcuccaagacugu

SEQ ID NO: 190737 - RNA, 19 nt, Artificial Sequence
  Description of Artificial Sequence: Synthetic oligonucleotide
cauguuucuccaaaacuua

SEQ ID NO: 190738 - RNA, 19 nt, Artificial Sequence
  Description of Artificial Sequence: Synthetic oligonucleotide
cacuaaagugaaauguucu

SEQ ID NO: 190739 - RNA, 19 nt, Artificial Sequence
  Description of Artificial Sequence: Synthetic oligonucleotide
cugguaucgacaacauaca

SEQ ID NO: 190740 - RNA, 19 nt, Artificial Sequence
  Description of Artificial Sequence: Synthetic oligonucleotide
guaggcucggacuuagaaa

SEQ ID NO: 190741 - RNA, 19 nt, Artificial Sequence
  Description of Artificial Sequence: Synthetic oligonucleotide
uccucacgacuacauauuu

SEQ ID NO: 190742 - RNA, 19 nt, Artificial Sequence
  Description of Artificial Sequence: Synthetic oligonucleotide
ucgaggauggaguguccga

SEQ ID NO: 190743 - RNA, 19 nt, Artificial Sequence
  Description of Artificial Sequence: Synthetic oligonucleotide
cuugcuccggaaguuggag

SEQ ID NO: 190744 - RNA, 19 nt, Artificial Sequence
  Description of Artificial Sequence: Synthetic oligonucleotide
ggcaugaaugaacaugcuc

SEQ ID NO: 190745 - RNA, 19 nt, Artificial Sequence
  Description of Artificial Sequence: Synthetic oligonucleotide
gaagaagaaacgcuucguu

SEQ ID NO: 190746 - RNA, 19 nt, Artificial Sequence
  Description of Artificial Sequence: Synthetic oligonucleotide
aguaucacucuugcuacaa

SEQ ID NO: 190747 - RNA, 19 nt, Artificial Sequence
  Description of Artificial Sequence: Synthetic oligonucleotide
aggugcuaacuuugaauau

SEQ ID NO: 190748 - RNA, 19 nt, Artificial Sequence
  Description of Artificial Sequence: Synthetic oligonucleotide
acguauauucaagacuaau

SEQ ID NO: 190749 - RNA, 19 nt, Artificial Sequence
  Description of Artificial Sequence: Synthetic oligonucleotide
uucccgaacuggcaugaau

SEQ ID NO: 190750 - RNA, 19 nt, Artificial Sequence
  Description of Artificial Sequence: Synthetic oligonucleotide
acaguaccgauuaucuggu

SEQ ID NO: 190751 - RNA, 19 nt, Artificial Sequence
  Description of Artificial Sequence: Synthetic oligonucleotide
cuagaucaggcaguuauaa

SEQ ID NO: 190752 - RNA, 19 nt, Artificial Sequence
  Description of Artificial Sequence: Synthetic oligonucleotide
aaguccuaucccacccauc

SEQ ID NO: 190753 - RNA, 19 nt, Artificial Sequence
  Description of Artificial Sequence: Synthetic oligonucleotide
cgaacuggcaugaaugaac

SEQ ID NO: 190754 - RNA, 19 nt, Artificial Sequence
  Description of Artificial Sequence: Synthetic oligonucleotide
auuaaccggcuccccucag

SEQ ID NO: 190755 - RNA, 19 nt, Artificial Sequence
  Description of Artificial Sequence: Synthetic oligonucleotide
cugucgaggauggaguguc

SEQ ID NO: 190756 - RNA, 19 nt, Artificial Sequence
  Description of Artificial Sequence: Synthetic oligonucleotide
ugaauaugguuggguuggc

SEQ ID NO: 190757 - RNA, 19 nt, Artificial Sequence
  Description of Artificial Sequence: Synthetic oligonucleotide
ugucgaggauggagugucc

SEQ ID NO: 190758 - RNA, 19 nt, Artificial Sequence
  Description of Artificial Sequence: Synthetic oligonucleotide
ugcccuugaacuguaccuc

SEQ ID NO: 190759 - RNA, 19 nt, Artificial Sequence
  Description of Artificial Sequence: Synthetic oligonucleotide
aggugcaaucaggagauau

SEQ ID NO: 190760 - RNA, 19 nt, Artificial Sequence
  Description of Artificial Sequence: Synthetic oligonucleotide
cacucucaguguguguagg

SEQ ID NO: 190761 - RNA, 19 nt, Artificial Sequence
  Description of Artificial Sequence: Synthetic oligonucleotide
uucuuacacuacagucagu

SEQ ID NO: 190762 - RNA, 19 nt, Artificial Sequence
  Description of Artificial Sequence: Synthetic oligonucleotide
cauccgaacaguggaccag

SEQ ID NO: 190763 - RNA, 19 nt, Artificial Sequence
  Description of Artificial Sequence: Synthetic oligonucleotide
ucacgacuacauauuucuu

SEQ ID NO: 190764 - RNA, 19 nt, Artificial Sequence
  Description of Artificial Sequence: Synthetic oligonucleotide
cuccggguagucacaguac

SEQ ID NO: 190765 - RNA, 19 nt, Artificial Sequence
  Description of Artificial Sequence: Synthetic oligonucleotide
uuccuacagagaugaguau

SEQ ID NO: 190766 - RNA, 19 nt, Artificial Sequence
  Description of Artificial Sequence: Synthetic oligonucleotide
ggacacuaaagugaaaugu

SEQ ID NO: 190767 - RNA, 19 nt, Artificial Sequence
  Description of Artificial Sequence: Synthetic oligonucleotide
ccgauuaucugguggguug

SEQ ID NO: 190768 - RNA, 19 nt, Artificial Sequence
  Description of Artificial Sequence: Synthetic oligonucleotide
aguucccgaacuggcauga

SEQ ID NO: 190769 - RNA, 19 nt, Artificial Sequence
  Description of Artificial Sequence: Synthetic oligonucleotide
gaaaccguauuuggcucca

SEQ ID NO: 190770 - RNA, 19 nt, Artificial Sequence
  Description of Artificial Sequence: Synthetic oligonucleotide
uugguacauuaaccggcuc

SEQ ID NO: 190771 - RNA, 19 nt, Artificial Sequence
  Description of Artificial Sequence: Synthetic oligonucleotide
cauuuacacagacuuuugu

SEQ ID NO: 190772 - RNA, 19 nt, Artificial Sequence
  Description of Artificial Sequence: Synthetic oligonucleotide
guaggacaagacuggaagu

SEQ ID NO: 190773 - RNA, 19 nt, Artificial Sequence
  Description of Artificial Sequence: Synthetic oligonucleotide
cuauagcccgaaguguguc

SEQ ID NO: 190774 - RNA, 19 nt, Artificial Sequence
  Description of Artificial Sequence: Synthetic oligonucleotide
uguuacccaggauguuauc

SEQ ID NO: 190775 - RNA, 19 nt, Artificial Sequence
  Description of Artificial Sequence: Synthetic oligonucleotide
gcuguaaauaaugaacugu

SEQ ID NO: 190776 - RNA, 19 nt, Artificial Sequence
  Description of Artificial Sequence: Synthetic oligonucleotide
ggccacaccucucugaaaa

SEQ ID NO: 190777 - RNA, 19 nt, Artificial Sequence
  Description of Artificial Sequence: Synthetic oligonucleotide
cuaucccacccauccgaac

SEQ ID NO: 190778 - RNA, 19 nt, Artificial Sequence
  Description of Artificial Sequence: Synthetic oligonucleotide
ugaccguaacaaggcaacu

SEQ ID NO: 190779 - RNA, 19 nt, Artificial Sequence
  Description of Artificial Sequence: Synthetic oligonucleotide
cuaagaaaucagucugcua

SEQ ID NO: 190780 - RNA, 19 nt, Artificial Sequence
  Description of Artificial Sequence: Synthetic oligonucleotide
gcagcguacagcccucaag

SEQ ID NO: 190781 - RNA, 19 nt, Artificial Sequence
  Description of Artificial Sequence: Synthetic oligonucleotide
auguuacccaggauguuau

SEQ ID NO: 190782 - RNA, 19 nt, Artificial Sequence
  Description of Artificial Sequence: Synthetic oligonucleotide
ggguugcugcccucuauag

SEQ ID NO: 190783 - RNA, 19 nt, Artificial Sequence
  Description of Artificial Sequence: Synthetic oligonucleotide
cauuaaccggcuccccuca

SEQ ID NO: 190784 - RNA, 19 nt, Artificial Sequence
  Description of Artificial Sequence: Synthetic oligonucleotide
caacaagagcgagccgagg

SEQ ID NO: 190785 - RNA, 19 nt, Artificial Sequence
  Description of Artificial Sequence: Synthetic oligonucleotide
ccgaucaaacuggugauac

SEQ ID NO: 190786 - RNA, 19 nt, Artificial Sequence
  Description of Artificial Sequence: Synthetic oligonucleotide
ggucuuacggaaguaaacu

SEQ ID NO: 190787 - RNA, 19 nt, Artificial Sequence
  Description of Artificial Sequence: Synthetic oligonucleotide
ugucaacauaugcccucua

SEQ ID NO: 190788 - RNA, 19 nt, Artificial Sequence
  Description of Artificial Sequence: Synthetic oligonucleotide
ccaacaagagcgagccgag

SEQ ID NO: 190789 - RNA, 19 nt, Artificial Sequence
  Description of Artificial Sequence: Synthetic oligonucleotide
guaucacucuugcuacaaa

SEQ ID NO: 190790 - RNA, 19 nt, Artificial Sequence
  Description of Artificial Sequence: Synthetic oligonucleotide
cacuauugccuuggcuaag

SEQ ID NO: 190791 - RNA, 19 nt, Artificial Sequence
  Description of Artificial Sequence: Synthetic oligonucleotide
aggcucggacuuagaaaac

SEQ ID NO: 190792 - RNA, 19 nt, Artificial Sequence
  Description of Artificial Sequence: Synthetic oligonucleotide
caugaacauuuaauugccu

SEQ ID NO: 190793 - RNA, 19 nt, Artificial Sequence
  Description of Artificial Sequence: Synthetic oligonucleotide
caaccacuauugccuuggc

SEQ ID NO: 190794 - RNA, 19 nt, Artificial Sequence
  Description of Artificial Sequence: Synthetic oligonucleotide
gaaguccuaucccacccau

SEQ ID NO: 190795 - RNA, 19 nt, Artificial Sequence
  Description of Artificial Sequence: Synthetic oligonucleotide
agugugucauucacuggaa

SEQ ID NO: 190796 - RNA, 19 nt, Artificial Sequence
  Description of Artificial Sequence: Synthetic oligonucleotide
ugcagcguacagcccucaa

SEQ ID NO: 190797 - RNA, 19 nt, Artificial Sequence
  Description of Artificial Sequence: Synthetic oligonucleotide
gugcaaucaggagauauau

SEQ ID NO: 190798 - RNA, 19 nt, Artificial Sequence
  Description of Artificial Sequence: Synthetic oligonucleotide
cuggagucuacaacuuucu

SEQ ID NO: 190799 - RNA, 19 nt, Artificial Sequence
  Description of Artificial Sequence: Synthetic oligonucleotide
uuucccgaguuggcuguac

SEQ ID NO: 190800 - RNA, 19 nt, Artificial Sequence
  Description of Artificial Sequence: Synthetic oligonucleotide
cccacaugaacagaucauc

SEQ ID NO: 190801 - RNA, 19 nt, Artificial Sequence
  Description of Artificial Sequence: Synthetic oligonucleotide
caguaccgauuaucuggug

SEQ ID NO: 190802 - RNA, 19 nt, Artificial Sequence
  Description of Artificial Sequence: Synthetic oligonucleotide
gcguacagcccucaaguaa

SEQ ID NO: 190803 - RNA, 19 nt, Artificial Sequence
  Description of Artificial Sequence: Synthetic oligonucleotide
caagagcgagccgagggaa

SEQ ID NO: 190804 - RNA, 19 nt, Artificial Sequence
  Description of Artificial Sequence: Synthetic oligonucleotide
ccuuuauauggcgaagcca

SEQ ID NO: 190805 - RNA, 19 nt, Artificial Sequence
  Description of Artificial Sequence: Synthetic oligonucleotide
aaaccguauuuggcuccaa

SEQ ID NO: 190806 - RNA, 19 nt, Artificial Sequence
  Description of Artificial Sequence: Synthetic oligonucleotide
guguccgaucaaacuggug

SEQ ID NO: 190807 - RNA, 19 nt, Artificial Sequence
  Description of Artificial Sequence: Synthetic oligonucleotide
guuaucugugugugagcau

SEQ ID NO: 190808 - RNA, 19 nt, Artificial Sequence
  Description of Artificial Sequence: Synthetic oligonucleotide
caauaccacucacuuccua

SEQ ID NO: 190809 - RNA, 19 nt, Artificial Sequence
  Description of Artificial Sequence: Synthetic oligonucleotide
ccgaacaguggaccaguac

SEQ ID NO: 190810 - RNA, 19 nt, Artificial Sequence
  Description of Artificial Sequence: Synthetic oligonucleotide
gggucaccguccaaauggc

SEQ ID NO: 190811 - RNA, 19 nt, Artificial Sequence
  Description of Artificial Sequence: Synthetic oligonucleotide
gcuaagaagauugcagcau

SEQ ID NO: 190812 - RNA, 19 nt, Artificial Sequence
  Description of Artificial Sequence: Synthetic oligonucleotide
cccgaacuggcaugaauga

SEQ ID NO: 190813 - RNA, 19 nt, Artificial Sequence
  Description of Artificial Sequence: Synthetic oligonucleotide
ggucaccguccaaauggcc

SEQ ID NO: 190814 - RNA, 19 nt, Artificial Sequence
  Description of Artificial Sequence: Synthetic oligonucleotide
gguuucccgaguuggcugu

SEQ ID NO: 190815 - RNA, 19 nt, Artificial Sequence
  Description of Artificial Sequence: Synthetic oligonucleotide
cauucacuuccaguaauuu

SEQ ID NO: 190816 - RNA, 19 nt, Artificial Sequence
  Description of Artificial Sequence: Synthetic oligonucleotide
agcgagccgagggaacaaa

SEQ ID NO: 190817 - RNA, 19 nt, Artificial Sequence
  Description of Artificial Sequence: Synthetic oligonucleotide
ggcucggacuuagaaaacu

SEQ ID NO: 190818 - RNA, 19 nt, Artificial Sequence
  Description of Artificial Sequence: Synthetic oligonucleotide
gccauucacuuccaguaau

SEQ ID NO: 190819 - RNA, 19 nt, Artificial Sequence
  Description of Artificial Sequence: Synthetic oligonucleotide
ccggaaguuggagcugccc

SEQ ID NO: 190820 - RNA, 19 nt, Artificial Sequence
  Description of Artificial Sequence: Synthetic oligonucleotide
gguuuugagggcaggugau

SEQ ID NO: 190821 - RNA, 19 nt, Artificial Sequence
  Description of Artificial Sequence: Synthetic oligonucleotide
ccguccaaauggccacacc

SEQ ID NO: 190822 - RNA, 19 nt, Artificial Sequence
  Description of Artificial Sequence: Synthetic oligonucleotide
ccggcaguaggacaagacu

SEQ ID NO: 190823 - RNA, 19 nt, Artificial Sequence
  Description of Artificial Sequence: Synthetic oligonucleotide
ccuaucccacccauccgaa

SEQ ID NO: 190824 - RNA, 19 nt, Artificial Sequence
  Description of Artificial Sequence: Synthetic oligonucleotide
guggguugcugcccucuau

SEQ ID NO: 190825 - RNA, 19 nt, Artificial Sequence
  Description of Artificial Sequence: Synthetic oligonucleotide
caccguccaaauggccaca

SEQ ID NO: 190826 - RNA, 19 nt, Artificial Sequence
  Description of Artificial Sequence: Synthetic oligonucleotide
cuauguuacccaggauguu

SEQ ID NO: 190827 - RNA, 19 nt, Artificial Sequence
  Description of Artificial Sequence: Synthetic oligonucleotide
guuucccgaguuggcugua

SEQ ID NO: 190828 - RNA, 19 nt, Artificial Sequence
  Description of Artificial Sequence: Synthetic oligonucleotide
gcccucaaguaaugagagu

SEQ ID NO: 190829 - RNA, 19 nt, Artificial Sequence
  Description of Artificial Sequence: Synthetic oligonucleotide
ccgaacuggcaugaaugaa

SEQ ID NO: 190830 - RNA, 19 nt, Artificial Sequence
  Description of Artificial Sequence: Synthetic oligonucleotide
ccgaguuggcuguacuaau

SEQ ID NO: 190831 - RNA, 19 nt, Artificial Sequence
  Description of Artificial Sequence: Synthetic oligonucleotide
ccucuauguuacccaggau

SEQ ID NO: 190832 - RNA, 19 nt, Artificial Sequence
  Description of Artificial Sequence: Synthetic oligonucleotide
aauaacagacaucagacgg

SEQ ID NO: 190833 - RNA, 19 nt, Artificial Sequence
  Description of Artificial Sequence: Synthetic oligonucleotide
uuuaaugugauguaaaggc

SEQ ID NO: 190834 - RNA, 19 nt, Artificial Sequence
  Description of Artificial Sequence: Synthetic oligonucleotide
aaggguuaaugccugagcc

SEQ ID NO: 190835 - RNA, 19 nt, Artificial Sequence
  Description of Artificial Sequence: Synthetic oligonucleotide
uuacuuaugaaucagugcu

SEQ ID NO: 190836 - RNA, 19 nt, Artificial Sequence
  Description of Artificial Sequence: Synthetic oligonucleotide
uuuuaaauuaaccaccuaa

SEQ ID NO: 190837 - RNA, 19 nt, Artificial Sequence
  Description of Artificial Sequence: Synthetic oligonucleotide
uuagauauuguccaacaug

SEQ ID NO: 190838 - RNA, 19 nt, Artificial Sequence
  Description of Artificial Sequence: Synthetic oligonucleotide
cugaauaucccuuacauuc

SEQ ID NO: 190839 - RNA, 19 nt, Artificial Sequence
  Description of Artificial Sequence: Synthetic oligonucleotide
caaagauuagauaaagccc

SEQ ID NO: 190840 - RNA, 19 nt, Artificial Sequence
  Description of Artificial Sequence: Synthetic oligonucleotide
uuuuacuuaugaaucagug

SEQ ID NO: 190841 - RNA, 19 nt, Artificial Sequence
  Description of Artificial Sequence: Synthetic oligonucleotide
aaugaauucuagaagagca

SEQ ID NO: 190842 - RNA, 19 nt, Artificial Sequence
  Description of Artificial Sequence: Synthetic oligonucleotide
cauguaugcagcaugauac

SEQ ID NO: 190843 - RNA, 19 nt, Artificial Sequence
  Description of Artificial Sequence: Synthetic oligonucleotide
ugauacauuagaaucgcgc

SEQ ID NO: 190844 - RNA, 19 nt, Artificial Sequence
  Description of Artificial Sequence: Synthetic oligonucleotide
aaugcaucacacucuuggc

SEQ ID NO: 190845 - RNA, 19 nt, Artificial Sequence
  Description of Artificial Sequence: Synthetic oligonucleotide
uguaauaaaggguauucca

SEQ ID NO: 190846 - RNA, 19 nt, Artificial Sequence
  Description of Artificial Sequence: Synthetic oligonucleotide
ucucaauaaggauuaaugc

SEQ ID NO: 190847 - RNA, 19 nt, Artificial Sequence
  Description of Artificial Sequence: Synthetic oligonucleotide
uuaauauguguauaucccc

SEQ ID NO: 190848 - RNA, 19 nt, Artificial Sequence
  Description of Artificial Sequence: Synthetic oligonucleotide
agacuguuagcuuuuaaag

SEQ ID NO: 190849 - RNA, 19 nt, Artificial Sequence
  Description of Artificial Sequence: Synthetic oligonucleotide
aaucauuaugcaucagaag

SEQ ID NO: 190850 - RNA, 19 nt, Artificial Sequence
  Description of Artificial Sequence: Synthetic oligonucleotide
ucaauaagaucaaaagccu

SEQ ID NO: 190851 - RNA, 19 nt, Artificial Sequence
  Description of Artificial Sequence: Synthetic oligonucleotide
ugugcaauagcuugucagg

SEQ ID NO: 190852 - RNA, 19 nt, Artificial Sequence
  Description of Artificial Sequence: Synthetic oligonucleotide
caaggcaagcaaaugagcg

SEQ ID NO: 190853 - RNA, 19 nt, Artificial Sequence
  Description of Artificial Sequence: Synthetic oligonucleotide
uaaucauuaugcaucagaa

SEQ ID NO: 190854 - RNA, 19 nt, Artificial Sequence
  Description of Artificial Sequence: Synthetic oligonucleotide
cauuagaggaaagaaaacc

SEQ ID NO: 190855 - RNA, 19 nt, Artificial Sequence
  Description of Artificial Sequence: Synthetic oligonucleotide
auuagaaucgcgcugcacu

SEQ ID NO: 190856 - RNA, 19 nt, Artificial Sequence
  Description of Artificial Sequence: Synthetic oligonucleotide
uuaaugugauguaaaggca

SEQ ID NO: 190857 - RNA, 19 nt, Artificial Sequence
  Description of Artificial Sequence: Synthetic oligonucleotide
aauccuaaguaacauuuaa

SEQ ID NO: 190858 - RNA, 19 nt, Artificial Sequence
  Description of Artificial Sequence: Synthetic oligonucleotide
aaccuguacaaucuuugag

SEQ ID NO: 190859 - RNA, 19 nt, Artificial Sequence
  Description of Artificial Sequence: Synthetic oligonucleotide
uuuaaaaggguaugcuccc

SEQ ID NO: 190860 - RNA, 19 nt, Artificial Sequence
  Description of Artificial Sequence: Synthetic oligonucleotide
ucgcauugaacucauuugc

SEQ ID NO: 190861 - RNA, 19 nt, Artificial Sequence
  Description of Artificial Sequence: Synthetic oligonucleotide
ucuaauauuagugcggauc

SEQ ID NO: 190862 - RNA, 19 nt, Artificial Sequence
  Description of Artificial Sequence: Synthetic oligonucleotide
aguaaaucgggucauguaa

SEQ ID NO: 190863 - RNA, 19 nt, Artificial Sequence
  Description of Artificial Sequence: Synthetic oligonucleotide
uuugaggagacuguuagcu

SEQ ID NO: 190864 - RNA, 19 nt, Artificial Sequence
  Description of Artificial Sequence: Synthetic oligonucleotide
aggauuaaugcaaauuugg

SEQ ID NO: 190865 - RNA, 19 nt, Artificial Sequence
  Description of Artificial Sequence: Synthetic oligonucleotide
gaaugacuccauuagagga

SEQ ID NO: 190866 - RNA, 19 nt, Artificial Sequence
  Description of Artificial Sequence: Synthetic oligonucleotide
aauauuagauauuguccaa

SEQ ID NO: 190867 - RNA, 19 nt, Artificial Sequence
  Description of Artificial Sequence: Synthetic oligonucleotide
ugagguaugaaaguucuga

SEQ ID NO: 190868 - RNA, 19 nt, Artificial Sequence
  Description of Artificial Sequence: Synthetic oligonucleotide
aagggaaucugccaagcca

SEQ ID NO: 190869 - RNA, 19 nt, Artificial Sequence
  Description of Artificial Sequence: Synthetic oligonucleotide
augugcaauagcuugucag

SEQ ID NO: 190870 - RNA, 19 nt, Artificial Sequence
  Description of Artificial Sequence: Synthetic oligonucleotide
aaagcuggaaaccuuccau

SEQ ID NO: 190871 - RNA, 19 nt, Artificial Sequence
  Description of Artificial Sequence: Synthetic oligonucleotide
acuagcaccgagaagucgc

SEQ ID NO: 190872 - RNA, 19 nt, Artificial Sequence
  Description of Artificial Sequence: Synthetic oligonucleotide
aagaacucgagaagaguac

SEQ ID NO: 190873 - RNA, 19 nt, Artificial Sequence
  Description of Artificial Sequence: Synthetic oligonucleotide
uaaaggguauuccaccaca

SEQ ID NO: 190874 - RNA, 19 nt, Artificial Sequence
  Description of Artificial Sequence: Synthetic oligonucleotide
ugggcuacucagcaaaugc

SEQ ID NO: 190875 - RNA, 19 nt, Artificial Sequence
  Description of Artificial Sequence: Synthetic oligonucleotide
uacauuagaaucgcgcugc

SEQ ID NO: 190876 - RNA, 19 nt, Artificial Sequence
  Description of Artificial Sequence: Synthetic oligonucleotide
uguguauauccccaugacu

SEQ ID NO: 190877 - RNA, 19 nt, Artificial Sequence
  Description of Artificial Sequence: Synthetic oligonucleotide
auccccaugacucuaauau

SEQ ID NO: 190878 - RNA, 19 nt, Artificial Sequence
  Description of Artificial Sequence: Synthetic oligonucleotide
aaaggguaugcucccaaca

SEQ ID NO: 190879 - RNA, 19 nt, Artificial Sequence
  Description of Artificial Sequence: Synthetic oligonucleotide
gacgguauccaucccagag

SEQ ID NO: 190880 - RNA, 19 nt, Artificial Sequence
  Description of Artificial Sequence: Synthetic oligonucleotide
caucagacgguauccaucc

SEQ ID NO: 190881 - RNA, 19 nt, Artificial Sequence
  Description of Artificial Sequence: Synthetic oligonucleotide
ugaauaucccuuacauuca

SEQ ID NO: 190882 - RNA, 19 nt, Artificial Sequence
  Description of Artificial Sequence: Synthetic oligonucleotide
auuagauaaagcccauacu

SEQ ID NO: 190883 - RNA, 19 nt, Artificial Sequence
  Description of Artificial Sequence: Synthetic oligonucleotide
gacucuaauauuagugcgg

SEQ ID NO: 190884 - RNA, 19 nt, Artificial Sequence
  Description of Artificial Sequence: Synthetic oligonucleotide
agagcaagaaugcaucaca

SEQ ID NO: 190885 - RNA, 19 nt, Artificial Sequence
  Description of Artificial Sequence: Synthetic oligonucleotide
aaaauuaccugugucugaa

SEQ ID NO: 190886 - RNA, 19 nt, Artificial Sequence
  Description of Artificial Sequence: Synthetic oligonucleotide
ugacuaguuuuguagugcc

SEQ ID NO: 190887 - RNA, 19 nt, Artificial Sequence
  Description of Artificial Sequence: Synthetic oligonucleotide
uaggguacuaguaggagau

SEQ ID NO: 190888 - RNA, 19 nt, Artificial Sequence
  Description of Artificial Sequence: Synthetic oligonucleotide
gacuguuagcuuuuaaaga

SEQ ID NO: 190889 - RNA, 19 nt, Artificial Sequence
  Description of Artificial Sequence: Synthetic oligonucleotide
auacauuagaaucgcgcug

SEQ ID NO: 190890 - RNA, 19 nt, Artificial Sequence
  Description of Artificial Sequence: Synthetic oligonucleotide
agcaguuugcaauauacua

SEQ ID NO: 190891 - RNA, 19 nt, Artificial Sequence
  Description of Artificial Sequence: Synthetic oligonucleotide
caugauacauuagaaucgc

SEQ ID NO: 190892 - RNA, 19 nt, Artificial Sequence
  Description of Artificial Sequence: Synthetic oligonucleotide
uuguaauaaaggguauucc

SEQ ID NO: 190893 - RNA, 19 nt, Artificial Sequence
  Description of Artificial Sequence: Synthetic oligonucleotide
uuagaaucgcgcugcacug

SEQ ID NO: 190894 - RNA, 19 nt, Artificial Sequence
  Description of Artificial Sequence: Synthetic oligonucleotide
cuuguaauaaaggguauuc

SEQ ID NO: 190895 - RNA, 19 nt, Artificial Sequence
  Description of Artificial Sequence: Synthetic oligonucleotide
uuagugcggaucuccaaag

SEQ ID NO: 190896 - RNA, 19 nt, Artificial Sequence
  Description of Artificial Sequence: Synthetic oligonucleotide
acuaguaggagaugaaaua

SEQ ID NO: 190897 - RNA, 19 nt, Artificial Sequence
  Description of Artificial Sequence: Synthetic oligonucleotide
acauucagcaggauucacc

SEQ ID NO: 190898 - RNA, 19 nt, Artificial Sequence
  Description of Artificial Sequence: Synthetic oligonucleotide
uauuguccaacaugcuucc

SEQ ID NO: 190899 - RNA, 19 nt, Artificial Sequence
  Description of Artificial Sequence: Synthetic oligonucleotide
gauacauuagaaucgcgcu

SEQ ID NO: 190900 - RNA, 19 nt, Artificial Sequence
  Description of Artificial Sequence: Synthetic oligonucleotide
uaugcacaagucuaaguau

SEQ ID NO: 190901 - RNA, 19 nt, Artificial Sequence
  Description of Artificial Sequence: Synthetic oligonucleotide
uuccagauguguguaaaag

SEQ ID NO: 190902 - RNA, 19 nt, Artificial Sequence
  Description of Artificial Sequence: Synthetic oligonucleotide
aagaaugcaucacacucuu

SEQ ID NO: 190903 - RNA, 19 nt, Artificial Sequence
  Description of Artificial Sequence: Synthetic oligonucleotide
ucauguaugcagcaugaua

SEQ ID NO: 190904 - RNA, 19 nt, Artificial Sequence
  Description of Artificial Sequence: Synthetic oligonucleotide
caagucuccuacauacucc

SEQ ID NO: 190905 - RNA, 19 nt, Artificial Sequence
  Description of Artificial Sequence: Synthetic oligonucleotide
uugacuaguuuuguagugc

SEQ ID NO: 190906 - RNA, 19 nt, Artificial Sequence
  Description of Artificial Sequence: Synthetic oligonucleotide
uaaccaccuaauuuauccc

SEQ ID NO: 190907 - RNA, 19 nt, Artificial Sequence
  Description of Artificial Sequence: Synthetic oligonucleotide
accuaauuuaucccuaaaa

SEQ ID NO: 190908 - RNA, 19 nt, Artificial Sequence
  Description of Artificial Sequence: Synthetic oligonucleotide
acuuuacggaaugaggaag

SEQ ID NO: 190909 - RNA, 19 nt, Artificial Sequence
  Description of Artificial Sequence: Synthetic oligonucleotide
uguauauccccaugacucu

SEQ ID NO: 190910 - RNA, 19 nt, Artificial Sequence
  Description of Artificial Sequence: Synthetic oligonucleotide
ugccaagccaguaucacau

SEQ ID NO: 190911 - RNA, 19 nt, Artificial Sequence
  Description of Artificial Sequence: Synthetic oligonucleotide
agaaucgcgcugcacugac

SEQ ID NO: 190912 - RNA, 19 nt, Artificial Sequence
  Description of Artificial Sequence: Synthetic oligonucleotide
uucggucccaaaguaaugc

SEQ ID NO: 190913 - RNA, 19 nt, Artificial Sequence
  Description of Artificial Sequence: Synthetic oligonucleotide
auuagugcggaucuccaaa

SEQ ID NO: 190914 - RNA, 19 nt, Artificial Sequence
  Description of Artificial Sequence: Synthetic oligonucleotide
ggaguaggguacuaguagg

SEQ ID NO: 190915 - RNA, 19 nt, Artificial Sequence
  Description of Artificial Sequence: Synthetic oligonucleotide
guaaaucgggucauguaag

SEQ ID NO: 190916 - RNA, 19 nt, Artificial Sequence
  Description of Artificial Sequence: Synthetic oligonucleotide
uuaguuuagaggucauuuu

SEQ ID NO: 190917 - RNA, 19 nt, Artificial Sequence
  Description of Artificial Sequence: Synthetic oligonucleotide
uuuugaggagacuguuagc

SEQ ID NO: 190918 - RNA, 19 nt, Artificial Sequence
  Description of Artificial Sequence: Synthetic oligonucleotide
agugcggaucuccaaagcu

SEQ ID NO: 190919 - RNA, 19 nt, Artificial Sequence
  Description of Artificial Sequence: Synthetic oligonucleotide
ugugauguaaaggcaacau

SEQ ID NO: 190920 - RNA, 19 nt, Artificial Sequence
  Description of Artificial Sequence: Synthetic oligonucleotide
aaaggguauuccaccacag

SEQ ID NO: 190921 - RNA, 19 nt, Artificial Sequence
  Description of Artificial Sequence: Synthetic oligonucleotide
aaguaaaucgggucaugua

SEQ ID NO: 190922 - RNA, 19 nt, Artificial Sequence
  Description of Artificial Sequence: Synthetic oligonucleotide
uccauaagagagugggcca

SEQ ID NO: 190923 - RNA, 19 nt, Artificial Sequence
  Description of Artificial Sequence: Synthetic oligonucleotide
uaaaucgggucauguaagu

SEQ ID NO: 190924 - RNA, 19 nt, Artificial Sequence
  Description of Artificial Sequence: Synthetic oligonucleotide
uaugcucccaacagacgug

SEQ ID NO: 190925 - RNA, 19 nt, Artificial Sequence
  Description of Artificial Sequence: Synthetic oligonucleotide
cagcacuagaaaacaacag

SEQ ID NO: 190926 - RNA, 19 nt, Artificial Sequence
  Description of Artificial Sequence: Synthetic oligonucleotide
aaugacuccauuagaggaa

SEQ ID NO: 190927 - RNA, 19 nt, Artificial Sequence
  Description of Artificial Sequence: Synthetic oligonucleotide
uuauacuuugggguuacaa

SEQ ID NO: 190928 - RNA, 19 nt, Artificial Sequence
  Description of Artificial Sequence: Synthetic oligonucleotide
ucugaauaucauccccugu

SEQ ID NO: 190929 - RNA, 19 nt, Artificial Sequence
  Description of Artificial Sequence: Synthetic oligonucleotide
auaagagcugggaacaugu

SEQ ID NO: 190930 - RNA, 19 nt, Artificial Sequence
  Description of Artificial Sequence: Synthetic oligonucleotide
caauaaacucugaagagcu

SEQ ID NO: 190931 - RNA, 19 nt, Artificial Sequence
  Description of Artificial Sequence: Synthetic oligonucleotide
aacuagcaccgagaagucg

SEQ ID NO: 190932 - RNA, 19 nt, Artificial Sequence
  Description of Artificial Sequence: Synthetic oligonucleotide
auaggagccucacacugcu

SEQ ID NO: 190933 - RNA, 19 nt, Artificial Sequence
  Description of Artificial Sequence: Synthetic oligonucleotide
ugauacaacccaguucuac

SEQ ID NO: 190934 - RNA, 19 nt, Artificial Sequence
  Description of Artificial Sequence: Synthetic oligonucleotide
cugagcaguucaaaauuac

SEQ ID NO: 190935 - RNA, 19 nt, Artificial Sequence
  Description of Artificial Sequence: Synthetic oligonucleotide
uacuuggggaguaggguac

SEQ ID NO: 190936 - RNA, 19 nt, Artificial Sequence
  Description of Artificial Sequence: Synthetic oligonucleotide
auacuaauaagagcuggga

SEQ ID NO: 190937 - RNA, 19 nt, Artificial Sequence
  Description of Artificial Sequence: Synthetic oligonucleotide
ggaaaccuuccauaggagc

SEQ ID NO: 190938 - RNA, 19 nt, Artificial Sequence
  Description of Artificial Sequence: Synthetic oligonucleotide
cuaauauuagugcggaucu

SEQ ID NO: 190939 - RNA, 19 nt, Artificial Sequence
  Description of Artificial Sequence: Synthetic oligonucleotide
uuuuauacuuugggguuac

SEQ ID NO: 190940 - RNA, 19 nt, Artificial Sequence
  Description of Artificial Sequence: Synthetic oligonucleotide
ccacaagucuccuacauac

SEQ ID NO: 190941 - RNA, 19 nt, Artificial Sequence
  Description of Artificial Sequence: Synthetic oligonucleotide
ggcugcuuaaauaacauca

SEQ ID NO: 190942 - RNA, 19 nt, Artificial Sequence
  Description of Artificial Sequence: Synthetic oligonucleotide
agcugagcaguucaaaauu

SEQ ID NO: 190943 - RNA, 19 nt, Artificial Sequence
  Description of Artificial Sequence: Synthetic oligonucleotide
acucuaauauuagugcgga

SEQ ID NO: 190944 - RNA, 19 nt, Artificial Sequence
  Description of Artificial Sequence: Synthetic oligonucleotide
aaagggagccacauuaaua

SEQ ID NO: 190945 - RNA, 19 nt, Artificial Sequence
  Description of Artificial Sequence: Synthetic oligonucleotide
cucgcaaagcaggagacac

SEQ ID NO: 190946 - RNA, 19 nt, Artificial Sequence
  Description of Artificial Sequence: Synthetic oligonucleotide
guacaggucaaguucagua

SEQ ID NO: 190947 - RNA, 19 nt, Artificial Sequence
  Description of Artificial Sequence: Synthetic oligonucleotide
gaucauguaugcagcauga

SEQ ID NO: 190948 - RNA, 19 nt, Artificial Sequence
  Description of Artificial Sequence: Synthetic oligonucleotide
cugacccuccagaaguugc

SEQ ID NO: 190949 - RNA, 19 nt, Artificial Sequence
  Description of Artificial Sequence: Synthetic oligonucleotide
gauagugucccaacauuga

SEQ ID NO: 190950 - RNA, 19 nt, Artificial Sequence
  Description of Artificial Sequence: Synthetic oligonucleotide
cagacgguauccaucccag

SEQ ID NO: 190951 - RNA, 19 nt, Artificial Sequence
  Description of Artificial Sequence: Synthetic oligonucleotide
auuaaccaccuaauuuauc

SEQ ID NO: 190952 - RNA, 19 nt, Artificial Sequence
  Description of Artificial Sequence: Synthetic oligonucleotide
cauuaugcaucagaagcuc

SEQ ID NO: 190953 - RNA, 19 nt, Artificial Sequence
  Description of Artificial Sequence: Synthetic oligonucleotide
uggaucugugcccuauuuc

SEQ ID NO: 190954 - RNA, 19 nt, Artificial Sequence
  Description of Artificial Sequence: Synthetic oligonucleotide
uguccaacaugcuuccuuu

SEQ ID NO: 190955 - RNA, 19 nt, Artificial Sequence
  Description of Artificial Sequence: Synthetic oligonucleotide
ugcggaucuccaaagcuua

SEQ ID NO: 190956 - RNA, 19 nt, Artificial Sequence
  Description of Artificial Sequence: Synthetic oligonucleotide
uccaaggguugguucacug

SEQ ID NO: 190957 - RNA, 19 nt, Artificial Sequence
  Description of Artificial Sequence: Synthetic oligonucleotide
auaacagacaucagacggu

SEQ ID NO: 190958 - RNA, 19 nt, Artificial Sequence
  Description of Artificial Sequence: Synthetic oligonucleotide
cuaguaggagaugaaauaa

SEQ ID NO: 190959 - RNA, 19 nt, Artificial Sequence
  Description of Artificial Sequence: Synthetic oligonucleotide
gacgugagcaacuuuuccu

SEQ ID NO: 190960 - RNA, 19 nt, Artificial Sequence
  Description of Artificial Sequence: Synthetic oligonucleotide
uauuagugcggaucuccaa

SEQ ID NO: 190961 - RNA, 19 nt, Artificial Sequence
  Description of Artificial Sequence: Synthetic oligonucleotide
auacaacccaguucuacua

SEQ ID NO: 190962 - RNA, 19 nt, Artificial Sequence
  Description of Artificial Sequence: Synthetic oligonucleotide
aucagacgguauccauccc

SEQ ID NO: 190963 - RNA, 19 nt, Artificial Sequence
  Description of Artificial Sequence: Synthetic oligonucleotide
caccacuuuauaaucauua

SEQ ID NO: 190964 - RNA, 19 nt, Artificial Sequence
  Description of Artificial Sequence: Synthetic oligonucleotide
uggggaguaggguacuagu

SEQ ID NO: 190965 - RNA, 19 nt, Artificial Sequence
  Description of Artificial Sequence: Synthetic oligonucleotide
auaacaucaugaugaggua

SEQ ID NO: 190966 - RNA, 19 nt, Artificial Sequence
  Description of Artificial Sequence: Synthetic oligonucleotide
agaagcacauucacugaag

SEQ ID NO: 190967 - RNA, 19 nt, Artificial Sequence
  Description of Artificial Sequence: Synthetic oligonucleotide
ucccucuacaaagauuaga

SEQ ID NO: 190968 - RNA, 19 nt, Artificial Sequence
  Description of Artificial Sequence: Synthetic oligonucleotide
gagugggccauucugguua

SEQ ID NO: 190969 - RNA, 19 nt, Artificial Sequence
  Description of Artificial Sequence: Synthetic oligonucleotide
cucgagaagaguacucuga

SEQ ID NO: 190970 - RNA, 19 nt, Artificial Sequence
  Description of Artificial Sequence: Synthetic oligonucleotide
ucgcaaagcaggagacacc

SEQ ID NO: 190971 - RNA, 19 nt, Artificial Sequence
  Description of Artificial Sequence: Synthetic oligonucleotide
cccacuuuacggaaugagg

SEQ ID NO: 190972 - RNA, 19 nt, Artificial Sequence
  Description of Artificial Sequence: Synthetic oligonucleotide
auccuaucucaauaaggau

SEQ ID NO: 190973 - RNA, 19 nt, Artificial Sequence
  Description of Artificial Sequence: Synthetic oligonucleotide
cuccauuagaggaaagaaa

SEQ ID NO: 190974 - RNA, 19 nt, Artificial Sequence
  Description of Artificial Sequence: Synthetic oligonucleotide
uacauacuccugcaucgau

SEQ ID NO: 190975 - RNA, 19 nt, Artificial Sequence
  Description of Artificial Sequence: Synthetic oligonucleotide
aaauccuaaguaacauuua

SEQ ID NO: 190976 - RNA, 19 nt, Artificial Sequence
  Description of Artificial Sequence: Synthetic oligonucleotide
augauacauuagaaucgcg

SEQ ID NO: 190977 - RNA, 19 nt, Artificial Sequence
  Description of Artificial Sequence: Synthetic oligonucleotide
ucggucccaaaguaaugcu

SEQ ID NO: 190978 - RNA, 19 nt, Artificial Sequence
  Description of Artificial Sequence: Synthetic oligonucleotide
aaccaagaaaggacacuca

SEQ ID NO: 190979 - RNA, 19 nt, Artificial Sequence
  Description of Artificial Sequence: Synthetic oligonucleotide
acauacuccugcaucgaug

SEQ ID NO: 190980 - RNA, 19 nt, Artificial Sequence
  Description of Artificial Sequence: Synthetic oligonucleotide
agccacauuaauaugugua

SEQ ID NO: 190981 - RNA, 19 nt, Artificial Sequence
  Description of Artificial Sequence: Synthetic oligonucleotide
cuucggucccaaaguaaug

SEQ ID NO: 190982 - RNA, 19 nt, Artificial Sequence
  Description of Artificial Sequence: Synthetic oligonucleotide
gcuaaggucaaccuggggu

SEQ ID NO: 190983 - RNA, 19 nt, Artificial Sequence
  Description of Artificial Sequence: Synthetic oligonucleotide
aaaugagcgcaaacaguau

SEQ ID NO: 190984 - RNA, 19 nt, Artificial Sequence
  Description of Artificial Sequence: Synthetic oligonucleotide
agaccauaugcuucuucaa

SEQ ID NO: 190985 - RNA, 19 nt, Artificial Sequence
  Description of Artificial Sequence: Synthetic oligonucleotide
ugcgcaaggcaagcaaaug

SEQ ID NO: 190986 - RNA, 19 nt, Artificial Sequence
  Description of Artificial Sequence: Synthetic oligonucleotide
ccacuuuacggaaugagga

SEQ ID NO: 190987 - RNA, 19 nt, Artificial Sequence
  Description of Artificial Sequence: Synthetic oligonucleotide
agacaccacuuuauaauca

SEQ ID NO: 190988 - RNA, 19 nt, Artificial Sequence
  Description of Artificial Sequence: Synthetic oligonucleotide
gaguaggguacuaguagga

SEQ ID NO: 190989 - RNA, 19 nt, Artificial Sequence
  Description of Artificial Sequence: Synthetic oligonucleotide
uaauauuagugcggaucuc

SEQ ID NO: 190990 - RNA, 19 nt, Artificial Sequence
  Description of Artificial Sequence: Synthetic oligonucleotide
auauuagugcggaucucca

SEQ ID NO: 190991 - RNA, 19 nt, Artificial Sequence
  Description of Artificial Sequence: Synthetic oligonucleotide
aggacucuucccucuacaa

SEQ ID NO: 190992 - RNA, 19 nt, Artificial Sequence
  Description of Artificial Sequence: Synthetic oligonucleotide
augugauguaaaggcaaca

SEQ ID NO: 190993 - RNA, 19 nt, Artificial Sequence
  Description of Artificial Sequence: Synthetic oligonucleotide
ugagcgcaaacaguauuau

SEQ ID NO: 190994 - RNA, 19 nt, Artificial Sequence
  Description of Artificial Sequence: Synthetic oligonucleotide
gacaccacuuuauaaucau

SEQ ID NO: 190995 - RNA, 19 nt, Artificial Sequence
  Description of Artificial Sequence: Synthetic oligonucleotide
ccauuagaggaaagaaaac

SEQ ID NO: 190996 - RNA, 19 nt, Artificial Sequence
  Description of Artificial Sequence: Synthetic oligonucleotide
cagacgugagcaacuuuuc

SEQ ID NO: 190997 - RNA, 19 nt, Artificial Sequence
  Description of Artificial Sequence: Synthetic oligonucleotide
gcuuaaauaacaucaugau

SEQ ID NO: 190998 - RNA, 19 nt, Artificial Sequence
  Description of Artificial Sequence: Synthetic oligonucleotide
caaaguaaaucgggucaug

SEQ ID NO: 190999 - RNA, 19 nt, Artificial Sequence
  Description of Artificial Sequence: Synthetic oligonucleotide
acaucaugaugagguauga

SEQ ID NO: 191000 - RNA, 19 nt, Artificial Sequence
  Description of Artificial Sequence: Synthetic oligonucleotide
ccuaucucaauaaggauua

SEQ ID NO: 191001 - RNA, 19 nt, Artificial Sequence
  Description of Artificial Sequence: Synthetic oligonucleotide
ccaacuagcaccgagaagu

SEQ ID NO: 191002 - RNA, 19 nt, Artificial Sequence
  Description of Artificial Sequence: Synthetic oligonucleotide
acauuagaaucgcgcugca

SEQ ID NO: 191003 - RNA, 19 nt, Artificial Sequence
  Description of Artificial Sequence: Synthetic oligonucleotide
uaauaagagcugggaacau

SEQ ID NO: 191004 - RNA, 19 nt, Artificial Sequence
  Description of Artificial Sequence: Synthetic oligonucleotide
ccuaaguaacauuuaaaua

SEQ ID NO: 191005 - RNA, 19 nt, Artificial Sequence
  Description of Artificial Sequence: Synthetic oligonucleotide
guaaguuggcugcuuaaau

SEQ ID NO: 191006 - RNA, 19 nt, Artificial Sequence
  Description of Artificial Sequence: Synthetic oligonucleotide
ugguuacccuuguaauaaa

SEQ ID NO: 191007 - RNA, 19 nt, Artificial Sequence
  Description of Artificial Sequence: Synthetic oligonucleotide
uagaaucgcgcugcacuga

SEQ ID NO: 191008 - RNA, 19 nt, Artificial Sequence
  Description of Artificial Sequence: Synthetic oligonucleotide
aggugcgcaaggcaagcaa

SEQ ID NO: 191009 - RNA, 19 nt, Artificial Sequence
  Description of Artificial Sequence: Synthetic oligonucleotide
augagcgcaaacaguauua

SEQ ID NO: 191010 - RNA, 19 nt, Artificial Sequence
  Description of Artificial Sequence: Synthetic oligonucleotide
cauuagaaucgcgcugcac

SEQ ID NO: 191011 - RNA, 19 nt, Artificial Sequence
  Description of Artificial Sequence: Synthetic oligonucleotide
ucgggucauguaaguuggc

SEQ ID NO: 191012 - RNA, 19 nt, Artificial Sequence
  Description of Artificial Sequence: Synthetic oligonucleotide
ugcucccaacagacgugag

SEQ ID NO: 191013 - RNA, 19 nt, Artificial Sequence
  Description of Artificial Sequence: Synthetic oligonucleotide
uugauacaacccaguucua

SEQ ID NO: 191014 - RNA, 19 nt, Artificial Sequence
  Description of Artificial Sequence: Synthetic oligonucleotide
ggcacuaguacaucagugu

SEQ ID NO: 191015 - RNA, 19 nt, Artificial Sequence
  Description of Artificial Sequence: Synthetic oligonucleotide
ucuuggcaauuaagcuuuc

SEQ ID NO: 191016 - RNA, 19 nt, Artificial Sequence
  Description of Artificial Sequence: Synthetic oligonucleotide
agcaggugcgcaaggcaag

SEQ ID NO: 191017 - RNA, 19 nt, Artificial Sequence
  Description of Artificial Sequence: Synthetic oligonucleotide
gcgcaaacaguauuaugga

SEQ ID NO: 191018 - RNA, 19 nt, Artificial Sequence
  Description of Artificial Sequence: Synthetic oligonucleotide
gagaugugcaauagcuugu

SEQ ID NO: 191019 - RNA, 19 nt, Artificial Sequence
  Description of Artificial Sequence: Synthetic oligonucleotide
ugcauuugugauggcccaa

SEQ ID NO: 191020 - RNA, 19 nt, Artificial Sequence
  Description of Artificial Sequence: Synthetic oligonucleotide
cuuaugaaucagugcuucu

SEQ ID NO: 191021 - RNA, 19 nt, Artificial Sequence
  Description of Artificial Sequence: Synthetic oligonucleotide
caucuucggucccaaagua

SEQ ID NO: 191022 - RNA, 19 nt, Artificial Sequence
  Description of Artificial Sequence: Synthetic oligonucleotide
agacgguauccaucccaga

SEQ ID NO: 191023 - RNA, 19 nt, Artificial Sequence
  Description of Artificial Sequence: Synthetic oligonucleotide
gugauguaaaggcaacauu

SEQ ID NO: 191024 - RNA, 19 nt, Artificial Sequence
  Description of Artificial Sequence: Synthetic oligonucleotide
gcagucuaaagagauuuaa

SEQ ID NO: 191025 - RNA, 19 nt, Artificial Sequence
  Description of Artificial Sequence: Synthetic oligonucleotide
ccaccggguacuccaaggg

SEQ ID NO: 191026 - RNA, 19 nt, Artificial Sequence
  Description of Artificial Sequence: Synthetic oligonucleotide
ggcuaaggucaaccugggg

SEQ ID NO: 191027 - RNA, 19 nt, Artificial Sequence
  Description of Artificial Sequence: Synthetic oligonucleotide
ucccaacagacgugagcaa

SEQ ID NO: 191028 - RNA, 19 nt, Artificial Sequence
  Description of Artificial Sequence: Synthetic oligonucleotide
caagucuaaguaucucccu

SEQ ID NO: 191029 - RNA, 19 nt, Artificial Sequence
  Description of Artificial Sequence: Synthetic oligonucleotide
aucuucggucccaaaguaa

SEQ ID NO: 191030 - RNA, 19 nt, Artificial Sequence
  Description of Artificial Sequence: Synthetic oligonucleotide
aucauguaugcagcaugau

SEQ ID NO: 191031 - RNA, 19 nt, Artificial Sequence
  Description of Artificial Sequence: Synthetic oligonucleotide
agccaccggguacuccaag

SEQ ID NO: 191032 - RNA, 19 nt, Artificial Sequence
  Description of Artificial Sequence: Synthetic oligonucleotide
accggguacuccaaggguu

SEQ ID NO: 191033 - RNA, 19 nt, Artificial Sequence
  Description of Artificial Sequence: Synthetic oligonucleotide
gccacauuaauauguguau

SEQ ID NO: 191034 - RNA, 19 nt, Artificial Sequence
  Description of Artificial Sequence: Synthetic oligonucleotide
ggaagcgccauuugcagau

SEQ ID NO: 191035 - RNA, 19 nt, Artificial Sequence
  Description of Artificial Sequence: Synthetic oligonucleotide
ggaguugacuaguuuugua

SEQ ID NO: 191036 - RNA, 19 nt, Artificial Sequence
  Description of Artificial Sequence: Synthetic oligonucleotide
ccgagaagucgcauugaac

SEQ ID NO: 191037 - RNA, 19 nt, Artificial Sequence
  Description of Artificial Sequence: Synthetic oligonucleotide
guuaaugccugagccauuu

SEQ ID NO: 191038 - RNA, 19 nt, Artificial Sequence
  Description of Artificial Sequence: Synthetic oligonucleotide
accaccuaauuuaucccua

SEQ ID NO: 191039 - RNA, 19 nt, Artificial Sequence
  Description of Artificial Sequence: Synthetic oligonucleotide
cuacauacuccugcaucga

SEQ ID NO: 191040 - RNA, 19 nt, Artificial Sequence
  Description of Artificial Sequence: Synthetic oligonucleotide
caaccugggguguaaugcu

SEQ ID NO: 191041 - RNA, 19 nt, Artificial Sequence
  Description of Artificial Sequence: Synthetic oligonucleotide
gucccaacauugagccaag

SEQ ID NO: 191042 - RNA, 19 nt, Artificial Sequence
  Description of Artificial Sequence: Synthetic oligonucleotide
cccaacagacgugagcaac

SEQ ID NO: 191043 - RNA, 19 nt, Artificial Sequence
  Description of Artificial Sequence: Synthetic oligonucleotide
ggccaacuagcaccgagaa

SEQ ID NO: 191044 - RNA, 19 nt, Artificial Sequence
  Description of Artificial Sequence: Synthetic oligonucleotide
gggaguggaugguuuaacu

SEQ ID NO: 191045 - RNA, 19 nt, Artificial Sequence
  Description of Artificial Sequence: Synthetic oligonucleotide
ccggguacuccaaggguug

SEQ ID NO: 191046 - RNA, 19 nt, Artificial Sequence
  Description of Artificial Sequence: Synthetic oligonucleotide
ucccaacauugagccaaga

SEQ ID NO: 191047 - RNA, 19 nt, Artificial Sequence
  Description of Artificial Sequence: Synthetic oligonucleotide
aucgcgcugcacugacuaa

SEQ ID NO: 191048 - RNA, 19 nt, Artificial Sequence
  Description of Artificial Sequence: Synthetic oligonucleotide
acagagagccagagguuuu

SEQ ID NO: 191049 - RNA, 19 nt, Artificial Sequence
  Description of Artificial Sequence: Synthetic oligonucleotide
ggugcgcaaggcaagcaaa

SEQ ID NO: 191050 - RNA, 19 nt, Artificial Sequence
  Description of Artificial Sequence: Synthetic oligonucleotide
gcugacccuccagaaguug

SEQ ID NO: 191051 - RNA, 19 nt, Artificial Sequence
  Description of Artificial Sequence: Synthetic oligonucleotide
cggaucuccaaagcuuagg

SEQ ID NO: 191052 - RNA, 19 nt, Artificial Sequence
  Description of Artificial Sequence: Synthetic oligonucleotide
cuaucucaauaaggauuaa

SEQ ID NO: 191053 - RNA, 19 nt, Artificial Sequence
  Description of Artificial Sequence: Synthetic oligonucleotide
cucuaauauuagugcggau

SEQ ID NO: 191054 - RNA, 19 nt, Artificial Sequence
  Description of Artificial Sequence: Synthetic oligonucleotide
ggggaguaggguacuagua

SEQ ID NO: 191055 - RNA, 19 nt, Artificial Sequence
  Description of Artificial Sequence: Synthetic oligonucleotide
ggaaucugccaagccagua

SEQ ID NO: 191056 - RNA, 19 nt, Artificial Sequence
  Description of Artificial Sequence: Synthetic oligonucleotide
gggguguaaugcugcuguc

SEQ ID NO: 191057 - RNA, 19 nt, Artificial Sequence
  Description of Artificial Sequence: Synthetic oligonucleotide
gcggaucuccaaagcuuag

SEQ ID NO: 191058 - RNA, 19 nt, Artificial Sequence
  Description of Artificial Sequence: Synthetic oligonucleotide
gggagaaaccuuagcaaau

SEQ ID NO: 191059 - RNA, 19 nt, Artificial Sequence
  Description of Artificial Sequence: Synthetic oligonucleotide
ccaccuaauuuaucccuaa

SEQ ID NO: 191060 - RNA, 19 nt, Artificial Sequence
  Description of Artificial Sequence: Synthetic oligonucleotide
cuggaucugugcccuauuu

SEQ ID NO: 191061 - RNA, 19 nt, Artificial Sequence
  Description of Artificial Sequence: Synthetic oligonucleotide
ccacauuaauauguguaua

SEQ ID NO: 191062 - RNA, 19 nt, Artificial Sequence
  Description of Artificial Sequence: Synthetic oligonucleotide
gguauccaucccagagcac

SEQ ID NO: 191063 - RNA, 19 nt, Artificial Sequence
  Description of Artificial Sequence: Synthetic oligonucleotide
gaagcgccauuugcagaua

SEQ ID NO: 191064 - RNA, 19 nt, Artificial Sequence
  Description of Artificial Sequence: Synthetic oligonucleotide
caggugcgcaaggcaagca

SEQ ID NO: 191065 - RNA, 19 nt, Artificial Sequence
  Description of Artificial Sequence: Synthetic oligonucleotide
gcucgcaaagcaggagaca

SEQ ID NO: 191066 - RNA, 19 nt, Artificial Sequence
  Description of Artificial Sequence: Synthetic oligonucleotide
gugcgcaaggcaagcaaau

SEQ ID NO: 191067 - RNA, 19 nt, Artificial Sequence
  Description of Artificial Sequence: Synthetic oligonucleotide
gaaucgcgcugcacugacu

SEQ ID NO: 191068 - RNA, 19 nt, Artificial Sequence
  Description of Artificial Sequence: Synthetic oligonucleotide
ccccuucuaguccaagcaa

SEQ ID NO: 191069 - RNA, 19 nt, Artificial Sequence
  Description of Artificial Sequence: Synthetic oligonucleotide
cauaagagagugggccauu

SEQ ID NO: 191070 - RNA, 19 nt, Artificial Sequence
  Description of Artificial Sequence: Synthetic oligonucleotide
cacugcccuuuaguuuaga

SEQ ID NO: 191071 - RNA, 19 nt, Artificial Sequence
  Description of Artificial Sequence: Synthetic oligonucleotide
ccauaagagagugggccau

SEQ ID NO: 191072 - RNA, 19 nt, Artificial Sequence
  Description of Artificial Sequence: Synthetic oligonucleotide
gccaagccaguaucacauu

SEQ ID NO: 191073 - RNA, 19 nt, Artificial Sequence
  Description of Artificial Sequence: Synthetic oligonucleotide
aaaacaaggaaucacauug

SEQ ID NO: 191074 - RNA, 19 nt, Artificial Sequence
  Description of Artificial Sequence: Synthetic oligonucleotide
aauacucagaucuuguugc

SEQ ID NO: 191075 - RNA, 19 nt, Artificial Sequence
  Description of Artificial Sequence: Synthetic oligonucleotide
auaucauuuaguuugguac

SEQ ID NO: 191076 - RNA, 19 nt, Artificial Sequence
  Description of Artificial Sequence: Synthetic oligonucleotide
aacgaaugagguuaccucc

SEQ ID NO: 191077 - RNA, 19 nt, Artificial Sequence
  Description of Artificial Sequence: Synthetic oligonucleotide
aaagguuuagguuugugug

SEQ ID NO: 191078 - RNA, 19 nt, Artificial Sequence
  Description of Artificial Sequence: Synthetic oligonucleotide
aacaccaagauagaagagc

SEQ ID NO: 191079 - RNA, 19 nt, Artificial Sequence
  Description of Artificial Sequence: Synthetic oligonucleotide
uuuaauuugcuccagccgu

SEQ ID NO: 191080 - RNA, 19 nt, Artificial Sequence
  Description of Artificial Sequence: Synthetic oligonucleotide
acuggagucaauuaaaacu

SEQ ID NO: 191081 - RNA, 19 nt, Artificial Sequence
  Description of Artificial Sequence: Synthetic oligonucleotide
aaucacauugauuuaagau

SEQ ID NO: 191082 - RNA, 19 nt, Artificial Sequence
  Description of Artificial Sequence: Synthetic oligonucleotide
cuuguggucauuuaagcgg

SEQ ID NO: 191083 - RNA, 19 nt, Artificial Sequence
  Description of Artificial Sequence: Synthetic oligonucleotide
uaaggaaguaggaauauca

SEQ ID NO: 191084 - RNA, 19 nt, Artificial Sequence
  Description of Artificial Sequence: Synthetic oligonucleotide
ugagcuauaucuauugucu

SEQ ID NO: 191085 - RNA, 19 nt, Artificial Sequence
  Description of Artificial Sequence: Synthetic oligonucleotide
ugcguauuaauaaauacuc

SEQ ID NO: 191086 - RNA, 19 nt, Artificial Sequence
  Description of Artificial Sequence: Synthetic oligonucleotide
uuuaguuugguacccaugu

SEQ ID NO: 191087 - RNA, 19 nt, Artificial Sequence
  Description of Artificial Sequence: Synthetic oligonucleotide
aaaagauugccaccgcuag

SEQ ID NO: 191088 - RNA, 19 nt, Artificial Sequence
  Description of Artificial Sequence: Synthetic oligonucleotide
aaaaccugugcuuucgcag

SEQ ID NO: 191089 - RNA, 19 nt, Artificial Sequence
  Description of Artificial Sequence: Synthetic oligonucleotide
ucuacuaugcguauuaaua

SEQ ID NO: 191090 - RNA, 19 nt, Artificial Sequence
  Description of Artificial Sequence: Synthetic oligonucleotide
aauuccaucaccaucguga

SEQ ID NO: 191091 - RNA, 19 nt, Artificial Sequence
  Description of Artificial Sequence: Synthetic oligonucleotide
uagaugaauauccacaauc

SEQ ID NO: 191092 - RNA, 19 nt, Artificial Sequence
  Description of Artificial Sequence: Synthetic oligonucleotide
aguucaacuaagcucuugg

SEQ ID NO: 191093 - RNA, 19 nt, Artificial Sequence
  Description of Artificial Sequence: Synthetic oligonucleotide
uuuucguugguaacaauga

SEQ ID NO: 191094 - RNA, 19 nt, Artificial Sequence
  Description of Artificial Sequence: Synthetic oligonucleotide
uaucauuuaguuugguacc

SEQ ID NO: 191095 - RNA, 19 nt, Artificial Sequence
  Description of Artificial Sequence: Synthetic oligonucleotide
agauaguacucccuugggc

SEQ ID NO: 191096 - RNA, 19 nt, Artificial Sequence
  Description of Artificial Sequence: Synthetic oligonucleotide
ugcuagaugaauauccaca

SEQ ID NO: 191097 - RNA, 19 nt, Artificial Sequence
  Description of Artificial Sequence: Synthetic oligonucleotide
uaugcguauuaauaaauac

SEQ ID NO: 191098 - RNA, 19 nt, Artificial Sequence
  Description of Artificial Sequence: Synthetic oligonucleotide
aaguaagaaguucaugagu

SEQ ID NO: 191099 - RNA, 19 nt, Artificial Sequence
  Description of Artificial Sequence: Synthetic oligonucleotide
ucgcauuucaacaucuugc

SEQ ID NO: 191100 - RNA, 19 nt, Artificial Sequence
  Description of Artificial Sequence: Synthetic oligonucleotide
aguucccauacauccaucc

SEQ ID NO: 191101 - RNA, 19 nt, Artificial Sequence
  Description of Artificial Sequence: Synthetic oligonucleotide
uguucaucgcauuucaaca

SEQ ID NO: 191102 - RNA, 19 nt, Artificial Sequence
  Description of Artificial Sequence: Synthetic oligonucleotide
uaugucgcugaauaaacug

SEQ ID NO: 191103 - RNA, 19 nt, Artificial Sequence
  Description of Artificial Sequence: Synthetic oligonucleotide
gugucgucuauguagaggg

SEQ ID NO: 191104 - RNA, 19 nt, Artificial Sequence
  Description of Artificial Sequence: Synthetic oligonucleotide
gagggugucgucuauguag

SEQ ID NO: 191105 - RNA, 19 nt, Artificial Sequence
  Description of Artificial Sequence: Synthetic oligonucleotide
aacacugaaguaccaccac

SEQ ID NO: 191106 - RNA, 19 nt, Artificial Sequence
  Description of Artificial Sequence: Synthetic oligonucleotide
cuuaagcauacuaugucgc

SEQ ID NO: 191107 - RNA, 19 nt, Artificial Sequence
  Description of Artificial Sequence: Synthetic oligonucleotide
cuugaguucucuaacucgc

SEQ ID NO: 191108 - RNA, 19 nt, Artificial Sequence
  Description of Artificial Sequence: Synthetic oligonucleotide
uuguguguaucuaaggagu

SEQ ID NO: 191109 - RNA, 19 nt, Artificial Sequence
  Description of Artificial Sequence: Synthetic oligonucleotide
ucuugagcuauaucuauug

SEQ ID NO: 191110 - RNA, 19 nt, Artificial Sequence
  Description of Artificial Sequence: Synthetic oligonucleotide
guugcuuaagcauacuaug

SEQ ID NO: 191111 - RNA, 19 nt, Artificial Sequence
  Description of Artificial Sequence: Synthetic oligonucleotide
aagaacaaacgaaugaggu

SEQ ID NO: 191112 - RNA, 19 nt, Artificial Sequence
  Description of Artificial Sequence: Synthetic oligonucleotide
ucaucuguuguguguaagg

SEQ ID NO: 191113 - RNA, 19 nt, Artificial Sequence
  Description of Artificial Sequence: Synthetic oligonucleotide
uaguugugcaccauuauuc

SEQ ID NO: 191114 - RNA, 19 nt, Artificial Sequence
  Description of Artificial Sequence: Synthetic oligonucleotide
uuuaggggaccccaaaaga

SEQ ID NO: 191115 - RNA, 19 nt, Artificial Sequence
  Description of Artificial Sequence: Synthetic oligonucleotide
ugguaauaagcaucuauca

SEQ ID NO: 191116 - RNA, 19 nt, Artificial Sequence
  Description of Artificial Sequence: Synthetic oligonucleotide
acaaccaacacaugggaca

SEQ ID NO: 191117 - RNA, 19 nt, Artificial Sequence
  Description of Artificial Sequence: Synthetic oligonucleotide
ucagucaugcaacuucgag

SEQ ID NO: 191118 - RNA, 19 nt, Artificial Sequence
  Description of Artificial Sequence: Synthetic oligonucleotide
uggcuuaaaucauaagcag

SEQ ID NO: 191119 - RNA, 19 nt, Artificial Sequence
  Description of Artificial Sequence: Synthetic oligonucleotide
ugaggauauuguacgcucg

SEQ ID NO: 191120 - RNA, 19 nt, Artificial Sequence
  Description of Artificial Sequence: Synthetic oligonucleotide
ucuauugcuguagaaagac

SEQ ID NO: 191121 - RNA, 19 nt, Artificial Sequence
  Description of Artificial Sequence: Synthetic oligonucleotide
ucaucuugugagauaaaga

SEQ ID NO: 191122 - RNA, 19 nt, Artificial Sequence
  Description of Artificial Sequence: Synthetic oligonucleotide
uugccuuuaacauugcguc

SEQ ID NO: 191123 - RNA, 19 nt, Artificial Sequence
  Description of Artificial Sequence: Synthetic oligonucleotide
uuuauuuuaggggacccca

SEQ ID NO: 191124 - RNA, 19 nt, Artificial Sequence
  Description of Artificial Sequence: Synthetic oligonucleotide
uguugcuuaagcauacuau

SEQ ID NO: 191125 - RNA, 19 nt, Artificial Sequence
  Description of Artificial Sequence: Synthetic oligonucleotide
gcuuuaguaagucucacag

SEQ ID NO: 191126 - RNA, 19 nt, Artificial Sequence
  Description of Artificial Sequence: Synthetic oligonucleotide
accaagauagaagagcauc

SEQ ID NO: 191127 - RNA, 19 nt, Artificial Sequence
  Description of Artificial Sequence: Synthetic oligonucleotide
aagcauacuaugucgcuga

SEQ ID NO: 191128 - RNA, 19 nt, Artificial Sequence
  Description of Artificial Sequence: Synthetic oligonucleotide
ggaagagaaacguuuaaug

SEQ ID NO: 191129 - RNA, 19 nt, Artificial Sequence
  Description of Artificial Sequence: Synthetic oligonucleotide
uaucuaaggagugcaauug

SEQ ID NO: 191130 - RNA, 19 nt, Artificial Sequence
  Description of Artificial Sequence: Synthetic oligonucleotide
gauauuguacgcucggaga

SEQ ID NO: 191131 - RNA, 19 nt, Artificial Sequence
  Description of Artificial Sequence: Synthetic oligonucleotide
uucgcagauauguuucuag

SEQ ID NO: 191132 - RNA, 19 nt, Artificial Sequence
  Description of Artificial Sequence: Synthetic oligonucleotide
uguguagccacgcaacuaa

SEQ ID NO: 191133 - RNA, 19 nt, Artificial Sequence
  Description of Artificial Sequence: Synthetic oligonucleotide
guaagaaguucaugagugg

SEQ ID NO: 191134 - RNA, 19 nt, Artificial Sequence
  Description of Artificial Sequence: Synthetic oligonucleotide
acuaugucgcugaauaaac

SEQ ID NO: 191135 - RNA, 19 nt, Artificial Sequence
  Description of Artificial Sequence: Synthetic oligonucleotide
gcuuaagcauacuaugucg

SEQ ID NO: 191136 - RNA, 19 nt, Artificial Sequence
  Description of Artificial Sequence: Synthetic oligonucleotide
aagauugccaccgcuagga

SEQ ID NO: 191137 - RNA, 19 nt, Artificial Sequence
  Description of Artificial Sequence: Synthetic oligonucleotide
aggcguuccacacugcgac

SEQ ID NO: 191138 - RNA, 19 nt, Artificial Sequence
  Description of Artificial Sequence: Synthetic oligonucleotide
uugcuuaagcauacuaugu

SEQ ID NO: 191139 - RNA, 19 nt, Artificial Sequence
  Description of Artificial Sequence: Synthetic oligonucleotide
aaugaggauauuguacgcu

SEQ ID NO: 191140 - RNA, 19 nt, Artificial Sequence
  Description of Artificial Sequence: Synthetic oligonucleotide
uguguaucuaaggagugca

SEQ ID NO: 191141 - RNA, 19 nt, Artificial Sequence
  Description of Artificial Sequence: Synthetic oligonucleotide
aaaugggccucuugugguc

SEQ ID NO: 191142 - RNA, 19 nt, Artificial Sequence
  Description of Artificial Sequence: Synthetic oligonucleotide
ugcuuaagcauacuauguc

SEQ ID NO: 191143 - RNA, 19 nt, Artificial Sequence
  Description of Artificial Sequence: Synthetic oligonucleotide
uguguguaucuaaggagug

SEQ ID NO: 191144 - RNA, 19 nt, Artificial Sequence
  Description of Artificial Sequence: Synthetic oligonucleotide
uguagccacgcaacuaaag

SEQ ID NO: 191145 - RNA, 19 nt, Artificial Sequence
  Description of Artificial Sequence: Synthetic oligonucleotide
uaagcggcaguauuuauua

SEQ ID NO: 191146 - RNA, 19 nt, Artificial Sequence
  Description of Artificial Sequence: Synthetic oligonucleotide
augguuacaaauccccuca

SEQ ID NO: 191147 - RNA, 19 nt, Artificial Sequence
  Description of Artificial Sequence: Synthetic oligonucleotide
ggaucuguaauacagcuuc

SEQ ID NO: 191148 - RNA, 19 nt, Artificial Sequence
  Description of Artificial Sequence: Synthetic oligonucleotide
ugcgacgacaaccaacaca

SEQ ID NO: 191149 - RNA, 19 nt, Artificial Sequence
  Description of Artificial Sequence: Synthetic oligonucleotide
augcuagaugaauauccac

SEQ ID NO: 191150 - RNA, 19 nt, Artificial Sequence
  Description of Artificial Sequence: Synthetic oligonucleotide
uuaggggaccccaaaagau

SEQ ID NO: 191151 - RNA, 19 nt, Artificial Sequence
  Description of Artificial Sequence: Synthetic oligonucleotide
ucgagucagagauaguacu

SEQ ID NO: 191152 - RNA, 19 nt, Artificial Sequence
  Description of Artificial Sequence: Synthetic oligonucleotide
uuaguucccauacauccau

SEQ ID NO: 191153 - RNA, 19 nt, Artificial Sequence
  Description of Artificial Sequence: Synthetic oligonucleotide
auauuguacgcucggagaa

SEQ ID NO: 191154 - RNA, 19 nt, Artificial Sequence
  Description of Artificial Sequence: Synthetic oligonucleotide
cauacuaugucgcugaaua

SEQ ID NO: 191155 - RNA, 19 nt, Artificial Sequence
  Description of Artificial Sequence: Synthetic oligonucleotide
gaccccaaaagauugccac

SEQ ID NO: 191156 - RNA, 19 nt, Artificial Sequence
  Description of Artificial Sequence: Synthetic oligonucleotide
gagauaguacucccuuggg

SEQ ID NO: 191157 - RNA, 19 nt, Artificial Sequence
  Description of Artificial Sequence: Synthetic oligonucleotide
uuaagcauacuaugucgcu

SEQ ID NO: 191158 - RNA, 19 nt, Artificial Sequence
  Description of Artificial Sequence: Synthetic oligonucleotide
aacaaacgaaugagguuac

SEQ ID NO: 191159 - RNA, 19 nt, Artificial Sequence
  Description of Artificial Sequence: Synthetic oligonucleotide
uacuaugcguauuaauaaa

SEQ ID NO: 191160 - RNA, 19 nt, Artificial Sequence
  Description of Artificial Sequence: Synthetic oligonucleotide
accguuacaauguggagau

SEQ ID NO: 191161 - RNA, 19 nt, Artificial Sequence
  Description of Artificial Sequence: Synthetic oligonucleotide
uuucguugguaacaaugac

SEQ ID NO: 191162 - RNA, 19 nt, Artificial Sequence
  Description of Artificial Sequence: Synthetic oligonucleotide
acggugaaacacugugugc

SEQ ID NO: 191163 - RNA, 19 nt, Artificial Sequence
  Description of Artificial Sequence: Synthetic oligonucleotide
uacaaaugggccucuugug

SEQ ID NO: 191164 - RNA, 19 nt, Artificial Sequence
  Description of Artificial Sequence: Synthetic oligonucleotide
uucgcucauacccuccugc

SEQ ID NO: 191165 - RNA, 19 nt, Artificial Sequence
  Description of Artificial Sequence: Synthetic oligonucleotide
aucgcauuucaacaucuug

SEQ ID NO: 191166 - RNA, 19 nt, Artificial Sequence
  Description of Artificial Sequence: Synthetic oligonucleotide
uucgagucagagauaguac

SEQ ID NO: 191167 - RNA, 19 nt, Artificial Sequence
  Description of Artificial Sequence: Synthetic oligonucleotide
uaagcauacuaugucgcug

SEQ ID NO: 191168 - RNA, 19 nt, Artificial Sequence
  Description of Artificial Sequence: Synthetic oligonucleotide
uuaagcggcaguauuuauu

SEQ ID NO: 191169 - RNA, 19 nt, Artificial Sequence
  Description of Artificial Sequence: Synthetic oligonucleotide
ucacgugauguuaccacca

SEQ ID NO: 191170 - RNA, 19 nt, Artificial Sequence
  Description of Artificial Sequence: Synthetic oligonucleotide
gaaguaggaauaucacaca

SEQ ID NO: 191171 - RNA, 19 nt, Artificial Sequence
  Description of Artificial Sequence: Synthetic oligonucleotide
guuacaauguggagauacg

SEQ ID NO: 191172 - RNA, 19 nt, Artificial Sequence
  Description of Artificial Sequence: Synthetic oligonucleotide
acgacaaccaacacauggg

SEQ ID NO: 191173 - RNA, 19 nt, Artificial Sequence
  Description of Artificial Sequence: Synthetic oligonucleotide
uucaucgcauuucaacauc

SEQ ID NO: 191174 - RNA, 19 nt, Artificial Sequence
  Description of Artificial Sequence: Synthetic oligonucleotide
acuacaaaugggccucuug

SEQ ID NO: 191175 - RNA, 19 nt, Artificial Sequence
  Description of Artificial Sequence: Synthetic oligonucleotide
gauccgaugcaaucguuca

SEQ ID NO: 191176 - RNA, 19 nt, Artificial Sequence
  Description of Artificial Sequence: Synthetic oligonucleotide
cuauuaccaucuucagugc

SEQ ID NO: 191177 - RNA, 19 nt, Artificial Sequence
  Description of Artificial Sequence: Synthetic oligonucleotide
ggauauuguacgcucggag

SEQ ID NO: 191178 - RNA, 19 nt, Artificial Sequence
  Description of Artificial Sequence: Synthetic oligonucleotide
aaacaaggaaucacauuga

SEQ ID NO: 191179 - RNA, 19 nt, Artificial Sequence
  Description of Artificial Sequence: Synthetic oligonucleotide
accgcuaggacagguacac

SEQ ID NO: 191180 - RNA, 19 nt, Artificial Sequence
  Description of Artificial Sequence: Synthetic oligonucleotide
aauguggagauacgccuuu

SEQ ID NO: 191181 - RNA, 19 nt, Artificial Sequence
  Description of Artificial Sequence: Synthetic oligonucleotide
cacguuugcucuucggccc

SEQ ID NO: 191182 - RNA, 19 nt, Artificial Sequence
  Description of Artificial Sequence: Synthetic oligonucleotide
aaucugaccuccucucgaa

SEQ ID NO: 191183 - RNA, 19 nt, Artificial Sequence
  Description of Artificial Sequence: Synthetic oligonucleotide
guucaacuaagcucuuggc

SEQ ID NO: 191184 - RNA, 19 nt, Artificial Sequence
  Description of Artificial Sequence: Synthetic oligonucleotide
uguggagauacgccuuucu

SEQ ID NO: 191185 - RNA, 19 nt, Artificial Sequence
  Description of Artificial Sequence: Synthetic oligonucleotide
aggagaugcgcaaugaagu

SEQ ID NO: 191186 - RNA, 19 nt, Artificial Sequence
  Description of Artificial Sequence: Synthetic oligonucleotide
uguaucuaaggagugcaau

SEQ ID NO: 191187 - RNA, 19 nt, Artificial Sequence
  Description of Artificial Sequence: Synthetic oligonucleotide
gacauuaguucccauacau

SEQ ID NO: 191188 - RNA, 19 nt, Artificial Sequence
  Description of Artificial Sequence: Synthetic oligonucleotide
guagccacgcaacuaaaga

SEQ ID NO: 191189 - RNA, 19 nt, Artificial Sequence
  Description of Artificial Sequence: Synthetic oligonucleotide
gacucuacaagcugagaaa

SEQ ID NO: 191190 - RNA, 19 nt, Artificial Sequence
  Description of Artificial Sequence: Synthetic oligonucleotide
gcuauaucuauugucuuag

SEQ ID NO: 191191 - RNA, 19 nt, Artificial Sequence
  Description of Artificial Sequence: Synthetic oligonucleotide
uuauuuuaggggaccccaa

SEQ ID NO: 191192 - RNA, 19 nt, Artificial Sequence
  Description of Artificial Sequence: Synthetic oligonucleotide
uguaugugucgcucgugug

SEQ ID NO: 191193 - RNA, 19 nt, Artificial Sequence
  Description of Artificial Sequence: Synthetic oligonucleotide
ugucgucuauguagagggg

SEQ ID NO: 191194 - RNA, 19 nt, Artificial Sequence
  Description of Artificial Sequence: Synthetic oligonucleotide
accgucucccaaaacaagg

SEQ ID NO: 191195 - RNA, 19 nt, Artificial Sequence
  Description of Artificial Sequence: Synthetic oligonucleotide
ugcgcaaugaagucuguuu

SEQ ID NO: 191196 - RNA, 19 nt, Artificial Sequence
  Description of Artificial Sequence: Synthetic oligonucleotide
ucgcucauacccuccugcg

SEQ ID NO: 191197 - RNA, 19 nt, Artificial Sequence
  Description of Artificial Sequence: Synthetic oligonucleotide
uucuacuaugcguauuaau

SEQ ID NO: 191198 - RNA, 19 nt, Artificial Sequence
  Description of Artificial Sequence: Synthetic oligonucleotide
cuuuauuuuaggggacccc

SEQ ID NO: 191199 - RNA, 19 nt, Artificial Sequence
  Description of Artificial Sequence: Synthetic oligonucleotide
cuauaucuauugucuuagc

SEQ ID NO: 191200 - RNA, 19 nt, Artificial Sequence
  Description of Artificial Sequence: Synthetic oligonucleotide
acauuaguucccauacauc

SEQ ID NO: 191201 - RNA, 19 nt, Artificial Sequence
  Description of Artificial Sequence: Synthetic oligonucleotide
acugcgacgacaaccaaca

SEQ ID NO: 191202 - RNA, 19 nt, Artificial Sequence
  Description of Artificial Sequence: Synthetic oligonucleotide
agcggcaguauuuauuaaa

SEQ ID NO: 191203 - RNA, 19 nt, Artificial Sequence
  Description of Artificial Sequence: Synthetic oligonucleotide
gaaucugaccuccucucga

SEQ ID NO: 191204 - RNA, 19 nt, Artificial Sequence
  Description of Artificial Sequence: Synthetic oligonucleotide
ugcagcuauuuucaaugaa

SEQ ID NO: 191205 - RNA, 19 nt, Artificial Sequence
  Description of Artificial Sequence: Synthetic oligonucleotide
agauccgaugcaaucguuc

SEQ ID NO: 191206 - RNA, 19 nt, Artificial Sequence
  Description of Artificial Sequence: Synthetic oligonucleotide
ucgcagauauguuucuagu

SEQ ID NO: 191207 - RNA, 19 nt, Artificial Sequence
  Description of Artificial Sequence: Synthetic oligonucleotide
ucacggugaaacacugugu

SEQ ID NO: 191208 - RNA, 19 nt, Artificial Sequence
  Description of Artificial Sequence: Synthetic oligonucleotide
ugguuacaaauccccucag

SEQ ID NO: 191209 - RNA, 19 nt, Artificial Sequence
  Description of Artificial Sequence: Synthetic oligonucleotide
uggucauuuaagcggcagu

SEQ ID NO: 191210 - RNA, 19 nt, Artificial Sequence
  Description of Artificial Sequence: Synthetic oligonucleotide
aucucaaagcuuuuacgua

SEQ ID NO: 191211 - RNA, 19 nt, Artificial Sequence
  Description of Artificial Sequence: Synthetic oligonucleotide
uaugugucgcucgugugga

SEQ ID NO: 191212 - RNA, 19 nt, Artificial Sequence
  Description of Artificial Sequence: Synthetic oligonucleotide
gauugccaccgcuaggaca

SEQ ID NO: 191213 - RNA, 19 nt, Artificial Sequence
  Description of Artificial Sequence: Synthetic oligonucleotide
agcggcuaauacccuguac

SEQ ID NO: 191214 - RNA, 19 nt, Artificial Sequence
  Description of Artificial Sequence: Synthetic oligonucleotide
ugcuuucgcagauauguuu

SEQ ID NO: 191215 - RNA, 19 nt, Artificial Sequence
  Description of Artificial Sequence: Synthetic oligonucleotide
agacuucacgugauguuac

SEQ ID NO: 191216 - RNA, 19 nt, Artificial Sequence
  Description of Artificial Sequence: Synthetic oligonucleotide
cauuauucugauguccauc

SEQ ID NO: 191217 - RNA, 19 nt, Artificial Sequence
  Description of Artificial Sequence: Synthetic oligonucleotide
ucacuaccguuacaaugug

SEQ ID NO: 191218 - RNA, 19 nt, Artificial Sequence
  Description of Artificial Sequence: Synthetic oligonucleotide
acuaugcguauuaauaaau

SEQ ID NO: 191219 - RNA, 19 nt, Artificial Sequence
  Description of Artificial Sequence: Synthetic oligonucleotide
aguaggaauaucacacaca

SEQ ID NO: 191220 - RNA, 19 nt, Artificial Sequence
  Description of Artificial Sequence: Synthetic oligonucleotide
ucacuaaauuaagaguuuu

SEQ ID NO: 191221 - RNA, 19 nt, Artificial Sequence
  Description of Artificial Sequence: Synthetic oligonucleotide
uugaguucucuaacucgcu

SEQ ID NO: 191222 - RNA, 19 nt, Artificial Sequence
  Description of Artificial Sequence: Synthetic oligonucleotide
aaguucaacuaagcucuug

SEQ ID NO: 191223 - RNA, 19 nt, Artificial Sequence
  Description of Artificial Sequence: Synthetic oligonucleotide
agguguaaguacaacauua

SEQ ID NO: 191224 - RNA, 19 nt, Artificial Sequence
  Description of Artificial Sequence: Synthetic oligonucleotide
accauuauucugaugucca

SEQ ID NO: 191225 - RNA, 19 nt, Artificial Sequence
  Description of Artificial Sequence: Synthetic oligonucleotide
acauguaugugucgcucgu

SEQ ID NO: 191226 - RNA, 19 nt, Artificial Sequence
  Description of Artificial Sequence: Synthetic oligonucleotide
caacaccaagauagaagag

SEQ ID NO: 191227 - RNA, 19 nt, Artificial Sequence
  Description of Artificial Sequence: Synthetic oligonucleotide
uuuaagcggcaguauuuau

SEQ ID NO: 191228 - RNA, 19 nt, Artificial Sequence
  Description of Artificial Sequence: Synthetic oligonucleotide
ugggacauuaguucccaua

SEQ ID NO: 191229 - RNA, 19 nt, Artificial Sequence
  Description of Artificial Sequence: Synthetic oligonucleotide
cacuaccguuacaaugugg

SEQ ID NO: 191230 - RNA, 19 nt, Artificial Sequence
  Description of Artificial Sequence: Synthetic oligonucleotide
agauugccaccgcuaggac

SEQ ID NO: 191231 - RNA, 19 nt, Artificial Sequence
  Description of Artificial Sequence: Synthetic oligonucleotide
gccguugucaaccagccac

SEQ ID NO: 191232 - RNA, 19 nt, Artificial Sequence
  Description of Artificial Sequence: Synthetic oligonucleotide
auuguacgcucggagaacu

SEQ ID NO: 191233 - RNA, 19 nt, Artificial Sequence
  Description of Artificial Sequence: Synthetic oligonucleotide
cuaugcguauuaauaaaua

SEQ ID NO: 191234 - RNA, 19 nt, Artificial Sequence
  Description of Artificial Sequence: Synthetic oligonucleotide
cauucuacuaugcguauua

SEQ ID NO: 191235 - RNA, 19 nt, Artificial Sequence
  Description of Artificial Sequence: Synthetic oligonucleotide
ggaaucugaccuccucucg

SEQ ID NO: 191236 - RNA, 19 nt, Artificial Sequence
  Description of Artificial Sequence: Synthetic oligonucleotide
augccguucucuucgcuca

SEQ ID NO: 191237 - RNA, 19 nt, Artificial Sequence
  Description of Artificial Sequence: Synthetic oligonucleotide
uauuguacgcucggagaac

SEQ ID NO: 191238 - RNA, 19 nt, Artificial Sequence
  Description of Artificial Sequence: Synthetic oligonucleotide
gaacucuggcucagcacgg

SEQ ID NO: 191239 - RNA, 19 nt, Artificial Sequence
  Description of Artificial Sequence: Synthetic oligonucleotide
agcaugccguucucuucgc

SEQ ID NO: 191240 - RNA, 19 nt, Artificial Sequence
  Description of Artificial Sequence: Synthetic oligonucleotide
cacucaagacuucacguga

SEQ ID NO: 191241 - RNA, 19 nt, Artificial Sequence
  Description of Artificial Sequence: Synthetic oligonucleotide
cacugcgacgacaaccaac

SEQ ID NO: 191242 - RNA, 19 nt, Artificial Sequence
  Description of Artificial Sequence: Synthetic oligonucleotide
accaaauggcauuucugua

SEQ ID NO: 191243 - RNA, 19 nt, Artificial Sequence
  Description of Artificial Sequence: Synthetic oligonucleotide
auuuaagcggcaguauuua

SEQ ID NO: 191244 - RNA, 19 nt, Artificial Sequence
  Description of Artificial Sequence: Synthetic oligonucleotide
caaaagauugccaccgcua

SEQ ID NO: 191245 - RNA, 19 nt, Artificial Sequence
  Description of Artificial Sequence: Synthetic oligonucleotide
guaaaccauauauccagcu

SEQ ID NO: 191246 - RNA, 19 nt, Artificial Sequence
  Description of Artificial Sequence: Synthetic oligonucleotide
auacuaugucgcugaauaa

SEQ ID NO: 191247 - RNA, 19 nt, Artificial Sequence
  Description of Artificial Sequence: Synthetic oligonucleotide
acguuugcucuucggcccg

SEQ ID NO: 191248 - RNA, 19 nt, Artificial Sequence
  Description of Artificial Sequence: Synthetic oligonucleotide
ccuaugcucaaaccaaggc

SEQ ID NO: 191249 - RNA, 19 nt, Artificial Sequence
  Description of Artificial Sequence: Synthetic oligonucleotide
agccacgcaacuaaagaca

SEQ ID NO: 191250 - RNA, 19 nt, Artificial Sequence
  Description of Artificial Sequence: Synthetic oligonucleotide
ugugucgcucguguggaca

SEQ ID NO: 191251 - RNA, 19 nt, Artificial Sequence
  Description of Artificial Sequence: Synthetic oligonucleotide
ugccagauccgaugcaauc

SEQ ID NO: 191252 - RNA, 19 nt, Artificial Sequence
  Description of Artificial Sequence: Synthetic oligonucleotide
acgugauguuaccaccaug

SEQ ID NO: 191253 - RNA, 19 nt, Artificial Sequence
  Description of Artificial Sequence: Synthetic oligonucleotide
caaaaccugugcuuucgca

SEQ ID NO: 191254 - RNA, 19 nt, Artificial Sequence
  Description of Artificial Sequence: Synthetic oligonucleotide
gccagauccgaugcaaucg

SEQ ID NO: 191255 - RNA, 19 nt, Artificial Sequence
  Description of Artificial Sequence: Synthetic oligonucleotide
cauaaagaugaauccccaa

SEQ ID NO: 191256 - RNA, 19 nt, Artificial Sequence
  Description of Artificial Sequence: Synthetic oligonucleotide
gggacaagcugagaaagug

SEQ ID NO: 191257 - RNA, 19 nt, Artificial Sequence
  Description of Artificial Sequence: Synthetic oligonucleotide
gcagauauguuucuagugu

SEQ ID NO: 191258 - RNA, 19 nt, Artificial Sequence
  Description of Artificial Sequence: Synthetic oligonucleotide
uguggucauuuaagcggca

SEQ ID NO: 191259 - RNA, 19 nt, Artificial Sequence
  Description of Artificial Sequence: Synthetic oligonucleotide
ugccacuaaguugcuuuag

SEQ ID NO: 191260 - RNA, 19 nt, Artificial Sequence
  Description of Artificial Sequence: Synthetic oligonucleotide
uugcguccagacacuuugc

SEQ ID NO: 191261 - RNA, 19 nt, Artificial Sequence
  Description of Artificial Sequence: Synthetic oligonucleotide
gugucgcucguguggacag

SEQ ID NO: 191262 - RNA, 19 nt, Artificial Sequence
  Description of Artificial Sequence: Synthetic oligonucleotide
gcaaucguucauaaagaug

SEQ ID NO: 191263 - RNA, 19 nt, Artificial Sequence
  Description of Artificial Sequence: Synthetic oligonucleotide
cuacuucaucccugcauuc

SEQ ID NO: 191264 - RNA, 19 nt, Artificial Sequence
  Description of Artificial Sequence: Synthetic oligonucleotide
uucagaugcugucgguauu

SEQ ID NO: 191265 - RNA, 19 nt, Artificial Sequence
  Description of Artificial Sequence: Synthetic oligonucleotide
ucagcacggcccaggagau

SEQ ID NO: 191266 - RNA, 19 nt, Artificial Sequence
  Description of Artificial Sequence: Synthetic oligonucleotide
guggucauuuaagcggcag

SEQ ID NO: 191267 - RNA, 19 nt, Artificial Sequence
  Description of Artificial Sequence: Synthetic oligonucleotide
aaucguucauaaagaugaa

SEQ ID NO: 191268 - RNA, 19 nt, Artificial Sequence
  Description of Artificial Sequence: Synthetic oligonucleotide
aagcggcaguauuuauuaa

SEQ ID NO: 191269 - RNA, 19 nt, Artificial Sequence
  Description of Artificial Sequence: Synthetic oligonucleotide
guucaagggcaggauuucc

SEQ ID NO: 191270 - RNA, 19 nt, Artificial Sequence
  Description of Artificial Sequence: Synthetic oligonucleotide
gaaggcgcaguagucaucu

SEQ ID NO: 191271 - RNA, 19 nt, Artificial Sequence
  Description of Artificial Sequence: Synthetic oligonucleotide
uacgcucggagaacuuuau

SEQ ID NO: 191272 - RNA, 19 nt, Artificial Sequence
  Description of Artificial Sequence: Synthetic oligonucleotide
gccacguuugcucuucggc

SEQ ID NO: 191273 - RNA, 19 nt, Artificial Sequence
  Description of Artificial Sequence: Synthetic oligonucleotide
ggagaugcgcaaugaaguc

SEQ ID NO: 191274 - RNA, 19 nt, Artificial Sequence
  Description of Artificial Sequence: Synthetic oligonucleotide
gguacacgauguguuuucg

SEQ ID NO: 191275 - RNA, 19 nt, Artificial Sequence
  Description of Artificial Sequence: Synthetic oligonucleotide
gucgucuauguagagggga

SEQ ID NO: 191276 - RNA, 19 nt, Artificial Sequence
  Description of Artificial Sequence: Synthetic oligonucleotide
gcuuuuacguaaagcauca

SEQ ID NO: 191277 - RNA, 19 nt, Artificial Sequence
  Description of Artificial Sequence: Synthetic oligonucleotide
guaucuaaggagugcaauu

SEQ ID NO: 191278 - RNA, 19 nt, Artificial Sequence
  Description of Artificial Sequence: Synthetic oligonucleotide
acgaaugagguuaccucca

SEQ ID NO: 191279 - RNA, 19 nt, Artificial Sequence
  Description of Artificial Sequence: Synthetic oligonucleotide
cuuugcaaguggaugucua

SEQ ID NO: 191280 - RNA, 19 nt, Artificial Sequence
  Description of Artificial Sequence: Synthetic oligonucleotide
uugccacuaaguugcuuua

SEQ ID NO: 191281 - RNA, 19 nt, Artificial Sequence
  Description of Artificial Sequence: Synthetic oligonucleotide
gcucguguggacagcaccg

SEQ ID NO: 191282 - RNA, 19 nt, Artificial Sequence
  Description of Artificial Sequence: Synthetic oligonucleotide
cauuuaagcggcaguauuu

SEQ ID NO: 191283 - RNA, 19 nt, Artificial Sequence
  Description of Artificial Sequence: Synthetic oligonucleotide
auuuugccagaagucacua

SEQ ID NO: 191284 - RNA, 19 nt, Artificial Sequence
  Description of Artificial Sequence: Synthetic oligonucleotide
augugucgcucguguggac

SEQ ID NO: 191285 - RNA, 19 nt, Artificial Sequence
  Description of Artificial Sequence: Synthetic oligonucleotide
agggugucgucuauguaga

SEQ ID NO: 191286 - RNA, 19 nt, Artificial Sequence
  Description of Artificial Sequence: Synthetic oligonucleotide
ccucauaaagugcagcgca

SEQ ID NO: 191287 - RNA, 19 nt, Artificial Sequence
  Description of Artificial Sequence: Synthetic oligonucleotide
gacugguuauuagccauaa

SEQ ID NO: 191288 - RNA, 19 nt, Artificial Sequence
  Description of Artificial Sequence: Synthetic oligonucleotide
guucaucgcauuucaacau

SEQ ID NO: 191289 - RNA, 19 nt, Artificial Sequence
  Description of Artificial Sequence: Synthetic oligonucleotide
ugucuugaucagucugcau

SEQ ID NO: 191290 - RNA, 19 nt, Artificial Sequence
  Description of Artificial Sequence: Synthetic oligonucleotide
gcuuucgcagauauguuuc

SEQ ID NO: 191291 - RNA, 19 nt, Artificial Sequence
  Description of Artificial Sequence: Synthetic oligonucleotide
ugucgguauuguucucuau

SEQ ID NO: 191292 - RNA, 19 nt, Artificial Sequence
  Description of Artificial Sequence: Synthetic oligonucleotide
auguggagauacgccuuuc

SEQ ID NO: 191293 - RNA, 19 nt, Artificial Sequence
  Description of Artificial Sequence: Synthetic oligonucleotide
cuaugucgcugaauaaacu

SEQ ID NO: 191294 - RNA, 19 nt, Artificial Sequence
  Description of Artificial Sequence: Synthetic oligonucleotide
gcggcuaauacccuguacu

SEQ ID NO: 191295 - RNA, 19 nt, Artificial Sequence
  Description of Artificial Sequence: Synthetic oligonucleotide
gagguguaaguacaacauu

SEQ ID NO: 191296 - RNA, 19 nt, Artificial Sequence
  Description of Artificial Sequence: Synthetic oligonucleotide
cgcagauauguuucuagug

SEQ ID NO: 191297 - RNA, 19 nt, Artificial Sequence
  Description of Artificial Sequence: Synthetic oligonucleotide
uaguacucccuugggcccu

SEQ ID NO: 191298 - RNA, 19 nt, Artificial Sequence
  Description of Artificial Sequence: Synthetic oligonucleotide
aagcggcuaauacccugua

SEQ ID NO: 191299 - RNA, 19 nt, Artificial Sequence
  Description of Artificial Sequence: Synthetic oligonucleotide
gugcaaaaccugugcuuuc

SEQ ID NO: 191300 - RNA, 19 nt, Artificial Sequence
  Description of Artificial Sequence: Synthetic oligonucleotide
ggucauuuaagcggcagua

SEQ ID NO: 191301 - RNA, 19 nt, Artificial Sequence
  Description of Artificial Sequence: Synthetic oligonucleotide
agcauacuaugucgcugaa

SEQ ID NO: 191302 - RNA, 19 nt, Artificial Sequence
  Description of Artificial Sequence: Synthetic oligonucleotide
acucaagacuucacgugau

SEQ ID NO: 191303 - RNA, 19 nt, Artificial Sequence
  Description of Artificial Sequence: Synthetic oligonucleotide
accauauauccagcucacu

SEQ ID NO: 191304 - RNA, 19 nt, Artificial Sequence
  Description of Artificial Sequence: Synthetic oligonucleotide
acauucuacuaugcguauu

SEQ ID NO: 191305 - RNA, 19 nt, Artificial Sequence
  Description of Artificial Sequence: Synthetic oligonucleotide
ggacauuaguucccauaca

SEQ ID NO: 191306 - RNA, 19 nt, Artificial Sequence
  Description of Artificial Sequence: Synthetic oligonucleotide
cuuagcaugccguucucuu

SEQ ID NO: 191307 - RNA, 19 nt, Artificial Sequence
  Description of Artificial Sequence: Synthetic oligonucleotide
uuuugccacuaaguugcuu

SEQ ID NO: 191308 - RNA, 19 nt, Artificial Sequence
  Description of Artificial Sequence: Synthetic oligonucleotide
gagcuauaucuauugucuu

SEQ ID NO: 191309 - RNA, 19 nt, Artificial Sequence
  Description of Artificial Sequence: Synthetic oligonucleotide
gcgacgacaaccaacacau

SEQ ID NO: 191310 - RNA, 19 nt, Artificial Sequence
  Description of Artificial Sequence: Synthetic oligonucleotide
acgcaacuaaagacacaag

SEQ ID NO: 191311 - RNA, 19 nt, Artificial Sequence
  Description of Artificial Sequence: Synthetic oligonucleotide
gccacgcaacuaaagacac

SEQ ID NO: 191312 - RNA, 19 nt, Artificial Sequence
  Description of Artificial Sequence: Synthetic oligonucleotide
ccaagauagaagagcaucu

SEQ ID NO: 191313 - RNA, 19 nt, Artificial Sequence
  Description of Artificial Sequence: Synthetic oligonucleotide
ggcguuccacacugcgacg

SEQ ID NO: 191314 - RNA, 19 nt, Artificial Sequence
  Description of Artificial Sequence: Synthetic oligonucleotide
cgagucagagauaguacuc

SEQ ID NO: 191315 - RNA, 19 nt, Artificial Sequence
  Description of Artificial Sequence: Synthetic oligonucleotide
ccaccgcuaggacagguac

SEQ ID NO: 191316 - RNA, 19 nt, Artificial Sequence
  Description of Artificial Sequence: Synthetic oligonucleotide
ucgcucguguggacagcac

SEQ ID NO: 191317 - RNA, 19 nt, Artificial Sequence
  Description of Artificial Sequence: Synthetic oligonucleotide
cugccacguuugcucuucg

SEQ ID NO: 191318 - RNA, 19 nt, Artificial Sequence
  Description of Artificial Sequence: Synthetic oligonucleotide
guacacgauguguuuucgu

SEQ ID NO: 191319 - RNA, 19 nt, Artificial Sequence
  Description of Artificial Sequence: Synthetic oligonucleotide
uacucccuugggcccuacu

SEQ ID NO: 191320 - RNA, 19 nt, Artificial Sequence
  Description of Artificial Sequence: Synthetic oligonucleotide
ucgugagggugucgucuau

SEQ ID NO: 191321 - RNA, 19 nt, Artificial Sequence
  Description of Artificial Sequence: Synthetic oligonucleotide
gcaccauuauucugauguc

SEQ ID NO: 191322 - RNA, 19 nt, Artificial Sequence
  Description of Artificial Sequence: Synthetic oligonucleotide
ccugaggucucucgauuac

SEQ ID NO: 191323 - RNA, 19 nt, Artificial Sequence
  Description of Artificial Sequence: Synthetic oligonucleotide
gugcaccauuauucugaug

SEQ ID NO: 191324 - RNA, 19 nt, Artificial Sequence
  Description of Artificial Sequence: Synthetic oligonucleotide
caccgcuaggacagguaca

SEQ ID NO: 191325 - RNA, 19 nt, Artificial Sequence
  Description of Artificial Sequence: Synthetic oligonucleotide
ccguucucuucgcucauac

SEQ ID NO: 191326 - RNA, 19 nt, Artificial Sequence
  Description of Artificial Sequence: Synthetic oligonucleotide
uccucucgaaggggaacuc

SEQ ID NO: 191327 - RNA, 19 nt, Artificial Sequence
  Description of Artificial Sequence: Synthetic oligonucleotide
guacgcucggagaacuuua

SEQ ID NO: 191328 - RNA, 19 nt, Artificial Sequence
  Description of Artificial Sequence: Synthetic oligonucleotide
guggagauacgccuuucuu

SEQ ID NO: 191329 - RNA, 19 nt, Artificial Sequence
  Description of Artificial Sequence: Synthetic oligonucleotide
acgcucggagaacuuuauu

SEQ ID NO: 191330 - RNA, 19 nt, Artificial Sequence
  Description of Artificial Sequence: Synthetic oligonucleotide
gccuguguagccacgcaac

SEQ ID NO: 191331 - RNA, 19 nt, Artificial Sequence
  Description of Artificial Sequence: Synthetic oligonucleotide
guguaucuaaggagugcaa

SEQ ID NO: 191332 - RNA, 19 nt, Artificial Sequence
  Description of Artificial Sequence: Synthetic oligonucleotide
caucgugagggugucgucu

SEQ ID NO: 191333 - RNA, 19 nt, Artificial Sequence
  Description of Artificial Sequence: Synthetic oligonucleotide
acacugcgacgacaaccaa

SEQ ID NO: 191334 - RNA, 19 nt, Artificial Sequence
  Description of Artificial Sequence: Synthetic oligonucleotide
cugcgacgacaaccaacac

SEQ ID NO: 191335 - RNA, 19 nt, Artificial Sequence
  Description of Artificial Sequence: Synthetic oligonucleotide
caaucacuaccguuacaau

SEQ ID NO: 191336 - RNA, 19 nt, Artificial Sequence
  Description of Artificial Sequence: Synthetic oligonucleotide
gcguauuaauaaauacucu

SEQ ID NO: 191337 - RNA, 19 nt, Artificial Sequence
  Description of Artificial Sequence: Synthetic oligonucleotide
acuucgagucagagauagu

SEQ ID NO: 191338 - RNA, 19 nt, Artificial Sequence
  Description of Artificial Sequence: Synthetic oligonucleotide
ccgucucccaaaacaagga

SEQ ID NO: 191339 - RNA, 19 nt, Artificial Sequence
  Description of Artificial Sequence: Synthetic oligonucleotide
ccucucgaaggggaacucc

SEQ ID NO: 191340 - RNA, 19 nt, Artificial Sequence
  Description of Artificial Sequence: Synthetic oligonucleotide
cguucucuucgcucauacc

SEQ ID NO: 191341 - RNA, 19 nt, Artificial Sequence
  Description of Artificial Sequence: Synthetic oligonucleotide
caccaucgugagggugucg

SEQ ID NO: 191342 - RNA, 19 nt, Artificial Sequence
  Description of Artificial Sequence: Synthetic oligonucleotide
gcaauacucagaucuuguu

SEQ ID NO: 191343 - RNA, 19 nt, Artificial Sequence
  Description of Artificial Sequence: Synthetic oligonucleotide
gcggcaguauuuauuaaau

SEQ ID NO: 191344 - RNA, 19 nt, Artificial Sequence
  Description of Artificial Sequence: Synthetic oligonucleotide
gcguuccacacugcgacga

SEQ ID NO: 191345 - RNA, 19 nt, Artificial Sequence
  Description of Artificial Sequence: Synthetic oligonucleotide
cuuguugcuuaagcauacu

SEQ ID NO: 191346 - RNA, 19 nt, Artificial Sequence
  Description of Artificial Sequence: Synthetic oligonucleotide
caccaagauagaagagcau

SEQ ID NO: 191347 - RNA, 19 nt, Artificial Sequence
  Description of Artificial Sequence: Synthetic oligonucleotide
cacgugauguuaccaccau

SEQ ID NO: 191348 - RNA, 19 nt, Artificial Sequence
  Description of Artificial Sequence: Synthetic oligonucleotide
ccagauccgaugcaaucgu

SEQ ID NO: 191349 - RNA, 19 nt, Artificial Sequence
  Description of Artificial Sequence: Synthetic oligonucleotide
ccaucgugagggugucguc

SEQ ID NO: 191350 - RNA, 19 nt, Artificial Sequence
  Description of Artificial Sequence: Synthetic oligonucleotide
ggcuaauacccuguacuuu

SEQ ID NO: 191351 - RNA, 19 nt, Artificial Sequence
  Description of Artificial Sequence: Synthetic oligonucleotide
ccacgcaacuaaagacaca

SEQ ID NO: 191352 - RNA, 19 nt, Artificial Sequence
  Description of Artificial Sequence: Synthetic oligonucleotide
cgcucggagaacuuuauuu

SEQ ID NO: 191353 - RNA, 19 nt, Artificial Sequence
  Description of Artificial Sequence: Synthetic oligonucleotide
gaggggaaucugaccuccu

SEQ ID NO: 191354 - RNA, 19 nt, Artificial Sequence
  Description of Artificial Sequence: Synthetic oligonucleotide
cagauccgaugcaaucguu

SEQ ID NO: 191355 - RNA, 19 nt, Artificial Sequence
  Description of Artificial Sequence: Synthetic oligonucleotide
ccaacacaugggacaagcu

SEQ ID NO: 191356 - RNA, 19 nt, Artificial Sequence
  Description of Artificial Sequence: Synthetic oligonucleotide
ccguugucaaccagccacu

SEQ ID NO: 191357 - RNA, 19 nt, Artificial Sequence
  Description of Artificial Sequence: Synthetic oligonucleotide
cgaugcaaucguucauaaa

SEQ ID NO: 191358 - RNA, 19 nt, Artificial Sequence
  Description of Artificial Sequence: Synthetic oligonucleotide
gcauacuaugucgcugaau

SEQ ID NO: 191359 - RNA, 19 nt, Artificial Sequence
  Description of Artificial Sequence: Synthetic oligonucleotide
cgauuaccuggaucuguaa

SEQ ID NO: 191360 - RNA, 19 nt, Artificial Sequence
  Description of Artificial Sequence: Synthetic oligonucleotide
cgcucauacccuccugcga

SEQ ID NO: 191361 - RNA, 19 nt, Artificial Sequence
  Description of Artificial Sequence: Synthetic oligonucleotide
guacucccuugggcccuac

SEQ ID NO: 191362 - RNA, 19 nt, Artificial Sequence
  Description of Artificial Sequence: Synthetic oligonucleotide
gcaugccguucucuucgcu

SEQ ID NO: 191363 - RNA, 19 nt, Artificial Sequence
  Description of Artificial Sequence: Synthetic oligonucleotide
cggcuaauacccuguacuu

SEQ ID NO: 191364 - RNA, 19 nt, Artificial Sequence
  Description of Artificial Sequence: Synthetic oligonucleotide
gauauguuuaguuucaucg

SEQ ID NO: 191365 - RNA, 19 nt, Artificial Sequence
  Description of Artificial Sequence: Synthetic oligonucleotide
aaugugaucgaccagggga

SEQ ID NO: 191366 - RNA, 19 nt, Artificial Sequence
  Description of Artificial Sequence: Synthetic oligonucleotide
aauaccgcugaacugcagc

SEQ ID NO: 191367 - RNA, 19 nt, Artificial Sequence
  Description of Artificial Sequence: Synthetic oligonucleotide
aguaggaaccaacugauuc

SEQ ID NO: 191368 - RNA, 19 nt, Artificial Sequence
  Description of Artificial Sequence: Synthetic oligonucleotide
accuauauagcaucugacc

SEQ ID NO: 191369 - RNA, 19 nt, Artificial Sequence
  Description of Artificial Sequence: Synthetic oligonucleotide
auuaguaggaaccaacuga

SEQ ID NO: 191370 - RNA, 19 nt, Artificial Sequence
  Description of Artificial Sequence: Synthetic oligonucleotide
ugcacuaucaguugccugg

SEQ ID NO: 191371 - RNA, 19 nt, Artificial Sequence
  Description of Artificial Sequence: Synthetic oligonucleotide
uuggaugagauuauggaca

SEQ ID NO: 191372 - RNA, 19 nt, Artificial Sequence
  Description of Artificial Sequence: Synthetic oligonucleotide
uguuacugugcaaagacga

SEQ ID NO: 191373 - RNA, 19 nt, Artificial Sequence
  Description of Artificial Sequence: Synthetic oligonucleotide
cauugaacguccaacaccc

SEQ ID NO: 191374 - RNA, 19 nt, Artificial Sequence
  Description of Artificial Sequence: Synthetic oligonucleotide
uuucaacucccuuugaagc

SEQ ID NO: 191375 - RNA, 19 nt, Artificial Sequence
  Description of Artificial Sequence: Synthetic oligonucleotide
uucaucguaugaaacaugu

SEQ ID NO: 191376 - RNA, 19 nt, Artificial Sequence
  Description of Artificial Sequence: Synthetic oligonucleotide
caucugguuacuaagaguc

SEQ ID NO: 191377 - RNA, 19 nt, Artificial Sequence
  Description of Artificial Sequence: Synthetic oligonucleotide
uuauguguauuuuacccug

SEQ ID NO: 191378 - RNA, 19 nt, Artificial Sequence
  Description of Artificial Sequence: Synthetic oligonucleotide
ugucuuucaccgcuggugg

SEQ ID NO: 191379 - RNA, 19 nt, Artificial Sequence
  Description of Artificial Sequence: Synthetic oligonucleotide
aaagaugcuagcuuagauu

SEQ ID NO: 191380 - RNA, 19 nt, Artificial Sequence
  Description of Artificial Sequence: Synthetic oligonucleotide
cagaguaagacguuugccc

SEQ ID NO: 191381 - RNA, 19 nt, Artificial Sequence
  Description of Artificial Sequence: Synthetic oligonucleotide
uuaaggcaccauuagagcu

SEQ ID NO: 191382 - RNA, 19 nt, Artificial Sequence
  Description of Artificial Sequence: Synthetic oligonucleotide
ugagauaguaguuauccau

SEQ ID NO: 191383 - RNA, 19 nt, Artificial Sequence
  Description of Artificial Sequence: Synthetic oligonucleotide
uugaacguccaacacccgg

SEQ ID NO: 191384 - RNA, 19 nt, Artificial Sequence
  Description of Artificial Sequence: Synthetic oligonucleotide
ucugggauuuguaacagaa

SEQ ID NO: 191385 - RNA, 19 nt, Artificial Sequence
  Description of Artificial Sequence: Synthetic oligonucleotide
uggucuaacacaacugggc

SEQ ID NO: 191386 - RNA, 19 nt, Artificial Sequence
  Description of Artificial Sequence: Synthetic oligonucleotide
auccgauauguuuaguuuc

SEQ ID NO: 191387 - RNA, 19 nt, Artificial Sequence
  Description of Artificial Sequence: Synthetic oligonucleotide
uagaaucuaugcuacaagu

SEQ ID NO: 191388 - RNA, 19 nt, Artificial Sequence
  Description of Artificial Sequence: Synthetic oligonucleotide
uuaguaggaaccaacugau

SEQ ID NO: 191389 - RNA, 19 nt, Artificial Sequence
  Description of Artificial Sequence: Synthetic oligonucleotide
uccucuauaaggucagugc

SEQ ID NO: 191390 - RNA, 19 nt, Artificial Sequence
  Description of Artificial Sequence: Synthetic oligonucleotide
uuagauuccauugaacguc

SEQ ID NO: 191391 - RNA, 19 nt, Artificial Sequence
  Description of Artificial Sequence: Synthetic oligonucleotide
aguaguuauccauucuuug

SEQ ID NO: 191392 - RNA, 19 nt, Artificial Sequence
  Description of Artificial Sequence: Synthetic oligonucleotide
auaccgcugaacugcagcc

SEQ ID NO: 191393 - RNA, 19 nt, Artificial Sequence
  Description of Artificial Sequence: Synthetic oligonucleotide
gauuaguaggaaccaacug

SEQ ID NO: 191394 - RNA, 19 nt, Artificial Sequence
  Description of Artificial Sequence: Synthetic oligonucleotide
uuuugcacuaucaguugcc

SEQ ID NO: 191395 - RNA, 19 nt, Artificial Sequence
  Description of Artificial Sequence: Synthetic oligonucleotide
uucaagucgucuuugaauu

SEQ ID NO: 191396 - RNA, 19 nt, Artificial Sequence
  Description of Artificial Sequence: Synthetic oligonucleotide
ucguaugaaacauguuuag

SEQ ID NO: 191397 - RNA, 19 nt, Artificial Sequence
  Description of Artificial Sequence: Synthetic oligonucleotide
aaccuauauagcaucugac

SEQ ID NO: 191398 - RNA, 19 nt, Artificial Sequence
  Description of Artificial Sequence: Synthetic oligonucleotide
ucucauauccgauauguuu

SEQ ID NO: 191399 - RNA, 19 nt, Artificial Sequence
  Description of Artificial Sequence: Synthetic oligonucleotide
aauuacuuuugcacuauca

SEQ ID NO: 191400 - RNA, 19 nt, Artificial Sequence
  Description of Artificial Sequence: Synthetic oligonucleotide
uggaugagauuauggacag

SEQ ID NO: 191401 - RNA, 19 nt, Artificial Sequence
  Description of Artificial Sequence: Synthetic oligonucleotide
aguuuugccauggccauac

SEQ ID NO: 191402 - RNA, 19 nt, Artificial Sequence
  Description of Artificial Sequence: Synthetic oligonucleotide
uccagaguuauaguccugg

SEQ ID NO: 191403 - RNA, 19 nt, Artificial Sequence
  Description of Artificial Sequence: Synthetic oligonucleotide
gacugaucaaucugggaug

SEQ ID NO: 191404 - RNA, 19 nt, Artificial Sequence
  Description of Artificial Sequence: Synthetic oligonucleotide
aaaggauucuucggcacag

SEQ ID NO: 191405 - RNA, 19 nt, Artificial Sequence
  Description of Artificial Sequence: Synthetic oligonucleotide
acuaucaugcacuuugcaa

SEQ ID NO: 191406 - RNA, 19 nt, Artificial Sequence
  Description of Artificial Sequence: Synthetic oligonucleotide
uguuuaguuucaucguaug

SEQ ID NO: 191407 - RNA, 19 nt, Artificial Sequence
  Description of Artificial Sequence: Synthetic oligonucleotide
uccgauauguuuaguuuca

SEQ ID NO: 191408 - RNA, 19 nt, Artificial Sequence
  Description of Artificial Sequence: Synthetic oligonucleotide
agaguaagacguuugcccu

SEQ ID NO: 191409 - RNA, 19 nt, Artificial Sequence
  Description of Artificial Sequence: Synthetic oligonucleotide
agaauaaagucaaacgcca

SEQ ID NO: 191410 - RNA, 19 nt, Artificial Sequence
  Description of Artificial Sequence: Synthetic oligonucleotide
uuuagguaacuuucagugu

SEQ ID NO: 191411 - RNA, 19 nt, Artificial Sequence
  Description of Artificial Sequence: Synthetic oligonucleotide
cagauguguagaaagggug

SEQ ID NO: 191412 - RNA, 19 nt, Artificial Sequence
  Description of Artificial Sequence: Synthetic oligonucleotide
cuuuagcugaaguaaagga

SEQ ID NO: 191413 - RNA, 19 nt, Artificial Sequence
  Description of Artificial Sequence: Synthetic oligonucleotide
uuccauugaacguccaaca

SEQ ID NO: 191414 - RNA, 19 nt, Artificial Sequence
  Description of Artificial Sequence: Synthetic oligonucleotide
uagauuccauugaacgucc

SEQ ID NO: 191415 - RNA, 19 nt, Artificial Sequence
  Description of Artificial Sequence: Synthetic oligonucleotide
uguguagaaagggugacaa

SEQ ID NO: 191416 - RNA, 19 nt, Artificial Sequence
  Description of Artificial Sequence: Synthetic oligonucleotide
gaaccuauauagcaucuga

SEQ ID NO: 191417 - RNA, 19 nt, Artificial Sequence
  Description of Artificial Sequence: Synthetic oligonucleotide
uuucaucguaugaaacaug

SEQ ID NO: 191418 - RNA, 19 nt, Artificial Sequence
  Description of Artificial Sequence: Synthetic oligonucleotide
ugucaguacugacacuagc

SEQ ID NO: 191419 - RNA, 19 nt, Artificial Sequence
  Description of Artificial Sequence: Synthetic oligonucleotide
guaguuauccauucuuuga

SEQ ID NO: 191420 - RNA, 19 nt, Artificial Sequence
  Description of Artificial Sequence: Synthetic oligonucleotide
ugaacguccaacacccggu

SEQ ID NO: 191421 - RNA, 19 nt, Artificial Sequence
  Description of Artificial Sequence: Synthetic oligonucleotide
caguacugacacuagcugc

SEQ ID NO: 191422 - RNA, 19 nt, Artificial Sequence
  Description of Artificial Sequence: Synthetic oligonucleotide
ggugaaucuuauuccauag

SEQ ID NO: 191423 - RNA, 19 nt, Artificial Sequence
  Description of Artificial Sequence: Synthetic oligonucleotide
uauccgauauguuuaguuu

SEQ ID NO: 191424 - RNA, 19 nt, Artificial Sequence
  Description of Artificial Sequence: Synthetic oligonucleotide
auauccgauauguuuaguu

SEQ ID NO: 191425 - RNA, 19 nt, Artificial Sequence
  Description of Artificial Sequence: Synthetic oligonucleotide
auucgccucuguuaguguc

SEQ ID NO: 191426 - RNA, 19 nt, Artificial Sequence
  Description of Artificial Sequence: Synthetic oligonucleotide
uuacugugcaaagacgaug

SEQ ID NO: 191427 - RNA, 19 nt, Artificial Sequence
  Description of Artificial Sequence: Synthetic oligonucleotide
cuggucuaacacaacuggg

SEQ ID NO: 191428 - RNA, 19 nt, Artificial Sequence
  Description of Artificial Sequence: Synthetic oligonucleotide
acuauugcccacaggcacc

SEQ ID NO: 191429 - RNA, 19 nt, Artificial Sequence
  Description of Artificial Sequence: Synthetic oligonucleotide
uauaaggucagugcaguau

SEQ ID NO: 191430 - RNA, 19 nt, Artificial Sequence
  Description of Artificial Sequence: Synthetic oligonucleotide
ggugaugggaccucuauac

SEQ ID NO: 191431 - RNA, 19 nt, Artificial Sequence
  Description of Artificial Sequence: Synthetic oligonucleotide
uccauugaacguccaacac

SEQ ID NO: 191432 - RNA, 19 nt, Artificial Sequence
  Description of Artificial Sequence: Synthetic oligonucleotide
auuccuaaagaugcuagcu

SEQ ID NO: 191433 - RNA, 19 nt, Artificial Sequence
  Description of Artificial Sequence: Synthetic oligonucleotide
ucugguuacuaagagucac

SEQ ID NO: 191434 - RNA, 19 nt, Artificial Sequence
  Description of Artificial Sequence: Synthetic oligonucleotide
cacuauuagauucuugaga

SEQ ID NO: 191435 - RNA, 19 nt, Artificial Sequence
  Description of Artificial Sequence: Synthetic oligonucleotide
gcuagcuuagauuccauug

SEQ ID NO: 191436 - RNA, 19 nt, Artificial Sequence
  Description of Artificial Sequence: Synthetic oligonucleotide
cuauauugcuuggaccugg

SEQ ID NO: 191437 - RNA, 19 nt, Artificial Sequence
  Description of Artificial Sequence: Synthetic oligonucleotide
auagcaucugaccuguuuu

SEQ ID NO: 191438 - RNA, 19 nt, Artificial Sequence
  Description of Artificial Sequence: Synthetic oligonucleotide
uauagcaucugaccuguuu

SEQ ID NO: 191439 - RNA, 19 nt, Artificial Sequence
  Description of Artificial Sequence: Synthetic oligonucleotide
auuauggacagaaugugau

SEQ ID NO: 191440 - RNA, 19 nt, Artificial Sequence
  Description of Artificial Sequence: Synthetic oligonucleotide
uuguuguauuuguucccgg

SEQ ID NO: 191441 - RNA, 19 nt, Artificial Sequence
  Description of Artificial Sequence: Synthetic oligonucleotide
augaaucccaaccccucuc

SEQ ID NO: 191442 - RNA, 19 nt, Artificial Sequence
  Description of Artificial Sequence: Synthetic oligonucleotide
aacuggucuaacacaacug

SEQ ID NO: 191443 - RNA, 19 nt, Artificial Sequence
  Description of Artificial Sequence: Synthetic oligonucleotide
gaaugugaucgaccagggg

SEQ ID NO: 191444 - RNA, 19 nt, Artificial Sequence
  Description of Artificial Sequence: Synthetic oligonucleotide
guagcgaguaacaagcuga

SEQ ID NO: 191445 - RNA, 19 nt, Artificial Sequence
  Description of Artificial Sequence: Synthetic oligonucleotide
cacuauugcccacaggcac

SEQ ID NO: 191446 - RNA, 19 nt, Artificial Sequence
  Description of Artificial Sequence: Synthetic oligonucleotide
uuccuaaagaugcuagcuu

SEQ ID NO: 191447 - RNA, 19 nt, Artificial Sequence
  Description of Artificial Sequence: Synthetic oligonucleotide
gagauuauggacagaaugu

SEQ ID NO: 191448 - RNA, 19 nt, Artificial Sequence
  Description of Artificial Sequence: Synthetic oligonucleotide
auaaggucagugcaguauu

SEQ ID NO: 191449 - RNA, 19 nt, Artificial Sequence
  Description of Artificial Sequence: Synthetic oligonucleotide
aguaagacguuugcccuuc

SEQ ID NO: 191450 - RNA, 19 nt, Artificial Sequence
  Description of Artificial Sequence: Synthetic oligonucleotide
ggcaauaccgcugaacugc

SEQ ID NO: 191451 - RNA, 19 nt, Artificial Sequence
  Description of Artificial Sequence: Synthetic oligonucleotide
uguguauuuuacccuguuu

SEQ ID NO: 191452 - RNA, 19 nt, Artificial Sequence
  Description of Artificial Sequence: Synthetic oligonucleotide
gacguuugcccuucaugcc

SEQ ID NO: 191453 - RNA, 19 nt, Artificial Sequence
  Description of Artificial Sequence: Synthetic oligonucleotide
acgguuuagaggcgagggg

SEQ ID NO: 191454 - RNA, 19 nt, Artificial Sequence
  Description of Artificial Sequence: Synthetic oligonucleotide
cacgguuuagaggcgaggg

SEQ ID NO: 191455 - RNA, 19 nt, Artificial Sequence
  Description of Artificial Sequence: Synthetic oligonucleotide
uagagcuaugagagugucc

SEQ ID NO: 191456 - RNA, 19 nt, Artificial Sequence
  Description of Artificial Sequence: Synthetic oligonucleotide
acguugauuccagugucac

SEQ ID NO: 191457 - RNA, 19 nt, Artificial Sequence
  Description of Artificial Sequence: Synthetic oligonucleotide
ugaucgaccaggggagagg

SEQ ID NO: 191458 - RNA, 19 nt, Artificial Sequence
  Description of Artificial Sequence: Synthetic oligonucleotide
aucugguugcaggugguac

SEQ ID NO: 191459 - RNA, 19 nt, Artificial Sequence
  Description of Artificial Sequence: Synthetic oligonucleotide
gaucaaucugggaugguga

SEQ ID NO: 191460 - RNA, 19 nt, Artificial Sequence
  Description of Artificial Sequence: Synthetic oligonucleotide
agcuuagauuccauugaac

SEQ ID NO: 191461 - RNA, 19 nt, Artificial Sequence
  Description of Artificial Sequence: Synthetic oligonucleotide
ccgguagcgaguaacaagc

SEQ ID NO: 191462 - RNA, 19 nt, Artificial Sequence
  Description of Artificial Sequence: Synthetic oligonucleotide
uucgccucuguuaguguca

SEQ ID NO: 191463 - RNA, 19 nt, Artificial Sequence
  Description of Artificial Sequence: Synthetic oligonucleotide
acggcagaaccuauauagc

SEQ ID NO: 191464 - RNA, 19 nt, Artificial Sequence
  Description of Artificial Sequence: Synthetic oligonucleotide
acguuugcccuucaugcca

SEQ ID NO: 191465 - RNA, 19 nt, Artificial Sequence
  Description of Artificial Sequence: Synthetic oligonucleotide
aagccugcuagcaacacua

SEQ ID NO: 191466 - RNA, 19 nt, Artificial Sequence
  Description of Artificial Sequence: Synthetic oligonucleotide
augugaucgaccaggggag

SEQ ID NO: 191467 - RNA, 19 nt, Artificial Sequence
  Description of Artificial Sequence: Synthetic oligonucleotide
ugguuacuaagagucacaa

SEQ ID NO: 191468 - RNA, 19 nt, Artificial Sequence
  Description of Artificial Sequence: Synthetic oligonucleotide
gauuccgcaaagcaucugu

SEQ ID NO: 191469 - RNA, 19 nt, Artificial Sequence
  Description of Artificial Sequence: Synthetic oligonucleotide
aucguaugaaacauguuua

SEQ ID NO: 191470 - RNA, 19 nt, Artificial Sequence
  Description of Artificial Sequence: Synthetic oligonucleotide
aaucccaaccccucucaua

SEQ ID NO: 191471 - RNA, 19 nt, Artificial Sequence
  Description of Artificial Sequence: Synthetic oligonucleotide
cuggucuaucauccaaacc

SEQ ID NO: 191472 - RNA, 19 nt, Artificial Sequence
  Description of Artificial Sequence: Synthetic oligonucleotide
ggcugggugaaucuuauuc

SEQ ID NO: 191473 - RNA, 19 nt, Artificial Sequence
  Description of Artificial Sequence: Synthetic oligonucleotide
agucaaacgccauguucca

SEQ ID NO: 191474 - RNA, 19 nt, Artificial Sequence
  Description of Artificial Sequence: Synthetic oligonucleotide
ccauugaacguccaacacc

SEQ ID NO: 191475 - RNA, 19 nt, Artificial Sequence
  Description of Artificial Sequence: Synthetic oligonucleotide
uuguucccggagaucaggu

SEQ ID NO: 191476 - RNA, 19 nt, Artificial Sequence
  Description of Artificial Sequence: Synthetic oligonucleotide
agcuccagcuaaauugggg

SEQ ID NO: 191477 - RNA, 19 nt, Artificial Sequence
  Description of Artificial Sequence: Synthetic oligonucleotide
uugcacuaucaguugccug

SEQ ID NO: 191478 - RNA, 19 nt, Artificial Sequence
  Description of Artificial Sequence: Synthetic oligonucleotide
agaaccuauauagcaucug

SEQ ID NO: 191479 - RNA, 19 nt, Artificial Sequence
  Description of Artificial Sequence: Synthetic oligonucleotide
caucguaugaaacauguuu

SEQ ID NO: 191480 - RNA, 19 nt, Artificial Sequence
  Description of Artificial Sequence: Synthetic oligonucleotide
uuagagcuaugagaguguc

SEQ ID NO: 191481 - RNA, 19 nt, Artificial Sequence
  Description of Artificial Sequence: Synthetic oligonucleotide
gauuccauugaacguccaa

SEQ ID NO: 191482 - RNA, 19 nt, Artificial Sequence
  Description of Artificial Sequence: Synthetic oligonucleotide
gguagcgaguaacaagcug

SEQ ID NO: 191483 - RNA, 19 nt, Artificial Sequence
  Description of Artificial Sequence: Synthetic oligonucleotide
ggaguggugagcaccauug

SEQ ID NO: 191484 - RNA, 19 nt, Artificial Sequence
  Description of Artificial Sequence: Synthetic oligonucleotide
auuagagcuaugagagugu

SEQ ID NO: 191485 - RNA, 19 nt, Artificial Sequence
  Description of Artificial Sequence: Synthetic oligonucleotide
ucaccgaacucaacagcuc

SEQ ID NO: 191486 - RNA, 19 nt, Artificial Sequence
  Description of Artificial Sequence: Synthetic oligonucleotide
agaaucuaugcuacaagua

SEQ ID NO: 191487 - RNA, 19 nt, Artificial Sequence
  Description of Artificial Sequence: Synthetic oligonucleotide
uuggcugggugaaucuuau

SEQ ID NO: 191488 - RNA, 19 nt, Artificial Sequence
  Description of Artificial Sequence: Synthetic oligonucleotide
accacggcagaaccuauau

SEQ ID NO: 191489 - RNA, 19 nt, Artificial Sequence
  Description of Artificial Sequence: Synthetic oligonucleotide
uucccucauguuuuagaaa

SEQ ID NO: 191490 - RNA, 19 nt, Artificial Sequence
  Description of Artificial Sequence: Synthetic oligonucleotide
gcgaguaacaagcugaccu

SEQ ID NO: 191491 - RNA, 19 nt, Artificial Sequence
  Description of Artificial Sequence: Synthetic oligonucleotide
aggaagggcuaugacguug

SEQ ID NO: 191492 - RNA, 19 nt, Artificial Sequence
  Description of Artificial Sequence: Synthetic oligonucleotide
uuuagaggcgaggggcuac

SEQ ID NO: 191493 - RNA, 19 nt, Artificial Sequence
  Description of Artificial Sequence: Synthetic oligonucleotide
aucugagauaguaguuauc

SEQ ID NO: 191494 - RNA, 19 nt, Artificial Sequence
  Description of Artificial Sequence: Synthetic oligonucleotide
ucaucguaugaaacauguu

SEQ ID NO: 191495 - RNA, 19 nt, Artificial Sequence
  Description of Artificial Sequence: Synthetic oligonucleotide
cuugguacuacguggcucu

SEQ ID NO: 191496 - RNA, 19 nt, Artificial Sequence
  Description of Artificial Sequence: Synthetic oligonucleotide
auguuuaguuucaucguau

SEQ ID NO: 191497 - RNA, 19 nt, Artificial Sequence
  Description of Artificial Sequence: Synthetic oligonucleotide
cauuggaucugagauagua

SEQ ID NO: 191498 - RNA, 19 nt, Artificial Sequence
  Description of Artificial Sequence: Synthetic oligonucleotide
aguaacaagcugaccucug

SEQ ID NO: 191499 - RNA, 19 nt, Artificial Sequence
  Description of Artificial Sequence: Synthetic oligonucleotide
cugguuacuaagagucaca

SEQ ID NO: 191500 - RNA, 19 nt, Artificial Sequence
  Description of Artificial Sequence: Synthetic oligonucleotide
acgaugagagagaauuagu

SEQ ID NO: 191501 - RNA, 19 nt, Artificial Sequence
  Description of Artificial Sequence: Synthetic oligonucleotide
ugcuagcuuagauuccauu

SEQ ID NO: 191502 - RNA, 19 nt, Artificial Sequence
  Description of Artificial Sequence: Synthetic oligonucleotide
gagaucaggugguaaugcu

SEQ ID NO: 191503 - RNA, 19 nt, Artificial Sequence
  Description of Artificial Sequence: Synthetic oligonucleotide
acacgguuuagaggcgagg

SEQ ID NO: 191504 - RNA, 19 nt, Artificial Sequence
  Description of Artificial Sequence: Synthetic oligonucleotide
ugcaaacuagagggguucu

SEQ ID NO: 191505 - RNA, 19 nt, Artificial Sequence
  Description of Artificial Sequence: Synthetic oligonucleotide
ucgaccaggggagaggcuu

SEQ ID NO: 191506 - RNA, 19 nt, Artificial Sequence
  Description of Artificial Sequence: Synthetic oligonucleotide
accgcugaacugcagccau

SEQ ID NO: 191507 - RNA, 19 nt, Artificial Sequence
  Description of Artificial Sequence: Synthetic oligonucleotide
cugcaaacuagagggguuc

SEQ ID NO: 191508 - RNA, 19 nt, Artificial Sequence
  Description of Artificial Sequence: Synthetic oligonucleotide
uaguaggaaccaacugauu

SEQ ID NO: 191509 - RNA, 19 nt, Artificial Sequence
  Description of Artificial Sequence: Synthetic oligonucleotide
ucgccucuguuagugucag

SEQ ID NO: 191510 - RNA, 19 nt, Artificial Sequence
  Description of Artificial Sequence: Synthetic oligonucleotide
ccuauauagcaucugaccu

SEQ ID NO: 191511 - RNA, 19 nt, Artificial Sequence
  Description of Artificial Sequence: Synthetic oligonucleotide
uggaagguuuagguaacuu

SEQ ID NO: 191512 - RNA, 19 nt, Artificial Sequence
  Description of Artificial Sequence: Synthetic oligonucleotide
ggacagaaugugaucgacc

SEQ ID NO: 191513 - RNA, 19 nt, Artificial Sequence
  Description of Artificial Sequence: Synthetic oligonucleotide
ggauucuucggcacagaug

SEQ ID NO: 191514 - RNA, 19 nt, Artificial Sequence
  Description of Artificial Sequence: Synthetic oligonucleotide
gguuuagguaacuuucagu

SEQ ID NO: 191515 - RNA, 19 nt, Artificial Sequence
  Description of Artificial Sequence: Synthetic oligonucleotide
auugaacguccaacacccg

SEQ ID NO: 191516 - RNA, 19 nt, Artificial Sequence
  Description of Artificial Sequence: Synthetic oligonucleotide
caaacugacuccaccgacu

SEQ ID NO: 191517 - RNA, 19 nt, Artificial Sequence
  Description of Artificial Sequence: Synthetic oligonucleotide
caauaccgcugaacugcag

SEQ ID NO: 191518 - RNA, 19 nt, Artificial Sequence
  Description of Artificial Sequence: Synthetic oligonucleotide
auacucagauuaagucuug

SEQ ID NO: 191519 - RNA, 19 nt, Artificial Sequence
  Description of Artificial Sequence: Synthetic oligonucleotide
ccucuauaaggucagugca

SEQ ID NO: 191520 - RNA, 19 nt, Artificial Sequence
  Description of Artificial Sequence: Synthetic oligonucleotide
ugugaucgaccaggggaga

SEQ ID NO: 191521 - RNA, 19 nt, Artificial Sequence
  Description of Artificial Sequence: Synthetic oligonucleotide
aggcuugacugaauugaug

SEQ ID NO: 191522 - RNA, 19 nt, Artificial Sequence
  Description of Artificial Sequence: Synthetic oligonucleotide
cacaugaaucccaaccccu

SEQ ID NO: 191523 - RNA, 19 nt, Artificial Sequence
  Description of Artificial Sequence: Synthetic oligonucleotide
cacuaucaugcacuuugca

SEQ ID NO: 191524 - RNA, 19 nt, Artificial Sequence
  Description of Artificial Sequence: Synthetic oligonucleotide
cccgguagcgaguaacaag

SEQ ID NO: 191525 - RNA, 19 nt, Artificial Sequence
  Description of Artificial Sequence: Synthetic oligonucleotide
gcuaugagaguguccauua

SEQ ID NO: 191526 - RNA, 19 nt, Artificial Sequence
  Description of Artificial Sequence: Synthetic oligonucleotide
uaccgcugaacugcagcca

SEQ ID NO: 191527 - RNA, 19 nt, Artificial Sequence
  Description of Artificial Sequence: Synthetic oligonucleotide
accucuauacucagauuaa

SEQ ID NO: 191528 - RNA, 19 nt, Artificial Sequence
  Description of Artificial Sequence: Synthetic oligonucleotide
gcuacaaguaaaagaagua

SEQ ID NO: 191529 - RNA, 19 nt, Artificial Sequence
  Description of Artificial Sequence: Synthetic oligonucleotide
uugagaugucuggcuauau

SEQ ID NO: 191530 - RNA, 19 nt, Artificial Sequence
  Description of Artificial Sequence: Synthetic oligonucleotide
gcuuucaacucccuuugaa

SEQ ID NO: 191531 - RNA, 19 nt, Artificial Sequence
  Description of Artificial Sequence: Synthetic oligonucleotide
cauggccauacacugcaaa

SEQ ID NO: 191532 - RNA, 19 nt, Artificial Sequence
  Description of Artificial Sequence: Synthetic oligonucleotide
gaguaacaagcugaccucu

SEQ ID NO: 191533 - RNA, 19 nt, Artificial Sequence
  Description of Artificial Sequence: Synthetic oligonucleotide
gaacguccaacacccggua

SEQ ID NO: 191534 - RNA, 19 nt, Artificial Sequence
  Description of Artificial Sequence: Synthetic oligonucleotide
accccucucauauccgaua

SEQ ID NO: 191535 - RNA, 19 nt, Artificial Sequence
  Description of Artificial Sequence: Synthetic oligonucleotide
gggugaaucuuauuccaua

SEQ ID NO: 191536 - RNA, 19 nt, Artificial Sequence
  Description of Artificial Sequence: Synthetic oligonucleotide
cuaugagaguguccauuaa

SEQ ID NO: 191537 - RNA, 19 nt, Artificial Sequence
  Description of Artificial Sequence: Synthetic oligonucleotide
augagauuauggacagaau

SEQ ID NO: 191538 - RNA, 19 nt, Artificial Sequence
  Description of Artificial Sequence: Synthetic oligonucleotide
accgaacucaacagcucca

SEQ ID NO: 191539 - RNA, 19 nt, Artificial Sequence
  Description of Artificial Sequence: Synthetic oligonucleotide
guacacgguuuagaggcga

SEQ ID NO: 191540 - RNA, 19 nt, Artificial Sequence
  Description of Artificial Sequence: Synthetic oligonucleotide
guaccaugauuuucagagu

SEQ ID NO: 191541 - RNA, 19 nt, Artificial Sequence
  Description of Artificial Sequence: Synthetic oligonucleotide
ggauuaguaggaaccaacu

SEQ ID NO: 191542 - RNA, 19 nt, Artificial Sequence
  Description of Artificial Sequence: Synthetic oligonucleotide
cuauaaggucagugcagua

SEQ ID NO: 191543 - RNA, 19 nt, Artificial Sequence
  Description of Artificial Sequence: Synthetic oligonucleotide
gggaccucuauacucagau

SEQ ID NO: 191544 - RNA, 19 nt, Artificial Sequence
  Description of Artificial Sequence: Synthetic oligonucleotide
guagccuuuccaauuacuu

SEQ ID NO: 191545 - RNA, 19 nt, Artificial Sequence
  Description of Artificial Sequence: Synthetic oligonucleotide
aacacccgguagcgaguaa

SEQ ID NO: 191546 - RNA, 19 nt, Artificial Sequence
  Description of Artificial Sequence: Synthetic oligonucleotide
cgaguaacaagcugaccuc

SEQ ID NO: 191547 - RNA, 19 nt, Artificial Sequence
  Description of Artificial Sequence: Synthetic oligonucleotide
caccgacugcugcaucagc

SEQ ID NO: 191548 - RNA, 19 nt, Artificial Sequence
  Description of Artificial Sequence: Synthetic oligonucleotide
agccauuuacugguucuuu

SEQ ID NO: 191549 - RNA, 19 nt, Artificial Sequence
  Description of Artificial Sequence: Synthetic oligonucleotide
aaccacggcagaaccuaua

SEQ ID NO: 191550 - RNA, 19 nt, Artificial Sequence
  Description of Artificial Sequence: Synthetic oligonucleotide
gaguaagacguuugcccuu

SEQ ID NO: 191551 - RNA, 19 nt, Artificial Sequence
  Description of Artificial Sequence: Synthetic oligonucleotide
guuacugugcaaagacgau

SEQ ID NO: 191552 - RNA, 19 nt, Artificial Sequence
  Description of Artificial Sequence: Synthetic oligonucleotide
ggcgaggggcuacuuccag

SEQ ID NO: 191553 - RNA, 19 nt, Artificial Sequence
  Description of Artificial Sequence: Synthetic oligonucleotide
ccucucauauccgauaugu

SEQ ID NO: 191554 - RNA, 19 nt, Artificial Sequence
  Description of Artificial Sequence: Synthetic oligonucleotide
acccgguagcgaguaacaa

SEQ ID NO: 191555 - RNA, 19 nt, Artificial Sequence
  Description of Artificial Sequence: Synthetic oligonucleotide
uugguacuacguggcucuc

SEQ ID NO: 191556 - RNA, 19 nt, Artificial Sequence
  Description of Artificial Sequence: Synthetic oligonucleotide
guugccugguccagaguua

SEQ ID NO: 191557 - RNA, 19 nt, Artificial Sequence
  Description of Artificial Sequence: Synthetic oligonucleotide
uggcugggugaaucuuauu

SEQ ID NO: 191558 - RNA, 19 nt, Artificial Sequence
  Description of Artificial Sequence: Synthetic oligonucleotide
ggauuccgcaaagcaucug

SEQ ID NO: 191559 - RNA, 19 nt, Artificial Sequence
  Description of Artificial Sequence: Synthetic oligonucleotide
cuaugacguugauuccagu

SEQ ID NO: 191560 - RNA, 19 nt, Artificial Sequence
  Description of Artificial Sequence: Synthetic oligonucleotide
cauucgccucuguuagugu

SEQ ID NO: 191561 - RNA, 19 nt, Artificial Sequence
  Description of Artificial Sequence: Synthetic oligonucleotide
augcuagcuuagauuccau

SEQ ID NO: 191562 - RNA, 19 nt, Artificial Sequence
  Description of Artificial Sequence: Synthetic oligonucleotide
cuacaggggccccucggcu

SEQ ID NO: 191563 - RNA, 19 nt, Artificial Sequence
  Description of Artificial Sequence: Synthetic oligonucleotide
gcgaggggcuacuuccaga

SEQ ID NO: 191564 - RNA, 19 nt, Artificial Sequence
  Description of Artificial Sequence: Synthetic oligonucleotide
cauauccgauauguuuagu

SEQ ID NO: 191565 - RNA, 19 nt, Artificial Sequence
  Description of Artificial Sequence: Synthetic oligonucleotide
cccucucauauccgauaug

SEQ ID NO: 191566 - RNA, 19 nt, Artificial Sequence
  Description of Artificial Sequence: Synthetic oligonucleotide
cggagaucaggugguaaug

SEQ ID NO: 191567 - RNA, 19 nt, Artificial Sequence
  Description of Artificial Sequence: Synthetic oligonucleotide
caacacccgguagcgagua

SEQ ID NO: 191568 - RNA, 19 nt, Artificial Sequence
  Description of Artificial Sequence: Synthetic oligonucleotide
agccugcuagcaacacuau

SEQ ID NO: 191569 - RNA, 19 nt, Artificial Sequence
  Description of Artificial Sequence: Synthetic oligonucleotide
gggaugcaauauuccauuu

SEQ ID NO: 191570 - RNA, 19 nt, Artificial Sequence
  Description of Artificial Sequence: Synthetic oligonucleotide
ccgcaaagcaucuguauuu

SEQ ID NO: 191571 - RNA, 19 nt, Artificial Sequence
  Description of Artificial Sequence: Synthetic oligonucleotide
gcuuccguaccaugauuuu

SEQ ID NO: 191572 - RNA, 19 nt, Artificial Sequence
  Description of Artificial Sequence: Synthetic oligonucleotide
ccggagaucaggugguaau

SEQ ID NO: 191573 - RNA, 19 nt, Artificial Sequence
  Description of Artificial Sequence: Synthetic oligonucleotide
guacuacguggcucuccuu

SEQ ID NO: 191574 - RNA, 19 nt, Artificial Sequence
  Description of Artificial Sequence: Synthetic oligonucleotide
ccacggcagaaccuauaua

SEQ ID NO: 191575 - RNA, 19 nt, Artificial Sequence
  Description of Artificial Sequence: Synthetic oligonucleotide
ccccucucauauccgauau

SEQ ID NO: 191576 - RNA, 19 nt, Artificial Sequence
  Description of Artificial Sequence: Synthetic oligonucleotide
cccggagaucaggugguaa

SEQ ID NO: 191577 - RNA, 19 nt, Artificial Sequence
  Description of Artificial Sequence: Synthetic oligonucleotide
ccauuggaucugagauagu

SEQ ID NO: 191578 - RNA, 19 nt, Artificial Sequence
  Description of Artificial Sequence: Synthetic oligonucleotide
ccgauauguuuaguuucau

SEQ ID NO: 191579 - RNA, 19 nt, Artificial Sequence
  Description of Artificial Sequence: Synthetic oligonucleotide
cgguagcgaguaacaagcu

SEQ ID NO: 191580 - RNA, 19 nt, Artificial Sequence
  Description of Artificial Sequence: Synthetic oligonucleotide
ggggccccucggcuuccgu

SEQ ID NO: 191581 - RNA, 19 nt, Artificial Sequence
  Description of Artificial Sequence: Synthetic oligonucleotide
cggcuuccguaccaugauu

SEQ ID NO: 191582 - RNA, 19 nt, Artificial Sequence
  Description of Artificial Sequence: Synthetic oligonucleotide
cgccucuguuagugucagu

SEQ ID NO: 191583 - RNA, 19 nt, Artificial Sequence
  Description of Artificial Sequence: Synthetic oligonucleotide
agugauaucuacuacaugg

SEQ ID NO: 191584 - RNA, 19 nt, Artificial Sequence
  Description of Artificial Sequence: Synthetic oligonucleotide
auaccugugauccaaaggc

SEQ ID NO: 191585 - RNA, 19 nt, Artificial Sequence
  Description of Artificial Sequence: Synthetic oligonucleotide
auaucuacuacaugggugc

SEQ ID NO: 191586 - RNA, 19 nt, Artificial Sequence
  Description of Artificial Sequence: Synthetic oligonucleotide
aguuacuuuaaucaagggg

SEQ ID NO: 191587 - RNA, 19 nt, Artificial Sequence
  Description of Artificial Sequence: Synthetic oligonucleotide
ugaguugguagcuugaugc

SEQ ID NO: 191588 - RNA, 19 nt, Artificial Sequence
  Description of Artificial Sequence: Synthetic oligonucleotide
ucucccuuaaucuugagug

SEQ ID NO: 191589 - RNA, 19 nt, Artificial Sequence
  Description of Artificial Sequence: Synthetic oligonucleotide
aaugcgcucgucugcaucc

SEQ ID NO: 191590 - RNA, 19 nt, Artificial Sequence
  Description of Artificial Sequence: Synthetic oligonucleotide
aacuuugucaaugcgcucg

SEQ ID NO: 191591 - RNA, 19 nt, Artificial Sequence
  Description of Artificial Sequence: Synthetic oligonucleotide
uuuaacuccuugauaacug

SEQ ID NO: 191592 - RNA, 19 nt, Artificial Sequence
  Description of Artificial Sequence: Synthetic oligonucleotide
acagcuaccacccauguca

SEQ ID NO: 191593 - RNA, 19 nt, Artificial Sequence
  Description of Artificial Sequence: Synthetic oligonucleotide
ugucucucgaucuucaagc

SEQ ID NO: 191594 - RNA, 19 nt, Artificial Sequence
  Description of Artificial Sequence: Synthetic oligonucleotide
ugccuugcaaaugagacgg

SEQ ID NO: 191595 - RNA, 19 nt, Artificial Sequence
  Description of Artificial Sequence: Synthetic oligonucleotide
uuaaucuugagugacuucu

SEQ ID NO: 191596 - RNA, 19 nt, Artificial Sequence
  Description of Artificial Sequence: Synthetic oligonucleotide
cauaggggcugcuagaggg

SEQ ID NO: 191597 - RNA, 19 nt, Artificial Sequence
  Description of Artificial Sequence: Synthetic oligonucleotide
ucaucguucaucucguuca

SEQ ID NO: 191598 - RNA, 19 nt, Artificial Sequence
  Description of Artificial Sequence: Synthetic oligonucleotide
uuugcaacaugcagagggg

SEQ ID NO: 191599 - RNA, 19 nt, Artificial Sequence
  Description of Artificial Sequence: Synthetic oligonucleotide
aaguuacuuuaaucaaggg

SEQ ID NO: 191600 - RNA, 19 nt, Artificial Sequence
  Description of Artificial Sequence: Synthetic oligonucleotide
ucuugcgauacaaugcccc

SEQ ID NO: 191601 - RNA, 19 nt, Artificial Sequence
  Description of Artificial Sequence: Synthetic oligonucleotide
ucuagauucagguuccggu

SEQ ID NO: 191602 - RNA, 19 nt, Artificial Sequence
  Description of Artificial Sequence: Synthetic oligonucleotide
ugauccaaaggccagcgcu

SEQ ID NO: 191603 - RNA, 19 nt, Artificial Sequence
  Description of Artificial Sequence: Synthetic oligonucleotide
gauaucuacuacaugggug

SEQ ID NO: 191604 - RNA, 19 nt, Artificial Sequence
  Description of Artificial Sequence: Synthetic oligonucleotide
ugucggauaccugugaucc

SEQ ID NO: 191605 - RNA, 19 nt, Artificial Sequence
  Description of Artificial Sequence: Synthetic oligonucleotide
acuacaugggugcgggugc

SEQ ID NO: 191606 - RNA, 19 nt, Artificial Sequence
  Description of Artificial Sequence: Synthetic oligonucleotide
acuuugcccauguagacug

SEQ ID NO: 191607 - RNA, 19 nt, Artificial Sequence
  Description of Artificial Sequence: Synthetic oligonucleotide
ucuacuacaugggugcggg

SEQ ID NO: 191608 - RNA, 19 nt, Artificial Sequence
  Description of Artificial Sequence: Synthetic oligonucleotide
ucgagugauaucuacuaca

SEQ ID NO: 191609 - RNA, 19 nt, Artificial Sequence
  Description of Artificial Sequence: Synthetic oligonucleotide
aacgguagcuccgggacgc

SEQ ID NO: 191610 - RNA, 19 nt, Artificial Sequence
  Description of Artificial Sequence: Synthetic oligonucleotide
ucgagucugaacuuuguca

SEQ ID NO: 191611 - RNA, 19 nt, Artificial Sequence
  Description of Artificial Sequence: Synthetic oligonucleotide
uggucuugcgauacaaugc

SEQ ID NO: 191612 - RNA, 19 nt, Artificial Sequence
  Description of Artificial Sequence: Synthetic oligonucleotide
uuacuuuaaucaaggggug

SEQ ID NO: 191613 - RNA, 19 nt, Artificial Sequence
  Description of Artificial Sequence: Synthetic oligonucleotide
ggcgcagacacucauaggg

SEQ ID NO: 191614 - RNA, 19 nt, Artificial Sequence
  Description of Artificial Sequence: Synthetic oligonucleotide
uugauugguuugcugguag

SEQ ID NO: 191615 - RNA, 19 nt, Artificial Sequence
  Description of Artificial Sequence: Synthetic oligonucleotide
aaaugcagggaaggagugc

SEQ ID NO: 191616 - RNA, 19 nt, Artificial Sequence
  Description of Artificial Sequence: Synthetic oligonucleotide
agcugagauaugugcagcc

SEQ ID NO: 191617 - RNA, 19 nt, Artificial Sequence
  Description of Artificial Sequence: Synthetic oligonucleotide
ugcucgcuugcuuugaaag

SEQ ID NO: 191618 - RNA, 19 nt, Artificial Sequence
  Description of Artificial Sequence: Synthetic oligonucleotide
ugaguuacggucuccuuga

SEQ ID NO: 191619 - RNA, 19 nt, Artificial Sequence
  Description of Artificial Sequence: Synthetic oligonucleotide
ugauaucuacuacaugggu

SEQ ID NO: 191620 - RNA, 19 nt, Artificial Sequence
  Description of Artificial Sequence: Synthetic oligonucleotide
aggggugaaguccucaguc

SEQ ID NO: 191621 - RNA, 19 nt, Artificial Sequence
  Description of Artificial Sequence: Synthetic oligonucleotide
aaugcagggaaggagugcu

SEQ ID NO: 191622 - RNA, 19 nt, Artificial Sequence
  Description of Artificial Sequence: Synthetic oligonucleotide
cucacucaauccuuagugg

SEQ ID NO: 191623 - RNA, 19 nt, Artificial Sequence
  Description of Artificial Sequence: Synthetic oligonucleotide
acccaugucaagugcuucc

SEQ ID NO: 191624 - RNA, 19 nt, Artificial Sequence
  Description of Artificial Sequence: Synthetic oligonucleotide
uuaaucaaggggugaaguc

SEQ ID NO: 191625 - RNA, 19 nt, Artificial Sequence
  Description of Artificial Sequence: Synthetic oligonucleotide
gacaaaugcagggaaggag

SEQ ID NO: 191626 - RNA, 19 nt, Artificial Sequence
  Description of Artificial Sequence: Synthetic oligonucleotide
aacaacuggcuggucuugc

SEQ ID NO: 191627 - RNA, 19 nt, Artificial Sequence
  Description of Artificial Sequence: Synthetic oligonucleotide
gcgacugugaagcugaugc

SEQ ID NO: 191628 - RNA, 19 nt, Artificial Sequence
  Description of Artificial Sequence: Synthetic oligonucleotide
ugcgauacaaugccccagc

SEQ ID NO: 191629 - RNA, 19 nt, Artificial Sequence
  Description of Artificial Sequence: Synthetic oligonucleotide
caauugugcgcuuggacug

SEQ ID NO: 191630 - RNA, 19 nt, Artificial Sequence
  Description of Artificial Sequence: Synthetic oligonucleotide
uggcgguacuucuugauug

SEQ ID NO: 191631 - RNA, 19 nt, Artificial Sequence
  Description of Artificial Sequence: Synthetic oligonucleotide
cuggucuugcgauacaaug

SEQ ID NO: 191632 - RNA, 19 nt, Artificial Sequence
  Description of Artificial Sequence: Synthetic oligonucleotide
gaugucgcuguccuaggcc

SEQ ID NO: 191633 - RNA, 19 nt, Artificial Sequence
  Description of Artificial Sequence: Synthetic oligonucleotide
ucagcaccagacgaugucg

SEQ ID NO: 191634 - RNA, 19 nt, Artificial Sequence
  Description of Artificial Sequence: Synthetic oligonucleotide
ugggcuuccguuacucggg

SEQ ID NO: 191635 - RNA, 19 nt, Artificial Sequence
  Description of Artificial Sequence: Synthetic oligonucleotide
aacagcuaccacccauguc

SEQ ID NO: 191636 - RNA, 19 nt, Artificial Sequence
  Description of Artificial Sequence: Synthetic oligonucleotide
aagggcaauaucuguugcu

SEQ ID NO: 191637 - RNA, 19 nt, Artificial Sequence
  Description of Artificial Sequence: Synthetic oligonucleotide
uugucaaugcgcucgucug

SEQ ID NO: 191638 - RNA, 19 nt, Artificial Sequence
  Description of Artificial Sequence: Synthetic oligonucleotide
acgcugcugucucacaacc

SEQ ID NO: 191639 - RNA, 19 nt, Artificial Sequence
  Description of Artificial Sequence: Synthetic oligonucleotide
aaugccagagacgagggua

SEQ ID NO: 191640 - RNA, 19 nt, Artificial Sequence
  Description of Artificial Sequence: Synthetic oligonucleotide
uucaacuggaggaggcuug

SEQ ID NO: 191641 - RNA, 19 nt, Artificial Sequence
  Description of Artificial Sequence: Synthetic oligonucleotide
gugauaucuacuacauggg

SEQ ID NO: 191642 - RNA, 19 nt, Artificial Sequence
  Description of Artificial Sequence: Synthetic oligonucleotide
gagugcuuaggagaugagg

SEQ ID NO: 191643 - RNA, 19 nt, Artificial Sequence
  Description of Artificial Sequence: Synthetic oligonucleotide
gaggagagaucucgcaucc

SEQ ID NO: 191644 - RNA, 19 nt, Artificial Sequence
  Description of Artificial Sequence: Synthetic oligonucleotide
gaaguucaacuggaggagg

SEQ ID NO: 191645 - RNA, 19 nt, Artificial Sequence
  Description of Artificial Sequence: Synthetic oligonucleotide
ugugcggucaacuggcggu

SEQ ID NO: 191646 - RNA, 19 nt, Artificial Sequence
  Description of Artificial Sequence: Synthetic oligonucleotide
aguuacggucuccuugagg

SEQ ID NO: 191647 - RNA, 19 nt, Artificial Sequence
  Description of Artificial Sequence: Synthetic oligonucleotide
ugauaacugucucucgauc

SEQ ID NO: 191648 - RNA, 19 nt, Artificial Sequence
  Description of Artificial Sequence: Synthetic oligonucleotide
ugauguuuccaggucucgg

SEQ ID NO: 191649 - RNA, 19 nt, Artificial Sequence
  Description of Artificial Sequence: Synthetic oligonucleotide
caaugccccagcuaugagc

SEQ ID NO: 191650 - RNA, 19 nt, Artificial Sequence
  Description of Artificial Sequence: Synthetic oligonucleotide
ucauaggggcugcuagagg

SEQ ID NO: 191651 - RNA, 19 nt, Artificial Sequence
  Description of Artificial Sequence: Synthetic oligonucleotide
aacuggcggaugucacugc

SEQ ID NO: 191652 - RNA, 19 nt, Artificial Sequence
  Description of Artificial Sequence: Synthetic oligonucleotide
agagaucugcuggagcagc

SEQ ID NO: 191653 - RNA, 19 nt, Artificial Sequence
  Description of Artificial Sequence: Synthetic oligonucleotide
aauugugcgcuuggacugg

SEQ ID NO: 191654 - RNA, 19 nt, Artificial Sequence
  Description of Artificial Sequence: Synthetic oligonucleotide
ucguucauugcuuccaaau

SEQ ID NO: 191655 - RNA, 19 nt, Artificial Sequence
  Description of Artificial Sequence: Synthetic oligonucleotide
gagugacuucuuuaacucc

SEQ ID NO: 191656 - RNA, 19 nt, Artificial Sequence
  Description of Artificial Sequence: Synthetic oligonucleotide
ugucaaugcgcucgucugc

SEQ ID NO: 191657 - RNA, 19 nt, Artificial Sequence
  Description of Artificial Sequence: Synthetic oligonucleotide
cugaguuacggucuccuug

SEQ ID NO: 191658 - RNA, 19 nt, Artificial Sequence
  Description of Artificial Sequence: Synthetic oligonucleotide
agacgaggguagcaaugcc

SEQ ID NO: 191659 - RNA, 19 nt, Artificial Sequence
  Description of Artificial Sequence: Synthetic oligonucleotide
agcuccucucccuuaaucu

SEQ ID NO: 191660 - RNA, 19 nt, Artificial Sequence
  Description of Artificial Sequence: Synthetic oligonucleotide
ugucucaacuccaucucaa

SEQ ID NO: 191661 - RNA, 19 nt, Artificial Sequence
  Description of Artificial Sequence: Synthetic oligonucleotide
uccuugauaacugucucuc

SEQ ID NO: 191662 - RNA, 19 nt, Artificial Sequence
  Description of Artificial Sequence: Synthetic oligonucleotide
cucaauccuuaguggaggg

SEQ ID NO: 191663 - RNA, 19 nt, Artificial Sequence
  Description of Artificial Sequence: Synthetic oligonucleotide
ggucuugcgauacaaugcc

SEQ ID NO: 191664 - RNA, 19 nt, Artificial Sequence
  Description of Artificial Sequence: Synthetic oligonucleotide
uacuacaugggugcgggug

SEQ ID NO: 191665 - RNA, 19 nt, Artificial Sequence
  Description of Artificial Sequence: Synthetic oligonucleotide
uacaaugccccagcuauga

SEQ ID NO: 191666 - RNA, 19 nt, Artificial Sequence
  Description of Artificial Sequence: Synthetic oligonucleotide
aggugugcggucaacuggc

SEQ ID NO: 191667 - RNA, 19 nt, Artificial Sequence
  Description of Artificial Sequence: Synthetic oligonucleotide
acgcucauacaguccaggg

SEQ ID NO: 191668 - RNA, 19 nt, Artificial Sequence
  Description of Artificial Sequence: Synthetic oligonucleotide
acaacuggcuggucuugcg

SEQ ID NO: 191669 - RNA, 19 nt, Artificial Sequence
  Description of Artificial Sequence: Synthetic oligonucleotide
cucaauugugcgcuuggac

SEQ ID NO: 191670 - RNA, 19 nt, Artificial Sequence
  Description of Artificial Sequence: Synthetic oligonucleotide
uagucugcaacugucuccu

SEQ ID NO: 191671 - RNA, 19 nt, Artificial Sequence
  Description of Artificial Sequence: Synthetic oligonucleotide
ucucaacuccaucucaauu

SEQ ID NO: 191672 - RNA, 19 nt, Artificial Sequence
  Description of Artificial Sequence: Synthetic oligonucleotide
uugguagcuugaugcagcc

SEQ ID NO: 191673 - RNA, 19 nt, Artificial Sequence
  Description of Artificial Sequence: Synthetic oligonucleotide
agauucagguuccggucag

SEQ ID NO: 191674 - RNA, 19 nt, Artificial Sequence
  Description of Artificial Sequence: Synthetic oligonucleotide
guuccauaagcugagcuga

SEQ ID NO: 191675 - RNA, 19 nt, Artificial Sequence
  Description of Artificial Sequence: Synthetic oligonucleotide
cacucauaggggcugcuag

SEQ ID NO: 191676 - RNA, 19 nt, Artificial Sequence
  Description of Artificial Sequence: Synthetic oligonucleotide
gaacgguagcuccgggacg

SEQ ID NO: 191677 - RNA, 19 nt, Artificial Sequence
  Description of Artificial Sequence: Synthetic oligonucleotide
cuuuaaucaaggggugaag

SEQ ID NO: 191678 - RNA, 19 nt, Artificial Sequence
  Description of Artificial Sequence: Synthetic oligonucleotide
ugugucggauaccugugau

SEQ ID NO: 191679 - RNA, 19 nt, Artificial Sequence
  Description of Artificial Sequence: Synthetic oligonucleotide
gaacuggcggaugucacug

SEQ ID NO: 191680 - RNA, 19 nt, Artificial Sequence
  Description of Artificial Sequence: Synthetic oligonucleotide
gagugauaucuacuacaug

SEQ ID NO: 191681 - RNA, 19 nt, Artificial Sequence
  Description of Artificial Sequence: Synthetic oligonucleotide
uacuuuaaucaagggguga

SEQ ID NO: 191682 - RNA, 19 nt, Artificial Sequence
  Description of Artificial Sequence: Synthetic oligonucleotide
aucgugcugaugaggaugg

SEQ ID NO: 191683 - RNA, 19 nt, Artificial Sequence
  Description of Artificial Sequence: Synthetic oligonucleotide
agcugaugggcucuuggca

SEQ ID NO: 191684 - RNA, 19 nt, Artificial Sequence
  Description of Artificial Sequence: Synthetic oligonucleotide
cagcuaugagcucaccgcc

SEQ ID NO: 191685 - RNA, 19 nt, Artificial Sequence
  Description of Artificial Sequence: Synthetic oligonucleotide
ucccuuaaucuugagugac

SEQ ID NO: 191686 - RNA, 19 nt, Artificial Sequence
  Description of Artificial Sequence: Synthetic oligonucleotide
guagacugugucaucuugc

SEQ ID NO: 191687 - RNA, 19 nt, Artificial Sequence
  Description of Artificial Sequence: Synthetic oligonucleotide
cugguagucugcaacuguc

SEQ ID NO: 191688 - RNA, 19 nt, Artificial Sequence
  Description of Artificial Sequence: Synthetic oligonucleotide
uaucuacuacaugggugcg

SEQ ID NO: 191689 - RNA, 19 nt, Artificial Sequence
  Description of Artificial Sequence: Synthetic oligonucleotide
acuuuaaucaaggggugaa

SEQ ID NO: 191690 - RNA, 19 nt, Artificial Sequence
  Description of Artificial Sequence: Synthetic oligonucleotide
gaucucugcacgcagggcu

SEQ ID NO: 191691 - RNA, 19 nt, Artificial Sequence
  Description of Artificial Sequence: Synthetic oligonucleotide
ccagcuaugagcucaccgc

SEQ ID NO: 191692 - RNA, 19 nt, Artificial Sequence
  Description of Artificial Sequence: Synthetic oligonucleotide
cuuaguggaggggugucag

SEQ ID NO: 191693 - RNA, 19 nt, Artificial Sequence
  Description of Artificial Sequence: Synthetic oligonucleotide
gagaucucgcauccucacc

SEQ ID NO: 191694 - RNA, 19 nt, Artificial Sequence
  Description of Artificial Sequence: Synthetic oligonucleotide
gugccgguuagccugggcc

SEQ ID NO: 191695 - RNA, 19 nt, Artificial Sequence
  Description of Artificial Sequence: Synthetic oligonucleotide
cuuuaggcgggcguucugc

SEQ ID NO: 191696 - RNA, 19 nt, Artificial Sequence
  Description of Artificial Sequence: Synthetic oligonucleotide
caucgugcugaugaggaug

SEQ ID NO: 191697 - RNA, 19 nt, Artificial Sequence
  Description of Artificial Sequence: Synthetic oligonucleotide
cucgagugauaucuacuac

SEQ ID NO: 191698 - RNA, 19 nt, Artificial Sequence
  Description of Artificial Sequence: Synthetic oligonucleotide
ccucacucaauccuuagug

SEQ ID NO: 191699 - RNA, 19 nt, Artificial Sequence
  Description of Artificial Sequence: Synthetic oligonucleotide
agaacagcuaccacccaug

SEQ ID NO: 191700 - RNA, 19 nt, Artificial Sequence
  Description of Artificial Sequence: Synthetic oligonucleotide
acucauaggggcugcuaga

SEQ ID NO: 191701 - RNA, 19 nt, Artificial Sequence
  Description of Artificial Sequence: Synthetic oligonucleotide
cacacgucucccucaauuc

SEQ ID NO: 191702 - RNA, 19 nt, Artificial Sequence
  Description of Artificial Sequence: Synthetic oligonucleotide
ucucgaucuucaagcuuca

SEQ ID NO: 191703 - RNA, 19 nt, Artificial Sequence
  Description of Artificial Sequence: Synthetic oligonucleotide
gaguccucggguuguucag

SEQ ID NO: 191704 - RNA, 19 nt, Artificial Sequence
  Description of Artificial Sequence: Synthetic oligonucleotide
ucccgguugacauccugca

SEQ ID NO: 191705 - RNA, 19 nt, Artificial Sequence
  Description of Artificial Sequence: Synthetic oligonucleotide
uuaguggaggggugucagc

SEQ ID NO: 191706 - RNA, 19 nt, Artificial Sequence
  Description of Artificial Sequence: Synthetic oligonucleotide
uaaucuugagugacuucuu

SEQ ID NO: 191707 - RNA, 19 nt, Artificial Sequence
  Description of Artificial Sequence: Synthetic oligonucleotide
gucucggcaaacuugauuu

SEQ ID NO: 191708 - RNA, 19 nt, Artificial Sequence
  Description of Artificial Sequence: Synthetic oligonucleotide
uuuaggcgggcguucugcu

SEQ ID NO: 191709 - RNA, 19 nt, Artificial Sequence
  Description of Artificial Sequence: Synthetic oligonucleotide
caauaagcugggcggcugc

SEQ ID NO: 191710 - RNA, 19 nt, Artificial Sequence
  Description of Artificial Sequence: Synthetic oligonucleotide
ucucguucauugcuuccaa

SEQ ID NO: 191711 - RNA, 19 nt, Artificial Sequence
  Description of Artificial Sequence: Synthetic oligonucleotide
uugcgauacaaugccccag

SEQ ID NO: 191712 - RNA, 19 nt, Artificial Sequence
  Description of Artificial Sequence: Synthetic oligonucleotide
ucaacuggaggaggcuugc

SEQ ID NO: 191713 - RNA, 19 nt, Artificial Sequence
  Description of Artificial Sequence: Synthetic oligonucleotide
ggaacgguagcuccgggac

SEQ ID NO: 191714 - RNA, 19 nt, Artificial Sequence
  Description of Artificial Sequence: Synthetic oligonucleotide
aacuggcgguacuucuuga

SEQ ID NO: 191715 - RNA, 19 nt, Artificial Sequence
  Description of Artificial Sequence: Synthetic oligonucleotide
acuuugucaaugcgcucgu

SEQ ID NO: 191716 - RNA, 19 nt, Artificial Sequence
  Description of Artificial Sequence: Synthetic oligonucleotide
gagcucaccgcccgggccc

SEQ ID NO: 191717 - RNA, 19 nt, Artificial Sequence
  Description of Artificial Sequence: Synthetic oligonucleotide
ucgauggugcccucugccu

SEQ ID NO: 191718 - RNA, 19 nt, Artificial Sequence
  Description of Artificial Sequence: Synthetic oligonucleotide
ucgggcaccggccaucguc

SEQ ID NO: 191719 - RNA, 19 nt, Artificial Sequence
  Description of Artificial Sequence: Synthetic oligonucleotide
ugccgguuagccugggcca

SEQ ID NO: 191720 - RNA, 19 nt, Artificial Sequence
  Description of Artificial Sequence: Synthetic oligonucleotide
agcuccgggacgcugaguu

SEQ ID NO: 191721 - RNA, 19 nt, Artificial Sequence
  Description of Artificial Sequence: Synthetic oligonucleotide
uuccguuacucgggcaccg

SEQ ID NO: 191722 - RNA, 19 nt, Artificial Sequence
  Description of Artificial Sequence: Synthetic oligonucleotide
ucacgugcauucuccugca

SEQ ID NO: 191723 - RNA, 19 nt, Artificial Sequence
  Description of Artificial Sequence: Synthetic oligonucleotide
uccauaagcugagcugaug

SEQ ID NO: 191724 - RNA, 19 nt, Artificial Sequence
  Description of Artificial Sequence: Synthetic oligonucleotide
accucacucaauccuuagu

SEQ ID NO: 191725 - RNA, 19 nt, Artificial Sequence
  Description of Artificial Sequence: Synthetic oligonucleotide
acaaugccccagcuaugag

SEQ ID NO: 191726 - RNA, 19 nt, Artificial Sequence
  Description of Artificial Sequence: Synthetic oligonucleotide
acgaugucgcuguccuagg

SEQ ID NO: 191727 - RNA, 19 nt, Artificial Sequence
  Description of Artificial Sequence: Synthetic oligonucleotide
ggcgguacuucuugauugg

SEQ ID NO: 191728 - RNA, 19 nt, Artificial Sequence
  Description of Artificial Sequence: Synthetic oligonucleotide
caacuggcgguacuucuug

SEQ ID NO: 191729 - RNA, 19 nt, Artificial Sequence
  Description of Artificial Sequence: Synthetic oligonucleotide
uggcucgagugauaucuac

SEQ ID NO: 191730 - RNA, 19 nt, Artificial Sequence
  Description of Artificial Sequence: Synthetic oligonucleotide
aucucguucauugcuucca

SEQ ID NO: 191731 - RNA, 19 nt, Artificial Sequence
  Description of Artificial Sequence: Synthetic oligonucleotide
cucgcauccucaccagggc

SEQ ID NO: 191732 - RNA, 19 nt, Artificial Sequence
  Description of Artificial Sequence: Synthetic oligonucleotide
cacgucucccucaauucuc

SEQ ID NO: 191733 - RNA, 19 nt, Artificial Sequence
  Description of Artificial Sequence: Synthetic oligonucleotide
auugugcgcuuggacuggc

SEQ ID NO: 191734 - RNA, 19 nt, Artificial Sequence
  Description of Artificial Sequence: Synthetic oligonucleotide
uccgggacgcugaguuacg

SEQ ID NO: 191735 - RNA, 19 nt, Artificial Sequence
  Description of Artificial Sequence: Synthetic oligonucleotide
ccgaaguucaacuggagga

SEQ ID NO: 191736 - RNA, 19 nt, Artificial Sequence
  Description of Artificial Sequence: Synthetic oligonucleotide
ggauaccugugauccaaag

SEQ ID NO: 191737 - RNA, 19 nt, Artificial Sequence
  Description of Artificial Sequence: Synthetic oligonucleotide
acacagucguggucuccac

SEQ ID NO: 191738 - RNA, 19 nt, Artificial Sequence
  Description of Artificial Sequence: Synthetic oligonucleotide
cuugcgauacaaugcccca

SEQ ID NO: 191739 - RNA, 19 nt, Artificial Sequence
  Description of Artificial Sequence: Synthetic oligonucleotide
ugggaacgguagcuccggg

SEQ ID NO: 191740 - RNA, 19 nt, Artificial Sequence
  Description of Artificial Sequence: Synthetic oligonucleotide
gugugcggucaacuggcgg

SEQ ID NO: 191741 - RNA, 19 nt, Artificial Sequence
  Description of Artificial Sequence: Synthetic oligonucleotide
cagucgagucugaacuuug

SEQ ID NO: 191742 - RNA, 19 nt, Artificial Sequence
  Description of Artificial Sequence: Synthetic oligonucleotide
cacgcucauacaguccagg

SEQ ID NO: 191743 - RNA, 19 nt, Artificial Sequence
  Description of Artificial Sequence: Synthetic oligonucleotide
caugcuggagcugagauau

SEQ ID NO: 191744 - RNA, 19 nt, Artificial Sequence
  Description of Artificial Sequence: Synthetic oligonucleotide
uuccacccgcuucugggcu

SEQ ID NO: 191745 - RNA, 19 nt, Artificial Sequence
  Description of Artificial Sequence: Synthetic oligonucleotide
guuacucgggcaccggcca

SEQ ID NO: 191746 - RNA, 19 nt, Artificial Sequence
  Description of Artificial Sequence: Synthetic oligonucleotide
uuacggucuccuugaggac

SEQ ID NO: 191747 - RNA, 19 nt, Artificial Sequence
  Description of Artificial Sequence: Synthetic oligonucleotide
gucgagucugaacuuuguc

SEQ ID NO: 191748 - RNA, 19 nt, Artificial Sequence
  Description of Artificial Sequence: Synthetic oligonucleotide
ggccgaaggaagcugucag

SEQ ID NO: 191749 - RNA, 19 nt, Artificial Sequence
  Description of Artificial Sequence: Synthetic oligonucleotide
acuucuugauugguuugcu

SEQ ID NO: 191750 - RNA, 19 nt, Artificial Sequence
  Description of Artificial Sequence: Synthetic oligonucleotide
ugcaucguacucgcccucc

SEQ ID NO: 191751 - RNA, 19 nt, Artificial Sequence
  Description of Artificial Sequence: Synthetic oligonucleotide
agugugucggauaccugug

SEQ ID NO: 191752 - RNA, 19 nt, Artificial Sequence
  Description of Artificial Sequence: Synthetic oligonucleotide
cugagucuccuccagucga

SEQ ID NO: 191753 - RNA, 19 nt, Artificial Sequence
  Description of Artificial Sequence: Synthetic oligonucleotide
cccgaaguucaacuggagg

SEQ ID NO: 191754 - RNA, 19 nt, Artificial Sequence
  Description of Artificial Sequence: Synthetic oligonucleotide
gcuagaggggcucccguag

SEQ ID NO: 191755 - RNA, 19 nt, Artificial Sequence
  Description of Artificial Sequence: Synthetic oligonucleotide
cuccacgcucauacagucc

SEQ ID NO: 191756 - RNA, 19 nt, Artificial Sequence
  Description of Artificial Sequence: Synthetic oligonucleotide
cacagucguggucuccacc

SEQ ID NO: 191757 - RNA, 19 nt, Artificial Sequence
  Description of Artificial Sequence: Synthetic oligonucleotide
cuaugagcucaccgcccgg

SEQ ID NO: 191758 - RNA, 19 nt, Artificial Sequence
  Description of Artificial Sequence: Synthetic oligonucleotide
ucugcucgcuugcuuugaa

SEQ ID NO: 191759 - RNA, 19 nt, Artificial Sequence
  Description of Artificial Sequence: Synthetic oligonucleotide
gaguuacggucuccuugag

SEQ ID NO: 191760 - RNA, 19 nt, Artificial Sequence
  Description of Artificial Sequence: Synthetic oligonucleotide
gggacgcugaguuacgguc

SEQ ID NO: 191761 - RNA, 19 nt, Artificial Sequence
  Description of Artificial Sequence: Synthetic oligonucleotide
gaugaggauggugcaugac

SEQ ID NO: 191762 - RNA, 19 nt, Artificial Sequence
  Description of Artificial Sequence: Synthetic oligonucleotide
ugccgggaucccaggagca

SEQ ID NO: 191763 - RNA, 19 nt, Artificial Sequence
  Description of Artificial Sequence: Synthetic oligonucleotide
gacgcugaguuacggucuc

SEQ ID NO: 191764 - RNA, 19 nt, Artificial Sequence
  Description of Artificial Sequence: Synthetic oligonucleotide
ucguggucuccaccuggcc

SEQ ID NO: 191765 - RNA, 19 nt, Artificial Sequence
  Description of Artificial Sequence: Synthetic oligonucleotide
cucccuuaaucuugaguga

SEQ ID NO: 191766 - RNA, 19 nt, Artificial Sequence
  Description of Artificial Sequence: Synthetic oligonucleotide
ccuugauaacugucucucg

SEQ ID NO: 191767 - RNA, 19 nt, Artificial Sequence
  Description of Artificial Sequence: Synthetic oligonucleotide
accgcccgggcccucgugg

SEQ ID NO: 191768 - RNA, 19 nt, Artificial Sequence
  Description of Artificial Sequence: Synthetic oligonucleotide
cuccgggacgcugaguuac

SEQ ID NO: 191769 - RNA, 19 nt, Artificial Sequence
  Description of Artificial Sequence: Synthetic oligonucleotide
uggcaugagccuuggucuc

SEQ ID NO: 191770 - RNA, 19 nt, Artificial Sequence
  Description of Artificial Sequence: Synthetic oligonucleotide
ugugccgguuagccugggc

SEQ ID NO: 191771 - RNA, 19 nt, Artificial Sequence
  Description of Artificial Sequence: Synthetic oligonucleotide
gcagucgaggagugugucg

SEQ ID NO: 191772 - RNA, 19 nt, Artificial Sequence
  Description of Artificial Sequence: Synthetic oligonucleotide
agcaccagacgaugucgcu

SEQ ID NO: 191773 - RNA, 19 nt, Artificial Sequence
  Description of Artificial Sequence: Synthetic oligonucleotide
caaugcgcucgucugcauc

SEQ ID NO: 191774 - RNA, 19 nt, Artificial Sequence
  Description of Artificial Sequence: Synthetic oligonucleotide
gaaggagugcuuaggagau

SEQ ID NO: 191775 - RNA, 19 nt, Artificial Sequence
  Description of Artificial Sequence: Synthetic oligonucleotide
cccagcuaugagcucaccg

SEQ ID NO: 191776 - RNA, 19 nt, Artificial Sequence
  Description of Artificial Sequence: Synthetic oligonucleotide
ucgaggagugugucggaua

SEQ ID NO: 191777 - RNA, 19 nt, Artificial Sequence
  Description of Artificial Sequence: Synthetic oligonucleotide
agcucgucgauggugcccu

SEQ ID NO: 191778 - RNA, 19 nt, Artificial Sequence
  Description of Artificial Sequence: Synthetic oligonucleotide
uccagucgagucugaacuu

SEQ ID NO: 191779 - RNA, 19 nt, Artificial Sequence
  Description of Artificial Sequence: Synthetic oligonucleotide
ugaggggcucacguugaca

SEQ ID NO: 191780 - RNA, 19 nt, Artificial Sequence
  Description of Artificial Sequence: Synthetic oligonucleotide
ugacuggcgcagacacuca

SEQ ID NO: 191781 - RNA, 19 nt, Artificial Sequence
  Description of Artificial Sequence: Synthetic oligonucleotide
gugauccaaaggccagcgc

SEQ ID NO: 191782 - RNA, 19 nt, Artificial Sequence
  Description of Artificial Sequence: Synthetic oligonucleotide
gggacggaaagcuuugcaa

SEQ ID NO: 191783 - RNA, 19 nt, Artificial Sequence
  Description of Artificial Sequence: Synthetic oligonucleotide
auacaguccagggcacucu

SEQ ID NO: 191784 - RNA, 19 nt, Artificial Sequence
  Description of Artificial Sequence: Synthetic oligonucleotide
uuaggcgggcguucugcuc

SEQ ID NO: 191785 - RNA, 19 nt, Artificial Sequence
  Description of Artificial Sequence: Synthetic oligonucleotide
uccguuacucgggcaccgg

SEQ ID NO: 191786 - RNA, 19 nt, Artificial Sequence
  Description of Artificial Sequence: Synthetic oligonucleotide
gucaaugcgcucgucugca

SEQ ID NO: 191787 - RNA, 19 nt, Artificial Sequence
  Description of Artificial Sequence: Synthetic oligonucleotide
guagcuccgggacgcugag

SEQ ID NO: 191788 - RNA, 19 nt, Artificial Sequence
  Description of Artificial Sequence: Synthetic oligonucleotide
gucaagugcuuccugcagu

SEQ ID NO: 191789 - RNA, 19 nt, Artificial Sequence
  Description of Artificial Sequence: Synthetic oligonucleotide
gucuugcgauacaaugccc

SEQ ID NO: 191790 - RNA, 19 nt, Artificial Sequence
  Description of Artificial Sequence: Synthetic oligonucleotide
auccuuaguggaggggugu

SEQ ID NO: 191791 - RNA, 19 nt, Artificial Sequence
  Description of Artificial Sequence: Synthetic oligonucleotide
ucggguuguucagcaaggu

SEQ ID NO: 191792 - RNA, 19 nt, Artificial Sequence
  Description of Artificial Sequence: Synthetic oligonucleotide
ggaggagaagggcaauauc

SEQ ID NO: 191793 - RNA, 19 nt, Artificial Sequence
  Description of Artificial Sequence: Synthetic oligonucleotide
gggagaccucacucaaucc

SEQ ID NO: 191794 - RNA, 19 nt, Artificial Sequence
  Description of Artificial Sequence: Synthetic oligonucleotide
auacaaugccccagcuaug

SEQ ID NO: 191795 - RNA, 19 nt, Artificial Sequence
  Description of Artificial Sequence: Synthetic oligonucleotide
gacgaggguagcaaugccu

SEQ ID NO: 191796 - RNA, 19 nt, Artificial Sequence
  Description of Artificial Sequence: Synthetic oligonucleotide
agggcguccuuuaggcggg

SEQ ID NO: 191797 - RNA, 19 nt, Artificial Sequence
  Description of Artificial Sequence: Synthetic oligonucleotide
ugcagucgaggaguguguc

SEQ ID NO: 191798 - RNA, 19 nt, Artificial Sequence
  Description of Artificial Sequence: Synthetic oligonucleotide
gaacagcuaccacccaugu

SEQ ID NO: 191799 - RNA, 19 nt, Artificial Sequence
  Description of Artificial Sequence: Synthetic oligonucleotide
ugguagcuugaugcagccc

SEQ ID NO: 191800 - RNA, 19 nt, Artificial Sequence
  Description of Artificial Sequence: Synthetic oligonucleotide
gcucgagugauaucuacua

SEQ ID NO: 191801 - RNA, 19 nt, Artificial Sequence
  Description of Artificial Sequence: Synthetic oligonucleotide
ccguagaucugcucgcuug

SEQ ID NO: 191802 - RNA, 19 nt, Artificial Sequence
  Description of Artificial Sequence: Synthetic oligonucleotide
gguuguucagcaaggugga

SEQ ID NO: 191803 - RNA, 19 nt, Artificial Sequence
  Description of Artificial Sequence: Synthetic oligonucleotide
ggugcuuagcugguucagc

SEQ ID NO: 191804 - RNA, 19 nt, Artificial Sequence
  Description of Artificial Sequence: Synthetic oligonucleotide
agucgagucugaacuuugu

SEQ ID NO: 191805 - RNA, 19 nt, Artificial Sequence
  Description of Artificial Sequence: Synthetic oligonucleotide
gugugucggauaccuguga

SEQ ID NO: 191806 - RNA, 19 nt, Artificial Sequence
  Description of Artificial Sequence: Synthetic oligonucleotide
accagacgaugucgcuguc

SEQ ID NO: 191807 - RNA, 19 nt, Artificial Sequence
  Description of Artificial Sequence: Synthetic oligonucleotide
ggagaagggcaauaucugu

SEQ ID NO: 191808 - RNA, 19 nt, Artificial Sequence
  Description of Artificial Sequence: Synthetic oligonucleotide
agcgcugccgggaucccag

SEQ ID NO: 191809 - RNA, 19 nt, Artificial Sequence
  Description of Artificial Sequence: Synthetic oligonucleotide
gaggagugugucggauacc

SEQ ID NO: 191810 - RNA, 19 nt, Artificial Sequence
  Description of Artificial Sequence: Synthetic oligonucleotide
ccugcagucgaggagugug

SEQ ID NO: 191811 - RNA, 19 nt, Artificial Sequence
  Description of Artificial Sequence: Synthetic oligonucleotide
gugucacucagggaccuga

SEQ ID NO: 191812 - RNA, 19 nt, Artificial Sequence
  Description of Artificial Sequence: Synthetic oligonucleotide
uuacucgggcaccggccau

SEQ ID NO: 191813 - RNA, 19 nt, Artificial Sequence
  Description of Artificial Sequence: Synthetic oligonucleotide
gucguggucuccaccuggc

SEQ ID NO: 191814 - RNA, 19 nt, Artificial Sequence
  Description of Artificial Sequence: Synthetic oligonucleotide
cgaaguucaacuggaggag

SEQ ID NO: 191815 - RNA, 19 nt, Artificial Sequence
  Description of Artificial Sequence: Synthetic oligonucleotide
cuguccuaggccugcugca

SEQ ID NO: 191816 - RNA, 19 nt, Artificial Sequence
  Description of Artificial Sequence: Synthetic oligonucleotide
caacuggcuggucuugcga

SEQ ID NO: 191817 - RNA, 19 nt, Artificial Sequence
  Description of Artificial Sequence: Synthetic oligonucleotide
caggacacagucguggucu

SEQ ID NO: 191818 - RNA, 19 nt, Artificial Sequence
  Description of Artificial Sequence: Synthetic oligonucleotide
gcgcagacacucauagggg

SEQ ID NO: 191819 - RNA, 19 nt, Artificial Sequence
  Description of Artificial Sequence: Synthetic oligonucleotide
ucaaugcgcucgucugcau

SEQ ID NO: 191820 - RNA, 19 nt, Artificial Sequence
  Description of Artificial Sequence: Synthetic oligonucleotide
augaggcgacugugaagcu

SEQ ID NO: 191821 - RNA, 19 nt, Artificial Sequence
  Description of Artificial Sequence: Synthetic oligonucleotide
caugagccuuggucucggc

SEQ ID NO: 191822 - RNA, 19 nt, Artificial Sequence
  Description of Artificial Sequence: Synthetic oligonucleotide
cgaggagugugucggauac

SEQ ID NO: 191823 - RNA, 19 nt, Artificial Sequence
  Description of Artificial Sequence: Synthetic oligonucleotide
cuagaggggcucccguaga

SEQ ID NO: 191824 - RNA, 19 nt, Artificial Sequence
  Description of Artificial Sequence: Synthetic oligonucleotide
ggaugucacugcaugaugu

SEQ ID NO: 191825 - RNA, 19 nt, Artificial Sequence
  Description of Artificial Sequence: Synthetic oligonucleotide
aggggcucacguugacagu

SEQ ID NO: 191826 - RNA, 19 nt, Artificial Sequence
  Description of Artificial Sequence: Synthetic oligonucleotide
ugaaggccgucagcaggga

SEQ ID NO: 191827 - RNA, 19 nt, Artificial Sequence
  Description of Artificial Sequence: Synthetic oligonucleotide
cucacguugacaguuucau

SEQ ID NO: 191828 - RNA, 19 nt, Artificial Sequence
  Description of Artificial Sequence: Synthetic oligonucleotide
ggagugcauccauugucuc

SEQ ID NO: 191829 - RNA, 19 nt, Artificial Sequence
  Description of Artificial Sequence: Synthetic oligonucleotide
cguuacucgggcaccggcc

SEQ ID NO: 191830 - RNA, 19 nt, Artificial Sequence
  Description of Artificial Sequence: Synthetic oligonucleotide
uccucggguuguucagcaa

SEQ ID NO: 191831 - RNA, 19 nt, Artificial Sequence
  Description of Artificial Sequence: Synthetic oligonucleotide
cuugauugguuugcuggua

SEQ ID NO: 191832 - RNA, 19 nt, Artificial Sequence
  Description of Artificial Sequence: Synthetic oligonucleotide
gcuaccacccaugucaagu

SEQ ID NO: 191833 - RNA, 19 nt, Artificial Sequence
  Description of Artificial Sequence: Synthetic oligonucleotide
gucggauaccugugaucca

SEQ ID NO: 191834 - RNA, 19 nt, Artificial Sequence
  Description of Artificial Sequence: Synthetic oligonucleotide
guccuaggccugcugcaca

SEQ ID NO: 191835 - RNA, 19 nt, Artificial Sequence
  Description of Artificial Sequence: Synthetic oligonucleotide
cacccaugucaagugcuuc

SEQ ID NO: 191836 - RNA, 19 nt, Artificial Sequence
  Description of Artificial Sequence: Synthetic oligonucleotide
cugcucccguaguuccagc

SEQ ID NO: 191837 - RNA, 19 nt, Artificial Sequence
  Description of Artificial Sequence: Synthetic oligonucleotide
aucugcucgcuugcuuuga

SEQ ID NO: 191838 - RNA, 19 nt, Artificial Sequence
  Description of Artificial Sequence: Synthetic oligonucleotide
cucguucauugcuuccaaa

SEQ ID NO: 191839 - RNA, 19 nt, Artificial Sequence
  Description of Artificial Sequence: Synthetic oligonucleotide
uggucucggcaaacuugau

SEQ ID NO: 191840 - RNA, 19 nt, Artificial Sequence
  Description of Artificial Sequence: Synthetic oligonucleotide
gggaacgguagcuccggga

SEQ ID NO: 191841 - RNA, 19 nt, Artificial Sequence
  Description of Artificial Sequence: Synthetic oligonucleotide
cuuugucaaugcgcucguc

SEQ ID NO: 191842 - RNA, 19 nt, Artificial Sequence
  Description of Artificial Sequence: Synthetic oligonucleotide
ucggcacccagagcagcgu

SEQ ID NO: 191843 - RNA, 19 nt, Artificial Sequence
  Description of Artificial Sequence: Synthetic oligonucleotide
gagaccucacucaauccuu

SEQ ID NO: 191844 - RNA, 19 nt, Artificial Sequence
  Description of Artificial Sequence: Synthetic oligonucleotide
agaccucacucaauccuua

SEQ ID NO: 191845 - RNA, 19 nt, Artificial Sequence
  Description of Artificial Sequence: Synthetic oligonucleotide
acaugggugcgggugcuua

SEQ ID NO: 191846 - RNA, 19 nt, Artificial Sequence
  Description of Artificial Sequence: Synthetic oligonucleotide
ccagggcguccuuuaggcg

SEQ ID NO: 191847 - RNA, 19 nt, Artificial Sequence
  Description of Artificial Sequence: Synthetic oligonucleotide
ugcggucaacuggcgguac

SEQ ID NO: 191848 - RNA, 19 nt, Artificial Sequence
  Description of Artificial Sequence: Synthetic oligonucleotide
cauucgccuucggaucuuc

SEQ ID NO: 191849 - RNA, 19 nt, Artificial Sequence
  Description of Artificial Sequence: Synthetic oligonucleotide
gcuugaugcagccccgucu

SEQ ID NO: 191850 - RNA, 19 nt, Artificial Sequence
  Description of Artificial Sequence: Synthetic oligonucleotide
gguagcuccgggacgcuga

SEQ ID NO: 191851 - RNA, 19 nt, Artificial Sequence
  Description of Artificial Sequence: Synthetic oligonucleotide
gggugcuuagcugguucag

SEQ ID NO: 191852 - RNA, 19 nt, Artificial Sequence
  Description of Artificial Sequence: Synthetic oligonucleotide
ggugugcggucaacuggcg

SEQ ID NO: 191853 - RNA, 19 nt, Artificial Sequence
  Description of Artificial Sequence: Synthetic oligonucleotide
cugcaucguacucgcccuc

SEQ ID NO: 191854 - RNA, 19 nt, Artificial Sequence
  Description of Artificial Sequence: Synthetic oligonucleotide
cucaccgcccgggcccucg

SEQ ID NO: 191855 - RNA, 19 nt, Artificial Sequence
  Description of Artificial Sequence: Synthetic oligonucleotide
uccacccgcuucugggcuu

SEQ ID NO: 191856 - RNA, 19 nt, Artificial Sequence
  Description of Artificial Sequence: Synthetic oligonucleotide
ccagacgaugucgcugucc

SEQ ID NO: 191857 - RNA, 19 nt, Artificial Sequence
  Description of Artificial Sequence: Synthetic oligonucleotide
cauccucaccagggcgucc

SEQ ID NO: 191858 - RNA, 19 nt, Artificial Sequence
  Description of Artificial Sequence: Synthetic oligonucleotide
gggcuuccguuacucgggc

SEQ ID NO: 191859 - RNA, 19 nt, Artificial Sequence
  Description of Artificial Sequence: Synthetic oligonucleotide
cacgcagccgugccaccuc

SEQ ID NO: 191860 - RNA, 19 nt, Artificial Sequence
  Description of Artificial Sequence: Synthetic oligonucleotide
ggagugcuuaggagaugag

SEQ ID NO: 191861 - RNA, 19 nt, Artificial Sequence
  Description of Artificial Sequence: Synthetic oligonucleotide
cugcucgcuugcuuugaaa

SEQ ID NO: 191862 - RNA, 19 nt, Artificial Sequence
  Description of Artificial Sequence: Synthetic oligonucleotide
ugcgcucgucugcauccuu

SEQ ID NO: 191863 - RNA, 19 nt, Artificial Sequence
  Description of Artificial Sequence: Synthetic oligonucleotide
gucucacgugcauucuccu

SEQ ID NO: 191864 - RNA, 19 nt, Artificial Sequence
  Description of Artificial Sequence: Synthetic oligonucleotide
cacuuugcccauguagacu

SEQ ID NO: 191865 - RNA, 19 nt, Artificial Sequence
  Description of Artificial Sequence: Synthetic oligonucleotide
gacuggcgcagacacucau

SEQ ID NO: 191866 - RNA, 19 nt, Artificial Sequence
  Description of Artificial Sequence: Synthetic oligonucleotide
ccguuacucgggcaccggc

SEQ ID NO: 191867 - RNA, 19 nt, Artificial Sequence
  Description of Artificial Sequence: Synthetic oligonucleotide
gcgggugcuuagcugguuc

SEQ ID NO: 191868 - RNA, 19 nt, Artificial Sequence
  Description of Artificial Sequence: Synthetic oligonucleotide
ggucaacuggcgguacuuc

SEQ ID NO: 191869 - RNA, 19 nt, Artificial Sequence
  Description of Artificial Sequence: Synthetic oligonucleotide
uccggucagucagcauuuc

SEQ ID NO: 191870 - RNA, 19 nt, Artificial Sequence
  Description of Artificial Sequence: Synthetic oligonucleotide
cagcucugucucacgugca

SEQ ID NO: 191871 - RNA, 19 nt, Artificial Sequence
  Description of Artificial Sequence: Synthetic oligonucleotide
guucaacuggaggaggcuu

SEQ ID NO: 191872 - RNA, 19 nt, Artificial Sequence
  Description of Artificial Sequence: Synthetic oligonucleotide
cugagcugaugggcucuug

SEQ ID NO: 191873 - RNA, 19 nt, Artificial Sequence
  Description of Artificial Sequence: Synthetic oligonucleotide
cccgguugacauccugcag

SEQ ID NO: 191874 - RNA, 19 nt, Artificial Sequence
  Description of Artificial Sequence: Synthetic oligonucleotide
cuggcucgagugauaucua

SEQ ID NO: 191875 - RNA, 19 nt, Artificial Sequence
  Description of Artificial Sequence: Synthetic oligonucleotide
cugcagucgaggagugugu

SEQ ID NO: 191876 - RNA, 19 nt, Artificial Sequence
  Description of Artificial Sequence: Synthetic oligonucleotide
gcucagccgcacauuggcc

SEQ ID NO: 191877 - RNA, 19 nt, Artificial Sequence
  Description of Artificial Sequence: Synthetic oligonucleotide
ucgugcugaugaggauggu

SEQ ID NO: 191878 - RNA, 19 nt, Artificial Sequence
  Description of Artificial Sequence: Synthetic oligonucleotide
augugccgguuagccuggg

SEQ ID NO: 191879 - RNA, 19 nt, Artificial Sequence
  Description of Artificial Sequence: Synthetic oligonucleotide
ggacacagucguggucucc

SEQ ID NO: 191880 - RNA, 19 nt, Artificial Sequence
  Description of Artificial Sequence: Synthetic oligonucleotide
cgaugucgcuguccuaggc

SEQ ID NO: 191881 - RNA, 19 nt, Artificial Sequence
  Description of Artificial Sequence: Synthetic oligonucleotide
ggucucggcaaacuugauu

SEQ ID NO: 191882 - RNA, 19 nt, Artificial Sequence
  Description of Artificial Sequence: Synthetic oligonucleotide
gcucacguugacaguuuca

SEQ ID NO: 191883 - RNA, 19 nt, Artificial Sequence
  Description of Artificial Sequence: Synthetic oligonucleotide
augcgcucgucugcauccu

SEQ ID NO: 191884 - RNA, 19 nt, Artificial Sequence
  Description of Artificial Sequence: Synthetic oligonucleotide
ggcuggucuugcgauacaa

SEQ ID NO: 191885 - RNA, 19 nt, Artificial Sequence
  Description of Artificial Sequence: Synthetic oligonucleotide
gguuugucagcucccgguu

SEQ ID NO: 191886 - RNA, 19 nt, Artificial Sequence
  Description of Artificial Sequence: Synthetic oligonucleotide
cgugcauucuccugcagcu

SEQ ID NO: 191887 - RNA, 19 nt, Artificial Sequence
  Description of Artificial Sequence: Synthetic oligonucleotide
cuggcgguacuucuugauu

SEQ ID NO: 191888 - RNA, 19 nt, Artificial Sequence
  Description of Artificial Sequence: Synthetic oligonucleotide
ccggagccccucaauugug

SEQ ID NO: 191889 - RNA, 19 nt, Artificial Sequence
  Description of Artificial Sequence: Synthetic oligonucleotide
cgagugauaucuacuacau

SEQ ID NO: 191890 - RNA, 19 nt, Artificial Sequence
  Description of Artificial Sequence: Synthetic oligonucleotide
ccagagacgaggguagcaa

SEQ ID NO: 191891 - RNA, 19 nt, Artificial Sequence
  Description of Artificial Sequence: Synthetic oligonucleotide
ggcucgagugauaucuacu

SEQ ID NO: 191892 - RNA, 19 nt, Artificial Sequence
  Description of Artificial Sequence: Synthetic oligonucleotide
caaugccagagacgagggu

SEQ ID NO: 191893 - RNA, 19 nt, Artificial Sequence
  Description of Artificial Sequence: Synthetic oligonucleotide
ggcguccuuuaggcgggcg

SEQ ID NO: 191894 - RNA, 19 nt, Artificial Sequence
  Description of Artificial Sequence: Synthetic oligonucleotide
ggacgcugaguuacggucu

SEQ ID NO: 191895 - RNA, 19 nt, Artificial Sequence
  Description of Artificial Sequence: Synthetic oligonucleotide
ggcuuccguuacucgggca

SEQ ID NO: 191896 - RNA, 19 nt, Artificial Sequence
  Description of Artificial Sequence: Synthetic oligonucleotide
ggcucccguagaucugcuc

SEQ ID NO: 191897 - RNA, 19 nt, Artificial Sequence
  Description of Artificial Sequence: Synthetic oligonucleotide
ccgggacgcugaguuacgg

SEQ ID NO: 191898 - RNA, 19 nt, Artificial Sequence
  Description of Artificial Sequence: Synthetic oligonucleotide
agcucaccgcccgggcccu

SEQ ID NO: 191899 - RNA, 19 nt, Artificial Sequence
  Description of Artificial Sequence: Synthetic oligonucleotide
gucgaggagugugucggau

SEQ ID NO: 191900 - RNA, 19 nt, Artificial Sequence
  Description of Artificial Sequence: Synthetic oligonucleotide
gcgauacaaugccccagcu

SEQ ID NO: 191901 - RNA, 19 nt, Artificial Sequence
  Description of Artificial Sequence: Synthetic oligonucleotide
ccuuaaucuugagugacuu

SEQ ID NO: 191902 - RNA, 19 nt, Artificial Sequence
  Description of Artificial Sequence: Synthetic oligonucleotide
gugcggucaacuggcggua

SEQ ID NO: 191903 - RNA, 19 nt, Artificial Sequence
  Description of Artificial Sequence: Synthetic oligonucleotide
cucgaucuucaagcuucaa

SEQ ID NO: 191904 - RNA, 19 nt, Artificial Sequence
  Description of Artificial Sequence: Synthetic oligonucleotide
cgucucccucaauucucgc

SEQ ID NO: 191905 - RNA, 19 nt, Artificial Sequence
  Description of Artificial Sequence: Synthetic oligonucleotide
gccgguuagccugggccac

SEQ ID NO: 191906 - RNA, 19 nt, Artificial Sequence
  Description of Artificial Sequence: Synthetic oligonucleotide
gcggaugucacugcaugau

SEQ ID NO: 191907 - RNA, 19 nt, Artificial Sequence
  Description of Artificial Sequence: Synthetic oligonucleotide
gggccgcucugcaucguac

SEQ ID NO: 191908 - RNA, 19 nt, Artificial Sequence
  Description of Artificial Sequence: Synthetic oligonucleotide
cuacuacaugggugcgggu

SEQ ID NO: 191909 - RNA, 19 nt, Artificial Sequence
  Description of Artificial Sequence: Synthetic oligonucleotide
cuacaugggugcgggugcu

SEQ ID NO: 191910 - RNA, 19 nt, Artificial Sequence
  Description of Artificial Sequence: Synthetic oligonucleotide
ggcuggcucgagugauauc

SEQ ID NO: 191911 - RNA, 19 nt, Artificial Sequence
  Description of Artificial Sequence: Synthetic oligonucleotide
ggggcucacguugacaguu

SEQ ID NO: 191912 - RNA, 19 nt, Artificial Sequence
  Description of Artificial Sequence: Synthetic oligonucleotide
ccgggaucccaggagcauc

SEQ ID NO: 191913 - RNA, 19 nt, Artificial Sequence
  Description of Artificial Sequence: Synthetic oligonucleotide
cgauacaaugccccagcua

SEQ ID NO: 191914 - RNA, 19 nt, Artificial Sequence
  Description of Artificial Sequence: Synthetic oligonucleotide
ccgcccgggcccucguggg

SEQ ID NO: 191915 - RNA, 19 nt, Artificial Sequence
  Description of Artificial Sequence: Synthetic oligonucleotide
gcguccuuuaggcgggcgu

SEQ ID NO: 191916 - RNA, 19 nt, Artificial Sequence
  Description of Artificial Sequence: Synthetic oligonucleotide
ccccucaauugugcgcuug

SEQ ID NO: 191917 - RNA, 19 nt, Artificial Sequence
  Description of Artificial Sequence: Synthetic oligonucleotide
gggugggacggaaagcuuu

SEQ ID NO: 191918 - RNA, 19 nt, Artificial Sequence
  Description of Artificial Sequence: Synthetic oligonucleotide
guucagcaagguggaugcu

SEQ ID NO: 191919 - RNA, 19 nt, Artificial Sequence
  Description of Artificial Sequence: Synthetic oligonucleotide
gcaucguacucgcccuccu

SEQ ID NO: 191920 - RNA, 19 nt, Artificial Sequence
  Description of Artificial Sequence: Synthetic oligonucleotide
gggcugcuagaggggcucc

SEQ ID NO: 191921 - RNA, 19 nt, Artificial Sequence
  Description of Artificial Sequence: Synthetic oligonucleotide
cgggugcuuagcugguuca

SEQ ID NO: 191922 - RNA, 19 nt, Artificial Sequence
  Description of Artificial Sequence: Synthetic oligonucleotide
cccacccugcaagaaggca

SEQ ID NO: 191923 - RNA, 19 nt, Artificial Sequence
  Description of Artificial Sequence: Synthetic oligonucleotide
ccgguuagccugggccacc

SEQ ID NO: 191924 - RNA, 19 nt, Artificial Sequence
  Description of Artificial Sequence: Synthetic oligonucleotide
cacccgcuucugggcuucc

SEQ ID NO: 191925 - RNA, 19 nt, Artificial Sequence
  Description of Artificial Sequence: Synthetic oligonucleotide
ccgugccaccuccacgcuc

SEQ ID NO: 191926 - RNA, 19 nt, Artificial Sequence
  Description of Artificial Sequence: Synthetic oligonucleotide
cccggagccccucaauugu

SEQ ID NO: 191927 - RNA, 19 nt, Artificial Sequence
  Description of Artificial Sequence: Synthetic oligonucleotide
cuucaccggccccgggccu

SEQ ID NO: 191928 - RNA, 19 nt, Artificial Sequence
  Description of Artificial Sequence: Synthetic oligonucleotide
caacuggaggaggcuugcu

SEQ ID NO: 191929 - RNA, 19 nt, Artificial Sequence
  Description of Artificial Sequence: Synthetic oligonucleotide
gcuggucuugcgauacaau

SEQ ID NO: 191930 - RNA, 19 nt, Artificial Sequence
  Description of Artificial Sequence: Synthetic oligonucleotide
gcggucaacuggcgguacu

SEQ ID NO: 191931 - RNA, 19 nt, Artificial Sequence
  Description of Artificial Sequence: Synthetic oligonucleotide
ggggccgcucugcaucgua

SEQ ID NO: 191932 - RNA, 19 nt, Artificial Sequence
  Description of Artificial Sequence: Synthetic oligonucleotide
cucggaggagaagggcaau

SEQ ID NO: 191933 - RNA, 19 nt, Artificial Sequence
  Description of Artificial Sequence: Synthetic oligonucleotide
gcgguacuucuugauuggu

SEQ ID NO: 191934 - RNA, 19 nt, Artificial Sequence
  Description of Artificial Sequence: Synthetic oligonucleotide
cggauaccugugauccaaa

SEQ ID NO: 191935 - RNA, 19 nt, Artificial Sequence
  Description of Artificial Sequence: Synthetic oligonucleotide
ccacccaugucaagugcuu

SEQ ID NO: 191936 - RNA, 19 nt, Artificial Sequence
  Description of Artificial Sequence: Synthetic oligonucleotide
gggcguccuuuaggcgggc

SEQ ID NO: 191937 - RNA, 19 nt, Artificial Sequence
  Description of Artificial Sequence: Synthetic oligonucleotide
gccgugccaccuccacgcu

SEQ ID NO: 191938 - RNA, 19 nt, Artificial Sequence
  Description of Artificial Sequence: Synthetic oligonucleotide
gccgggaucccaggagcau

SEQ ID NO: 191939 - RNA, 19 nt, Artificial Sequence
  Description of Artificial Sequence: Synthetic oligonucleotide
cucgggcaccggccaucgu

SEQ ID NO: 191940 - RNA, 19 nt, Artificial Sequence
  Description of Artificial Sequence: Synthetic oligonucleotide
gcauucgccuucggaucuu

SEQ ID NO: 191941 - RNA, 19 nt, Artificial Sequence
  Description of Artificial Sequence: Synthetic oligonucleotide
cccguagaucugcucgcuu

SEQ ID NO: 191942 - RNA, 19 nt, Artificial Sequence
  Description of Artificial Sequence: Synthetic oligonucleotide
cguccuuuaggcgggcguu

SEQ ID NO: 191943 - RNA, 19 nt, Artificial Sequence
  Description of Artificial Sequence: Synthetic oligonucleotide
cggucaacuggcgguacuu

SEQ ID NO: 191944 - RNA, 19 nt, Artificial Sequence
  Description of Artificial Sequence: Synthetic oligonucleotide
gccccucaauugugcgcuu

SEQ ID NO: 191945 - RNA, 19 nt, Artificial Sequence
  Description of Artificial Sequence: Synthetic oligonucleotide
aaaaugaccauccccauuc

SEQ ID NO: 191946 - RNA, 19 nt, Artificial Sequence
  Description of Artificial Sequence: Synthetic oligonucleotide
gagaauacaacccucgugg

SEQ ID NO: 191947 - RNA, 19 nt, Artificial Sequence
  Description of Artificial Sequence: Synthetic oligonucleotide
aauacaacccucguggacc

SEQ ID NO: 191948 - RNA, 19 nt, Artificial Sequence
  Description of Artificial Sequence: Synthetic oligonucleotide
acacuuauuuacuacaugg

SEQ ID NO: 191949 - RNA, 19 nt, Artificial Sequence
  Description of Artificial Sequence: Synthetic oligonucleotide
aaucaaaagggauagcgca

SEQ ID NO: 191950 - RNA, 19 nt, Artificial Sequence
  Description of Artificial Sequence: Synthetic oligonucleotide
ugggaaauacccuuuaggg

SEQ ID NO: 191951 - RNA, 19 nt, Artificial Sequence
  Description of Artificial Sequence: Synthetic oligonucleotide
uagauuuauauauauauau

SEQ ID NO: 191952 - RNA, 19 nt, Artificial Sequence
  Description of Artificial Sequence: Synthetic oligonucleotide
uuuacuacauggauguaag

SEQ ID NO: 191953 - RNA, 19 nt, Artificial Sequence
  Description of Artificial Sequence: Synthetic oligonucleotide
uuuagaaccguuagaagug

SEQ ID NO: 191954 - RNA, 19 nt, Artificial Sequence
  Description of Artificial Sequence: Synthetic oligonucleotide
uugggugaaaucaugacug

SEQ ID NO: 191955 - RNA, 19 nt, Artificial Sequence
  Description of Artificial Sequence: Synthetic oligonucleotide
uuaaacaucauuccccaca

SEQ ID NO: 191956 - RNA, 19 nt, Artificial Sequence
  Description of Artificial Sequence: Synthetic oligonucleotide
agugcuuuugugccgaacc

SEQ ID NO: 191957 - RNA, 19 nt, Artificial Sequence
  Description of Artificial Sequence: Synthetic oligonucleotide
uggagcuacauucuuagag

SEQ ID NO: 191958 - RNA, 19 nt, Artificial Sequence
  Description of Artificial Sequence: Synthetic oligonucleotide
uaacagaagauucuguuac

SEQ ID NO: 191959 - RNA, 19 nt, Artificial Sequence
  Description of Artificial Sequence: Synthetic oligonucleotide
uguguuuaaacaucauucc

SEQ ID NO: 191960 - RNA, 19 nt, Artificial Sequence
  Description of Artificial Sequence: Synthetic oligonucleotide
cuuauuuacuacauggaug

SEQ ID NO: 191961 - RNA, 19 nt, Artificial Sequence
  Description of Artificial Sequence: Synthetic oligonucleotide
uucauuuaaacaaagucuu

SEQ ID NO: 191962 - RNA, 19 nt, Artificial Sequence
  Description of Artificial Sequence: Synthetic oligonucleotide
uuccugauuaguuacacug

SEQ ID NO: 191963 - RNA, 19 nt, Artificial Sequence
  Description of Artificial Sequence: Synthetic oligonucleotide
caguauaucauccagugug

SEQ ID NO: 191964 - RNA, 19 nt, Artificial Sequence
  Description of Artificial Sequence: Synthetic oligonucleotide
cauaguaccagaagguucc

SEQ ID NO: 191965 - RNA, 19 nt, Artificial Sequence
  Description of Artificial Sequence: Synthetic oligonucleotide
aguuacacugacuagguca

SEQ ID NO: 191966 - RNA, 19 nt, Artificial Sequence
  Description of Artificial Sequence: Synthetic oligonucleotide
caggcuaaagaucaaagcc

SEQ ID NO: 191967 - RNA, 19 nt, Artificial Sequence
  Description of Artificial Sequence: Synthetic oligonucleotide
agauuaguggugcugcccc

SEQ ID NO: 191968 - RNA, 19 nt, Artificial Sequence
  Description of Artificial Sequence: Synthetic oligonucleotide
uuccugaugggaaauaccc

SEQ ID NO: 191969 - RNA, 19 nt, Artificial Sequence
  Description of Artificial Sequence: Synthetic oligonucleotide
aauaguguuucuggaaagg

SEQ ID NO: 191970 - RNA, 19 nt, Artificial Sequence
  Description of Artificial Sequence: Synthetic oligonucleotide
gaagcuguggaugucauag

SEQ ID NO: 191971 - RNA, 19 nt, Artificial Sequence
  Description of Artificial Sequence: Synthetic oligonucleotide
ucuugagguucuacgaugg

SEQ ID NO: 191972 - RNA, 19 nt, Artificial Sequence
  Description of Artificial Sequence: Synthetic oligonucleotide
uuugggugaaaucaugacu

SEQ ID NO: 191973 - RNA, 19 nt, Artificial Sequence
  Description of Artificial Sequence: Synthetic oligonucleotide
cauuggaacaaauuuugag

SEQ ID NO: 191974 - RNA, 19 nt, Artificial Sequence
  Description of Artificial Sequence: Synthetic oligonucleotide
ugugagacaggcuaaagau

SEQ ID NO: 191975 - RNA, 19 nt, Artificial Sequence
  Description of Artificial Sequence: Synthetic oligonucleotide
uuaucccucccuuuuaucc

SEQ ID NO: 191976 - RNA, 19 nt, Artificial Sequence
  Description of Artificial Sequence: Synthetic oligonucleotide
augggaaauacccuuuagg

SEQ ID NO: 191977 - RNA, 19 nt, Artificial Sequence
  Description of Artificial Sequence: Synthetic oligonucleotide
aacaucauuccccacacuu

SEQ ID NO: 191978 - RNA, 19 nt, Artificial Sequence
  Description of Artificial Sequence: Synthetic oligonucleotide
gacuaggucagauaccacc

SEQ ID NO: 191979 - RNA, 19 nt, Artificial Sequence
  Description of Artificial Sequence: Synthetic oligonucleotide
gauuuauauauauauauuu

SEQ ID NO: 191980 - RNA, 19 nt, Artificial Sequence
  Description of Artificial Sequence: Synthetic oligonucleotide
acuacauggauguaaggga

SEQ ID NO: 191981 - RNA, 19 nt, Artificial Sequence
  Description of Artificial Sequence: Synthetic oligonucleotide
ugucauaguaccagaaggu

SEQ ID NO: 191982 - RNA, 19 nt, Artificial Sequence
  Description of Artificial Sequence: Synthetic oligonucleotide
aagauuaguggugcugccc

SEQ ID NO: 191983 - RNA, 19 nt, Artificial Sequence
  Description of Artificial Sequence: Synthetic oligonucleotide
guaacuccagcucaggacc

SEQ ID NO: 191984 - RNA, 19 nt, Artificial Sequence
  Description of Artificial Sequence: Synthetic oligonucleotide
gagacaguauaucauccag

SEQ ID NO: 191985 - RNA, 19 nt, Artificial Sequence
  Description of Artificial Sequence: Synthetic oligonucleotide
gaaagauuaguggugcugc

SEQ ID NO: 191986 - RNA, 19 nt, Artificial Sequence
  Description of Artificial Sequence: Synthetic oligonucleotide
uguuugggugaaaucauga

SEQ ID NO: 191987 - RNA, 19 nt, Artificial Sequence
  Description of Artificial Sequence: Synthetic oligonucleotide
uuaguuacacugacuaggu

SEQ ID NO: 191988 - RNA, 19 nt, Artificial Sequence
  Description of Artificial Sequence: Synthetic oligonucleotide
aguuuguucaguucaauuu

SEQ ID NO: 191989 - RNA, 19 nt, Artificial Sequence
  Description of Artificial Sequence: Synthetic oligonucleotide
acccacauggcuccuacgc

SEQ ID NO: 191990 - RNA, 19 nt, Artificial Sequence
  Description of Artificial Sequence: Synthetic oligonucleotide
gauuaguuacacugacuag

SEQ ID NO: 191991 - RNA, 19 nt, Artificial Sequence
  Description of Artificial Sequence: Synthetic oligonucleotide
acuuauuuacuacauggau

SEQ ID NO: 191992 - RNA, 19 nt, Artificial Sequence
  Description of Artificial Sequence: Synthetic oligonucleotide
gaauucuugugagacaggc

SEQ ID NO: 191993 - RNA, 19 nt, Artificial Sequence
  Description of Artificial Sequence: Synthetic oligonucleotide
uguaacuccagcucaggac

SEQ ID NO: 191994 - RNA, 19 nt, Artificial Sequence
  Description of Artificial Sequence: Synthetic oligonucleotide
ugagguucuacgaugggaa

SEQ ID NO: 191995 - RNA, 19 nt, Artificial Sequence
  Description of Artificial Sequence: Synthetic oligonucleotide
ugaccuuggagcaucuacc

SEQ ID NO: 191996 - RNA, 19 nt, Artificial Sequence
  Description of Artificial Sequence: Synthetic oligonucleotide
uacuauuuguggaugcacu

SEQ ID NO: 191997 - RNA, 19 nt, Artificial Sequence
  Description of Artificial Sequence: Synthetic oligonucleotide
ucagggauuuguaacucca

SEQ ID NO: 191998 - RNA, 19 nt, Artificial Sequence
  Description of Artificial Sequence: Synthetic oligonucleotide
cauucuuagagucaggaaa

SEQ ID NO: 191999 - RNA, 19 nt, Artificial Sequence
  Description of Artificial Sequence: Synthetic oligonucleotide
uccuuaaguauaccuguug

SEQ ID NO: 192000 - RNA, 19 nt, Artificial Sequence
  Description of Artificial Sequence: Synthetic oligonucleotide
uuuagcuugaucucugguu

SEQ ID NO: 192001 - RNA, 19 nt, Artificial Sequence
  Description of Artificial Sequence: Synthetic oligonucleotide
cauacuuuagcuugaucuc

SEQ ID NO: 192002 - RNA, 19 nt, Artificial Sequence
  Description of Artificial Sequence: Synthetic oligonucleotide
acagucuucugaccggugg

SEQ ID NO: 192003 - RNA, 19 nt, Artificial Sequence
  Description of Artificial Sequence: Synthetic oligonucleotide
uaguucagggauuuguaac

SEQ ID NO: 192004 - RNA, 19 nt, Artificial Sequence
  Description of Artificial Sequence: Synthetic oligonucleotide
ugaaccuagggugagcagc

SEQ ID NO: 192005 - RNA, 19 nt, Artificial Sequence
  Description of Artificial Sequence: Synthetic oligonucleotide
auucuuagagucaggaaag

SEQ ID NO: 192006 - RNA, 19 nt, Artificial Sequence
  Description of Artificial Sequence: Synthetic oligonucleotide
uugguuaccaccagacuuc

SEQ ID NO: 192007 - RNA, 19 nt, Artificial Sequence
  Description of Artificial Sequence: Synthetic oligonucleotide
auacaacccucguggaccc

SEQ ID NO: 192008 - RNA, 19 nt, Artificial Sequence
  Description of Artificial Sequence: Synthetic oligonucleotide
accaaggugccccauaaca

SEQ ID NO: 192009 - RNA, 19 nt, Artificial Sequence
  Description of Artificial Sequence: Synthetic oligonucleotide
auuuauauauauauauuuu

SEQ ID NO: 192010 - RNA, 19 nt, Artificial Sequence
  Description of Artificial Sequence: Synthetic oligonucleotide
agaccuggccuauuucagc

SEQ ID NO: 192011 - RNA, 19 nt, Artificial Sequence
  Description of Artificial Sequence: Synthetic oligonucleotide
gggaaauacccuuuagggg

SEQ ID NO: 192012 - RNA, 19 nt, Artificial Sequence
  Description of Artificial Sequence: Synthetic oligonucleotide
agaucaaagccacacccca

SEQ ID NO: 192013 - RNA, 19 nt, Artificial Sequence
  Description of Artificial Sequence: Synthetic oligonucleotide
gaugggaaauacccuuuag

SEQ ID NO: 192014 - RNA, 19 nt, Artificial Sequence
  Description of Artificial Sequence: Synthetic oligonucleotide
uacauggauguaagggaag

SEQ ID NO: 192015 - RNA, 19 nt, Artificial Sequence
  Description of Artificial Sequence: Synthetic oligonucleotide
gacccugcagcauaaagga

SEQ ID NO: 192016 - RNA, 19 nt, Artificial Sequence
  Description of Artificial Sequence: Synthetic oligonucleotide
uuacuacauggauguaagg

SEQ ID NO: 192017 - RNA, 19 nt, Artificial Sequence
  Description of Artificial Sequence: Synthetic oligonucleotide
aaugaccauccccauucug

SEQ ID NO: 192018 - RNA, 19 nt, Artificial Sequence
  Description of Artificial Sequence: Synthetic oligonucleotide
uauaccuguugcugugggg

SEQ ID NO: 192019 - RNA, 19 nt, Artificial Sequence
  Description of Artificial Sequence: Synthetic oligonucleotide
augggucccaguuacauaa

SEQ ID NO: 192020 - RNA, 19 nt, Artificial Sequence
  Description of Artificial Sequence: Synthetic oligonucleotide
ugccucaggggccaaaaug

SEQ ID NO: 192021 - RNA, 19 nt, Artificial Sequence
  Description of Artificial Sequence: Synthetic oligonucleotide
uuaugagaugaguuuguuc

SEQ ID NO: 192022 - RNA, 19 nt, Artificial Sequence
  Description of Artificial Sequence: Synthetic oligonucleotide
gacaggcuaaagaucaaag

SEQ ID NO: 192023 - RNA, 19 nt, Artificial Sequence
  Description of Artificial Sequence: Synthetic oligonucleotide
aaaccaaggugccccauaa

SEQ ID NO: 192024 - RNA, 19 nt, Artificial Sequence
  Description of Artificial Sequence: Synthetic oligonucleotide
uccuuuaugagaugaguuu

SEQ ID NO: 192025 - RNA, 19 nt, Artificial Sequence
  Description of Artificial Sequence: Synthetic oligonucleotide
auaacuggcccacuugcca

SEQ ID NO: 192026 - RNA, 19 nt, Artificial Sequence
  Description of Artificial Sequence: Synthetic oligonucleotide
gagucaggaaagauuagug

SEQ ID NO: 192027 - RNA, 19 nt, Artificial Sequence
  Description of Artificial Sequence: Synthetic oligonucleotide
uuguuugggugaaaucaug

SEQ ID NO: 192028 - RNA, 19 nt, Artificial Sequence
  Description of Artificial Sequence: Synthetic oligonucleotide
uuuuaucccucccuuuuau

SEQ ID NO: 192029 - RNA, 19 nt, Artificial Sequence
  Description of Artificial Sequence: Synthetic oligonucleotide
uaccagaagguuccuuucc

SEQ ID NO: 192030 - RNA, 19 nt, Artificial Sequence
  Description of Artificial Sequence: Synthetic oligonucleotide
uuuugugccgaaccuugac

SEQ ID NO: 192031 - RNA, 19 nt, Artificial Sequence
  Description of Artificial Sequence: Synthetic oligonucleotide
aucaaaagggauagcgcac

SEQ ID NO: 192032 - RNA, 19 nt, Artificial Sequence
  Description of Artificial Sequence: Synthetic oligonucleotide
uguuccgauaacuggccca

SEQ ID NO: 192033 - RNA, 19 nt, Artificial Sequence
  Description of Artificial Sequence: Synthetic oligonucleotide
gaauacaacccucguggac

SEQ ID NO: 192034 - RNA, 19 nt, Artificial Sequence
  Description of Artificial Sequence: Synthetic oligonucleotide
cacacuaccaaucggucuc

SEQ ID NO: 192035 - RNA, 19 nt, Artificial Sequence
  Description of Artificial Sequence: Synthetic oligonucleotide
ugauuccugauuaguuaca

SEQ ID NO: 192036 - RNA, 19 nt, Artificial Sequence
  Description of Artificial Sequence: Synthetic oligonucleotide
uuagaaccguuagaagugc

SEQ ID NO: 192037 - RNA, 19 nt, Artificial Sequence
  Description of Artificial Sequence: Synthetic oligonucleotide
cauaaagauucauguagca

SEQ ID NO: 192038 - RNA, 19 nt, Artificial Sequence
  Description of Artificial Sequence: Synthetic oligonucleotide
aaaucaugacuguuucauu

SEQ ID NO: 192039 - RNA, 19 nt, Artificial Sequence
  Description of Artificial Sequence: Synthetic oligonucleotide
ucuacgaugggaacugcuu

SEQ ID NO: 192040 - RNA, 19 nt, Artificial Sequence
  Description of Artificial Sequence: Synthetic oligonucleotide
ucaguacuauuuguggaug

SEQ ID NO: 192041 - RNA, 19 nt, Artificial Sequence
  Description of Artificial Sequence: Synthetic oligonucleotide
agacugaccagaggaaagg

SEQ ID NO: 192042 - RNA, 19 nt, Artificial Sequence
  Description of Artificial Sequence: Synthetic oligonucleotide
gagcuacauucuuagaguc

SEQ ID NO: 192043 - RNA, 19 nt, Artificial Sequence
  Description of Artificial Sequence: Synthetic oligonucleotide
uggcugcauaaucuugggg

SEQ ID NO: 192044 - RNA, 19 nt, Artificial Sequence
  Description of Artificial Sequence: Synthetic oligonucleotide
gaccacucuucagagacag

SEQ ID NO: 192045 - RNA, 19 nt, Artificial Sequence
  Description of Artificial Sequence: Synthetic oligonucleotide
caggaaagauuaguggugc

SEQ ID NO: 192046 - RNA, 19 nt, Artificial Sequence
  Description of Artificial Sequence: Synthetic oligonucleotide
uccaguaggagcuguuuuc

SEQ ID NO: 192047 - RNA, 19 nt, Artificial Sequence
  Description of Artificial Sequence: Synthetic oligonucleotide
uggacccaaaauucauugc

SEQ ID NO: 192048 - RNA, 19 nt, Artificial Sequence
  Description of Artificial Sequence: Synthetic oligonucleotide
ucacacuaccaaucggucu

SEQ ID NO: 192049 - RNA, 19 nt, Artificial Sequence
  Description of Artificial Sequence: Synthetic oligonucleotide
ucuguuaccacaggacccu

SEQ ID NO: 192050 - RNA, 19 nt, Artificial Sequence
  Description of Artificial Sequence: Synthetic oligonucleotide
caguacuauuuguggaugc

SEQ ID NO: 192051 - RNA, 19 nt, Artificial Sequence
  Description of Artificial Sequence: Synthetic oligonucleotide
gccgcuugaaccuagggug

SEQ ID NO: 192052 - RNA, 19 nt, Artificial Sequence
  Description of Artificial Sequence: Synthetic oligonucleotide
cccaguuacauaaaauuug

SEQ ID NO: 192053 - RNA, 19 nt, Artificial Sequence
  Description of Artificial Sequence: Synthetic oligonucleotide
ccuuaaguauaccuguugc

SEQ ID NO: 192054 - RNA, 19 nt, Artificial Sequence
  Description of Artificial Sequence: Synthetic oligonucleotide
agauuuauauauauauauu

SEQ ID NO: 192055 - RNA, 19 nt, Artificial Sequence
  Description of Artificial Sequence: Synthetic oligonucleotide
gcugucaagagguaguuca

SEQ ID NO: 192056 - RNA, 19 nt, Artificial Sequence
  Description of Artificial Sequence: Synthetic oligonucleotide
aaaugaccauccccauucu

SEQ ID NO: 192057 - RNA, 19 nt, Artificial Sequence
  Description of Artificial Sequence: Synthetic oligonucleotide
ugaguagccacagucccac

SEQ ID NO: 192058 - RNA, 19 nt, Artificial Sequence
  Description of Artificial Sequence: Synthetic oligonucleotide
gcuacauucuuagagucag

SEQ ID NO: 192059 - RNA, 19 nt, Artificial Sequence
  Description of Artificial Sequence: Synthetic oligonucleotide
auagauuuauauauauaua

SEQ ID NO: 192060 - RNA, 19 nt, Artificial Sequence
  Description of Artificial Sequence: Synthetic oligonucleotide
cuacgaugggaacugcuug

SEQ ID NO: 192061 - RNA, 19 nt, Artificial Sequence
  Description of Artificial Sequence: Synthetic oligonucleotide
gagguggauucuucggaag

SEQ ID NO: 192062 - RNA, 19 nt, Artificial Sequence
  Description of Artificial Sequence: Synthetic oligonucleotide
uucuacgaugggaacugcu

SEQ ID NO: 192063 - RNA, 19 nt, Artificial Sequence
  Description of Artificial Sequence: Synthetic oligonucleotide
ggauaaaaggguccaaaga

SEQ ID NO: 192064 - RNA, 19 nt, Artificial Sequence
  Description of Artificial Sequence: Synthetic oligonucleotide
aguucacacuuauuuacua

SEQ ID NO: 192065 - RNA, 19 nt, Artificial Sequence
  Description of Artificial Sequence: Synthetic oligonucleotide
agcaugaccuuggagcauc

SEQ ID NO: 192066 - RNA, 19 nt, Artificial Sequence
  Description of Artificial Sequence: Synthetic oligonucleotide
agaauacaacccucgugga

SEQ ID NO: 192067 - RNA, 19 nt, Artificial Sequence
  Description of Artificial Sequence: Synthetic oligonucleotide
acaguauaucauccagugu

SEQ ID NO: 192068 - RNA, 19 nt, Artificial Sequence
  Description of Artificial Sequence: Synthetic oligonucleotide
gaaccuagggugagcagcc

SEQ ID NO: 192069 - RNA, 19 nt, Artificial Sequence
  Description of Artificial Sequence: Synthetic oligonucleotide
cuuugucauccccacugcc

SEQ ID NO: 192070 - RNA, 19 nt, Artificial Sequence
  Description of Artificial Sequence: Synthetic oligonucleotide
cacuuauuuacuacaugga

SEQ ID NO: 192071 - RNA, 19 nt, Artificial Sequence
  Description of Artificial Sequence: Synthetic oligonucleotide
uguggaugcacuccuccua

SEQ ID NO: 192072 - RNA, 19 nt, Artificial Sequence
  Description of Artificial Sequence: Synthetic oligonucleotide
agggauagcgcaccuuuca

SEQ ID NO: 192073 - RNA, 19 nt, Artificial Sequence
  Description of Artificial Sequence: Synthetic oligonucleotide
aagugcuuuugugccgaac

SEQ ID NO: 192074 - RNA, 19 nt, Artificial Sequence
  Description of Artificial Sequence: Synthetic oligonucleotide
ucuucugaccgguggcgcc

SEQ ID NO: 192075 - RNA, 19 nt, Artificial Sequence
  Description of Artificial Sequence: Synthetic oligonucleotide
uagcgcaccuuucauuuaa

SEQ ID NO: 192076 - RNA, 19 nt, Artificial Sequence
  Description of Artificial Sequence: Synthetic oligonucleotide
accauccccauucugcccu

SEQ ID NO: 192077 - RNA, 19 nt, Artificial Sequence
  Description of Artificial Sequence: Synthetic oligonucleotide
uucuugugagacaggcuaa

SEQ ID NO: 192078 - RNA, 19 nt, Artificial Sequence
  Description of Artificial Sequence: Synthetic oligonucleotide
gaccuggccuauuucagca

SEQ ID NO: 192079 - RNA, 19 nt, Artificial Sequence
  Description of Artificial Sequence: Synthetic oligonucleotide
caaaauucauugcugucaa

SEQ ID NO: 192080 - RNA, 19 nt, Artificial Sequence
  Description of Artificial Sequence: Synthetic oligonucleotide
uuuaucccucccuuuuauc

SEQ ID NO: 192081 - RNA, 19 nt, Artificial Sequence
  Description of Artificial Sequence: Synthetic oligonucleotide
ucuuagagucaggaaagau

SEQ ID NO: 192082 - RNA, 19 nt, Artificial Sequence
  Description of Artificial Sequence: Synthetic oligonucleotide
aguauaucauccaguguga

SEQ ID NO: 192083 - RNA, 19 nt, Artificial Sequence
  Description of Artificial Sequence: Synthetic oligonucleotide
acuaggucagauaccaccu

SEQ ID NO: 192084 - RNA, 19 nt, Artificial Sequence
  Description of Artificial Sequence: Synthetic oligonucleotide
cuacauucuuagagucagg

SEQ ID NO: 192085 - RNA, 19 nt, Artificial Sequence
  Description of Artificial Sequence: Synthetic oligonucleotide
cagaccuggccuauuucag

SEQ ID NO: 192086 - RNA, 19 nt, Artificial Sequence
  Description of Artificial Sequence: Synthetic oligonucleotide
gaaccuugaccuugcucug

SEQ ID NO: 192087 - RNA, 19 nt, Artificial Sequence
  Description of Artificial Sequence: Synthetic oligonucleotide
aaccguuagaagugcuuuu

SEQ ID NO: 192088 - RNA, 19 nt, Artificial Sequence
  Description of Artificial Sequence: Synthetic oligonucleotide
uacacugacuaggucagau

SEQ ID NO: 192089 - RNA, 19 nt, Artificial Sequence
  Description of Artificial Sequence: Synthetic oligonucleotide
aggagcuguuuucugcaug

SEQ ID NO: 192090 - RNA, 19 nt, Artificial Sequence
  Description of Artificial Sequence: Synthetic oligonucleotide
uuuaugagaugaguuuguu

SEQ ID NO: 192091 - RNA, 19 nt, Artificial Sequence
  Description of Artificial Sequence: Synthetic oligonucleotide
aagggauagcgcaccuuuc

SEQ ID NO: 192092 - RNA, 19 nt, Artificial Sequence
  Description of Artificial Sequence: Synthetic oligonucleotide
uugaaccuagggugagcag

SEQ ID NO: 192093 - RNA, 19 nt, Artificial Sequence
  Description of Artificial Sequence: Synthetic oligonucleotide
guaguucagggauuuguaa

SEQ ID NO: 192094 - RNA, 19 nt, Artificial Sequence
  Description of Artificial Sequence: Synthetic oligonucleotide
gguucuugagguucuacga

SEQ ID NO: 192095 - RNA, 19 nt, Artificial Sequence
  Description of Artificial Sequence: Synthetic oligonucleotide
accguuagaagugcuuuug

SEQ ID NO: 192096 - RNA, 19 nt, Artificial Sequence
  Description of Artificial Sequence: Synthetic oligonucleotide
uagaaccguuagaagugcu

SEQ ID NO: 192097 - RNA, 19 nt, Artificial Sequence
  Description of Artificial Sequence: Synthetic oligonucleotide
auggguuccauggauccug

SEQ ID NO: 192098 - RNA, 19 nt, Artificial Sequence
  Description of Artificial Sequence: Synthetic oligonucleotide
uauuugggaugugaucuuc

SEQ ID NO: 192099 - RNA, 19 nt, Artificial Sequence
  Description of Artificial Sequence: Synthetic oligonucleotide
gaugcacuccuccuaauau

SEQ ID NO: 192100 - RNA, 19 nt, Artificial Sequence
  Description of Artificial Sequence: Synthetic oligonucleotide
uuccuuaaguauaccuguu

SEQ ID NO: 192101 - RNA, 19 nt, Artificial Sequence
  Description of Artificial Sequence: Synthetic oligonucleotide
ugaccgguggcgccgcuug

SEQ ID NO: 192102 - RNA, 19 nt, Artificial Sequence
  Description of Artificial Sequence: Synthetic oligonucleotide
uaguguucacugaauucuu

SEQ ID NO: 192103 - RNA, 19 nt, Artificial Sequence
  Description of Artificial Sequence: Synthetic oligonucleotide
gucucccuugguuaccacc

SEQ ID NO: 192104 - RNA, 19 nt, Artificial Sequence
  Description of Artificial Sequence: Synthetic oligonucleotide
uccgauaacuggcccacuu

SEQ ID NO: 192105 - RNA, 19 nt, Artificial Sequence
  Description of Artificial Sequence: Synthetic oligonucleotide
agacaguauaucauccagu

SEQ ID NO: 192106 - RNA, 19 nt, Artificial Sequence
  Description of Artificial Sequence: Synthetic oligonucleotide
ugucuguuuuagaaccguu

SEQ ID NO: 192107 - RNA, 19 nt, Artificial Sequence
  Description of Artificial Sequence: Synthetic oligonucleotide
gguucuacgaugggaacug

SEQ ID NO: 192108 - RNA, 19 nt, Artificial Sequence
  Description of Artificial Sequence: Synthetic oligonucleotide
uaguuacacugacuagguc

SEQ ID NO: 192109 - RNA, 19 nt, Artificial Sequence
  Description of Artificial Sequence: Synthetic oligonucleotide
cuugaaccuagggugagca

SEQ ID NO: 192110 - RNA, 19 nt, Artificial Sequence
  Description of Artificial Sequence: Synthetic oligonucleotide
aggaaagauuaguggugcu

SEQ ID NO: 192111 - RNA, 19 nt, Artificial Sequence
  Description of Artificial Sequence: Synthetic oligonucleotide
cuugguuaccaccagacuu

SEQ ID NO: 192112 - RNA, 19 nt, Artificial Sequence
  Description of Artificial Sequence: Synthetic oligonucleotide
ccugauuaguuacacugac

SEQ ID NO: 192113 - RNA, 19 nt, Artificial Sequence
  Description of Artificial Sequence: Synthetic oligonucleotide
agguucuacgaugggaacu

SEQ ID NO: 192114 - RNA, 19 nt, Artificial Sequence
  Description of Artificial Sequence: Synthetic oligonucleotide
ucccuugguuaccaccaga

SEQ ID NO: 192115 - RNA, 19 nt, Artificial Sequence
  Description of Artificial Sequence: Synthetic oligonucleotide
ucuugugagacaggcuaaa

SEQ ID NO: 192116 - RNA, 19 nt, Artificial Sequence
  Description of Artificial Sequence: Synthetic oligonucleotide
acuaccaaucggucucccu

SEQ ID NO: 192117 - RNA, 19 nt, Artificial Sequence
  Description of Artificial Sequence: Synthetic oligonucleotide
cuguuuuagaaccguuaga

SEQ ID NO: 192118 - RNA, 19 nt, Artificial Sequence
  Description of Artificial Sequence: Synthetic oligonucleotide
agccucaguacuauuugug

SEQ ID NO: 192119 - RNA, 19 nt, Artificial Sequence
  Description of Artificial Sequence: Synthetic oligonucleotide
cucguggacccaaaauuca

SEQ ID NO: 192120 - RNA, 19 nt, Artificial Sequence
  Description of Artificial Sequence: Synthetic oligonucleotide
ugccgaaccuugaccuugc

SEQ ID NO: 192121 - RNA, 19 nt, Artificial Sequence
  Description of Artificial Sequence: Synthetic oligonucleotide
gaccauccccauucugccc

SEQ ID NO: 192122 - RNA, 19 nt, Artificial Sequence
  Description of Artificial Sequence: Synthetic oligonucleotide
guuccgauaacuggcccac

SEQ ID NO: 192123 - RNA, 19 nt, Artificial Sequence
  Description of Artificial Sequence: Synthetic oligonucleotide
gaguggcugcauaaucuug

SEQ ID NO: 192124 - RNA, 19 nt, Artificial Sequence
  Description of Artificial Sequence: Synthetic oligonucleotide
guaagccauuccuuaagua

SEQ ID NO: 192125 - RNA, 19 nt, Artificial Sequence
  Description of Artificial Sequence: Synthetic oligonucleotide
agucccaccuucaggagga

SEQ ID NO: 192126 - RNA, 19 nt, Artificial Sequence
  Description of Artificial Sequence: Synthetic oligonucleotide
uggggcuacucuaccuacu

SEQ ID NO: 192127 - RNA, 19 nt, Artificial Sequence
  Description of Artificial Sequence: Synthetic oligonucleotide
ggacccaaaauucauugcu

SEQ ID NO: 192128 - RNA, 19 nt, Artificial Sequence
  Description of Artificial Sequence: Synthetic oligonucleotide
ggagcuacauucuuagagu

SEQ ID NO: 192129 - RNA, 19 nt, Artificial Sequence
  Description of Artificial Sequence: Synthetic oligonucleotide
uaccaaucggucucccuuu

SEQ ID NO: 192130 - RNA, 19 nt, Artificial Sequence
  Description of Artificial Sequence: Synthetic oligonucleotide
ggugccccauaacagaaga

SEQ ID NO: 192131 - RNA, 19 nt, Artificial Sequence
  Description of Artificial Sequence: Synthetic oligonucleotide
agcuacauucuuagaguca

SEQ ID NO: 192132 - RNA, 19 nt, Artificial Sequence
  Description of Artificial Sequence: Synthetic oligonucleotide
ccuagggugagcagccagg

SEQ ID NO: 192133 - RNA, 19 nt, Artificial Sequence
  Description of Artificial Sequence: Synthetic oligonucleotide
gggauuuguaacuccagcu

SEQ ID NO: 192134 - RNA, 19 nt, Artificial Sequence
  Description of Artificial Sequence: Synthetic oligonucleotide
guagcauacuuuagcuuga

SEQ ID NO: 192135 - RNA, 19 nt, Artificial Sequence
  Description of Artificial Sequence: Synthetic oligonucleotide
ccucguggacccaaaauuc

SEQ ID NO: 192136 - RNA, 19 nt, Artificial Sequence
  Description of Artificial Sequence: Synthetic oligonucleotide
caggaggaccacucuucag

SEQ ID NO: 192137 - RNA, 19 nt, Artificial Sequence
  Description of Artificial Sequence: Synthetic oligonucleotide
ggcccagagaauacaaccc

SEQ ID NO: 192138 - RNA, 19 nt, Artificial Sequence
  Description of Artificial Sequence: Synthetic oligonucleotide
ucugcugcugcugcugcuc

SEQ ID NO: 192139 - RNA, 19 nt, Artificial Sequence
  Description of Artificial Sequence: Synthetic oligonucleotide
gaaaaugaccauccccauu

SEQ ID NO: 192140 - RNA, 19 nt, Artificial Sequence
  Description of Artificial Sequence: Synthetic oligonucleotide
ugcuuuugugccgaaccuu

SEQ ID NO: 192141 - RNA, 19 nt, Artificial Sequence
  Description of Artificial Sequence: Synthetic oligonucleotide
uuucaguccugggucuagu

SEQ ID NO: 192142 - RNA, 19 nt, Artificial Sequence
  Description of Artificial Sequence: Synthetic oligonucleotide
ggugguugucauuggucug

SEQ ID NO: 192143 - RNA, 19 nt, Artificial Sequence
  Description of Artificial Sequence: Synthetic oligonucleotide
guggggcuacucuaccuac

SEQ ID NO: 192144 - RNA, 19 nt, Artificial Sequence
  Description of Artificial Sequence: Synthetic oligonucleotide
ugguuaccaccagacuucu

SEQ ID NO: 192145 - RNA, 19 nt, Artificial Sequence
  Description of Artificial Sequence: Synthetic oligonucleotide
acccucguggacccaaaau

SEQ ID NO: 192146 - RNA, 19 nt, Artificial Sequence
  Description of Artificial Sequence: Synthetic oligonucleotide
ucuaguggcuggguagcau

SEQ ID NO: 192147 - RNA, 19 nt, Artificial Sequence
  Description of Artificial Sequence: Synthetic oligonucleotide
aacccucguggacccaaaa

SEQ ID NO: 192148 - RNA, 19 nt, Artificial Sequence
  Description of Artificial Sequence: Synthetic oligonucleotide
aggguccaaagaaggucac

SEQ ID NO: 192149 - RNA, 19 nt, Artificial Sequence
  Description of Artificial Sequence: Synthetic oligonucleotide
acugcuuguuugguugccu

SEQ ID NO: 192150 - RNA, 19 nt, Artificial Sequence
  Description of Artificial Sequence: Synthetic oligonucleotide
cuuuugugccgaaccuuga

SEQ ID NO: 192151 - RNA, 19 nt, Artificial Sequence
  Description of Artificial Sequence: Synthetic oligonucleotide
gugccgaaccuugaccuug

SEQ ID NO: 192152 - RNA, 19 nt, Artificial Sequence
  Description of Artificial Sequence: Synthetic oligonucleotide
guguucaagugggugguuc

SEQ ID NO: 192153 - RNA, 19 nt, Artificial Sequence
  Description of Artificial Sequence: Synthetic oligonucleotide
gucuguuuuagaaccguua

SEQ ID NO: 192154 - RNA, 19 nt, Artificial Sequence
  Description of Artificial Sequence: Synthetic oligonucleotide
guucuugagguucuacgau

SEQ ID NO: 192155 - RNA, 19 nt, Artificial Sequence
  Description of Artificial Sequence: Synthetic oligonucleotide
ugccucugucuugacuuug

SEQ ID NO: 192156 - RNA, 19 nt, Artificial Sequence
  Description of Artificial Sequence: Synthetic oligonucleotide
caacauuugauuccugauu

SEQ ID NO: 192157 - RNA, 19 nt, Artificial Sequence
  Description of Artificial Sequence: Synthetic oligonucleotide
uucugcugcugcugcugcu

SEQ ID NO: 192158 - RNA, 19 nt, Artificial Sequence
  Description of Artificial Sequence: Synthetic oligonucleotide
agaaccguuagaagugcuu

SEQ ID NO: 192159 - RNA, 19 nt, Artificial Sequence
  Description of Artificial Sequence: Synthetic oligonucleotide
acgccacucuucugaaggu

SEQ ID NO: 192160 - RNA, 19 nt, Artificial Sequence
  Description of Artificial Sequence: Synthetic oligonucleotide
uuccccugugagacagacu

SEQ ID NO: 192161 - RNA, 19 nt, Artificial Sequence
  Description of Artificial Sequence: Synthetic oligonucleotide
uauuuacuacauggaugua

SEQ ID NO: 192162 - RNA, 19 nt, Artificial Sequence
  Description of Artificial Sequence: Synthetic oligonucleotide
gggucuaguguucacugaa

SEQ ID NO: 192163 - RNA, 19 nt, Artificial Sequence
  Description of Artificial Sequence: Synthetic oligonucleotide
ccuggccuauuucagcagc

SEQ ID NO: 192164 - RNA, 19 nt, Artificial Sequence
  Description of Artificial Sequence: Synthetic oligonucleotide
augaguuuguucaguucaa

SEQ ID NO: 192165 - RNA, 19 nt, Artificial Sequence
  Description of Artificial Sequence: Synthetic oligonucleotide
ugggagcauuucaucucuc

SEQ ID NO: 192166 - RNA, 19 nt, Artificial Sequence
  Description of Artificial Sequence: Synthetic oligonucleotide
aggaaaggugguugucauu

SEQ ID NO: 192167 - RNA, 19 nt, Artificial Sequence
  Description of Artificial Sequence: Synthetic oligonucleotide
gugggagcauuucaucucu

SEQ ID NO: 192168 - RNA, 19 nt, Artificial Sequence
  Description of Artificial Sequence: Synthetic oligonucleotide
ugcugucaagagguaguuc

SEQ ID NO: 192169 - RNA, 19 nt, Artificial Sequence
  Description of Artificial Sequence: Synthetic oligonucleotide
cugcugcugcugcugcucc

SEQ ID NO: 192170 - RNA, 19 nt, Artificial Sequence
  Description of Artificial Sequence: Synthetic oligonucleotide
gaaccguuagaagugcuuu

SEQ ID NO: 192171 - RNA, 19 nt, Artificial Sequence
  Description of Artificial Sequence: Synthetic oligonucleotide
ugggucccaguuacauaaa

SEQ ID NO: 192172 - RNA, 19 nt, Artificial Sequence
  Description of Artificial Sequence: Synthetic oligonucleotide
ggaccgagggccuccacca

SEQ ID NO: 192173 - RNA, 19 nt, Artificial Sequence
  Description of Artificial Sequence: Synthetic oligonucleotide
ggagguggauucuucggaa

SEQ ID NO: 192174 - RNA, 19 nt, Artificial Sequence
  Description of Artificial Sequence: Synthetic oligonucleotide
gguaagccauuccuuaagu

SEQ ID NO: 192175 - RNA, 19 nt, Artificial Sequence
  Description of Artificial Sequence: Synthetic oligonucleotide
gccccauaacagaagauuc

SEQ ID NO: 192176 - RNA, 19 nt, Artificial Sequence
  Description of Artificial Sequence: Synthetic oligonucleotide
auaguaccagaagguuccu

SEQ ID NO: 192177 - RNA, 19 nt, Artificial Sequence
  Description of Artificial Sequence: Synthetic oligonucleotide
uggcgccgcuugaaccuag

SEQ ID NO: 192178 - RNA, 19 nt, Artificial Sequence
  Description of Artificial Sequence: Synthetic oligonucleotide
uaccuacuugguggggcca

SEQ ID NO: 192179 - RNA, 19 nt, Artificial Sequence
  Description of Artificial Sequence: Synthetic oligonucleotide
uucggaagaguggcugcau

SEQ ID NO: 192180 - RNA, 19 nt, Artificial Sequence
  Description of Artificial Sequence: Synthetic oligonucleotide
ggugaaaucaugacuguuu

SEQ ID NO: 192181 - RNA, 19 nt, Artificial Sequence
  Description of Artificial Sequence: Synthetic oligonucleotide
cuaccaaucggucucccuu

SEQ ID NO: 192182 - RNA, 19 nt, Artificial Sequence
  Description of Artificial Sequence: Synthetic oligonucleotide
aaccuagggugagcagcca

SEQ ID NO: 192183 - RNA, 19 nt, Artificial Sequence
  Description of Artificial Sequence: Synthetic oligonucleotide
aggugccccauaacagaag

SEQ ID NO: 192184 - RNA, 19 nt, Artificial Sequence
  Description of Artificial Sequence: Synthetic oligonucleotide
caaaccaaggugccccaua

SEQ ID NO: 192185 - RNA, 19 nt, Artificial Sequence
  Description of Artificial Sequence: Synthetic oligonucleotide
accaaucggucucccuuuu

SEQ ID NO: 192186 - RNA, 19 nt, Artificial Sequence
  Description of Artificial Sequence: Synthetic oligonucleotide
gguaguucagggauuugua

SEQ ID NO: 192187 - RNA, 19 nt, Artificial Sequence
  Description of Artificial Sequence: Synthetic oligonucleotide
gcuggguagcauacuuuag

SEQ ID NO: 192188 - RNA, 19 nt, Artificial Sequence
  Description of Artificial Sequence: Synthetic oligonucleotide
cccugugagacagacugac

SEQ ID NO: 192189 - RNA, 19 nt, Artificial Sequence
  Description of Artificial Sequence: Synthetic oligonucleotide
gacugaccagaggaaaggu

SEQ ID NO: 192190 - RNA, 19 nt, Artificial Sequence
  Description of Artificial Sequence: Synthetic oligonucleotide
gucauaguaccagaagguu

SEQ ID NO: 192191 - RNA, 19 nt, Artificial Sequence
  Description of Artificial Sequence: Synthetic oligonucleotide
caucuaccaauuccaccaa

SEQ ID NO: 192192 - RNA, 19 nt, Artificial Sequence
  Description of Artificial Sequence: Synthetic oligonucleotide
gggcuacucuaccuacuug

SEQ ID NO: 192193 - RNA, 19 nt, Artificial Sequence
  Description of Artificial Sequence: Synthetic oligonucleotide
ccgauaacuggcccacuug

SEQ ID NO: 192194 - RNA, 19 nt, Artificial Sequence
  Description of Artificial Sequence: Synthetic oligonucleotide
cuggagcuacauucuuaga

SEQ ID NO: 192195 - RNA, 19 nt, Artificial Sequence
  Description of Artificial Sequence: Synthetic oligonucleotide
gcgcaccuuucauuuaaac

SEQ ID NO: 192196 - RNA, 19 nt, Artificial Sequence
  Description of Artificial Sequence: Synthetic oligonucleotide
cacugccacgccacucuuc

SEQ ID NO: 192197 - RNA, 19 nt, Artificial Sequence
  Description of Artificial Sequence: Synthetic oligonucleotide
cacuaccaaucggucuccc

SEQ ID NO: 192198 - RNA, 19 nt, Artificial Sequence
  Description of Artificial Sequence: Synthetic oligonucleotide
gugucuguuuuagaaccgu

SEQ ID NO: 192199 - RNA, 19 nt, Artificial Sequence
  Description of Artificial Sequence: Synthetic oligonucleotide
gaucaaagccacaccccau

SEQ ID NO: 192200 - RNA, 19 nt, Artificial Sequence
  Description of Artificial Sequence: Synthetic oligonucleotide
uuccgauaacuggcccacu

SEQ ID NO: 192201 - RNA, 19 nt, Artificial Sequence
  Description of Artificial Sequence: Synthetic oligonucleotide
gcuugaaccuagggugagc

SEQ ID NO: 192202 - RNA, 19 nt, Artificial Sequence
  Description of Artificial Sequence: Synthetic oligonucleotide
gcgccgcuugaaccuaggg

SEQ ID NO: 192203 - RNA, 19 nt, Artificial Sequence
  Description of Artificial Sequence: Synthetic oligonucleotide
guagccacagucccaccuu

SEQ ID NO: 192204 - RNA, 19 nt, Artificial Sequence
  Description of Artificial Sequence: Synthetic oligonucleotide
uacaacccucguggaccca

SEQ ID NO: 192205 - RNA, 19 nt, Artificial Sequence
  Description of Artificial Sequence: Synthetic oligonucleotide
aguguucaagugggugguu

SEQ ID NO: 192206 - RNA, 19 nt, Artificial Sequence
  Description of Artificial Sequence: Synthetic oligonucleotide
uggcuccuacgcucuucuc

SEQ ID NO: 192207 - RNA, 19 nt, Artificial Sequence
  Description of Artificial Sequence: Synthetic oligonucleotide
gucacccacuguuccgaua

SEQ ID NO: 192208 - RNA, 19 nt, Artificial Sequence
  Description of Artificial Sequence: Synthetic oligonucleotide
agauaccaccucaccuuuu

SEQ ID NO: 192209 - RNA, 19 nt, Artificial Sequence
  Description of Artificial Sequence: Synthetic oligonucleotide
agcgcaccuuucauuuaaa

SEQ ID NO: 192210 - RNA, 19 nt, Artificial Sequence
  Description of Artificial Sequence: Synthetic oligonucleotide
ggucccaguuacauaaaau

SEQ ID NO: 192211 - RNA, 19 nt, Artificial Sequence
  Description of Artificial Sequence: Synthetic oligonucleotide
cgguggcgccgcuugaacc

SEQ ID NO: 192212 - RNA, 19 nt, Artificial Sequence
  Description of Artificial Sequence: Synthetic oligonucleotide
gaccgguggcgccgcuuga

SEQ ID NO: 192213 - RNA, 19 nt, Artificial Sequence
  Description of Artificial Sequence: Synthetic oligonucleotide
accgguggcgccgcuugaa

SEQ ID NO: 192214 - RNA, 19 nt, Artificial Sequence
  Description of Artificial Sequence: Synthetic oligonucleotide
ccaaucggucucccuuuuc

SEQ ID NO: 192215 - RNA, 19 nt, Artificial Sequence
  Description of Artificial Sequence: Synthetic oligonucleotide
ggaagaguggcugcauaau

SEQ ID NO: 192216 - RNA, 19 nt, Artificial Sequence
  Description of Artificial Sequence: Synthetic oligonucleotide
ccgcuugaaccuaggguga

SEQ ID NO: 192217 - RNA, 19 nt, Artificial Sequence
  Description of Artificial Sequence: Synthetic oligonucleotide
gguuaccaccagacuucug

SEQ ID NO: 192218 - RNA, 19 nt, Artificial Sequence
  Description of Artificial Sequence: Synthetic oligonucleotide
ggcgccgcuugaaccuagg

SEQ ID NO: 192219 - RNA, 19 nt, Artificial Sequence
  Description of Artificial Sequence: Synthetic oligonucleotide
gguagguacagagggcuuu

SEQ ID NO: 192220 - RNA, 19 nt, Artificial Sequence
  Description of Artificial Sequence: Synthetic oligonucleotide
ggcgccagagguaagccau

SEQ ID NO: 192221 - RNA, 19 nt, Artificial Sequence
  Description of Artificial Sequence: Synthetic oligonucleotide
ggucucccuugguuaccac

SEQ ID NO: 192222 - RNA, 19 nt, Artificial Sequence
  Description of Artificial Sequence: Synthetic oligonucleotide
cauggguuccauggauccu

SEQ ID NO: 192223 - RNA, 19 nt, Artificial Sequence
  Description of Artificial Sequence: Synthetic oligonucleotide
cccucguggacccaaaauu

SEQ ID NO: 192224 - RNA, 19 nt, Artificial Sequence
  Description of Artificial Sequence: Synthetic oligonucleotide
gugagcagccaggcuccuc

SEQ ID NO: 192225 - RNA, 19 nt, Artificial Sequence
  Description of Artificial Sequence: Synthetic oligonucleotide
ggggcuacucuaccuacuu

SEQ ID NO: 192226 - RNA, 19 nt, Artificial Sequence
  Description of Artificial Sequence: Synthetic oligonucleotide
ccccuggacagggaccgag

SEQ ID NO: 192227 - RNA, 19 nt, Artificial Sequence
  Description of Artificial Sequence: Synthetic oligonucleotide
ggucuaguguucacugaau

SEQ ID NO: 192228 - RNA, 19 nt, Artificial Sequence
  Description of Artificial Sequence: Synthetic oligonucleotide
cgcuugaaccuagggugag

SEQ ID NO: 192229 - RNA, 19 nt, Artificial Sequence
  Description of Artificial Sequence: Synthetic oligonucleotide
gggugaaaucaugacuguu

SEQ ID NO: 192230 - RNA, 19 nt, Artificial Sequence
  Description of Artificial Sequence: Synthetic oligonucleotide
ccugggucuaguguucacu

SEQ ID NO: 192231 - RNA, 19 nt, Artificial Sequence
  Description of Artificial Sequence: Synthetic oligonucleotide
gcauaaucuuggggauaaa

SEQ ID NO: 192232 - RNA, 19 nt, Artificial Sequence
  Description of Artificial Sequence: Synthetic oligonucleotide
cagggaccgagggccucca

SEQ ID NO: 192233 - RNA, 19 nt, Artificial Sequence
  Description of Artificial Sequence: Synthetic oligonucleotide
cgccgcuugaaccuagggu

SEQ ID NO: 192234 - RNA, 19 nt, Artificial Sequence
  Description of Artificial Sequence: Synthetic oligonucleotide
ccaccucaccuuuucucuu

SEQ ID NO: 192235 - RNA, 19 nt, Artificial Sequence
  Description of Artificial Sequence: Synthetic oligonucleotide
gguuugccucaggggccaa

SEQ ID NO: 192236 - RNA, 19 nt, Artificial Sequence
  Description of Artificial Sequence: Synthetic oligonucleotide
ggugagcagccaggcuccu

SEQ ID NO: 192237 - RNA, 19 nt, Artificial Sequence
  Description of Artificial Sequence: Synthetic oligonucleotide
cugaccgguggcgccgcuu

SEQ ID NO: 192238 - RNA, 19 nt, Artificial Sequence
  Description of Artificial Sequence: Synthetic oligonucleotide
gcgccagagguaagccauu

SEQ ID NO: 192239 - RNA, 19 nt, Artificial Sequence
  Description of Artificial Sequence: Synthetic oligonucleotide
uauauauauauauauauaa

SEQ ID NO: 192240 - RNA, 19 nt, Artificial Sequence
  Description of Artificial Sequence: Synthetic oligonucleotide
aaucuuaaagcauccgggc

SEQ ID NO: 192241 - RNA, 19 nt, Artificial Sequence
  Description of Artificial Sequence: Synthetic oligonucleotide
uauauauauauauauaaaa

SEQ ID NO: 192242 - RNA, 19 nt, Artificial Sequence
  Description of Artificial Sequence: Synthetic oligonucleotide
uuguuuaucgauuucacgc

SEQ ID NO: 192243 - RNA, 19 nt, Artificial Sequence
  Description of Artificial Sequence: Synthetic oligonucleotide
aaugcaacgccaaugaaac

SEQ ID NO: 192244 - RNA, 19 nt, Artificial Sequence
  Description of Artificial Sequence: Synthetic oligonucleotide
aacuccauaggaauaaugc

SEQ ID NO: 192245 - RNA, 19 nt, Artificial Sequence
  Description of Artificial Sequence: Synthetic oligonucleotide
uaugcuuauauauauauau

SEQ ID NO: 192246 - RNA, 19 nt, Artificial Sequence
  Description of Artificial Sequence: Synthetic oligonucleotide
ugcauaaucgagcagcggg

SEQ ID NO: 192247 - RNA, 19 nt, Artificial Sequence
  Description of Artificial Sequence: Synthetic oligonucleotide
aacgagaagugguaaaguc

SEQ ID NO: 192248 - RNA, 19 nt, Artificial Sequence
  Description of Artificial Sequence: Synthetic oligonucleotide
aaagaugccauugagggcu

SEQ ID NO: 192249 - RNA, 19 nt, Artificial Sequence
  Description of Artificial Sequence: Synthetic oligonucleotide
auauuguugaguucauucg

SEQ ID NO: 192250 - RNA, 19 nt, Artificial Sequence
  Description of Artificial Sequence: Synthetic oligonucleotide
uguuuaucgauuucacgcg

SEQ ID NO: 192251 - RNA, 19 nt, Artificial Sequence
  Description of Artificial Sequence: Synthetic oligonucleotide
cuauaugagucuuuggacc

SEQ ID NO: 192252 - RNA, 19 nt, Artificial Sequence
  Description of Artificial Sequence: Synthetic oligonucleotide
acauauguaugacaauugg

SEQ ID NO: 192253 - RNA, 19 nt, Artificial Sequence
  Description of Artificial Sequence: Synthetic oligonucleotide
uuauauauauauauauaua

SEQ ID NO: 192254 - RNA, 19 nt, Artificial Sequence
  Description of Artificial Sequence: Synthetic oligonucleotide
aacguauucaucagccucc

SEQ ID NO: 192255 - RNA, 19 nt, Artificial Sequence
  Description of Artificial Sequence: Synthetic oligonucleotide
ugcuuauauauauauauau

SEQ ID NO: 192256 - RNA, 19 nt, Artificial Sequence
  Description of Artificial Sequence: Synthetic oligonucleotide
aucgauuucacgcgguggc

SEQ ID NO: 192257 - RNA, 19 nt, Artificial Sequence
  Description of Artificial Sequence: Synthetic oligonucleotide
cuucugaucaagauagugc

SEQ ID NO: 192258 - RNA, 19 nt, Artificial Sequence
  Description of Artificial Sequence: Synthetic oligonucleotide
uuuaaguuacuacuccaca

SEQ ID NO: 192259 - RNA, 19 nt, Artificial Sequence
  Description of Artificial Sequence: Synthetic oligonucleotide
uauaugagucuuuggaccc

SEQ ID NO: 192260 - RNA, 19 nt, Artificial Sequence
  Description of Artificial Sequence: Synthetic oligonucleotide
agagaggcgaaguugauca

SEQ ID NO: 192261 - RNA, 19 nt, Artificial Sequence
  Description of Artificial Sequence: Synthetic oligonucleotide
uuuguguggacugaauggg

SEQ ID NO: 192262 - RNA, 19 nt, Artificial Sequence
  Description of Artificial Sequence: Synthetic oligonucleotide
uauuguugaguucauucga

SEQ ID NO: 192263 - RNA, 19 nt, Artificial Sequence
  Description of Artificial Sequence: Synthetic oligonucleotide
cagaucgugagacauaggc

SEQ ID NO: 192264 - RNA, 19 nt, Artificial Sequence
  Description of Artificial Sequence: Synthetic oligonucleotide
agcuauaugagucuuugga

SEQ ID NO: 192265 - RNA, 19 nt, Artificial Sequence
  Description of Artificial Sequence: Synthetic oligonucleotide
aagugguaaagucuuaaaa

SEQ ID NO: 192266 - RNA, 19 nt, Artificial Sequence
  Description of Artificial Sequence: Synthetic oligonucleotide
gcuauuauggcuauggucc

SEQ ID NO: 192267 - RNA, 19 nt, Artificial Sequence
  Description of Artificial Sequence: Synthetic oligonucleotide
ugauaauacagagaagaga

SEQ ID NO: 192268 - RNA, 19 nt, Artificial Sequence
  Description of Artificial Sequence: Synthetic oligonucleotide
aggaaauaucaucccaugg

SEQ ID NO: 192269 - RNA, 19 nt, Artificial Sequence
  Description of Artificial Sequence: Synthetic oligonucleotide
gauagugcccaaugaagcc

SEQ ID NO: 192270 - RNA, 19 nt, Artificial Sequence
  Description of Artificial Sequence: Synthetic oligonucleotide
ugacauuaaguagacacug

SEQ ID NO: 192271 - RNA, 19 nt, Artificial Sequence
  Description of Artificial Sequence: Synthetic oligonucleotide
cuuauauauauauauauau

SEQ ID NO: 192272 - RNA, 19 nt, Artificial Sequence
  Description of Artificial Sequence: Synthetic oligonucleotide
auuacuacccaggagggag

SEQ ID NO: 192273 - RNA, 19 nt, Artificial Sequence
  Description of Artificial Sequence: Synthetic oligonucleotide
caucauaaggcccuagaag

SEQ ID NO: 192274 - RNA, 19 nt, Artificial Sequence
  Description of Artificial Sequence: Synthetic oligonucleotide
uauaauuuggaggccagga

SEQ ID NO: 192275 - RNA, 19 nt, Artificial Sequence
  Description of Artificial Sequence: Synthetic oligonucleotide
uuagguaaccgucucugga

SEQ ID NO: 192276 - RNA, 19 nt, Artificial Sequence
  Description of Artificial Sequence: Synthetic oligonucleotide
ucaagauagugcccaauga

SEQ ID NO: 192277 - RNA, 19 nt, Artificial Sequence
  Description of Artificial Sequence: Synthetic oligonucleotide
aguucauucgacaugccuc

SEQ ID NO: 192278 - RNA, 19 nt, Artificial Sequence
  Description of Artificial Sequence: Synthetic oligonucleotide
cuguauaguuuauuuaaac

SEQ ID NO: 192279 - RNA, 19 nt, Artificial Sequence
  Description of Artificial Sequence: Synthetic oligonucleotide
uucagugggauacuaaaua

SEQ ID NO: 192280 - RNA, 19 nt, Artificial Sequence
  Description of Artificial Sequence: Synthetic oligonucleotide
ggcgguauaauuuggaggc

SEQ ID NO: 192281 - RNA, 19 nt, Artificial Sequence
  Description of Artificial Sequence: Synthetic oligonucleotide
auagacaccgucugugguc

SEQ ID NO: 192282 - RNA, 19 nt, Artificial Sequence
  Description of Artificial Sequence: Synthetic oligonucleotide
cagguuuucggaucaaacc

SEQ ID NO: 192283 - RNA, 19 nt, Artificial Sequence
  Description of Artificial Sequence: Synthetic oligonucleotide
aaaccgaucuccaauggug

SEQ ID NO: 192284 - RNA, 19 nt, Artificial Sequence
  Description of Artificial Sequence: Synthetic oligonucleotide
aucaagauagugcccaaug

SEQ ID NO: 192285 - RNA, 19 nt, Artificial Sequence
  Description of Artificial Sequence: Synthetic oligonucleotide
auguuaugugaagauaacg

SEQ ID NO: 192286 - RNA, 19 nt, Artificial Sequence
  Description of Artificial Sequence: Synthetic oligonucleotide
auaaugguuacucccuucu

SEQ ID NO: 192287 - RNA, 19 nt, Artificial Sequence
  Description of Artificial Sequence: Synthetic oligonucleotide
auacuaagcuucuuugugu

SEQ ID NO: 192288 - RNA, 19 nt, Artificial Sequence
  Description of Artificial Sequence: Synthetic oligonucleotide
ucagugggauacuaaauaa

SEQ ID NO: 192289 - RNA, 19 nt, Artificial Sequence
  Description of Artificial Sequence: Synthetic oligonucleotide
guuuaucgauuucacgcgg

SEQ ID NO: 192290 - RNA, 19 nt, Artificial Sequence
  Description of Artificial Sequence: Synthetic oligonucleotide
caugccugcguaaaugagc

SEQ ID NO: 192291 - RNA, 19 nt, Artificial Sequence
  Description of Artificial Sequence: Synthetic oligonucleotide
ucaggauaagauuuggcuu

SEQ ID NO: 192292 - RNA, 19 nt, Artificial Sequence
  Description of Artificial Sequence: Synthetic oligonucleotide
cuguccauuacuacccagg

SEQ ID NO: 192293 - RNA, 19 nt, Artificial Sequence
  Description of Artificial Sequence: Synthetic oligonucleotide
guucauucgacaugccucc

SEQ ID NO: 192294 - RNA, 19 nt, Artificial Sequence
  Description of Artificial Sequence: Synthetic oligonucleotide
ugcuauuauggcuaugguc

SEQ ID NO: 192295 - RNA, 19 nt, Artificial Sequence
  Description of Artificial Sequence: Synthetic oligonucleotide
uaugguccggaucugugca

SEQ ID NO: 192296 - RNA, 19 nt, Artificial Sequence
  Description of Artificial Sequence: Synthetic oligonucleotide
uaggaaauaucaucccaug

SEQ ID NO: 192297 - RNA, 19 nt, Artificial Sequence
  Description of Artificial Sequence: Synthetic oligonucleotide
auauauauauauauauaaa

SEQ ID NO: 192298 - RNA, 19 nt, Artificial Sequence
  Description of Artificial Sequence: Synthetic oligonucleotide
ugucaacguauucaucagc

SEQ ID NO: 192299 - RNA, 19 nt, Artificial Sequence
  Description of Artificial Sequence: Synthetic oligonucleotide
gaauacuuagguaaccguc

SEQ ID NO: 192300 - RNA, 19 nt, Artificial Sequence
  Description of Artificial Sequence: Synthetic oligonucleotide
cugaauggguacuagccug

SEQ ID NO: 192301 - RNA, 19 nt, Artificial Sequence
  Description of Artificial Sequence: Synthetic oligonucleotide
ucugaucaagauagugccc

SEQ ID NO: 192302 - RNA, 19 nt, Artificial Sequence
  Description of Artificial Sequence: Synthetic oligonucleotide
uuaucgauuucacgcggug

SEQ ID NO: 192303 - RNA, 19 nt, Artificial Sequence
  Description of Artificial Sequence: Synthetic oligonucleotide
cuauuauggcuaugguccg

SEQ ID NO: 192304 - RNA, 19 nt, Artificial Sequence
  Description of Artificial Sequence: Synthetic oligonucleotide
auagauacagcagguagca

SEQ ID NO: 192305 - RNA, 19 nt, Artificial Sequence
  Description of Artificial Sequence: Synthetic oligonucleotide
caugccuccagaucgugag

SEQ ID NO: 192306 - RNA, 19 nt, Artificial Sequence
  Description of Artificial Sequence: Synthetic oligonucleotide
ugagucuuuggacccacac

SEQ ID NO: 192307 - RNA, 19 nt, Artificial Sequence
  Description of Artificial Sequence: Synthetic oligonucleotide
cauaggaauaaugccacug

SEQ ID NO: 192308 - RNA, 19 nt, Artificial Sequence
  Description of Artificial Sequence: Synthetic oligonucleotide
agguaaccgucucuggaac

SEQ ID NO: 192309 - RNA, 19 nt, Artificial Sequence
  Description of Artificial Sequence: Synthetic oligonucleotide
ugugauccccagugaaggg

SEQ ID NO: 192310 - RNA, 19 nt, Artificial Sequence
  Description of Artificial Sequence: Synthetic oligonucleotide
uaucgauuucacgcggugg

SEQ ID NO: 192311 - RNA, 19 nt, Artificial Sequence
  Description of Artificial Sequence: Synthetic oligonucleotide
aucuuaaagcauccgggcu

SEQ ID NO: 192312 - RNA, 19 nt, Artificial Sequence
  Description of Artificial Sequence: Synthetic oligonucleotide
cuuagguaaccgucucugg

SEQ ID NO: 192313 - RNA, 19 nt, Artificial Sequence
  Description of Artificial Sequence: Synthetic oligonucleotide
augauaauacagagaagag

SEQ ID NO: 192314 - RNA, 19 nt, Artificial Sequence
  Description of Artificial Sequence: Synthetic oligonucleotide
ugcaugccccacacgauag

SEQ ID NO: 192315 - RNA, 19 nt, Artificial Sequence
  Description of Artificial Sequence: Synthetic oligonucleotide
aucucgggagcacacguag

SEQ ID NO: 192316 - RNA, 19 nt, Artificial Sequence
  Description of Artificial Sequence: Synthetic oligonucleotide
cuuauacuccucugugccc

SEQ ID NO: 192317 - RNA, 19 nt, Artificial Sequence
  Description of Artificial Sequence: Synthetic oligonucleotide
ucauucgacaugccuccag

SEQ ID NO: 192318 - RNA, 19 nt, Artificial Sequence
  Description of Artificial Sequence: Synthetic oligonucleotide
acuuagguaaccgucucug

SEQ ID NO: 192319 - RNA, 19 nt, Artificial Sequence
  Description of Artificial Sequence: Synthetic oligonucleotide
ugaauggguacuagccugu

SEQ ID NO: 192320 - RNA, 19 nt, Artificial Sequence
  Description of Artificial Sequence: Synthetic oligonucleotide
auaauuuggaggccaggau

SEQ ID NO: 192321 - RNA, 19 nt, Artificial Sequence
  Description of Artificial Sequence: Synthetic oligonucleotide
cacgcgguggccaaugccc

SEQ ID NO: 192322 - RNA, 19 nt, Artificial Sequence
  Description of Artificial Sequence: Synthetic oligonucleotide
uguggguuacagaugcaaa

SEQ ID NO: 192323 - RNA, 19 nt, Artificial Sequence
  Description of Artificial Sequence: Synthetic oligonucleotide
uggguuacagaugcaaaac

SEQ ID NO: 192324 - RNA, 19 nt, Artificial Sequence
  Description of Artificial Sequence: Synthetic oligonucleotide
acgauacagccccugcuuc

SEQ ID NO: 192325 - RNA, 19 nt, Artificial Sequence
  Description of Artificial Sequence: Synthetic oligonucleotide
uguguggacugaaugggua

SEQ ID NO: 192326 - RNA, 19 nt, Artificial Sequence
  Description of Artificial Sequence: Synthetic oligonucleotide
agugcauaaucgagcagcg

SEQ ID NO: 192327 - RNA, 19 nt, Artificial Sequence
  Description of Artificial Sequence: Synthetic oligonucleotide
uauuauggcuaugguccgg

SEQ ID NO: 192328 - RNA, 19 nt, Artificial Sequence
  Description of Artificial Sequence: Synthetic oligonucleotide
gucacaaguauuggcuugg

SEQ ID NO: 192329 - RNA, 19 nt, Artificial Sequence
  Description of Artificial Sequence: Synthetic oligonucleotide
cuacugcgguuucagaagc

SEQ ID NO: 192330 - RNA, 19 nt, Artificial Sequence
  Description of Artificial Sequence: Synthetic oligonucleotide
cuccacauauguaugacaa

SEQ ID NO: 192331 - RNA, 19 nt, Artificial Sequence
  Description of Artificial Sequence: Synthetic oligonucleotide
gaagaccucggugaugggc

SEQ ID NO: 192332 - RNA, 19 nt, Artificial Sequence
  Description of Artificial Sequence: Synthetic oligonucleotide
uucgacaugccuccagauc

SEQ ID NO: 192333 - RNA, 19 nt, Artificial Sequence
  Description of Artificial Sequence: Synthetic oligonucleotide
auaggaaauaucaucccau

SEQ ID NO: 192334 - RNA, 19 nt, Artificial Sequence
  Description of Artificial Sequence: Synthetic oligonucleotide
cacgauagccuugguaugg

SEQ ID NO: 192335 - RNA, 19 nt, Artificial Sequence
  Description of Artificial Sequence: Synthetic oligonucleotide
gggcgguauaauuuggagg

SEQ ID NO: 192336 - RNA, 19 nt, Artificial Sequence
  Description of Artificial Sequence: Synthetic oligonucleotide
aagauaacgagaaguggua

SEQ ID NO: 192337 - RNA, 19 nt, Artificial Sequence
  Description of Artificial Sequence: Synthetic oligonucleotide
uagacaccgucuguggucc

SEQ ID NO: 192338 - RNA, 19 nt, Artificial Sequence
  Description of Artificial Sequence: Synthetic oligonucleotide
cagaccacuggcuugguga

SEQ ID NO: 192339 - RNA, 19 nt, Artificial Sequence
  Description of Artificial Sequence: Synthetic oligonucleotide
guauaauuuggaggccagg

SEQ ID NO: 192340 - RNA, 19 nt, Artificial Sequence
  Description of Artificial Sequence: Synthetic oligonucleotide
uuggcuacugcgguuucag

SEQ ID NO: 192341 - RNA, 19 nt, Artificial Sequence
  Description of Artificial Sequence: Synthetic oligonucleotide
accgucugugguccgagag

SEQ ID NO: 192342 - RNA, 19 nt, Artificial Sequence
  Description of Artificial Sequence: Synthetic oligonucleotide
uaacgagaagugguaaagu

SEQ ID NO: 192343 - RNA, 19 nt, Artificial Sequence
  Description of Artificial Sequence: Synthetic oligonucleotide
augugaagauaacgagaag

SEQ ID NO: 192344 - RNA, 19 nt, Artificial Sequence
  Description of Artificial Sequence: Synthetic oligonucleotide
guugcauucccuuccucca

SEQ ID NO: 192345 - RNA, 19 nt, Artificial Sequence
  Description of Artificial Sequence: Synthetic oligonucleotide
ucuuaaagacagggauuag

SEQ ID NO: 192346 - RNA, 19 nt, Artificial Sequence
  Description of Artificial Sequence: Synthetic oligonucleotide
acgagaagugguaaagucu

SEQ ID NO: 192347 - RNA, 19 nt, Artificial Sequence
  Description of Artificial Sequence: Synthetic oligonucleotide
gcuacugcgguuucagaag

SEQ ID NO: 192348 - RNA, 19 nt, Artificial Sequence
  Description of Artificial Sequence: Synthetic oligonucleotide
gcguaaaugagcuccugcc

SEQ ID NO: 192349 - RNA, 19 nt, Artificial Sequence
  Description of Artificial Sequence: Synthetic oligonucleotide
auaaucgagcagcggggug

SEQ ID NO: 192350 - RNA, 19 nt, Artificial Sequence
  Description of Artificial Sequence: Synthetic oligonucleotide
cuuaaagcauccgggcuug

SEQ ID NO: 192351 - RNA, 19 nt, Artificial Sequence
  Description of Artificial Sequence: Synthetic oligonucleotide
caauuggcuaagaauguaa

SEQ ID NO: 192352 - RNA, 19 nt, Artificial Sequence
  Description of Artificial Sequence: Synthetic oligonucleotide
guaaaugagcuccugcccu

SEQ ID NO: 192353 - RNA, 19 nt, Artificial Sequence
  Description of Artificial Sequence: Synthetic oligonucleotide
cacacgauagccuugguau

SEQ ID NO: 192354 - RNA, 19 nt, Artificial Sequence
  Description of Artificial Sequence: Synthetic oligonucleotide
acgauagccuugguauggc

SEQ ID NO: 192355 - RNA, 19 nt, Artificial Sequence
  Description of Artificial Sequence: Synthetic oligonucleotide
caugugcuccggaagaaca

SEQ ID NO: 192356 - RNA, 19 nt, Artificial Sequence
  Description of Artificial Sequence: Synthetic oligonucleotide
acacgauagccuugguaug

SEQ ID NO: 192357 - RNA, 19 nt, Artificial Sequence
  Description of Artificial Sequence: Synthetic oligonucleotide
cugcggggcacaaacacuc

SEQ ID NO: 192358 - RNA, 19 nt, Artificial Sequence
  Description of Artificial Sequence: Synthetic oligonucleotide
guagcagagcaaaugucac

SEQ ID NO: 192359 - RNA, 19 nt, Artificial Sequence
  Description of Artificial Sequence: Synthetic oligonucleotide
guauggcggcugaagaggg

SEQ ID NO: 192360 - RNA, 19 nt, Artificial Sequence
  Description of Artificial Sequence: Synthetic oligonucleotide
caucuucgcugcugcaucc

SEQ ID NO: 192361 - RNA, 19 nt, Artificial Sequence
  Description of Artificial Sequence: Synthetic oligonucleotide
gguacuagccuguaggugu

SEQ ID NO: 192362 - RNA, 19 nt, Artificial Sequence
  Description of Artificial Sequence: Synthetic oligonucleotide
agcauaccaccaguauuac

SEQ ID NO: 192363 - RNA, 19 nt, Artificial Sequence
  Description of Artificial Sequence: Synthetic oligonucleotide
uacugcgguuucagaagcc

SEQ ID NO: 192364 - RNA, 19 nt, Artificial Sequence
  Description of Artificial Sequence: Synthetic oligonucleotide
accgaucuccaauggugag

SEQ ID NO: 192365 - RNA, 19 nt, Artificial Sequence
  Description of Artificial Sequence: Synthetic oligonucleotide
auuauggcuaugguccgga

SEQ ID NO: 192366 - RNA, 19 nt, Artificial Sequence
  Description of Artificial Sequence: Synthetic oligonucleotide
auaauacagagaagagacu

SEQ ID NO: 192367 - RNA, 19 nt, Artificial Sequence
  Description of Artificial Sequence: Synthetic oligonucleotide
augccugcguaaaugagcu

SEQ ID NO: 192368 - RNA, 19 nt, Artificial Sequence
  Description of Artificial Sequence: Synthetic oligonucleotide
caugccuugcacagcccgc

SEQ ID NO: 192369 - RNA, 19 nt, Artificial Sequence
  Description of Artificial Sequence: Synthetic oligonucleotide
uccgagagaugauauuguu

SEQ ID NO: 192370 - RNA, 19 nt, Artificial Sequence
  Description of Artificial Sequence: Synthetic oligonucleotide
aaacagcuauaugagucuu

SEQ ID NO: 192371 - RNA, 19 nt, Artificial Sequence
  Description of Artificial Sequence: Synthetic oligonucleotide
caugccccacacgauagcc

SEQ ID NO: 192372 - RNA, 19 nt, Artificial Sequence
  Description of Artificial Sequence: Synthetic oligonucleotide
cucgggagcacacguaguc

SEQ ID NO: 192373 - RNA, 19 nt, Artificial Sequence
  Description of Artificial Sequence: Synthetic oligonucleotide
cuaugcuuauauauauaua

SEQ ID NO: 192374 - RNA, 19 nt, Artificial Sequence
  Description of Artificial Sequence: Synthetic oligonucleotide
uggguuguuuaucgauuuc

SEQ ID NO: 192375 - RNA, 19 nt, Artificial Sequence
  Description of Artificial Sequence: Synthetic oligonucleotide
gauucaguuacaugcucau

SEQ ID NO: 192376 - RNA, 19 nt, Artificial Sequence
  Description of Artificial Sequence: Synthetic oligonucleotide
gagggcucaucucgggagc

SEQ ID NO: 192377 - RNA, 19 nt, Artificial Sequence
  Description of Artificial Sequence: Synthetic oligonucleotide
ugccugggcgguauaauuu

SEQ ID NO: 192378 - RNA, 19 nt, Artificial Sequence
  Description of Artificial Sequence: Synthetic oligonucleotide
gauaagauuuggcuucuuu

SEQ ID NO: 192379 - RNA, 19 nt, Artificial Sequence
  Description of Artificial Sequence: Synthetic oligonucleotide
gcauaaucgagcagcgggg

SEQ ID NO: 192380 - RNA, 19 nt, Artificial Sequence
  Description of Artificial Sequence: Synthetic oligonucleotide
cgugccuguacaucaaugg

SEQ ID NO: 192381 - RNA, 19 nt, Artificial Sequence
  Description of Artificial Sequence: Synthetic oligonucleotide
gagaggcgaaguugaucag

SEQ ID NO: 192382 - RNA, 19 nt, Artificial Sequence
  Description of Artificial Sequence: Synthetic oligonucleotide
aguuacuacuccacauaug

SEQ ID NO: 192383 - RNA, 19 nt, Artificial Sequence
  Description of Artificial Sequence: Synthetic oligonucleotide
aguagacacugaucuguaa

SEQ ID NO: 192384 - RNA, 19 nt, Artificial Sequence
  Description of Artificial Sequence: Synthetic oligonucleotide
aucgugagacauaggccac

SEQ ID NO: 192385 - RNA, 19 nt, Artificial Sequence
  Description of Artificial Sequence: Synthetic oligonucleotide
agauaacgagaagugguaa

SEQ ID NO: 192386 - RNA, 19 nt, Artificial Sequence
  Description of Artificial Sequence: Synthetic oligonucleotide
ugaucaagauagugcccaa

SEQ ID NO: 192387 - RNA, 19 nt, Artificial Sequence
  Description of Artificial Sequence: Synthetic oligonucleotide
ugcacucgcaugucugggu

SEQ ID NO: 192388 - RNA, 19 nt, Artificial Sequence
  Description of Artificial Sequence: Synthetic oligonucleotide
agaguaguccauaggcacu

SEQ ID NO: 192389 - RNA, 19 nt, Artificial Sequence
  Description of Artificial Sequence: Synthetic oligonucleotide
gcaugccuugcacagcccg

SEQ ID NO: 192390 - RNA, 19 nt, Artificial Sequence
  Description of Artificial Sequence: Synthetic oligonucleotide
cugacauuaaguagacacu

SEQ ID NO: 192391 - RNA, 19 nt, Artificial Sequence
  Description of Artificial Sequence: Synthetic oligonucleotide
ucgauuucacgcgguggcc

SEQ ID NO: 192392 - RNA, 19 nt, Artificial Sequence
  Description of Artificial Sequence: Synthetic oligonucleotide
augcuuauauauauauaua

SEQ ID NO: 192393 - RNA, 19 nt, Artificial Sequence
  Description of Artificial Sequence: Synthetic oligonucleotide
guaaccgucucuggaacca

SEQ ID NO: 192394 - RNA, 19 nt, Artificial Sequence
  Description of Artificial Sequence: Synthetic oligonucleotide
ugaagaccucggugauggg

SEQ ID NO: 192395 - RNA, 19 nt, Artificial Sequence
  Description of Artificial Sequence: Synthetic oligonucleotide
cauucgacaugccuccaga

SEQ ID NO: 192396 - RNA, 19 nt, Artificial Sequence
  Description of Artificial Sequence: Synthetic oligonucleotide
uucacgcgguggccaaugc

SEQ ID NO: 192397 - RNA, 19 nt, Artificial Sequence
  Description of Artificial Sequence: Synthetic oligonucleotide
cggaacaugagacacaaga

SEQ ID NO: 192398 - RNA, 19 nt, Artificial Sequence
  Description of Artificial Sequence: Synthetic oligonucleotide
gguaaccgucucuggaacc

SEQ ID NO: 192399 - RNA, 19 nt, Artificial Sequence
  Description of Artificial Sequence: Synthetic oligonucleotide
gguuguuuaucgauuucac

SEQ ID NO: 192400 - RNA, 19 nt, Artificial Sequence
  Description of Artificial Sequence: Synthetic oligonucleotide
gcuuauauauauauauaua

SEQ ID NO: 192401 - RNA, 19 nt, Artificial Sequence
  Description of Artificial Sequence: Synthetic oligonucleotide
aucgcagagaggcgaaguu

SEQ ID NO: 192402 - RNA, 19 nt, Artificial Sequence
  Description of Artificial Sequence: Synthetic oligonucleotide
gccucggcagaucuuauac

SEQ ID NO: 192403 - RNA, 19 nt, Artificial Sequence
  Description of Artificial Sequence: Synthetic oligonucleotide
gauuucacgcgguggccaa

SEQ ID NO: 192404 - RNA, 19 nt, Artificial Sequence
  Description of Artificial Sequence: Synthetic oligonucleotide
cguaaaugagcuccugccc

SEQ ID NO: 192405 - RNA, 19 nt, Artificial Sequence
  Description of Artificial Sequence: Synthetic oligonucleotide
ccugguguguccugguacc

SEQ ID NO: 192406 - RNA, 19 nt, Artificial Sequence
  Description of Artificial Sequence: Synthetic oligonucleotide
guaccgcagcacauggucc

SEQ ID NO: 192407 - RNA, 19 nt, Artificial Sequence
  Description of Artificial Sequence: Synthetic oligonucleotide
ggguuguuuaucgauuuca

SEQ ID NO: 192408 - RNA, 19 nt, Artificial Sequence
  Description of Artificial Sequence: Synthetic oligonucleotide
cccaaaccgaucuccaaug

SEQ ID NO: 192409 - RNA, 19 nt, Artificial Sequence
  Description of Artificial Sequence: Synthetic oligonucleotide
ggcuacugcgguuucagaa

SEQ ID NO: 192410 - RNA, 19 nt, Artificial Sequence
  Description of Artificial Sequence: Synthetic oligonucleotide
aacagcuauaugagucuuu

SEQ ID NO: 192411 - RNA, 19 nt, Artificial Sequence
  Description of Artificial Sequence: Synthetic oligonucleotide
cccgugaucagcugucacc

SEQ ID NO: 192412 - RNA, 19 nt, Artificial Sequence
  Description of Artificial Sequence: Synthetic oligonucleotide
gugcauaaucgagcagcgg

SEQ ID NO: 192413 - RNA, 19 nt, Artificial Sequence
  Description of Artificial Sequence: Synthetic oligonucleotide
uaaagcauccgggcuugau

SEQ ID NO: 192414 - RNA, 19 nt, Artificial Sequence
  Description of Artificial Sequence: Synthetic oligonucleotide
gagcacacguagucgaagu

SEQ ID NO: 192415 - RNA, 19 nt, Artificial Sequence
  Description of Artificial Sequence: Synthetic oligonucleotide
agcagaucgcagagaggcg

SEQ ID NO: 192416 - RNA, 19 nt, Artificial Sequence
  Description of Artificial Sequence: Synthetic oligonucleotide
acucgcaugucuggguugu

SEQ ID NO: 192417 - RNA, 19 nt, Artificial Sequence
  Description of Artificial Sequence: Synthetic oligonucleotide
cugcacucgcaugucuggg

SEQ ID NO: 192418 - RNA, 19 nt, Artificial Sequence
  Description of Artificial Sequence: Synthetic oligonucleotide
uuccgugccuguacaucaa

SEQ ID NO: 192419 - RNA, 19 nt, Artificial Sequence
  Description of Artificial Sequence: Synthetic oligonucleotide
ggaauacuuagguaaccgu

SEQ ID NO: 192420 - RNA, 19 nt, Artificial Sequence
  Description of Artificial Sequence: Synthetic oligonucleotide
gacgauacagccccugcuu

SEQ ID NO: 192421 - RNA, 19 nt, Artificial Sequence
  Description of Artificial Sequence: Synthetic oligonucleotide
cugguguguccugguaccg

SEQ ID NO: 192422 - RNA, 19 nt, Artificial Sequence
  Description of Artificial Sequence: Synthetic oligonucleotide
cagagaggcgaaguugauc

SEQ ID NO: 192423 - RNA, 19 nt, Artificial Sequence
  Description of Artificial Sequence: Synthetic oligonucleotide
cacucgcaugucuggguug

SEQ ID NO: 192424 - RNA, 19 nt, Artificial Sequence
  Description of Artificial Sequence: Synthetic oligonucleotide
ugggcaugccugcguaaau

SEQ ID NO: 192425 - RNA, 19 nt, Artificial Sequence
  Description of Artificial Sequence: Synthetic oligonucleotide
ucacaaguauuggcuuggu

SEQ ID NO: 192426 - RNA, 19 nt, Artificial Sequence
  Description of Artificial Sequence: Synthetic oligonucleotide
gcagguuuucggaucaaac

SEQ ID NO: 192427 - RNA, 19 nt, Artificial Sequence
  Description of Artificial Sequence: Synthetic oligonucleotide
ccucugacauuaaguagac

SEQ ID NO: 192428 - RNA, 19 nt, Artificial Sequence
  Description of Artificial Sequence: Synthetic oligonucleotide
gcauaccaccaguauuacc

SEQ ID NO: 192429 - RNA, 19 nt, Artificial Sequence
  Description of Artificial Sequence: Synthetic oligonucleotide
gacaugccuccagaucgug

SEQ ID NO: 192430 - RNA, 19 nt, Artificial Sequence
  Description of Artificial Sequence: Synthetic oligonucleotide
ccaugaauguggagccagg

SEQ ID NO: 192431 - RNA, 19 nt, Artificial Sequence
  Description of Artificial Sequence: Synthetic oligonucleotide
uucauucgacaugccucca

SEQ ID NO: 192432 - RNA, 19 nt, Artificial Sequence
  Description of Artificial Sequence: Synthetic oligonucleotide
gaacuggcaggaauacuua

SEQ ID NO: 192433 - RNA, 19 nt, Artificial Sequence
  Description of Artificial Sequence: Synthetic oligonucleotide
uggcuacugcgguuucaga

SEQ ID NO: 192434 - RNA, 19 nt, Artificial Sequence
  Description of Artificial Sequence: Synthetic oligonucleotide
aaccguggcuggcccaaua

SEQ ID NO: 192435 - RNA, 19 nt, Artificial Sequence
  Description of Artificial Sequence: Synthetic oligonucleotide
ggagcacacguagucgaag

SEQ ID NO: 192436 - RNA, 19 nt, Artificial Sequence
  Description of Artificial Sequence: Synthetic oligonucleotide
caacgccaaugaaaccguc

SEQ ID NO: 192437 - RNA, 19 nt, Artificial Sequence
  Description of Artificial Sequence: Synthetic oligonucleotide
gggauacuaaauaaacccu

SEQ ID NO: 192438 - RNA, 19 nt, Artificial Sequence
  Description of Artificial Sequence: Synthetic oligonucleotide
agacaccgucugugguccg

SEQ ID NO: 192439 - RNA, 19 nt, Artificial Sequence
  Description of Artificial Sequence: Synthetic oligonucleotide
gguccggaucugugcauag

SEQ ID NO: 192440 - RNA, 19 nt, Artificial Sequence
  Description of Artificial Sequence: Synthetic oligonucleotide
caaaccgaucuccaauggu

SEQ ID NO: 192441 - RNA, 19 nt, Artificial Sequence
  Description of Artificial Sequence: Synthetic oligonucleotide
uuaaagcauccgggcuuga

SEQ ID NO: 192442 - RNA, 19 nt, Artificial Sequence
  Description of Artificial Sequence: Synthetic oligonucleotide
gacgccaccgaugcccauc

SEQ ID NO: 192443 - RNA, 19 nt, Artificial Sequence
  Description of Artificial Sequence: Synthetic oligonucleotide
cauagacaccgucuguggu

SEQ ID NO: 192444 - RNA, 19 nt, Artificial Sequence
  Description of Artificial Sequence: Synthetic oligonucleotide
ugccuugcacagcccgcgu

SEQ ID NO: 192445 - RNA, 19 nt, Artificial Sequence
  Description of Artificial Sequence: Synthetic oligonucleotide
ugccucggcagaucuuaua

SEQ ID NO: 192446 - RNA, 19 nt, Artificial Sequence
  Description of Artificial Sequence: Synthetic oligonucleotide
gcagaucgcagagaggcga

SEQ ID NO: 192447 - RNA, 19 nt, Artificial Sequence
  Description of Artificial Sequence: Synthetic oligonucleotide
augguccggaucugugcau

SEQ ID NO: 192448 - RNA, 19 nt, Artificial Sequence
  Description of Artificial Sequence: Synthetic oligonucleotide
ggguacuagccuguaggug

SEQ ID NO: 192449 - RNA, 19 nt, Artificial Sequence
  Description of Artificial Sequence: Synthetic oligonucleotide
cagcugccgggaaucuuug

SEQ ID NO: 192450 - RNA, 19 nt, Artificial Sequence
  Description of Artificial Sequence: Synthetic oligonucleotide
caccgaugcccaucucuuc

SEQ ID NO: 192451 - RNA, 19 nt, Artificial Sequence
  Description of Artificial Sequence: Synthetic oligonucleotide
cauuacuacccaggaggga

SEQ ID NO: 192452 - RNA, 19 nt, Artificial Sequence
  Description of Artificial Sequence: Synthetic oligonucleotide
augugcuccggaagaacau

SEQ ID NO: 192453 - RNA, 19 nt, Artificial Sequence
  Description of Artificial Sequence: Synthetic oligonucleotide
acugccugggcgguauaau

SEQ ID NO: 192454 - RNA, 19 nt, Artificial Sequence
  Description of Artificial Sequence: Synthetic oligonucleotide
gaucaagauagugcccaau

SEQ ID NO: 192455 - RNA, 19 nt, Artificial Sequence
  Description of Artificial Sequence: Synthetic oligonucleotide
cuggguuguuuaucgauuu

SEQ ID NO: 192456 - RNA, 19 nt, Artificial Sequence
  Description of Artificial Sequence: Synthetic oligonucleotide
gacaccgucugugguccga

SEQ ID NO: 192457 - RNA, 19 nt, Artificial Sequence
  Description of Artificial Sequence: Synthetic oligonucleotide
ccgugccuguacaucaaug

SEQ ID NO: 192458 - RNA, 19 nt, Artificial Sequence
  Description of Artificial Sequence: Synthetic oligonucleotide
ccagaucgugagacauagg

SEQ ID NO: 192459 - RNA, 19 nt, Artificial Sequence
  Description of Artificial Sequence: Synthetic oligonucleotide
uggcuaugguccggaucug

SEQ ID NO: 192460 - RNA, 19 nt, Artificial Sequence
  Description of Artificial Sequence: Synthetic oligonucleotide
cauaaucgagcagcggggu

SEQ ID NO: 192461 - RNA, 19 nt, Artificial Sequence
  Description of Artificial Sequence: Synthetic oligonucleotide
gaauggguacuagccugua

SEQ ID NO: 192462 - RNA, 19 nt, Artificial Sequence
  Description of Artificial Sequence: Synthetic oligonucleotide
cuccagaucgugagacaua

SEQ ID NO: 192463 - RNA, 19 nt, Artificial Sequence
  Description of Artificial Sequence: Synthetic oligonucleotide
ccugguaccgcagcacaug

SEQ ID NO: 192464 - RNA, 19 nt, Artificial Sequence
  Description of Artificial Sequence: Synthetic oligonucleotide
gcaugccccacacgauagc

SEQ ID NO: 192465 - RNA, 19 nt, Artificial Sequence
  Description of Artificial Sequence: Synthetic oligonucleotide
gcgguauaauuuggaggcc

SEQ ID NO: 192466 - RNA, 19 nt, Artificial Sequence
  Description of Artificial Sequence: Synthetic oligonucleotide
ccgugaucagcugucacca

SEQ ID NO: 192467 - RNA, 19 nt, Artificial Sequence
  Description of Artificial Sequence: Synthetic oligonucleotide
aggacgccaccgaugccca

SEQ ID NO: 192468 - RNA, 19 nt, Artificial Sequence
  Description of Artificial Sequence: Synthetic oligonucleotide
augagucuuuggacccaca

SEQ ID NO: 192469 - RNA, 19 nt, Artificial Sequence
  Description of Artificial Sequence: Synthetic oligonucleotide
gugguccgagagaugauau

SEQ ID NO: 192470 - RNA, 19 nt, Artificial Sequence
  Description of Artificial Sequence: Synthetic oligonucleotide
cugccugggcgguauaauu

SEQ ID NO: 192471 - RNA, 19 nt, Artificial Sequence
  Description of Artificial Sequence: Synthetic oligonucleotide
cgguauaauuuggaggcca

SEQ ID NO: 192472 - RNA, 19 nt, Artificial Sequence
  Description of Artificial Sequence: Synthetic oligonucleotide
gcccgugaucagcugucac

SEQ ID NO: 192473 - RNA, 19 nt, Artificial Sequence
  Description of Artificial Sequence: Synthetic oligonucleotide
ccacuggcuuggugaggcg

SEQ ID NO: 192474 - RNA, 19 nt, Artificial Sequence
  Description of Artificial Sequence: Synthetic oligonucleotide
ggucaugaaugaggcaggu

SEQ ID NO: 192475 - RNA, 19 nt, Artificial Sequence
  Description of Artificial Sequence: Synthetic oligonucleotide
gucuuccgugccuguacau

SEQ ID NO: 192476 - RNA, 19 nt, Artificial Sequence
  Description of Artificial Sequence: Synthetic oligonucleotide
caccgucugugguccgaga

SEQ ID NO: 192477 - RNA, 19 nt, Artificial Sequence
  Description of Artificial Sequence: Synthetic oligonucleotide
cacugccugggcgguauaa

SEQ ID NO: 192478 - RNA, 19 nt, Artificial Sequence
  Description of Artificial Sequence: Synthetic oligonucleotide
augccucggcagaucuuau

SEQ ID NO: 192479 - RNA, 19 nt, Artificial Sequence
  Description of Artificial Sequence: Synthetic oligonucleotide
gcggggcacaaacacuccu

SEQ ID NO: 192480 - RNA, 19 nt, Artificial Sequence
  Description of Artificial Sequence: Synthetic oligonucleotide
gcccuagaagaacaccauu

SEQ ID NO: 192481 - RNA, 19 nt, Artificial Sequence
  Description of Artificial Sequence: Synthetic oligonucleotide
cgauuucacgcgguggcca

SEQ ID NO: 192482 - RNA, 19 nt, Artificial Sequence
  Description of Artificial Sequence: Synthetic oligonucleotide
gcacucgcaugucuggguu

SEQ ID NO: 192483 - RNA, 19 nt, Artificial Sequence
  Description of Artificial Sequence: Synthetic oligonucleotide
gcccucgcucaucacagau

SEQ ID NO: 192484 - RNA, 19 nt, Artificial Sequence
  Description of Artificial Sequence: Synthetic oligonucleotide
ccccaaaccgaucuccaau

SEQ ID NO: 192485 - RNA, 19 nt, Artificial Sequence
  Description of Artificial Sequence: Synthetic oligonucleotide
ggcccuagaagaacaccau

SEQ ID NO: 192486 - RNA, 19 nt, Artificial Sequence
  Description of Artificial Sequence: Synthetic oligonucleotide
ggcccgugaucagcuguca

SEQ ID NO: 192487 - RNA, 19 nt, Artificial Sequence
  Description of Artificial Sequence: Synthetic oligonucleotide
ccgggaaucuuuguggguu

SEQ ID NO: 192488 - RNA, 19 nt, Artificial Sequence
  Description of Artificial Sequence: Synthetic oligonucleotide
cccgcgucugcaugcccca

SEQ ID NO: 192489 - RNA, 19 nt, Artificial Sequence
  Description of Artificial Sequence: Synthetic oligonucleotide
ccaaccguggcuggcccaa

SEQ ID NO: 192490 - RNA, 19 nt, Artificial Sequence
  Description of Artificial Sequence: Synthetic oligonucleotide
gcagcgggguggcggggaa

SEQ ID NO: 192491 - RNA, 19 nt, Artificial Sequence
  Description of Artificial Sequence: Synthetic oligonucleotide
cucgcaugucuggguuguu

SEQ ID NO: 192492 - RNA, 19 nt, Artificial Sequence
  Description of Artificial Sequence: Synthetic oligonucleotide
cccacacgauagccuuggu

SEQ ID NO: 192493 - RNA, 19 nt, Artificial Sequence
  Description of Artificial Sequence: Synthetic oligonucleotide
aauuagcccaauuguaucc

SEQ ID NO: 192494 - RNA, 19 nt, Artificial Sequence
  Description of Artificial Sequence: Synthetic oligonucleotide
auaacaauggccuuugguc

SEQ ID NO: 192495 - RNA, 19 nt, Artificial Sequence
  Description of Artificial Sequence: Synthetic oligonucleotide
aagaaguuaauauuaagaa

SEQ ID NO: 192496 - RNA, 19 nt, Artificial Sequence
  Description of Artificial Sequence: Synthetic oligonucleotide
aacuaugacaaacucagug

SEQ ID NO: 192497 - RNA, 19 nt, Artificial Sequence
  Description of Artificial Sequence: Synthetic oligonucleotide
aaaucaacaauccagcuuu

SEQ ID NO: 192498 - RNA, 19 nt, Artificial Sequence
  Description of Artificial Sequence: Synthetic oligonucleotide
guagcuauaaaccacaauc

SEQ ID NO: 192499 - RNA, 19 nt, Artificial Sequence
  Description of Artificial Sequence: Synthetic oligonucleotide
ucuuaugacagucaguaac

SEQ ID NO: 192500 - RNA, 19 nt, Artificial Sequence
  Description of Artificial Sequence: Synthetic oligonucleotide
ucuauugguagcuauaaac

SEQ ID NO: 192501 - RNA, 19 nt, Artificial Sequence
  Description of Artificial Sequence: Synthetic oligonucleotide
auauuaagaagaauuaagg

SEQ ID NO: 192502 - RNA, 19 nt, Artificial Sequence
  Description of Artificial Sequence: Synthetic oligonucleotide
gaaucuagucuccugauag

SEQ ID NO: 192503 - RNA, 19 nt, Artificial Sequence
  Description of Artificial Sequence: Synthetic oligonucleotide
uguuuggagaaugaaagcg

SEQ ID NO: 192504 - RNA, 19 nt, Artificial Sequence
  Description of Artificial Sequence: Synthetic oligonucleotide
gaaaagacaccuuagggac

SEQ ID NO: 192505 - RNA, 19 nt, Artificial Sequence
  Description of Artificial Sequence: Synthetic oligonucleotide
uauuaagaagaauuaaggu

SEQ ID NO: 192506 - RNA, 19 nt, Artificial Sequence
  Description of Artificial Sequence: Synthetic oligonucleotide
agaaguuaauauuaagaag

SEQ ID NO: 192507 - RNA, 19 nt, Artificial Sequence
  Description of Artificial Sequence: Synthetic oligonucleotide
uuaaguacacacuaugaga

SEQ ID NO: 192508 - RNA, 19 nt, Artificial Sequence
  Description of Artificial Sequence: Synthetic oligonucleotide
ucaguguuaguauaguaag

SEQ ID NO: 192509 - RNA, 19 nt, Artificial Sequence
  Description of Artificial Sequence: Synthetic oligonucleotide
uauuuuguaauacuagguc

SEQ ID NO: 192510 - RNA, 19 nt, Artificial Sequence
  Description of Artificial Sequence: Synthetic oligonucleotide
aagcacucacuucuuaagc

SEQ ID NO: 192511 - RNA, 19 nt, Artificial Sequence
  Description of Artificial Sequence: Synthetic oligonucleotide
uguaaagaaacccucuacu

SEQ ID NO: 192512 - RNA, 19 nt, Artificial Sequence
  Description of Artificial Sequence: Synthetic oligonucleotide
auccuaauacuauacacuc

SEQ ID NO: 192513 - RNA, 19 nt, Artificial Sequence
  Description of Artificial Sequence: Synthetic oligonucleotide
accaauaucccacaucagg

SEQ ID NO: 192514 - RNA, 19 nt, Artificial Sequence
  Description of Artificial Sequence: Synthetic oligonucleotide
aaaucauaguuuguaaaag

SEQ ID NO: 192515 - RNA, 19 nt, Artificial Sequence
  Description of Artificial Sequence: Synthetic oligonucleotide
uguguguacaacuucauuc

SEQ ID NO: 192516 - RNA, 19 nt, Artificial Sequence
  Description of Artificial Sequence: Synthetic oligonucleotide
ugauuaguaguugaguuag

SEQ ID NO: 192517 - RNA, 19 nt, Artificial Sequence
  Description of Artificial Sequence: Synthetic oligonucleotide
uaguaaguguuccaggaag

SEQ ID NO: 192518 - RNA, 19 nt, Artificial Sequence
  Description of Artificial Sequence: Synthetic oligonucleotide
uacugaaugacacuagggu

SEQ ID NO: 192519 - RNA, 19 nt, Artificial Sequence
  Description of Artificial Sequence: Synthetic oligonucleotide
aacgcguauuauuaaccac

SEQ ID NO: 192520 - RNA, 19 nt, Artificial Sequence
  Description of Artificial Sequence: Synthetic oligonucleotide
gaauuaaggugcuaaguac

SEQ ID NO: 192521 - RNA, 19 nt, Artificial Sequence
  Description of Artificial Sequence: Synthetic oligonucleotide
uguaaaagugguaaaguuu

SEQ ID NO: 192522 - RNA, 19 nt, Artificial Sequence
  Description of Artificial Sequence: Synthetic oligonucleotide
uacuccacuaucauggucu

SEQ ID NO: 192523 - RNA, 19 nt, Artificial Sequence
  Description of Artificial Sequence: Synthetic oligonucleotide
aauaaguggucuuaacuuu

SEQ ID NO: 192524 - RNA, 19 nt, Artificial Sequence
  Description of Artificial Sequence: Synthetic oligonucleotide
ugggcuagcauuuuguaga

SEQ ID NO: 192525 - RNA, 19 nt, Artificial Sequence
  Description of Artificial Sequence: Synthetic oligonucleotide
acuaugacaaacucagugu

SEQ ID NO: 192526 - RNA, 19 nt, Artificial Sequence
  Description of Artificial Sequence: Synthetic oligonucleotide
aaacgcguauuauuaacca

SEQ ID NO: 192527 - RNA, 19 nt, Artificial Sequence
  Description of Artificial Sequence: Synthetic oligonucleotide
uaacugacuauacuaugcc

SEQ ID NO: 192528 - RNA, 19 nt, Artificial Sequence
  Description of Artificial Sequence: Synthetic oligonucleotide
auagaaaacaaguaucguu

SEQ ID NO: 192529 - RNA, 19 nt, Artificial Sequence
  Description of Artificial Sequence: Synthetic oligonucleotide
auuguauccuguuacauuu

SEQ ID NO: 192530 - RNA, 19 nt, Artificial Sequence
  Description of Artificial Sequence: Synthetic oligonucleotide
aguguuaguauaguaagug

SEQ ID NO: 192531 - RNA, 19 nt, Artificial Sequence
  Description of Artificial Sequence: Synthetic oligonucleotide
aguauaguaaguguuccag

SEQ ID NO: 192532 - RNA, 19 nt, Artificial Sequence
  Description of Artificial Sequence: Synthetic oligonucleotide
caaguucaacgcuauauag

SEQ ID NO: 192533 - RNA, 19 nt, Artificial Sequence
  Description of Artificial Sequence: Synthetic oligonucleotide
uaguaguugaguuagcaua

SEQ ID NO: 192534 - RNA, 19 nt, Artificial Sequence
  Description of Artificial Sequence: Synthetic oligonucleotide
auuauuaaccacgaucucu

SEQ ID NO: 192535 - RNA, 19 nt, Artificial Sequence
  Description of Artificial Sequence: Synthetic oligonucleotide
acuaggguaauaacuaagg

SEQ ID NO: 192536 - RNA, 19 nt, Artificial Sequence
  Description of Artificial Sequence: Synthetic oligonucleotide
ucuacuuugccuugaaaau

SEQ ID NO: 192537 - RNA, 19 nt, Artificial Sequence
  Description of Artificial Sequence: Synthetic oligonucleotide
uuacacuaauauaaacaga

SEQ ID NO: 192538 - RNA, 19 nt, Artificial Sequence
  Description of Artificial Sequence: Synthetic oligonucleotide
ucguuuauuacauggacuu

SEQ ID NO: 192539 - RNA, 19 nt, Artificial Sequence
  Description of Artificial Sequence: Synthetic oligonucleotide
uaaggugcuaaguacagua

SEQ ID NO: 192540 - RNA, 19 nt, Artificial Sequence
  Description of Artificial Sequence: Synthetic oligonucleotide
aguucaacgcuauauaguu

SEQ ID NO: 192541 - RNA, 19 nt, Artificial Sequence
  Description of Artificial Sequence: Synthetic oligonucleotide
uugaguuagcauaaagauc

SEQ ID NO: 192542 - RNA, 19 nt, Artificial Sequence
  Description of Artificial Sequence: Synthetic oligonucleotide
uuauccagcccaacaauga

SEQ ID NO: 192543 - RNA, 19 nt, Artificial Sequence
  Description of Artificial Sequence: Synthetic oligonucleotide
aaauauaugugaaccauuu

SEQ ID NO: 192544 - RNA, 19 nt, Artificial Sequence
  Description of Artificial Sequence: Synthetic oligonucleotide
uaguugaguuagcauaaag

SEQ ID NO: 192545 - RNA, 19 nt, Artificial Sequence
  Description of Artificial Sequence: Synthetic oligonucleotide
aaagcggucaaaucuguua

SEQ ID NO: 192546 - RNA, 19 nt, Artificial Sequence
  Description of Artificial Sequence: Synthetic oligonucleotide
agcuauaaaccacaaucug

SEQ ID NO: 192547 - RNA, 19 nt, Artificial Sequence
  Description of Artificial Sequence: Synthetic oligonucleotide
acugauuaguaguugaguu

SEQ ID NO: 192548 - RNA, 19 nt, Artificial Sequence
  Description of Artificial Sequence: Synthetic oligonucleotide
gaaacgcguauuauuaacc

SEQ ID NO: 192549 - RNA, 19 nt, Artificial Sequence
  Description of Artificial Sequence: Synthetic oligonucleotide
auaauugcuuaccauguaa

SEQ ID NO: 192550 - RNA, 19 nt, Artificial Sequence
  Description of Artificial Sequence: Synthetic oligonucleotide
aacaacuaugacaaacuca

SEQ ID NO: 192551 - RNA, 19 nt, Artificial Sequence
  Description of Artificial Sequence: Synthetic oligonucleotide
uguaauacuaggucucaaa

SEQ ID NO: 192552 - RNA, 19 nt, Artificial Sequence
  Description of Artificial Sequence: Synthetic oligonucleotide
aacugacuauacuaugcca

SEQ ID NO: 192553 - RNA, 19 nt, Artificial Sequence
  Description of Artificial Sequence: Synthetic oligonucleotide
uuaccauguaauucugccc

SEQ ID NO: 192554 - RNA, 19 nt, Artificial Sequence
  Description of Artificial Sequence: Synthetic oligonucleotide
ucauuuuaggcugucuuca

SEQ ID NO: 192555 - RNA, 19 nt, Artificial Sequence
  Description of Artificial Sequence: Synthetic oligonucleotide
cuuggcauaaccccucgcc

SEQ ID NO: 192556 - RNA, 19 nt, Artificial Sequence
  Description of Artificial Sequence: Synthetic oligonucleotide
guaacugacuauacuaugc

SEQ ID NO: 192557 - RNA, 19 nt, Artificial Sequence
  Description of Artificial Sequence: Synthetic oligonucleotide
uucacauaugaucuaggau

SEQ ID NO: 192558 - RNA, 19 nt, Artificial Sequence
  Description of Artificial Sequence: Synthetic oligonucleotide
uaauugcuuaccauguaau

SEQ ID NO: 192559 - RNA, 19 nt, Artificial Sequence
  Description of Artificial Sequence: Synthetic oligonucleotide
uuaaucaacugcaccugcu

SEQ ID NO: 192560 - RNA, 19 nt, Artificial Sequence
  Description of Artificial Sequence: Synthetic oligonucleotide
guauuauuaaccacgaucu

SEQ ID NO: 192561 - RNA, 19 nt, Artificial Sequence
  Description of Artificial Sequence: Synthetic oligonucleotide
auaugaucuaggaugagcu

SEQ ID NO: 192562 - RNA, 19 nt, Artificial Sequence
  Description of Artificial Sequence: Synthetic oligonucleotide
cacacuaugagaaaugucu

SEQ ID NO: 192563 - RNA, 19 nt, Artificial Sequence
  Description of Artificial Sequence: Synthetic oligonucleotide
cauaugaucuaggaugagc

SEQ ID NO: 192564 - RNA, 19 nt, Artificial Sequence
  Description of Artificial Sequence: Synthetic oligonucleotide
uucccuuacuccacuauca

SEQ ID NO: 192565 - RNA, 19 nt, Artificial Sequence
  Description of Artificial Sequence: Synthetic oligonucleotide
acuaccaaagauccgcaca

SEQ ID NO: 192566 - RNA, 19 nt, Artificial Sequence
  Description of Artificial Sequence: Synthetic oligonucleotide
ucuuagauccucgugggcu

SEQ ID NO: 192567 - RNA, 19 nt, Artificial Sequence
  Description of Artificial Sequence: Synthetic oligonucleotide
ccuaauacuauacacucag

SEQ ID NO: 192568 - RNA, 19 nt, Artificial Sequence
  Description of Artificial Sequence: Synthetic oligonucleotide
uuggaggugagcaaacauc

SEQ ID NO: 192569 - RNA, 19 nt, Artificial Sequence
  Description of Artificial Sequence: Synthetic oligonucleotide
aagcggucaaaucuguuau

SEQ ID NO: 192570 - RNA, 19 nt, Artificial Sequence
  Description of Artificial Sequence: Synthetic oligonucleotide
aauaauugcuuaccaugua

SEQ ID NO: 192571 - RNA, 19 nt, Artificial Sequence
  Description of Artificial Sequence: Synthetic oligonucleotide
acgcguauuauuaaccacg

SEQ ID NO: 192572 - RNA, 19 nt, Artificial Sequence
  Description of Artificial Sequence: Synthetic oligonucleotide
gauagacucagaaucucug

SEQ ID NO: 192573 - RNA, 19 nt, Artificial Sequence
  Description of Artificial Sequence: Synthetic oligonucleotide
uuaaccacgaucucuucua

SEQ ID NO: 192574 - RNA, 19 nt, Artificial Sequence
  Description of Artificial Sequence: Synthetic oligonucleotide
gauaccaagggcaauuaga

SEQ ID NO: 192575 - RNA, 19 nt, Artificial Sequence
  Description of Artificial Sequence: Synthetic oligonucleotide
guggucuuaacuuuucuuc

SEQ ID NO: 192576 - RNA, 19 nt, Artificial Sequence
  Description of Artificial Sequence: Synthetic oligonucleotide
agaaacccucuacuuugcc

SEQ ID NO: 192577 - RNA, 19 nt, Artificial Sequence
  Description of Artificial Sequence: Synthetic oligonucleotide
ucuaguggacacucgacuc

SEQ ID NO: 192578 - RNA, 19 nt, Artificial Sequence
  Description of Artificial Sequence: Synthetic oligonucleotide
guugaguuagcauaaagau

SEQ ID NO: 192579 - RNA, 19 nt, Artificial Sequence
  Description of Artificial Sequence: Synthetic oligonucleotide
acugaaugacacuagggua

SEQ ID NO: 192580 - RNA, 19 nt, Artificial Sequence
  Description of Artificial Sequence: Synthetic oligonucleotide
uccuaauacuauacacuca

SEQ ID NO: 192581 - RNA, 19 nt, Artificial Sequence
  Description of Artificial Sequence: Synthetic oligonucleotide
caagcacucacuucuuaag

SEQ ID NO: 192582 - RNA, 19 nt, Artificial Sequence
  Description of Artificial Sequence: Synthetic oligonucleotide
cagacuauagaugcauucc

SEQ ID NO: 192583 - RNA, 19 nt, Artificial Sequence
  Description of Artificial Sequence: Synthetic oligonucleotide
cacuaggguaauaacuaag

SEQ ID NO: 192584 - RNA, 19 nt, Artificial Sequence
  Description of Artificial Sequence: Synthetic oligonucleotide
uaauucugcccaguuacgc

SEQ ID NO: 192585 - RNA, 19 nt, Artificial Sequence
  Description of Artificial Sequence: Synthetic oligonucleotide
uuucuauugguagcuauaa

SEQ ID NO: 192586 - RNA, 19 nt, Artificial Sequence
  Description of Artificial Sequence: Synthetic oligonucleotide
cuauuguaggggaugugug

SEQ ID NO: 192587 - RNA, 19 nt, Artificial Sequence
  Description of Artificial Sequence: Synthetic oligonucleotide
uauagaaguuagcuucaaa

SEQ ID NO: 192588 - RNA, 19 nt, Artificial Sequence
  Description of Artificial Sequence: Synthetic oligonucleotide
uuggcauaaccccucgcca

SEQ ID NO: 192589 - RNA, 19 nt, Artificial Sequence
  Description of Artificial Sequence: Synthetic oligonucleotide
ugcuguuaccaucucuuac

SEQ ID NO: 192590 - RNA, 19 nt, Artificial Sequence
  Description of Artificial Sequence: Synthetic oligonucleotide
auaauuagcccaauuguau

SEQ ID NO: 192591 - RNA, 19 nt, Artificial Sequence
  Description of Artificial Sequence: Synthetic oligonucleotide
uauuauuaaccacgaucuc

SEQ ID NO: 192592 - RNA, 19 nt, Artificial Sequence
  Description of Artificial Sequence: Synthetic oligonucleotide
aagacucacucuuccauuu

SEQ ID NO: 192593 - RNA, 19 nt, Artificial Sequence
  Description of Artificial Sequence: Synthetic oligonucleotide
ucaugcauucuuuuacauc

SEQ ID NO: 192594 - RNA, 19 nt, Artificial Sequence
  Description of Artificial Sequence: Synthetic oligonucleotide
auuaaggugcuaaguacag

SEQ ID NO: 192595 - RNA, 19 nt, Artificial Sequence
  Description of Artificial Sequence: Synthetic oligonucleotide
uggucuuuuauagaaguua

SEQ ID NO: 192596 - RNA, 19 nt, Artificial Sequence
  Description of Artificial Sequence: Synthetic oligonucleotide
uacacacuaugagaaaugu

SEQ ID NO: 192597 - RNA, 19 nt, Artificial Sequence
  Description of Artificial Sequence: Synthetic oligonucleotide
cacuaugagaaaugucuac

SEQ ID NO: 192598 - RNA, 19 nt, Artificial Sequence
  Description of Artificial Sequence: Synthetic oligonucleotide
cauaauuagcccaauugua

SEQ ID NO: 192599 - RNA, 19 nt, Artificial Sequence
  Description of Artificial Sequence: Synthetic oligonucleotide
cugaaugacacuaggguaa

SEQ ID NO: 192600 - RNA, 19 nt, Artificial Sequence
  Description of Artificial Sequence: Synthetic oligonucleotide
cucugaugaugcaagagca

SEQ ID NO: 192601 - RNA, 19 nt, Artificial Sequence
  Description of Artificial Sequence: Synthetic oligonucleotide
uggcauaaccccucgccag

SEQ ID NO: 192602 - RNA, 19 nt, Artificial Sequence
  Description of Artificial Sequence: Synthetic oligonucleotide
cguauuauuaaccacgauc

SEQ ID NO: 192603 - RNA, 19 nt, Artificial Sequence
  Description of Artificial Sequence: Synthetic oligonucleotide
aguacacacuaugagaaau

SEQ ID NO: 192604 - RNA, 19 nt, Artificial Sequence
  Description of Artificial Sequence: Synthetic oligonucleotide
cugacuauacuaugccaac

SEQ ID NO: 192605 - RNA, 19 nt, Artificial Sequence
  Description of Artificial Sequence: Synthetic oligonucleotide
cuacuuugccuugaaaaug

SEQ ID NO: 192606 - RNA, 19 nt, Artificial Sequence
  Description of Artificial Sequence: Synthetic oligonucleotide
gugccuguaagagaggacc

SEQ ID NO: 192607 - RNA, 19 nt, Artificial Sequence
  Description of Artificial Sequence: Synthetic oligonucleotide
ugcuuggauaugccacugg

SEQ ID NO: 192608 - RNA, 19 nt, Artificial Sequence
  Description of Artificial Sequence: Synthetic oligonucleotide
cuuggauaugccacuggug

SEQ ID NO: 192609 - RNA, 19 nt, Artificial Sequence
  Description of Artificial Sequence: Synthetic oligonucleotide
caguaagagcacagcaugc

SEQ ID NO: 192610 - RNA, 19 nt, Artificial Sequence
  Description of Artificial Sequence: Synthetic oligonucleotide
ugguaaaguuucaugcuuu

SEQ ID NO: 192611 - RNA, 19 nt, Artificial Sequence
  Description of Artificial Sequence: Synthetic oligonucleotide
auaaccccucgccaguaag

SEQ ID NO: 192612 - RNA, 19 nt, Artificial Sequence
  Description of Artificial Sequence: Synthetic oligonucleotide
ucaacgcuauauaguuuug

SEQ ID NO: 192613 - RNA, 19 nt, Artificial Sequence
  Description of Artificial Sequence: Synthetic oligonucleotide
ggucaaaucuguuauguaa

SEQ ID NO: 192614 - RNA, 19 nt, Artificial Sequence
  Description of Artificial Sequence: Synthetic oligonucleotide
ggggaagucuaauaauugc

SEQ ID NO: 192615 - RNA, 19 nt, Artificial Sequence
  Description of Artificial Sequence: Synthetic oligonucleotide
cacagaaaugacacuuaac

SEQ ID NO: 192616 - RNA, 19 nt, Artificial Sequence
  Description of Artificial Sequence: Synthetic oligonucleotide
ugacagucaguaacugacu

SEQ ID NO: 192617 - RNA, 19 nt, Artificial Sequence
  Description of Artificial Sequence: Synthetic oligonucleotide
uggucuuaaucaacugcac

SEQ ID NO: 192618 - RNA, 19 nt, Artificial Sequence
  Description of Artificial Sequence: Synthetic oligonucleotide
ggucuuaaucaacugcacc

SEQ ID NO: 192619 - RNA, 19 nt, Artificial Sequence
  Description of Artificial Sequence: Synthetic oligonucleotide
acugacuauacuaugccaa

SEQ ID NO: 192620 - RNA, 19 nt, Artificial Sequence
  Description of Artificial Sequence: Synthetic oligonucleotide
augugggaaaucauuuuag

SEQ ID NO: 192621 - RNA, 19 nt, Artificial Sequence
  Description of Artificial Sequence: Synthetic oligonucleotide
aaccccucgccaguaagag

SEQ ID NO: 192622 - RNA, 19 nt, Artificial Sequence
  Description of Artificial Sequence: Synthetic oligonucleotide
uucuauugguagcuauaaa

SEQ ID NO: 192623 - RNA, 19 nt, Artificial Sequence
  Description of Artificial Sequence: Synthetic oligonucleotide
gaacgaagggacucuugac

SEQ ID NO: 192624 - RNA, 19 nt, Artificial Sequence
  Description of Artificial Sequence: Synthetic oligonucleotide
gaggagaaugugaacauaa

SEQ ID NO: 192625 - RNA, 19 nt, Artificial Sequence
  Description of Artificial Sequence: Synthetic oligonucleotide
agucaguaacugacuauac

SEQ ID NO: 192626 - RNA, 19 nt, Artificial Sequence
  Description of Artificial Sequence: Synthetic oligonucleotide
uucuuagauccucgugggc

SEQ ID NO: 192627 - RNA, 19 nt, Artificial Sequence
  Description of Artificial Sequence: Synthetic oligonucleotide
aucguuuauuacauggacu

SEQ ID NO: 192628 - RNA, 19 nt, Artificial Sequence
  Description of Artificial Sequence: Synthetic oligonucleotide
aguaguugaguuagcauaa

SEQ ID NO: 192629 - RNA, 19 nt, Artificial Sequence
  Description of Artificial Sequence: Synthetic oligonucleotide
ggaaacgcguauuauuaac

SEQ ID NO: 192630 - RNA, 19 nt, Artificial Sequence
  Description of Artificial Sequence: Synthetic oligonucleotide
cauccuaauacuauacacu

SEQ ID NO: 192631 - RNA, 19 nt, Artificial Sequence
  Description of Artificial Sequence: Synthetic oligonucleotide
ugcuuccuauuguagggga

SEQ ID NO: 192632 - RNA, 19 nt, Artificial Sequence
  Description of Artificial Sequence: Synthetic oligonucleotide
aggucaguagagaucaucu

SEQ ID NO: 192633 - RNA, 19 nt, Artificial Sequence
  Description of Artificial Sequence: Synthetic oligonucleotide
uaaccccucgccaguaaga

SEQ ID NO: 192634 - RNA, 19 nt, Artificial Sequence
  Description of Artificial Sequence: Synthetic oligonucleotide
gagcaaccuucguuggagg

SEQ ID NO: 192635 - RNA, 19 nt, Artificial Sequence
  Description of Artificial Sequence: Synthetic oligonucleotide
ucgacucacuugcuguuac

SEQ ID NO: 192636 - RNA, 19 nt, Artificial Sequence
  Description of Artificial Sequence: Synthetic oligonucleotide
acgcuauauaguuuuguuu

SEQ ID NO: 192637 - RNA, 19 nt, Artificial Sequence
  Description of Artificial Sequence: Synthetic oligonucleotide
ugacuauacuaugccaacu

SEQ ID NO: 192638 - RNA, 19 nt, Artificial Sequence
  Description of Artificial Sequence: Synthetic oligonucleotide
agagcaaacugggugguga

SEQ ID NO: 192639 - RNA, 19 nt, Artificial Sequence
  Description of Artificial Sequence: Synthetic oligonucleotide
cucgccaguaagagcacag

SEQ ID NO: 192640 - RNA, 19 nt, Artificial Sequence
  Description of Artificial Sequence: Synthetic oligonucleotide
augugcuaugacugauuag

SEQ ID NO: 192641 - RNA, 19 nt, Artificial Sequence
  Description of Artificial Sequence: Synthetic oligonucleotide
cuuccuauuguaggggaug

SEQ ID NO: 192642 - RNA, 19 nt, Artificial Sequence
  Description of Artificial Sequence: Synthetic oligonucleotide
agaaucucugaugaugcaa

SEQ ID NO: 192643 - RNA, 19 nt, Artificial Sequence
  Description of Artificial Sequence: Synthetic oligonucleotide
aucaacaauccagcuuuuc

SEQ ID NO: 192644 - RNA, 19 nt, Artificial Sequence
  Description of Artificial Sequence: Synthetic oligonucleotide
cccaauuguauccuguuac

SEQ ID NO: 192645 - RNA, 19 nt, Artificial Sequence
  Description of Artificial Sequence: Synthetic oligonucleotide
uagcccaauuguauccugu

SEQ ID NO: 192646 - RNA, 19 nt, Artificial Sequence
  Description of Artificial Sequence: Synthetic oligonucleotide
guaauacuaggucucaaau

SEQ ID NO: 192647 - RNA, 19 nt, Artificial Sequence
  Description of Artificial Sequence: Synthetic oligonucleotide
acauaacaauggccuuugg

SEQ ID NO: 192648 - RNA, 19 nt, Artificial Sequence
  Description of Artificial Sequence: Synthetic oligonucleotide
gaugaugcaagagcaaccu

SEQ ID NO: 192649 - RNA, 19 nt, Artificial Sequence
  Description of Artificial Sequence: Synthetic oligonucleotide
aguuacagcaagaaauaua

SEQ ID NO: 192650 - RNA, 19 nt, Artificial Sequence
  Description of Artificial Sequence: Synthetic oligonucleotide
ugggcauccuaauacuaua

SEQ ID NO: 192651 - RNA, 19 nt, Artificial Sequence
  Description of Artificial Sequence: Synthetic oligonucleotide
agccauuaaccugaacuug

SEQ ID NO: 192652 - RNA, 19 nt, Artificial Sequence
  Description of Artificial Sequence: Synthetic oligonucleotide
uuaaggugcuaaguacagu

SEQ ID NO: 192653 - RNA, 19 nt, Artificial Sequence
  Description of Artificial Sequence: Synthetic oligonucleotide
acacacuaugagaaauguc

SEQ ID NO: 192654 - RNA, 19 nt, Artificial Sequence
  Description of Artificial Sequence: Synthetic oligonucleotide
ugccaacuuuaacaauaga

SEQ ID NO: 192655 - RNA, 19 nt, Artificial Sequence
  Description of Artificial Sequence: Synthetic oligonucleotide
cuaugagaaaugucuacua

SEQ ID NO: 192656 - RNA, 19 nt, Artificial Sequence
  Description of Artificial Sequence: Synthetic oligonucleotide
cugauuaguaguugaguua

SEQ ID NO: 192657 - RNA, 19 nt, Artificial Sequence
  Description of Artificial Sequence: Synthetic oligonucleotide
aggugcuaaguacaguaua

SEQ ID NO: 192658 - RNA, 19 nt, Artificial Sequence
  Description of Artificial Sequence: Synthetic oligonucleotide
agcaaccuucguuggaggu

SEQ ID NO: 192659 - RNA, 19 nt, Artificial Sequence
  Description of Artificial Sequence: Synthetic oligonucleotide
uuccuauuguaggggaugu

SEQ ID NO: 192660 - RNA, 19 nt, Artificial Sequence
  Description of Artificial Sequence: Synthetic oligonucleotide
cuauagaugcauucccaaa

SEQ ID NO: 192661 - RNA, 19 nt, Artificial Sequence
  Description of Artificial Sequence: Synthetic oligonucleotide
acaauagagcaaaugcuuu

SEQ ID NO: 192662 - RNA, 19 nt, Artificial Sequence
  Description of Artificial Sequence: Synthetic oligonucleotide
accccucgccaguaagagc

SEQ ID NO: 192663 - RNA, 19 nt, Artificial Sequence
  Description of Artificial Sequence: Synthetic oligonucleotide
uaguuacagcaagaaauau

SEQ ID NO: 192664 - RNA, 19 nt, Artificial Sequence
  Description of Artificial Sequence: Synthetic oligonucleotide
uuauagaaguuagcuucaa

SEQ ID NO: 192665 - RNA, 19 nt, Artificial Sequence
  Description of Artificial Sequence: Synthetic oligonucleotide
guaaagaaacccucuacuu

SEQ ID NO: 192666 - RNA, 19 nt, Artificial Sequence
  Description of Artificial Sequence: Synthetic oligonucleotide
ucccuuacuccacuaucau

SEQ ID NO: 192667 - RNA, 19 nt, Artificial Sequence
  Description of Artificial Sequence: Synthetic oligonucleotide
agcggucaaaucuguuaug

SEQ ID NO: 192668 - RNA, 19 nt, Artificial Sequence
  Description of Artificial Sequence: Synthetic oligonucleotide
ucguuggaggugagcaaac

SEQ ID NO: 192669 - RNA, 19 nt, Artificial Sequence
  Description of Artificial Sequence: Synthetic oligonucleotide
cuaguggacacucgacuca

SEQ ID NO: 192670 - RNA, 19 nt, Artificial Sequence
  Description of Artificial Sequence: Synthetic oligonucleotide
guguuaguauaguaagugu

SEQ ID NO: 192671 - RNA, 19 nt, Artificial Sequence
  Description of Artificial Sequence: Synthetic oligonucleotide
uuagauccucgugggcuag

SEQ ID NO: 192672 - RNA, 19 nt, Artificial Sequence
  Description of Artificial Sequence: Synthetic oligonucleotide
aacucucaaaucaguuuau

SEQ ID NO: 192673 - RNA, 19 nt, Artificial Sequence
  Description of Artificial Sequence: Synthetic oligonucleotide
cauaacaauggccuuuggu

SEQ ID NO: 192674 - RNA, 19 nt, Artificial Sequence
  Description of Artificial Sequence: Synthetic oligonucleotide
auguguguacaacuucauu

SEQ ID NO: 192675 - RNA, 19 nt, Artificial Sequence
  Description of Artificial Sequence: Synthetic oligonucleotide
uccucgugggcuagcauuu

SEQ ID NO: 192676 - RNA, 19 nt, Artificial Sequence
  Description of Artificial Sequence: Synthetic oligonucleotide
ggucaguagagaucaucug

SEQ ID NO: 192677 - RNA, 19 nt, Artificial Sequence
  Description of Artificial Sequence: Synthetic oligonucleotide
aaguugccccugaacaaga

SEQ ID NO: 192678 - RNA, 19 nt, Artificial Sequence
  Description of Artificial Sequence: Synthetic oligonucleotide
gguggucuuuuauagaagu

SEQ ID NO: 192679 - RNA, 19 nt, Artificial Sequence
  Description of Artificial Sequence: Synthetic oligonucleotide
uuacgccuggccagggguc

SEQ ID NO: 192680 - RNA, 19 nt, Artificial Sequence
  Description of Artificial Sequence: Synthetic oligonucleotide
gucuaguggacacucgacu

SEQ ID NO: 192681 - RNA, 19 nt, Artificial Sequence
  Description of Artificial Sequence: Synthetic oligonucleotide
caguaucugugcugauuug

SEQ ID NO: 192682 - RNA, 19 nt, Artificial Sequence
  Description of Artificial Sequence: Synthetic oligonucleotide
ucgccaguaagagcacagc

SEQ ID NO: 192683 - RNA, 19 nt, Artificial Sequence
  Description of Artificial Sequence: Synthetic oligonucleotide
gcaugcuuggauaugccac

SEQ ID NO: 192684 - RNA, 19 nt, Artificial Sequence
  Description of Artificial Sequence: Synthetic oligonucleotide
cucgugggcuagcauuuug

SEQ ID NO: 192685 - RNA, 19 nt, Artificial Sequence
  Description of Artificial Sequence: Synthetic oligonucleotide
cuuagauccucgugggcua

SEQ ID NO: 192686 - RNA, 19 nt, Artificial Sequence
  Description of Artificial Sequence: Synthetic oligonucleotide
caaccuucguuggagguga

SEQ ID NO: 192687 - RNA, 19 nt, Artificial Sequence
  Description of Artificial Sequence: Synthetic oligonucleotide
gguaaagucagcacuuugu

SEQ ID NO: 192688 - RNA, 19 nt, Artificial Sequence
  Description of Artificial Sequence: Synthetic oligonucleotide
cauuuuaggcugucuucaa

SEQ ID NO: 192689 - RNA, 19 nt, Artificial Sequence
  Description of Artificial Sequence: Synthetic oligonucleotide
cccaguuacgccuggccag

SEQ ID NO: 192690 - RNA, 19 nt, Artificial Sequence
  Description of Artificial Sequence: Synthetic oligonucleotide
augagcuguuauccacuau

SEQ ID NO: 192691 - RNA, 19 nt, Artificial Sequence
  Description of Artificial Sequence: Synthetic oligonucleotide
aggaccugaaauagucuau

SEQ ID NO: 192692 - RNA, 19 nt, Artificial Sequence
  Description of Artificial Sequence: Synthetic oligonucleotide
gagagcaaacuggguggug

SEQ ID NO: 192693 - RNA, 19 nt, Artificial Sequence
  Description of Artificial Sequence: Synthetic oligonucleotide
aaucaacaauccagcuuuu

SEQ ID NO: 192694 - RNA, 19 nt, Artificial Sequence
  Description of Artificial Sequence: Synthetic oligonucleotide
caguguuaguauaguaagu

SEQ ID NO: 192695 - RNA, 19 nt, Artificial Sequence
  Description of Artificial Sequence: Synthetic oligonucleotide
gggucuaguggacacucga

SEQ ID NO: 192696 - RNA, 19 nt, Artificial Sequence
  Description of Artificial Sequence: Synthetic oligonucleotide
caggguuggcuuguuagga

SEQ ID NO: 192697 - RNA, 19 nt, Artificial Sequence
  Description of Artificial Sequence: Synthetic oligonucleotide
gucaugcauucuuuuacau

SEQ ID NO: 192698 - RNA, 19 nt, Artificial Sequence
  Description of Artificial Sequence: Synthetic oligonucleotide
gcaaccuucguuggaggug

SEQ ID NO: 192699 - RNA, 19 nt, Artificial Sequence
  Description of Artificial Sequence: Synthetic oligonucleotide
ggaaacuagacagcugucu

SEQ ID NO: 192700 - RNA, 19 nt, Artificial Sequence
  Description of Artificial Sequence: Synthetic oligonucleotide
gcuuaccauguaauucugc

SEQ ID NO: 192701 - RNA, 19 nt, Artificial Sequence
  Description of Artificial Sequence: Synthetic oligonucleotide
cucaaggaccugaaauagu

SEQ ID NO: 192702 - RNA, 19 nt, Artificial Sequence
  Description of Artificial Sequence: Synthetic oligonucleotide
guuggcuuguuaggacaac

SEQ ID NO: 192703 - RNA, 19 nt, Artificial Sequence
  Description of Artificial Sequence: Synthetic oligonucleotide
cacaucgagcaggcaacac

SEQ ID NO: 192704 - RNA, 19 nt, Artificial Sequence
  Description of Artificial Sequence: Synthetic oligonucleotide
cuugagguauauacacaau

SEQ ID NO: 192705 - RNA, 19 nt, Artificial Sequence
  Description of Artificial Sequence: Synthetic oligonucleotide
ggucuaguggacacucgac

SEQ ID NO: 192706 - RNA, 19 nt, Artificial Sequence
  Description of Artificial Sequence: Synthetic oligonucleotide
ggugcuaaguacaguauau

SEQ ID NO: 192707 - RNA, 19 nt, Artificial Sequence
  Description of Artificial Sequence: Synthetic oligonucleotide
gagguugucuguacuguau

SEQ ID NO: 192708 - RNA, 19 nt, Artificial Sequence
  Description of Artificial Sequence: Synthetic oligonucleotide
guaguugaguuagcauaaa

SEQ ID NO: 192709 - RNA, 19 nt, Artificial Sequence
  Description of Artificial Sequence: Synthetic oligonucleotide
cugaaucuagucuccugau

SEQ ID NO: 192710 - RNA, 19 nt, Artificial Sequence
  Description of Artificial Sequence: Synthetic oligonucleotide
ccaguuacgccuggccagg

SEQ ID NO: 192711 - RNA, 19 nt, Artificial Sequence
  Description of Artificial Sequence: Synthetic oligonucleotide
gccccugaacaagaaauuc

SEQ ID NO: 192712 - RNA, 19 nt, Artificial Sequence
  Description of Artificial Sequence: Synthetic oligonucleotide
guggacacucgacucacuu

SEQ ID NO: 192713 - RNA, 19 nt, Artificial Sequence
  Description of Artificial Sequence: Synthetic oligonucleotide
caguuacgccuggccaggg

SEQ ID NO: 192714 - RNA, 19 nt, Artificial Sequence
  Description of Artificial Sequence: Synthetic oligonucleotide
gguagcuauaaaccacaau

SEQ ID NO: 192715 - RNA, 19 nt, Artificial Sequence
  Description of Artificial Sequence: Synthetic oligonucleotide
cauaaccccucgccaguaa

SEQ ID NO: 192716 - RNA, 19 nt, Artificial Sequence
  Description of Artificial Sequence: Synthetic oligonucleotide
aguugccccugaacaagaa

SEQ ID NO: 192717 - RNA, 19 nt, Artificial Sequence
  Description of Artificial Sequence: Synthetic oligonucleotide
auaugccacugguggucuu

SEQ ID NO: 192718 - RNA, 19 nt, Artificial Sequence
  Description of Artificial Sequence: Synthetic oligonucleotide
gcggucaaaucuguuaugu

SEQ ID NO: 192719 - RNA, 19 nt, Artificial Sequence
  Description of Artificial Sequence: Synthetic oligonucleotide
caacuaugacaaacucagu

SEQ ID NO: 192720 - RNA, 19 nt, Artificial Sequence
  Description of Artificial Sequence: Synthetic oligonucleotide
ccuauuguaggggaugugu

SEQ ID NO: 192721 - RNA, 19 nt, Artificial Sequence
  Description of Artificial Sequence: Synthetic oligonucleotide
cgcguauuauuaaccacga

SEQ ID NO: 192722 - RNA, 19 nt, Artificial Sequence
  Description of Artificial Sequence: Synthetic oligonucleotide
gguuggcuuguuaggacaa

SEQ ID NO: 192723 - RNA, 19 nt, Artificial Sequence
  Description of Artificial Sequence: Synthetic oligonucleotide
ggcacaacaccaccacaua

SEQ ID NO: 192724 - RNA, 19 nt, Artificial Sequence
  Description of Artificial Sequence: Synthetic oligonucleotide
ccuaacuuguguagcucaa

SEQ ID NO: 192725 - RNA, 19 nt, Artificial Sequence
  Description of Artificial Sequence: Synthetic oligonucleotide
acaauggccuuugguccua

SEQ ID NO: 192726 - RNA, 19 nt, Artificial Sequence
  Description of Artificial Sequence: Synthetic oligonucleotide
gcccaauuguauccuguua

SEQ ID NO: 192727 - RNA, 19 nt, Artificial Sequence
  Description of Artificial Sequence: Synthetic oligonucleotide
ggcauaaccccucgccagu

SEQ ID NO: 192728 - RNA, 19 nt, Artificial Sequence
  Description of Artificial Sequence: Synthetic oligonucleotide
caguagagaucaucugauu

SEQ ID NO: 192729 - RNA, 19 nt, Artificial Sequence
  Description of Artificial Sequence: Synthetic oligonucleotide
guucaacgcuauauaguuu

SEQ ID NO: 192730 - RNA, 19 nt, Artificial Sequence
  Description of Artificial Sequence: Synthetic oligonucleotide
cucgacucacuugcuguua

SEQ ID NO: 192731 - RNA, 19 nt, Artificial Sequence
  Description of Artificial Sequence: Synthetic oligonucleotide
ggaccucuugccugucugu

SEQ ID NO: 192732 - RNA, 19 nt, Artificial Sequence
  Description of Artificial Sequence: Synthetic oligonucleotide
ccagcccaacaaugauaac

SEQ ID NO: 192733 - RNA, 19 nt, Artificial Sequence
  Description of Artificial Sequence: Synthetic oligonucleotide
cugggagaucucugcuacu

SEQ ID NO: 192734 - RNA, 19 nt, Artificial Sequence
  Description of Artificial Sequence: Synthetic oligonucleotide
cagguaaagucagcacuuu

SEQ ID NO: 192735 - RNA, 19 nt, Artificial Sequence
  Description of Artificial Sequence: Synthetic oligonucleotide
ccucuacuuugccuugaaa

SEQ ID NO: 192736 - RNA, 19 nt, Artificial Sequence
  Description of Artificial Sequence: Synthetic oligonucleotide
gcguauuauuaaccacgau

SEQ ID NO: 192737 - RNA, 19 nt, Artificial Sequence
  Description of Artificial Sequence: Synthetic oligonucleotide
cccucgccaguaagagcac

SEQ ID NO: 192738 - RNA, 19 nt, Artificial Sequence
  Description of Artificial Sequence: Synthetic oligonucleotide
gcauaaccccucgccagua

SEQ ID NO: 192739 - RNA, 19 nt, Artificial Sequence
  Description of Artificial Sequence: Synthetic oligonucleotide
gcuuccuauuguaggggau

SEQ ID NO: 192740 - RNA, 19 nt, Artificial Sequence
  Description of Artificial Sequence: Synthetic oligonucleotide
gaccaacauugucccucuu

SEQ ID NO: 192741 - RNA, 19 nt, Artificial Sequence
  Description of Artificial Sequence: Synthetic oligonucleotide
ccucgugggcuagcauuuu

SEQ ID NO: 192742 - RNA, 19 nt, Artificial Sequence
  Description of Artificial Sequence: Synthetic oligonucleotide
uuagaaaugccugugacgg

SEQ ID NO: 192743 - RNA, 19 nt, Artificial Sequence
  Description of Artificial Sequence: Synthetic oligonucleotide
uaauuuauggacaucugcc

SEQ ID NO: 192744 - RNA, 19 nt, Artificial Sequence
  Description of Artificial Sequence: Synthetic oligonucleotide
uuugaacucgcuaagggcc

SEQ ID NO: 192745 - RNA, 19 nt, Artificial Sequence
  Description of Artificial Sequence: Synthetic oligonucleotide
ucuauugcagaguugagug

SEQ ID NO: 192746 - RNA, 19 nt, Artificial Sequence
  Description of Artificial Sequence: Synthetic oligonucleotide
auucggacgagcuuuacac

SEQ ID NO: 192747 - RNA, 19 nt, Artificial Sequence
  Description of Artificial Sequence: Synthetic oligonucleotide
gaaguaaugucaucaacag

SEQ ID NO: 192748 - RNA, 19 nt, Artificial Sequence
  Description of Artificial Sequence: Synthetic oligonucleotide
uugacuuugcugcagaugu

SEQ ID NO: 192749 - RNA, 19 nt, Artificial Sequence
  Description of Artificial Sequence: Synthetic oligonucleotide
aagcguuccucgcugaagc

SEQ ID NO: 192750 - RNA, 19 nt, Artificial Sequence
  Description of Artificial Sequence: Synthetic oligonucleotide
uaucccuaagucuugcucg

SEQ ID NO: 192751 - RNA, 19 nt, Artificial Sequence
  Description of Artificial Sequence: Synthetic oligonucleotide
auaaccugaggacagagug

SEQ ID NO: 192752 - RNA, 19 nt, Artificial Sequence
  Description of Artificial Sequence: Synthetic oligonucleotide
gacuuaagaaguuaaugug

SEQ ID NO: 192753 - RNA, 19 nt, Artificial Sequence
  Description of Artificial Sequence: Synthetic oligonucleotide
gauacaugguccaugacag

SEQ ID NO: 192754 - RNA, 19 nt, Artificial Sequence
  Description of Artificial Sequence: Synthetic oligonucleotide
cauuauuggagauugaaca

SEQ ID NO: 192755 - RNA, 19 nt, Artificial Sequence
  Description of Artificial Sequence: Synthetic oligonucleotide
uuuguuggcauguucacga

SEQ ID NO: 192756 - RNA, 19 nt, Artificial Sequence
  Description of Artificial Sequence: Synthetic oligonucleotide
uuguccagcuaucaguugg

SEQ ID NO: 192757 - RNA, 19 nt, Artificial Sequence
  Description of Artificial Sequence: Synthetic oligonucleotide
ugauauucagcuuauccac

SEQ ID NO: 192758 - RNA, 19 nt, Artificial Sequence
  Description of Artificial Sequence: Synthetic oligonucleotide
uauaucaagucccgguuag

SEQ ID NO: 192759 - RNA, 19 nt, Artificial Sequence
  Description of Artificial Sequence: Synthetic oligonucleotide
acuucugaauucuaaagcu

SEQ ID NO: 192760 - RNA, 19 nt, Artificial Sequence
  Description of Artificial Sequence: Synthetic oligonucleotide
aaguccgucaucuccauca

SEQ ID NO: 192761 - RNA, 19 nt, Artificial Sequence
  Description of Artificial Sequence: Synthetic oligonucleotide
uccgucaucuccaucauga

SEQ ID NO: 192762 - RNA, 19 nt, Artificial Sequence
  Description of Artificial Sequence: Synthetic oligonucleotide
ucauuauuggagauugaac

SEQ ID NO: 192763 - RNA, 19 nt, Artificial Sequence
  Description of Artificial Sequence: Synthetic oligonucleotide
aaucuaaguguucucuacu

SEQ ID NO: 192764 - RNA, 19 nt, Artificial Sequence
  Description of Artificial Sequence: Synthetic oligonucleotide
uucaauauaccaucuucca

SEQ ID NO: 192765 - RNA, 19 nt, Artificial Sequence
  Description of Artificial Sequence: Synthetic oligonucleotide
auaguuguccaucucugag

SEQ ID NO: 192766 - RNA, 19 nt, Artificial Sequence
  Description of Artificial Sequence: Synthetic oligonucleotide
ugaggugacuacauggaug

SEQ ID NO: 192767 - RNA, 19 nt, Artificial Sequence
  Description of Artificial Sequence: Synthetic oligonucleotide
uauacuucugaauucuaaa

SEQ ID NO: 192768 - RNA, 19 nt, Artificial Sequence
  Description of Artificial Sequence: Synthetic oligonucleotide
uacucugcggcuuugcugc

SEQ ID NO: 192769 - RNA, 19 nt, Artificial Sequence
  Description of Artificial Sequence: Synthetic oligonucleotide
cuuagucugcgucucaucc

SEQ ID NO: 192770 - RNA, 19 nt, Artificial Sequence
  Description of Artificial Sequence: Synthetic oligonucleotide
ucaauauaccaucuuccac

SEQ ID NO: 192771 - RNA, 19 nt, Artificial Sequence
  Description of Artificial Sequence: Synthetic oligonucleotide
acugucgucccauuuggac

SEQ ID NO: 192772 - RNA, 19 nt, Artificial Sequence
  Description of Artificial Sequence: Synthetic oligonucleotide
augugauucucugagacag

SEQ ID NO: 192773 - RNA, 19 nt, Artificial Sequence
  Description of Artificial Sequence: Synthetic oligonucleotide
ucauaguuguccaucucug

SEQ ID NO: 192774 - RNA, 19 nt, Artificial Sequence
  Description of Artificial Sequence: Synthetic oligonucleotide
aaugugauucucugagaca

SEQ ID NO: 192775 - RNA, 19 nt, Artificial Sequence
  Description of Artificial Sequence: Synthetic oligonucleotide
aauggucugcgauggugcg

SEQ ID NO: 192776 - RNA, 19 nt, Artificial Sequence
  Description of Artificial Sequence: Synthetic oligonucleotide
uuuauggacaucugccaug

SEQ ID NO: 192777 - RNA, 19 nt, Artificial Sequence
  Description of Artificial Sequence: Synthetic oligonucleotide
ugcaacaucagggugcugc

SEQ ID NO: 192778 - RNA, 19 nt, Artificial Sequence
  Description of Artificial Sequence: Synthetic oligonucleotide
ucccgguuagcuuuguagg

SEQ ID NO: 192779 - RNA, 19 nt, Artificial Sequence
  Description of Artificial Sequence: Synthetic oligonucleotide
aaccucaaucaauuuguug

SEQ ID NO: 192780 - RNA, 19 nt, Artificial Sequence
  Description of Artificial Sequence: Synthetic oligonucleotide
ugcugcuaaggccaaugcg

SEQ ID NO: 192781 - RNA, 19 nt, Artificial Sequence
  Description of Artificial Sequence: Synthetic oligonucleotide
uaaguguucucuacuuagc

SEQ ID NO: 192782 - RNA, 19 nt, Artificial Sequence
  Description of Artificial Sequence: Synthetic oligonucleotide
cucgcuaagggccugcacg

SEQ ID NO: 192783 - RNA, 19 nt, Artificial Sequence
  Description of Artificial Sequence: Synthetic oligonucleotide
augacuuaagaaguuaaug

SEQ ID NO: 192784 - RNA, 19 nt, Artificial Sequence
  Description of Artificial Sequence: Synthetic oligonucleotide
uguaggcugcaacaucagg

SEQ ID NO: 192785 - RNA, 19 nt, Artificial Sequence
  Description of Artificial Sequence: Synthetic oligonucleotide
uguggaaucuaaguguucu

SEQ ID NO: 192786 - RNA, 19 nt, Artificial Sequence
  Description of Artificial Sequence: Synthetic oligonucleotide
agagcaaugcgcuggaggu

SEQ ID NO: 192787 - RNA, 19 nt, Artificial Sequence
  Description of Artificial Sequence: Synthetic oligonucleotide
uuuaucuauugcagaguug

SEQ ID NO: 192788 - RNA, 19 nt, Artificial Sequence
  Description of Artificial Sequence: Synthetic oligonucleotide
ucauccauaggcugggcug

SEQ ID NO: 192789 - RNA, 19 nt, Artificial Sequence
  Description of Artificial Sequence: Synthetic oligonucleotide
ugcggcauugauaaccuga

SEQ ID NO: 192790 - RNA, 19 nt, Artificial Sequence
  Description of Artificial Sequence: Synthetic oligonucleotide
uauugcagaguugagugca

SEQ ID NO: 192791 - RNA, 19 nt, Artificial Sequence
  Description of Artificial Sequence: Synthetic oligonucleotide
uccacuaauaaugcuuucc

SEQ ID NO: 192792 - RNA, 19 nt, Artificial Sequence
  Description of Artificial Sequence: Synthetic oligonucleotide
acaaguaauuuauggacau

SEQ ID NO: 192793 - RNA, 19 nt, Artificial Sequence
  Description of Artificial Sequence: Synthetic oligonucleotide
aggccuaaagcguuccucg

SEQ ID NO: 192794 - RNA, 19 nt, Artificial Sequence
  Description of Artificial Sequence: Synthetic oligonucleotide
ucucuacuuagcaaacaca

SEQ ID NO: 192795 - RNA, 19 nt, Artificial Sequence
  Description of Artificial Sequence: Synthetic oligonucleotide
aaagagggacguuggucuc

SEQ ID NO: 192796 - RNA, 19 nt, Artificial Sequence
  Description of Artificial Sequence: Synthetic oligonucleotide
uuugcgaagcugucuacgc

SEQ ID NO: 192797 - RNA, 19 nt, Artificial Sequence
  Description of Artificial Sequence: Synthetic oligonucleotide
aguugagugcaucacuucu

SEQ ID NO: 192798 - RNA, 19 nt, Artificial Sequence
  Description of Artificial Sequence: Synthetic oligonucleotide
uucauuauuggagauugaa

SEQ ID NO: 192799 - RNA, 19 nt, Artificial Sequence
  Description of Artificial Sequence: Synthetic oligonucleotide
caaugcggcauugauaacc

SEQ ID NO: 192800 - RNA, 19 nt, Artificial Sequence
  Description of Artificial Sequence: Synthetic oligonucleotide
uaugacuuaagaaguuaau

SEQ ID NO: 192801 - RNA, 19 nt, Artificial Sequence
  Description of Artificial Sequence: Synthetic oligonucleotide
guagagagcaaugcgcugg

SEQ ID NO: 192802 - RNA, 19 nt, Artificial Sequence
  Description of Artificial Sequence: Synthetic oligonucleotide
ugcaggauuccucuagcug

SEQ ID NO: 192803 - RNA, 19 nt, Artificial Sequence
  Description of Artificial Sequence: Synthetic oligonucleotide
aaguuaaugugguacucuu

SEQ ID NO: 192804 - RNA, 19 nt, Artificial Sequence
  Description of Artificial Sequence: Synthetic oligonucleotide
aggacagagugcuucuaac

SEQ ID NO: 192805 - RNA, 19 nt, Artificial Sequence
  Description of Artificial Sequence: Synthetic oligonucleotide
aguaccaaaagagggacgu

SEQ ID NO: 192806 - RNA, 19 nt, Artificial Sequence
  Description of Artificial Sequence: Synthetic oligonucleotide
gccaucguaaaccagucgg

SEQ ID NO: 192807 - RNA, 19 nt, Artificial Sequence
  Description of Artificial Sequence: Synthetic oligonucleotide
uaccaaaagagggacguug

SEQ ID NO: 192808 - RNA, 19 nt, Artificial Sequence
  Description of Artificial Sequence: Synthetic oligonucleotide
aguccuuaucaucagcacu

SEQ ID NO: 192809 - RNA, 19 nt, Artificial Sequence
  Description of Artificial Sequence: Synthetic oligonucleotide
auugaacaggccaaguuug

SEQ ID NO: 192810 - RNA, 19 nt, Artificial Sequence
  Description of Artificial Sequence: Synthetic oligonucleotide
cuuuacguccagcauugcc

SEQ ID NO: 192811 - RNA, 19 nt, Artificial Sequence
  Description of Artificial Sequence: Synthetic oligonucleotide
gaugcaguguagaggauug

SEQ ID NO: 192812 - RNA, 19 nt, Artificial Sequence
  Description of Artificial Sequence: Synthetic oligonucleotide
agacgacaagcucuccacc

SEQ ID NO: 192813 - RNA, 19 nt, Artificial Sequence
  Description of Artificial Sequence: Synthetic oligonucleotide
uccucgggaguccuuauca

SEQ ID NO: 192814 - RNA, 19 nt, Artificial Sequence
  Description of Artificial Sequence: Synthetic oligonucleotide
acauucugccacaaugcgc

SEQ ID NO: 192815 - RNA, 19 nt, Artificial Sequence
  Description of Artificial Sequence: Synthetic oligonucleotide
ucgcuaagggccugcacgg

SEQ ID NO: 192816 - RNA, 19 nt, Artificial Sequence
  Description of Artificial Sequence: Synthetic oligonucleotide
ucggacgagcuuuacaccu

SEQ ID NO: 192817 - RNA, 19 nt, Artificial Sequence
  Description of Artificial Sequence: Synthetic oligonucleotide
uauccauccuggauccugc

SEQ ID NO: 192818 - RNA, 19 nt, Artificial Sequence
  Description of Artificial Sequence: Synthetic oligonucleotide
uuacucugcggcuuugcug

SEQ ID NO: 192819 - RNA, 19 nt, Artificial Sequence
  Description of Artificial Sequence: Synthetic oligonucleotide
ugucgucccauuuggacac

SEQ ID NO: 192820 - RNA, 19 nt, Artificial Sequence
  Description of Artificial Sequence: Synthetic oligonucleotide
ucuacuuagcaaacacauc

SEQ ID NO: 192821 - RNA, 19 nt, Artificial Sequence
  Description of Artificial Sequence: Synthetic oligonucleotide
cuugcagacauucggacga

SEQ ID NO: 192822 - RNA, 19 nt, Artificial Sequence
  Description of Artificial Sequence: Synthetic oligonucleotide
uggaaucuaaguguucucu

SEQ ID NO: 192823 - RNA, 19 nt, Artificial Sequence
  Description of Artificial Sequence: Synthetic oligonucleotide
ucaagucccgguuagcuuu

SEQ ID NO: 192824 - RNA, 19 nt, Artificial Sequence
  Description of Artificial Sequence: Synthetic oligonucleotide
uugaacaggccaaguuugc

SEQ ID NO: 192825 - RNA, 19 nt, Artificial Sequence
  Description of Artificial Sequence: Synthetic oligonucleotide
acuucugguauuuggugga

SEQ ID NO: 192826 - RNA, 19 nt, Artificial Sequence
  Description of Artificial Sequence: Synthetic oligonucleotide
uuugcugcuaaggccaaug

SEQ ID NO: 192827 - RNA, 19 nt, Artificial Sequence
  Description of Artificial Sequence: Synthetic oligonucleotide
cacgagugcaggaugaguc

SEQ ID NO: 192828 - RNA, 19 nt, Artificial Sequence
  Description of Artificial Sequence: Synthetic oligonucleotide
guuaccucgcuucacagaa

SEQ ID NO: 192829 - RNA, 19 nt, Artificial Sequence
  Description of Artificial Sequence: Synthetic oligonucleotide
ugauaaccugaggacagag

SEQ ID NO: 192830 - RNA, 19 nt, Artificial Sequence
  Description of Artificial Sequence: Synthetic oligonucleotide
gagacgacaagcucuccac

SEQ ID NO: 192831 - RNA, 19 nt, Artificial Sequence
  Description of Artificial Sequence: Synthetic oligonucleotide
gaugcuauccauggcuuug

SEQ ID NO: 192832 - RNA, 19 nt, Artificial Sequence
  Description of Artificial Sequence: Synthetic oligonucleotide
cucgcuucacagaagagca

SEQ ID NO: 192833 - RNA, 19 nt, Artificial Sequence
  Description of Artificial Sequence: Synthetic oligonucleotide
uuacguccagcauugccca

SEQ ID NO: 192834 - RNA, 19 nt, Artificial Sequence
  Description of Artificial Sequence: Synthetic oligonucleotide
uuauccauccuggauccug

SEQ ID NO: 192835 - RNA, 19 nt, Artificial Sequence
  Description of Artificial Sequence: Synthetic oligonucleotide
cuauugcagaguugagugc

SEQ ID NO: 192836 - RNA, 19 nt, Artificial Sequence
  Description of Artificial Sequence: Synthetic oligonucleotide
uuggucgucuucugucugg

SEQ ID NO: 192837 - RNA, 19 nt, Artificial Sequence
  Description of Artificial Sequence: Synthetic oligonucleotide
aaugcggcauugauaaccu

SEQ ID NO: 192838 - RNA, 19 nt, Artificial Sequence
  Description of Artificial Sequence: Synthetic oligonucleotide
uuauggacaucugccaugu

SEQ ID NO: 192839 - RNA, 19 nt, Artificial Sequence
  Description of Artificial Sequence: Synthetic oligonucleotide
aaagcguuccucgcugaag

SEQ ID NO: 192840 - RNA, 19 nt, Artificial Sequence
  Description of Artificial Sequence: Synthetic oligonucleotide
ugggccaguuuacucugcg

SEQ ID NO: 192841 - RNA, 19 nt, Artificial Sequence
  Description of Artificial Sequence: Synthetic oligonucleotide
uaucaguuggucgucuucu

SEQ ID NO: 192842 - RNA, 19 nt, Artificial Sequence
  Description of Artificial Sequence: Synthetic oligonucleotide
gucccgguuagcuuuguag

SEQ ID NO: 192843 - RNA, 19 nt, Artificial Sequence
  Description of Artificial Sequence: Synthetic oligonucleotide
ggcaguagagagcaaugcg

SEQ ID NO: 192844 - RNA, 19 nt, Artificial Sequence
  Description of Artificial Sequence: Synthetic oligonucleotide
ugaaccguggcaugacugu

SEQ ID NO: 192845 - RNA, 19 nt, Artificial Sequence
  Description of Artificial Sequence: Synthetic oligonucleotide
agagacgacaagcucucca

SEQ ID NO: 192846 - RNA, 19 nt, Artificial Sequence
  Description of Artificial Sequence: Synthetic oligonucleotide
ucugaauucuaaagcuuuu

SEQ ID NO: 192847 - RNA, 19 nt, Artificial Sequence
  Description of Artificial Sequence: Synthetic oligonucleotide
uaagucuugcucguugcca

SEQ ID NO: 192848 - RNA, 19 nt, Artificial Sequence
  Description of Artificial Sequence: Synthetic oligonucleotide
ugccaucguaaaccagucg

SEQ ID NO: 192849 - RNA, 19 nt, Artificial Sequence
  Description of Artificial Sequence: Synthetic oligonucleotide
cuuugcgaagcugucuacg

SEQ ID NO: 192850 - RNA, 19 nt, Artificial Sequence
  Description of Artificial Sequence: Synthetic oligonucleotide
cugcacggggcucacaugc

SEQ ID NO: 192851 - RNA, 19 nt, Artificial Sequence
  Description of Artificial Sequence: Synthetic oligonucleotide
uucagcuggacaaguaauu

SEQ ID NO: 192852 - RNA, 19 nt, Artificial Sequence
  Description of Artificial Sequence: Synthetic oligonucleotide
gcucaagggauccacaaug

SEQ ID NO: 192853 - RNA, 19 nt, Artificial Sequence
  Description of Artificial Sequence: Synthetic oligonucleotide
gagucugauacauggucca

SEQ ID NO: 192854 - RNA, 19 nt, Artificial Sequence
  Description of Artificial Sequence: Synthetic oligonucleotide
gacuacauggaugacucga

SEQ ID NO: 192855 - RNA, 19 nt, Artificial Sequence
  Description of Artificial Sequence: Synthetic oligonucleotide
agcugucuacgcaaguccc

SEQ ID NO: 192856 - RNA, 19 nt, Artificial Sequence
  Description of Artificial Sequence: Synthetic oligonucleotide
gugacuacauggaugacuc

SEQ ID NO: 192857 - RNA, 19 nt, Artificial Sequence
  Description of Artificial Sequence: Synthetic oligonucleotide
ugcgaagcugucuacgcaa

SEQ ID NO: 192858 - RNA, 19 nt, Artificial Sequence
  Description of Artificial Sequence: Synthetic oligonucleotide
cuuguauaucaagucccgg

SEQ ID NO: 192859 - RNA, 19 nt, Artificial Sequence
  Description of Artificial Sequence: Synthetic oligonucleotide
aucuauugcagaguugagu

SEQ ID NO: 192860 - RNA, 19 nt, Artificial Sequence
  Description of Artificial Sequence: Synthetic oligonucleotide
uuaagaaguuaauguggua

SEQ ID NO: 192861 - RNA, 19 nt, Artificial Sequence
  Description of Artificial Sequence: Synthetic oligonucleotide
ugcgaggcucgcuuaaucu

SEQ ID NO: 192862 - RNA, 19 nt, Artificial Sequence
  Description of Artificial Sequence: Synthetic oligonucleotide
cucguugccagcauuccuc

SEQ ID NO: 192863 - RNA, 19 nt, Artificial Sequence
  Description of Artificial Sequence: Synthetic oligonucleotide
auguuaccucgcuucacag

SEQ ID NO: 192864 - RNA, 19 nt, Artificial Sequence
  Description of Artificial Sequence: Synthetic oligonucleotide
agccagaaucagcagccgg

SEQ ID NO: 192865 - RNA, 19 nt, Artificial Sequence
  Description of Artificial Sequence: Synthetic oligonucleotide
uguuaccucgcuucacaga

SEQ ID NO: 192866 - RNA, 19 nt, Artificial Sequence
  Description of Artificial Sequence: Synthetic oligonucleotide
uacucugaaauaugacuua

SEQ ID NO: 192867 - RNA, 19 nt, Artificial Sequence
  Description of Artificial Sequence: Synthetic oligonucleotide
ugaagcucaagggauccac

SEQ ID NO: 192868 - RNA, 19 nt, Artificial Sequence
  Description of Artificial Sequence: Synthetic oligonucleotide
auaucaagucccgguuagc

SEQ ID NO: 192869 - RNA, 19 nt, Artificial Sequence
  Description of Artificial Sequence: Synthetic oligonucleotide
ucuucugcgaggcucgcuu

SEQ ID NO: 192870 - RNA, 19 nt, Artificial Sequence
  Description of Artificial Sequence: Synthetic oligonucleotide
cuugcucagugaaccgugg

SEQ ID NO: 192871 - RNA, 19 nt, Artificial Sequence
  Description of Artificial Sequence: Synthetic oligonucleotide
cuaagucuugcucguugcc

SEQ ID NO: 192872 - RNA, 19 nt, Artificial Sequence
  Description of Artificial Sequence: Synthetic oligonucleotide
aguagagagcaaugcgcug

SEQ ID NO: 192873 - RNA, 19 nt, Artificial Sequence
  Description of Artificial Sequence: Synthetic oligonucleotide
aucaguaccaaaagaggga

SEQ ID NO: 192874 - RNA, 19 nt, Artificial Sequence
  Description of Artificial Sequence: Synthetic oligonucleotide
ccaagcuuauccauccugg

SEQ ID NO: 192875 - RNA, 19 nt, Artificial Sequence
  Description of Artificial Sequence: Synthetic oligonucleotide
uucggacgagcuuuacacc

SEQ ID NO: 192876 - RNA, 19 nt, Artificial Sequence
  Description of Artificial Sequence: Synthetic oligonucleotide
gagcaaguccuguagagcu

SEQ ID NO: 192877 - RNA, 19 nt, Artificial Sequence
  Description of Artificial Sequence: Synthetic oligonucleotide
aaaccagucgggaggcauc

SEQ ID NO: 192878 - RNA, 19 nt, Artificial Sequence
  Description of Artificial Sequence: Synthetic oligonucleotide
uuucgcugccaugauauuc

SEQ ID NO: 192879 - RNA, 19 nt, Artificial Sequence
  Description of Artificial Sequence: Synthetic oligonucleotide
gccaaugcggcauugauaa

SEQ ID NO: 192880 - RNA, 19 nt, Artificial Sequence
  Description of Artificial Sequence: Synthetic oligonucleotide
aguaauuuauggacaucug

SEQ ID NO: 192881 - RNA, 19 nt, Artificial Sequence
  Description of Artificial Sequence: Synthetic oligonucleotide
gaauggcgccagcagugcg

SEQ ID NO: 192882 - RNA, 19 nt, Artificial Sequence
  Description of Artificial Sequence: Synthetic oligonucleotide
ggaacauucuucugcagga

SEQ ID NO: 192883 - RNA, 19 nt, Artificial Sequence
  Description of Artificial Sequence: Synthetic oligonucleotide
gguuauggaacuuuuauuu

SEQ ID NO: 192884 - RNA, 19 nt, Artificial Sequence
  Description of Artificial Sequence: Synthetic oligonucleotide
guaucccuaagucuugcuc

SEQ ID NO: 192885 - RNA, 19 nt, Artificial Sequence
  Description of Artificial Sequence: Synthetic oligonucleotide
gauggugcggccaagcuua

SEQ ID NO: 192886 - RNA, 19 nt, Artificial Sequence
  Description of Artificial Sequence: Synthetic oligonucleotide
gagaacacggacuuguuuu

SEQ ID NO: 192887 - RNA, 19 nt, Artificial Sequence
  Description of Artificial Sequence: Synthetic oligonucleotide
auaugacuuaagaaguuaa

SEQ ID NO: 192888 - RNA, 19 nt, Artificial Sequence
  Description of Artificial Sequence: Synthetic oligonucleotide
cacggaccauguuaccucg

SEQ ID NO: 192889 - RNA, 19 nt, Artificial Sequence
  Description of Artificial Sequence: Synthetic oligonucleotide
caucugaucacgauggccu

SEQ ID NO: 192890 - RNA, 19 nt, Artificial Sequence
  Description of Artificial Sequence: Synthetic oligonucleotide
uugcgaagcugucuacgca

SEQ ID NO: 192891 - RNA, 19 nt, Artificial Sequence
  Description of Artificial Sequence: Synthetic oligonucleotide
ugacuacauggaugacucg

SEQ ID NO: 192892 - RNA, 19 nt, Artificial Sequence
  Description of Artificial Sequence: Synthetic oligonucleotide
cagagcuuuguacuguauc

SEQ ID NO: 192893 - RNA, 19 nt, Artificial Sequence
  Description of Artificial Sequence: Synthetic oligonucleotide
uguccagcuaucaguuggu

SEQ ID NO: 192894 - RNA, 19 nt, Artificial Sequence
  Description of Artificial Sequence: Synthetic oligonucleotide
acuacauggaugacucgag

SEQ ID NO: 192895 - RNA, 19 nt, Artificial Sequence
  Description of Artificial Sequence: Synthetic oligonucleotide
uuggaacauucuucugcag

SEQ ID NO: 192896 - RNA, 19 nt, Artificial Sequence
  Description of Artificial Sequence: Synthetic oligonucleotide
cacaaugcgcucccgccgg

SEQ ID NO: 192897 - RNA, 19 nt, Artificial Sequence
  Description of Artificial Sequence: Synthetic oligonucleotide
gcuugcagacauucggacg

SEQ ID NO: 192898 - RNA, 19 nt, Artificial Sequence
  Description of Artificial Sequence: Synthetic oligonucleotide
ggccaguuuacucugcggc

SEQ ID NO: 192899 - RNA, 19 nt, Artificial Sequence
  Description of Artificial Sequence: Synthetic oligonucleotide
ugcacggaccauguuaccu

SEQ ID NO: 192900 - RNA, 19 nt, Artificial Sequence
  Description of Artificial Sequence: Synthetic oligonucleotide
uagaaaugccugugacggc

SEQ ID NO: 192901 - RNA, 19 nt, Artificial Sequence
  Description of Artificial Sequence: Synthetic oligonucleotide
cauguuaccucgcuucaca

SEQ ID NO: 192902 - RNA, 19 nt, Artificial Sequence
  Description of Artificial Sequence: Synthetic oligonucleotide
agcauggaucaucagcaaa

SEQ ID NO: 192903 - RNA, 19 nt, Artificial Sequence
  Description of Artificial Sequence: Synthetic oligonucleotide
agcuggacaaguaauuuau

SEQ ID NO: 192904 - RNA, 19 nt, Artificial Sequence
  Description of Artificial Sequence: Synthetic oligonucleotide
agcugcacggaccauguua

SEQ ID NO: 192905 - RNA, 19 nt, Artificial Sequence
  Description of Artificial Sequence: Synthetic oligonucleotide
aauuccucgggaguccuua

SEQ ID NO: 192906 - RNA, 19 nt, Artificial Sequence
  Description of Artificial Sequence: Synthetic oligonucleotide
agacauucggacgagcuuu

SEQ ID NO: 192907 - RNA, 19 nt, Artificial Sequence
  Description of Artificial Sequence: Synthetic oligonucleotide
ugaucgcccgggcacuuug

SEQ ID NO: 192908 - RNA, 19 nt, Artificial Sequence
  Description of Artificial Sequence: Synthetic oligonucleotide
ugaaggccuaaagcguucc

SEQ ID NO: 192909 - RNA, 19 nt, Artificial Sequence
  Description of Artificial Sequence: Synthetic oligonucleotide
uccgguuucagagcuuugu

SEQ ID NO: 192910 - RNA, 19 nt, Artificial Sequence
  Description of Artificial Sequence: Synthetic oligonucleotide
uaaagcguuccucgcugaa

SEQ ID NO: 192911 - RNA, 19 nt, Artificial Sequence
  Description of Artificial Sequence: Synthetic oligonucleotide
agugaaccguggcaugacu

SEQ ID NO: 192912 - RNA, 19 nt, Artificial Sequence
  Description of Artificial Sequence: Synthetic oligonucleotide
cuaucaguuggucgucuuc

SEQ ID NO: 192913 - RNA, 19 nt, Artificial Sequence
  Description of Artificial Sequence: Synthetic oligonucleotide
uuuguuugucaaaguuguu

SEQ ID NO: 192914 - RNA, 19 nt, Artificial Sequence
  Description of Artificial Sequence: Synthetic oligonucleotide
gcuuguauaucaagucccg

SEQ ID NO: 192915 - RNA, 19 nt, Artificial Sequence
  Description of Artificial Sequence: Synthetic oligonucleotide
gaaucagcagccggguaac

SEQ ID NO: 192916 - RNA, 19 nt, Artificial Sequence
  Description of Artificial Sequence: Synthetic oligonucleotide
ggaugagucagccaucaaa

SEQ ID NO: 192917 - RNA, 19 nt, Artificial Sequence
  Description of Artificial Sequence: Synthetic oligonucleotide
ucuuagucugcgucucauc

SEQ ID NO: 192918 - RNA, 19 nt, Artificial Sequence
  Description of Artificial Sequence: Synthetic oligonucleotide
ugucuacgcaagucccuug

SEQ ID NO: 192919 - RNA, 19 nt, Artificial Sequence
  Description of Artificial Sequence: Synthetic oligonucleotide
gaaguuaaugugguacucu

SEQ ID NO: 192920 - RNA, 19 nt, Artificial Sequence
  Description of Artificial Sequence: Synthetic oligonucleotide
aucccuaagucuugcucgu

SEQ ID NO: 192921 - RNA, 19 nt, Artificial Sequence
  Description of Artificial Sequence: Synthetic oligonucleotide
aguuugcaaccucaaucaa

SEQ ID NO: 192922 - RNA, 19 nt, Artificial Sequence
  Description of Artificial Sequence: Synthetic oligonucleotide
cagcgauuuucuuggcggc

SEQ ID NO: 192923 - RNA, 19 nt, Artificial Sequence
  Description of Artificial Sequence: Synthetic oligonucleotide
agagcauaugccagcucuc

SEQ ID NO: 192924 - RNA, 19 nt, Artificial Sequence
  Description of Artificial Sequence: Synthetic oligonucleotide
ucuacgcaagucccuuguc

SEQ ID NO: 192925 - RNA, 19 nt, Artificial Sequence
  Description of Artificial Sequence: Synthetic oligonucleotide
agaguugagugcaucacuu

SEQ ID NO: 192926 - RNA, 19 nt, Artificial Sequence
  Description of Artificial Sequence: Synthetic oligonucleotide
aaccagucgggaggcauca

SEQ ID NO: 192927 - RNA, 19 nt, Artificial Sequence
  Description of Artificial Sequence: Synthetic oligonucleotide
gucugauacaugguccaug

SEQ ID NO: 192928 - RNA, 19 nt, Artificial Sequence
  Description of Artificial Sequence: Synthetic oligonucleotide
agacacugcuggaagguug

SEQ ID NO: 192929 - RNA, 19 nt, Artificial Sequence
  Description of Artificial Sequence: Synthetic oligonucleotide
guuggucgucuucugucug

SEQ ID NO: 192930 - RNA, 19 nt, Artificial Sequence
  Description of Artificial Sequence: Synthetic oligonucleotide
caucacgagugcaggauga

SEQ ID NO: 192931 - RNA, 19 nt, Artificial Sequence
  Description of Artificial Sequence: Synthetic oligonucleotide
agggacgccauacccugug

SEQ ID NO: 192932 - RNA, 19 nt, Artificial Sequence
  Description of Artificial Sequence: Synthetic oligonucleotide
gccugugacggcuugcugc

SEQ ID NO: 192933 - RNA, 19 nt, Artificial Sequence
  Description of Artificial Sequence: Synthetic oligonucleotide
gugaaccguggcaugacug

SEQ ID NO: 192934 - RNA, 19 nt, Artificial Sequence
  Description of Artificial Sequence: Synthetic oligonucleotide
ccuaagucuugcucguugc

SEQ ID NO: 192935 - RNA, 19 nt, Artificial Sequence
  Description of Artificial Sequence: Synthetic oligonucleotide
caaagcagcuccacuaaua

SEQ ID NO: 192936 - RNA, 19 nt, Artificial Sequence
  Description of Artificial Sequence: Synthetic oligonucleotide
uauaaacuccugguucaua

SEQ ID NO: 192937 - RNA, 19 nt, Artificial Sequence
  Description of Artificial Sequence: Synthetic oligonucleotide
uugguucuuucacccuacu

SEQ ID NO: 192938 - RNA, 19 nt, Artificial Sequence
  Description of Artificial Sequence: Synthetic oligonucleotide
gacagcuuugcgaagcugu

SEQ ID NO: 192939 - RNA, 19 nt, Artificial Sequence
  Description of Artificial Sequence: Synthetic oligonucleotide
aucaagucccgguuagcuu

SEQ ID NO: 192940 - RNA, 19 nt, Artificial Sequence
  Description of Artificial Sequence: Synthetic oligonucleotide
caaugauuuguuugucaaa

SEQ ID NO: 192941 - RNA, 19 nt, Artificial Sequence
  Description of Artificial Sequence: Synthetic oligonucleotide
agcucagaugcuauccaug

SEQ ID NO: 192942 - RNA, 19 nt, Artificial Sequence
  Description of Artificial Sequence: Synthetic oligonucleotide
gguccaugacagcuuugcg

SEQ ID NO: 192943 - RNA, 19 nt, Artificial Sequence
  Description of Artificial Sequence: Synthetic oligonucleotide
gauauucagcuuauccacu

SEQ ID NO: 192944 - RNA, 19 nt, Artificial Sequence
  Description of Artificial Sequence: Synthetic oligonucleotide
gccggguaacagcagagag

SEQ ID NO: 192945 - RNA, 19 nt, Artificial Sequence
  Description of Artificial Sequence: Synthetic oligonucleotide
aucgcccgggcacuuuguc

SEQ ID NO: 192946 - RNA, 19 nt, Artificial Sequence
  Description of Artificial Sequence: Synthetic oligonucleotide
uucugcgaggcucgcuuaa

SEQ ID NO: 192947 - RNA, 19 nt, Artificial Sequence
  Description of Artificial Sequence: Synthetic oligonucleotide
ucgcccgggcacuuugucc

SEQ ID NO: 192948 - RNA, 19 nt, Artificial Sequence
  Description of Artificial Sequence: Synthetic oligonucleotide
agcucaagggauccacaau

SEQ ID NO: 192949 - RNA, 19 nt, Artificial Sequence
  Description of Artificial Sequence: Synthetic oligonucleotide
ucugaucacgauggccuac

SEQ ID NO: 192950 - RNA, 19 nt, Artificial Sequence
  Description of Artificial Sequence: Synthetic oligonucleotide
agugaaggccuaaagcguu

SEQ ID NO: 192951 - RNA, 19 nt, Artificial Sequence
  Description of Artificial Sequence: Synthetic oligonucleotide
caagcuuauccauccugga

SEQ ID NO: 192952 - RNA, 19 nt, Artificial Sequence
  Description of Artificial Sequence: Synthetic oligonucleotide
acccuacucugaaauauga

SEQ ID NO: 192953 - RNA, 19 nt, Artificial Sequence
  Description of Artificial Sequence: Synthetic oligonucleotide
aaccguggcaugacugugu

SEQ ID NO: 192954 - RNA, 19 nt, Artificial Sequence
  Description of Artificial Sequence: Synthetic oligonucleotide
ucacgagugcaggaugagu

SEQ ID NO: 192955 - RNA, 19 nt, Artificial Sequence
  Description of Artificial Sequence: Synthetic oligonucleotide
uuguccuacuucugacauc

SEQ ID NO: 192956 - RNA, 19 nt, Artificial Sequence
  Description of Artificial Sequence: Synthetic oligonucleotide
ugcucguugccagcauucc

SEQ ID NO: 192957 - RNA, 19 nt, Artificial Sequence
  Description of Artificial Sequence: Synthetic oligonucleotide
ggcucgcuuaaucuuaguc

SEQ ID NO: 192958 - RNA, 19 nt, Artificial Sequence
  Description of Artificial Sequence: Synthetic oligonucleotide
auugccacugucgucccau

SEQ ID NO: 192959 - RNA, 19 nt, Artificial Sequence
  Description of Artificial Sequence: Synthetic oligonucleotide
acgacaagcucuccaccaa

SEQ ID NO: 192960 - RNA, 19 nt, Artificial Sequence
  Description of Artificial Sequence: Synthetic oligonucleotide
cuacuucugacaucaaaau

SEQ ID NO: 192961 - RNA, 19 nt, Artificial Sequence
  Description of Artificial Sequence: Synthetic oligonucleotide
ccuaaagcguuccucgcug

SEQ ID NO: 192962 - RNA, 19 nt, Artificial Sequence
  Description of Artificial Sequence: Synthetic oligonucleotide
cauucggacgagcuuuaca

SEQ ID NO: 192963 - RNA, 19 nt, Artificial Sequence
  Description of Artificial Sequence: Synthetic oligonucleotide
gaagcucaagggauccaca

SEQ ID NO: 192964 - RNA, 19 nt, Artificial Sequence
  Description of Artificial Sequence: Synthetic oligonucleotide
cugggcauacuccuuaacu

SEQ ID NO: 192965 - RNA, 19 nt, Artificial Sequence
  Description of Artificial Sequence: Synthetic oligonucleotide
cuguggaaucuaaguguuc

SEQ ID NO: 192966 - RNA, 19 nt, Artificial Sequence
  Description of Artificial Sequence: Synthetic oligonucleotide
aucacgagugcaggaugag

SEQ ID NO: 192967 - RNA, 19 nt, Artificial Sequence
  Description of Artificial Sequence: Synthetic oligonucleotide
auggucugcgauggugcgg

SEQ ID NO: 192968 - RNA, 19 nt, Artificial Sequence
  Description of Artificial Sequence: Synthetic oligonucleotide
caucguaaaccagucggga

SEQ ID NO: 192969 - RNA, 19 nt, Artificial Sequence
  Description of Artificial Sequence: Synthetic oligonucleotide
ccggguaacagcagagagc

SEQ ID NO: 192970 - RNA, 19 nt, Artificial Sequence
  Description of Artificial Sequence: Synthetic oligonucleotide
caagucccgguuagcuuug

SEQ ID NO: 192971 - RNA, 19 nt, Artificial Sequence
  Description of Artificial Sequence: Synthetic oligonucleotide
gguugagggacgccauacc

SEQ ID NO: 192972 - RNA, 19 nt, Artificial Sequence
  Description of Artificial Sequence: Synthetic oligonucleotide
augcaguguagaggauugg

SEQ ID NO: 192973 - RNA, 19 nt, Artificial Sequence
  Description of Artificial Sequence: Synthetic oligonucleotide
cuccacuaauaaugcuuuc

SEQ ID NO: 192974 - RNA, 19 nt, Artificial Sequence
  Description of Artificial Sequence: Synthetic oligonucleotide
uugcagacauucggacgag

SEQ ID NO: 192975 - RNA, 19 nt, Artificial Sequence
  Description of Artificial Sequence: Synthetic oligonucleotide
cugauacaugguccaugac

SEQ ID NO: 192976 - RNA, 19 nt, Artificial Sequence
  Description of Artificial Sequence: Synthetic oligonucleotide
gccaugaucgcccgggcac

SEQ ID NO: 192977 - RNA, 19 nt, Artificial Sequence
  Description of Artificial Sequence: Synthetic oligonucleotide
ucuugcucguugccagcau

SEQ ID NO: 192978 - RNA, 19 nt, Artificial Sequence
  Description of Artificial Sequence: Synthetic oligonucleotide
cauuuggacacuucagcau

SEQ ID NO: 192979 - RNA, 19 nt, Artificial Sequence
  Description of Artificial Sequence: Synthetic oligonucleotide
uuccgguuucagagcuuug

SEQ ID NO: 192980 - RNA, 19 nt, Artificial Sequence
  Description of Artificial Sequence: Synthetic oligonucleotide
cuucauuauuggagauuga

SEQ ID NO: 192981 - RNA, 19 nt, Artificial Sequence
  Description of Artificial Sequence: Synthetic oligonucleotide
cuaaagcguuccucgcuga

SEQ ID NO: 192982 - RNA, 19 nt, Artificial Sequence
  Description of Artificial Sequence: Synthetic oligonucleotide
auaaugcuuuccaggcgcu

SEQ ID NO: 192983 - RNA, 19 nt, Artificial Sequence
  Description of Artificial Sequence: Synthetic oligonucleotide
cacggggcucacaugcuuc

SEQ ID NO: 192984 - RNA, 19 nt, Artificial Sequence
  Description of Artificial Sequence: Synthetic oligonucleotide
agccaugaucgcccgggca

SEQ ID NO: 192985 - RNA, 19 nt, Artificial Sequence
  Description of Artificial Sequence: Synthetic oligonucleotide
gcaaccucaaucaauuugu

SEQ ID NO: 192986 - RNA, 19 nt, Artificial Sequence
  Description of Artificial Sequence: Synthetic oligonucleotide
acggggcucacaugcuucu

SEQ ID NO: 192987 - RNA, 19 nt, Artificial Sequence
  Description of Artificial Sequence: Synthetic oligonucleotide
gucauccaauuccucggga

SEQ ID NO: 192988 - RNA, 19 nt, Artificial Sequence
  Description of Artificial Sequence: Synthetic oligonucleotide
uugcagcuucaaucaguac

SEQ ID NO: 192989 - RNA, 19 nt, Artificial Sequence
  Description of Artificial Sequence: Synthetic oligonucleotide
agcgauuuucuuggcggca

SEQ ID NO: 192990 - RNA, 19 nt, Artificial Sequence
  Description of Artificial Sequence: Synthetic oligonucleotide
cccgguuagcuuuguaggc

SEQ ID NO: 192991 - RNA, 19 nt, Artificial Sequence
  Description of Artificial Sequence: Synthetic oligonucleotide
cugaucacaucugagguau

SEQ ID NO: 192992 - RNA, 19 nt, Artificial Sequence
  Description of Artificial Sequence: Synthetic oligonucleotide
aguuaaugugguacucuuu

SEQ ID NO: 192993 - RNA, 19 nt, Artificial Sequence
  Description of Artificial Sequence: Synthetic oligonucleotide
gcugcacggaccauguuac

SEQ ID NO: 192994 - RNA, 19 nt, Artificial Sequence
  Description of Artificial Sequence: Synthetic oligonucleotide
uuuucgcugccaugauauu

SEQ ID NO: 192995 - RNA, 19 nt, Artificial Sequence
  Description of Artificial Sequence: Synthetic oligonucleotide
ucuuuacguccagcauugc

SEQ ID NO: 192996 - RNA, 19 nt, Artificial Sequence
  Description of Artificial Sequence: Synthetic oligonucleotide
gagcauggaucaucagcaa

SEQ ID NO: 192997 - RNA, 19 nt, Artificial Sequence
  Description of Artificial Sequence: Synthetic oligonucleotide
gucgggaggcaucaauaaa

SEQ ID NO: 192998 - RNA, 19 nt, Artificial Sequence
  Description of Artificial Sequence: Synthetic oligonucleotide
gagccaugaucgcccgggc

SEQ ID NO: 192999 - RNA, 19 nt, Artificial Sequence
  Description of Artificial Sequence: Synthetic oligonucleotide
gggccaguuuacucugcgg

SEQ ID NO: 193000 - RNA, 19 nt, Artificial Sequence
  Description of Artificial Sequence: Synthetic oligonucleotide
cagcuggacaaguaauuua

SEQ ID NO: 193001 - RNA, 19 nt, Artificial Sequence
  Description of Artificial Sequence: Synthetic oligonucleotide
acuguccaccccagagacg

SEQ ID NO: 193002 - RNA, 19 nt, Artificial Sequence
  Description of Artificial Sequence: Synthetic oligonucleotide
ccagagacgacaagcucuc

SEQ ID NO: 193003 - RNA, 19 nt, Artificial Sequence
  Description of Artificial Sequence: Synthetic oligonucleotide
cugcgaggcucgcuuaauc

SEQ ID NO: 193004 - RNA, 19 nt, Artificial Sequence
  Description of Artificial Sequence: Synthetic oligonucleotide
ccgccggucaucacgagug

SEQ ID NO: 193005 - RNA, 19 nt, Artificial Sequence
  Description of Artificial Sequence: Synthetic oligonucleotide
ccacaaugcgcucccgccg

SEQ ID NO: 193006 - RNA, 19 nt, Artificial Sequence
  Description of Artificial Sequence: Synthetic oligonucleotide
acggaccauguuaccucgc

SEQ ID NO: 193007 - RNA, 19 nt, Artificial Sequence
  Description of Artificial Sequence: Synthetic oligonucleotide
ucgcgugaaguccgucauc

SEQ ID NO: 193008 - RNA, 19 nt, Artificial Sequence
  Description of Artificial Sequence: Synthetic oligonucleotide
cccuacucugaaauaugac

SEQ ID NO: 193009 - RNA, 19 nt, Artificial Sequence
  Description of Artificial Sequence: Synthetic oligonucleotide
aggugacuacauggaugac

SEQ ID NO: 193010 - RNA, 19 nt, Artificial Sequence
  Description of Artificial Sequence: Synthetic oligonucleotide
auccauaggcugggcuggg

SEQ ID NO: 193011 - RNA, 19 nt, Artificial Sequence
  Description of Artificial Sequence: Synthetic oligonucleotide
ggugacuacauggaugacu

SEQ ID NO: 193012 - RNA, 19 nt, Artificial Sequence
  Description of Artificial Sequence: Synthetic oligonucleotide
gcacggaccauguuaccuc

SEQ ID NO: 193013 - RNA, 19 nt, Artificial Sequence
  Description of Artificial Sequence: Synthetic oligonucleotide
auuccucgggaguccuuau

SEQ ID NO: 193014 - RNA, 19 nt, Artificial Sequence
  Description of Artificial Sequence: Synthetic oligonucleotide
ggacgccauacccugugac

SEQ ID NO: 193015 - RNA, 19 nt, Artificial Sequence
  Description of Artificial Sequence: Synthetic oligonucleotide
gucuacgcaagucccuugu

SEQ ID NO: 193016 - RNA, 19 nt, Artificial Sequence
  Description of Artificial Sequence: Synthetic oligonucleotide
agucugauacaugguccau

SEQ ID NO: 193017 - RNA, 19 nt, Artificial Sequence
  Description of Artificial Sequence: Synthetic oligonucleotide
ugcuucuaacuggcuugca

SEQ ID NO: 193018 - RNA, 19 nt, Artificial Sequence
  Description of Artificial Sequence: Synthetic oligonucleotide
gauccugccucagcgauuu

SEQ ID NO: 193019 - RNA, 19 nt, Artificial Sequence
  Description of Artificial Sequence: Synthetic oligonucleotide
gugaaggccuaaagcguuc

SEQ ID NO: 193020 - RNA, 19 nt, Artificial Sequence
  Description of Artificial Sequence: Synthetic oligonucleotide
cagugaaccguggcaugac

SEQ ID NO: 193021 - RNA, 19 nt, Artificial Sequence
  Description of Artificial Sequence: Synthetic oligonucleotide
ucugcgaggcucgcuuaau

SEQ ID NO: 193022 - RNA, 19 nt, Artificial Sequence
  Description of Artificial Sequence: Synthetic oligonucleotide
ccaucucugaggugacuac

SEQ ID NO: 193023 - RNA, 19 nt, Artificial Sequence
  Description of Artificial Sequence: Synthetic oligonucleotide
gguuagcuuuguaggcugc

SEQ ID NO: 193024 - RNA, 19 nt, Artificial Sequence
  Description of Artificial Sequence: Synthetic oligonucleotide
agccggguaacagcagaga

SEQ ID NO: 193025 - RNA, 19 nt, Artificial Sequence
  Description of Artificial Sequence: Synthetic oligonucleotide
uccugaugucccggaugcc

SEQ ID NO: 193026 - RNA, 19 nt, Artificial Sequence
  Description of Artificial Sequence: Synthetic oligonucleotide
gugcggccaagcuuaucca

SEQ ID NO: 193027 - RNA, 19 nt, Artificial Sequence
  Description of Artificial Sequence: Synthetic oligonucleotide
gaaggccuaaagcguuccu

SEQ ID NO: 193028 - RNA, 19 nt, Artificial Sequence
  Description of Artificial Sequence: Synthetic oligonucleotide
aggaugagucagccaucaa

SEQ ID NO: 193029 - RNA, 19 nt, Artificial Sequence
  Description of Artificial Sequence: Synthetic oligonucleotide
cggccaagcuuauccaucc

SEQ ID NO: 193030 - RNA, 19 nt, Artificial Sequence
  Description of Artificial Sequence: Synthetic oligonucleotide
cauugcccauguacucuga

SEQ ID NO: 193031 - RNA, 19 nt, Artificial Sequence
  Description of Artificial Sequence: Synthetic oligonucleotide
agcuuggcggacagcauua

SEQ ID NO: 193032 - RNA, 19 nt, Artificial Sequence
  Description of Artificial Sequence: Synthetic oligonucleotide
cucgggcgccuucaucuuc

SEQ ID NO: 193033 - RNA, 19 nt, Artificial Sequence
  Description of Artificial Sequence: Synthetic oligonucleotide
gcuuugcgaagcugucuac

SEQ ID NO: 193034 - RNA, 19 nt, Artificial Sequence
  Description of Artificial Sequence: Synthetic oligonucleotide
gacauucggacgagcuuua

SEQ ID NO: 193035 - RNA, 19 nt, Artificial Sequence
  Description of Artificial Sequence: Synthetic oligonucleotide
gcgauuuucuuggcggcac

SEQ ID NO: 193036 - RNA, 19 nt, Artificial Sequence
  Description of Artificial Sequence: Synthetic oligonucleotide
cccuguggaaucuaagugu

SEQ ID NO: 193037 - RNA, 19 nt, Artificial Sequence
  Description of Artificial Sequence: Synthetic oligonucleotide
ggaagccacauaggacgcc

SEQ ID NO: 193038 - RNA, 19 nt, Artificial Sequence
  Description of Artificial Sequence: Synthetic oligonucleotide
ugccucgcgugaaguccgu

SEQ ID NO: 193039 - RNA, 19 nt, Artificial Sequence
  Description of Artificial Sequence: Synthetic oligonucleotide
gagggacguuggucuccag

SEQ ID NO: 193040 - RNA, 19 nt, Artificial Sequence
  Description of Artificial Sequence: Synthetic oligonucleotide
gccaucugaucacgauggc

SEQ ID NO: 193041 - RNA, 19 nt, Artificial Sequence
  Description of Artificial Sequence: Synthetic oligonucleotide
aagucccgguuagcuuugu

SEQ ID NO: 193042 - RNA, 19 nt, Artificial Sequence
  Description of Artificial Sequence: Synthetic oligonucleotide
cacauaggacgccuucacu

SEQ ID NO: 193043 - RNA, 19 nt, Artificial Sequence
  Description of Artificial Sequence: Synthetic oligonucleotide
gugacggcuugcugcagcu

SEQ ID NO: 193044 - RNA, 19 nt, Artificial Sequence
  Description of Artificial Sequence: Synthetic oligonucleotide
cagaugcuauccauggcuu

SEQ ID NO: 193045 - RNA, 19 nt, Artificial Sequence
  Description of Artificial Sequence: Synthetic oligonucleotide
guugagugcaucacuucuu

SEQ ID NO: 193046 - RNA, 19 nt, Artificial Sequence
  Description of Artificial Sequence: Synthetic oligonucleotide
gcgaagcugucuacgcaag

SEQ ID NO: 193047 - RNA, 19 nt, Artificial Sequence
  Description of Artificial Sequence: Synthetic oligonucleotide
agucccgguuagcuuugua

SEQ ID NO: 193048 - RNA, 19 nt, Artificial Sequence
  Description of Artificial Sequence: Synthetic oligonucleotide
ccaugggcagagcagcuca

SEQ ID NO: 193049 - RNA, 19 nt, Artificial Sequence
  Description of Artificial Sequence: Synthetic oligonucleotide
gucccggaugccaucguaa

SEQ ID NO: 193050 - RNA, 19 nt, Artificial Sequence
  Description of Artificial Sequence: Synthetic oligonucleotide
ccaugacagcuuugcgaag

SEQ ID NO: 193051 - RNA, 19 nt, Artificial Sequence
  Description of Artificial Sequence: Synthetic oligonucleotide
guccagcuaucaguugguc

SEQ ID NO: 193052 - RNA, 19 nt, Artificial Sequence
  Description of Artificial Sequence: Synthetic oligonucleotide
cguuccucgcugaagcuca

SEQ ID NO: 193053 - RNA, 19 nt, Artificial Sequence
  Description of Artificial Sequence: Synthetic oligonucleotide
gguccagcccauccacauc

SEQ ID NO: 193054 - RNA, 19 nt, Artificial Sequence
  Description of Artificial Sequence: Synthetic oligonucleotide
guaaaccagucgggaggca

SEQ ID NO: 193055 - RNA, 19 nt, Artificial Sequence
  Description of Artificial Sequence: Synthetic oligonucleotide
cuucugcgaggcucgcuua

SEQ ID NO: 193056 - RNA, 19 nt, Artificial Sequence
  Description of Artificial Sequence: Synthetic oligonucleotide
cacgauggccuacaucuuu

SEQ ID NO: 193057 - RNA, 19 nt, Artificial Sequence
  Description of Artificial Sequence: Synthetic oligonucleotide
cugcggcuuugcugcuaag

SEQ ID NO: 193058 - RNA, 19 nt, Artificial Sequence
  Description of Artificial Sequence: Synthetic oligonucleotide
ccucgcgugaaguccguca

SEQ ID NO: 193059 - RNA, 19 nt, Artificial Sequence
  Description of Artificial Sequence: Synthetic oligonucleotide
gccuuuugcuccugaggaa

SEQ ID NO: 193060 - RNA, 19 nt, Artificial Sequence
  Description of Artificial Sequence: Synthetic oligonucleotide
augcgcucccgccggucau

SEQ ID NO: 193061 - RNA, 19 nt, Artificial Sequence
  Description of Artificial Sequence: Synthetic oligonucleotide
cucgcgugaaguccgucau

SEQ ID NO: 193062 - RNA, 19 nt, Artificial Sequence
  Description of Artificial Sequence: Synthetic oligonucleotide
caaccucaaucaauuuguu

SEQ ID NO: 193063 - RNA, 19 nt, Artificial Sequence
  Description of Artificial Sequence: Synthetic oligonucleotide
ccauguuaccucgcuucac

SEQ ID NO: 193064 - RNA, 19 nt, Artificial Sequence
  Description of Artificial Sequence: Synthetic oligonucleotide
cugugacggcuugcugcag

SEQ ID NO: 193065 - RNA, 19 nt, Artificial Sequence
  Description of Artificial Sequence: Synthetic oligonucleotide
ccucagcgauuuucuuggc

SEQ ID NO: 193066 - RNA, 19 nt, Artificial Sequence
  Description of Artificial Sequence: Synthetic oligonucleotide
gcggccaagcuuauccauc

SEQ ID NO: 193067 - RNA, 19 nt, Artificial Sequence
  Description of Artificial Sequence: Synthetic oligonucleotide
cuugcucguugccagcauu

SEQ ID NO: 193068 - RNA, 19 nt, Artificial Sequence
  Description of Artificial Sequence: Synthetic oligonucleotide
ccuguggaaucuaaguguu

SEQ ID NO: 193069 - RNA, 19 nt, Artificial Sequence
  Description of Artificial Sequence: Synthetic oligonucleotide
gucuuuucgcugccaugau

SEQ ID NO: 193070 - RNA, 19 nt, Artificial Sequence
  Description of Artificial Sequence: Synthetic oligonucleotide
gcaaugcgcuggagguagg

SEQ ID NO: 193071 - RNA, 19 nt, Artificial Sequence
  Description of Artificial Sequence: Synthetic oligonucleotide
gcggacagcauuacauucu

SEQ ID NO: 193072 - RNA, 19 nt, Artificial Sequence
  Description of Artificial Sequence: Synthetic oligonucleotide
ggccaaugcggcauugaua

SEQ ID NO: 193073 - RNA, 19 nt, Artificial Sequence
  Description of Artificial Sequence: Synthetic oligonucleotide
accaccugguuggguugga

SEQ ID NO: 193074 - RNA, 19 nt, Artificial Sequence
  Description of Artificial Sequence: Synthetic oligonucleotide
gugguccuuugccucgcgu

SEQ ID NO: 193075 - RNA, 19 nt, Artificial Sequence
  Description of Artificial Sequence: Synthetic oligonucleotide
cugcgauggugcggccaag

SEQ ID NO: 193076 - RNA, 19 nt, Artificial Sequence
  Description of Artificial Sequence: Synthetic oligonucleotide
acuuccgguuucagagcuu

SEQ ID NO: 193077 - RNA, 19 nt, Artificial Sequence
  Description of Artificial Sequence: Synthetic oligonucleotide
uggugcggccaagcuuauc

SEQ ID NO: 193078 - RNA, 19 nt, Artificial Sequence
  Description of Artificial Sequence: Synthetic oligonucleotide
gggacgccauacccuguga

SEQ ID NO: 193079 - RNA, 19 nt, Artificial Sequence
  Description of Artificial Sequence: Synthetic oligonucleotide
cgaauggcgccagcagugc

SEQ ID NO: 193080 - RNA, 19 nt, Artificial Sequence
  Description of Artificial Sequence: Synthetic oligonucleotide
gcucguugccagcauuccu

SEQ ID NO: 193081 - RNA, 19 nt, Artificial Sequence
  Description of Artificial Sequence: Synthetic oligonucleotide
cuaccucccuguggaaucu

SEQ ID NO: 193082 - RNA, 19 nt, Artificial Sequence
  Description of Artificial Sequence: Synthetic oligonucleotide
cagcuuugcgaagcugucu

SEQ ID NO: 193083 - RNA, 19 nt, Artificial Sequence
  Description of Artificial Sequence: Synthetic oligonucleotide
gcuuggcggacagcauuac

SEQ ID NO: 193084 - RNA, 19 nt, Artificial Sequence
  Description of Artificial Sequence: Synthetic oligonucleotide
cgcccgggcacuuugucca

SEQ ID NO: 193085 - RNA, 19 nt, Artificial Sequence
  Description of Artificial Sequence: Synthetic oligonucleotide
augaucgcccgggcacuuu

SEQ ID NO: 193086 - RNA, 19 nt, Artificial Sequence
  Description of Artificial Sequence: Synthetic oligonucleotide
cgaggcucgcuuaaucuua

SEQ ID NO: 193087 - RNA, 19 nt, Artificial Sequence
  Description of Artificial Sequence: Synthetic oligonucleotide
gaucgcccgggcacuuugu

SEQ ID NO: 193088 - RNA, 19 nt, Artificial Sequence
  Description of Artificial Sequence: Synthetic oligonucleotide
ccgguuucagagcuuugua

SEQ ID NO: 193089 - RNA, 19 nt, Artificial Sequence
  Description of Artificial Sequence: Synthetic oligonucleotide
gcgaggcucgcuuaaucuu

SEQ ID NO: 193090 - RNA, 19 nt, Artificial Sequence
  Description of Artificial Sequence: Synthetic oligonucleotide
gcccgggcacuuuguccag

SEQ ID NO: 193091 - RNA, 19 nt, Artificial Sequence
  Description of Artificial Sequence: Synthetic oligonucleotide
guaccaaaagagggacguu

SEQ ID NO: 193092 - RNA, 19 nt, Artificial Sequence
  Description of Artificial Sequence: Synthetic oligonucleotide
gcugucuacgcaagucccu

SEQ ID NO: 193093 - RNA, 19 nt, Artificial Sequence
  Description of Artificial Sequence: Synthetic oligonucleotide
gcuaucaguuggucgucuu

SEQ ID NO: 193094 - RNA, 19 nt, Artificial Sequence
  Description of Artificial Sequence: Synthetic oligonucleotide
cuuauccauccuggauccu

SEQ ID NO: 193095 - RNA, 19 nt, Artificial Sequence
  Description of Artificial Sequence: Synthetic oligonucleotide
gagggacgccauacccugu

SEQ ID NO: 193096 - RNA, 19 nt, Artificial Sequence
  Description of Artificial Sequence: Synthetic oligonucleotide
ccgguuagcuuuguaggcu

SEQ ID NO: 193097 - RNA, 19 nt, Artificial Sequence
  Description of Artificial Sequence: Synthetic oligonucleotide
cagugcgguccagcccauc

SEQ ID NO: 193098 - RNA, 19 nt, Artificial Sequence
  Description of Artificial Sequence: Synthetic oligonucleotide
cgcgugaaguccgucaucu

SEQ ID NO: 193099 - RNA, 19 nt, Artificial Sequence
  Description of Artificial Sequence: Synthetic oligonucleotide
ccuuggugcugagaggcgu

SEQ ID NO: 193100 - RNA, 19 nt, Artificial Sequence
  Description of Artificial Sequence: Synthetic oligonucleotide
cccgggcacuuuguccagc

SEQ ID NO: 193101 - RNA, 19 nt, Artificial Sequence
  Description of Artificial Sequence: Synthetic oligonucleotide
cucugcggcuuugcugcua

SEQ ID NO: 193102 - RNA, 19 nt, Artificial Sequence
  Description of Artificial Sequence: Synthetic oligonucleotide
cgagcugcacggaccaugu

SEQ ID NO: 193103 - RNA, 19 nt, Artificial Sequence
  Description of Artificial Sequence: Synthetic oligonucleotide
gcgcuggagguaggccagc

SEQ ID NO: 193104 - RNA, 19 nt, Artificial Sequence
  Description of Artificial Sequence: Synthetic oligonucleotide
ccuuaacuucuuucucauu

SEQ ID NO: 193105 - RNA, 19 nt, Artificial Sequence
  Description of Artificial Sequence: Synthetic oligonucleotide
gucgucccauuuggacacu

SEQ ID NO: 193106 - RNA, 19 nt, Artificial Sequence
  Description of Artificial Sequence: Synthetic oligonucleotide
caugaucgcccgggcacuu

SEQ ID NO: 193107 - RNA, 19 nt, Artificial Sequence
  Description of Artificial Sequence: Synthetic oligonucleotide
gcgucucauccugcuucuc

SEQ ID NO: 193108 - RNA, 19 nt, Artificial Sequence
  Description of Artificial Sequence: Synthetic oligonucleotide
gccucgcgugaaguccguc

SEQ ID NO: 193109 - RNA, 19 nt, Artificial Sequence
  Description of Artificial Sequence: Synthetic oligonucleotide
ccaugaucgcccgggcacu

SEQ ID NO: 193110 - RNA, 19 nt, Artificial Sequence
  Description of Artificial Sequence: Synthetic oligonucleotide
cgauggugcggccaagcuu

SEQ ID NO: 193111 - RNA, 19 nt, Artificial Sequence
  Description of Artificial Sequence: Synthetic oligonucleotide
cccgccggucaucacgagu

SEQ ID NO: 193112 - RNA, 19 nt, Artificial Sequence
  Description of Artificial Sequence: Synthetic oligonucleotide
gggaugcaguguagaggau

SEQ ID NO: 193113 - RNA, 19 nt, Artificial Sequence
  Description of Artificial Sequence: Synthetic oligonucleotide
ccggccccgaauggcgcca

SEQ ID NO: 193114 - RNA, 19 nt, Artificial Sequence
  Description of Artificial Sequence: Synthetic oligonucleotide
cgagcugcccggccccgaa

SEQ ID NO: 193115 - RNA, 19 nt, Artificial Sequence
  Description of Artificial Sequence: Synthetic oligonucleotide
cggccccgaauggcgccag

SEQ ID NO: 193116 - RNA, 19 nt, Artificial Sequence
  Description of Artificial Sequence: Synthetic oligonucleotide
gcagugcgguccagcccau

SEQ ID NO: 193117 - RNA, 19 nt, Artificial Sequence
  Description of Artificial Sequence: Synthetic oligonucleotide
uauauauuuauauauauau

SEQ ID NO: 193118 - RNA, 19 nt, Artificial Sequence
  Description of Artificial Sequence: Synthetic oligonucleotide
aaaaguaccauccacuugu

SEQ ID NO: 193119 - RNA, 19 nt, Artificial Sequence
  Description of Artificial Sequence: Synthetic oligonucleotide
uaaacuucuacuuagcccc

SEQ ID NO: 193120 - RNA, 19 nt, Artificial Sequence
  Description of Artificial Sequence: Synthetic oligonucleotide
uauauuuauauauauauua

SEQ ID NO: 193121 - RNA, 19 nt, Artificial Sequence
  Description of Artificial Sequence: Synthetic oligonucleotide
auaaacuucuacuuagccc

SEQ ID NO: 193122 - RNA, 19 nt, Artificial Sequence
  Description of Artificial Sequence: Synthetic oligonucleotide
augaccuaaauauacauuc

SEQ ID NO: 193123 - RNA, 19 nt, Artificial Sequence
  Description of Artificial Sequence: Synthetic oligonucleotide
aaacaacacaaccaagcgc

SEQ ID NO: 193124 - RNA, 19 nt, Artificial Sequence
  Description of Artificial Sequence: Synthetic oligonucleotide
gaaaccauuauccacgaag

SEQ ID NO: 193125 - RNA, 19 nt, Artificial Sequence
  Description of Artificial Sequence: Synthetic oligonucleotide
ucuacuuagccccaggucc

SEQ ID NO: 193126 - RNA, 19 nt, Artificial Sequence
  Description of Artificial Sequence: Synthetic oligonucleotide
uaucgagauagccagaugc

SEQ ID NO: 193127 - RNA, 19 nt, Artificial Sequence
  Description of Artificial Sequence: Synthetic oligonucleotide
uuauccacgaagcuugugg

SEQ ID NO: 193128 - RNA, 19 nt, Artificial Sequence
  Description of Artificial Sequence: Synthetic oligonucleotide
uuauugggcaacaacauga

SEQ ID NO: 193129 - RNA, 19 nt, Artificial Sequence
  Description of Artificial Sequence: Synthetic oligonucleotide
gaagaguguagauaauugg

SEQ ID NO: 193130 - RNA, 19 nt, Artificial Sequence
  Description of Artificial Sequence: Synthetic oligonucleotide
agaaugagagcaugcaccc

SEQ ID NO: 193131 - RNA, 19 nt, Artificial Sequence
  Description of Artificial Sequence: Synthetic oligonucleotide
aguguaucgagauagccag

SEQ ID NO: 193132 - RNA, 19 nt, Artificial Sequence
  Description of Artificial Sequence: Synthetic oligonucleotide
aaugucuacacauggagaa

SEQ ID NO: 193133 - RNA, 19 nt, Artificial Sequence
  Description of Artificial Sequence: Synthetic oligonucleotide
ucuacuaaguuccugguaa

SEQ ID NO: 193134 - RNA, 19 nt, Artificial Sequence
  Description of Artificial Sequence: Synthetic oligonucleotide
agccauuaaaggcuaaggc

SEQ ID NO: 193135 - RNA, 19 nt, Artificial Sequence
  Description of Artificial Sequence: Synthetic oligonucleotide
uguuauccaagccauaaac

SEQ ID NO: 193136 - RNA, 19 nt, Artificial Sequence
  Description of Artificial Sequence: Synthetic oligonucleotide
guagaaucgagugugauag

SEQ ID NO: 193137 - RNA, 19 nt, Artificial Sequence
  Description of Artificial Sequence: Synthetic oligonucleotide
uuggaugcaacauacauau

SEQ ID NO: 193138 - RNA, 19 nt, Artificial Sequence
  Description of Artificial Sequence: Synthetic oligonucleotide
agcaaguccccucaaaacg

SEQ ID NO: 193139 - RNA, 19 nt, Artificial Sequence
  Description of Artificial Sequence: Synthetic oligonucleotide
auagcaacacgucugguag

SEQ ID NO: 193140 - RNA, 19 nt, Artificial Sequence
  Description of Artificial Sequence: Synthetic oligonucleotide
aaagcuacuucccuccuug

SEQ ID NO: 193141 - RNA, 19 nt, Artificial Sequence
  Description of Artificial Sequence: Synthetic oligonucleotide
acuauaguauuauugggca

SEQ ID NO: 193142 - RNA, 19 nt, Artificial Sequence
  Description of Artificial Sequence: Synthetic oligonucleotide
uucgguuuccaaaaguacc

SEQ ID NO: 193143 - RNA, 19 nt, Artificial Sequence
  Description of Artificial Sequence: Synthetic oligonucleotide
cacuauaguauuauugggc

SEQ ID NO: 193144 - RNA, 19 nt, Artificial Sequence
  Description of Artificial Sequence: Synthetic oligonucleotide
ugugauagcuauugaaggc

SEQ ID NO: 193145 - RNA, 19 nt, Artificial Sequence
  Description of Artificial Sequence: Synthetic oligonucleotide
ucagaguuauggcaggucc

SEQ ID NO: 193146 - RNA, 19 nt, Artificial Sequence
  Description of Artificial Sequence: Synthetic oligonucleotide
aaugauuauaggauggaga

SEQ ID NO: 193147 - RNA, 19 nt, Artificial Sequence
  Description of Artificial Sequence: Synthetic oligonucleotide
caugaguacucucagaaug

SEQ ID NO: 193148 - RNA, 19 nt, Artificial Sequence
  Description of Artificial Sequence: Synthetic oligonucleotide
ugauauauauuuauauaua

SEQ ID NO: 193149 - RNA, 19 nt, Artificial Sequence
  Description of Artificial Sequence: Synthetic oligonucleotide
uaauaacccagcucaaaag

SEQ ID NO: 193150 - RNA, 19 nt, Artificial Sequence
  Description of Artificial Sequence: Synthetic oligonucleotide
  modified_base (8)..(8): a, c, u, g, unknown or other
agcaaagngcuacacuccc

SEQ ID NO: 193151 - RNA, 19 nt, Artificial Sequence
  Description of Artificial Sequence: Synthetic oligonucleotide
  modified_base (14)..(14): a, c, u, g, unknown or other
uacgugaggaaagngaaug

SEQ ID NO: 193152 - RNA, 19 nt, Artificial Sequence
  Description of Artificial Sequence: Synthetic oligonucleotide
gugugauagcuauugaagg

SEQ ID NO: 193153 - RNA, 19 nt, Artificial Sequence
  Description of Artificial Sequence: Synthetic oligonucleotide
augauuauaggauggagaa

SEQ ID NO: 193154 - RNA, 19 nt, Artificial Sequence
  Description of Artificial Sequence: Synthetic oligonucleotide
aaaaguucaagaguucggu

SEQ ID NO: 193155 - RNA, 19 nt, Artificial Sequence
  Description of Artificial Sequence: Synthetic oligonucleotide
gaaaccguggaucaggcca

SEQ ID NO: 193156 - RNA, 19 nt, Artificial Sequence
  Description of Artificial Sequence: Synthetic oligonucleotide
cagaugauccccaaggcag

SEQ ID NO: 193157 - RNA, 19 nt, Artificial Sequence
  Description of Artificial Sequence: Synthetic oligonucleotide
  modified_base (4)..(4): a, c, u, g, unknown or other
aagngaaugaagaguguag

SEQ ID NO: 193158 - RNA, 19 nt, Artificial Sequence
  Description of Artificial Sequence: Synthetic oligonucleotide
cucuuaauagacccaaccc

SEQ ID NO: 193159 - RNA, 19 nt, Artificial Sequence
  Description of Artificial Sequence: Synthetic oligonucleotide
aaucgagugugauagcuau

SEQ ID NO: 193160 - RNA, 19 nt, Artificial Sequence
  Description of Artificial Sequence: Synthetic oligonucleotide
aaaucguccuuucucuucu

SEQ ID NO: 193161 - RNA, 19 nt, Artificial Sequence
  Description of Artificial Sequence: Synthetic oligonucleotide
uguccuuacgugaggaaag

SEQ ID NO: 193162 - RNA, 19 nt, Artificial Sequence
  Description of Artificial Sequence: Synthetic oligonucleotide
  modified_base (7)..(7): a, c, u, g, unknown or other
ggaaagngaaugaagagug

SEQ ID NO: 193163 - RNA, 19 nt, Artificial Sequence
  Description of Artificial Sequence: Synthetic oligonucleotide
aagaguucgguuuccaaaa

SEQ ID NO: 193164 - RNA, 19 nt, Artificial Sequence
  Description of Artificial Sequence: Synthetic oligonucleotide
ucaaacaaguacuuugauc

SEQ ID NO: 193165 - RNA, 19 nt, Artificial Sequence
  Description of Artificial Sequence: Synthetic oligonucleotide
aacccucacaaauauacau

SEQ ID NO: 193166 - RNA, 19 nt, Artificial Sequence
  Description of Artificial Sequence: Synthetic oligonucleotide
aaguucaagaguucgguuu

SEQ ID NO: 193167 - RNA, 19 nt, Artificial Sequence
  Description of Artificial Sequence: Synthetic oligonucleotide
gauauauauuuauauauau

SEQ ID NO: 193168 - RNA, 19 nt, Artificial Sequence
  Description of Artificial Sequence: Synthetic oligonucleotide
ugcaacauacauaugggua

SEQ ID NO: 193169 - RNA, 19 nt, Artificial Sequence
  Description of Artificial Sequence: Synthetic oligonucleotide
uauuauugggcaacaacau

SEQ ID NO: 193170 - RNA, 19 nt, Artificial Sequence
  Description of Artificial Sequence: Synthetic oligonucleotide
gauuuuaucccugggcuag

SEQ ID NO: 193171 - RNA, 19 nt, Artificial Sequence
  Description of Artificial Sequence: Synthetic oligonucleotide
uuucuuacccacauucgcu

SEQ ID NO: 193172 - RNA, 19 nt, Artificial Sequence
  Description of Artificial Sequence: Synthetic oligonucleotide
ugaccuaaauauacauucc

SEQ ID NO: 193173 - RNA, 19 nt, Artificial Sequence
  Description of Artificial Sequence: Synthetic oligonucleotide
agugugauagcuauugaag

SEQ ID NO: 193174 - RNA, 19 nt, Artificial Sequence
  Description of Artificial Sequence: Synthetic oligonucleotide
cuuucuuacccacauucgc

SEQ ID NO: 193175 - RNA, 19 nt, Artificial Sequence
  Description of Artificial Sequence: Synthetic oligonucleotide
cuaaguuccugguaaguac

SEQ ID NO: 193176 - RNA, 19 nt, Artificial Sequence
  Description of Artificial Sequence: Synthetic oligonucleotide
aguacacgcccauauuugg

SEQ ID NO: 193177 - RNA, 19 nt, Artificial Sequence
  Description of Artificial Sequence: Synthetic oligonucleotide
ugguaucagccaaagaaga

SEQ ID NO: 193178 - RNA, 19 nt, Artificial Sequence
  Description of Artificial Sequence: Synthetic oligonucleotide
guauuauugggcaacaaca

SEQ ID NO: 193179 - RNA, 19 nt, Artificial Sequence
  Description of Artificial Sequence: Synthetic oligonucleotide
gaaucuaaagcaccaagaa

SEQ ID NO: 193180 - RNA, 19 nt, Artificial Sequence
  Description of Artificial Sequence: Synthetic oligonucleotide
gguaaacucuacuagggcc

SEQ ID NO: 193181 - RNA, 19 nt, Artificial Sequence
  Description of Artificial Sequence: Synthetic oligonucleotide
ucugaagaccuccaaugga

SEQ ID NO: 193182 - RNA, 19 nt, Artificial Sequence
  Description of Artificial Sequence: Synthetic oligonucleotide
  modified_base (16)..(16): a, c, u, g, unknown or other
cuuacgugaggaaagngaa

SEQ ID NO: 193183 - RNA, 19 nt, Artificial Sequence
  Description of Artificial Sequence: Synthetic oligonucleotide
ggugguucaacuaucauug

SEQ ID NO: 193184 - RNA, 19 nt, Artificial Sequence
  Description of Artificial Sequence: Synthetic oligonucleotide
aauagacccaacccucaca

SEQ ID NO: 193185 - RNA, 19 nt, Artificial Sequence
  Description of Artificial Sequence: Synthetic oligonucleotide
aauauacaugccaugugga

SEQ ID NO: 193186 - RNA, 19 nt, Artificial Sequence
  Description of Artificial Sequence: Synthetic oligonucleotide
ugaguuaccugguauuggu

SEQ ID NO: 193187 - RNA, 19 nt, Artificial Sequence
  Description of Artificial Sequence: Synthetic oligonucleotide
gaucaggccacccagccac

SEQ ID NO: 193188 - RNA, 19 nt, Artificial Sequence
  Description of Artificial Sequence: Synthetic oligonucleotide
uuuugguaauaacccagcu

SEQ ID NO: 193189 - RNA, 19 nt, Artificial Sequence
  Description of Artificial Sequence: Synthetic oligonucleotide
ugguaaacucuacuagggc

SEQ ID NO: 193190 - RNA, 19 nt, Artificial Sequence
  Description of Artificial Sequence: Synthetic oligonucleotide
agaacugacacuauaguau

SEQ ID NO: 193191 - RNA, 19 nt, Artificial Sequence
  Description of Artificial Sequence: Synthetic oligonucleotide
uucuucuucuucuucuucu

SEQ ID NO: 193192 - RNA, 19 nt, Artificial Sequence
  Description of Artificial Sequence: Synthetic oligonucleotide
ucgagugugauagcuauug

SEQ ID NO: 193193 - RNA, 19 nt, Artificial Sequence
  Description of Artificial Sequence: Synthetic oligonucleotide
  modified_base (3)..(3): a, c, u, g, unknown or other
agngcuacacuccccuuuc

SEQ ID NO: 193194 - RNA, 19 nt, Artificial Sequence
  Description of Artificial Sequence: Synthetic oligonucleotide
ugggagauccuccaaaauu

SEQ ID NO: 193195 - RNA, 19 nt, Artificial Sequence
  Description of Artificial Sequence: Synthetic oligonucleotide
uacacgcccauauuugggc

SEQ ID NO: 193196 - RNA, 19 nt, Artificial Sequence
  Description of Artificial Sequence: Synthetic oligonucleotide
uggguaaacuugaaguauc

SEQ ID NO: 193197 - RNA, 19 nt, Artificial Sequence
  Description of Artificial Sequence: Synthetic oligonucleotide
  modified_base (8)..(8): a, c, u, g, unknown or other
aggaaagngaaugaagagu

SEQ ID NO: 193198 - RNA, 19 nt, Artificial Sequence
  Description of Artificial Sequence: Synthetic oligonucleotide
ugaauugugagggauuaau

SEQ ID NO: 193199 - RNA, 19 nt, Artificial Sequence
  Description of Artificial Sequence: Synthetic oligonucleotide
uucgcugguccucuaagga

SEQ ID NO: 193200 - RNA, 19 nt, Artificial Sequence
  Description of Artificial Sequence: Synthetic oligonucleotide
auucgcugguccucuaagg

SEQ ID NO: 193201 - RNA, 19 nt, Artificial Sequence
  Description of Artificial Sequence: Synthetic oligonucleotide
gguaugacuuuucaaagca

SEQ ID NO: 193202 - RNA, 19 nt, Artificial Sequence
  Description of Artificial Sequence: Synthetic oligonucleotide
guaccauccacuugugagc

SEQ ID NO: 193203 - RNA, 19 nt, Artificial Sequence
  Description of Artificial Sequence: Synthetic oligonucleotide
auauacauuccugguuuac

SEQ ID NO: 193204 - RNA, 19 nt, Artificial Sequence
  Description of Artificial Sequence: Synthetic oligonucleotide
auacaggcaguguaucgag

SEQ ID NO: 193205 - RNA, 19 nt, Artificial Sequence
  Description of Artificial Sequence: Synthetic oligonucleotide
guaauaacccagcucaaaa

SEQ ID NO: 193206 - RNA, 19 nt, Artificial Sequence
  Description of Artificial Sequence: Synthetic oligonucleotide
  modified_base (3)..(3): a, c, u, g, unknown or other
agngaaugaagaguguaga

SEQ ID NO: 193207 - RNA, 19 nt, Artificial Sequence
  Description of Artificial Sequence: Synthetic oligonucleotide
uuggguugguagaaucgag

SEQ ID NO: 193208 - RNA, 19 nt, Artificial Sequence
  Description of Artificial Sequence: Synthetic oligonucleotide
  modified_base (4)..(4): a, c, u, g, unknown or other
aagngcuacacuccccuuu

SEQ ID NO: 193209 - RNA, 19 nt, Artificial Sequence
  Description of Artificial Sequence: Synthetic oligonucleotide
agaguacacgcccauauuu

SEQ ID NO: 193210 - RNA, 19 nt, Artificial Sequence
  Description of Artificial Sequence: Synthetic oligonucleotide
gaacucgggauuuucuuca

SEQ ID NO: 193211 - RNA, 19 nt, Artificial Sequence
  Description of Artificial Sequence: Synthetic oligonucleotide
uuuggguugguagaaucga

SEQ ID NO: 193212 - RNA, 19 nt, Artificial Sequence
  Description of Artificial Sequence: Synthetic oligonucleotide
agacaaaaguucaagaguu

SEQ ID NO: 193213 - RNA, 19 nt, Artificial Sequence
  Description of Artificial Sequence: Synthetic oligonucleotide
aaaccguggaucaggccac

SEQ ID NO: 193214 - RNA, 19 nt, Artificial Sequence
  Description of Artificial Sequence: Synthetic oligonucleotide
agugaaggaugaaucagag

SEQ ID NO: 193215 - RNA, 19 nt, Artificial Sequence
  Description of Artificial Sequence: Synthetic oligonucleotide
agacccaacccucacaaau

SEQ ID NO: 193216 - RNA, 19 nt, Artificial Sequence
  Description of Artificial Sequence: Synthetic oligonucleotide
agaaaccguggaucaggcc

SEQ ID NO: 193217 - RNA, 19 nt, Artificial Sequence
  Description of Artificial Sequence: Synthetic oligonucleotide
ugcuucuguaaccguauac

SEQ ID NO: 193218 - RNA, 19 nt, Artificial Sequence
  Description of Artificial Sequence: Synthetic oligonucleotide
agaaucgagugugauagcu

SEQ ID NO: 193219 - RNA, 19 nt, Artificial Sequence
  Description of Artificial Sequence: Synthetic oligonucleotide
agucuucuucuucuucuuc

SEQ ID NO: 193220 - RNA, 19 nt, Artificial Sequence
  Description of Artificial Sequence: Synthetic oligonucleotide
aggagagucucccaaagua

SEQ ID NO: 193221 - RNA, 19 nt, Artificial Sequence
  Description of Artificial Sequence: Synthetic oligonucleotide
aguguagauaauuggcuuu

SEQ ID NO: 193222 - RNA, 19 nt, Artificial Sequence
  Description of Artificial Sequence: Synthetic oligonucleotide
cucuacuagggccugugag

SEQ ID NO: 193223 - RNA, 19 nt, Artificial Sequence
  Description of Artificial Sequence: Synthetic oligonucleotide
uggugguucaacuaucauu

SEQ ID NO: 193224 - RNA, 19 nt, Artificial Sequence
  Description of Artificial Sequence: Synthetic oligonucleotide
uggguugguagaaucgagu

SEQ ID NO: 193225 - RNA, 19 nt, Artificial Sequence
  Description of Artificial Sequence: Synthetic oligonucleotide
aguaccauucaaggguuuc

SEQ ID NO: 193226 - RNA, 19 nt, Artificial Sequence
  Description of Artificial Sequence: Synthetic oligonucleotide
aaacgcuucuccagaggac

SEQ ID NO: 193227 - RNA, 19 nt, Artificial Sequence
  Description of Artificial Sequence: Synthetic oligonucleotide
caaccaagcgcacaaugug

SEQ ID NO: 193228 - RNA, 19 nt, Artificial Sequence
  Description of Artificial Sequence: Synthetic oligonucleotide
  modified_base (9)..(9): a, c, u, g, unknown or other
cagcaaagngcuacacucc

SEQ ID NO: 193229 - RNA, 19 nt, Artificial Sequence
  Description of Artificial Sequence: Synthetic oligonucleotide
auauauauuuauauauaua

SEQ ID NO: 193230 - RNA, 19 nt, Artificial Sequence
  Description of Artificial Sequence: Synthetic oligonucleotide
uguaaccguauaccuuagc

SEQ ID NO: 193231 - RNA, 19 nt, Artificial Sequence
  Description of Artificial Sequence: Synthetic oligonucleotide
auuaaaggcuaaggcuuac

SEQ ID NO: 193232 - RNA, 19 nt, Artificial Sequence
  Description of Artificial Sequence: Synthetic oligonucleotide
uguaucgagauagccagau

SEQ ID NO: 193233 - RNA, 19 nt, Artificial Sequence
  Description of Artificial Sequence: Synthetic oligonucleotide
auauauuuauauauauauu

SEQ ID NO: 193234 - RNA, 19 nt, Artificial Sequence
  Description of Artificial Sequence: Synthetic oligonucleotide
ucuacaugccugaguuacc

SEQ ID NO: 193235 - RNA, 19 nt, Artificial Sequence
  Description of Artificial Sequence: Synthetic oligonucleotide
gagcaaguccccucaaaac

SEQ ID NO: 193236 - RNA, 19 nt, Artificial Sequence
  Description of Artificial Sequence: Synthetic oligonucleotide
guagauaauuggcuuuuga

SEQ ID NO: 193237 - RNA, 19 nt, Artificial Sequence
  Description of Artificial Sequence: Synthetic oligonucleotide
caaaaguaccauccacuug

SEQ ID NO: 193238 - RNA, 19 nt, Artificial Sequence
  Description of Artificial Sequence: Synthetic oligonucleotide
ccaagcuaaagccagauga

SEQ ID NO: 193239 - RNA, 19 nt, Artificial Sequence
  Description of Artificial Sequence: Synthetic oligonucleotide
gaguacacgcccauauuug

SEQ ID NO: 193240 - RNA, 19 nt, Artificial Sequence
  Description of Artificial Sequence: Synthetic oligonucleotide
cagaguuauggcagguccc

SEQ ID NO: 193241 - RNA, 19 nt, Artificial Sequence
  Description of Artificial Sequence: Synthetic oligonucleotide
cuggacgguccccucaucg

SEQ ID NO: 193242 - RNA, 19 nt, Artificial Sequence
  Description of Artificial Sequence: Synthetic oligonucleotide
uuauuagcauucagacaaa

SEQ ID NO: 193243 - RNA, 19 nt, Artificial Sequence
  Description of Artificial Sequence: Synthetic oligonucleotide
acaggcaguguaucgagau

SEQ ID NO: 193244 - RNA, 19 nt, Artificial Sequence
  Description of Artificial Sequence: Synthetic oligonucleotide
auaccuuagcuguuccacu

SEQ ID NO: 193245 - RNA, 19 nt, Artificial Sequence
  Description of Artificial Sequence: Synthetic oligonucleotide
aaccaagcgcacaauguga

SEQ ID NO: 193246 - RNA, 19 nt, Artificial Sequence
  Description of Artificial Sequence: Synthetic oligonucleotide
ugagagcaugcacccagca

SEQ ID NO: 193247 - RNA, 19 nt, Artificial Sequence
  Description of Artificial Sequence: Synthetic oligonucleotide
caguguaucgagauagcca

SEQ ID NO: 193248 - RNA, 19 nt, Artificial Sequence
  Description of Artificial Sequence: Synthetic oligonucleotide
cagccauuaaaggcuaagg

SEQ ID NO: 193249 - RNA, 19 nt, Artificial Sequence
  Description of Artificial Sequence: Synthetic oligonucleotide
cuagguggccuuucuuacc

SEQ ID NO: 193250 - RNA, 19 nt, Artificial Sequence
  Description of Artificial Sequence: Synthetic oligonucleotide
auagcuauugaaggcuaug

SEQ ID NO: 193251 - RNA, 19 nt, Artificial Sequence
  Description of Artificial Sequence: Synthetic oligonucleotide
aacucuacuagggccugug

SEQ ID NO: 193252 - RNA, 19 nt, Artificial Sequence
  Description of Artificial Sequence: Synthetic oligonucleotide
uuugacuggacgguccccu

SEQ ID NO: 193253 - RNA, 19 nt, Artificial Sequence
  Description of Artificial Sequence: Synthetic oligonucleotide
auauauguuguaacauaca

SEQ ID NO: 193254 - RNA, 19 nt, Artificial Sequence
  Description of Artificial Sequence: Synthetic oligonucleotide
aguacucucagaaugucua

SEQ ID NO: 193255 - RNA, 19 nt, Artificial Sequence
  Description of Artificial Sequence: Synthetic oligonucleotide
aagaguacacgcccauauu

SEQ ID NO: 193256 - RNA, 19 nt, Artificial Sequence
  Description of Artificial Sequence: Synthetic oligonucleotide
ccucuuaauagacccaacc

SEQ ID NO: 193257 - RNA, 19 nt, Artificial Sequence
  Description of Artificial Sequence: Synthetic oligonucleotide
accauauguccucagccaa

SEQ ID NO: 193258 - RNA, 19 nt, Artificial Sequence
  Description of Artificial Sequence: Synthetic oligonucleotide
aguaggaugcuuugccaau

SEQ ID NO: 193259 - RNA, 19 nt, Artificial Sequence
  Description of Artificial Sequence: Synthetic oligonucleotide
agacgggagguuugucugg

SEQ ID NO: 193260 - RNA, 19 nt, Artificial Sequence
  Description of Artificial Sequence: Synthetic oligonucleotide
caagaguucgguuuccaaa

SEQ ID NO: 193261 - RNA, 19 nt, Artificial Sequence
  Description of Artificial Sequence: Synthetic oligonucleotide
gaugagucugugaugucuc

SEQ ID NO: 193262 - RNA, 19 nt, Artificial Sequence
  Description of Artificial Sequence: Synthetic oligonucleotide
gaagaguacacgcccauau

SEQ ID NO: 193263 - RNA, 19 nt, Artificial Sequence
  Description of Artificial Sequence: Synthetic oligonucleotide
uugaaguaucccugguaaa

SEQ ID NO: 193264 - RNA, 19 nt, Artificial Sequence
  Description of Artificial Sequence: Synthetic oligonucleotide
  modified_base (15)..(15): a, c, u, g, unknown or other
uuacgugaggaaagngaau

SEQ ID NO: 193265 - RNA, 19 nt, Artificial Sequence
  Description of Artificial Sequence: Synthetic oligonucleotide
gacuaggcuaucaagaaau

SEQ ID NO: 193266 - RNA, 19 nt, Artificial Sequence
  Description of Artificial Sequence: Synthetic oligonucleotide
acaaccaagcgcacaaugu

SEQ ID NO: 193267 - RNA, 19 nt, Artificial Sequence
  Description of Artificial Sequence: Synthetic oligonucleotide
ggguugguagaaucgagug

SEQ ID NO: 193268 - RNA, 19 nt, Artificial Sequence
  Description of Artificial Sequence: Synthetic oligonucleotide
agauuuuaucccugggcua

SEQ ID NO: 193269 - RNA, 19 nt, Artificial Sequence
  Description of Artificial Sequence: Synthetic oligonucleotide
cauucaaggguuuccucca

SEQ ID NO: 193270 - RNA, 19 nt, Artificial Sequence
  Description of Artificial Sequence: Synthetic oligonucleotide
accauuauccacgaagcuu

SEQ ID NO: 193271 - RNA, 19 nt, Artificial Sequence
  Description of Artificial Sequence: Synthetic oligonucleotide
gagaaaccguggaucaggc

SEQ ID NO: 193272 - RNA, 19 nt, Artificial Sequence
  Description of Artificial Sequence: Synthetic oligonucleotide
guacacgcccauauuuggg

SEQ ID NO: 193273 - RNA, 19 nt, Artificial Sequence
  Description of Artificial Sequence: Synthetic oligonucleotide
gaaaggacuuucaggcaac

SEQ ID NO: 193274 - RNA, 19 nt, Artificial Sequence
  Description of Artificial Sequence: Synthetic oligonucleotide
ugauuauaggauggagaaa

SEQ ID NO: 193275 - RNA, 19 nt, Artificial Sequence
  Description of Artificial Sequence: Synthetic oligonucleotide
agaguuauggcaggucccu

SEQ ID NO: 193276 - RNA, 19 nt, Artificial Sequence
  Description of Artificial Sequence: Synthetic oligonucleotide
uaccauccacuugugagcu

SEQ ID NO: 193277 - RNA, 19 nt, Artificial Sequence
  Description of Artificial Sequence: Synthetic oligonucleotide
uacaggcaguguaucgaga

SEQ ID NO: 193278 - RNA, 19 nt, Artificial Sequence
  Description of Artificial Sequence: Synthetic oligonucleotide
  modified_base (18)..(18): a, c, u, g, unknown or other
uccuuacgugaggaaagng

SEQ ID NO: 193279 - RNA, 19 nt, Artificial Sequence
  Description of Artificial Sequence: Synthetic oligonucleotide
uucaacuaucauugucauc

SEQ ID NO: 193280 - RNA, 19 nt, Artificial Sequence
  Description of Artificial Sequence: Synthetic oligonucleotide
ucuucuucuucuucuucuu

SEQ ID NO: 193281 - RNA, 19 nt, Artificial Sequence
  Description of Artificial Sequence: Synthetic oligonucleotide
accaagcgcacaaugugag

SEQ ID NO: 193282 - RNA, 19 nt, Artificial Sequence
  Description of Artificial Sequence: Synthetic oligonucleotide
gggugaguaacuaggguag

SEQ ID NO: 193283 - RNA, 19 nt, Artificial Sequence
  Description of Artificial Sequence: Synthetic oligonucleotide
ucgggauuuucuucacacu

SEQ ID NO: 193284 - RNA, 19 nt, Artificial Sequence
  Description of Artificial Sequence: Synthetic oligonucleotide
guaccauucaaggguuucc

SEQ ID NO: 193285 - RNA, 19 nt, Artificial Sequence
  Description of Artificial Sequence: Synthetic oligonucleotide
gguaucagccaaagaagag

SEQ ID NO: 193286 - RNA, 19 nt, Artificial Sequence
  Description of Artificial Sequence: Synthetic oligonucleotide
uaccuuagcuguuccacuu

SEQ ID NO: 193287 - RNA, 19 nt, Artificial Sequence
  Description of Artificial Sequence: Synthetic oligonucleotide
  modified_base (5)..(5): a, c, u, g, unknown or other
aaagngcuacacuccccuu

SEQ ID NO: 193288 - RNA, 19 nt, Artificial Sequence
  Description of Artificial Sequence: Synthetic oligonucleotide
  modified_base (2)..(2): a, c, u, g, unknown or other
gngaaugaagaguguagau

SEQ ID NO: 193289 - RNA, 19 nt, Artificial Sequence
  Description of Artificial Sequence: Synthetic oligonucleotide
ugacuggacgguccccuca

SEQ ID NO: 193290 - RNA, 19 nt, Artificial Sequence
  Description of Artificial Sequence: Synthetic oligonucleotide
uagaaucgagugugauagc

SEQ ID NO: 193291 - RNA, 19 nt, Artificial Sequence
  Description of Artificial Sequence: Synthetic oligonucleotide
gugaguaacuaggguaggc

SEQ ID NO: 193292 - RNA, 19 nt, Artificial Sequence
  Description of Artificial Sequence: Synthetic oligonucleotide
aucagccaaagaagaguac

SEQ ID NO: 193293 - RNA, 19 nt, Artificial Sequence
  Description of Artificial Sequence: Synthetic oligonucleotide
ugguaauaacccagcucaa

SEQ ID NO: 193294 - RNA, 19 nt, Artificial Sequence
  Description of Artificial Sequence: Synthetic oligonucleotide
uucaagaguucgguuucca

SEQ ID NO: 193295 - RNA, 19 nt, Artificial Sequence
  Description of Artificial Sequence: Synthetic oligonucleotide
agguucuacaugccugagu

SEQ ID NO: 193296 - RNA, 19 nt, Artificial Sequence
  Description of Artificial Sequence: Synthetic oligonucleotide
aaugucuuuucuggacaau

SEQ ID NO: 193297 - RNA, 19 nt, Artificial Sequence
  Description of Artificial Sequence: Synthetic oligonucleotide
cuucuucuucuucuucuuc

SEQ ID NO: 193298 - RNA, 19 nt, Artificial Sequence
  Description of Artificial Sequence: Synthetic oligonucleotide
guacucucagaaugucuac

SEQ ID NO: 193299 - RNA, 19 nt, Artificial Sequence
  Description of Artificial Sequence: Synthetic oligonucleotide
uacaugccugaguuaccug

SEQ ID NO: 193300 - RNA, 19 nt, Artificial Sequence
  Description of Artificial Sequence: Synthetic oligonucleotide
guaugacuuuucaaagcac

SEQ ID NO: 193301 - RNA, 19 nt, Artificial Sequence
  Description of Artificial Sequence: Synthetic oligonucleotide
aguuugcuucuguaaccgu

SEQ ID NO: 193302 - RNA, 19 nt, Artificial Sequence
  Description of Artificial Sequence: Synthetic oligonucleotide
cuauaguauuauugggcaa

SEQ ID NO: 193303 - RNA, 19 nt, Artificial Sequence
  Description of Artificial Sequence: Synthetic oligonucleotide
uguggaacucgggauuuuc

SEQ ID NO: 193304 - RNA, 19 nt, Artificial Sequence
  Description of Artificial Sequence: Synthetic oligonucleotide
uggacgguccccucaucga

SEQ ID NO: 193305 - RNA, 19 nt, Artificial Sequence
  Description of Artificial Sequence: Synthetic oligonucleotide
cuguaaccguauaccuuag

SEQ ID NO: 193306 - RNA, 19 nt, Artificial Sequence
  Description of Artificial Sequence: Synthetic oligonucleotide
uggaugcaacauacauaug

SEQ ID NO: 193307 - RNA, 19 nt, Artificial Sequence
  Description of Artificial Sequence: Synthetic oligonucleotide
acgggagguuugucuggcc

SEQ ID NO: 193308 - RNA, 19 nt, Artificial Sequence
  Description of Artificial Sequence: Synthetic oligonucleotide
ggcagauaccuggagacug

SEQ ID NO: 193309 - RNA, 19 nt, Artificial Sequence
  Description of Artificial Sequence: Synthetic oligonucleotide
cuaaugcuccuuugaagaa

SEQ ID NO: 193310 - RNA, 19 nt, Artificial Sequence
  Description of Artificial Sequence: Synthetic oligonucleotide
gcggcucagccauuaaagg

SEQ ID NO: 193311 - RNA, 19 nt, Artificial Sequence
  Description of Artificial Sequence: Synthetic oligonucleotide
gucuucuucuucuucuucu

SEQ ID NO: 193312 - RNA, 19 nt, Artificial Sequence
  Description of Artificial Sequence: Synthetic oligonucleotide
aacacgucugguaguugga

SEQ ID NO: 193313 - RNA, 19 nt, Artificial Sequence
  Description of Artificial Sequence: Synthetic oligonucleotide
agauagccagaugccagug

SEQ ID NO: 193314 - RNA, 19 nt, Artificial Sequence
  Description of Artificial Sequence: Synthetic oligonucleotide
aaguagcaagagggagcac

SEQ ID NO: 193315 - RNA, 19 nt, Artificial Sequence
  Description of Artificial Sequence: Synthetic oligonucleotide
  modified_base (6)..(6): a, c, u, g, unknown or other
caaagngcuacacuccccu

SEQ ID NO: 193316 - RNA, 19 nt, Artificial Sequence
  Description of Artificial Sequence: Synthetic oligonucleotide
cuacucagagguaugacuu

SEQ ID NO: 193317 - RNA, 19 nt, Artificial Sequence
  Description of Artificial Sequence: Synthetic oligonucleotide
auagcacuaagaggaggga

SEQ ID NO: 193318 - RNA, 19 nt, Artificial Sequence
  Description of Artificial Sequence: Synthetic oligonucleotide
cccuaaugcuccuuugaag

SEQ ID NO: 193319 - RNA, 19 nt, Artificial Sequence
  Description of Artificial Sequence: Synthetic oligonucleotide
ggguaggcccuucugggag

SEQ ID NO: 193320 - RNA, 19 nt, Artificial Sequence
  Description of Artificial Sequence: Synthetic oligonucleotide
ggggugaguaacuagggua

SEQ ID NO: 193321 - RNA, 19 nt, Artificial Sequence
  Description of Artificial Sequence: Synthetic oligonucleotide
gagauagccagaugccagu

SEQ ID NO: 193322 - RNA, 19 nt, Artificial Sequence
  Description of Artificial Sequence: Synthetic oligonucleotide
uagcaacacgucugguagu

SEQ ID NO: 193323 - RNA, 19 nt, Artificial Sequence
  Description of Artificial Sequence: Synthetic oligonucleotide
auuguggaacucgggauuu

SEQ ID NO: 193324 - RNA, 19 nt, Artificial Sequence
  Description of Artificial Sequence: Synthetic oligonucleotide
caacccucacaaauauaca

SEQ ID NO: 193325 - RNA, 19 nt, Artificial Sequence
  Description of Artificial Sequence: Synthetic oligonucleotide
guuugcuucuguaaccgua

SEQ ID NO: 193326 - RNA, 19 nt, Artificial Sequence
  Description of Artificial Sequence: Synthetic oligonucleotide
acucuacuagggccuguga

SEQ ID NO: 193327 - RNA, 19 nt, Artificial Sequence
  Description of Artificial Sequence: Synthetic oligonucleotide
ggugaguaacuaggguagg

SEQ ID NO: 193328 - RNA, 19 nt, Artificial Sequence
  Description of Artificial Sequence: Synthetic oligonucleotide
  modified_base (6)..(6): a, c, u, g, unknown or other
gaaagngaaugaagagugu

SEQ ID NO: 193329 - RNA, 19 nt, Artificial Sequence
  Description of Artificial Sequence: Synthetic oligonucleotide
  modified_base (13)..(13): a, c, u, g, unknown or other
acgugaggaaagngaauga

SEQ ID NO: 193330 - RNA, 19 nt, Artificial Sequence
  Description of Artificial Sequence: Synthetic oligonucleotide
gccagaugauccccaaggc

SEQ ID NO: 193331 - RNA, 19 nt, Artificial Sequence
  Description of Artificial Sequence: Synthetic oligonucleotide
gaaucgagugugauagcua

SEQ ID NO: 193332 - RNA, 19 nt, Artificial Sequence
  Description of Artificial Sequence: Synthetic oligonucleotide
acaaugugaguaggaugcu

SEQ ID NO: 193333 - RNA, 19 nt, Artificial Sequence
  Description of Artificial Sequence: Synthetic oligonucleotide
uugcuucuguaaccguaua

SEQ ID NO: 193334 - RNA, 19 nt, Artificial Sequence
  Description of Artificial Sequence: Synthetic oligonucleotide
ggagauccuccaaaauuug

SEQ ID NO: 193335 - RNA, 19 nt, Artificial Sequence
  Description of Artificial Sequence: Synthetic oligonucleotide
agcaacacgucugguaguu

SEQ ID NO: 193336 - RNA, 19 nt, Artificial Sequence
  Description of Artificial Sequence: Synthetic oligonucleotide
ccauauauagcagggaaaa

SEQ ID NO: 193337 - RNA, 19 nt, Artificial Sequence
  Description of Artificial Sequence: Synthetic oligonucleotide
ggaacgaaggaggcaggag

SEQ ID NO: 193338 - RNA, 19 nt, Artificial Sequence
  Description of Artificial Sequence: Synthetic oligonucleotide
aggcuaaggcuuacaacca

SEQ ID NO: 193339 - RNA, 19 nt, Artificial Sequence
  Description of Artificial Sequence: Synthetic oligonucleotide
  modified_base (7)..(7): a, c, u, g, unknown or other
gcaaagngcuacacucccc

SEQ ID NO: 193340 - RNA, 19 nt, Artificial Sequence
  Description of Artificial Sequence: Synthetic oligonucleotide
ccagugagugcuagggaug

SEQ ID NO: 193341 - RNA, 19 nt, Artificial Sequence
  Description of Artificial Sequence: Synthetic oligonucleotide
accugguauuggucuucag

SEQ ID NO: 193342 - RNA, 19 nt, Artificial Sequence
  Description of Artificial Sequence: Synthetic oligonucleotide
aggcggcucagccauuaaa

SEQ ID NO: 193343 - RNA, 19 nt, Artificial Sequence
  Description of Artificial Sequence: Synthetic oligonucleotide
gaggagagucucccaaagu

SEQ ID NO: 193344 - RNA, 19 nt, Artificial Sequence
  Description of Artificial Sequence: Synthetic oligonucleotide
ccugaguuaccugguauug

SEQ ID NO: 193345 - RNA, 19 nt, Artificial Sequence
  Description of Artificial Sequence: Synthetic oligonucleotide
gguaauaacccagcucaaa

SEQ ID NO: 193346 - RNA, 19 nt, Artificial Sequence
  Description of Artificial Sequence: Synthetic oligonucleotide
acauauggguaaacuugaa

SEQ ID NO: 193347 - RNA, 19 nt, Artificial Sequence
  Description of Artificial Sequence: Synthetic oligonucleotide
ggacuaggcuaucaagaaa

SEQ ID NO: 193348 - RNA, 19 nt, Artificial Sequence
  Description of Artificial Sequence: Synthetic oligonucleotide
  modified_base (19)..(19): a, c, u, g, unknown or other
guccuuacgugaggaaagn

SEQ ID NO: 193349 - RNA, 19 nt, Artificial Sequence
  Description of Artificial Sequence: Synthetic oligonucleotide
ugguaguuggaagcauauu

SEQ ID NO: 193350 - RNA, 19 nt, Artificial Sequence
  Description of Artificial Sequence: Synthetic oligonucleotide
guccuacucagagguauga

SEQ ID NO: 193351 - RNA, 19 nt, Artificial Sequence
  Description of Artificial Sequence: Synthetic oligonucleotide
gugcuagggauggagaggu

SEQ ID NO: 193352 - RNA, 19 nt, Artificial Sequence
  Description of Artificial Sequence: Synthetic oligonucleotide
cucaucgaacccaguaagu

SEQ ID NO: 193353 - RNA, 19 nt, Artificial Sequence
  Description of Artificial Sequence: Synthetic oligonucleotide
cuacuuagccccagguccu

SEQ ID NO: 193354 - RNA, 19 nt, Artificial Sequence
  Description of Artificial Sequence: Synthetic oligonucleotide
gguugguagaaucgagugu

SEQ ID NO: 193355 - RNA, 19 nt, Artificial Sequence
  Description of Artificial Sequence: Synthetic oligonucleotide
ggcaaaagaggcggcucag

SEQ ID NO: 193356 - RNA, 19 nt, Artificial Sequence
  Description of Artificial Sequence: Synthetic oligonucleotide
aagugagccuaggggccga

SEQ ID NO: 193357 - RNA, 19 nt, Artificial Sequence
  Description of Artificial Sequence: Synthetic oligonucleotide
acacgucugguaguuggaa

SEQ ID NO: 193358 - RNA, 19 nt, Artificial Sequence
  Description of Artificial Sequence: Synthetic oligonucleotide
cuacaugccugaguuaccu

SEQ ID NO: 193359 - RNA, 19 nt, Artificial Sequence
  Description of Artificial Sequence: Synthetic oligonucleotide
acuaggcuaucaagaaauu

SEQ ID NO: 193360 - RNA, 19 nt, Artificial Sequence
  Description of Artificial Sequence: Synthetic oligonucleotide
aaguaccauucaaggguuu

SEQ ID NO: 193361 - RNA, 19 nt, Artificial Sequence
  Description of Artificial Sequence: Synthetic oligonucleotide
cccauauauagcagggaaa

SEQ ID NO: 193362 - RNA, 19 nt, Artificial Sequence
  Description of Artificial Sequence: Synthetic oligonucleotide
uacuucccuccuugguaua

SEQ ID NO: 193363 - RNA, 19 nt, Artificial Sequence
  Description of Artificial Sequence: Synthetic oligonucleotide
gcaaaagaggcggcucagc

SEQ ID NO: 193364 - RNA, 19 nt, Artificial Sequence
  Description of Artificial Sequence: Synthetic oligonucleotide
gaaaucccgccagucuucu

SEQ ID NO: 193365 - RNA, 19 nt, Artificial Sequence
  Description of Artificial Sequence: Synthetic oligonucleotide
ccuacucagagguaugacu

SEQ ID NO: 193366 - RNA, 19 nt, Artificial Sequence
  Description of Artificial Sequence: Synthetic oligonucleotide
ggcaguguaucgagauagc

SEQ ID NO: 193367 - RNA, 19 nt, Artificial Sequence
  Description of Artificial Sequence: Synthetic oligonucleotide
gggagauccuccaaaauuu

SEQ ID NO: 193368 - RNA, 19 nt, Artificial Sequence
  Description of Artificial Sequence: Synthetic oligonucleotide
ccuggugguucaacuauca

SEQ ID NO: 193369 - RNA, 19 nt, Artificial Sequence
  Description of Artificial Sequence: Synthetic oligonucleotide
ggcuaaggcuuacaaccaa

SEQ ID NO: 193370 - RNA, 19 nt, Artificial Sequence
  Description of Artificial Sequence: Synthetic oligonucleotide
gcuaaggcuuacaaccaaa

SEQ ID NO: 193371 - RNA, 19 nt, Artificial Sequence
  Description of Artificial Sequence: Synthetic oligonucleotide
uaacuaggguaggcccuuc

SEQ ID NO: 193372 - RNA, 19 nt, Artificial Sequence
  Description of Artificial Sequence: Synthetic oligonucleotide
gcggcagaaugagagcaug

SEQ ID NO: 193373 - RNA, 19 nt, Artificial Sequence
  Description of Artificial Sequence: Synthetic oligonucleotide
gguaggcccuucugggaga

SEQ ID NO: 193374 - RNA, 19 nt, Artificial Sequence
  Description of Artificial Sequence: Synthetic oligonucleotide
ggaucaggccacccagcca

SEQ ID NO: 193375 - RNA, 19 nt, Artificial Sequence
  Description of Artificial Sequence: Synthetic oligonucleotide
uuguggaacucgggauuuu

SEQ ID NO: 193376 - RNA, 19 nt, Artificial Sequence
  Description of Artificial Sequence: Synthetic oligonucleotide
uccccucaucgaacccagu

SEQ ID NO: 193377 - RNA, 19 nt, Artificial Sequence
  Description of Artificial Sequence: Synthetic oligonucleotide
uacuuagccccagguccua

SEQ ID NO: 193378 - RNA, 19 nt, Artificial Sequence
  Description of Artificial Sequence: Synthetic oligonucleotide
cauuauccacgaagcuugu

SEQ ID NO: 193379 - RNA, 19 nt, Artificial Sequence
  Description of Artificial Sequence: Synthetic oligonucleotide
ggacgguccccucaucgaa

SEQ ID NO: 193380 - RNA, 19 nt, Artificial Sequence
  Description of Artificial Sequence: Synthetic oligonucleotide
cucuaaggacuaggcuauc

SEQ ID NO: 193381 - RNA, 19 nt, Artificial Sequence
  Description of Artificial Sequence: Synthetic oligonucleotide
guguaucgagauagccaga

SEQ ID NO: 193382 - RNA, 19 nt, Artificial Sequence
  Description of Artificial Sequence: Synthetic oligonucleotide
ccaaaaguaccauccacuu

SEQ ID NO: 193383 - RNA, 19 nt, Artificial Sequence
  Description of Artificial Sequence: Synthetic oligonucleotide
cucagccauuaaaggcuaa

SEQ ID NO: 193384 - RNA, 19 nt, Artificial Sequence
  Description of Artificial Sequence: Synthetic oligonucleotide
aucgagugugauagcuauu

SEQ ID NO: 193385 - RNA, 19 nt, Artificial Sequence
  Description of Artificial Sequence: Synthetic oligonucleotide
guaacuaggguaggcccuu

SEQ ID NO: 193386 - RNA, 19 nt, Artificial Sequence
  Description of Artificial Sequence: Synthetic oligonucleotide
cguugcugguaaacucuac

SEQ ID NO: 193387 - RNA, 19 nt, Artificial Sequence
  Description of Artificial Sequence: Synthetic oligonucleotide
ccucuagcaagugagccua

SEQ ID NO: 193388 - RNA, 19 nt, Artificial Sequence
  Description of Artificial Sequence: Synthetic oligonucleotide
gaggcggcucagccauuaa

SEQ ID NO: 193389 - RNA, 19 nt, Artificial Sequence
  Description of Artificial Sequence: Synthetic oligonucleotide
gcaacacgucugguaguug

SEQ ID NO: 193390 - RNA, 19 nt, Artificial Sequence
  Description of Artificial Sequence: Synthetic oligonucleotide
cuagggccugugagaaacu

SEQ ID NO: 193391 - RNA, 19 nt, Artificial Sequence
  Description of Artificial Sequence: Synthetic oligonucleotide
ccccucuuaauagacccaa

SEQ ID NO: 193392 - RNA, 19 nt, Artificial Sequence
  Description of Artificial Sequence: Synthetic oligonucleotide
cacauucgcugguccucua

SEQ ID NO: 193393 - RNA, 19 nt, Artificial Sequence
  Description of Artificial Sequence: Synthetic oligonucleotide
cgagugugauagcuauuga

SEQ ID NO: 193394 - RNA, 19 nt, Artificial Sequence
  Description of Artificial Sequence: Synthetic oligonucleotide
ggacggaaaucccgccagu

SEQ ID NO: 193395 - RNA, 19 nt, Artificial Sequence
  Description of Artificial Sequence: Synthetic oligonucleotide
gccuaggggccgagggcag

SEQ ID NO: 193396 - RNA, 19 nt, Artificial Sequence
  Description of Artificial Sequence: Synthetic oligonucleotide
guaggcccuucugggagau

SEQ ID NO: 193397 - RNA, 19 nt, Artificial Sequence
  Description of Artificial Sequence: Synthetic oligonucleotide
ccaagcgcacaaugugagu

SEQ ID NO: 193398 - RNA, 19 nt, Artificial Sequence
  Description of Artificial Sequence: Synthetic oligonucleotide
ggcggcagaaugagagcau

SEQ ID NO: 193399 - RNA, 19 nt, Artificial Sequence
  Description of Artificial Sequence: Synthetic oligonucleotide
  modified_base (1)..(1): a, c, u, g, unknown or other
ngaaugaagaguguagaua

SEQ ID NO: 193400 - RNA, 19 nt, Artificial Sequence
  Description of Artificial Sequence: Synthetic oligonucleotide
aaugagaagaggcuuggcc

SEQ ID NO: 193401 - RNA, 19 nt, Artificial Sequence
  Description of Artificial Sequence: Synthetic oligonucleotide
uuaaauuggguccaaagug

SEQ ID NO: 193402 - RNA, 19 nt, Artificial Sequence
  Description of Artificial Sequence: Synthetic oligonucleotide
cauacuuaagacaugaccc

SEQ ID NO: 193403 - RNA, 19 nt, Artificial Sequence
  Description of Artificial Sequence: Synthetic oligonucleotide
aaaccuaaggcccugugcg

SEQ ID NO: 193404 - RNA, 19 nt, Artificial Sequence
  Description of Artificial Sequence: Synthetic oligonucleotide
aauaggcuaucacucaggc

SEQ ID NO: 193405 - RNA, 19 nt, Artificial Sequence
  Description of Artificial Sequence: Synthetic oligonucleotide
acaugaagcacaaauaggc

SEQ ID NO: 193406 - RNA, 19 nt, Artificial Sequence
  Description of Artificial Sequence: Synthetic oligonucleotide
aacauuccgggguaguugc

SEQ ID NO: 193407 - RNA, 19 nt, Artificial Sequence
  Description of Artificial Sequence: Synthetic oligonucleotide
aaagccucauauuugcguc

SEQ ID NO: 193408 - RNA, 19 nt, Artificial Sequence
  Description of Artificial Sequence: Synthetic oligonucleotide
aaagaggugaugccccugc

SEQ ID NO: 193409 - RNA, 19 nt, Artificial Sequence
  Description of Artificial Sequence: Synthetic oligonucleotide
ucgagagaaagaaagaggu

SEQ ID NO: 193410 - RNA, 19 nt, Artificial Sequence
  Description of Artificial Sequence: Synthetic oligonucleotide
aaagcgaccaggcuguuug

SEQ ID NO: 193411 - RNA, 19 nt, Artificial Sequence
  Description of Artificial Sequence: Synthetic oligonucleotide
uugaaaaucucacuagcca

SEQ ID NO: 193412 - RNA, 19 nt, Artificial Sequence
  Description of Artificial Sequence: Synthetic oligonucleotide
uaaugagaagcuccgagcc

SEQ ID NO: 193413 - RNA, 19 nt, Artificial Sequence
  Description of Artificial Sequence: Synthetic oligonucleotide
gagguugccauccugaggc

SEQ ID NO: 193414 - RNA, 19 nt, Artificial Sequence
  Description of Artificial Sequence: Synthetic oligonucleotide
uuagcuacauuccuugccc

SEQ ID NO: 193415 - RNA, 19 nt, Artificial Sequence
  Description of Artificial Sequence: Synthetic oligonucleotide
ucuuugguaacugggagcg

SEQ ID NO: 193416 - RNA, 19 nt, Artificial Sequence
  Description of Artificial Sequence: Synthetic oligonucleotide
uuaaaauucccuucucuca

SEQ ID NO: 193417 - RNA, 19 nt, Artificial Sequence
  Description of Artificial Sequence: Synthetic oligonucleotide
acgaucagcacugagggcc

SEQ ID NO: 193418 - RNA, 19 nt, Artificial Sequence
  Description of Artificial Sequence: Synthetic oligonucleotide
uaaauuggguccaaagugu

SEQ ID NO: 193419 - RNA, 19 nt, Artificial Sequence
  Description of Artificial Sequence: Synthetic oligonucleotide
ugagguggaaauauuaaaa

SEQ ID NO: 193420 - RNA, 19 nt, Artificial Sequence
  Description of Artificial Sequence: Synthetic oligonucleotide
uuuaggauuugccccagcc

SEQ ID NO: 193421 - RNA, 19 nt, Artificial Sequence
  Description of Artificial Sequence: Synthetic oligonucleotide
ucggauaagcaccucauca

SEQ ID NO: 193422 - RNA, 19 nt, Artificial Sequence
  Description of Artificial Sequence: Synthetic oligonucleotide
cuugaaaaucucacuagcc

SEQ ID NO: 193423 - RNA, 19 nt, Artificial Sequence
  Description of Artificial Sequence: Synthetic oligonucleotide
ugaaaaucucacuagccac

SEQ ID NO: 193424 - RNA, 19 nt, Artificial Sequence
  Description of Artificial Sequence: Synthetic oligonucleotide
uagacgauuucucuuaagu

SEQ ID NO: 193425 - RNA, 19 nt, Artificial Sequence
  Description of Artificial Sequence: Synthetic oligonucleotide
aaaugaugugcguacguga

SEQ ID NO: 193426 - RNA, 19 nt, Artificial Sequence
  Description of Artificial Sequence: Synthetic oligonucleotide
ucagauauuuggcaucagc

SEQ ID NO: 193427 - RNA, 19 nt, Artificial Sequence
  Description of Artificial Sequence: Synthetic oligonucleotide
uggguagacagacagacaa

SEQ ID NO: 193428 - RNA, 19 nt, Artificial Sequence
  Description of Artificial Sequence: Synthetic oligonucleotide
cuuauuguccucacgcugc

SEQ ID NO: 193429 - RNA, 19 nt, Artificial Sequence
  Description of Artificial Sequence: Synthetic oligonucleotide
uuagcauccuccacaauga

SEQ ID NO: 193430 - RNA, 19 nt, Artificial Sequence
  Description of Artificial Sequence: Synthetic oligonucleotide
uaagacaugacccucgcuu

SEQ ID NO: 193431 - RNA, 19 nt, Artificial Sequence
  Description of Artificial Sequence: Synthetic oligonucleotide
cuagcauccuuaaauuggg

SEQ ID NO: 193432 - RNA, 19 nt, Artificial Sequence
  Description of Artificial Sequence: Synthetic oligonucleotide
uguguuuaggguaggaaaa

SEQ ID NO: 193433 - RNA, 19 nt, Artificial Sequence
  Description of Artificial Sequence: Synthetic oligonucleotide
agcacaaauaggcuaucac

SEQ ID NO: 193434 - RNA, 19 nt, Artificial Sequence
  Description of Artificial Sequence: Synthetic oligonucleotide
uuuaguguuucucuggauu

SEQ ID NO: 193435 - RNA, 19 nt, Artificial Sequence
  Description of Artificial Sequence: Synthetic oligonucleotide
uuugguaacugggagcggg

SEQ ID NO: 193436 - RNA, 19 nt, Artificial Sequence
  Description of Artificial Sequence: Synthetic oligonucleotide
agcauccuuaaauuggguc

SEQ ID NO: 193437 - RNA, 19 nt, Artificial Sequence
  Description of Artificial Sequence: Synthetic oligonucleotide
guuuaggguaggaaaaugg

SEQ ID NO: 193438 - RNA, 19 nt, Artificial Sequence
  Description of Artificial Sequence: Synthetic oligonucleotide
ucacucaggcuacugacag

SEQ ID NO: 193439 - RNA, 19 nt, Artificial Sequence
  Description of Artificial Sequence: Synthetic oligonucleotide
cuaaugaagagucugggga

SEQ ID NO: 193440 - RNA, 19 nt, Artificial Sequence
  Description of Artificial Sequence: Synthetic oligonucleotide
aaaaugaugugcguacgug

SEQ ID NO: 193441 - RNA, 19 nt, Artificial Sequence
  Description of Artificial Sequence: Synthetic oligonucleotide
ugugcuaaugaagagucug

SEQ ID NO: 193442 - RNA, 19 nt, Artificial Sequence
  Description of Artificial Sequence: Synthetic oligonucleotide
ugguuagagagccugguac

SEQ ID NO: 193443 - RNA, 19 nt, Artificial Sequence
  Description of Artificial Sequence: Synthetic oligonucleotide
cacacgaucagcacugagg

SEQ ID NO: 193444 - RNA, 19 nt, Artificial Sequence
  Description of Artificial Sequence: Synthetic oligonucleotide
ugucucgaucacaugauca

SEQ ID NO: 193445 - RNA, 19 nt, Artificial Sequence
  Description of Artificial Sequence: Synthetic oligonucleotide
auauuguucacacgaucag

SEQ ID NO: 193446 - RNA, 19 nt, Artificial Sequence
  Description of Artificial Sequence: Synthetic oligonucleotide
ugagccgacggauaguuug

SEQ ID NO: 193447 - RNA, 19 nt, Artificial Sequence
  Description of Artificial Sequence: Synthetic oligonucleotide
ugaugugcguacgugaucc

SEQ ID NO: 193448 - RNA, 19 nt, Artificial Sequence
  Description of Artificial Sequence: Synthetic oligonucleotide
uuggucaaacacauauugc

SEQ ID NO: 193449 - RNA, 19 nt, Artificial Sequence
  Description of Artificial Sequence: Synthetic oligonucleotide
uuaaugcuggggauuaaac

SEQ ID NO: 193450 - RNA, 19 nt, Artificial Sequence
  Description of Artificial Sequence: Synthetic oligonucleotide
uuuguagcccuuucgguca

SEQ ID NO: 193451 - RNA, 19 nt, Artificial Sequence
  Description of Artificial Sequence: Synthetic oligonucleotide
cauggcguaagaugaagcc

SEQ ID NO: 193452 - RNA, 19 nt, Artificial Sequence
  Description of Artificial Sequence: Synthetic oligonucleotide
uuuauacucuucuggcuug

SEQ ID NO: 193453 - RNA, 19 nt, Artificial Sequence
  Description of Artificial Sequence: Synthetic oligonucleotide
gaucacaugaucacuuugc

SEQ ID NO: 193454 - RNA, 19 nt, Artificial Sequence
  Description of Artificial Sequence: Synthetic oligonucleotide
guaaugagaagcuccgagc

SEQ ID NO: 193455 - RNA, 19 nt, Artificial Sequence
  Description of Artificial Sequence: Synthetic oligonucleotide
gaauuucugccgccaaugg

SEQ ID NO: 193456 - RNA, 19 nt, Artificial Sequence
  Description of Artificial Sequence: Synthetic oligonucleotide
uugacuuuagcauccucca

SEQ ID NO: 193457 - RNA, 19 nt, Artificial Sequence
  Description of Artificial Sequence: Synthetic oligonucleotide
ugcgucgauaggcaaagcc

SEQ ID NO: 193458 - RNA, 19 nt, Artificial Sequence
  Description of Artificial Sequence: Synthetic oligonucleotide
aagccucauauuugcgucg

SEQ ID NO: 193459 - RNA, 19 nt, Artificial Sequence
  Description of Artificial Sequence: Synthetic oligonucleotide
aaauaggcuaucacucagg

SEQ ID NO: 193460 - RNA, 19 nt, Artificial Sequence
  Description of Artificial Sequence: Synthetic oligonucleotide
uguugauauuguucacacg

SEQ ID NO: 193461 - RNA, 19 nt, Artificial Sequence
  Description of Artificial Sequence: Synthetic oligonucleotide
uaauuguccuucuugcccu

SEQ ID NO: 193462 - RNA, 19 nt, Artificial Sequence
  Description of Artificial Sequence: Synthetic oligonucleotide
agcggauauaggcaggcuc

SEQ ID NO: 193463 - RNA, 19 nt, Artificial Sequence
  Description of Artificial Sequence: Synthetic oligonucleotide
aagguugauugcugguuag

SEQ ID NO: 193464 - RNA, 19 nt, Artificial Sequence
  Description of Artificial Sequence: Synthetic oligonucleotide
ucuacgcacucgcagauuc

SEQ ID NO: 193465 - RNA, 19 nt, Artificial Sequence
  Description of Artificial Sequence: Synthetic oligonucleotide
gcguacgugauccagaaag

SEQ ID NO: 193466 - RNA, 19 nt, Artificial Sequence
  Description of Artificial Sequence: Synthetic oligonucleotide
uuugcgucgauaggcaaag

SEQ ID NO: 193467 - RNA, 19 nt, Artificial Sequence
  Description of Artificial Sequence: Synthetic oligonucleotide
acaaauaggcuaucacuca

SEQ ID NO: 193468 - RNA, 19 nt, Artificial Sequence
  Description of Artificial Sequence: Synthetic oligonucleotide
ugaucgcuucacccgaagg

SEQ ID NO: 193469 - RNA, 19 nt, Artificial Sequence
  Description of Artificial Sequence: Synthetic oligonucleotide
ccuagcauccuuaaauugg

SEQ ID NO: 193470 - RNA, 19 nt, Artificial Sequence
  Description of Artificial Sequence: Synthetic oligonucleotide
auuccgguuagguuggugu

SEQ ID NO: 193471 - RNA, 19 nt, Artificial Sequence
  Description of Artificial Sequence: Synthetic oligonucleotide
uauuguucacacgaucagc

SEQ ID NO: 193472 - RNA, 19 nt, Artificial Sequence
  Description of Artificial Sequence: Synthetic oligonucleotide
aaccuaaggcccugugcgg

SEQ ID NO: 193473 - RNA, 19 nt, Artificial Sequence
  Description of Artificial Sequence: Synthetic oligonucleotide
aaugagguggaaauauuaa

SEQ ID NO: 193474 - RNA, 19 nt, Artificial Sequence
  Description of Artificial Sequence: Synthetic oligonucleotide
ugcacaugaagcacaaaua

SEQ ID NO: 193475 - RNA, 19 nt, Artificial Sequence
  Description of Artificial Sequence: Synthetic oligonucleotide
guugauguugauauuguuc

SEQ ID NO: 193476 - RNA, 19 nt, Artificial Sequence
  Description of Artificial Sequence: Synthetic oligonucleotide
uccaccggugccuucauca

SEQ ID NO: 193477 - RNA, 19 nt, Artificial Sequence
  Description of Artificial Sequence: Synthetic oligonucleotide
cuacugacagagauuccgg

SEQ ID NO: 193478 - RNA, 19 nt, Artificial Sequence
  Description of Artificial Sequence: Synthetic oligonucleotide
uagccgagaugucugacca

SEQ ID NO: 193479 - RNA, 19 nt, Artificial Sequence
  Description of Artificial Sequence: Synthetic oligonucleotide
ucuggcgucggacuuccag

SEQ ID NO: 193480 - RNA, 19 nt, Artificial Sequence
  Description of Artificial Sequence: Synthetic oligonucleotide
ugcuauuaggcaagccuug

SEQ ID NO: 193481 - RNA, 19 nt, Artificial Sequence
  Description of Artificial Sequence: Synthetic oligonucleotide
auauaggcaggcuccuuag

SEQ ID NO: 193482 - RNA, 19 nt, Artificial Sequence
  Description of Artificial Sequence: Synthetic oligonucleotide
gcauccuuaaauugggucc

SEQ ID NO: 193483 - RNA, 19 nt, Artificial Sequence
  Description of Artificial Sequence: Synthetic oligonucleotide
aucuuuuagcuacauuccu

SEQ ID NO: 193484 - RNA, 19 nt, Artificial Sequence
  Description of Artificial Sequence: Synthetic oligonucleotide
uagucuccuauaaagcauc

SEQ ID NO: 193485 - RNA, 19 nt, Artificial Sequence
  Description of Artificial Sequence: Synthetic oligonucleotide
cuuagcaccgguucuacca

SEQ ID NO: 193486 - RNA, 19 nt, Artificial Sequence
  Description of Artificial Sequence: Synthetic oligonucleotide
aagcucgagucuuugguaa

SEQ ID NO: 193487 - RNA, 19 nt, Artificial Sequence
  Description of Artificial Sequence: Synthetic oligonucleotide
uggggauuaaacccagggu

SEQ ID NO: 193488 - RNA, 19 nt, Artificial Sequence
  Description of Artificial Sequence: Synthetic oligonucleotide
agggcaacggggugcaugg

SEQ ID NO: 193489 - RNA, 19 nt, Artificial Sequence
  Description of Artificial Sequence: Synthetic oligonucleotide
aaauuggguccaaagugug

SEQ ID NO: 193490 - RNA, 19 nt, Artificial Sequence
  Description of Artificial Sequence: Synthetic oligonucleotide
acuuaagacaugacccucg

SEQ ID NO: 193491 - RNA, 19 nt, Artificial Sequence
  Description of Artificial Sequence: Synthetic oligonucleotide
uguuuaggguaggaaaaug

SEQ ID NO: 193492 - RNA, 19 nt, Artificial Sequence
  Description of Artificial Sequence: Synthetic oligonucleotide
agcaccucaucaaagcgac

SEQ ID NO: 193493 - RNA, 19 nt, Artificial Sequence
  Description of Artificial Sequence: Synthetic oligonucleotide
cucuguaccaagacgugug

SEQ ID NO: 193494 - RNA, 19 nt, Artificial Sequence
  Description of Artificial Sequence: Synthetic oligonucleotide
ucucagauauuuggcauca

SEQ ID NO: 193495 - RNA, 19 nt, Artificial Sequence
  Description of Artificial Sequence: Synthetic oligonucleotide
uugguaacugggagcgggg

SEQ ID NO: 193496 - RNA, 19 nt, Artificial Sequence
  Description of Artificial Sequence: Synthetic oligonucleotide
ugugcggucgagagaaaga

SEQ ID NO: 193497 - RNA, 19 nt, Artificial Sequence
  Description of Artificial Sequence: Synthetic oligonucleotide
ugugcguacgugauccaga

SEQ ID NO: 193498 - RNA, 19 nt, Artificial Sequence
  Description of Artificial Sequence: Synthetic oligonucleotide
gcuacugacagagauuccg

SEQ ID NO: 193499 - RNA, 19 nt, Artificial Sequence
  Description of Artificial Sequence: Synthetic oligonucleotide
uguaccaagacgugugcua

SEQ ID NO: 193500 - RNA, 19 nt, Artificial Sequence
  Description of Artificial Sequence: Synthetic oligonucleotide
augcagcggauauaggcag

SEQ ID NO: 193501 - RNA, 19 nt, Artificial Sequence
  Description of Artificial Sequence: Synthetic oligonucleotide
ugaacugcguggcaaccgu

SEQ ID NO: 193502 - RNA, 19 nt, Artificial Sequence
  Description of Artificial Sequence: Synthetic oligonucleotide
aaugaugugcguacgugau

SEQ ID NO: 193503 - RNA, 19 nt, Artificial Sequence
  Description of Artificial Sequence: Synthetic oligonucleotide
auacuccggcaguauuucc

SEQ ID NO: 193504 - RNA, 19 nt, Artificial Sequence
  Description of Artificial Sequence: Synthetic oligonucleotide
uugaacugcguggcaaccg

SEQ ID NO: 193505 - RNA, 19 nt, Artificial Sequence
  Description of Artificial Sequence: Synthetic oligonucleotide
uggcaaccguuucuggccg

SEQ ID NO: 193506 - RNA, 19 nt, Artificial Sequence
  Description of Artificial Sequence: Synthetic oligonucleotide
gacgugugcuaaugaagag

SEQ ID NO: 193507 - RNA, 19 nt, Artificial Sequence
  Description of Artificial Sequence: Synthetic oligonucleotide
aggagagguccaccggugc

SEQ ID NO: 193508 - RNA, 19 nt, Artificial Sequence
  Description of Artificial Sequence: Synthetic oligonucleotide
gaugcagcggauauaggca

SEQ ID NO: 193509 - RNA, 19 nt, Artificial Sequence
  Description of Artificial Sequence: Synthetic oligonucleotide
gagauuccgguuagguugg

SEQ ID NO: 193510 - RNA, 19 nt, Artificial Sequence
  Description of Artificial Sequence: Synthetic oligonucleotide
cuugguuagugucucgauc

SEQ ID NO: 193511 - RNA, 19 nt, Artificial Sequence
  Description of Artificial Sequence: Synthetic oligonucleotide
uguaggaaagccucauauu

SEQ ID NO: 193512 - RNA, 19 nt, Artificial Sequence
  Description of Artificial Sequence: Synthetic oligonucleotide
uuauuguccucacgcugca

SEQ ID NO: 193513 - RNA, 19 nt, Artificial Sequence
  Description of Artificial Sequence: Synthetic oligonucleotide
auuucugccgccaauggaa

SEQ ID NO: 193514 - RNA, 19 nt, Artificial Sequence
  Description of Artificial Sequence: Synthetic oligonucleotide
uggcgucggacuuccaggg

SEQ ID NO: 193515 - RNA, 19 nt, Artificial Sequence
  Description of Artificial Sequence: Synthetic oligonucleotide
agugggccgcaaaaggugc

SEQ ID NO: 193516 - RNA, 19 nt, Artificial Sequence
  Description of Artificial Sequence: Synthetic oligonucleotide
ugucggauaagcaccucau

SEQ ID NO: 193517 - RNA, 19 nt, Artificial Sequence
  Description of Artificial Sequence: Synthetic oligonucleotide
augaugugcguacgugauc

SEQ ID NO: 193518 - RNA, 19 nt, Artificial Sequence
  Description of Artificial Sequence: Synthetic oligonucleotide
augacccucgcuugauggg

SEQ ID NO: 193519 - RNA, 19 nt, Artificial Sequence
  Description of Artificial Sequence: Synthetic oligonucleotide
guagccgagaugucugacc

SEQ ID NO: 193520 - RNA, 19 nt, Artificial Sequence
  Description of Artificial Sequence: Synthetic oligonucleotide
gacuagacgauuucucuua

SEQ ID NO: 193521 - RNA, 19 nt, Artificial Sequence
  Description of Artificial Sequence: Synthetic oligonucleotide
agcucgagucuuugguaac

SEQ ID NO: 193522 - RNA, 19 nt, Artificial Sequence
  Description of Artificial Sequence: Synthetic oligonucleotide
auagacccaggcaggagac

SEQ ID NO: 193523 - RNA, 19 nt, Artificial Sequence
  Description of Artificial Sequence: Synthetic oligonucleotide
acucgcagauucuccauca

SEQ ID NO: 193524 - RNA, 19 nt, Artificial Sequence
  Description of Artificial Sequence: Synthetic oligonucleotide
gauggcugaucgcuucacc

SEQ ID NO: 193525 - RNA, 19 nt, Artificial Sequence
  Description of Artificial Sequence: Synthetic oligonucleotide
ucgauaggcaaagccagcu

SEQ ID NO: 193526 - RNA, 19 nt, Artificial Sequence
  Description of Artificial Sequence: Synthetic oligonucleotide
ucaccgggaauucagccuu

SEQ ID NO: 193527 - RNA, 19 nt, Artificial Sequence
  Description of Artificial Sequence: Synthetic oligonucleotide
cuggacuagacgauuucuc

SEQ ID NO: 193528 - RNA, 19 nt, Artificial Sequence
  Description of Artificial Sequence: Synthetic oligonucleotide
ucacacgaucagcacugag

SEQ ID NO: 193529 - RNA, 19 nt, Artificial Sequence
  Description of Artificial Sequence: Synthetic oligonucleotide
cucucagauauuuggcauc

SEQ ID NO: 193530 - RNA, 19 nt, Artificial Sequence
  Description of Artificial Sequence: Synthetic oligonucleotide
ucgcagauucuccaucagu

SEQ ID NO: 193531 - RNA, 19 nt, Artificial Sequence
  Description of Artificial Sequence: Synthetic oligonucleotide
acugcguggcaaccguuuc

SEQ ID NO: 193532 - RNA, 19 nt, Artificial Sequence
  Description of Artificial Sequence: Synthetic oligonucleotide
gacccuagcauccuuaaau

SEQ ID NO: 193533 - RNA, 19 nt, Artificial Sequence
  Description of Artificial Sequence: Synthetic oligonucleotide
aucaaagcgaccaggcugu

SEQ ID NO: 193534 - RNA, 19 nt, Artificial Sequence
  Description of Artificial Sequence: Synthetic oligonucleotide
uccugaggcauagacccag

SEQ ID NO: 193535 - RNA, 19 nt, Artificial Sequence
  Description of Artificial Sequence: Synthetic oligonucleotide
accggugccuucaucaccg

SEQ ID NO: 193536 - RNA, 19 nt, Artificial Sequence
  Description of Artificial Sequence: Synthetic oligonucleotide
ccugaucaccucaugagag

SEQ ID NO: 193537 - RNA, 19 nt, Artificial Sequence
  Description of Artificial Sequence: Synthetic oligonucleotide
agugacuuguaccucugua

SEQ ID NO: 193538 - RNA, 19 nt, Artificial Sequence
  Description of Artificial Sequence: Synthetic oligonucleotide
gguaaugagaagaggcuug

SEQ ID NO: 193539 - RNA, 19 nt, Artificial Sequence
  Description of Artificial Sequence: Synthetic oligonucleotide
cuagacgauuucucuuaag

SEQ ID NO: 193540 - RNA, 19 nt, Artificial Sequence
  Description of Artificial Sequence: Synthetic oligonucleotide
agcucuacgcacucgcaga

SEQ ID NO: 193541 - RNA, 19 nt, Artificial Sequence
  Description of Artificial Sequence: Synthetic oligonucleotide
ccgacggauaguuugggcg

SEQ ID NO: 193542 - RNA, 19 nt, Artificial Sequence
  Description of Artificial Sequence: Synthetic oligonucleotide
uuagugucucgaucacaug

SEQ ID NO: 193543 - RNA, 19 nt, Artificial Sequence
  Description of Artificial Sequence: Synthetic oligonucleotide
ugcccuauuuuauacucuu

SEQ ID NO: 193544 - RNA, 19 nt, Artificial Sequence
  Description of Artificial Sequence: Synthetic oligonucleotide
gauacuccggcaguauuuc

SEQ ID NO: 193545 - RNA, 19 nt, Artificial Sequence
  Description of Artificial Sequence: Synthetic oligonucleotide
ugggcaaaccuaaggcccu

SEQ ID NO: 193546 - RNA, 19 nt, Artificial Sequence
  Description of Artificial Sequence: Synthetic oligonucleotide
gcggucgagagaaagaaag

SEQ ID NO: 193547 - RNA, 19 nt, Artificial Sequence
  Description of Artificial Sequence: Synthetic oligonucleotide
uauuugcgucgauaggcaa

SEQ ID NO: 193548 - RNA, 19 nt, Artificial Sequence
  Description of Artificial Sequence: Synthetic oligonucleotide
gagaugucugaccagcacu

SEQ ID NO: 193549 - RNA, 19 nt, Artificial Sequence
  Description of Artificial Sequence: Synthetic oligonucleotide
auauuugcgucgauaggca

SEQ ID NO: 193550 - RNA, 19 nt, Artificial Sequence
  Description of Artificial Sequence: Synthetic oligonucleotide
uacuggacuagacgauuuc

SEQ ID NO: 193551 - RNA, 19 nt, Artificial Sequence
  Description of Artificial Sequence: Synthetic oligonucleotide
agcuacauuccuugcccug

SEQ ID NO: 193552 - RNA, 19 nt, Artificial Sequence
  Description of Artificial Sequence: Synthetic oligonucleotide
ggccuugguaaugagaagc

SEQ ID NO: 193553 - RNA, 19 nt, Artificial Sequence
  Description of Artificial Sequence: Synthetic oligonucleotide
auagucuccuauaaagcau

SEQ ID NO: 193554 - RNA, 19 nt, Artificial Sequence
  Description of Artificial Sequence: Synthetic oligonucleotide
uccgguuagguugguguag

SEQ ID NO: 193555 - RNA, 19 nt, Artificial Sequence
  Description of Artificial Sequence: Synthetic oligonucleotide
auuuaguguuucucuggau

SEQ ID NO: 193556 - RNA, 19 nt, Artificial Sequence
  Description of Artificial Sequence: Synthetic oligonucleotide
uucggucauauuucaccac

SEQ ID NO: 193557 - RNA, 19 nt, Artificial Sequence
  Description of Artificial Sequence: Synthetic oligonucleotide
cauuccgggguaguugccg

SEQ ID NO: 193558 - RNA, 19 nt, Artificial Sequence
  Description of Artificial Sequence: Synthetic oligonucleotide
acuggacuagacgauuucu

SEQ ID NO: 193559 - RNA, 19 nt, Artificial Sequence
  Description of Artificial Sequence: Synthetic oligonucleotide
aucaggagucaggagaggu

SEQ ID NO: 193560 - RNA, 19 nt, Artificial Sequence
  Description of Artificial Sequence: Synthetic oligonucleotide
uggugucggauaagcaccu

SEQ ID NO: 193561 - RNA, 19 nt, Artificial Sequence
  Description of Artificial Sequence: Synthetic oligonucleotide
ugguuagugucucgaucac

SEQ ID NO: 193562 - RNA, 19 nt, Artificial Sequence
  Description of Artificial Sequence: Synthetic oligonucleotide
cucagaaugagguggaaau

SEQ ID NO: 193563 - RNA, 19 nt, Artificial Sequence
  Description of Artificial Sequence: Synthetic oligonucleotide
agugucagcagugggcuga

SEQ ID NO: 193564 - RNA, 19 nt, Artificial Sequence
  Description of Artificial Sequence: Synthetic oligonucleotide
gaccuggugucggauaagc

SEQ ID NO: 193565 - RNA, 19 nt, Artificial Sequence
  Description of Artificial Sequence: Synthetic oligonucleotide
ugcguggcaaccguuucug

SEQ ID NO: 193566 - RNA, 19 nt, Artificial Sequence
  Description of Artificial Sequence: Synthetic oligonucleotide
uagguugguguagucaauc

SEQ ID NO: 193567 - RNA, 19 nt, Artificial Sequence
  Description of Artificial Sequence: Synthetic oligonucleotide
ugacccucgcuugaugggc

SEQ ID NO: 193568 - RNA, 19 nt, Artificial Sequence
  Description of Artificial Sequence: Synthetic oligonucleotide
acgugugcuaaugaagagu

SEQ ID NO: 193569 - RNA, 19 nt, Artificial Sequence
  Description of Artificial Sequence: Synthetic oligonucleotide
gccaaagguaaugagaaga

SEQ ID NO: 193570 - RNA, 19 nt, Artificial Sequence
  Description of Artificial Sequence: Synthetic oligonucleotide
uuagguugguguagucaau

SEQ ID NO: 193571 - RNA, 19 nt, Artificial Sequence
  Description of Artificial Sequence: Synthetic oligonucleotide
aagaggugaugccccugca

SEQ ID NO: 193572 - RNA, 19 nt, Artificial Sequence
  Description of Artificial Sequence: Synthetic oligonucleotide
accaagacgugugcuaaug

SEQ ID NO: 193573 - RNA, 19 nt, Artificial Sequence
  Description of Artificial Sequence: Synthetic oligonucleotide
ccgcaaaaggugcaggugg

SEQ ID NO: 193574 - RNA, 19 nt, Artificial Sequence
  Description of Artificial Sequence: Synthetic oligonucleotide
ugagggccgucuugguuag

SEQ ID NO: 193575 - RNA, 19 nt, Artificial Sequence
  Description of Artificial Sequence: Synthetic oligonucleotide
caagacgugugcuaaugaa

SEQ ID NO: 193576 - RNA, 19 nt, Artificial Sequence
  Description of Artificial Sequence: Synthetic oligonucleotide
cuaucacucaggcuacuga

SEQ ID NO: 193577 - RNA, 19 nt, Artificial Sequence
  Description of Artificial Sequence: Synthetic oligonucleotide
cuugaacugcguggcaacc

SEQ ID NO: 193578 - RNA, 19 nt, Artificial Sequence
  Description of Artificial Sequence: Synthetic oligonucleotide
ugguccugcccuauuuuau

SEQ ID NO: 193579 - RNA, 19 nt, Artificial Sequence
  Description of Artificial Sequence: Synthetic oligonucleotide
gaagcucgagucuuuggua

SEQ ID NO: 193580 - RNA, 19 nt, Artificial Sequence
  Description of Artificial Sequence: Synthetic oligonucleotide
agucuuccaaacucuuaaa

SEQ ID NO: 193581 - RNA, 19 nt, Artificial Sequence
  Description of Artificial Sequence: Synthetic oligonucleotide
acccuagcauccuuaaauu

SEQ ID NO: 193582 - RNA, 19 nt, Artificial Sequence
  Description of Artificial Sequence: Synthetic oligonucleotide
acuagacgauuucucuuaa

SEQ ID NO: 193583 - RNA, 19 nt, Artificial Sequence
  Description of Artificial Sequence: Synthetic oligonucleotide
ugguguagucaauccucug

SEQ ID NO: 193584 - RNA, 19 nt, Artificial Sequence
  Description of Artificial Sequence: Synthetic oligonucleotide
cugcgaaugugaugcugcc

SEQ ID NO: 193585 - RNA, 19 nt, Artificial Sequence
  Description of Artificial Sequence: Synthetic oligonucleotide
agacaugacccucgcuuga

SEQ ID NO: 193586 - RNA, 19 nt, Artificial Sequence
  Description of Artificial Sequence: Synthetic oligonucleotide
aggcaggcuccuuagacuu

SEQ ID NO: 193587 - RNA, 19 nt, Artificial Sequence
  Description of Artificial Sequence: Synthetic oligonucleotide
ggcaacggggugcauggcg

SEQ ID NO: 193588 - RNA, 19 nt, Artificial Sequence
  Description of Artificial Sequence: Synthetic oligonucleotide
cgagucuuugguaacuggg

SEQ ID NO: 193589 - RNA, 19 nt, Artificial Sequence
  Description of Artificial Sequence: Synthetic oligonucleotide
cagcucuacgcacucgcag

SEQ ID NO: 193590 - RNA, 19 nt, Artificial Sequence
  Description of Artificial Sequence: Synthetic oligonucleotide
agaggcuuggccagagaag

SEQ ID NO: 193591 - RNA, 19 nt, Artificial Sequence
  Description of Artificial Sequence: Synthetic oligonucleotide
cuccgagccagaugugaag

SEQ ID NO: 193592 - RNA, 19 nt, Artificial Sequence
  Description of Artificial Sequence: Synthetic oligonucleotide
guccugcccuauuuuauac

SEQ ID NO: 193593 - RNA, 19 nt, Artificial Sequence
  Description of Artificial Sequence: Synthetic oligonucleotide
agagugggccgcaaaaggu

SEQ ID NO: 193594 - RNA, 19 nt, Artificial Sequence
  Description of Artificial Sequence: Synthetic oligonucleotide
ggagguugccauccugagg

SEQ ID NO: 193595 - RNA, 19 nt, Artificial Sequence
  Description of Artificial Sequence: Synthetic oligonucleotide
uucugccgccaauggaagc

SEQ ID NO: 193596 - RNA, 19 nt, Artificial Sequence
  Description of Artificial Sequence: Synthetic oligonucleotide
ugcgaaugugaugcugccc

SEQ ID NO: 193597 - RNA, 19 nt, Artificial Sequence
  Description of Artificial Sequence: Synthetic oligonucleotide
gacagagauuccgguuagg

SEQ ID NO: 193598 - RNA, 19 nt, Artificial Sequence
  Description of Artificial Sequence: Synthetic oligonucleotide
gugucggauaagcaccuca

SEQ ID NO: 193599 - RNA, 19 nt, Artificial Sequence
  Description of Artificial Sequence: Synthetic oligonucleotide
acaugacccucgcuugaug

SEQ ID NO: 193600 - RNA, 19 nt, Artificial Sequence
  Description of Artificial Sequence: Synthetic oligonucleotide
cauccuuaaauugggucca

SEQ ID NO: 193601 - RNA, 19 nt, Artificial Sequence
  Description of Artificial Sequence: Synthetic oligonucleotide
ugcggucgagagaaagaaa

SEQ ID NO: 193602 - RNA, 19 nt, Artificial Sequence
  Description of Artificial Sequence: Synthetic oligonucleotide
gcacaaauaggcuaucacu

SEQ ID NO: 193603 - RNA, 19 nt, Artificial Sequence
  Description of Artificial Sequence: Synthetic oligonucleotide
ugggguaggcaaagauggu

SEQ ID NO: 193604 - RNA, 19 nt, Artificial Sequence
  Description of Artificial Sequence: Synthetic oligonucleotide
aucgcuucacccgaaggaa

SEQ ID NO: 193605 - RNA, 19 nt, Artificial Sequence
  Description of Artificial Sequence: Synthetic oligonucleotide
cuuuaggauuugccccagc

SEQ ID NO: 193606 - RNA, 19 nt, Artificial Sequence
  Description of Artificial Sequence: Synthetic oligonucleotide
ccauccugaggcauagacc

SEQ ID NO: 193607 - RNA, 19 nt, Artificial Sequence
  Description of Artificial Sequence: Synthetic oligonucleotide
gaucacuuugcagcaccac

SEQ ID NO: 193608 - RNA, 19 nt, Artificial Sequence
  Description of Artificial Sequence: Synthetic oligonucleotide
cuaaggcccugugcggucg

SEQ ID NO: 193609 - RNA, 19 nt, Artificial Sequence
  Description of Artificial Sequence: Synthetic oligonucleotide
ugggcggcccacuuccucu

SEQ ID NO: 193610 - RNA, 19 nt, Artificial Sequence
  Description of Artificial Sequence: Synthetic oligonucleotide
cucugcuugacuuuagcau

SEQ ID NO: 193611 - RNA, 19 nt, Artificial Sequence
  Description of Artificial Sequence: Synthetic oligonucleotide
cuguuugagucaggaaaac

SEQ ID NO: 193612 - RNA, 19 nt, Artificial Sequence
  Description of Artificial Sequence: Synthetic oligonucleotide
uuccgguuagguuggugua

SEQ ID NO: 193613 - RNA, 19 nt, Artificial Sequence
  Description of Artificial Sequence: Synthetic oligonucleotide
gcggauauaggcaggcucc

SEQ ID NO: 193614 - RNA, 19 nt, Artificial Sequence
  Description of Artificial Sequence: Synthetic oligonucleotide
acgcacucgcagauucucc

SEQ ID NO: 193615 - RNA, 19 nt, Artificial Sequence
  Description of Artificial Sequence: Synthetic oligonucleotide
aggcuaucacucaggcuac

SEQ ID NO: 193616 - RNA, 19 nt, Artificial Sequence
  Description of Artificial Sequence: Synthetic oligonucleotide
ccugcccuauuuuauacuc

SEQ ID NO: 193617 - RNA, 19 nt, Artificial Sequence
  Description of Artificial Sequence: Synthetic oligonucleotide
uacgcacucgcagauucuc

SEQ ID NO: 193618 - RNA, 19 nt, Artificial Sequence
  Description of Artificial Sequence: Synthetic oligonucleotide
gacggauaguuugggcggc

SEQ ID NO: 193619 - RNA, 19 nt, Artificial Sequence
  Description of Artificial Sequence: Synthetic oligonucleotide
acggauaguuugggcggcc

SEQ ID NO: 193620 - RNA, 19 nt, Artificial Sequence
  Description of Artificial Sequence: Synthetic oligonucleotide
uuucuccggcccagugugc

SEQ ID NO: 193621 - RNA, 19 nt, Artificial Sequence
  Description of Artificial Sequence: Synthetic oligonucleotide
uguagccgagaugucugac

SEQ ID NO: 193622 - RNA, 19 nt, Artificial Sequence
  Description of Artificial Sequence: Synthetic oligonucleotide
ucgcuucacccgaaggaau

SEQ ID NO: 193623 - RNA, 19 nt, Artificial Sequence
  Description of Artificial Sequence: Synthetic oligonucleotide
cugugcggucgagagaaag

SEQ ID NO: 193624 - RNA, 19 nt, Artificial Sequence
  Description of Artificial Sequence: Synthetic oligonucleotide
agugucucgaucacaugau

SEQ ID NO: 193625 - RNA, 19 nt, Artificial Sequence
  Description of Artificial Sequence: Synthetic oligonucleotide
auuugcgucgauaggcaaa

SEQ ID NO: 193626 - RNA, 19 nt, Artificial Sequence
  Description of Artificial Sequence: Synthetic oligonucleotide
cgucgauaggcaaagccag

SEQ ID NO: 193627 - RNA, 19 nt, Artificial Sequence
  Description of Artificial Sequence: Synthetic oligonucleotide
cucgcagauucuccaucag

SEQ ID NO: 193628 - RNA, 19 nt, Artificial Sequence
  Description of Artificial Sequence: Synthetic oligonucleotide
caggagagguccaccggug

SEQ ID NO: 193629 - RNA, 19 nt, Artificial Sequence
  Description of Artificial Sequence: Synthetic oligonucleotide
gauuccgguuagguuggug

SEQ ID NO: 193630 - RNA, 19 nt, Artificial Sequence
  Description of Artificial Sequence: Synthetic oligonucleotide
cugaucgcuucacccgaag

SEQ ID NO: 193631 - RNA, 19 nt, Artificial Sequence
  Description of Artificial Sequence: Synthetic oligonucleotide
agcauacuggaugggcuca

SEQ ID NO: 193632 - RNA, 19 nt, Artificial Sequence
  Description of Artificial Sequence: Synthetic oligonucleotide
caagguugauugcugguua

SEQ ID NO: 193633 - RNA, 19 nt, Artificial Sequence
  Description of Artificial Sequence: Synthetic oligonucleotide
ugggccgcaaaaggugcag

SEQ ID NO: 193634 - RNA, 19 nt, Artificial Sequence
  Description of Artificial Sequence: Synthetic oligonucleotide
caccggugccuucaucacc

SEQ ID NO: 193635 - RNA, 19 nt, Artificial Sequence
  Description of Artificial Sequence: Synthetic oligonucleotide
guacgugauccagaaagaa

SEQ ID NO: 193636 - RNA, 19 nt, Artificial Sequence
  Description of Artificial Sequence: Synthetic oligonucleotide
gucggauaagcaccucauc

SEQ ID NO: 193637 - RNA, 19 nt, Artificial Sequence
  Description of Artificial Sequence: Synthetic oligonucleotide
gguuagguugguguaguca

SEQ ID NO: 193638 - RNA, 19 nt, Artificial Sequence
  Description of Artificial Sequence: Synthetic oligonucleotide
gcgucggacuuccagggag

SEQ ID NO: 193639 - RNA, 19 nt, Artificial Sequence
  Description of Artificial Sequence: Synthetic oligonucleotide
gugucucgaucacaugauc

SEQ ID NO: 193640 - RNA, 19 nt, Artificial Sequence
  Description of Artificial Sequence: Synthetic oligonucleotide
aacugcguggcaaccguuu

SEQ ID NO: 193641 - RNA, 19 nt, Artificial Sequence
  Description of Artificial Sequence: Synthetic oligonucleotide
gaagcacaaauaggcuauc

SEQ ID NO: 193642 - RNA, 19 nt, Artificial Sequence
  Description of Artificial Sequence: Synthetic oligonucleotide
ucugaggauagggcuucac

SEQ ID NO: 193643 - RNA, 19 nt, Artificial Sequence
  Description of Artificial Sequence: Synthetic oligonucleotide
gucgauaggcaaagccagc

SEQ ID NO: 193644 - RNA, 19 nt, Artificial Sequence
  Description of Artificial Sequence: Synthetic oligonucleotide
acauuccgggguaguugcc

SEQ ID NO: 193645 - RNA, 19 nt, Artificial Sequence
  Description of Artificial Sequence: Synthetic oligonucleotide
gucuugguuagugucucga

SEQ ID NO: 193646 - RNA, 19 nt, Artificial Sequence
  Description of Artificial Sequence: Synthetic oligonucleotide
cuucacccgaaggaauuuc

SEQ ID NO: 193647 - RNA, 19 nt, Artificial Sequence
  Description of Artificial Sequence: Synthetic oligonucleotide
agccugcuauuaggcaagc

SEQ ID NO: 193648 - RNA, 19 nt, Artificial Sequence
  Description of Artificial Sequence: Synthetic oligonucleotide
uccuuaaauuggguccaaa

SEQ ID NO: 193649 - RNA, 19 nt, Artificial Sequence
  Description of Artificial Sequence: Synthetic oligonucleotide
cgacggauaguuugggcgg

SEQ ID NO: 193650 - RNA, 19 nt, Artificial Sequence
  Description of Artificial Sequence: Synthetic oligonucleotide
agacaaggugccaaaggua

SEQ ID NO: 193651 - RNA, 19 nt, Artificial Sequence
  Description of Artificial Sequence: Synthetic oligonucleotide
cccuagcauccuuaaauug

SEQ ID NO: 193652 - RNA, 19 nt, Artificial Sequence
  Description of Artificial Sequence: Synthetic oligonucleotide
agcuccgagccagauguga

SEQ ID NO: 193653 - RNA, 19 nt, Artificial Sequence
  Description of Artificial Sequence: Synthetic oligonucleotide
cuauugcuguggcccggcc

SEQ ID NO: 193654 - RNA, 19 nt, Artificial Sequence
  Description of Artificial Sequence: Synthetic oligonucleotide
ugaccuggugucggauaag

SEQ ID NO: 193655 - RNA, 19 nt, Artificial Sequence
  Description of Artificial Sequence: Synthetic oligonucleotide
ggccgcuuggaucuuggug

SEQ ID NO: 193656 - RNA, 19 nt, Artificial Sequence
  Description of Artificial Sequence: Synthetic oligonucleotide
gugcguacgugauccagaa

SEQ ID NO: 193657 - RNA, 19 nt, Artificial Sequence
  Description of Artificial Sequence: Synthetic oligonucleotide
gaugugcguacgugaucca

SEQ ID NO: 193658 - RNA, 19 nt, Artificial Sequence
  Description of Artificial Sequence: Synthetic oligonucleotide
accgggaauucagccuugg

SEQ ID NO: 193659 - RNA, 19 nt, Artificial Sequence
  Description of Artificial Sequence: Synthetic oligonucleotide
uagcaccgguucuaccacu

SEQ ID NO: 193660 - RNA, 19 nt, Artificial Sequence
  Description of Artificial Sequence: Synthetic oligonucleotide
agguugauugcugguuaga

SEQ ID NO: 193661 - RNA, 19 nt, Artificial Sequence
  Description of Artificial Sequence: Synthetic oligonucleotide
uggcccacuccugggguag

SEQ ID NO: 193662 - RNA, 19 nt, Artificial Sequence
  Description of Artificial Sequence: Synthetic oligonucleotide
uaccaagacgugugcuaau

SEQ ID NO: 193663 - RNA, 19 nt, Artificial Sequence
  Description of Artificial Sequence: Synthetic oligonucleotide
gccgagaugucugaccagc

SEQ ID NO: 193664 - RNA, 19 nt, Artificial Sequence
  Description of Artificial Sequence: Synthetic oligonucleotide
gacccucgcuugaugggcc

SEQ ID NO: 193665 - RNA, 19 nt, Artificial Sequence
  Description of Artificial Sequence: Synthetic oligonucleotide
gcguaagaugaagccacgg

SEQ ID NO: 193666 - RNA, 19 nt, Artificial Sequence
  Description of Artificial Sequence: Synthetic oligonucleotide
ccgggagcgagguuuguag

SEQ ID NO: 193667 - RNA, 19 nt, Artificial Sequence
  Description of Artificial Sequence: Synthetic oligonucleotide
gugcggucgagagaaagaa

SEQ ID NO: 193668 - RNA, 19 nt, Artificial Sequence
  Description of Artificial Sequence: Synthetic oligonucleotide
gcauggcguaagaugaagc

SEQ ID NO: 193669 - RNA, 19 nt, Artificial Sequence
  Description of Artificial Sequence: Synthetic oligonucleotide
ucgcuugaugggccuccug

SEQ ID NO: 193670 - RNA, 19 nt, Artificial Sequence
  Description of Artificial Sequence: Synthetic oligonucleotide
agcaccgguucuaccacug

SEQ ID NO: 193671 - RNA, 19 nt, Artificial Sequence
  Description of Artificial Sequence: Synthetic oligonucleotide
gaugagccgacggauaguu

SEQ ID NO: 193672 - RNA, 19 nt, Artificial Sequence
  Description of Artificial Sequence: Synthetic oligonucleotide
ggccguccugcccacgugg

SEQ ID NO: 193673 - RNA, 19 nt, Artificial Sequence
  Description of Artificial Sequence: Synthetic oligonucleotide
uucacacgaucagcacuga

SEQ ID NO: 193674 - RNA, 19 nt, Artificial Sequence
  Description of Artificial Sequence: Synthetic oligonucleotide
gcgucgauaggcaaagcca

SEQ ID NO: 193675 - RNA, 19 nt, Artificial Sequence
  Description of Artificial Sequence: Synthetic oligonucleotide
aacggggugcauggcguaa

SEQ ID NO: 193676 - RNA, 19 nt, Artificial Sequence
  Description of Artificial Sequence: Synthetic oligonucleotide
cugaggauagggcuucacu

SEQ ID NO: 193677 - RNA, 19 nt, Artificial Sequence
  Description of Artificial Sequence: Synthetic oligonucleotide
uccgggguaguugccgccu

SEQ ID NO: 193678 - RNA, 19 nt, Artificial Sequence
  Description of Artificial Sequence: Synthetic oligonucleotide
uggccgcuucuugucacug

SEQ ID NO: 193679 - RNA, 19 nt, Artificial Sequence
  Description of Artificial Sequence: Synthetic oligonucleotide
agagccugguacauacuua

SEQ ID NO: 193680 - RNA, 19 nt, Artificial Sequence
  Description of Artificial Sequence: Synthetic oligonucleotide
ggcguaagaugaagccacg

SEQ ID NO: 193681 - RNA, 19 nt, Artificial Sequence
  Description of Artificial Sequence: Synthetic oligonucleotide
ggaugaagaucuugguccu

SEQ ID NO: 193682 - RNA, 19 nt, Artificial Sequence
  Description of Artificial Sequence: Synthetic oligonucleotide
ggauuaaacccagggucuc

SEQ ID NO: 193683 - RNA, 19 nt, Artificial Sequence
  Description of Artificial Sequence: Synthetic oligonucleotide
acggggugcauggcguaag

SEQ ID NO: 193684 - RNA, 19 nt, Artificial Sequence
  Description of Artificial Sequence: Synthetic oligonucleotide
gcuaucacucaggcuacug

SEQ ID NO: 193685 - RNA, 19 nt, Artificial Sequence
  Description of Artificial Sequence: Synthetic oligonucleotide
gcagcggauauaggcaggc

SEQ ID NO: 193686 - RNA, 19 nt, Artificial Sequence
  Description of Artificial Sequence: Synthetic oligonucleotide
ggcugaucgcuucacccga

SEQ ID NO: 193687 - RNA, 19 nt, Artificial Sequence
  Description of Artificial Sequence: Synthetic oligonucleotide
augcuuagcaccgguucua

SEQ ID NO: 193688 - RNA, 19 nt, Artificial Sequence
  Description of Artificial Sequence: Synthetic oligonucleotide
ggauaguuugggcggccca

SEQ ID NO: 193689 - RNA, 19 nt, Artificial Sequence
  Description of Artificial Sequence: Synthetic oligonucleotide
acaaggugccaaagguaau

SEQ ID NO: 193690 - RNA, 19 nt, Artificial Sequence
  Description of Artificial Sequence: Synthetic oligonucleotide
cguaagaugaagccacgga

SEQ ID NO: 193691 - RNA, 19 nt, Artificial Sequence
  Description of Artificial Sequence: Synthetic oligonucleotide
gccgccucagguuaagcaa

SEQ ID NO: 193692 - RNA, 19 nt, Artificial Sequence
  Description of Artificial Sequence: Synthetic oligonucleotide
gccgacggauaguuugggc

SEQ ID NO: 193693 - RNA, 19 nt, Artificial Sequence
  Description of Artificial Sequence: Synthetic oligonucleotide
gguuagugucucgaucaca

SEQ ID NO: 193694 - RNA, 19 nt, Artificial Sequence
  Description of Artificial Sequence: Synthetic oligonucleotide
ccugaggcauagacccagg

SEQ ID NO: 193695 - RNA, 19 nt, Artificial Sequence
  Description of Artificial Sequence: Synthetic oligonucleotide
ccaggguacuggacuagac

SEQ ID NO: 193696 - RNA, 19 nt, Artificial Sequence
  Description of Artificial Sequence: Synthetic oligonucleotide
guuagagagccugguacau

SEQ ID NO: 193697 - RNA, 19 nt, Artificial Sequence
  Description of Artificial Sequence: Synthetic oligonucleotide
acccucgcuugaugggccu

SEQ ID NO: 193698 - RNA, 19 nt, Artificial Sequence
  Description of Artificial Sequence: Synthetic oligonucleotide
uugcgucgauaggcaaagc

SEQ ID NO: 193699 - RNA, 19 nt, Artificial Sequence
  Description of Artificial Sequence: Synthetic oligonucleotide
ggcccagugugccacgcca

SEQ ID NO: 193700 - RNA, 19 nt, Artificial Sequence
  Description of Artificial Sequence: Synthetic oligonucleotide
cgaucagcacugagggccg

SEQ ID NO: 193701 - RNA, 19 nt, Artificial Sequence
  Description of Artificial Sequence: Synthetic oligonucleotide
gccgcaaaaggugcaggug

SEQ ID NO: 193702 - RNA, 19 nt, Artificial Sequence
  Description of Artificial Sequence: Synthetic oligonucleotide
cugcccuauuuuauacucu

SEQ ID NO: 193703 - RNA, 19 nt, Artificial Sequence
  Description of Artificial Sequence: Synthetic oligonucleotide
guguuuaggguaggaaaau

SEQ ID NO: 193704 - RNA, 19 nt, Artificial Sequence
  Description of Artificial Sequence: Synthetic oligonucleotide
acgccaccaugacuggaua

SEQ ID NO: 193705 - RNA, 19 nt, Artificial Sequence
  Description of Artificial Sequence: Synthetic oligonucleotide
aagcuccgagccagaugug

SEQ ID NO: 193706 - RNA, 19 nt, Artificial Sequence
  Description of Artificial Sequence: Synthetic oligonucleotide
gcguggcaaccguuucugg

SEQ ID NO: 193707 - RNA, 19 nt, Artificial Sequence
  Description of Artificial Sequence: Synthetic oligonucleotide
gcuuguagccgagaugucu

SEQ ID NO: 193708 - RNA, 19 nt, Artificial Sequence
  Description of Artificial Sequence: Synthetic oligonucleotide
auccuuaaauuggguccaa

SEQ ID NO: 193709 - RNA, 19 nt, Artificial Sequence
  Description of Artificial Sequence: Synthetic oligonucleotide
gcauacuggaugggcucag

SEQ ID NO: 193710 - RNA, 19 nt, Artificial Sequence
  Description of Artificial Sequence: Synthetic oligonucleotide
ggacuagacgauuucucuu

SEQ ID NO: 193711 - RNA, 19 nt, Artificial Sequence
  Description of Artificial Sequence: Synthetic oligonucleotide
ggcauagacccaggcagga

SEQ ID NO: 193712 - RNA, 19 nt, Artificial Sequence
  Description of Artificial Sequence: Synthetic oligonucleotide
ccgggaauucagccuuggg

SEQ ID NO: 193713 - RNA, 19 nt, Artificial Sequence
  Description of Artificial Sequence: Synthetic oligonucleotide
ccaagacgugugcuaauga

SEQ ID NO: 193714 - RNA, 19 nt, Artificial Sequence
  Description of Artificial Sequence: Synthetic oligonucleotide
aggccgcuuggaucuuggu

SEQ ID NO: 193715 - RNA, 19 nt, Artificial Sequence
  Description of Artificial Sequence: Synthetic oligonucleotide
gggccgcaaaaggugcagg

SEQ ID NO: 193716 - RNA, 19 nt, Artificial Sequence
  Description of Artificial Sequence: Synthetic oligonucleotide
agccagaugugaagucaau

SEQ ID NO: 193717 - RNA, 19 nt, Artificial Sequence
  Description of Artificial Sequence: Synthetic oligonucleotide
gacaugacccucgcuugau

SEQ ID NO: 193718 - RNA, 19 nt, Artificial Sequence
  Description of Artificial Sequence: Synthetic oligonucleotide
cccugugcggucgagagaa

SEQ ID NO: 193719 - RNA, 19 nt, Artificial Sequence
  Description of Artificial Sequence: Synthetic oligonucleotide
ccucaguuaaaauucccuu

SEQ ID NO: 193720 - RNA, 19 nt, Artificial Sequence
  Description of Artificial Sequence: Synthetic oligonucleotide
ggcuacugacagagauucc

SEQ ID NO: 193721 - RNA, 19 nt, Artificial Sequence
  Description of Artificial Sequence: Synthetic oligonucleotide
ccuaaggcccugugcgguc

SEQ ID NO: 193722 - RNA, 19 nt, Artificial Sequence
  Description of Artificial Sequence: Synthetic oligonucleotide
guacuggacuagacgauuu

SEQ ID NO: 193723 - RNA, 19 nt, Artificial Sequence
  Description of Artificial Sequence: Synthetic oligonucleotide
cugauacuccggcaguauu

SEQ ID NO: 193724 - RNA, 19 nt, Artificial Sequence
  Description of Artificial Sequence: Synthetic oligonucleotide
ggguccaaagugugugugu

SEQ ID NO: 193725 - RNA, 19 nt, Artificial Sequence
  Description of Artificial Sequence: Synthetic oligonucleotide
ccgagccagaugugaaguc

SEQ ID NO: 193726 - RNA, 19 nt, Artificial Sequence
  Description of Artificial Sequence: Synthetic oligonucleotide
cuguaccaagacgugugcu

SEQ ID NO: 193727 - RNA, 19 nt, Artificial Sequence
  Description of Artificial Sequence: Synthetic oligonucleotide
cuacgcacucgcagauucu

SEQ ID NO: 193728 - RNA, 19 nt, Artificial Sequence
  Description of Artificial Sequence: Synthetic oligonucleotide
gcccacgugggccaugucu

SEQ ID NO: 193729 - RNA, 19 nt, Artificial Sequence
  Description of Artificial Sequence: Synthetic oligonucleotide
gugggccgcaaaaggugca

SEQ ID NO: 193730 - RNA, 19 nt, Artificial Sequence
  Description of Artificial Sequence: Synthetic oligonucleotide
ccucgcuugaugggccucc

SEQ ID NO: 193731 - RNA, 19 nt, Artificial Sequence
  Description of Artificial Sequence: Synthetic oligonucleotide
guagcccuuucggucauau

SEQ ID NO: 193732 - RNA, 19 nt, Artificial Sequence
  Description of Artificial Sequence: Synthetic oligonucleotide
gugcauggcguaagaugaa

SEQ ID NO: 193733 - RNA, 19 nt, Artificial Sequence
  Description of Artificial Sequence: Synthetic oligonucleotide
gcccuauuuuauacucuuc

SEQ ID NO: 193734 - RNA, 19 nt, Artificial Sequence
  Description of Artificial Sequence: Synthetic oligonucleotide
cugcguggcaaccguuucu

SEQ ID NO: 193735 - RNA, 19 nt, Artificial Sequence
  Description of Artificial Sequence: Synthetic oligonucleotide
aguugccgccucagguuaa

SEQ ID NO: 193736 - RNA, 19 nt, Artificial Sequence
  Description of Artificial Sequence: Synthetic oligonucleotide
agauuccgguuagguuggu

SEQ ID NO: 193737 - RNA, 19 nt, Artificial Sequence
  Description of Artificial Sequence: Synthetic oligonucleotide
ggucagagugggccgcaaa

SEQ ID NO: 193738 - RNA, 19 nt, Artificial Sequence
  Description of Artificial Sequence: Synthetic oligonucleotide
ccgucuugguuagugucuc

SEQ ID NO: 193739 - RNA, 19 nt, Artificial Sequence
  Description of Artificial Sequence: Synthetic oligonucleotide
gccugcuauuaggcaagcc

SEQ ID NO: 193740 - RNA, 19 nt, Artificial Sequence
  Description of Artificial Sequence: Synthetic oligonucleotide
guccaccggugccuucauc

SEQ ID NO: 193741 - RNA, 19 nt, Artificial Sequence
  Description of Artificial Sequence: Synthetic oligonucleotide
gggcaaaccuaaggcccug

SEQ ID NO: 193742 - RNA, 19 nt, Artificial Sequence
  Description of Artificial Sequence: Synthetic oligonucleotide
cccugcgaaugugaugcug

SEQ ID NO: 193743 - RNA, 19 nt, Artificial Sequence
  Description of Artificial Sequence: Synthetic oligonucleotide
ggcaguauuuccacaccau

SEQ ID NO: 193744 - RNA, 19 nt, Artificial Sequence
  Description of Artificial Sequence: Synthetic oligonucleotide
ccgagaugucugaccagca

SEQ ID NO: 193745 - RNA, 19 nt, Artificial Sequence
  Description of Artificial Sequence: Synthetic oligonucleotide
ccgccucagguuaagcaaa

SEQ ID NO: 193746 - RNA, 19 nt, Artificial Sequence
  Description of Artificial Sequence: Synthetic oligonucleotide
ggcgucggacuuccaggga

SEQ ID NO: 193747 - RNA, 19 nt, Artificial Sequence
  Description of Artificial Sequence: Synthetic oligonucleotide
augagccgacggauaguuu

SEQ ID NO: 193748 - RNA, 19 nt, Artificial Sequence
  Description of Artificial Sequence: Synthetic oligonucleotide
ugcccacgugggccauguc

SEQ ID NO: 193749 - RNA, 19 nt, Artificial Sequence
  Description of Artificial Sequence: Synthetic oligonucleotide
gcuccgagccagaugugaa

SEQ ID NO: 193750 - RNA, 19 nt, Artificial Sequence
  Description of Artificial Sequence: Synthetic oligonucleotide
agcgagguuuguagcccuu

SEQ ID NO: 193751 - RNA, 19 nt, Artificial Sequence
  Description of Artificial Sequence: Synthetic oligonucleotide
caggcuguuuggcaucauu

SEQ ID NO: 193752 - RNA, 19 nt, Artificial Sequence
  Description of Artificial Sequence: Synthetic oligonucleotide
ugccgggagcgagguuugu

SEQ ID NO: 193753 - RNA, 19 nt, Artificial Sequence
  Description of Artificial Sequence: Synthetic oligonucleotide
gcucuacgcacucgcagau

SEQ ID NO: 193754 - RNA, 19 nt, Artificial Sequence
  Description of Artificial Sequence: Synthetic oligonucleotide
gccgucuugguuagugucu

SEQ ID NO: 193755 - RNA, 19 nt, Artificial Sequence
  Description of Artificial Sequence: Synthetic oligonucleotide
gcucgagucuuugguaacu

SEQ ID NO: 193756 - RNA, 19 nt, Artificial Sequence
  Description of Artificial Sequence: Synthetic oligonucleotide
gggccguccugcccacgug

SEQ ID NO: 193757 - RNA, 19 nt, Artificial Sequence
  Description of Artificial Sequence: Synthetic oligonucleotide
cggauaguuugggcggccc

SEQ ID NO: 193758 - RNA, 19 nt, Artificial Sequence
  Description of Artificial Sequence: Synthetic oligonucleotide
cuggcacagcauacuggau

SEQ ID NO: 193759 - RNA, 19 nt, Artificial Sequence
  Description of Artificial Sequence: Synthetic oligonucleotide
guggcucccaagguugauu

SEQ ID NO: 193760 - RNA, 19 nt, Artificial Sequence
  Description of Artificial Sequence: Synthetic oligonucleotide
gaacugcguggcaaccguu

SEQ ID NO: 193761 - RNA, 19 nt, Artificial Sequence
  Description of Artificial Sequence: Synthetic oligonucleotide
ggcaggcuccuuagacuuc

SEQ ID NO: 193762 - RNA, 19 nt, Artificial Sequence
  Description of Artificial Sequence: Synthetic oligonucleotide
ccgguucuaccacugggcu

SEQ ID NO: 193763 - RNA, 19 nt, Artificial Sequence
  Description of Artificial Sequence: Synthetic oligonucleotide
cccaagguugauugcuggu

SEQ ID NO: 193764 - RNA, 19 nt, Artificial Sequence
  Description of Artificial Sequence: Synthetic oligonucleotide
ccgccaauggaagccccuc

SEQ ID NO: 193765 - RNA, 19 nt, Artificial Sequence
  Description of Artificial Sequence: Synthetic oligonucleotide
ggaugagccgacggauagu

SEQ ID NO: 193766 - RNA, 19 nt, Artificial Sequence
  Description of Artificial Sequence: Synthetic oligonucleotide
gggccgucuugguuagugu

SEQ ID NO: 193767 - RNA, 19 nt, Artificial Sequence
  Description of Artificial Sequence: Synthetic oligonucleotide
gcccugugcggucgagaga

SEQ ID NO: 193768 - RNA, 19 nt, Artificial Sequence
  Description of Artificial Sequence: Synthetic oligonucleotide
gggaguccucuguggcaaa

SEQ ID NO: 193769 - RNA, 19 nt, Artificial Sequence
  Description of Artificial Sequence: Synthetic oligonucleotide
gcugaucgcuucacccgaa

SEQ ID NO: 193770 - RNA, 19 nt, Artificial Sequence
  Description of Artificial Sequence: Synthetic oligonucleotide
ggcaaaccuaaggcccugu

SEQ ID NO: 193771 - RNA, 19 nt, Artificial Sequence
  Description of Artificial Sequence: Synthetic oligonucleotide
gcaaccguuucuggccgcu

SEQ ID NO: 193772 - RNA, 19 nt, Artificial Sequence
  Description of Artificial Sequence: Synthetic oligonucleotide
gggcuucacuuuaggauuu

SEQ ID NO: 193773 - RNA, 19 nt, Artificial Sequence
  Description of Artificial Sequence: Synthetic oligonucleotide
cucuggcgucggacuucca

SEQ ID NO: 193774 - RNA, 19 nt, Artificial Sequence
  Description of Artificial Sequence: Synthetic oligonucleotide
gcuucacccgaaggaauuu

SEQ ID NO: 193775 - RNA, 19 nt, Artificial Sequence
  Description of Artificial Sequence: Synthetic oligonucleotide
ccgggguaguugccgccuc

SEQ ID NO: 193776 - RNA, 19 nt, Artificial Sequence
  Description of Artificial Sequence: Synthetic oligonucleotide
ggggugcauggcguaagau

SEQ ID NO: 193777 - RNA, 19 nt, Artificial Sequence
  Description of Artificial Sequence: Synthetic oligonucleotide
ccgguuagguugguguagu

SEQ ID NO: 193778 - RNA, 19 nt, Artificial Sequence
  Description of Artificial Sequence: Synthetic oligonucleotide
cucuacgcacucgcagauu

SEQ ID NO: 193779 - RNA, 19 nt, Artificial Sequence
  Description of Artificial Sequence: Synthetic oligonucleotide
cgguucuaccacugggcua

SEQ ID NO: 193780 - RNA, 19 nt, Artificial Sequence
  Description of Artificial Sequence: Synthetic oligonucleotide
gccgggagcgagguuugua

SEQ ID NO: 193781 - RNA, 19 nt, Artificial Sequence
  Description of Artificial Sequence: Synthetic oligonucleotide
cgcuucacccgaaggaauu

SEQ ID NO: 193782 - RNA, 19 nt, Artificial Sequence
  Description of Artificial Sequence: Synthetic oligonucleotide
cccucgcuugaugggccuc

SEQ ID NO: 193783 - RNA, 19 nt, Artificial Sequence
  Description of Artificial Sequence: Synthetic oligonucleotide
cgucggacuuccagggagu

SEQ ID NO: 193784 - RNA, 19 nt, Artificial Sequence
  Description of Artificial Sequence: Synthetic oligonucleotide
ccacgccaccaugacugga

SEQ ID NO: 193785 - RNA, 19 nt, Artificial Sequence
  Description of Artificial Sequence: Synthetic oligonucleotide
gccgccaauggaagccccu

SEQ ID NO: 193786 - RNA, 19 nt, Artificial Sequence
  Description of Artificial Sequence: Synthetic oligonucleotide
ccugugcggucgagagaaa

SEQ ID NO: 193787 - RNA, 19 nt, Artificial Sequence
  Description of Artificial Sequence: Synthetic oligonucleotide
caaccguuucuggccgcuu

SEQ ID NO: 193788 - RNA, 19 nt, Artificial Sequence
  Description of Artificial Sequence: Synthetic oligonucleotide
gagggccgucuugguuagu

SEQ ID NO: 193789 - RNA, 19 nt, Artificial Sequence
  Description of Artificial Sequence: Synthetic oligonucleotide
cccugaccccacgcuccca

SEQ ID NO: 193790 - RNA, 19 nt, Artificial Sequence
  Description of Artificial Sequence: Synthetic oligonucleotide
aaaugugugaaccacaagc

SEQ ID NO: 193791 - RNA, 19 nt, Artificial Sequence
  Description of Artificial Sequence: Synthetic oligonucleotide
aauaagaacauccucgaac

SEQ ID NO: 193792 - RNA, 19 nt, Artificial Sequence
  Description of Artificial Sequence: Synthetic oligonucleotide
aauaccaaacuacaguggc

SEQ ID NO: 193793 - RNA, 19 nt, Artificial Sequence
  Description of Artificial Sequence: Synthetic oligonucleotide
aauaccaagacuauguuac

SEQ ID NO: 193794 - RNA, 19 nt, Artificial Sequence
  Description of Artificial Sequence: Synthetic oligonucleotide
uuuacuuugacaauguaca

SEQ ID NO: 193795 - RNA, 19 nt, Artificial Sequence
  Description of Artificial Sequence: Synthetic oligonucleotide
uuuaguuuaaccaagcagu

SEQ ID NO: 193796 - RNA, 19 nt, Artificial Sequence
  Description of Artificial Sequence: Synthetic oligonucleotide
uuaaagacauuucaugggg

SEQ ID NO: 193797 - RNA, 19 nt, Artificial Sequence
  Description of Artificial Sequence: Synthetic oligonucleotide
aaacguaaaugugugaacc

SEQ ID NO: 193798 - RNA, 19 nt, Artificial Sequence
  Description of Artificial Sequence: Synthetic oligonucleotide
aaccuauacauguuguacc

SEQ ID NO: 193799 - RNA, 19 nt, Artificial Sequence
  Description of Artificial Sequence: Synthetic oligonucleotide
aauggaaauugccccaagc

SEQ ID NO: 193800 - RNA, 19 nt, Artificial Sequence
  Description of Artificial Sequence: Synthetic oligonucleotide
cuauguuacagaauuagcc

SEQ ID NO: 193801 - RNA, 19 nt, Artificial Sequence
  Description of Artificial Sequence: Synthetic oligonucleotide
uuuguaaacguaaaugugu

SEQ ID NO: 193802 - RNA, 19 nt, Artificial Sequence
  Description of Artificial Sequence: Synthetic oligonucleotide
aagacuauguuacagaauu

SEQ ID NO: 193803 - RNA, 19 nt, Artificial Sequence
  Description of Artificial Sequence: Synthetic oligonucleotide
auuuaguuuaaccaagcag

SEQ ID NO: 193804 - RNA, 19 nt, Artificial Sequence
  Description of Artificial Sequence: Synthetic oligonucleotide
uuacauuccugcuuaaagg

SEQ ID NO: 193805 - RNA, 19 nt, Artificial Sequence
  Description of Artificial Sequence: Synthetic oligonucleotide
uaaucuccuaauaucaucc

SEQ ID NO: 193806 - RNA, 19 nt, Artificial Sequence
  Description of Artificial Sequence: Synthetic oligonucleotide
uguagauacccuccaaugg

SEQ ID NO: 193807 - RNA, 19 nt, Artificial Sequence
  Description of Artificial Sequence: Synthetic oligonucleotide
auggaaauugccccaagcc

SEQ ID NO: 193808 - RNA, 19 nt, Artificial Sequence
  Description of Artificial Sequence: Synthetic oligonucleotide
acaucuauguaaccuauac

SEQ ID NO: 193809 - RNA, 19 nt, Artificial Sequence
  Description of Artificial Sequence: Synthetic oligonucleotide
auuagccacauuuaagaac

SEQ ID NO: 193810 - RNA, 19 nt, Artificial Sequence
  Description of Artificial Sequence: Synthetic oligonucleotide
agaacaauuaaacugucga

SEQ ID NO: 193811 - RNA, 19 nt, Artificial Sequence
  Description of Artificial Sequence: Synthetic oligonucleotide
aucuauguaaccuauacau

SEQ ID NO: 193812 - RNA, 19 nt, Artificial Sequence
  Description of Artificial Sequence: Synthetic oligonucleotide
aacugcagauucuaugugg

SEQ ID NO: 193813 - RNA, 19 nt, Artificial Sequence
  Description of Artificial Sequence: Synthetic oligonucleotide
ugugcuacuguuuauaaaa

SEQ ID NO: 193814 - RNA, 19 nt, Artificial Sequence
  Description of Artificial Sequence: Synthetic oligonucleotide
uacagaauuagccacauuu

SEQ ID NO: 193815 - RNA, 19 nt, Artificial Sequence
  Description of Artificial Sequence: Synthetic oligonucleotide
ucagcauaggucaauaacu

SEQ ID NO: 193816 - RNA, 19 nt, Artificial Sequence
  Description of Artificial Sequence: Synthetic oligonucleotide
cuuaugauuucuuuccggg

SEQ ID NO: 193817 - RNA, 19 nt, Artificial Sequence
  Description of Artificial Sequence: Synthetic oligonucleotide
gaauuagccacauuuaaga

SEQ ID NO: 193818 - RNA, 19 nt, Artificial Sequence
  Description of Artificial Sequence: Synthetic oligonucleotide
cacacauugguccaaaugc

SEQ ID NO: 193819 - RNA, 19 nt, Artificial Sequence
  Description of Artificial Sequence: Synthetic oligonucleotide
uggagaacaauuaaacugu

SEQ ID NO: 193820 - RNA, 19 nt, Artificial Sequence
  Description of Artificial Sequence: Synthetic oligonucleotide
aaccauuacuucuaggcug

SEQ ID NO: 193821 - RNA, 19 nt, Artificial Sequence
  Description of Artificial Sequence: Synthetic oligonucleotide
ucaugagcucuaauaaucg

SEQ ID NO: 193822 - RNA, 19 nt, Artificial Sequence
  Description of Artificial Sequence: Synthetic oligonucleotide
ugaguuguauuccaggaca

SEQ ID NO: 193823 - RNA, 19 nt, Artificial Sequence
  Description of Artificial Sequence: Synthetic oligonucleotide
auuuuguauaaacaccauc

SEQ ID NO: 193824 - RNA, 19 nt, Artificial Sequence
  Description of Artificial Sequence: Synthetic oligonucleotide
aucgauaacaaauuauugu

SEQ ID NO: 193825 - RNA, 19 nt, Artificial Sequence
  Description of Artificial Sequence: Synthetic oligonucleotide
aaccaagcaguucuguaac

SEQ ID NO: 193826 - RNA, 19 nt, Artificial Sequence
  Description of Artificial Sequence: Synthetic oligonucleotide
aacuaaaauuucucauaac

SEQ ID NO: 193827 - RNA, 19 nt, Artificial Sequence
  Description of Artificial Sequence: Synthetic oligonucleotide
aagaacuauagaccugagg

SEQ ID NO: 193828 - RNA, 19 nt, Artificial Sequence
  Description of Artificial Sequence: Synthetic oligonucleotide
aaccuaauucuacugaaga

SEQ ID NO: 193829 - RNA, 19 nt, Artificial Sequence
  Description of Artificial Sequence: Synthetic oligonucleotide
ugggauguaaaucucaaaa

SEQ ID NO: 193830 - RNA, 19 nt, Artificial Sequence
  Description of Artificial Sequence: Synthetic oligonucleotide
cagcaaauuacccuggugg

SEQ ID NO: 193831 - RNA, 19 nt, Artificial Sequence
  Description of Artificial Sequence: Synthetic oligonucleotide
uguacagcaucuuuccggg

SEQ ID NO: 193832 - RNA, 19 nt, Artificial Sequence
  Description of Artificial Sequence: Synthetic oligonucleotide
ucuggcaaacaaaacaaca

SEQ ID NO: 193833 - RNA, 19 nt, Artificial Sequence
  Description of Artificial Sequence: Synthetic oligonucleotide
uuguaaacguaaaugugug

SEQ ID NO: 193834 - RNA, 19 nt, Artificial Sequence
  Description of Artificial Sequence: Synthetic oligonucleotide
uucaugagcucuaauaauc

SEQ ID NO: 193835 - RNA, 19 nt, Artificial Sequence
  Description of Artificial Sequence: Synthetic oligonucleotide
uuauuaaugaagggaaccc

SEQ ID NO: 193836 - RNA, 19 nt, Artificial Sequence
  Description of Artificial Sequence: Synthetic oligonucleotide
aaaaccuaauucuacugaa

SEQ ID NO: 193837 - RNA, 19 nt, Artificial Sequence
  Description of Artificial Sequence: Synthetic oligonucleotide
augacuaaaauguucuugu

SEQ ID NO: 193838 - RNA, 19 nt, Artificial Sequence
  Description of Artificial Sequence: Synthetic oligonucleotide
uuugacaauguacaaacuu

SEQ ID NO: 193839 - RNA, 19 nt, Artificial Sequence
  Description of Artificial Sequence: Synthetic oligonucleotide
aacuauagaccugagguca

SEQ ID NO: 193840 - RNA, 19 nt, Artificial Sequence
  Description of Artificial Sequence: Synthetic oligonucleotide
uuuagaagugcagcaaggg

SEQ ID NO: 193841 - RNA, 19 nt, Artificial Sequence
  Description of Artificial Sequence: Synthetic oligonucleotide
ucaacaugcagucuuugac

SEQ ID NO: 193842 - RNA, 19 nt, Artificial Sequence
  Description of Artificial Sequence: Synthetic oligonucleotide
aacaauuaaacugucgaau

SEQ ID NO: 193843 - RNA, 19 nt, Artificial Sequence
  Description of Artificial Sequence: Synthetic oligonucleotide
aaucuaucuaaucuccuaa

SEQ ID NO: 193844 - RNA, 19 nt, Artificial Sequence
  Description of Artificial Sequence: Synthetic oligonucleotide
ugauagaaagccagcagca

SEQ ID NO: 193845 - RNA, 19 nt, Artificial Sequence
  Description of Artificial Sequence: Synthetic oligonucleotide
uacgucaaguuuuacagac

SEQ ID NO: 193846 - RNA, 19 nt, Artificial Sequence
  Description of Artificial Sequence: Synthetic oligonucleotide
cauaaaauugggcaaccag

SEQ ID NO: 193847 - RNA, 19 nt, Artificial Sequence
  Description of Artificial Sequence: Synthetic oligonucleotide
aauugggcaaccaguaagg

SEQ ID NO: 193848 - RNA, 19 nt, Artificial Sequence
  Description of Artificial Sequence: Synthetic oligonucleotide
ucuauguaaccuauacaug

SEQ ID NO: 193849 - RNA, 19 nt, Artificial Sequence
  Description of Artificial Sequence: Synthetic oligonucleotide
auaaaacacacucuauacu

SEQ ID NO: 193850 - RNA, 19 nt, Artificial Sequence
  Description of Artificial Sequence: Synthetic oligonucleotide
ucgauaacaaauuauuguu

SEQ ID NO: 193851 - RNA, 19 nt, Artificial Sequence
  Description of Artificial Sequence: Synthetic oligonucleotide
auagccucaacuguggcac

SEQ ID NO: 193852 - RNA, 19 nt, Artificial Sequence
  Description of Artificial Sequence: Synthetic oligonucleotide
acauucuauagccugcauc

SEQ ID NO: 193853 - RNA, 19 nt, Artificial Sequence
  Description of Artificial Sequence: Synthetic oligonucleotide
uuuaagaacuauagaccug

SEQ ID NO: 193854 - RNA, 19 nt, Artificial Sequence
  Description of Artificial Sequence: Synthetic oligonucleotide
caacaaacgguaaagacca

SEQ ID NO: 193855 - RNA, 19 nt, Artificial Sequence
  Description of Artificial Sequence: Synthetic oligonucleotide
guuauuaaugaagggaacc

SEQ ID NO: 193856 - RNA, 19 nt, Artificial Sequence
  Description of Artificial Sequence: Synthetic oligonucleotide
acauuaacucuaaagauug

SEQ ID NO: 193857 - RNA, 19 nt, Artificial Sequence
  Description of Artificial Sequence: Synthetic oligonucleotide
aaaucucauuuguaaacgu

SEQ ID NO: 193858 - RNA, 19 nt, Artificial Sequence
  Description of Artificial Sequence: Synthetic oligonucleotide
aaucgauaacaaauuauug

SEQ ID NO: 193859 - RNA, 19 nt, Artificial Sequence
  Description of Artificial Sequence: Synthetic oligonucleotide
uguaacuaucaaaaguaaa

SEQ ID NO: 193860 - RNA, 19 nt, Artificial Sequence
  Description of Artificial Sequence: Synthetic oligonucleotide
aaauaccaaacuacagugg

SEQ ID NO: 193861 - RNA, 19 nt, Artificial Sequence
  Description of Artificial Sequence: Synthetic oligonucleotide
uaacuggagguguagauac

SEQ ID NO: 193862 - RNA, 19 nt, Artificial Sequence
  Description of Artificial Sequence: Synthetic oligonucleotide
cuguuuauaaaauacucga

SEQ ID NO: 193863 - RNA, 19 nt, Artificial Sequence
  Description of Artificial Sequence: Synthetic oligonucleotide
agugucagcacgcuuucac

SEQ ID NO: 193864 - RNA, 19 nt, Artificial Sequence
  Description of Artificial Sequence: Synthetic oligonucleotide
uaaaauugggcaaccagua

SEQ ID NO: 193865 - RNA, 19 nt, Artificial Sequence
  Description of Artificial Sequence: Synthetic oligonucleotide
gguaucguguauuagcagg

SEQ ID NO: 193866 - RNA, 19 nt, Artificial Sequence
  Description of Artificial Sequence: Synthetic oligonucleotide
ucacugggcacuaugguug

SEQ ID NO: 193867 - RNA, 19 nt, Artificial Sequence
  Description of Artificial Sequence: Synthetic oligonucleotide
uguuuauaaaauacucgaa

SEQ ID NO: 193868 - RNA, 19 nt, Artificial Sequence
  Description of Artificial Sequence: Synthetic oligonucleotide
aguaaagggaaauaccaaa

SEQ ID NO: 193869 - RNA, 19 nt, Artificial Sequence
  Description of Artificial Sequence: Synthetic oligonucleotide
accuguacaucauaggucu

SEQ ID NO: 193870 - RNA, 19 nt, Artificial Sequence
  Description of Artificial Sequence: Synthetic oligonucleotide
guaaagaccaugugaagac

SEQ ID NO: 193871 - RNA, 19 nt, Artificial Sequence
  Description of Artificial Sequence: Synthetic oligonucleotide
ugucgaauauucaucacau

SEQ ID NO: 193872 - RNA, 19 nt, Artificial Sequence
  Description of Artificial Sequence: Synthetic oligonucleotide
uaugugguggagagaaucc

SEQ ID NO: 193873 - RNA, 19 nt, Artificial Sequence
  Description of Artificial Sequence: Synthetic oligonucleotide
uucuaggcugcauuaauca

SEQ ID NO: 193874 - RNA, 19 nt, Artificial Sequence
  Description of Artificial Sequence: Synthetic oligonucleotide
uguaaccuauacauguugu

SEQ ID NO: 193875 - RNA, 19 nt, Artificial Sequence
  Description of Artificial Sequence: Synthetic oligonucleotide
cuguacagcaucuuuccgg

SEQ ID NO: 193876 - RNA, 19 nt, Artificial Sequence
  Description of Artificial Sequence: Synthetic oligonucleotide
acagcuaguaaccucagaa

SEQ ID NO: 193877 - RNA, 19 nt, Artificial Sequence
  Description of Artificial Sequence: Synthetic oligonucleotide
agcucuaauaaucgauaac

SEQ ID NO: 193878 - RNA, 19 nt, Artificial Sequence
  Description of Artificial Sequence: Synthetic oligonucleotide
uuuauugugugcuacuguu

SEQ ID NO: 193879 - RNA, 19 nt, Artificial Sequence
  Description of Artificial Sequence: Synthetic oligonucleotide
acuauguuacagaauuagc

SEQ ID NO: 193880 - RNA, 19 nt, Artificial Sequence
  Description of Artificial Sequence: Synthetic oligonucleotide
aaugugugaaccacaagca

SEQ ID NO: 193881 - RNA, 19 nt, Artificial Sequence
  Description of Artificial Sequence: Synthetic oligonucleotide
agcugaaccaucaaacugg

SEQ ID NO: 193882 - RNA, 19 nt, Artificial Sequence
  Description of Artificial Sequence: Synthetic oligonucleotide
aacguaaaugugugaacca

SEQ ID NO: 193883 - RNA, 19 nt, Artificial Sequence
  Description of Artificial Sequence: Synthetic oligonucleotide
uccucgaaccguauuauga

SEQ ID NO: 193884 - RNA, 19 nt, Artificial Sequence
  Description of Artificial Sequence: Synthetic oligonucleotide
aaauaccaagacuauguua

SEQ ID NO: 193885 - RNA, 19 nt, Artificial Sequence
  Description of Artificial Sequence: Synthetic oligonucleotide
agaaggaauaaugugcuug

SEQ ID NO: 193886 - RNA, 19 nt, Artificial Sequence
  Description of Artificial Sequence: Synthetic oligonucleotide
acuccacuaggcaacaucc

SEQ ID NO: 193887 - RNA, 19 nt, Artificial Sequence
  Description of Artificial Sequence: Synthetic oligonucleotide
ucacacauugguccaaaug

SEQ ID NO: 193888 - RNA, 19 nt, Artificial Sequence
  Description of Artificial Sequence: Synthetic oligonucleotide
uuaaugaagggaacccugu

SEQ ID NO: 193889 - RNA, 19 nt, Artificial Sequence
  Description of Artificial Sequence: Synthetic oligonucleotide
uaauuuuacauuccugcuu

SEQ ID NO: 193890 - RNA, 19 nt, Artificial Sequence
  Description of Artificial Sequence: Synthetic oligonucleotide
cuuuaaaucuaucuaaucu

SEQ ID NO: 193891 - RNA, 19 nt, Artificial Sequence
  Description of Artificial Sequence: Synthetic oligonucleotide
uggauuuguguucaaguaa

SEQ ID NO: 193892 - RNA, 19 nt, Artificial Sequence
  Description of Artificial Sequence: Synthetic oligonucleotide
aaaauaccaagacuauguu

SEQ ID NO: 193893 - RNA, 19 nt, Artificial Sequence
  Description of Artificial Sequence: Synthetic oligonucleotide
uaagaacauccucgaaccg

SEQ ID NO: 193894 - RNA, 19 nt, Artificial Sequence
  Description of Artificial Sequence: Synthetic oligonucleotide
aaugugcuuggguauagaa

SEQ ID NO: 193895 - RNA, 19 nt, Artificial Sequence
  Description of Artificial Sequence: Synthetic oligonucleotide
cuccaauggaaauugcccc

SEQ ID NO: 193896 - RNA, 19 nt, Artificial Sequence
  Description of Artificial Sequence: Synthetic oligonucleotide
aaagacauuucauggggua

SEQ ID NO: 193897 - RNA, 19 nt, Artificial Sequence
  Description of Artificial Sequence: Synthetic oligonucleotide
acaugcauaauauuuccaa

SEQ ID NO: 193898 - RNA, 19 nt, Artificial Sequence
  Description of Artificial Sequence: Synthetic oligonucleotide
uuaugauuucuuuccgggc

SEQ ID NO: 193899 - RNA, 19 nt, Artificial Sequence
  Description of Artificial Sequence: Synthetic oligonucleotide
agacccauaaauaauaaaa

SEQ ID NO: 193900 - RNA, 19 nt, Artificial Sequence
  Description of Artificial Sequence: Synthetic oligonucleotide
ucuccaacaaacgguaaag

SEQ ID NO: 193901 - RNA, 19 nt, Artificial Sequence
  Description of Artificial Sequence: Synthetic oligonucleotide
uauugugugcuacuguuua

SEQ ID NO: 193902 - RNA, 19 nt, Artificial Sequence
  Description of Artificial Sequence: Synthetic oligonucleotide
uuagacaggagaccauaca

SEQ ID NO: 193903 - RNA, 19 nt, Artificial Sequence
  Description of Artificial Sequence: Synthetic oligonucleotide
uguauuagcaggugauccu

SEQ ID NO: 193904 - RNA, 19 nt, Artificial Sequence
  Description of Artificial Sequence: Synthetic oligonucleotide
ucauaggucuauauauuaa

SEQ ID NO: 193905 - RNA, 19 nt, Artificial Sequence
  Description of Artificial Sequence: Synthetic oligonucleotide
ccaacaaacgguaaagacc

SEQ ID NO: 193906 - RNA, 19 nt, Artificial Sequence
  Description of Artificial Sequence: Synthetic oligonucleotide
uuauuagacagcacauguc

SEQ ID NO: 193907 - RNA, 19 nt, Artificial Sequence
  Description of Artificial Sequence: Synthetic oligonucleotide
acaauuaaacugucgaaua

SEQ ID NO: 193908 - RNA, 19 nt, Artificial Sequence
  Description of Artificial Sequence: Synthetic oligonucleotide
uaaacguaaaugugugaac

SEQ ID NO: 193909 - RNA, 19 nt, Artificial Sequence
  Description of Artificial Sequence: Synthetic oligonucleotide
uaaccuauacauguuguac

SEQ ID NO: 193910 - RNA, 19 nt, Artificial Sequence
  Description of Artificial Sequence: Synthetic oligonucleotide
augguugccagucccgugg

SEQ ID NO: 193911 - RNA, 19 nt, Artificial Sequence
  Description of Artificial Sequence: Synthetic oligonucleotide
uucuuaaaucuuugggaug

SEQ ID NO: 193912 - RNA, 19 nt, Artificial Sequence
  Description of Artificial Sequence: Synthetic oligonucleotide
aagacauuucaugggguag

SEQ ID NO: 193913 - RNA, 19 nt, Artificial Sequence
  Description of Artificial Sequence: Synthetic oligonucleotide
aguaaccucagaaauauau

SEQ ID NO: 193914 - RNA, 19 nt, Artificial Sequence
  Description of Artificial Sequence: Synthetic oligonucleotide
ucuaaagauugcauuuaaa

SEQ ID NO: 193915 - RNA, 19 nt, Artificial Sequence
  Description of Artificial Sequence: Synthetic oligonucleotide
gagaacaauuaaacugucg

SEQ ID NO: 193916 - RNA, 19 nt, Artificial Sequence
  Description of Artificial Sequence: Synthetic oligonucleotide
agaaauuguugguuuagaa

SEQ ID NO: 193917 - RNA, 19 nt, Artificial Sequence
  Description of Artificial Sequence: Synthetic oligonucleotide
ucuuauuagacagcacaug

SEQ ID NO: 193918 - RNA, 19 nt, Artificial Sequence
  Description of Artificial Sequence: Synthetic oligonucleotide
ugagcucuaauaaucgaua

SEQ ID NO: 193919 - RNA, 19 nt, Artificial Sequence
  Description of Artificial Sequence: Synthetic oligonucleotide
uaaccaagcaguucuguaa

SEQ ID NO: 193920 - RNA, 19 nt, Artificial Sequence
  Description of Artificial Sequence: Synthetic oligonucleotide
cauuucaugggguagggga

SEQ ID NO: 193921 - RNA, 19 nt, Artificial Sequence
  Description of Artificial Sequence: Synthetic oligonucleotide
auuacuucuaggcugcauu

SEQ ID NO: 193922 - RNA, 19 nt, Artificial Sequence
  Description of Artificial Sequence: Synthetic oligonucleotide
ugacuuuuaugcuuccacu

SEQ ID NO: 193923 - RNA, 19 nt, Artificial Sequence
  Description of Artificial Sequence: Synthetic oligonucleotide
auguuguaccuguacauca

SEQ ID NO: 193924 - RNA, 19 nt, Artificial Sequence
  Description of Artificial Sequence: Synthetic oligonucleotide
aagaacauccucgaaccgu

SEQ ID NO: 193925 - RNA, 19 nt, Artificial Sequence
  Description of Artificial Sequence: Synthetic oligonucleotide
aagguaucguguauuagca

SEQ ID NO: 193926 - RNA, 19 nt, Artificial Sequence
  Description of Artificial Sequence: Synthetic oligonucleotide
agucccgugguucucagug

SEQ ID NO: 193927 - RNA, 19 nt, Artificial Sequence
  Description of Artificial Sequence: Synthetic oligonucleotide
uauuaaugaagggaacccu

SEQ ID NO: 193928 - RNA, 19 nt, Artificial Sequence
  Description of Artificial Sequence: Synthetic oligonucleotide
accauuacuucuaggcugc

SEQ ID NO: 193929 - RNA, 19 nt, Artificial Sequence
  Description of Artificial Sequence: Synthetic oligonucleotide
aagacccauaaauaauaaa

SEQ ID NO: 193930 - RNA, 19 nt, Artificial Sequence
  Description of Artificial Sequence: Synthetic oligonucleotide
cuauguaaccuauacaugu

SEQ ID NO: 193931 - RNA, 19 nt, Artificial Sequence
  Description of Artificial Sequence: Synthetic oligonucleotide
acguaaaugugugaaccac

SEQ ID NO: 193932 - RNA, 19 nt, Artificial Sequence
  Description of Artificial Sequence: Synthetic oligonucleotide
caugugaagacauccauaa

SEQ ID NO: 193933 - RNA, 19 nt, Artificial Sequence
  Description of Artificial Sequence: Synthetic oligonucleotide
gguuccauuuaguuuaacc

SEQ ID NO: 193934 - RNA, 19 nt, Artificial Sequence
  Description of Artificial Sequence: Synthetic oligonucleotide
uggcucuuuaaaucuaucu

SEQ ID NO: 193935 - RNA, 19 nt, Artificial Sequence
  Description of Artificial Sequence: Synthetic oligonucleotide
acaaaauacgucaaguuuu

SEQ ID NO: 193936 - RNA, 19 nt, Artificial Sequence
  Description of Artificial Sequence: Synthetic oligonucleotide
uguaaacguaaauguguga

SEQ ID NO: 193937 - RNA, 19 nt, Artificial Sequence
  Description of Artificial Sequence: Synthetic oligonucleotide
cuaauucuacugaagaaaa

SEQ ID NO: 193938 - RNA, 19 nt, Artificial Sequence
  Description of Artificial Sequence: Synthetic oligonucleotide
cucuauacuaaaauaaccu

SEQ ID NO: 193939 - RNA, 19 nt, Artificial Sequence
  Description of Artificial Sequence: Synthetic oligonucleotide
uccacuaggcaacaucccu

SEQ ID NO: 193940 - RNA, 19 nt, Artificial Sequence
  Description of Artificial Sequence: Synthetic oligonucleotide
uaacucuaaagauugcauu

SEQ ID NO: 193941 - RNA, 19 nt, Artificial Sequence
  Description of Artificial Sequence: Synthetic oligonucleotide
agaugauuccgcugccugg

SEQ ID NO: 193942 - RNA, 19 nt, Artificial Sequence
  Description of Artificial Sequence: Synthetic oligonucleotide
gggauguaaaucucaaaag

SEQ ID NO: 193943 - RNA, 19 nt, Artificial Sequence
  Description of Artificial Sequence: Synthetic oligonucleotide
uauuagcaggugauccucc

SEQ ID NO: 193944 - RNA, 19 nt, Artificial Sequence
  Description of Artificial Sequence: Synthetic oligonucleotide
cuuuuaugcuuccacuaac

SEQ ID NO: 193945 - RNA, 19 nt, Artificial Sequence
  Description of Artificial Sequence: Synthetic oligonucleotide
cuccuaauaucauccagug

SEQ ID NO: 193946 - RNA, 19 nt, Artificial Sequence
  Description of Artificial Sequence: Synthetic oligonucleotide
auuaaugaagggaacccug

SEQ ID NO: 193947 - RNA, 19 nt, Artificial Sequence
  Description of Artificial Sequence: Synthetic oligonucleotide
gucaaaagcuuccauacaa

SEQ ID NO: 193948 - RNA, 19 nt, Artificial Sequence
  Description of Artificial Sequence: Synthetic oligonucleotide
gaacuauagaccugagguc

SEQ ID NO: 193949 - RNA, 19 nt, Artificial Sequence
  Description of Artificial Sequence: Synthetic oligonucleotide
gugaaaguccaccaugaac

SEQ ID NO: 193950 - RNA, 19 nt, Artificial Sequence
  Description of Artificial Sequence: Synthetic oligonucleotide
auugccccaagccccuugc

SEQ ID NO: 193951 - RNA, 19 nt, Artificial Sequence
  Description of Artificial Sequence: Synthetic oligonucleotide
uccaauggaaauugcccca

SEQ ID NO: 193952 - RNA, 19 nt, Artificial Sequence
  Description of Artificial Sequence: Synthetic oligonucleotide
uuuugccuacaauucaaaa

SEQ ID NO: 193953 - RNA, 19 nt, Artificial Sequence
  Description of Artificial Sequence: Synthetic oligonucleotide
gaacaauuaaacugucgaa

SEQ ID NO: 193954 - RNA, 19 nt, Artificial Sequence
  Description of Artificial Sequence: Synthetic oligonucleotide
guguauuagcaggugaucc

SEQ ID NO: 193955 - RNA, 19 nt, Artificial Sequence
  Description of Artificial Sequence: Synthetic oligonucleotide
cagcauaggucaauaacug

SEQ ID NO: 193956 - RNA, 19 nt, Artificial Sequence
  Description of Artificial Sequence: Synthetic oligonucleotide
aucauaggucuauauauua

SEQ ID NO: 193957 - RNA, 19 nt, Artificial Sequence
  Description of Artificial Sequence: Synthetic oligonucleotide
aggucaauaacuguguaaa

SEQ ID NO: 193958 - RNA, 19 nt, Artificial Sequence
  Description of Artificial Sequence: Synthetic oligonucleotide
auagacucuuucagaauac

SEQ ID NO: 193959 - RNA, 19 nt, Artificial Sequence
  Description of Artificial Sequence: Synthetic oligonucleotide
agcaaauuacccugguggu

SEQ ID NO: 193960 - RNA, 19 nt, Artificial Sequence
  Description of Artificial Sequence: Synthetic oligonucleotide
cauucuauagccugcaucu

SEQ ID NO: 193961 - RNA, 19 nt, Artificial Sequence
  Description of Artificial Sequence: Synthetic oligonucleotide
cguauuaugacuaaaaugu

SEQ ID NO: 193962 - RNA, 19 nt, Artificial Sequence
  Description of Artificial Sequence: Synthetic oligonucleotide
ucgaaccguauuaugacua

SEQ ID NO: 193963 - RNA, 19 nt, Artificial Sequence
  Description of Artificial Sequence: Synthetic oligonucleotide
guaaacguaaaugugugaa

SEQ ID NO: 193964 - RNA, 19 nt, Artificial Sequence
  Description of Artificial Sequence: Synthetic oligonucleotide
gggaauugaaaccauccug

SEQ ID NO: 193965 - RNA, 19 nt, Artificial Sequence
  Description of Artificial Sequence: Synthetic oligonucleotide
ucguguauuagcaggugau

SEQ ID NO: 193966 - RNA, 19 nt, Artificial Sequence
  Description of Artificial Sequence: Synthetic oligonucleotide
cacauugguccaaaugcag

SEQ ID NO: 193967 - RNA, 19 nt, Artificial Sequence
  Description of Artificial Sequence: Synthetic oligonucleotide
uuuaguacagcagcuuuau

SEQ ID NO: 193968 - RNA, 19 nt, Artificial Sequence
  Description of Artificial Sequence: Synthetic oligonucleotide
aaacuacaguggcaaucag

SEQ ID NO: 193969 - RNA, 19 nt, Artificial Sequence
  Description of Artificial Sequence: Synthetic oligonucleotide
uuuccggugaaaguccacc

SEQ ID NO: 193970 - RNA, 19 nt, Artificial Sequence
  Description of Artificial Sequence: Synthetic oligonucleotide
ggauuuguguucaaguaag

SEQ ID NO: 193971 - RNA, 19 nt, Artificial Sequence
  Description of Artificial Sequence: Synthetic oligonucleotide
aguacucacaauaaacuaa

SEQ ID NO: 193972 - RNA, 19 nt, Artificial Sequence
  Description of Artificial Sequence: Synthetic oligonucleotide
uugauccuauccaaacccu

SEQ ID NO: 193973 - RNA, 19 nt, Artificial Sequence
  Description of Artificial Sequence: Synthetic oligonucleotide
accguauuaugacuaaaau

SEQ ID NO: 193974 - RNA, 19 nt, Artificial Sequence
  Description of Artificial Sequence: Synthetic oligonucleotide
uuugcaaggucugccgucc

SEQ ID NO: 193975 - RNA, 19 nt, Artificial Sequence
  Description of Artificial Sequence: Synthetic oligonucleotide
uaagaacuauagaccugag

SEQ ID NO: 193976 - RNA, 19 nt, Artificial Sequence
  Description of Artificial Sequence: Synthetic oligonucleotide
cuuauuagacagcacaugu

SEQ ID NO: 193977 - RNA, 19 nt, Artificial Sequence
  Description of Artificial Sequence: Synthetic oligonucleotide
guuguauuccaggacauga

SEQ ID NO: 193978 - RNA, 19 nt, Artificial Sequence
  Description of Artificial Sequence: Synthetic oligonucleotide
uaccaaacuacaguggcaa

SEQ ID NO: 193979 - RNA, 19 nt, Artificial Sequence
  Description of Artificial Sequence: Synthetic oligonucleotide
uguguucaaguaagagucu

SEQ ID NO: 193980 - RNA, 19 nt, Artificial Sequence
  Description of Artificial Sequence: Synthetic oligonucleotide
gcucuaauaaucgauaaca

SEQ ID NO: 193981 - RNA, 19 nt, Artificial Sequence
  Description of Artificial Sequence: Synthetic oligonucleotide
auauucaguaaggugucug

SEQ ID NO: 193982 - RNA, 19 nt, Artificial Sequence
  Description of Artificial Sequence: Synthetic oligonucleotide
cauaggucuauauauuaaa

SEQ ID NO: 193983 - RNA, 19 nt, Artificial Sequence
  Description of Artificial Sequence: Synthetic oligonucleotide
cuuagacaggagaccauac

SEQ ID NO: 193984 - RNA, 19 nt, Artificial Sequence
  Description of Artificial Sequence: Synthetic oligonucleotide
guucucaguggcaugugcg

SEQ ID NO: 193985 - RNA, 19 nt, Artificial Sequence
  Description of Artificial Sequence: Synthetic oligonucleotide
ugugugcuacuguuuauaa

SEQ ID NO: 193986 - RNA, 19 nt, Artificial Sequence
  Description of Artificial Sequence: Synthetic oligonucleotide
cauuaacucuaaagauugc

SEQ ID NO: 193987 - RNA, 19 nt, Artificial Sequence
  Description of Artificial Sequence: Synthetic oligonucleotide
uagauacccuccaauggaa

SEQ ID NO: 193988 - RNA, 19 nt, Artificial Sequence
  Description of Artificial Sequence: Synthetic oligonucleotide
cuucuaggcugcauuaauc

SEQ ID NO: 193989 - RNA, 19 nt, Artificial Sequence
  Description of Artificial Sequence: Synthetic oligonucleotide
uauagaccugaggucauca

SEQ ID NO: 193990 - RNA, 19 nt, Artificial Sequence
  Description of Artificial Sequence: Synthetic oligonucleotide
accuaauucuacugaagaa

SEQ ID NO: 193991 - RNA, 19 nt, Artificial Sequence
  Description of Artificial Sequence: Synthetic oligonucleotide
aaccguauuaugacuaaaa

SEQ ID NO: 193992 - RNA, 19 nt, Artificial Sequence
  Description of Artificial Sequence: Synthetic oligonucleotide
ugucagcacgcuuucacuc

SEQ ID NO: 193993 - RNA, 19 nt, Artificial Sequence
  Description of Artificial Sequence: Synthetic oligonucleotide
uguuguaccuguacaucau

SEQ ID NO: 193994 - RNA, 19 nt, Artificial Sequence
  Description of Artificial Sequence: Synthetic oligonucleotide
cagcugaaccaucaaacug

SEQ ID NO: 193995 - RNA, 19 nt, Artificial Sequence
  Description of Artificial Sequence: Synthetic oligonucleotide
ccguauuaugacuaaaaug

SEQ ID NO: 193996 - RNA, 19 nt, Artificial Sequence
  Description of Artificial Sequence: Synthetic oligonucleotide
gacuuuuaugcuuccacua

SEQ ID NO: 193997 - RNA, 19 nt, Artificial Sequence
  Description of Artificial Sequence: Synthetic oligonucleotide
uccuaauaucauccagugu

SEQ ID NO: 193998 - RNA, 19 nt, Artificial Sequence
  Description of Artificial Sequence: Synthetic oligonucleotide
uguguaaaauuagcacaug

SEQ ID NO: 193999 - RNA, 19 nt, Artificial Sequence
  Description of Artificial Sequence: Synthetic oligonucleotide
ucuaggcugcauuaaucaa

SEQ ID NO: 194000 - RNA, 19 nt, Artificial Sequence
  Description of Artificial Sequence: Synthetic oligonucleotide
ggaaauaccaaacuacagu

SEQ ID NO: 194001 - RNA, 19 nt, Artificial Sequence
  Description of Artificial Sequence: Synthetic oligonucleotide
caugagggaaacaggccac

SEQ ID NO: 194002 - RNA, 19 nt, Artificial Sequence
  Description of Artificial Sequence: Synthetic oligonucleotide
guauuuccggugaaagucc

SEQ ID NO: 194003 - RNA, 19 nt, Artificial Sequence
  Description of Artificial Sequence: Synthetic oligonucleotide
acaaacgguaaagaccaug

SEQ ID NO: 194004 - RNA, 19 nt, Artificial Sequence
  Description of Artificial Sequence: Synthetic oligonucleotide
aauugccccaagccccuug

SEQ ID NO: 194005 - RNA, 19 nt, Artificial Sequence
  Description of Artificial Sequence: Synthetic oligonucleotide
cugucgaauauucaucaca

SEQ ID NO: 194006 - RNA, 19 nt, Artificial Sequence
  Description of Artificial Sequence: Synthetic oligonucleotide
acauccucgaaccguauua

SEQ ID NO: 194007 - RNA, 19 nt, Artificial Sequence
  Description of Artificial Sequence: Synthetic oligonucleotide
acgguaaagaccaugugaa

SEQ ID NO: 194008 - RNA, 19 nt, Artificial Sequence
  Description of Artificial Sequence: Synthetic oligonucleotide
auacgucaaguuuuacaga

SEQ ID NO: 194009 - RNA, 19 nt, Artificial Sequence
  Description of Artificial Sequence: Synthetic oligonucleotide
aucuaucuaaucuccuaau

SEQ ID NO: 194010 - RNA, 19 nt, Artificial Sequence
  Description of Artificial Sequence: Synthetic oligonucleotide
ugguccaaaugcagguggc

SEQ ID NO: 194011 - RNA, 19 nt, Artificial Sequence
  Description of Artificial Sequence: Synthetic oligonucleotide
aggaguccacauuaacucu

SEQ ID NO: 194012 - RNA, 19 nt, Artificial Sequence
  Description of Artificial Sequence: Synthetic oligonucleotide
gccucaauagccucaacug

SEQ ID NO: 194013 - RNA, 19 nt, Artificial Sequence
  Description of Artificial Sequence: Synthetic oligonucleotide
agguaucguguauuagcag

SEQ ID NO: 194014 - RNA, 19 nt, Artificial Sequence
  Description of Artificial Sequence: Synthetic oligonucleotide
ugauuccgcugccuggagc

SEQ ID NO: 194015 - RNA, 19 nt, Artificial Sequence
  Description of Artificial Sequence: Synthetic oligonucleotide
uccugcuuaaagguaaaau

SEQ ID NO: 194016 - RNA, 19 nt, Artificial Sequence
  Description of Artificial Sequence: Synthetic oligonucleotide
gcaaccaguaaggaugugg

SEQ ID NO: 194017 - RNA, 19 nt, Artificial Sequence
  Description of Artificial Sequence: Synthetic oligonucleotide
aaauuucucauaacaucua

SEQ ID NO: 194018 - RNA, 19 nt, Artificial Sequence
  Description of Artificial Sequence: Synthetic oligonucleotide
cucuaauaaucgauaacaa

SEQ ID NO: 194019 - RNA, 19 nt, Artificial Sequence
  Description of Artificial Sequence: Synthetic oligonucleotide
cuaggcugcauuaaucaaa

SEQ ID NO: 194020 - RNA, 19 nt, Artificial Sequence
  Description of Artificial Sequence: Synthetic oligonucleotide
agacauccauaaaauuggg

SEQ ID NO: 194021 - RNA, 19 nt, Artificial Sequence
  Description of Artificial Sequence: Synthetic oligonucleotide
ggcaacaucccugugggag

SEQ ID NO: 194022 - RNA, 19 nt, Artificial Sequence
  Description of Artificial Sequence: Synthetic oligonucleotide
cagagcaaauacucagaac

SEQ ID NO: 194023 - RNA, 19 nt, Artificial Sequence
  Description of Artificial Sequence: Synthetic oligonucleotide
auaggucuauauauuaaau

SEQ ID NO: 194024 - RNA, 19 nt, Artificial Sequence
  Description of Artificial Sequence: Synthetic oligonucleotide
uuagcacaugguuccauuu

SEQ ID NO: 194025 - RNA, 19 nt, Artificial Sequence
  Description of Artificial Sequence: Synthetic oligonucleotide
auuagcacaugguuccauu

SEQ ID NO: 194026 - RNA, 19 nt, Artificial Sequence
  Description of Artificial Sequence: Synthetic oligonucleotide
gagcucuaauaaucgauaa

SEQ ID NO: 194027 - RNA, 19 nt, Artificial Sequence
  Description of Artificial Sequence: Synthetic oligonucleotide
cacacucuauacuaaaaua

SEQ ID NO: 194028 - RNA, 19 nt, Artificial Sequence
  Description of Artificial Sequence: Synthetic oligonucleotide
uuccggugaaaguccacca

SEQ ID NO: 194029 - RNA, 19 nt, Artificial Sequence
  Description of Artificial Sequence: Synthetic oligonucleotide
ugauccuauccaaacccuu

SEQ ID NO: 194030 - RNA, 19 nt, Artificial Sequence
  Description of Artificial Sequence: Synthetic oligonucleotide
guaaaugugugaaccacaa

SEQ ID NO: 194031 - RNA, 19 nt, Artificial Sequence
  Description of Artificial Sequence: Synthetic oligonucleotide
ggagagaauccucguauug

SEQ ID NO: 194032 - RNA, 19 nt, Artificial Sequence
  Description of Artificial Sequence: Synthetic oligonucleotide
caucuauguaaccuauaca

SEQ ID NO: 194033 - RNA, 19 nt, Artificial Sequence
  Description of Artificial Sequence: Synthetic oligonucleotide
aggggcaagcugucaaaag

SEQ ID NO: 194034 - RNA, 19 nt, Artificial Sequence
  Description of Artificial Sequence: Synthetic oligonucleotide
aacauccucgaaccguauu

SEQ ID NO: 194035 - RNA, 19 nt, Artificial Sequence
  Description of Artificial Sequence: Synthetic oligonucleotide
caaacgguaaagaccaugu

SEQ ID NO: 194036 - RNA, 19 nt, Artificial Sequence
  Description of Artificial Sequence: Synthetic oligonucleotide
ugagugucagcacgcuuuc

SEQ ID NO: 194037 - RNA, 19 nt, Artificial Sequence
  Description of Artificial Sequence: Synthetic oligonucleotide
uaugguugccagucccgug

SEQ ID NO: 194038 - RNA, 19 nt, Artificial Sequence
  Description of Artificial Sequence: Synthetic oligonucleotide
cgaauaguccugcacaugc

SEQ ID NO: 194039 - RNA, 19 nt, Artificial Sequence
  Description of Artificial Sequence: Synthetic oligonucleotide
ugugcgguguucagggaau

SEQ ID NO: 194040 - RNA, 19 nt, Artificial Sequence
  Description of Artificial Sequence: Synthetic oligonucleotide
uacagcuaguaaccucaga

SEQ ID NO: 194041 - RNA, 19 nt, Artificial Sequence
  Description of Artificial Sequence: Synthetic oligonucleotide
gaacccuguaguuugacuu

SEQ ID NO: 194042 - RNA, 19 nt, Artificial Sequence
  Description of Artificial Sequence: Synthetic oligonucleotide
gaugauuccgcugccugga

SEQ ID NO: 194043 - RNA, 19 nt, Artificial Sequence
  Description of Artificial Sequence: Synthetic oligonucleotide
auacuuuaguacagcagcu

SEQ ID NO: 194044 - RNA, 19 nt, Artificial Sequence
  Description of Artificial Sequence: Synthetic oligonucleotide
auaccaagacuauguuaca

SEQ ID NO: 194045 - RNA, 19 nt, Artificial Sequence
  Description of Artificial Sequence: Synthetic oligonucleotide
agcauaacuggagguguag

SEQ ID NO: 194046 - RNA, 19 nt, Artificial Sequence
  Description of Artificial Sequence: Synthetic oligonucleotide
caacuuagacaggagacca

SEQ ID NO: 194047 - RNA, 19 nt, Artificial Sequence
  Description of Artificial Sequence: Synthetic oligonucleotide
gauuccgcugccuggagcu

SEQ ID NO: 194048 - RNA, 19 nt, Artificial Sequence
  Description of Artificial Sequence: Synthetic oligonucleotide
acugcagauucuauguggu

SEQ ID NO: 194049 - RNA, 19 nt, Artificial Sequence
  Description of Artificial Sequence: Synthetic oligonucleotide
uaucguguauuagcaggug

SEQ ID NO: 194050 - RNA, 19 nt, Artificial Sequence
  Description of Artificial Sequence: Synthetic oligonucleotide
agaccauacagggugcacu

SEQ ID NO: 194051 - RNA, 19 nt, Artificial Sequence
  Description of Artificial Sequence: Synthetic oligonucleotide
auaggucaauaacugugua

SEQ ID NO: 194052 - RNA, 19 nt, Artificial Sequence
  Description of Artificial Sequence: Synthetic oligonucleotide
cuguaacuaucaaaaguaa

SEQ ID NO: 194053 - RNA, 19 nt, Artificial Sequence
  Description of Artificial Sequence: Synthetic oligonucleotide
guauaaacaccaucugggu

SEQ ID NO: 194054 - RNA, 19 nt, Artificial Sequence
  Description of Artificial Sequence: Synthetic oligonucleotide
agauucuaugugguggaga

SEQ ID NO: 194055 - RNA, 19 nt, Artificial Sequence
  Description of Artificial Sequence: Synthetic oligonucleotide
gagagauugugacauuuau

SEQ ID NO: 194056 - RNA, 19 nt, Artificial Sequence
  Description of Artificial Sequence: Synthetic oligonucleotide
cuccacuaggcaacauccc

SEQ ID NO: 194057 - RNA, 19 nt, Artificial Sequence
  Description of Artificial Sequence: Synthetic oligonucleotide
guauuagcaggugauccuc

SEQ ID NO: 194058 - RNA, 19 nt, Artificial Sequence
  Description of Artificial Sequence: Synthetic oligonucleotide
aaauuacccuggugguuuu

SEQ ID NO: 194059 - RNA, 19 nt, Artificial Sequence
  Description of Artificial Sequence: Synthetic oligonucleotide
guaaccuauacauguugua

SEQ ID NO: 194060 - RNA, 19 nt, Artificial Sequence
  Description of Artificial Sequence: Synthetic oligonucleotide
auccucgaaccguauuaug

SEQ ID NO: 194061 - RNA, 19 nt, Artificial Sequence
  Description of Artificial Sequence: Synthetic oligonucleotide
auugugugcuacuguuuau

SEQ ID NO: 194062 - RNA, 19 nt, Artificial Sequence
  Description of Artificial Sequence: Synthetic oligonucleotide
uugugugcuacuguuuaua

SEQ ID NO: 194063 - RNA, 19 nt, Artificial Sequence
  Description of Artificial Sequence: Synthetic oligonucleotide
uccggugaaaguccaccau

SEQ ID NO: 194064 - RNA, 19 nt, Artificial Sequence
  Description of Artificial Sequence: Synthetic oligonucleotide
ucgaauaguccugcacaug

SEQ ID NO: 194065 - RNA, 19 nt, Artificial Sequence
  Description of Artificial Sequence: Synthetic oligonucleotide
cuuuaguacagcagcuuua

SEQ ID NO: 194066 - RNA, 19 nt, Artificial Sequence
  Description of Artificial Sequence: Synthetic oligonucleotide
augugcgguguucagggaa

SEQ ID NO: 194067 - RNA, 19 nt, Artificial Sequence
  Description of Artificial Sequence: Synthetic oligonucleotide
acauuucaugggguagggg

SEQ ID NO: 194068 - RNA, 19 nt, Artificial Sequence
  Description of Artificial Sequence: Synthetic oligonucleotide
ccuauccaaacccuuugcc

SEQ ID NO: 194069 - RNA, 19 nt, Artificial Sequence
  Description of Artificial Sequence: Synthetic oligonucleotide
gugaaccacaagcauaacu

SEQ ID NO: 194070 - RNA, 19 nt, Artificial Sequence
  Description of Artificial Sequence: Synthetic oligonucleotide
cuaguaaccucagaaauau

SEQ ID NO: 194071 - RNA, 19 nt, Artificial Sequence
  Description of Artificial Sequence: Synthetic oligonucleotide
aguuguauuccaggacaug

SEQ ID NO: 194072 - RNA, 19 nt, Artificial Sequence
  Description of Artificial Sequence: Synthetic oligonucleotide
aacacuccacuaggcaaca

SEQ ID NO: 194073 - RNA, 19 nt, Artificial Sequence
  Description of Artificial Sequence: Synthetic oligonucleotide
acagaauuagccacauuua

SEQ ID NO: 194074 - RNA, 19 nt, Artificial Sequence
  Description of Artificial Sequence: Synthetic oligonucleotide
uggagagaauccucguauu

SEQ ID NO: 194075 - RNA, 19 nt, Artificial Sequence
  Description of Artificial Sequence: Synthetic oligonucleotide
uacuuuaguacagcagcuu

SEQ ID NO: 194076 - RNA, 19 nt, Artificial Sequence
  Description of Artificial Sequence: Synthetic oligonucleotide
uacauucuauagccugcau

SEQ ID NO: 194077 - RNA, 19 nt, Artificial Sequence
  Description of Artificial Sequence: Synthetic oligonucleotide
acuuagacaggagaccaua

SEQ ID NO: 194078 - RNA, 19 nt, Artificial Sequence
  Description of Artificial Sequence: Synthetic oligonucleotide
cucuaaagauugcauuuaa

SEQ ID NO: 194079 - RNA, 19 nt, Artificial Sequence
  Description of Artificial Sequence: Synthetic oligonucleotide
auaccaaacuacaguggca

SEQ ID NO: 194080 - RNA, 19 nt, Artificial Sequence
  Description of Artificial Sequence: Synthetic oligonucleotide
caacaugcagucuuugacu

SEQ ID NO: 194081 - RNA, 19 nt, Artificial Sequence
  Description of Artificial Sequence: Synthetic oligonucleotide
cauugguccaaaugcaggu

SEQ ID NO: 194082 - RNA, 19 nt, Artificial Sequence
  Description of Artificial Sequence: Synthetic oligonucleotide
aaggggcaagcugucaaaa

SEQ ID NO: 194083 - RNA, 19 nt, Artificial Sequence
  Description of Artificial Sequence: Synthetic oligonucleotide
ucagaaggaucagaccaua

SEQ ID NO: 194084 - RNA, 19 nt, Artificial Sequence
  Description of Artificial Sequence: Synthetic oligonucleotide
gaauaguccugcacaugca

SEQ ID NO: 194085 - RNA, 19 nt, Artificial Sequence
  Description of Artificial Sequence: Synthetic oligonucleotide
ucuaugugguggagagaau

SEQ ID NO: 194086 - RNA, 19 nt, Artificial Sequence
  Description of Artificial Sequence: Synthetic oligonucleotide
gucccgugguucucagugg

SEQ ID NO: 194087 - RNA, 19 nt, Artificial Sequence
  Description of Artificial Sequence: Synthetic oligonucleotide
cacugggcacuaugguugc

SEQ ID NO: 194088 - RNA, 19 nt, Artificial Sequence
  Description of Artificial Sequence: Synthetic oligonucleotide
auuuccggugaaaguccac

SEQ ID NO: 194089 - RNA, 19 nt, Artificial Sequence
  Description of Artificial Sequence: Synthetic oligonucleotide
ccucgaaccguauuaugac

SEQ ID NO: 194090 - RNA, 19 nt, Artificial Sequence
  Description of Artificial Sequence: Synthetic oligonucleotide
auugggcaaccaguaagga

SEQ ID NO: 194091 - RNA, 19 nt, Artificial Sequence
  Description of Artificial Sequence: Synthetic oligonucleotide
agaacauccucgaaccgua

SEQ ID NO: 194092 - RNA, 19 nt, Artificial Sequence
  Description of Artificial Sequence: Synthetic oligonucleotide
guggagagaauccucguau

SEQ ID NO: 194093 - RNA, 19 nt, Artificial Sequence
  Description of Artificial Sequence: Synthetic oligonucleotide
augauuccgcugccuggag

SEQ ID NO: 194094 - RNA, 19 nt, Artificial Sequence
  Description of Artificial Sequence: Synthetic oligonucleotide
ccuaauucuacugaagaaa

SEQ ID NO: 194095 - RNA, 19 nt, Artificial Sequence
  Description of Artificial Sequence: Synthetic oligonucleotide
augugcuuggguauagaau

SEQ ID NO: 194096 - RNA, 19 nt, Artificial Sequence
  Description of Artificial Sequence: Synthetic oligonucleotide
guacauucuauagccugca

SEQ ID NO: 194097 - RNA, 19 nt, Artificial Sequence
  Description of Artificial Sequence: Synthetic oligonucleotide
uuccgggguggcauucucu

SEQ ID NO: 194098 - RNA, 19 nt, Artificial Sequence
  Description of Artificial Sequence: Synthetic oligonucleotide
aacuuagacaggagaccau

SEQ ID NO: 194099 - RNA, 19 nt, Artificial Sequence
  Description of Artificial Sequence: Synthetic oligonucleotide
gagggaaacaggccaccaa

SEQ ID NO: 194100 - RNA, 19 nt, Artificial Sequence
  Description of Artificial Sequence: Synthetic oligonucleotide
uaguaaccucagaaauaua

SEQ ID NO: 194101 - RNA, 19 nt, Artificial Sequence
  Description of Artificial Sequence: Synthetic oligonucleotide
ugaaaccauccugcuguac

SEQ ID NO: 194102 - RNA, 19 nt, Artificial Sequence
  Description of Artificial Sequence: Synthetic oligonucleotide
uuuccgggguggcauucuc

SEQ ID NO: 194103 - RNA, 19 nt, Artificial Sequence
  Description of Artificial Sequence: Synthetic oligonucleotide
agcacgcuuucacucuccu

SEQ ID NO: 194104 - RNA, 19 nt, Artificial Sequence
  Description of Artificial Sequence: Synthetic oligonucleotide
ugcgguguucagggaauug

SEQ ID NO: 194105 - RNA, 19 nt, Artificial Sequence
  Description of Artificial Sequence: Synthetic oligonucleotide
gugugcuacuguuuauaaa

SEQ ID NO: 194106 - RNA, 19 nt, Artificial Sequence
  Description of Artificial Sequence: Synthetic oligonucleotide
auacagcuaguaaccucag

SEQ ID NO: 194107 - RNA, 19 nt, Artificial Sequence
  Description of Artificial Sequence: Synthetic oligonucleotide
uggccgaccccuccaguuc

SEQ ID NO: 194108 - RNA, 19 nt, Artificial Sequence
  Description of Artificial Sequence: Synthetic oligonucleotide
gagaccauacagggugcac

SEQ ID NO: 194109 - RNA, 19 nt, Artificial Sequence
  Description of Artificial Sequence: Synthetic oligonucleotide
agguguagauacccuccaa

SEQ ID NO: 194110 - RNA, 19 nt, Artificial Sequence
  Description of Artificial Sequence: Synthetic oligonucleotide
ugguugccagucccguggu

SEQ ID NO: 194111 - RNA, 19 nt, Artificial Sequence
  Description of Artificial Sequence: Synthetic oligonucleotide
gaaccguauuaugacuaaa

SEQ ID NO: 194112 - RNA, 19 nt, Artificial Sequence
  Description of Artificial Sequence: Synthetic oligonucleotide
cugaaggguugaagagaac

SEQ ID NO: 194113 - RNA, 19 nt, Artificial Sequence
  Description of Artificial Sequence: Synthetic oligonucleotide
ccaaacuacaguggcaauc

SEQ ID NO: 194114 - RNA, 19 nt, Artificial Sequence
  Description of Artificial Sequence: Synthetic oligonucleotide
accaaacuacaguggcaau

SEQ ID NO: 194115 - RNA, 19 nt, Artificial Sequence
  Description of Artificial Sequence: Synthetic oligonucleotide
ccacuaggcaacaucccug

SEQ ID NO: 194116 - RNA, 19 nt, Artificial Sequence
  Description of Artificial Sequence: Synthetic oligonucleotide
aagcauaacuggaggugua

SEQ ID NO: 194117 - RNA, 19 nt, Artificial Sequence
  Description of Artificial Sequence: Synthetic oligonucleotide
guaucguguauuagcaggu

SEQ ID NO: 194118 - RNA, 19 nt, Artificial Sequence
  Description of Artificial Sequence: Synthetic oligonucleotide
caucccugugggagucagg

SEQ ID NO: 194119 - RNA, 19 nt, Artificial Sequence
  Description of Artificial Sequence: Synthetic oligonucleotide
cuccaacaaacgguaaaga

SEQ ID NO: 194120 - RNA, 19 nt, Artificial Sequence
  Description of Artificial Sequence: Synthetic oligonucleotide
ccugagagucccugggaag

SEQ ID NO: 194121 - RNA, 19 nt, Artificial Sequence
  Description of Artificial Sequence: Synthetic oligonucleotide
caagccccuugcucacugc

SEQ ID NO: 194122 - RNA, 19 nt, Artificial Sequence
  Description of Artificial Sequence: Synthetic oligonucleotide
cuauagaccugaggucauc

SEQ ID NO: 194123 - RNA, 19 nt, Artificial Sequence
  Description of Artificial Sequence: Synthetic oligonucleotide
guacaucauaggucuauau

SEQ ID NO: 194124 - RNA, 19 nt, Artificial Sequence
  Description of Artificial Sequence: Synthetic oligonucleotide
cucgaaccguauuaugacu

SEQ ID NO: 194125 - RNA, 19 nt, Artificial Sequence
  Description of Artificial Sequence: Synthetic oligonucleotide
acuauagaccugaggucau

SEQ ID NO: 194126 - RNA, 19 nt, Artificial Sequence
  Description of Artificial Sequence: Synthetic oligonucleotide
caaauuacccuggugguuu

SEQ ID NO: 194127 - RNA, 19 nt, Artificial Sequence
  Description of Artificial Sequence: Synthetic oligonucleotide
caguguguguauuuccggu

SEQ ID NO: 194128 - RNA, 19 nt, Artificial Sequence
  Description of Artificial Sequence: Synthetic oligonucleotide
gcaaggucugccguccucc

SEQ ID NO: 194129 - RNA, 19 nt, Artificial Sequence
  Description of Artificial Sequence: Synthetic oligonucleotide
gaaauugccccaagccccu

SEQ ID NO: 194130 - RNA, 19 nt, Artificial Sequence
  Description of Artificial Sequence: Synthetic oligonucleotide
caagcaguucuguaacuau

SEQ ID NO: 194131 - RNA, 19 nt, Artificial Sequence
  Description of Artificial Sequence: Synthetic oligonucleotide
ggagaacaauuaaacuguc

SEQ ID NO: 194132 - RNA, 19 nt, Artificial Sequence
  Description of Artificial Sequence: Synthetic oligonucleotide
caacaucccugugggaguc

SEQ ID NO: 194133 - RNA, 19 nt, Artificial Sequence
  Description of Artificial Sequence: Synthetic oligonucleotide
gucacugggcacuaugguu

SEQ ID NO: 194134 - RNA, 19 nt, Artificial Sequence
  Description of Artificial Sequence: Synthetic oligonucleotide
agacuauguuacagaauua

SEQ ID NO: 194135 - RNA, 19 nt, Artificial Sequence
  Description of Artificial Sequence: Synthetic oligonucleotide
gcuaguaaccucagaaaua

SEQ ID NO: 194136 - RNA, 19 nt, Artificial Sequence
  Description of Artificial Sequence: Synthetic oligonucleotide
caaggggcaagcugucaaa

SEQ ID NO: 194137 - RNA, 19 nt, Artificial Sequence
  Description of Artificial Sequence: Synthetic oligonucleotide
cacuaggcaacaucccugu

SEQ ID NO: 194138 - RNA, 19 nt, Artificial Sequence
  Description of Artificial Sequence: Synthetic oligonucleotide
gccuacaauucaaaauaca

SEQ ID NO: 194139 - RNA, 19 nt, Artificial Sequence
  Description of Artificial Sequence: Synthetic oligonucleotide
ggucugccguccuccagcc

SEQ ID NO: 194140 - RNA, 19 nt, Artificial Sequence
  Description of Artificial Sequence: Synthetic oligonucleotide
ccacauuaacucuaaagau

SEQ ID NO: 194141 - RNA, 19 nt, Artificial Sequence
  Description of Artificial Sequence: Synthetic oligonucleotide
cguaaaugugugaaccaca

SEQ ID NO: 194142 - RNA, 19 nt, Artificial Sequence
  Description of Artificial Sequence: Synthetic oligonucleotide
gugucagcacgcuuucacu

SEQ ID NO: 194143 - RNA, 19 nt, Artificial Sequence
  Description of Artificial Sequence: Synthetic oligonucleotide
gaguuguauuccaggacau

SEQ ID NO: 194144 - RNA, 19 nt, Artificial Sequence
  Description of Artificial Sequence: Synthetic oligonucleotide
agcaaggggcaagcuguca

SEQ ID NO: 194145 - RNA, 19 nt, Artificial Sequence
  Description of Artificial Sequence: Synthetic oligonucleotide
ggugaaaguccaccaugaa

SEQ ID NO: 194146 - RNA, 19 nt, Artificial Sequence
  Description of Artificial Sequence: Synthetic oligonucleotide
ggccgaccccuccaguucc

SEQ ID NO: 194147 - RNA, 19 nt, Artificial Sequence
  Description of Artificial Sequence: Synthetic oligonucleotide
caguaaggauguggagaac

SEQ ID NO: 194148 - RNA, 19 nt, Artificial Sequence
  Description of Artificial Sequence: Synthetic oligonucleotide
cugccguccuccagccaac

SEQ ID NO: 194149 - RNA, 19 nt, Artificial Sequence
  Description of Artificial Sequence: Synthetic oligonucleotide
caaggucugccguccucca

SEQ ID NO: 194150 - RNA, 19 nt, Artificial Sequence
  Description of Artificial Sequence: Synthetic oligonucleotide
gcgguguucagggaauuga

SEQ ID NO: 194151 - RNA, 19 nt, Artificial Sequence
  Description of Artificial Sequence: Synthetic oligonucleotide
aaacaccaucuggguuucu

SEQ ID NO: 194152 - RNA, 19 nt, Artificial Sequence
  Description of Artificial Sequence: Synthetic oligonucleotide
cgguaaagaccaugugaag

SEQ ID NO: 194153 - RNA, 19 nt, Artificial Sequence
  Description of Artificial Sequence: Synthetic oligonucleotide
gcauaacuggagguguaga

SEQ ID NO: 194154 - RNA, 19 nt, Artificial Sequence
  Description of Artificial Sequence: Synthetic oligonucleotide
aaauugccccaagccccuu

SEQ ID NO: 194155 - RNA, 19 nt, Artificial Sequence
  Description of Artificial Sequence: Synthetic oligonucleotide
ggcagcgaugacccaaucu

SEQ ID NO: 194156 - RNA, 19 nt, Artificial Sequence
  Description of Artificial Sequence: Synthetic oligonucleotide
augguuccauuuaguuuaa

SEQ ID NO: 194157 - RNA, 19 nt, Artificial Sequence
  Description of Artificial Sequence: Synthetic oligonucleotide
gucgaauauucaucacauu

SEQ ID NO: 194158 - RNA, 19 nt, Artificial Sequence
  Description of Artificial Sequence: Synthetic oligonucleotide
cgaugacccaaucuuauua

SEQ ID NO: 194159 - RNA, 19 nt, Artificial Sequence
  Description of Artificial Sequence: Synthetic oligonucleotide
cggugaaaguccaccauga

SEQ ID NO: 194160 - RNA, 19 nt, Artificial Sequence
  Description of Artificial Sequence: Synthetic oligonucleotide
agguggcucuuuaaaucua

SEQ ID NO: 194161 - RNA, 19 nt, Artificial Sequence
  Description of Artificial Sequence: Synthetic oligonucleotide
ccauaaaauugggcaacca

SEQ ID NO: 194162 - RNA, 19 nt, Artificial Sequence
  Description of Artificial Sequence: Synthetic oligonucleotide
cauccucgaaccguauuau

SEQ ID NO: 194163 - RNA, 19 nt, Artificial Sequence
  Description of Artificial Sequence: Synthetic oligonucleotide
cgucaaguuuuacagacau

SEQ ID NO: 194164 - RNA, 19 nt, Artificial Sequence
  Description of Artificial Sequence: Synthetic oligonucleotide
gagcuucaugagcucuaau

SEQ ID NO: 194165 - RNA, 19 nt, Artificial Sequence
  Description of Artificial Sequence: Synthetic oligonucleotide
gcacgcuuucacucuccuc

SEQ ID NO: 194166 - RNA, 19 nt, Artificial Sequence
  Description of Artificial Sequence: Synthetic oligonucleotide
cauuacuucuaggcugcau

SEQ ID NO: 194167 - RNA, 19 nt, Artificial Sequence
  Description of Artificial Sequence: Synthetic oligonucleotide
acacugcuggauaguuaua

SEQ ID NO: 194168 - RNA, 19 nt, Artificial Sequence
  Description of Artificial Sequence: Synthetic oligonucleotide
gaacauccucgaaccguau

SEQ ID NO: 194169 - RNA, 19 nt, Artificial Sequence
  Description of Artificial Sequence: Synthetic oligonucleotide
gguccaaaugcagguggcu

SEQ ID NO: 194170 - RNA, 19 nt, Artificial Sequence
  Description of Artificial Sequence: Synthetic oligonucleotide
cgaaccguauuaugacuaa

SEQ ID NO: 194171 - RNA, 19 nt, Artificial Sequence
  Description of Artificial Sequence: Synthetic oligonucleotide
ccccaagccccuugcucac

SEQ ID NO: 194172 - RNA, 19 nt, Artificial Sequence
  Description of Artificial Sequence: Synthetic oligonucleotide
gcaaucagcauaggucaau

SEQ ID NO: 194173 - RNA, 19 nt, Artificial Sequence
  Description of Artificial Sequence: Synthetic oligonucleotide
gucugccguccuccagcca

SEQ ID NO: 194174 - RNA, 19 nt, Artificial Sequence
  Description of Artificial Sequence: Synthetic oligonucleotide
gcaaauuacccuggugguu

SEQ ID NO: 194175 - RNA, 19 nt, Artificial Sequence
  Description of Artificial Sequence: Synthetic oligonucleotide
cuugggugaucuguccauu

SEQ ID NO: 194176 - RNA, 19 nt, Artificial Sequence
  Description of Artificial Sequence: Synthetic oligonucleotide
cuuggccgaccccuccagu

SEQ ID NO: 194177 - RNA, 19 nt, Artificial Sequence
  Description of Artificial Sequence: Synthetic oligonucleotide
gccagucccgugguucuca

SEQ ID NO: 194178 - RNA, 19 nt, Artificial Sequence
  Description of Artificial Sequence: Synthetic oligonucleotide
ggcaagcugucaaaagcuu

SEQ ID NO: 194179 - RNA, 19 nt, Artificial Sequence
  Description of Artificial Sequence: Synthetic oligonucleotide
ccuguacaucauaggucua

SEQ ID NO: 194180 - RNA, 19 nt, Artificial Sequence
  Description of Artificial Sequence: Synthetic oligonucleotide
ccauuacuucuaggcugca

SEQ ID NO: 194181 - RNA, 19 nt, Artificial Sequence
  Description of Artificial Sequence: Synthetic oligonucleotide
ccgaccccuccaguuccuu

SEQ ID NO: 194182 - RNA, 19 nt, Artificial Sequence
  Description of Artificial Sequence: Synthetic oligonucleotide
ucuauagccaccaaaagcu

SEQ ID NO: 194183 - RNA, 19 nt, Artificial Sequence
  Description of Artificial Sequence: Synthetic oligonucleotide
auacaacauauuuaggucc

SEQ ID NO: 194184 - RNA, 19 nt, Artificial Sequence
  Description of Artificial Sequence: Synthetic oligonucleotide
aaaccuuuaaucucuguag

SEQ ID NO: 194185 - RNA, 19 nt, Artificial Sequence
  Description of Artificial Sequence: Synthetic oligonucleotide
uguagaacaucuaccaggg

SEQ ID NO: 194186 - RNA, 19 nt, Artificial Sequence
  Description of Artificial Sequence: Synthetic oligonucleotide
uuguagaacaucuaccagg

SEQ ID NO: 194187 - RNA, 19 nt, Artificial Sequence
  Description of Artificial Sequence: Synthetic oligonucleotide
aaaguaguauauaauuuac

SEQ ID NO: 194188 - RNA, 19 nt, Artificial Sequence
  Description of Artificial Sequence: Synthetic oligonucleotide
uauauaacuuucucgcugg

SEQ ID NO: 194189 - RNA, 19 nt, Artificial Sequence
  Description of Artificial Sequence: Synthetic oligonucleotide
ccaauuaugagauacauag

SEQ ID NO: 194190 - RNA, 19 nt, Artificial Sequence
  Description of Artificial Sequence: Synthetic oligonucleotide
aacacuuaauggcuuaguc

SEQ ID NO: 194191 - RNA, 19 nt, Artificial Sequence
  Description of Artificial Sequence: Synthetic oligonucleotide
ugacuuaaaacccagucac

SEQ ID NO: 194192 - RNA, 19 nt, Artificial Sequence
  Description of Artificial Sequence: Synthetic oligonucleotide
uuuacuggaggcaaauucc

SEQ ID NO: 194193 - RNA, 19 nt, Artificial Sequence
  Description of Artificial Sequence: Synthetic oligonucleotide
gucuauauaacuuucucgc

SEQ ID NO: 194194 - RNA, 19 nt, Artificial Sequence
  Description of Artificial Sequence: Synthetic oligonucleotide
aauacugcaauagacggug

SEQ ID NO: 194195 - RNA, 19 nt, Artificial Sequence
  Description of Artificial Sequence: Synthetic oligonucleotide
agucuauauaacuuucucg

SEQ ID NO: 194196 - RNA, 19 nt, Artificial Sequence
  Description of Artificial Sequence: Synthetic oligonucleotide
aguaguauauaauuuacaa

SEQ ID NO: 194197 - RNA, 19 nt, Artificial Sequence
  Description of Artificial Sequence: Synthetic oligonucleotide
uguagcugcagaaaauucc

SEQ ID NO: 194198 - RNA, 19 nt, Artificial Sequence
  Description of Artificial Sequence: Synthetic oligonucleotide
uucaauuaaaguaguauau

SEQ ID NO: 194199 - RNA, 19 nt, Artificial Sequence
  Description of Artificial Sequence: Synthetic oligonucleotide
ucauuuacaagcuaccaaa

SEQ ID NO: 194200 - RNA, 19 nt, Artificial Sequence
  Description of Artificial Sequence: Synthetic oligonucleotide
aaugcgauaucaacucucc

SEQ ID NO: 194201 - RNA, 19 nt, Artificial Sequence
  Description of Artificial Sequence: Synthetic oligonucleotide
agucucuuuauuaaacucc

SEQ ID NO: 194202 - RNA, 19 nt, Artificial Sequence
  Description of Artificial Sequence: Synthetic oligonucleotide
auauuguagaacaucuacc

SEQ ID NO: 194203 - RNA, 19 nt, Artificial Sequence
  Description of Artificial Sequence: Synthetic oligonucleotide
uguaaugcgauaucaacuc

SEQ ID NO: 194204 - RNA, 19 nt, Artificial Sequence
  Description of Artificial Sequence: Synthetic oligonucleotide
uugacuuaaaacccaguca

SEQ ID NO: 194205 - RNA, 19 nt, Artificial Sequence
  Description of Artificial Sequence: Synthetic oligonucleotide
aucaucgcagcuuccaggc

SEQ ID NO: 194206 - RNA, 19 nt, Artificial Sequence
  Description of Artificial Sequence: Synthetic oligonucleotide
uuaguagaggacauuuuca

SEQ ID NO: 194207 - RNA, 19 nt, Artificial Sequence
  Description of Artificial Sequence: Synthetic oligonucleotide
auacauagguuccagauaa

SEQ ID NO: 194208 - RNA, 19 nt, Artificial Sequence
  Description of Artificial Sequence: Synthetic oligonucleotide
gacucgaacauuucugccg

SEQ ID NO: 194209 - RNA, 19 nt, Artificial Sequence
  Description of Artificial Sequence: Synthetic oligonucleotide
aacaccaucgauuucucau

SEQ ID NO: 194210 - RNA, 19 nt, Artificial Sequence
  Description of Artificial Sequence: Synthetic oligonucleotide
aacguuuaaucuaagaaaa

SEQ ID NO: 194211 - RNA, 19 nt, Artificial Sequence
  Description of Artificial Sequence: Synthetic oligonucleotide
aguaaaccaaugcucuugg

SEQ ID NO: 194212 - RNA, 19 nt, Artificial Sequence
  Description of Artificial Sequence: Synthetic oligonucleotide
ucuuccguagaacagcucu

SEQ ID NO: 194213 - RNA, 19 nt, Artificial Sequence
  Description of Artificial Sequence: Synthetic oligonucleotide
ugcaaaacuguuucgggcc

SEQ ID NO: 194214 - RNA, 19 nt, Artificial Sequence
  Description of Artificial Sequence: Synthetic oligonucleotide
auauaucauacacagugcu

SEQ ID NO: 194215 - RNA, 19 nt, Artificial Sequence
  Description of Artificial Sequence: Synthetic oligonucleotide
cuguagaacaaucaagcag

SEQ ID NO: 194216 - RNA, 19 nt, Artificial Sequence
  Description of Artificial Sequence: Synthetic oligonucleotide
guuaaggucggcauagucg

SEQ ID NO: 194217 - RNA, 19 nt, Artificial Sequence
  Description of Artificial Sequence: Synthetic oligonucleotide
agaaaauuccgccucccuc

SEQ ID NO: 194218 - RNA, 19 nt, Artificial Sequence
  Description of Artificial Sequence: Synthetic oligonucleotide
ucuguaaugcgauaucaac

SEQ ID NO: 194219 - RNA, 19 nt, Artificial Sequence
  Description of Artificial Sequence: Synthetic oligonucleotide
agauucuuauaauuccuag

SEQ ID NO: 194220 - RNA, 19 nt, Artificial Sequence
  Description of Artificial Sequence: Synthetic oligonucleotide
ugaggaacuagcaucaaua

SEQ ID NO: 194221 - RNA, 19 nt, Artificial Sequence
  Description of Artificial Sequence: Synthetic oligonucleotide
uuguguaucacuguucuca

SEQ ID NO: 194222 - RNA, 19 nt, Artificial Sequence
  Description of Artificial Sequence: Synthetic oligonucleotide
ugagauacauaguugcaac

SEQ ID NO: 194223 - RNA, 19 nt, Artificial Sequence
  Description of Artificial Sequence: Synthetic oligonucleotide
auuucuugcccuaaguagg

SEQ ID NO: 194224 - RNA, 19 nt, Artificial Sequence
  Description of Artificial Sequence: Synthetic oligonucleotide
uuugggacccgaaccauag

SEQ ID NO: 194225 - RNA, 19 nt, Artificial Sequence
  Description of Artificial Sequence: Synthetic oligonucleotide
aaaauccgucagcuuuucc

SEQ ID NO: 194226 - RNA, 19 nt, Artificial Sequence
  Description of Artificial Sequence: Synthetic oligonucleotide
aguaguccauaauaaaacu

SEQ ID NO: 194227 - RNA, 19 nt, Artificial Sequence
  Description of Artificial Sequence: Synthetic oligonucleotide
ugugccuugucauuuauau

SEQ ID NO: 194228 - RNA, 19 nt, Artificial Sequence
  Description of Artificial Sequence: Synthetic oligonucleotide
ggaacuagcaucaauauca

SEQ ID NO: 194229 - RNA, 19 nt, Artificial Sequence
  Description of Artificial Sequence: Synthetic oligonucleotide
ucuuuugaucucuucacgu

SEQ ID NO: 194230 - RNA, 19 nt, Artificial Sequence
  Description of Artificial Sequence: Synthetic oligonucleotide
gucguuuugucuuuugcag

SEQ ID NO: 194231 - RNA, 19 nt, Artificial Sequence
  Description of Artificial Sequence: Synthetic oligonucleotide
uaugagauacauaguugca

SEQ ID NO: 194232 - RNA, 19 nt, Artificial Sequence
  Description of Artificial Sequence: Synthetic oligonucleotide
aaaggaacgaugaacucgu

SEQ ID NO: 194233 - RNA, 19 nt, Artificial Sequence
  Description of Artificial Sequence: Synthetic oligonucleotide
gaucaucgcagcuuccagg

SEQ ID NO: 194234 - RNA, 19 nt, Artificial Sequence
  Description of Artificial Sequence: Synthetic oligonucleotide
aaaggaacaaacguuuaau

SEQ ID NO: 194235 - RNA, 19 nt, Artificial Sequence
  Description of Artificial Sequence: Synthetic oligonucleotide
guuaguagaggacauuuuc

SEQ ID NO: 194236 - RNA, 19 nt, Artificial Sequence
  Description of Artificial Sequence: Synthetic oligonucleotide
ugagggacagcaugauucg

SEQ ID NO: 194237 - RNA, 19 nt, Artificial Sequence
  Description of Artificial Sequence: Synthetic oligonucleotide
ucgguuaugugccuuggug

SEQ ID NO: 194238 - RNA, 19 nt, Artificial Sequence
  Description of Artificial Sequence: Synthetic oligonucleotide
aaccccguugaccugaagu

SEQ ID NO: 194239 - RNA, 19 nt, Artificial Sequence
  Description of Artificial Sequence: Synthetic oligonucleotide
acauagguuccagauaaac

SEQ ID NO: 194240 - RNA, 19 nt, Artificial Sequence
  Description of Artificial Sequence: Synthetic oligonucleotide
uaaucucuguagaacaauc

SEQ ID NO: 194241 - RNA, 19 nt, Artificial Sequence
  Description of Artificial Sequence: Synthetic oligonucleotide
aaucaagccauuguucacu

SEQ ID NO: 194242 - RNA, 19 nt, Artificial Sequence
  Description of Artificial Sequence: Synthetic oligonucleotide
agguauccgagacugagug

SEQ ID NO: 194243 - RNA, 19 nt, Artificial Sequence
  Description of Artificial Sequence: Synthetic oligonucleotide
aaaucuggagguauccgag

SEQ ID NO: 194244 - RNA, 19 nt, Artificial Sequence
  Description of Artificial Sequence: Synthetic oligonucleotide
aagucugaaugccaugcga

SEQ ID NO: 194245 - RNA, 19 nt, Artificial Sequence
  Description of Artificial Sequence: Synthetic oligonucleotide
ucacaauagcccuuauuca

SEQ ID NO: 194246 - RNA, 19 nt, Artificial Sequence
  Description of Artificial Sequence: Synthetic oligonucleotide
aucaacucuccaucaugcc

SEQ ID NO: 194247 - RNA, 19 nt, Artificial Sequence
  Description of Artificial Sequence: Synthetic oligonucleotide
aauacgacugagggacagc

SEQ ID NO: 194248 - RNA, 19 nt, Artificial Sequence
  Description of Artificial Sequence: Synthetic oligonucleotide
auucgggcgaaucucucac

SEQ ID NO: 194249 - RNA, 19 nt, Artificial Sequence
  Description of Artificial Sequence: Synthetic oligonucleotide
agcauugguuaguagagga

SEQ ID NO: 194250 - RNA, 19 nt, Artificial Sequence
  Description of Artificial Sequence: Synthetic oligonucleotide
uaaugcgauaucaacucuc

SEQ ID NO: 194251 - RNA, 19 nt, Artificial Sequence
  Description of Artificial Sequence: Synthetic oligonucleotide
uccgagacugagugaaugg

SEQ ID NO: 194252 - RNA, 19 nt, Artificial Sequence
  Description of Artificial Sequence: Synthetic oligonucleotide
uccaauuuaauugccgacu

SEQ ID NO: 194253 - RNA, 19 nt, Artificial Sequence
  Description of Artificial Sequence: Synthetic oligonucleotide
ugcgauaucaacucuccau

SEQ ID NO: 194254 - RNA, 19 nt, Artificial Sequence
  Description of Artificial Sequence: Synthetic oligonucleotide
ucggcuuuauuguuugcag

SEQ ID NO: 194255 - RNA, 19 nt, Artificial Sequence
  Description of Artificial Sequence: Synthetic oligonucleotide
aauuccgccucccucaguu

SEQ ID NO: 194256 - RNA, 19 nt, Artificial Sequence
  Description of Artificial Sequence: Synthetic oligonucleotide
ucaaaucuggugguaaugu

SEQ ID NO: 194257 - RNA, 19 nt, Artificial Sequence
  Description of Artificial Sequence: Synthetic oligonucleotide
aacaguaugcacuggcauu

SEQ ID NO: 194258 - RNA, 19 nt, Artificial Sequence
  Description of Artificial Sequence: Synthetic oligonucleotide
aggaacgaugaacucguuc

SEQ ID NO: 194259 - RNA, 19 nt, Artificial Sequence
  Description of Artificial Sequence: Synthetic oligonucleotide
uaguagaggacauuuucaa

SEQ ID NO: 194260 - RNA, 19 nt, Artificial Sequence
  Description of Artificial Sequence: Synthetic oligonucleotide
acaaacguuuaaucuaaga

SEQ ID NO: 194261 - RNA, 19 nt, Artificial Sequence
  Description of Artificial Sequence: Synthetic oligonucleotide
uggaggcaaauuccaaugc

SEQ ID NO: 194262 - RNA, 19 nt, Artificial Sequence
  Description of Artificial Sequence: Synthetic oligonucleotide
aaguaguauauaauuuaca

SEQ ID NO: 194263 - RNA, 19 nt, Artificial Sequence
  Description of Artificial Sequence: Synthetic oligonucleotide
ggaacgaugaacucguuca

SEQ ID NO: 194264 - RNA, 19 nt, Artificial Sequence
  Description of Artificial Sequence: Synthetic oligonucleotide
ugccaugcgauucucggcu

SEQ ID NO: 194265 - RNA, 19 nt, Artificial Sequence
  Description of Artificial Sequence: Synthetic oligonucleotide
acgacugagggacagcaug

SEQ ID NO: 194266 - RNA, 19 nt, Artificial Sequence
  Description of Artificial Sequence: Synthetic oligonucleotide
gggaauacgacugagggac

SEQ ID NO: 194267 - RNA, 19 nt, Artificial Sequence
  Description of Artificial Sequence: Synthetic oligonucleotide
ucgggcgaaucucucacag

SEQ ID NO: 194268 - RNA, 19 nt, Artificial Sequence
  Description of Artificial Sequence: Synthetic oligonucleotide
uuccaauuuaauugccgac

SEQ ID NO: 194269 - RNA, 19 nt, Artificial Sequence
  Description of Artificial Sequence: Synthetic oligonucleotide
aauugccgacugcaaaacu

SEQ ID NO: 194270 - RNA, 19 nt, Artificial Sequence
  Description of Artificial Sequence: Synthetic oligonucleotide
cauagguuccagauaaaca

SEQ ID NO: 194271 - RNA, 19 nt, Artificial Sequence
  Description of Artificial Sequence: Synthetic oligonucleotide
uucuguaaugcgauaucaa

SEQ ID NO: 194272 - RNA, 19 nt, Artificial Sequence
  Description of Artificial Sequence: Synthetic oligonucleotide
uaauacugugagguaaucu

SEQ ID NO: 194273 - RNA, 19 nt, Artificial Sequence
  Description of Artificial Sequence: Synthetic oligonucleotide
guauggagccacuaguuga

SEQ ID NO: 194274 - RNA, 19 nt, Artificial Sequence
  Description of Artificial Sequence: Synthetic oligonucleotide
aauccaauuaugagauaca

SEQ ID NO: 194275 - RNA, 19 nt, Artificial Sequence
  Description of Artificial Sequence: Synthetic oligonucleotide
ugaccugaaguggauacug

SEQ ID NO: 194276 - RNA, 19 nt, Artificial Sequence
  Description of Artificial Sequence: Synthetic oligonucleotide
guuucuauaguguguggga

SEQ ID NO: 194277 - RNA, 19 nt, Artificial Sequence
  Description of Artificial Sequence: Synthetic oligonucleotide
cagugcugaacacuuaaug

SEQ ID NO: 194278 - RNA, 19 nt, Artificial Sequence
  Description of Artificial Sequence: Synthetic oligonucleotide
aguggauacugaccaaaca

SEQ ID NO: 194279 - RNA, 19 nt, Artificial Sequence
  Description of Artificial Sequence: Synthetic oligonucleotide
uguuucgggcccuuugucu

SEQ ID NO: 194280 - RNA, 19 nt, Artificial Sequence
  Description of Artificial Sequence: Synthetic oligonucleotide
gcgggaauacgacugaggg

SEQ ID NO: 194281 - RNA, 19 nt, Artificial Sequence
  Description of Artificial Sequence: Synthetic oligonucleotide
ugaacacuuaauggcuuag

SEQ ID NO: 194282 - RNA, 19 nt, Artificial Sequence
  Description of Artificial Sequence: Synthetic oligonucleotide
caauuuaauugccgacugc

SEQ ID NO: 194283 - RNA, 19 nt, Artificial Sequence
  Description of Artificial Sequence: Synthetic oligonucleotide
ucuaaucuuuguuguaaua

SEQ ID NO: 194284 - RNA, 19 nt, Artificial Sequence
  Description of Artificial Sequence: Synthetic oligonucleotide
cagugcuuugagaagucgc

SEQ ID NO: 194285 - RNA, 19 nt, Artificial Sequence
  Description of Artificial Sequence: Synthetic oligonucleotide
ucuagauagucugauccuc

SEQ ID NO: 194286 - RNA, 19 nt, Artificial Sequence
  Description of Artificial Sequence: Synthetic oligonucleotide
ucguuuugucuuuugcagu

SEQ ID NO: 194287 - RNA, 19 nt, Artificial Sequence
  Description of Artificial Sequence: Synthetic oligonucleotide
uccagcgauguaaacaguu

SEQ ID NO: 194288 - RNA, 19 nt, Artificial Sequence
  Description of Artificial Sequence: Synthetic oligonucleotide
uauuuagguccaagaacuc

SEQ ID NO: 194289 - RNA, 19 nt, Artificial Sequence
  Description of Artificial Sequence: Synthetic oligonucleotide
cuuaaaacccagucacuca

SEQ ID NO: 194290 - RNA, 19 nt, Artificial Sequence
  Description of Artificial Sequence: Synthetic oligonucleotide
acaauagcccuuauucaag

SEQ ID NO: 194291 - RNA, 19 nt, Artificial Sequence
  Description of Artificial Sequence: Synthetic oligonucleotide
gaauacgacugagggacag

SEQ ID NO: 194292 - RNA, 19 nt, Artificial Sequence
  Description of Artificial Sequence: Synthetic oligonucleotide
aguaggaacaccaucgauu

SEQ ID NO: 194293 - RNA, 19 nt, Artificial Sequence
  Description of Artificial Sequence: Synthetic oligonucleotide
cuugcccuaaguaggaaca

SEQ ID NO: 194294 - RNA, 19 nt, Artificial Sequence
  Description of Artificial Sequence: Synthetic oligonucleotide
gaggcaauacugcaauaga

SEQ ID NO: 194295 - RNA, 19 nt, Artificial Sequence
  Description of Artificial Sequence: Synthetic oligonucleotide
cugguuaaggucggcauag

SEQ ID NO: 194296 - RNA, 19 nt, Artificial Sequence
  Description of Artificial Sequence: Synthetic oligonucleotide
cauaguucugccacaagaa

SEQ ID NO: 194297 - RNA, 19 nt, Artificial Sequence
  Description of Artificial Sequence: Synthetic oligonucleotide
uggaugcaugggcaaaucu

SEQ ID NO: 194298 - RNA, 19 nt, Artificial Sequence
  Description of Artificial Sequence: Synthetic oligonucleotide
aauagcccuuauucaagua

SEQ ID NO: 194299 - RNA, 19 nt, Artificial Sequence
  Description of Artificial Sequence: Synthetic oligonucleotide
cacaauagcccuuauucaa

SEQ ID NO: 194300 - RNA, 19 nt, Artificial Sequence
  Description of Artificial Sequence: Synthetic oligonucleotide
aaucuaagaaaagguuaaa

SEQ ID NO: 194301 - RNA, 19 nt, Artificial Sequence
  Description of Artificial Sequence: Synthetic oligonucleotide
caaaucuggagguauccga

SEQ ID NO: 194302 - RNA, 19 nt, Artificial Sequence
  Description of Artificial Sequence: Synthetic oligonucleotide
cuuucaucugaaaggcguc

SEQ ID NO: 194303 - RNA, 19 nt, Artificial Sequence
  Description of Artificial Sequence: Synthetic oligonucleotide
guuuguguaucacuguucu

SEQ ID NO: 194304 - RNA, 19 nt, Artificial Sequence
  Description of Artificial Sequence: Synthetic oligonucleotide
acuaguugaggaacuagca

SEQ ID NO: 194305 - RNA, 19 nt, Artificial Sequence
  Description of Artificial Sequence: Synthetic oligonucleotide
ucugguuaaggucggcaua

SEQ ID NO: 194306 - RNA, 19 nt, Artificial Sequence
  Description of Artificial Sequence: Synthetic oligonucleotide
acuguuucgggcccuuugu

SEQ ID NO: 194307 - RNA, 19 nt, Artificial Sequence
  Description of Artificial Sequence: Synthetic oligonucleotide
uugauggcugcucuagaua

SEQ ID NO: 194308 - RNA, 19 nt, Artificial Sequence
  Description of Artificial Sequence: Synthetic oligonucleotide
aaucacucggauaguuucu

SEQ ID NO: 194309 - RNA, 19 nt, Artificial Sequence
  Description of Artificial Sequence: Synthetic oligonucleotide
agauacauaguugcaacuu

SEQ ID NO: 194310 - RNA, 19 nt, Artificial Sequence
  Description of Artificial Sequence: Synthetic oligonucleotide
uaauugccgacugcaaaac

SEQ ID NO: 194311 - RNA, 19 nt, Artificial Sequence
  Description of Artificial Sequence: Synthetic oligonucleotide
caauagacgguggcaaaag

SEQ ID NO: 194312 - RNA, 19 nt, Artificial Sequence
  Description of Artificial Sequence: Synthetic oligonucleotide
ugguuaguagaggacauuu

SEQ ID NO: 194313 - RNA, 19 nt, Artificial Sequence
  Description of Artificial Sequence: Synthetic oligonucleotide
ucagcgggaauacgacuga

SEQ ID NO: 194314 - RNA, 19 nt, Artificial Sequence
  Description of Artificial Sequence: Synthetic oligonucleotide
caugauucgggcgaaucuc

SEQ ID NO: 194315 - RNA, 19 nt, Artificial Sequence
  Description of Artificial Sequence: Synthetic oligonucleotide
ugcaaugcucuuugggcaa

SEQ ID NO: 194316 - RNA, 19 nt, Artificial Sequence
  Description of Artificial Sequence: Synthetic oligonucleotide
ugaaugguuuguguaucac

SEQ ID NO: 194317 - RNA, 19 nt, Artificial Sequence
  Description of Artificial Sequence: Synthetic oligonucleotide
acugcaauagacgguggca

SEQ ID NO: 194318 - RNA, 19 nt, Artificial Sequence
  Description of Artificial Sequence: Synthetic oligonucleotide
cuguaaugcgauaucaacu

SEQ ID NO: 194319 - RNA, 19 nt, Artificial Sequence
  Description of Artificial Sequence: Synthetic oligonucleotide
acguuuaaucuaagaaaag

SEQ ID NO: 194320 - RNA, 19 nt, Artificial Sequence
  Description of Artificial Sequence: Synthetic oligonucleotide
cucuccuucgaucaucgca

SEQ ID NO: 194321 - RNA, 19 nt, Artificial Sequence
  Description of Artificial Sequence: Synthetic oligonucleotide
accaucgauuucucauauc

SEQ ID NO: 194322 - RNA, 19 nt, Artificial Sequence
  Description of Artificial Sequence: Synthetic oligonucleotide
guauccgagacugagugaa

SEQ ID NO: 194323 - RNA, 19 nt, Artificial Sequence
  Description of Artificial Sequence: Synthetic oligonucleotide
uuuugggacccgaaccaua

SEQ ID NO: 194324 - RNA, 19 nt, Artificial Sequence
  Description of Artificial Sequence: Synthetic oligonucleotide
auacgacugagggacagca

SEQ ID NO: 194325 - RNA, 19 nt, Artificial Sequence
  Description of Artificial Sequence: Synthetic oligonucleotide
ucgaucaucgcagcuucca

SEQ ID NO: 194326 - RNA, 19 nt, Artificial Sequence
  Description of Artificial Sequence: Synthetic oligonucleotide
ucuugacaguucaaauguu

SEQ ID NO: 194327 - RNA, 19 nt, Artificial Sequence
  Description of Artificial Sequence: Synthetic oligonucleotide
acucaguaguccauaauaa

SEQ ID NO: 194328 - RNA, 19 nt, Artificial Sequence
  Description of Artificial Sequence: Synthetic oligonucleotide
gagaggugcaaacagguuu

SEQ ID NO: 194329 - RNA, 19 nt, Artificial Sequence
  Description of Artificial Sequence: Synthetic oligonucleotide
ugcaauagacgguggcaaa

SEQ ID NO: 194330 - RNA, 19 nt, Artificial Sequence
  Description of Artificial Sequence: Synthetic oligonucleotide
ggagguauccgagacugag

SEQ ID NO: 194331 - RNA, 19 nt, Artificial Sequence
  Description of Artificial Sequence: Synthetic oligonucleotide
gagauacauaguugcaacu

SEQ ID NO: 194332 - RNA, 19 nt, Artificial Sequence
  Description of Artificial Sequence: Synthetic oligonucleotide
uuccguagaacagcucuac

SEQ ID NO: 194333 - RNA, 19 nt, Artificial Sequence
  Description of Artificial Sequence: Synthetic oligonucleotide
auauaacuuucucgcugga

SEQ ID NO: 194334 - RNA, 19 nt, Artificial Sequence
  Description of Artificial Sequence: Synthetic oligonucleotide
uccucgguuaugugccuug

SEQ ID NO: 194335 - RNA, 19 nt, Artificial Sequence
  Description of Artificial Sequence: Synthetic oligonucleotide
gagccacuaguugaggaac

SEQ ID NO: 194336 - RNA, 19 nt, Artificial Sequence
  Description of Artificial Sequence: Synthetic oligonucleotide
ucggcauagucguuuuguc

SEQ ID NO: 194337 - RNA, 19 nt, Artificial Sequence
  Description of Artificial Sequence: Synthetic oligonucleotide
uccuucgaucaucgcagcu

SEQ ID NO: 194338 - RNA, 19 nt, Artificial Sequence
  Description of Artificial Sequence: Synthetic oligonucleotide
uucgaucaucgcagcuucc

SEQ ID NO: 194339 - RNA, 19 nt, Artificial Sequence
  Description of Artificial Sequence: Synthetic oligonucleotide
gcgauaucaacucuccauc

SEQ ID NO: 194340 - RNA, 19 nt, Artificial Sequence
  Description of Artificial Sequence: Synthetic oligonucleotide
agcuaccaaauauuauaua

SEQ ID NO: 194341 - RNA, 19 nt, Artificial Sequence
  Description of Artificial Sequence: Synthetic oligonucleotide
uacauagguuccagauaaa

SEQ ID NO: 194342 - RNA, 19 nt, Artificial Sequence
  Description of Artificial Sequence: Synthetic oligonucleotide
ggaggcaaauuccaaugca

SEQ ID NO: 194343 - RNA, 19 nt, Artificial Sequence
  Description of Artificial Sequence: Synthetic oligonucleotide
agucugguuaaggucggca

SEQ ID NO: 194344 - RNA, 19 nt, Artificial Sequence
  Description of Artificial Sequence: Synthetic oligonucleotide
agaaaauccgucagcuuuu

SEQ ID NO: 194345 - RNA, 19 nt, Artificial Sequence
  Description of Artificial Sequence: Synthetic oligonucleotide
gaaaauccgucagcuuuuc

SEQ ID NO: 194346 - RNA, 19 nt, Artificial Sequence
  Description of Artificial Sequence: Synthetic oligonucleotide
agaggugcaaacagguuua

SEQ ID NO: 194347 - RNA, 19 nt, Artificial Sequence
  Description of Artificial Sequence: Synthetic oligonucleotide
cacguuuaauucuuguuau

SEQ ID NO: 194348 - RNA, 19 nt, Artificial Sequence
  Description of Artificial Sequence: Synthetic oligonucleotide
augcgauaucaacucucca

SEQ ID NO: 194349 - RNA, 19 nt, Artificial Sequence
  Description of Artificial Sequence: Synthetic oligonucleotide
gcuuagucuuggaaguucc

SEQ ID NO: 194350 - RNA, 19 nt, Artificial Sequence
  Description of Artificial Sequence: Synthetic oligonucleotide
caccaaaagcucguguguc

SEQ ID NO: 194351 - RNA, 19 nt, Artificial Sequence
  Description of Artificial Sequence: Synthetic oligonucleotide
uucgggcgaaucucucaca

SEQ ID NO: 194352 - RNA, 19 nt, Artificial Sequence
  Description of Artificial Sequence: Synthetic oligonucleotide
augauucgggcgaaucucu

SEQ ID NO: 194353 - RNA, 19 nt, Artificial Sequence
  Description of Artificial Sequence: Synthetic oligonucleotide
ccacauacauaaaggaaca

SEQ ID NO: 194354 - RNA, 19 nt, Artificial Sequence
  Description of Artificial Sequence: Synthetic oligonucleotide
cucggcuuuauuguuugca

SEQ ID NO: 194355 - RNA, 19 nt, Artificial Sequence
  Description of Artificial Sequence: Synthetic oligonucleotide
cgguuaugugccuuggugc

SEQ ID NO: 194356 - RNA, 19 nt, Artificial Sequence
  Description of Artificial Sequence: Synthetic oligonucleotide
auacugcaauagacggugg

SEQ ID NO: 194357 - RNA, 19 nt, Artificial Sequence
  Description of Artificial Sequence: Synthetic oligonucleotide
ugcgauucucggcuuuauu

SEQ ID NO: 194358 - RNA, 19 nt, Artificial Sequence
  Description of Artificial Sequence: Synthetic oligonucleotide
uauccgagacugagugaau

SEQ ID NO: 194359 - RNA, 19 nt, Artificial Sequence
  Description of Artificial Sequence: Synthetic oligonucleotide
ucaagccauuguucacuuc

SEQ ID NO: 194360 - RNA, 19 nt, Artificial Sequence
  Description of Artificial Sequence: Synthetic oligonucleotide
uacgacugagggacagcau

SEQ ID NO: 194361 - RNA, 19 nt, Artificial Sequence
  Description of Artificial Sequence: Synthetic oligonucleotide
cuaguugaggaacuagcau

SEQ ID NO: 194362 - RNA, 19 nt, Artificial Sequence
  Description of Artificial Sequence: Synthetic oligonucleotide
cugaacacuuaauggcuua

SEQ ID NO: 194363 - RNA, 19 nt, Artificial Sequence
  Description of Artificial Sequence: Synthetic oligonucleotide
guugcaacuuaaccagccu

SEQ ID NO: 194364 - RNA, 19 nt, Artificial Sequence
  Description of Artificial Sequence: Synthetic oligonucleotide
caauagcccuuauucaagu

SEQ ID NO: 194365 - RNA, 19 nt, Artificial Sequence
  Description of Artificial Sequence: Synthetic oligonucleotide
auaccuguccagauacaaa

SEQ ID NO: 194366 - RNA, 19 nt, Artificial Sequence
  Description of Artificial Sequence: Synthetic oligonucleotide
ccaucagcgggaauacgac

SEQ ID NO: 194367 - RNA, 19 nt, Artificial Sequence
  Description of Artificial Sequence: Synthetic oligonucleotide
uugguuaguagaggacauu

SEQ ID NO: 194368 - RNA, 19 nt, Artificial Sequence
  Description of Artificial Sequence: Synthetic oligonucleotide
augcacuggcauuucuaua

SEQ ID NO: 194369 - RNA, 19 nt, Artificial Sequence
  Description of Artificial Sequence: Synthetic oligonucleotide
ggggaaucuuuugggaccc

SEQ ID NO: 194370 - RNA, 19 nt, Artificial Sequence
  Description of Artificial Sequence: Synthetic oligonucleotide
aucacucggauaguuucuu

SEQ ID NO: 194371 - RNA, 19 nt, Artificial Sequence
  Description of Artificial Sequence: Synthetic oligonucleotide
guaugcacuggcauuucua

SEQ ID NO: 194372 - RNA, 19 nt, Artificial Sequence
  Description of Artificial Sequence: Synthetic oligonucleotide
cuuccguagaacagcucua

SEQ ID NO: 194373 - RNA, 19 nt, Artificial Sequence
  Description of Artificial Sequence: Synthetic oligonucleotide
aucuuccguagaacagcuc

SEQ ID NO: 194374 - RNA, 19 nt, Artificial Sequence
  Description of Artificial Sequence: Synthetic oligonucleotide
agccacuaguugaggaacu

SEQ ID NO: 194375 - RNA, 19 nt, Artificial Sequence
  Description of Artificial Sequence: Synthetic oligonucleotide
uaaggucggcauagucguu

SEQ ID NO: 194376 - RNA, 19 nt, Artificial Sequence
  Description of Artificial Sequence: Synthetic oligonucleotide
cuuucucgcuggaaauucu

SEQ ID NO: 194377 - RNA, 19 nt, Artificial Sequence
  Description of Artificial Sequence: Synthetic oligonucleotide
ggacccgaaccauagcuua

SEQ ID NO: 194378 - RNA, 19 nt, Artificial Sequence
  Description of Artificial Sequence: Synthetic oligonucleotide
gaaccccguugaccugaag

SEQ ID NO: 194379 - RNA, 19 nt, Artificial Sequence
  Description of Artificial Sequence: Synthetic oligonucleotide
ggcuuagucuuggaaguuc

SEQ ID NO: 194380 - RNA, 19 nt, Artificial Sequence
  Description of Artificial Sequence: Synthetic oligonucleotide
caugggaugcuuuggcaau

SEQ ID NO: 194381 - RNA, 19 nt, Artificial Sequence
  Description of Artificial Sequence: Synthetic oligonucleotide
acccgaaccauagcuuaaa

SEQ ID NO: 194382 - RNA, 19 nt, Artificial Sequence
  Description of Artificial Sequence: Synthetic oligonucleotide
cagcgggaauacgacugag

SEQ ID NO: 194383 - RNA, 19 nt, Artificial Sequence
  Description of Artificial Sequence: Synthetic oligonucleotide
ccacuaguugaggaacuag

SEQ ID NO: 194384 - RNA, 19 nt, Artificial Sequence
  Description of Artificial Sequence: Synthetic oligonucleotide
uggcuuagucuuggaaguu

SEQ ID NO: 194385 - RNA, 19 nt, Artificial Sequence
  Description of Artificial Sequence: Synthetic oligonucleotide
gggcaaguugugcauccca

SEQ ID NO: 194386 - RNA, 19 nt, Artificial Sequence
  Description of Artificial Sequence: Synthetic oligonucleotide
caucagcgggaauacgacu

SEQ ID NO: 194387 - RNA, 19 nt, Artificial Sequence
  Description of Artificial Sequence: Synthetic oligonucleotide
uggcaaucacucggauagu

SEQ ID NO: 194388 - RNA, 19 nt, Artificial Sequence
  Description of Artificial Sequence: Synthetic oligonucleotide
cuauuccaacaagggccug

SEQ ID NO: 194389 - RNA, 19 nt, Artificial Sequence
  Description of Artificial Sequence: Synthetic oligonucleotide
cagugcaucuugacuuaaa

SEQ ID NO: 194390 - RNA, 19 nt, Artificial Sequence
  Description of Artificial Sequence: Synthetic oligonucleotide
gagguauccgagacugagu

SEQ ID NO: 194391 - RNA, 19 nt, Artificial Sequence
  Description of Artificial Sequence: Synthetic oligonucleotide
ggaugcuuuggcaaucacu

SEQ ID NO: 194392 - RNA, 19 nt, Artificial Sequence
  Description of Artificial Sequence: Synthetic oligonucleotide
gcucgugugucauuuucua

SEQ ID NO: 194393 - RNA, 19 nt, Artificial Sequence
  Description of Artificial Sequence: Synthetic oligonucleotide
gacccgaaccauagcuuaa

SEQ ID NO: 194394 - RNA, 19 nt, Artificial Sequence
  Description of Artificial Sequence: Synthetic oligonucleotide
gucugaaugccaugcgauu

SEQ ID NO: 194395 - RNA, 19 nt, Artificial Sequence
  Description of Artificial Sequence: Synthetic oligonucleotide
cuucccgguccucuccaga

SEQ ID NO: 194396 - RNA, 19 nt, Artificial Sequence
  Description of Artificial Sequence: Synthetic oligonucleotide
caguaugcacuggcauuuc

SEQ ID NO: 194397 - RNA, 19 nt, Artificial Sequence
  Description of Artificial Sequence: Synthetic oligonucleotide
cccguugaccugaagugga

SEQ ID NO: 194398 - RNA, 19 nt, Artificial Sequence
  Description of Artificial Sequence: Synthetic oligonucleotide
ccgaaccauagcuuaaaua

SEQ ID NO: 194399 - RNA, 19 nt, Artificial Sequence
  Description of Artificial Sequence: Synthetic oligonucleotide
cgaucaucgcagcuuccag

SEQ ID NO: 194400 - RNA, 19 nt, Artificial Sequence
  Description of Artificial Sequence: Synthetic oligonucleotide
aaggaacgaugaacucguu

SEQ ID NO: 194401 - RNA, 19 nt, Artificial Sequence
  Description of Artificial Sequence: Synthetic oligonucleotide
augcgauucucggcuuuau

SEQ ID NO: 194402 - RNA, 19 nt, Artificial Sequence
  Description of Artificial Sequence: Synthetic oligonucleotide
caccaucgauuucucauau

SEQ ID NO: 194403 - RNA, 19 nt, Artificial Sequence
  Description of Artificial Sequence: Synthetic oligonucleotide
agggacccuuggacaagag

SEQ ID NO: 194404 - RNA, 19 nt, Artificial Sequence
  Description of Artificial Sequence: Synthetic oligonucleotide
ccucgguuaugugccuugg

SEQ ID NO: 194405 - RNA, 19 nt, Artificial Sequence
  Description of Artificial Sequence: Synthetic oligonucleotide
guagaacaaucaagcaguu

SEQ ID NO: 194406 - RNA, 19 nt, Artificial Sequence
  Description of Artificial Sequence: Synthetic oligonucleotide
caugcgauucucggcuuua

SEQ ID NO: 194407 - RNA, 19 nt, Artificial Sequence
  Description of Artificial Sequence: Synthetic oligonucleotide
cgauucucggcuuuauugu

SEQ ID NO: 194408 - RNA, 19 nt, Artificial Sequence
  Description of Artificial Sequence: Synthetic oligonucleotide
ggaauacgacugagggaca

SEQ ID NO: 194409 - RNA, 19 nt, Artificial Sequence
  Description of Artificial Sequence: Synthetic oligonucleotide
cucgguuaugugccuuggu

SEQ ID NO: 194410 - RNA, 19 nt, Artificial Sequence
  Description of Artificial Sequence: Synthetic oligonucleotide
gguuaguagaggacauuuu

SEQ ID NO: 194411 - RNA, 19 nt, Artificial Sequence
  Description of Artificial Sequence: Synthetic oligonucleotide
cgggaauacgacugaggga

SEQ ID NO: 194412 - RNA, 19 nt, Artificial Sequence
  Description of Artificial Sequence: Synthetic oligonucleotide
gguuuacuggaggcaaauu

SEQ ID NO: 194413 - RNA, 19 nt, Artificial Sequence
  Description of Artificial Sequence: Synthetic oligonucleotide
ccgcuugcucauuuaauuu

SEQ ID NO: 194414 - RNA, 19 nt, Artificial Sequence
  Description of Artificial Sequence: Synthetic oligonucleotide
cggcauagucguuuugucu

SEQ ID NO: 194415 - RNA, 19 nt, Artificial Sequence
  Description of Artificial Sequence: Synthetic oligonucleotide
ccgagacugagugaauggu

SEQ ID NO: 194416 - RNA, 19 nt, Artificial Sequence
  Description of Artificial Sequence: Synthetic oligonucleotide
gggacccgaaccauagcuu

SEQ ID NO: 194417 - RNA, 19 nt, Artificial Sequence
  Description of Artificial Sequence: Synthetic oligonucleotide
cgggcgaaucucucacaga

SEQ ID NO: 194418 - RNA, 19 nt, Artificial Sequence
  Description of Artificial Sequence: Synthetic oligonucleotide
cccgaaccauagcuuaaau

SEQ ID NO: 194419 - RNA, 19 nt, Artificial Sequence
  Description of Artificial Sequence: Synthetic oligonucleotide
gccaugcgauucucggcuu

SEQ ID NO: 194420 - RNA, 19 nt, Artificial Sequence
  Description of Artificial Sequence: Synthetic oligonucleotide
ccguugaccugaaguggau

SEQ ID NO: 194421 - RNA, 19 nt, Artificial Sequence
  Description of Artificial Sequence: Synthetic oligonucleotide
cagcaugauucgggcgaau

SEQ ID NO: 194422 - RNA, 19 nt, Artificial Sequence
  Description of Artificial Sequence: Synthetic oligonucleotide
ccaugcgauucucggcuuu

SEQ ID NO: 194423 - RNA, 19 nt, Artificial Sequence
  Description of Artificial Sequence: Synthetic oligonucleotide
aaugucauaaauuauacag

SEQ ID NO: 194424 - RNA, 19 nt, Artificial Sequence
  Description of Artificial Sequence: Synthetic oligonucleotide
cuuaauuacagcucaaugc

SEQ ID NO: 194425 - RNA, 19 nt, Artificial Sequence
  Description of Artificial Sequence: Synthetic oligonucleotide
aacauuuagaugcuugcac

SEQ ID NO: 194426 - RNA, 19 nt, Artificial Sequence
  Description of Artificial Sequence: Synthetic oligonucleotide
uauauauauagcuauauau

SEQ ID NO: 194427 - RNA, 19 nt, Artificial Sequence
  Description of Artificial Sequence: Synthetic oligonucleotide
uuaauuacagcucaaugca

SEQ ID NO: 194428 - RNA, 19 nt, Artificial Sequence
  Description of Artificial Sequence: Synthetic oligonucleotide
aagcugacaaaauagcaac

SEQ ID NO: 194429 - RNA, 19 nt, Artificial Sequence
  Description of Artificial Sequence: Synthetic oligonucleotide
acuuaguuaacccaagaac

SEQ ID NO: 194430 - RNA, 19 nt, Artificial Sequence
  Description of Artificial Sequence: Synthetic oligonucleotide
aaccauaacauaaagucac

SEQ ID NO: 194431 - RNA, 19 nt, Artificial Sequence
  Description of Artificial Sequence: Synthetic oligonucleotide
uauauagcuauauauauau

SEQ ID NO: 194432 - RNA, 19 nt, Artificial Sequence
  Description of Artificial Sequence: Synthetic oligonucleotide
ugaaauacuggacagugug

SEQ ID NO: 194433 - RNA, 19 nt, Artificial Sequence
  Description of Artificial Sequence: Synthetic oligonucleotide
uauauauauauauauguau

SEQ ID NO: 194434 - RNA, 19 nt, Artificial Sequence
  Description of Artificial Sequence: Synthetic oligonucleotide
gauguaaggggcuuggagg

SEQ ID NO: 194435 - RNA, 19 nt, Artificial Sequence
  Description of Artificial Sequence: Synthetic oligonucleotide
auauaauauagacaaacca

SEQ ID NO: 194436 - RNA, 19 nt, Artificial Sequence
  Description of Artificial Sequence: Synthetic oligonucleotide
acauuuagaugcuugcacc

SEQ ID NO: 194437 - RNA, 19 nt, Artificial Sequence
  Description of Artificial Sequence: Synthetic oligonucleotide
aauagcaacuaacucaaga

SEQ ID NO: 194438 - RNA, 19 nt, Artificial Sequence
  Description of Artificial Sequence: Synthetic oligonucleotide
ugcaauuauagaaauguca

SEQ ID NO: 194439 - RNA, 19 nt, Artificial Sequence
  Description of Artificial Sequence: Synthetic oligonucleotide
aaugcaacgugguacuuuc

SEQ ID NO: 194440 - RNA, 19 nt, Artificial Sequence
  Description of Artificial Sequence: Synthetic oligonucleotide
uauagcuauauauauauau

SEQ ID NO: 194441 - RNA, 19 nt, Artificial Sequence
  Description of Artificial Sequence: Synthetic oligonucleotide
ucuuuuauauccauaaaau

SEQ ID NO: 194442 - RNA, 19 nt, Artificial Sequence
  Description of Artificial Sequence: Synthetic oligonucleotide
uauauauagcuauauauau

SEQ ID NO: 194443 - RNA, 19 nt, Artificial Sequence
  Description of Artificial Sequence: Synthetic oligonucleotide
auagcaacuaacucaagag

SEQ ID NO: 194444 - RNA, 19 nt, Artificial Sequence
  Description of Artificial Sequence: Synthetic oligonucleotide
cauaaagucacaugaacac

SEQ ID NO: 194445 - RNA, 19 nt, Artificial Sequence
  Description of Artificial Sequence: Synthetic oligonucleotide
aauuacagcucaaugcaac

SEQ ID NO: 194446 - RNA, 19 nt, Artificial Sequence
  Description of Artificial Sequence: Synthetic oligonucleotide
ugucauaaauuauacagaa

SEQ ID NO: 194447 - RNA, 19 nt, Artificial Sequence
  Description of Artificial Sequence: Synthetic oligonucleotide
cacacgaugauguaagggg

SEQ ID NO: 194448 - RNA, 19 nt, Artificial Sequence
  Description of Artificial Sequence: Synthetic oligonucleotide
aagaguugagacacuaacc

SEQ ID NO: 194449 - RNA, 19 nt, Artificial Sequence
  Description of Artificial Sequence: Synthetic oligonucleotide
agguguucguuucucaugc

SEQ ID NO: 194450 - RNA, 19 nt, Artificial Sequence
  Description of Artificial Sequence: Synthetic oligonucleotide
uagcaacuaacucaagagg

SEQ ID NO: 194451 - RNA, 19 nt, Artificial Sequence
  Description of Artificial Sequence: Synthetic oligonucleotide
agaguugagacacuaacca

SEQ ID NO: 194452 - RNA, 19 nt, Artificial Sequence
  Description of Artificial Sequence: Synthetic oligonucleotide
cagacuuuccccuuaagag

SEQ ID NO: 194453 - RNA, 19 nt, Artificial Sequence
  Description of Artificial Sequence: Synthetic oligonucleotide
uauauauauauauguauuu

SEQ ID NO: 194454 - RNA, 19 nt, Artificial Sequence
  Description of Artificial Sequence: Synthetic oligonucleotide
aaaguuggaagcgaguaug

SEQ ID NO: 194455 - RNA, 19 nt, Artificial Sequence
  Description of Artificial Sequence: Synthetic oligonucleotide
aaacaagaauuucuuguca

SEQ ID NO: 194456 - RNA, 19 nt, Artificial Sequence
  Description of Artificial Sequence: Synthetic oligonucleotide
cuaugcauggcaaagagga

SEQ ID NO: 194457 - RNA, 19 nt, Artificial Sequence
  Description of Artificial Sequence: Synthetic oligonucleotide
ugcgaccuuaccaaggccg

SEQ ID NO: 194458 - RNA, 19 nt, Artificial Sequence
  Description of Artificial Sequence: Synthetic oligonucleotide
ucucccaaaauccucuugc

SEQ ID NO: 194459 - RNA, 19 nt, Artificial Sequence
  Description of Artificial Sequence: Synthetic oligonucleotide
ggaaacaugucaaagagcc

SEQ ID NO: 194460 - RNA, 19 nt, Artificial Sequence
  Description of Artificial Sequence: Synthetic oligonucleotide
aagguguucuguccagacc

SEQ ID NO: 194461 - RNA, 19 nt, Artificial Sequence
  Description of Artificial Sequence: Synthetic oligonucleotide
gauuauagucucccugugg

SEQ ID NO: 194462 - RNA, 19 nt, Artificial Sequence
  Description of Artificial Sequence: Synthetic oligonucleotide
acaacuagucccucacugc

SEQ ID NO: 194463 - RNA, 19 nt, Artificial Sequence
  Description of Artificial Sequence: Synthetic oligonucleotide
auuacagcucaaugcaacg

SEQ ID NO: 194464 - RNA, 19 nt, Artificial Sequence
  Description of Artificial Sequence: Synthetic oligonucleotide
uucaggcuaagccugagga

SEQ ID NO: 194465 - RNA, 19 nt, Artificial Sequence
  Description of Artificial Sequence: Synthetic oligonucleotide
cuuuggggcuccuacaugg

SEQ ID NO: 194466 - RNA, 19 nt, Artificial Sequence
  Description of Artificial Sequence: Synthetic oligonucleotide
uagcuauauauauauauau

SEQ ID NO: 194467 - RNA, 19 nt, Artificial Sequence
  Description of Artificial Sequence: Synthetic oligonucleotide
ucccauaaggacaauggca

SEQ ID NO: 194468 - RNA, 19 nt, Artificial Sequence
  Description of Artificial Sequence: Synthetic oligonucleotide
gaauuggggacucaacuug

SEQ ID NO: 194469 - RNA, 19 nt, Artificial Sequence
  Description of Artificial Sequence: Synthetic oligonucleotide
auacuggacagugugacac

SEQ ID NO: 194470 - RNA, 19 nt, Artificial Sequence
  Description of Artificial Sequence: Synthetic oligonucleotide
acugcgaccuuaccaaggc

SEQ ID NO: 194471 - RNA, 19 nt, Artificial Sequence
  Description of Artificial Sequence: Synthetic oligonucleotide
aagucaacaggugcuggcc

SEQ ID NO: 194472 - RNA, 19 nt, Artificial Sequence
  Description of Artificial Sequence: Synthetic oligonucleotide
uuggaagcgaguaugcuaa

SEQ ID NO: 194473 - RNA, 19 nt, Artificial Sequence
  Description of Artificial Sequence: Synthetic oligonucleotide
aaacacgucaccauagcug

SEQ ID NO: 194474 - RNA, 19 nt, Artificial Sequence
  Description of Artificial Sequence: Synthetic oligonucleotide
aaaaccuuccuggugugag

SEQ ID NO: 194475 - RNA, 19 nt, Artificial Sequence
  Description of Artificial Sequence: Synthetic oligonucleotide
gacacuaaccauaacauaa

SEQ ID NO: 194476 - RNA, 19 nt, Artificial Sequence
  Description of Artificial Sequence: Synthetic oligonucleotide
uccaauagccuguauccag

SEQ ID NO: 194477 - RNA, 19 nt, Artificial Sequence
  Description of Artificial Sequence: Synthetic oligonucleotide
aguguacacgauguuauac

SEQ ID NO: 194478 - RNA, 19 nt, Artificial Sequence
  Description of Artificial Sequence: Synthetic oligonucleotide
cuuaguuaacccaagaacu

SEQ ID NO: 194479 - RNA, 19 nt, Artificial Sequence
  Description of Artificial Sequence: Synthetic oligonucleotide
uccggcuucaggcuaagcc

SEQ ID NO: 194480 - RNA, 19 nt, Artificial Sequence
  Description of Artificial Sequence: Synthetic oligonucleotide
aaucucguaguuucucgug

SEQ ID NO: 194481 - RNA, 19 nt, Artificial Sequence
  Description of Artificial Sequence: Synthetic oligonucleotide
aacuaacucaagagguccc

SEQ ID NO: 194482 - RNA, 19 nt, Artificial Sequence
  Description of Artificial Sequence: Synthetic oligonucleotide
aaacuggugagacccgcag

SEQ ID NO: 194483 - RNA, 19 nt, Artificial Sequence
  Description of Artificial Sequence: Synthetic oligonucleotide
cucccuaucugguagcucc

SEQ ID NO: 194484 - RNA, 19 nt, Artificial Sequence
  Description of Artificial Sequence: Synthetic oligonucleotide
aaguuggaagcgaguaugc

SEQ ID NO: 194485 - RNA, 19 nt, Artificial Sequence
  Description of Artificial Sequence: Synthetic oligonucleotide
acuagucccucacugcgac

SEQ ID NO: 194486 - RNA, 19 nt, Artificial Sequence
  Description of Artificial Sequence: Synthetic oligonucleotide
uuccuuaccagcugggugu

SEQ ID NO: 194487 - RNA, 19 nt, Artificial Sequence
  Description of Artificial Sequence: Synthetic oligonucleotide
auagccuguauccagccca

SEQ ID NO: 194488 - RNA, 19 nt, Artificial Sequence
  Description of Artificial Sequence: Synthetic oligonucleotide
agaaggcauagccggaacg

SEQ ID NO: 194489 - RNA, 19 nt, Artificial Sequence
  Description of Artificial Sequence: Synthetic oligonucleotide
uguauccagcccaaucugc

SEQ ID NO: 194490 - RNA, 19 nt, Artificial Sequence
  Description of Artificial Sequence: Synthetic oligonucleotide
ucuacaaacuggugagacc

SEQ ID NO: 194491 - RNA, 19 nt, Artificial Sequence
  Description of Artificial Sequence: Synthetic oligonucleotide
auauauauauauauguauu

SEQ ID NO: 194492 - RNA, 19 nt, Artificial Sequence
  Description of Artificial Sequence: Synthetic oligonucleotide
gaagcgaguaugcuaagga

SEQ ID NO: 194493 - RNA, 19 nt, Artificial Sequence
  Description of Artificial Sequence: Synthetic oligonucleotide
aaaggagacggaagaacuc

SEQ ID NO: 194494 - RNA, 19 nt, Artificial Sequence
  Description of Artificial Sequence: Synthetic oligonucleotide
agccccacuacacugcaac

SEQ ID NO: 194495 - RNA, 19 nt, Artificial Sequence
  Description of Artificial Sequence: Synthetic oligonucleotide
uaacccaagaacucacaug

SEQ ID NO: 194496 - RNA, 19 nt, Artificial Sequence
  Description of Artificial Sequence: Synthetic oligonucleotide
agacuuuccccuuaagaga

SEQ ID NO: 194497 - RNA, 19 nt, Artificial Sequence
  Description of Artificial Sequence: Synthetic oligonucleotide
auauauauagcuauauaua

SEQ ID NO: 194498 - RNA, 19 nt, Artificial Sequence
  Description of Artificial Sequence: Synthetic oligonucleotide
caacuagucccucacugcg

SEQ ID NO: 194499 - RNA, 19 nt, Artificial Sequence
  Description of Artificial Sequence: Synthetic oligonucleotide
auauauauauagcuauaua

SEQ ID NO: 194500 - RNA, 19 nt, Artificial Sequence
  Description of Artificial Sequence: Synthetic oligonucleotide
uggagcgugugcuaaagcu

SEQ ID NO: 194501 - RNA, 19 nt, Artificial Sequence
  Description of Artificial Sequence: Synthetic oligonucleotide
uuaacccaagaacucacau

SEQ ID NO: 194502 - RNA, 19 nt, Artificial Sequence
  Description of Artificial Sequence: Synthetic oligonucleotide
gacccaaucucguaguuuc

SEQ ID NO: 194503 - RNA, 19 nt, Artificial Sequence
  Description of Artificial Sequence: Synthetic oligonucleotide
augcuugcaccccacuccc

SEQ ID NO: 194504 - RNA, 19 nt, Artificial Sequence
  Description of Artificial Sequence: Synthetic oligonucleotide
aauacuggacagugugaca

SEQ ID NO: 194505 - RNA, 19 nt, Artificial Sequence
  Description of Artificial Sequence: Synthetic oligonucleotide
cuauauauauauauaugua

SEQ ID NO: 194506 - RNA, 19 nt, Artificial Sequence
  Description of Artificial Sequence: Synthetic oligonucleotide
gcuauauauauauauaugu

SEQ ID NO: 194507 - RNA, 19 nt, Artificial Sequence
  Description of Artificial Sequence: Synthetic oligonucleotide
aguaugcuaaggaauuggg

SEQ ID NO: 194508 - RNA, 19 nt, Artificial Sequence
  Description of Artificial Sequence: Synthetic oligonucleotide
aaagcaccggauaagggga

SEQ ID NO: 194509 - RNA, 19 nt, Artificial Sequence
  Description of Artificial Sequence: Synthetic oligonucleotide
uggugagccacacgguggg

SEQ ID NO: 194510 - RNA, 19 nt, Artificial Sequence
  Description of Artificial Sequence: Synthetic oligonucleotide
guaauucaggaagaggggc

SEQ ID NO: 194511 - RNA, 19 nt, Artificial Sequence
  Description of Artificial Sequence: Synthetic oligonucleotide
agcuauauauauauauaug

SEQ ID NO: 194512 - RNA, 19 nt, Artificial Sequence
  Description of Artificial Sequence: Synthetic oligonucleotide
agcaacuaacucaagaggu

SEQ ID NO: 194513 - RNA, 19 nt, Artificial Sequence
  Description of Artificial Sequence: Synthetic oligonucleotide
auauauauauauguauuua

SEQ ID NO: 194514 - RNA, 19 nt, Artificial Sequence
  Description of Artificial Sequence: Synthetic oligonucleotide
ugcaacgugguacuuuccu

SEQ ID NO: 194515 - RNA, 19 nt, Artificial Sequence
  Description of Artificial Sequence: Synthetic oligonucleotide
caacuaacucaagaggucc

SEQ ID NO: 194516 - RNA, 19 nt, Artificial Sequence
  Description of Artificial Sequence: Synthetic oligonucleotide
aguuaacccaagaacucac

SEQ ID NO: 194517 - RNA, 19 nt, Artificial Sequence
  Description of Artificial Sequence: Synthetic oligonucleotide
cuuaccaaggccggaaccc

SEQ ID NO: 194518 - RNA, 19 nt, Artificial Sequence
  Description of Artificial Sequence: Synthetic oligonucleotide
agaacaaugggaccacuau

SEQ ID NO: 194519 - RNA, 19 nt, Artificial Sequence
  Description of Artificial Sequence: Synthetic oligonucleotide
uccacaacuagucccucac

SEQ ID NO: 194520 - RNA, 19 nt, Artificial Sequence
  Description of Artificial Sequence: Synthetic oligonucleotide
cacaacuagucccucacug

SEQ ID NO: 194521 - RNA, 19 nt, Artificial Sequence
  Description of Artificial Sequence: Synthetic oligonucleotide
uaauuacagcucaaugcaa

SEQ ID NO: 194522 - RNA, 19 nt, Artificial Sequence
  Description of Artificial Sequence: Synthetic oligonucleotide
gaaggcauagccggaacgc

SEQ ID NO: 194523 - RNA, 19 nt, Artificial Sequence
  Description of Artificial Sequence: Synthetic oligonucleotide
aagcgaguaugcuaaggaa

SEQ ID NO: 194524 - RNA, 19 nt, Artificial Sequence
  Description of Artificial Sequence: Synthetic oligonucleotide
uaguuaacccaagaacuca

SEQ ID NO: 194525 - RNA, 19 nt, Artificial Sequence
  Description of Artificial Sequence: Synthetic oligonucleotide
acacacgaugauguaaggg

SEQ ID NO: 194526 - RNA, 19 nt, Artificial Sequence
  Description of Artificial Sequence: Synthetic oligonucleotide
gagauuauagucucccugu

SEQ ID NO: 194527 - RNA, 19 nt, Artificial Sequence
  Description of Artificial Sequence: Synthetic oligonucleotide
gauaaggggaggaaggaaa

SEQ ID NO: 194528 - RNA, 19 nt, Artificial Sequence
  Description of Artificial Sequence: Synthetic oligonucleotide
guuccucccuaucugguag

SEQ ID NO: 194529 - RNA, 19 nt, Artificial Sequence
  Description of Artificial Sequence: Synthetic oligonucleotide
uuguguaauucaggaagag

SEQ ID NO: 194530 - RNA, 19 nt, Artificial Sequence
  Description of Artificial Sequence: Synthetic oligonucleotide
augucauaaauuauacaga

SEQ ID NO: 194531 - RNA, 19 nt, Artificial Sequence
  Description of Artificial Sequence: Synthetic oligonucleotide
caugcuucguugcuccggg

SEQ ID NO: 194532 - RNA, 19 nt, Artificial Sequence
  Description of Artificial Sequence: Synthetic oligonucleotide
ugcccgucuuaucagagaa

SEQ ID NO: 194533 - RNA, 19 nt, Artificial Sequence
  Description of Artificial Sequence: Synthetic oligonucleotide
auagccggaacgccgggag

SEQ ID NO: 194534 - RNA, 19 nt, Artificial Sequence
  Description of Artificial Sequence: Synthetic oligonucleotide
guguucguuucucaugcag

SEQ ID NO: 194535 - RNA, 19 nt, Artificial Sequence
  Description of Artificial Sequence: Synthetic oligonucleotide
cuuguguaauucaggaaga

SEQ ID NO: 194536 - RNA, 19 nt, Artificial Sequence
  Description of Artificial Sequence: Synthetic oligonucleotide
cccauaaggacaauggcac

SEQ ID NO: 194537 - RNA, 19 nt, Artificial Sequence
  Description of Artificial Sequence: Synthetic oligonucleotide
auagcuauauauauauaua

SEQ ID NO: 194538 - RNA, 19 nt, Artificial Sequence
  Description of Artificial Sequence: Synthetic oligonucleotide
ggucauagguuacuggggc

SEQ ID NO: 194539 - RNA, 19 nt, Artificial Sequence
  Description of Artificial Sequence: Synthetic oligonucleotide
gucuguacuccaugcuucg

SEQ ID NO: 194540 - RNA, 19 nt, Artificial Sequence
  Description of Artificial Sequence: Synthetic oligonucleotide
ugguagucuguacuccaug

SEQ ID NO: 194541 - RNA, 19 nt, Artificial Sequence
  Description of Artificial Sequence: Synthetic oligonucleotide
aaucagacuuuccccuuaa

SEQ ID NO: 194542 - RNA, 19 nt, Artificial Sequence
  Description of Artificial Sequence: Synthetic oligonucleotide
gauguuauacagggugaug

SEQ ID NO: 194543 - RNA, 19 nt, Artificial Sequence
  Description of Artificial Sequence: Synthetic oligonucleotide
gguagucuguacuccaugc

SEQ ID NO: 194544 - RNA, 19 nt, Artificial Sequence
  Description of Artificial Sequence: Synthetic oligonucleotide
acuacacugcaaccuaccu

SEQ ID NO: 194545 - RNA, 19 nt, Artificial Sequence
  Description of Artificial Sequence: Synthetic oligonucleotide
gagggugcccgucuuauca

SEQ ID NO: 194546 - RNA, 19 nt, Artificial Sequence
  Description of Artificial Sequence: Synthetic oligonucleotide
cuaacaaauaaggaguucu

SEQ ID NO: 194547 - RNA, 19 nt, Artificial Sequence
  Description of Artificial Sequence: Synthetic oligonucleotide
gugaccgugagauguggcc

SEQ ID NO: 194548 - RNA, 19 nt, Artificial Sequence
  Description of Artificial Sequence: Synthetic oligonucleotide
acugguagucuguacucca

SEQ ID NO: 194549 - RNA, 19 nt, Artificial Sequence
  Description of Artificial Sequence: Synthetic oligonucleotide
guacacgauguuauacagg

SEQ ID NO: 194550 - RNA, 19 nt, Artificial Sequence
  Description of Artificial Sequence: Synthetic oligonucleotide
gaaggugaccgugagaugu

SEQ ID NO: 194551 - RNA, 19 nt, Artificial Sequence
  Description of Artificial Sequence: Synthetic oligonucleotide
cacuacacugcaaccuacc

SEQ ID NO: 194552 - RNA, 19 nt, Artificial Sequence
  Description of Artificial Sequence: Synthetic oligonucleotide
ugaccgugagauguggccc

SEQ ID NO: 194553 - RNA, 19 nt, Artificial Sequence
  Description of Artificial Sequence: Synthetic oligonucleotide
uuacucugcugcuaacaaa

SEQ ID NO: 194554 - RNA, 19 nt, Artificial Sequence
  Description of Artificial Sequence: Synthetic oligonucleotide
gguggacccaaucucguag

SEQ ID NO: 194555 - RNA, 19 nt, Artificial Sequence
  Description of Artificial Sequence: Synthetic oligonucleotide
cagaaauuggaauuuuaua

SEQ ID NO: 194556 - RNA, 19 nt, Artificial Sequence
  Description of Artificial Sequence: Synthetic oligonucleotide
auauauagcuauauauaua

SEQ ID NO: 194557 - RNA, 19 nt, Artificial Sequence
  Description of Artificial Sequence: Synthetic oligonucleotide
ucaagacuuccccucccac

SEQ ID NO: 194558 - RNA, 19 nt, Artificial Sequence
  Description of Artificial Sequence: Synthetic oligonucleotide
augaccagcgauguggcca

SEQ ID NO: 194559 - RNA, 19 nt, Artificial Sequence
  Description of Artificial Sequence: Synthetic oligonucleotide
cuaagccugaggaagcgga

SEQ ID NO: 194560 - RNA, 19 nt, Artificial Sequence
  Description of Artificial Sequence: Synthetic oligonucleotide
cuuaccagcuggguguagc

SEQ ID NO: 194561 - RNA, 19 nt, Artificial Sequence
  Description of Artificial Sequence: Synthetic oligonucleotide
aguugagacacuaaccaua

SEQ ID NO: 194562 - RNA, 19 nt, Artificial Sequence
  Description of Artificial Sequence: Synthetic oligonucleotide
agaggcuugggucccaaaa

SEQ ID NO: 194563 - RNA, 19 nt, Artificial Sequence
  Description of Artificial Sequence: Synthetic oligonucleotide
cacugcgaccuuaccaagg

SEQ ID NO: 194564 - RNA, 19 nt, Artificial Sequence
  Description of Artificial Sequence: Synthetic oligonucleotide
aacuguggccaaaagggau

SEQ ID NO: 194565 - RNA, 19 nt, Artificial Sequence
  Description of Artificial Sequence: Synthetic oligonucleotide
cuacacugcaaccuaccuc

SEQ ID NO: 194566 - RNA, 19 nt, Artificial Sequence
  Description of Artificial Sequence: Synthetic oligonucleotide
uucccggcgugauacauuc

SEQ ID NO: 194567 - RNA, 19 nt, Artificial Sequence
  Description of Artificial Sequence: Synthetic oligonucleotide
aggacugggagcgaagugu

SEQ ID NO: 194568 - RNA, 19 nt, Artificial Sequence
  Description of Artificial Sequence: Synthetic oligonucleotide
agcgaaguguacacgaugu

SEQ ID NO: 194569 - RNA, 19 nt, Artificial Sequence
  Description of Artificial Sequence: Synthetic oligonucleotide
ggagagauccggcuucagg

SEQ ID NO: 194570 - RNA, 19 nt, Artificial Sequence
  Description of Artificial Sequence: Synthetic oligonucleotide
gaaggaaaguuggaagcga

SEQ ID NO: 194571 - RNA, 19 nt, Artificial Sequence
  Description of Artificial Sequence: Synthetic oligonucleotide
acuacacuucaugcucagc

SEQ ID NO: 194572 - RNA, 19 nt, Artificial Sequence
  Description of Artificial Sequence: Synthetic oligonucleotide
uagucccucacugcgaccu

SEQ ID NO: 194573 - RNA, 19 nt, Artificial Sequence
  Description of Artificial Sequence: Synthetic oligonucleotide
ggacacacgaugauguaag

SEQ ID NO: 194574 - RNA, 19 nt, Artificial Sequence
  Description of Artificial Sequence: Synthetic oligonucleotide
ugcuaaggaauuggggacu

SEQ ID NO: 194575 - RNA, 19 nt, Artificial Sequence
  Description of Artificial Sequence: Synthetic oligonucleotide
gguagggcaucccagugug

SEQ ID NO: 194576 - RNA, 19 nt, Artificial Sequence
  Description of Artificial Sequence: Synthetic oligonucleotide
cuguauccagcccaaucug

SEQ ID NO: 194577 - RNA, 19 nt, Artificial Sequence
  Description of Artificial Sequence: Synthetic oligonucleotide
agacacuaaccauaacaua

SEQ ID NO: 194578 - RNA, 19 nt, Artificial Sequence
  Description of Artificial Sequence: Synthetic oligonucleotide
auuauacagaauguuccuu

SEQ ID NO: 194579 - RNA, 19 nt, Artificial Sequence
  Description of Artificial Sequence: Synthetic oligonucleotide
aaguguacacgauguuaua

SEQ ID NO: 194580 - RNA, 19 nt, Artificial Sequence
  Description of Artificial Sequence: Synthetic oligonucleotide
uuaccaaggccggaacccc

SEQ ID NO: 194581 - RNA, 19 nt, Artificial Sequence
  Description of Artificial Sequence: Synthetic oligonucleotide
accggauaaggggaggaag

SEQ ID NO: 194582 - RNA, 19 nt, Artificial Sequence
  Description of Artificial Sequence: Synthetic oligonucleotide
ucacugcgaccuuaccaag

SEQ ID NO: 194583 - RNA, 19 nt, Artificial Sequence
  Description of Artificial Sequence: Synthetic oligonucleotide
uuggggacucaacuuggaa

SEQ ID NO: 194584 - RNA, 19 nt, Artificial Sequence
  Description of Artificial Sequence: Synthetic oligonucleotide
gaagcggaaggcaaccaca

SEQ ID NO: 194585 - RNA, 19 nt, Artificial Sequence
  Description of Artificial Sequence: Synthetic oligonucleotide
agugacugacaaaggacug

SEQ ID NO: 194586 - RNA, 19 nt, Artificial Sequence
  Description of Artificial Sequence: Synthetic oligonucleotide
auacagaauguuccuuaau

SEQ ID NO: 194587 - RNA, 19 nt, Artificial Sequence
  Description of Artificial Sequence: Synthetic oligonucleotide
ccaaucucguaguuucucg

SEQ ID NO: 194588 - RNA, 19 nt, Artificial Sequence
  Description of Artificial Sequence: Synthetic oligonucleotide
cagaggauuaaaggagaag

SEQ ID NO: 194589 - RNA, 19 nt, Artificial Sequence
  Description of Artificial Sequence: Synthetic oligonucleotide
gaaguguacacgauguuau

SEQ ID NO: 194590 - RNA, 19 nt, Artificial Sequence
  Description of Artificial Sequence: Synthetic oligonucleotide
gagcacuuguugaacacca

SEQ ID NO: 194591 - RNA, 19 nt, Artificial Sequence
  Description of Artificial Sequence: Synthetic oligonucleotide
ugaccagcgauguggccac

SEQ ID NO: 194592 - RNA, 19 nt, Artificial Sequence
  Description of Artificial Sequence: Synthetic oligonucleotide
aguaaacagcgaggcugcc

SEQ ID NO: 194593 - RNA, 19 nt, Artificial Sequence
  Description of Artificial Sequence: Synthetic oligonucleotide
gccguggugagcacgaugg

SEQ ID NO: 194594 - RNA, 19 nt, Artificial Sequence
  Description of Artificial Sequence: Synthetic oligonucleotide
agggguggacccaaucucg

SEQ ID NO: 194595 - RNA, 19 nt, Artificial Sequence
  Description of Artificial Sequence: Synthetic oligonucleotide
gucacaugaacaccuccuc

SEQ ID NO: 194596 - RNA, 19 nt, Artificial Sequence
  Description of Artificial Sequence: Synthetic oligonucleotide
caggacuuaguuaacccaa

SEQ ID NO: 194597 - RNA, 19 nt, Artificial Sequence
  Description of Artificial Sequence: Synthetic oligonucleotide
agcgaguaugcuaaggaau

SEQ ID NO: 194598 - RNA, 19 nt, Artificial Sequence
  Description of Artificial Sequence: Synthetic oligonucleotide
uaagccugaggaagcggaa

SEQ ID NO: 194599 - RNA, 19 nt, Artificial Sequence
  Description of Artificial Sequence: Synthetic oligonucleotide
uguggccauugauggagca

SEQ ID NO: 194600 - RNA, 19 nt, Artificial Sequence
  Description of Artificial Sequence: Synthetic oligonucleotide
caauuauagaaaugucaua

SEQ ID NO: 194601 - RNA, 19 nt, Artificial Sequence
  Description of Artificial Sequence: Synthetic oligonucleotide
aaggacaauggcacccuga

SEQ ID NO: 194602 - RNA, 19 nt, Artificial Sequence
  Description of Artificial Sequence: Synthetic oligonucleotide
uugcuaugcauggcaaaga

SEQ ID NO: 194603 - RNA, 19 nt, Artificial Sequence
  Description of Artificial Sequence: Synthetic oligonucleotide
guaaacagcgaggcugccc

SEQ ID NO: 194604 - RNA, 19 nt, Artificial Sequence
  Description of Artificial Sequence: Synthetic oligonucleotide
acuaacucaagaggucccu

SEQ ID NO: 194605 - RNA, 19 nt, Artificial Sequence
  Description of Artificial Sequence: Synthetic oligonucleotide
cuguaucccauaaggacaa

SEQ ID NO: 194606 - RNA, 19 nt, Artificial Sequence
  Description of Artificial Sequence: Synthetic oligonucleotide
agguagggcaucccagugu

SEQ ID NO: 194607 - RNA, 19 nt, Artificial Sequence
  Description of Artificial Sequence: Synthetic oligonucleotide
ucgauccagcuggagcugg

SEQ ID NO: 194608 - RNA, 19 nt, Artificial Sequence
  Description of Artificial Sequence: Synthetic oligonucleotide
uguucuugccagacauaau

SEQ ID NO: 194609 - RNA, 19 nt, Artificial Sequence
  Description of Artificial Sequence: Synthetic oligonucleotide
cacuacacuucaugcucag

SEQ ID NO: 194610 - RNA, 19 nt, Artificial Sequence
  Description of Artificial Sequence: Synthetic oligonucleotide
caguuuccggacacuggcc

SEQ ID NO: 194611 - RNA, 19 nt, Artificial Sequence
  Description of Artificial Sequence: Synthetic oligonucleotide
gcucaaugcaacgugguac

SEQ ID NO: 194612 - RNA, 19 nt, Artificial Sequence
  Description of Artificial Sequence: Synthetic oligonucleotide
ugucggagagauccggcuu

SEQ ID NO: 194613 - RNA, 19 nt, Artificial Sequence
  Description of Artificial Sequence: Synthetic oligonucleotide
ccuacauggaacauuuaga

SEQ ID NO: 194614 - RNA, 19 nt, Artificial Sequence
  Description of Artificial Sequence: Synthetic oligonucleotide
aggcauagccggaacgccg

SEQ ID NO: 194615 - RNA, 19 nt, Artificial Sequence
  Description of Artificial Sequence: Synthetic oligonucleotide
gaaaguuggaagcgaguau

SEQ ID NO: 194616 - RNA, 19 nt, Artificial Sequence
  Description of Artificial Sequence: Synthetic oligonucleotide
guaaggggcuuggaggccc

SEQ ID NO: 194617 - RNA, 19 nt, Artificial Sequence
  Description of Artificial Sequence: Synthetic oligonucleotide
uguaaggggcuuggaggcc

SEQ ID NO: 194618 - RNA, 19 nt, Artificial Sequence
  Description of Artificial Sequence: Synthetic oligonucleotide
agggugcccgucuuaucag

SEQ ID NO: 194619 - RNA, 19 nt, Artificial Sequence
  Description of Artificial Sequence: Synthetic oligonucleotide
uggcuucccggcgugauac

SEQ ID NO: 194620 - RNA, 19 nt, Artificial Sequence
  Description of Artificial Sequence: Synthetic oligonucleotide
aggacuuaguuaacccaag

SEQ ID NO: 194621 - RNA, 19 nt, Artificial Sequence
  Description of Artificial Sequence: Synthetic oligonucleotide
ggaagcgaguaugcuaagg

SEQ ID NO: 194622 - RNA, 19 nt, Artificial Sequence
  Description of Artificial Sequence: Synthetic oligonucleotide
cagcaggacuuaguuaacc

SEQ ID NO: 194623 - RNA, 19 nt, Artificial Sequence
  Description of Artificial Sequence: Synthetic oligonucleotide
agcgauguggccacaguga

SEQ ID NO: 194624 - RNA, 19 nt, Artificial Sequence
  Description of Artificial Sequence: Synthetic oligonucleotide
ucucguaguuucucguguu

SEQ ID NO: 194625 - RNA, 19 nt, Artificial Sequence
  Description of Artificial Sequence: Synthetic oligonucleotide
acgauguuauacaggguga

SEQ ID NO: 194626 - RNA, 19 nt, Artificial Sequence
  Description of Artificial Sequence: Synthetic oligonucleotide
aacuagucccucacugcga

SEQ ID NO: 194627 - RNA, 19 nt, Artificial Sequence
  Description of Artificial Sequence: Synthetic oligonucleotide
cuccgggacauccugguca

SEQ ID NO: 194628 - RNA, 19 nt, Artificial Sequence
  Description of Artificial Sequence: Synthetic oligonucleotide
aguccgggucuucagcccu

SEQ ID NO: 194629 - RNA, 19 nt, Artificial Sequence
  Description of Artificial Sequence: Synthetic oligonucleotide
cagggguggacccaaucuc

SEQ ID NO: 194630 - RNA, 19 nt, Artificial Sequence
  Description of Artificial Sequence: Synthetic oligonucleotide
gucggagagauccggcuuc

SEQ ID NO: 194631 - RNA, 19 nt, Artificial Sequence
  Description of Artificial Sequence: Synthetic oligonucleotide
gcuaugcauggcaaagagg

SEQ ID NO: 194632 - RNA, 19 nt, Artificial Sequence
  Description of Artificial Sequence: Synthetic oligonucleotide
gucauagguuacuggggca

SEQ ID NO: 194633 - RNA, 19 nt, Artificial Sequence
  Description of Artificial Sequence: Synthetic oligonucleotide
augaaauacuggacagugu

SEQ ID NO: 194634 - RNA, 19 nt, Artificial Sequence
  Description of Artificial Sequence: Synthetic oligonucleotide
cucaaugcaacgugguacu

SEQ ID NO: 194635 - RNA, 19 nt, Artificial Sequence
  Description of Artificial Sequence: Synthetic oligonucleotide
agcggaccgugucggagag

SEQ ID NO: 194636 - RNA, 19 nt, Artificial Sequence
  Description of Artificial Sequence: Synthetic oligonucleotide
ugcaaccuaccuccagcuc

SEQ ID NO: 194637 - RNA, 19 nt, Artificial Sequence
  Description of Artificial Sequence: Synthetic oligonucleotide
aggacacacgaugauguaa

SEQ ID NO: 194638 - RNA, 19 nt, Artificial Sequence
  Description of Artificial Sequence: Synthetic oligonucleotide
guauccagcccaaucugca

SEQ ID NO: 194639 - RNA, 19 nt, Artificial Sequence
  Description of Artificial Sequence: Synthetic oligonucleotide
gggucauagguuacugggg

SEQ ID NO: 194640 - RNA, 19 nt, Artificial Sequence
  Description of Artificial Sequence: Synthetic oligonucleotide
ggcgugauacauucuugug

SEQ ID NO: 194641 - RNA, 19 nt, Artificial Sequence
  Description of Artificial Sequence: Synthetic oligonucleotide
aagcaccggauaaggggag

SEQ ID NO: 194642 - RNA, 19 nt, Artificial Sequence
  Description of Artificial Sequence: Synthetic oligonucleotide
gcaaguggucaccuggcug

SEQ ID NO: 194643 - RNA, 19 nt, Artificial Sequence
  Description of Artificial Sequence: Synthetic oligonucleotide
cagugugugccagucuccc

SEQ ID NO: 194644 - RNA, 19 nt, Artificial Sequence
  Description of Artificial Sequence: Synthetic oligonucleotide
agcucaaugcaacguggua

SEQ ID NO: 194645 - RNA, 19 nt, Artificial Sequence
  Description of Artificial Sequence: Synthetic oligonucleotide
gucccaaaacaagaauuuc

SEQ ID NO: 194646 - RNA, 19 nt, Artificial Sequence
  Description of Artificial Sequence: Synthetic oligonucleotide
cuggagcgugugcuaaagc

SEQ ID NO: 194647 - RNA, 19 nt, Artificial Sequence
  Description of Artificial Sequence: Synthetic oligonucleotide
cugagaacaaugggaccac

SEQ ID NO: 194648 - RNA, 19 nt, Artificial Sequence
  Description of Artificial Sequence: Synthetic oligonucleotide
gccagacauaaugagcucc

SEQ ID NO: 194649 - RNA, 19 nt, Artificial Sequence
  Description of Artificial Sequence: Synthetic oligonucleotide
ucguaguuucucguguuuu

SEQ ID NO: 194650 - RNA, 19 nt, Artificial Sequence
  Description of Artificial Sequence: Synthetic oligonucleotide
aaaccggaacugguuugga

SEQ ID NO: 194651 - RNA, 19 nt, Artificial Sequence
  Description of Artificial Sequence: Synthetic oligonucleotide
aggugaccgugagaugugg

SEQ ID NO: 194652 - RNA, 19 nt, Artificial Sequence
  Description of Artificial Sequence: Synthetic oligonucleotide
ugagaacaaugggaccacu

SEQ ID NO: 194653 - RNA, 19 nt, Artificial Sequence
  Description of Artificial Sequence: Synthetic oligonucleotide
ggagcgugugcuaaagcug

SEQ ID NO: 194654 - RNA, 19 nt, Artificial Sequence
  Description of Artificial Sequence: Synthetic oligonucleotide
cugguagcuccuguauccc

SEQ ID NO: 194655 - RNA, 19 nt, Artificial Sequence
  Description of Artificial Sequence: Synthetic oligonucleotide
ucccucacugcgaccuuac

SEQ ID NO: 194656 - RNA, 19 nt, Artificial Sequence
  Description of Artificial Sequence: Synthetic oligonucleotide
gaguugagacacuaaccau

SEQ ID NO: 194657 - RNA, 19 nt, Artificial Sequence
  Description of Artificial Sequence: Synthetic oligonucleotide
caguccgggucuucagccc

SEQ ID NO: 194658 - RNA, 19 nt, Artificial Sequence
  Description of Artificial Sequence: Synthetic oligonucleotide
ggcauuccccacaaaccgg

SEQ ID NO: 194659 - RNA, 19 nt, Artificial Sequence
  Description of Artificial Sequence: Synthetic oligonucleotide
acucgccgcaugcagcggu

SEQ ID NO: 194660 - RNA, 19 nt, Artificial Sequence
  Description of Artificial Sequence: Synthetic oligonucleotide
gagaacaaugggaccacua

SEQ ID NO: 194661 - RNA, 19 nt, Artificial Sequence
  Description of Artificial Sequence: Synthetic oligonucleotide
auauagcuauauauauaua

SEQ ID NO: 194662 - RNA, 19 nt, Artificial Sequence
  Description of Artificial Sequence: Synthetic oligonucleotide
augcaacgugguacuuucc

SEQ ID NO: 194663 - RNA, 19 nt, Artificial Sequence
  Description of Artificial Sequence: Synthetic oligonucleotide
agcaccggauaaggggagg

SEQ ID NO: 194664 - RNA, 19 nt, Artificial Sequence
  Description of Artificial Sequence: Synthetic oligonucleotide
aggaaaguuggaagcgagu

SEQ ID NO: 194665 - RNA, 19 nt, Artificial Sequence
  Description of Artificial Sequence: Synthetic oligonucleotide
ggcauagccggaacgccgg

SEQ ID NO: 194666 - RNA, 19 nt, Artificial Sequence
  Description of Artificial Sequence: Synthetic oligonucleotide
caaacuggugagacccgca

SEQ ID NO: 194667 - RNA, 19 nt, Artificial Sequence
  Description of Artificial Sequence: Synthetic oligonucleotide
ccauaaggacaauggcacc

SEQ ID NO: 194668 - RNA, 19 nt, Artificial Sequence
  Description of Artificial Sequence: Synthetic oligonucleotide
guagucuguacuccaugcu

SEQ ID NO: 194669 - RNA, 19 nt, Artificial Sequence
  Description of Artificial Sequence: Synthetic oligonucleotide
uggacccaaucucguaguu

SEQ ID NO: 194670 - RNA, 19 nt, Artificial Sequence
  Description of Artificial Sequence: Synthetic oligonucleotide
cugcgaccuuaccaaggcc

SEQ ID NO: 194671 - RNA, 19 nt, Artificial Sequence
  Description of Artificial Sequence: Synthetic oligonucleotide
cuggggaauaggaguaaaa

SEQ ID NO: 194672 - RNA, 19 nt, Artificial Sequence
  Description of Artificial Sequence: Synthetic oligonucleotide
ucguucaggguggugggua

SEQ ID NO: 194673 - RNA, 19 nt, Artificial Sequence
  Description of Artificial Sequence: Synthetic oligonucleotide
ccggaacugguuuggaaac

SEQ ID NO: 194674 - RNA, 19 nt, Artificial Sequence
  Description of Artificial Sequence: Synthetic oligonucleotide
ccuuaccaaggccggaacc

SEQ ID NO: 194675 - RNA, 19 nt, Artificial Sequence
  Description of Artificial Sequence: Synthetic oligonucleotide
cugcggggagggaagacca

SEQ ID NO: 194676 - RNA, 19 nt, Artificial Sequence
  Description of Artificial Sequence: Synthetic oligonucleotide
gcaacgugguacuuuccuc

SEQ ID NO: 194677 - RNA, 19 nt, Artificial Sequence
  Description of Artificial Sequence: Synthetic oligonucleotide
gcgugauacauucuugugu

SEQ ID NO: 194678 - RNA, 19 nt, Artificial Sequence
  Description of Artificial Sequence: Synthetic oligonucleotide
gcgauguggccacagugac

SEQ ID NO: 194679 - RNA, 19 nt, Artificial Sequence
  Description of Artificial Sequence: Synthetic oligonucleotide
caaucucguaguuucucgu

SEQ ID NO: 194680 - RNA, 19 nt, Artificial Sequence
  Description of Artificial Sequence: Synthetic oligonucleotide
uccugcgcagacucucgau

SEQ ID NO: 194681 - RNA, 19 nt, Artificial Sequence
  Description of Artificial Sequence: Synthetic oligonucleotide
uccucccuaucugguagcu

SEQ ID NO: 194682 - RNA, 19 nt, Artificial Sequence
  Description of Artificial Sequence: Synthetic oligonucleotide
auuggggacucaacuugga

SEQ ID NO: 194683 - RNA, 19 nt, Artificial Sequence
  Description of Artificial Sequence: Synthetic oligonucleotide
gugauacauucuuguguaa

SEQ ID NO: 194684 - RNA, 19 nt, Artificial Sequence
  Description of Artificial Sequence: Synthetic oligonucleotide
guccaauagccuguaucca

SEQ ID NO: 194685 - RNA, 19 nt, Artificial Sequence
  Description of Artificial Sequence: Synthetic oligonucleotide
agcccaaucugcacacuga

SEQ ID NO: 194686 - RNA, 19 nt, Artificial Sequence
  Description of Artificial Sequence: Synthetic oligonucleotide
cuggugagacccgcagggc

SEQ ID NO: 194687 - RNA, 19 nt, Artificial Sequence
  Description of Artificial Sequence: Synthetic oligonucleotide
cccaagacaucaaacacgu

SEQ ID NO: 194688 - RNA, 19 nt, Artificial Sequence
  Description of Artificial Sequence: Synthetic oligonucleotide
ggugcccgucuuaucagag

SEQ ID NO: 194689 - RNA, 19 nt, Artificial Sequence
  Description of Artificial Sequence: Synthetic oligonucleotide
gccuguauccagcccaauc

SEQ ID NO: 194690 - RNA, 19 nt, Artificial Sequence
  Description of Artificial Sequence: Synthetic oligonucleotide
gcgaccuuaccaaggccgg

SEQ ID NO: 194691 - RNA, 19 nt, Artificial Sequence
  Description of Artificial Sequence: Synthetic oligonucleotide
cuuguaaacuguggccaaa

SEQ ID NO: 194692 - RNA, 19 nt, Artificial Sequence
  Description of Artificial Sequence: Synthetic oligonucleotide
gagacccgcagggcagucc

SEQ ID NO: 194693 - RNA, 19 nt, Artificial Sequence
  Description of Artificial Sequence: Synthetic oligonucleotide
gucauaaauuauacagaau

SEQ ID NO: 194694 - RNA, 19 nt, Artificial Sequence
  Description of Artificial Sequence: Synthetic oligonucleotide
acucucgauccagcuggag

SEQ ID NO: 194695 - RNA, 19 nt, Artificial Sequence
  Description of Artificial Sequence: Synthetic oligonucleotide
ccuguauccagcccaaucu

SEQ ID NO: 194696 - RNA, 19 nt, Artificial Sequence
  Description of Artificial Sequence: Synthetic oligonucleotide
gcuggagcgugugcuaaag

SEQ ID NO: 194697 - RNA, 19 nt, Artificial Sequence
  Description of Artificial Sequence: Synthetic oligonucleotide
cucgccgcaugcagcggug

SEQ ID NO: 194698 - RNA, 19 nt, Artificial Sequence
  Description of Artificial Sequence: Synthetic oligonucleotide
gauccggcuucaggcuaag

SEQ ID NO: 194699 - RNA, 19 nt, Artificial Sequence
  Description of Artificial Sequence: Synthetic oligonucleotide
cccgucuuaucagagaaga

SEQ ID NO: 194700 - RNA, 19 nt, Artificial Sequence
  Description of Artificial Sequence: Synthetic oligonucleotide
gggacuguuggcacuguca

SEQ ID NO: 194701 - RNA, 19 nt, Artificial Sequence
  Description of Artificial Sequence: Synthetic oligonucleotide
gacugggagcgaaguguac

SEQ ID NO: 194702 - RNA, 19 nt, Artificial Sequence
  Description of Artificial Sequence: Synthetic oligonucleotide
gugcccgucuuaucagaga

SEQ ID NO: 194703 - RNA, 19 nt, Artificial Sequence
  Description of Artificial Sequence: Synthetic oligonucleotide
cucgauccagcuggagcug

SEQ ID NO: 194704 - RNA, 19 nt, Artificial Sequence
  Description of Artificial Sequence: Synthetic oligonucleotide
gcugcggggagggaagacc

SEQ ID NO: 194705 - RNA, 19 nt, Artificial Sequence
  Description of Artificial Sequence: Synthetic oligonucleotide
guggacccaaucucguagu

SEQ ID NO: 194706 - RNA, 19 nt, Artificial Sequence
  Description of Artificial Sequence: Synthetic oligonucleotide
cccucaagacuuccccucc

SEQ ID NO: 194707 - RNA, 19 nt, Artificial Sequence
  Description of Artificial Sequence: Synthetic oligonucleotide
auggggagccagguugaga

SEQ ID NO: 194708 - RNA, 19 nt, Artificial Sequence
  Description of Artificial Sequence: Synthetic oligonucleotide
cacaaaccggaacugguuu

SEQ ID NO: 194709 - RNA, 19 nt, Artificial Sequence
  Description of Artificial Sequence: Synthetic oligonucleotide
ccuuucagucccaccccag

SEQ ID NO: 194710 - RNA, 19 nt, Artificial Sequence
  Description of Artificial Sequence: Synthetic oligonucleotide
ccaugcuucguugcuccgg

SEQ ID NO: 194711 - RNA, 19 nt, Artificial Sequence
  Description of Artificial Sequence: Synthetic oligonucleotide
caaccuaccuccagcuccu

SEQ ID NO: 194712 - RNA, 19 nt, Artificial Sequence
  Description of Artificial Sequence: Synthetic oligonucleotide
caugugcccuggggaagcc

SEQ ID NO: 194713 - RNA, 19 nt, Artificial Sequence
  Description of Artificial Sequence: Synthetic oligonucleotide
ggugaccgugagauguggc

SEQ ID NO: 194714 - RNA, 19 nt, Artificial Sequence
  Description of Artificial Sequence: Synthetic oligonucleotide
gguuccacaacuagucccu

SEQ ID NO: 194715 - RNA, 19 nt, Artificial Sequence
  Description of Artificial Sequence: Synthetic oligonucleotide
ccucaagacuuccccuccc

SEQ ID NO: 194716 - RNA, 19 nt, Artificial Sequence
  Description of Artificial Sequence: Synthetic oligonucleotide
uacggccucugcagguguu

SEQ ID NO: 194717 - RNA, 19 nt, Artificial Sequence
  Description of Artificial Sequence: Synthetic oligonucleotide
gcuaaggaauuggggacuc

SEQ ID NO: 194718 - RNA, 19 nt, Artificial Sequence
  Description of Artificial Sequence: Synthetic oligonucleotide
uccggacacuggcccugug

SEQ ID NO: 194719 - RNA, 19 nt, Artificial Sequence
  Description of Artificial Sequence: Synthetic oligonucleotide
agauccggcuucaggcuaa

SEQ ID NO: 194720 - RNA, 19 nt, Artificial Sequence
  Description of Artificial Sequence: Synthetic oligonucleotide
cccacucgccgcaugcagc

SEQ ID NO: 194721 - RNA, 19 nt, Artificial Sequence
  Description of Artificial Sequence: Synthetic oligonucleotide
uccuuaccagcugggugua

SEQ ID NO: 194722 - RNA, 19 nt, Artificial Sequence
  Description of Artificial Sequence: Synthetic oligonucleotide
ggacucaacuuggaaucca

SEQ ID NO: 194723 - RNA, 19 nt, Artificial Sequence
  Description of Artificial Sequence: Synthetic oligonucleotide
ccccucagcacuacacuuc

SEQ ID NO: 194724 - RNA, 19 nt, Artificial Sequence
  Description of Artificial Sequence: Synthetic oligonucleotide
ucccggcgugauacauucu

SEQ ID NO: 194725 - RNA, 19 nt, Artificial Sequence
  Description of Artificial Sequence: Synthetic oligonucleotide
caccagcaggacuuaguua

SEQ ID NO: 194726 - RNA, 19 nt, Artificial Sequence
  Description of Artificial Sequence: Synthetic oligonucleotide
ccggcgugauacauucuug

SEQ ID NO: 194727 - RNA, 19 nt, Artificial Sequence
  Description of Artificial Sequence: Synthetic oligonucleotide
gcccacucgccgcaugcag

SEQ ID NO: 194728 - RNA, 19 nt, Artificial Sequence
  Description of Artificial Sequence: Synthetic oligonucleotide
cagcucaaugcaacguggu

SEQ ID NO: 194729 - RNA, 19 nt, Artificial Sequence
  Description of Artificial Sequence: Synthetic oligonucleotide
ucgccgcaugcagcggugc

SEQ ID NO: 194730 - RNA, 19 nt, Artificial Sequence
  Description of Artificial Sequence: Synthetic oligonucleotide
ccuuacucugcugcuaaca

SEQ ID NO: 194731 - RNA, 19 nt, Artificial Sequence
  Description of Artificial Sequence: Synthetic oligonucleotide
cauuccccacaaaccggaa

SEQ ID NO: 194732 - RNA, 19 nt, Artificial Sequence
  Description of Artificial Sequence: Synthetic oligonucleotide
cgugugcuaaagcuggaca

SEQ ID NO: 194733 - RNA, 19 nt, Artificial Sequence
  Description of Artificial Sequence: Synthetic oligonucleotide
cauagccggaacgccggga

SEQ ID NO: 194734 - RNA, 19 nt, Artificial Sequence
  Description of Artificial Sequence: Synthetic oligonucleotide
cccaaucucguaguuucuc

SEQ ID NO: 194735 - RNA, 19 nt, Artificial Sequence
  Description of Artificial Sequence: Synthetic oligonucleotide
gacucucgauccagcugga

SEQ ID NO: 194736 - RNA, 19 nt, Artificial Sequence
  Description of Artificial Sequence: Synthetic oligonucleotide
uuccggacacuggcccugu

SEQ ID NO: 194737 - RNA, 19 nt, Artificial Sequence
  Description of Artificial Sequence: Synthetic oligonucleotide
uucguugcuccgggacauc

SEQ ID NO: 194738 - RNA, 19 nt, Artificial Sequence
  Description of Artificial Sequence: Synthetic oligonucleotide
gguagggucauagguuacu

SEQ ID NO: 194739 - RNA, 19 nt, Artificial Sequence
  Description of Artificial Sequence: Synthetic oligonucleotide
cgaguaugcuaaggaauug

SEQ ID NO: 194740 - RNA, 19 nt, Artificial Sequence
  Description of Artificial Sequence: Synthetic oligonucleotide
ggaacugguuuggaaacau

SEQ ID NO: 194741 - RNA, 19 nt, Artificial Sequence
  Description of Artificial Sequence: Synthetic oligonucleotide
gcggggagggaagaccagc

SEQ ID NO: 194742 - RNA, 19 nt, Artificial Sequence
  Description of Artificial Sequence: Synthetic oligonucleotide
cugguagucuguacuccau

SEQ ID NO: 194743 - RNA, 19 nt, Artificial Sequence
  Description of Artificial Sequence: Synthetic oligonucleotide
cacucgccgcaugcagcgg

SEQ ID NO: 194744 - RNA, 19 nt, Artificial Sequence
  Description of Artificial Sequence: Synthetic oligonucleotide
accgugagauguggccccu

SEQ ID NO: 194745 - RNA, 19 nt, Artificial Sequence
  Description of Artificial Sequence: Synthetic oligonucleotide
gccucucucccaguucagc

SEQ ID NO: 194746 - RNA, 19 nt, Artificial Sequence
  Description of Artificial Sequence: Synthetic oligonucleotide
guggccccuucugaaccac

SEQ ID NO: 194747 - RNA, 19 nt, Artificial Sequence
  Description of Artificial Sequence: Synthetic oligonucleotide
cucucucccaguucagcuu

SEQ ID NO: 194748 - RNA, 19 nt, Artificial Sequence
  Description of Artificial Sequence: Synthetic oligonucleotide
gcgugugcuaaagcuggac

SEQ ID NO: 194749 - RNA, 19 nt, Artificial Sequence
  Description of Artificial Sequence: Synthetic oligonucleotide
ccaaggccggaaccccugc

SEQ ID NO: 194750 - RNA, 19 nt, Artificial Sequence
  Description of Artificial Sequence: Synthetic oligonucleotide
gcgaguaugcuaaggaauu

SEQ ID NO: 194751 - RNA, 19 nt, Artificial Sequence
  Description of Artificial Sequence: Synthetic oligonucleotide
caaugcaacgugguacuuu

SEQ ID NO: 194752 - RNA, 19 nt, Artificial Sequence
  Description of Artificial Sequence: Synthetic oligonucleotide
cgugcggcccacucgccgc

SEQ ID NO: 194753 - RNA, 19 nt, Artificial Sequence
  Description of Artificial Sequence: Synthetic oligonucleotide
cgaaguguacacgauguua

SEQ ID NO: 194754 - RNA, 19 nt, Artificial Sequence
  Description of Artificial Sequence: Synthetic oligonucleotide
ccgugcggcccacucgccg

SEQ ID NO: 194755 - RNA, 19 nt, Artificial Sequence
  Description of Artificial Sequence: Synthetic oligonucleotide
ccauggggagccagguuga

SEQ ID NO: 194756 - RNA, 19 nt, Artificial Sequence
  Description of Artificial Sequence: Synthetic oligonucleotide
cccacuacacugcaaccua

SEQ ID NO: 194757 - RNA, 19 nt, Artificial Sequence
  Description of Artificial Sequence: Synthetic oligonucleotide
ccgcauguucuugccagac

SEQ ID NO: 194758 - RNA, 19 nt, Artificial Sequence
  Description of Artificial Sequence: Synthetic oligonucleotide
gcaccggauaaggggagga

SEQ ID NO: 194759 - RNA, 19 nt, Artificial Sequence
  Description of Artificial Sequence: Synthetic oligonucleotide
cgugagauguggccccuuc

SEQ ID NO: 194760 - RNA, 19 nt, Artificial Sequence
  Description of Artificial Sequence: Synthetic oligonucleotide
cucccuuacucugcugcua

SEQ ID NO: 194761 - RNA, 19 nt, Artificial Sequence
  Description of Artificial Sequence: Synthetic oligonucleotide
cacaggcaugaugcagaca

SEQ ID NO: 194762 - RNA, 19 nt, Artificial Sequence
  Description of Artificial Sequence: Synthetic oligonucleotide
caccggauaaggggaggaa

SEQ ID NO: 194763 - RNA, 19 nt, Artificial Sequence
  Description of Artificial Sequence: Synthetic oligonucleotide
ggugagggugcccgucuua

SEQ ID NO: 194764 - RNA, 19 nt, Artificial Sequence
  Description of Artificial Sequence: Synthetic oligonucleotide
gucccaccccaggguaggc

SEQ ID NO: 194765 - RNA, 19 nt, Artificial Sequence
  Description of Artificial Sequence: Synthetic oligonucleotide
cccucacugcgaccuuacc

SEQ ID NO: 194766 - RNA, 19 nt, Artificial Sequence
  Description of Artificial Sequence: Synthetic oligonucleotide
ggguggacccaaucucgua

SEQ ID NO: 194767 - RNA, 19 nt, Artificial Sequence
  Description of Artificial Sequence: Synthetic oligonucleotide
cuucccggcgugauacauu

SEQ ID NO: 194768 - RNA, 19 nt, Artificial Sequence
  Description of Artificial Sequence: Synthetic oligonucleotide
agcuccuuuggggcuccua

SEQ ID NO: 194769 - RNA, 19 nt, Artificial Sequence
  Description of Artificial Sequence: Synthetic oligonucleotide
cuggcuucccggcgugaua

SEQ ID NO: 194770 - RNA, 19 nt, Artificial Sequence
  Description of Artificial Sequence: Synthetic oligonucleotide
caaggccggaaccccugcu

SEQ ID NO: 194771 - RNA, 19 nt, Artificial Sequence
  Description of Artificial Sequence: Synthetic oligonucleotide
gcuccgggacauccugguc

SEQ ID NO: 194772 - RNA, 19 nt, Artificial Sequence
  Description of Artificial Sequence: Synthetic oligonucleotide
ggaacgccgggagcccgug

SEQ ID NO: 194773 - RNA, 19 nt, Artificial Sequence
  Description of Artificial Sequence: Synthetic oligonucleotide
agccuguauccagcccaau

SEQ ID NO: 194774 - RNA, 19 nt, Artificial Sequence
  Description of Artificial Sequence: Synthetic oligonucleotide
cuguggccaaaagggauuu

SEQ ID NO: 194775 - RNA, 19 nt, Artificial Sequence
  Description of Artificial Sequence: Synthetic oligonucleotide
ggagcgaaguguacacgau

SEQ ID NO: 194776 - RNA, 19 nt, Artificial Sequence
  Description of Artificial Sequence: Synthetic oligonucleotide
ccggaacgccgggagcccg

SEQ ID NO: 194777 - RNA, 19 nt, Artificial Sequence
  Description of Artificial Sequence: Synthetic oligonucleotide
cagccccacuacacugcaa

SEQ ID NO: 194778 - RNA, 19 nt, Artificial Sequence
  Description of Artificial Sequence: Synthetic oligonucleotide
ccgcaugcagcggugcuga

SEQ ID NO: 194779 - RNA, 19 nt, Artificial Sequence
  Description of Artificial Sequence: Synthetic oligonucleotide
ggacccaaucucguaguuu

SEQ ID NO: 194780 - RNA, 19 nt, Artificial Sequence
  Description of Artificial Sequence: Synthetic oligonucleotide
ccuuaccagcuggguguag

SEQ ID NO: 194781 - RNA, 19 nt, Artificial Sequence
  Description of Artificial Sequence: Synthetic oligonucleotide
cggcgugauacauucuugu

SEQ ID NO: 194782 - RNA, 19 nt, Artificial Sequence
  Description of Artificial Sequence: Synthetic oligonucleotide
ccucccuaucugguagcuc

SEQ ID NO: 194783 - RNA, 19 nt, Artificial Sequence
  Description of Artificial Sequence: Synthetic oligonucleotide
gcgaaguguacacgauguu

SEQ ID NO: 194784 - RNA, 19 nt, Artificial Sequence
  Description of Artificial Sequence: Synthetic oligonucleotide
ccccacuacacugcaaccu

SEQ ID NO: 194785 - RNA, 19 nt, Artificial Sequence
  Description of Artificial Sequence: Synthetic oligonucleotide
gaccagcgauguggccaca

SEQ ID NO: 194786 - RNA, 19 nt, Artificial Sequence
  Description of Artificial Sequence: Synthetic oligonucleotide
gggguggacccaaucucgu

SEQ ID NO: 194787 - RNA, 19 nt, Artificial Sequence
  Description of Artificial Sequence: Synthetic oligonucleotide
ccauagcuguggccauuga

SEQ ID NO: 194788 - RNA, 19 nt, Artificial Sequence
  Description of Artificial Sequence: Synthetic oligonucleotide
cccggcgugauacauucuu

SEQ ID NO: 194789 - RNA, 19 nt, Artificial Sequence
  Description of Artificial Sequence: Synthetic oligonucleotide
ccucccuuacucugcugcu

SEQ ID NO: 194790 - RNA, 19 nt, Artificial Sequence
  Description of Artificial Sequence: Synthetic oligonucleotide
ccacaacuagucccucacu

SEQ ID NO: 194791 - RNA, 19 nt, Artificial Sequence
  Description of Artificial Sequence: Synthetic oligonucleotide
ccgucuuaucagagaagau

SEQ ID NO: 194792 - RNA, 19 nt, Artificial Sequence
  Description of Artificial Sequence: Synthetic oligonucleotide
gccggaaccccugcucugu

SEQ ID NO: 194793 - RNA, 19 nt, Artificial Sequence
  Description of Artificial Sequence: Synthetic oligonucleotide
cgauguuauacagggugau

SEQ ID NO: 194794 - RNA, 19 nt, Artificial Sequence
  Description of Artificial Sequence: Synthetic oligonucleotide
ggaccgugucggagagauc

SEQ ID NO: 194795 - RNA, 19 nt, Artificial Sequence
  Description of Artificial Sequence: Synthetic oligonucleotide
cggaccgugucggagagau

SEQ ID NO: 194796 - RNA, 19 nt, Artificial Sequence
  Description of Artificial Sequence: Synthetic oligonucleotide
caccauagcuguggccauu

SEQ ID NO: 194797 - RNA, 19 nt, Artificial Sequence
  Description of Artificial Sequence: Synthetic oligonucleotide
cggagagauccggcuucag

SEQ ID NO: 194798 - RNA, 19 nt, Artificial Sequence
  Description of Artificial Sequence: Synthetic oligonucleotide
ggccauugauggagcacuu

SEQ ID NO: 194799 - RNA, 19 nt, Artificial Sequence
  Description of Artificial Sequence: Synthetic oligonucleotide
cgaccuuaccaaggccgga

SEQ ID NO: 194800 - RNA, 19 nt, Artificial Sequence
  Description of Artificial Sequence: Synthetic oligonucleotide
gcggaccgugucggagaga

SEQ ID NO: 194801 - RNA, 19 nt, Artificial Sequence
  Description of Artificial Sequence: Synthetic oligonucleotide
ccguggugagcacgauggu

SEQ ID NO: 194802 - RNA, 19 nt, Artificial Sequence
  Description of Artificial Sequence: Synthetic oligonucleotide
cagccguggugagcacgau

SEQ ID NO: 194803 - RNA, 19 nt, Artificial Sequence
  Description of Artificial Sequence: Synthetic oligonucleotide
cggaacgccgggagcccgu

SEQ ID NO: 194804 - RNA, 19 nt, Artificial Sequence
  Description of Artificial Sequence: Synthetic oligonucleotide
ccgugagauguggccccuu

SEQ ID NO: 194805 - RNA, 19 nt, Artificial Sequence
  Description of Artificial Sequence: Synthetic oligonucleotide
aaaacgagaauagucaucc

SEQ ID NO: 194806 - RNA, 19 nt, Artificial Sequence
  Description of Artificial Sequence: Synthetic oligonucleotide
aauuucaagauuccacccc

SEQ ID NO: 194807 - RNA, 19 nt, Artificial Sequence
  Description of Artificial Sequence: Synthetic oligonucleotide
gaucuuauuuauuacaucc

SEQ ID NO: 194808 - RNA, 19 nt, Artificial Sequence
  Description of Artificial Sequence: Synthetic oligonucleotide
aaucaauugggauaauuuc

SEQ ID NO: 194809 - RNA, 19 nt, Artificial Sequence
  Description of Artificial Sequence: Synthetic oligonucleotide
aauaaggagcagcaggagc

SEQ ID NO: 194810 - RNA, 19 nt, Artificial Sequence
  Description of Artificial Sequence: Synthetic oligonucleotide
aacaugauugaacauaugu

SEQ ID NO: 194811 - RNA, 19 nt, Artificial Sequence
  Description of Artificial Sequence: Synthetic oligonucleotide
uuaaaguugacuuucagau

SEQ ID NO: 194812 - RNA, 19 nt, Artificial Sequence
  Description of Artificial Sequence: Synthetic oligonucleotide
caugauugaacauaugucc

SEQ ID NO: 194813 - RNA, 19 nt, Artificial Sequence
  Description of Artificial Sequence: Synthetic oligonucleotide
aacuguauagaguaccccg

SEQ ID NO: 194814 - RNA, 19 nt, Artificial Sequence
  Description of Artificial Sequence: Synthetic oligonucleotide
aauuuugagucuccuuucc

SEQ ID NO: 194815 - RNA, 19 nt, Artificial Sequence
  Description of Artificial Sequence: Synthetic oligonucleotide
aaaguugacuuucagauuu

SEQ ID NO: 194816 - RNA, 19 nt, Artificial Sequence
  Description of Artificial Sequence: Synthetic oligonucleotide
cauugaaacaucaugcccc

SEQ ID NO: 194817 - RNA, 19 nt, Artificial Sequence
  Description of Artificial Sequence: Synthetic oligonucleotide
ucuagcaugagaagcaaag

SEQ ID NO: 194818 - RNA, 19 nt, Artificial Sequence
  Description of Artificial Sequence: Synthetic oligonucleotide
acauugaaacaucaugccc

SEQ ID NO: 194819 - RNA, 19 nt, Artificial Sequence
  Description of Artificial Sequence: Synthetic oligonucleotide
gaaggcucgacccacacgg

SEQ ID NO: 194820 - RNA, 19 nt, Artificial Sequence
  Description of Artificial Sequence: Synthetic oligonucleotide
aacgagaauagucauccag

SEQ ID NO: 194821 - RNA, 19 nt, Artificial Sequence
  Description of Artificial Sequence: Synthetic oligonucleotide
caaagcauggcucauuucg

SEQ ID NO: 194822 - RNA, 19 nt, Artificial Sequence
  Description of Artificial Sequence: Synthetic oligonucleotide
ucagccaguccucaaaacg

SEQ ID NO: 194823 - RNA, 19 nt, Artificial Sequence
  Description of Artificial Sequence: Synthetic oligonucleotide
ucggcauucacuaagaguu

SEQ ID NO: 194824 - RNA, 19 nt, Artificial Sequence
  Description of Artificial Sequence: Synthetic oligonucleotide
agugucaaaugacacaguc

SEQ ID NO: 194825 - RNA, 19 nt, Artificial Sequence
  Description of Artificial Sequence: Synthetic oligonucleotide
ugaacauauguccugccag

SEQ ID NO: 194826 - RNA, 19 nt, Artificial Sequence
  Description of Artificial Sequence: Synthetic oligonucleotide
uuguacgauacugacaugg

SEQ ID NO: 194827 - RNA, 19 nt, Artificial Sequence
  Description of Artificial Sequence: Synthetic oligonucleotide
acaaguugaggacggaggc

SEQ ID NO: 194828 - RNA, 19 nt, Artificial Sequence
  Description of Artificial Sequence: Synthetic oligonucleotide
aaggguagaaucaauuggg

SEQ ID NO: 194829 - RNA, 19 nt, Artificial Sequence
  Description of Artificial Sequence: Synthetic oligonucleotide
uacgauacugacaugguac

SEQ ID NO: 194830 - RNA, 19 nt, Artificial Sequence
  Description of Artificial Sequence: Synthetic oligonucleotide
uguacuguguuucucgaug

SEQ ID NO: 194831 - RNA, 19 nt, Artificial Sequence
  Description of Artificial Sequence: Synthetic oligonucleotide
aaugcugcuaugaacauga

SEQ ID NO: 194832 - RNA, 19 nt, Artificial Sequence
  Description of Artificial Sequence: Synthetic oligonucleotide
agugacuacauuugccucg

SEQ ID NO: 194833 - RNA, 19 nt, Artificial Sequence
  Description of Artificial Sequence: Synthetic oligonucleotide
uuaugagugaguacauacc

SEQ ID NO: 194834 - RNA, 19 nt, Artificial Sequence
  Description of Artificial Sequence: Synthetic oligonucleotide
ugaguacauaccauguuug

SEQ ID NO: 194835 - RNA, 19 nt, Artificial Sequence
  Description of Artificial Sequence: Synthetic oligonucleotide
gaugugauggcugacuucc

SEQ ID NO: 194836 - RNA, 19 nt, Artificial Sequence
  Description of Artificial Sequence: Synthetic oligonucleotide
ucaguugaggagcaucuag

SEQ ID NO: 194837 - RNA, 19 nt, Artificial Sequence
  Description of Artificial Sequence: Synthetic oligonucleotide
gaauuucaagauuccaccc

SEQ ID NO: 194838 - RNA, 19 nt, Artificial Sequence
  Description of Artificial Sequence: Synthetic oligonucleotide
gaagcugccauauacgcuc

SEQ ID NO: 194839 - RNA, 19 nt, Artificial Sequence
  Description of Artificial Sequence: Synthetic oligonucleotide
auuguguaaauguacuaca

SEQ ID NO: 194840 - RNA, 19 nt, Artificial Sequence
  Description of Artificial Sequence: Synthetic oligonucleotide
ugagugacuacauuugccu

SEQ ID NO: 194841 - RNA, 19 nt, Artificial Sequence
  Description of Artificial Sequence: Synthetic oligonucleotide
acgauacugacaugguacc

SEQ ID NO: 194842 - RNA, 19 nt, Artificial Sequence
  Description of Artificial Sequence: Synthetic oligonucleotide
auuucuucgacaguccuuc

SEQ ID NO: 194843 - RNA, 19 nt, Artificial Sequence
  Description of Artificial Sequence: Synthetic oligonucleotide
guauagaguaccccggagg

SEQ ID NO: 194844 - RNA, 19 nt, Artificial Sequence
  Description of Artificial Sequence: Synthetic oligonucleotide
gauuguacgauacugacau

SEQ ID NO: 194845 - RNA, 19 nt, Artificial Sequence
  Description of Artificial Sequence: Synthetic oligonucleotide
uccaugaucuuauuuauua

SEQ ID NO: 194846 - RNA, 19 nt, Artificial Sequence
  Description of Artificial Sequence: Synthetic oligonucleotide
ucgacaguccuucagggca

SEQ ID NO: 194847 - RNA, 19 nt, Artificial Sequence
  Description of Artificial Sequence: Synthetic oligonucleotide
cuucaagagaaguuugagc

SEQ ID NO: 194848 - RNA, 19 nt, Artificial Sequence
  Description of Artificial Sequence: Synthetic oligonucleotide
cucaaaacgagaauaguca

SEQ ID NO: 194849 - RNA, 19 nt, Artificial Sequence
  Description of Artificial Sequence: Synthetic oligonucleotide
uggguuaccucacucagga

SEQ ID NO: 194850 - RNA, 19 nt, Artificial Sequence
  Description of Artificial Sequence: Synthetic oligonucleotide
auugaacauauguccugcc

SEQ ID NO: 194851 - RNA, 19 nt, Artificial Sequence
  Description of Artificial Sequence: Synthetic oligonucleotide
ucaauugggauaauuucau

SEQ ID NO: 194852 - RNA, 19 nt, Artificial Sequence
  Description of Artificial Sequence: Synthetic oligonucleotide
ucacacaaguugaggacgg

SEQ ID NO: 194853 - RNA, 19 nt, Artificial Sequence
  Description of Artificial Sequence: Synthetic oligonucleotide
acaugauugaacauauguc

SEQ ID NO: 194854 - RNA, 19 nt, Artificial Sequence
  Description of Artificial Sequence: Synthetic oligonucleotide
uuaacgaagccaggaaagg

SEQ ID NO: 194855 - RNA, 19 nt, Artificial Sequence
  Description of Artificial Sequence: Synthetic oligonucleotide
caguaacuuggccagaucc

SEQ ID NO: 194856 - RNA, 19 nt, Artificial Sequence
  Description of Artificial Sequence: Synthetic oligonucleotide
uuugcggugguccacggcu

SEQ ID NO: 194857 - RNA, 19 nt, Artificial Sequence
  Description of Artificial Sequence: Synthetic oligonucleotide
uagauuguacgauacugac

SEQ ID NO: 194858 - RNA, 19 nt, Artificial Sequence
  Description of Artificial Sequence: Synthetic oligonucleotide
uguauagaguaccccggag

SEQ ID NO: 194859 - RNA, 19 nt, Artificial Sequence
  Description of Artificial Sequence: Synthetic oligonucleotide
cacaaguugaggacggagg

SEQ ID NO: 194860 - RNA, 19 nt, Artificial Sequence
  Description of Artificial Sequence: Synthetic oligonucleotide
ugauugaacauauguccug

SEQ ID NO: 194861 - RNA, 19 nt, Artificial Sequence
  Description of Artificial Sequence: Synthetic oligonucleotide
uguucacucagcuuccucu

SEQ ID NO: 194862 - RNA, 19 nt, Artificial Sequence
  Description of Artificial Sequence: Synthetic oligonucleotide
uuagcaaacuguacauaca

SEQ ID NO: 194863 - RNA, 19 nt, Artificial Sequence
  Description of Artificial Sequence: Synthetic oligonucleotide
gcuauuacaaacaaugcug

SEQ ID NO: 194864 - RNA, 19 nt, Artificial Sequence
  Description of Artificial Sequence: Synthetic oligonucleotide
gaaugaucgggcaaaguug

SEQ ID NO: 194865 - RNA, 19 nt, Artificial Sequence
  Description of Artificial Sequence: Synthetic oligonucleotide
guuaacgaagccaggaaag

SEQ ID NO: 194866 - RNA, 19 nt, Artificial Sequence
  Description of Artificial Sequence: Synthetic oligonucleotide
caaaggccugacuucaugg

SEQ ID NO: 194867 - RNA, 19 nt, Artificial Sequence
  Description of Artificial Sequence: Synthetic oligonucleotide
acggaaucuaugcugccac

SEQ ID NO: 194868 - RNA, 19 nt, Artificial Sequence
  Description of Artificial Sequence: Synthetic oligonucleotide
guuaccucacucaggaugg

SEQ ID NO: 194869 - RNA, 19 nt, Artificial Sequence
  Description of Artificial Sequence: Synthetic oligonucleotide
ugaccaagacuccaacaag

SEQ ID NO: 194870 - RNA, 19 nt, Artificial Sequence
  Description of Artificial Sequence: Synthetic oligonucleotide
uguacuacauuuucucuau

SEQ ID NO: 194871 - RNA, 19 nt, Artificial Sequence
  Description of Artificial Sequence: Synthetic oligonucleotide
uugaacauauguccugcca

SEQ ID NO: 194872 - RNA, 19 nt, Artificial Sequence
  Description of Artificial Sequence: Synthetic oligonucleotide
gaacauauguccugccagc

SEQ ID NO: 194873 - RNA, 19 nt, Artificial Sequence
  Description of Artificial Sequence: Synthetic oligonucleotide
aaugaucgggcaaaguugu

SEQ ID NO: 194874 - RNA, 19 nt, Artificial Sequence
  Description of Artificial Sequence: Synthetic oligonucleotide
cauuguguaaauguacuac

SEQ ID NO: 194875 - RNA, 19 nt, Artificial Sequence
  Description of Artificial Sequence: Synthetic oligonucleotide
uuugagucuccuuuccaug

SEQ ID NO: 194876 - RNA, 19 nt, Artificial Sequence
  Description of Artificial Sequence: Synthetic oligonucleotide
uggcuauuacaaacaaugc

SEQ ID NO: 194877 - RNA, 19 nt, Artificial Sequence
  Description of Artificial Sequence: Synthetic oligonucleotide
uggauggagucacacucgg

SEQ ID NO: 194878 - RNA, 19 nt, Artificial Sequence
  Description of Artificial Sequence: Synthetic oligonucleotide
caugaucuuauuuauuaca

SEQ ID NO: 194879 - RNA, 19 nt, Artificial Sequence
  Description of Artificial Sequence: Synthetic oligonucleotide
uuugaagguucgcuggcug

SEQ ID NO: 194880 - RNA, 19 nt, Artificial Sequence
  Description of Artificial Sequence: Synthetic oligonucleotide
auaugaggagguucuaaug

SEQ ID NO: 194881 - RNA, 19 nt, Artificial Sequence
  Description of Artificial Sequence: Synthetic oligonucleotide
uugguagauuguacgauac

SEQ ID NO: 194882 - RNA, 19 nt, Artificial Sequence
  Description of Artificial Sequence: Synthetic oligonucleotide
aagucuggucaccaauuug

SEQ ID NO: 194883 - RNA, 19 nt, Artificial Sequence
  Description of Artificial Sequence: Synthetic oligonucleotide
gaaucuaugcugccacugc

SEQ ID NO: 194884 - RNA, 19 nt, Artificial Sequence
  Description of Artificial Sequence: Synthetic oligonucleotide
aguacauaccauguuuguc

SEQ ID NO: 194885 - RNA, 19 nt, Artificial Sequence
  Description of Artificial Sequence: Synthetic oligonucleotide
gacugguucacaaaaucug

SEQ ID NO: 194886 - RNA, 19 nt, Artificial Sequence
  Description of Artificial Sequence: Synthetic oligonucleotide
ggcgauuucugucuguugg

SEQ ID NO: 194887 - RNA, 19 nt, Artificial Sequence
  Description of Artificial Sequence: Synthetic oligonucleotide
uauccauuguguaaaugua

SEQ ID NO: 194888 - RNA, 19 nt, Artificial Sequence
  Description of Artificial Sequence: Synthetic oligonucleotide
agcauggcucauuucgugg

SEQ ID NO: 194889 - RNA, 19 nt, Artificial Sequence
  Description of Artificial Sequence: Synthetic oligonucleotide
gugguaauuccugacauug

SEQ ID NO: 194890 - RNA, 19 nt, Artificial Sequence
  Description of Artificial Sequence: Synthetic oligonucleotide
auaaagcuuuccaugaucu

SEQ ID NO: 194891 - RNA, 19 nt, Artificial Sequence
  Description of Artificial Sequence: Synthetic oligonucleotide
uggaguacugacugguuca

SEQ ID NO: 194892 - RNA, 19 nt, Artificial Sequence
  Description of Artificial Sequence: Synthetic oligonucleotide
cauucacuaagaguuggcg

SEQ ID NO: 194893 - RNA, 19 nt, Artificial Sequence
  Description of Artificial Sequence: Synthetic oligonucleotide
gcuaacauuccuuuaugag

SEQ ID NO: 194894 - RNA, 19 nt, Artificial Sequence
  Description of Artificial Sequence: Synthetic oligonucleotide
acccacucgaccuugcaag

SEQ ID NO: 194895 - RNA, 19 nt, Artificial Sequence
  Description of Artificial Sequence: Synthetic oligonucleotide
gguuaccucacucaggaug

SEQ ID NO: 194896 - RNA, 19 nt, Artificial Sequence
  Description of Artificial Sequence: Synthetic oligonucleotide
uuguguaaauguacuacau

SEQ ID NO: 194897 - RNA, 19 nt, Artificial Sequence
  Description of Artificial Sequence: Synthetic oligonucleotide
uucggcauucacuaagagu

SEQ ID NO: 194898 - RNA, 19 nt, Artificial Sequence
  Description of Artificial Sequence: Synthetic oligonucleotide
cuucgacaguccuucaggg

SEQ ID NO: 194899 - RNA, 19 nt, Artificial Sequence
  Description of Artificial Sequence: Synthetic oligonucleotide
ugacauugcaucagugcac

SEQ ID NO: 194900 - RNA, 19 nt, Artificial Sequence
  Description of Artificial Sequence: Synthetic oligonucleotide
cauaaagcuuuccaugauc

SEQ ID NO: 194901 - RNA, 19 nt, Artificial Sequence
  Description of Artificial Sequence: Synthetic oligonucleotide
aaucgcagccaccuuuugu

SEQ ID NO: 194902 - RNA, 19 nt, Artificial Sequence
  Description of Artificial Sequence: Synthetic oligonucleotide
auccauuguguaaauguac

SEQ ID NO: 194903 - RNA, 19 nt, Artificial Sequence
  Description of Artificial Sequence: Synthetic oligonucleotide
uucuucgacaguccuucag

SEQ ID NO: 194904 - RNA, 19 nt, Artificial Sequence
  Description of Artificial Sequence: Synthetic oligonucleotide
ugagguuaacgaagccagg

SEQ ID NO: 194905 - RNA, 19 nt, Artificial Sequence
  Description of Artificial Sequence: Synthetic oligonucleotide
cagcuuguaccucuaaagc

SEQ ID NO: 194906 - RNA, 19 nt, Artificial Sequence
  Description of Artificial Sequence: Synthetic oligonucleotide
cauuucgugguaauuccug

SEQ ID NO: 194907 - RNA, 19 nt, Artificial Sequence
  Description of Artificial Sequence: Synthetic oligonucleotide
cuugaagcgucucuggguc

SEQ ID NO: 194908 - RNA, 19 nt, Artificial Sequence
  Description of Artificial Sequence: Synthetic oligonucleotide
cuccucacggaaucuaugc

SEQ ID NO: 194909 - RNA, 19 nt, Artificial Sequence
  Description of Artificial Sequence: Synthetic oligonucleotide
uugguguaucugagcaugg

SEQ ID NO: 194910 - RNA, 19 nt, Artificial Sequence
  Description of Artificial Sequence: Synthetic oligonucleotide
auuugcgugaguugucugu

SEQ ID NO: 194911 - RNA, 19 nt, Artificial Sequence
  Description of Artificial Sequence: Synthetic oligonucleotide
aguugaggagcaucuaggu

SEQ ID NO: 194912 - RNA, 19 nt, Artificial Sequence
  Description of Artificial Sequence: Synthetic oligonucleotide
uguacgauacugacauggu

SEQ ID NO: 194913 - RNA, 19 nt, Artificial Sequence
  Description of Artificial Sequence: Synthetic oligonucleotide
aacaggaaggcucgaccca

SEQ ID NO: 194914 - RNA, 19 nt, Artificial Sequence
  Description of Artificial Sequence: Synthetic oligonucleotide
aucuagguugcuuccaggu

SEQ ID NO: 194915 - RNA, 19 nt, Artificial Sequence
  Description of Artificial Sequence: Synthetic oligonucleotide
gaggucugaauugaacugc

SEQ ID NO: 194916 - RNA, 19 nt, Artificial Sequence
  Description of Artificial Sequence: Synthetic oligonucleotide
guacauaccauguuugucu

SEQ ID NO: 194917 - RNA, 19 nt, Artificial Sequence
  Description of Artificial Sequence: Synthetic oligonucleotide
ugccuuugaauuucaagau

SEQ ID NO: 194918 - RNA, 19 nt, Artificial Sequence
  Description of Artificial Sequence: Synthetic oligonucleotide
acuguauagaguaccccgg

SEQ ID NO: 194919 - RNA, 19 nt, Artificial Sequence
  Description of Artificial Sequence: Synthetic oligonucleotide
cuaacauuccuuuaugagu

SEQ ID NO: 194920 - RNA, 19 nt, Artificial Sequence
  Description of Artificial Sequence: Synthetic oligonucleotide
ugacacguccaguaacuug

SEQ ID NO: 194921 - RNA, 19 nt, Artificial Sequence
  Description of Artificial Sequence: Synthetic oligonucleotide
caaaacgagaauagucauc

SEQ ID NO: 194922 - RNA, 19 nt, Artificial Sequence
  Description of Artificial Sequence: Synthetic oligonucleotide
auuucgugguaauuccuga

SEQ ID NO: 194923 - RNA, 19 nt, Artificial Sequence
  Description of Artificial Sequence: Synthetic oligonucleotide
agucucaccuagccaggcc

SEQ ID NO: 194924 - RNA, 19 nt, Artificial Sequence
  Description of Artificial Sequence: Synthetic oligonucleotide
gguguaucugagcaugggg

SEQ ID NO: 194925 - RNA, 19 nt, Artificial Sequence
  Description of Artificial Sequence: Synthetic oligonucleotide
auguacuacauuuucucua

SEQ ID NO: 194926 - RNA, 19 nt, Artificial Sequence
  Description of Artificial Sequence: Synthetic oligonucleotide
uguacacuauuuucauacu

SEQ ID NO: 194927 - RNA, 19 nt, Artificial Sequence
  Description of Artificial Sequence: Synthetic oligonucleotide
cagauguuccuccaccgcc

SEQ ID NO: 194928 - RNA, 19 nt, Artificial Sequence
  Description of Artificial Sequence: Synthetic oligonucleotide
cugacauugcaucagugca

SEQ ID NO: 194929 - RNA, 19 nt, Artificial Sequence
  Description of Artificial Sequence: Synthetic oligonucleotide
ugguaauuccugacauugc

SEQ ID NO: 194930 - RNA, 19 nt, Artificial Sequence
  Description of Artificial Sequence: Synthetic oligonucleotide
gagggugaauuuuggguug

SEQ ID NO: 194931 - RNA, 19 nt, Artificial Sequence
  Description of Artificial Sequence: Synthetic oligonucleotide
uuauuugcgugaguugucu

SEQ ID NO: 194932 - RNA, 19 nt, Artificial Sequence
  Description of Artificial Sequence: Synthetic oligonucleotide
ugcuuuauuugcgugaguu

SEQ ID NO: 194933 - RNA, 19 nt, Artificial Sequence
  Description of Artificial Sequence: Synthetic oligonucleotide
ucgugguaauuccugacau

SEQ ID NO: 194934 - RNA, 19 nt, Artificial Sequence
  Description of Artificial Sequence: Synthetic oligonucleotide
gucuugaagcgucucuggg

SEQ ID NO: 194935 - RNA, 19 nt, Artificial Sequence
  Description of Artificial Sequence: Synthetic oligonucleotide
uuaucgcugcgcuugcucu

SEQ ID NO: 194936 - RNA, 19 nt, Artificial Sequence
  Description of Artificial Sequence: Synthetic oligonucleotide
ugaacggaagucuggucac

SEQ ID NO: 194937 - RNA, 19 nt, Artificial Sequence
  Description of Artificial Sequence: Synthetic oligonucleotide
acggaggcgacaccuguac

SEQ ID NO: 194938 - RNA, 19 nt, Artificial Sequence
  Description of Artificial Sequence: Synthetic oligonucleotide
caauuuugagucuccuuuc

SEQ ID NO: 194939 - RNA, 19 nt, Artificial Sequence
  Description of Artificial Sequence: Synthetic oligonucleotide
cuggauggagucacacucg

SEQ ID NO: 194940 - RNA, 19 nt, Artificial Sequence
  Description of Artificial Sequence: Synthetic oligonucleotide
gggaguuuugcuucugagg

SEQ ID NO: 194941 - RNA, 19 nt, Artificial Sequence
  Description of Artificial Sequence: Synthetic oligonucleotide
uacauuugccucguggcga

SEQ ID NO: 194942 - RNA, 19 nt, Artificial Sequence
  Description of Artificial Sequence: Synthetic oligonucleotide
aguugacuuucagauuuac

SEQ ID NO: 194943 - RNA, 19 nt, Artificial Sequence
  Description of Artificial Sequence: Synthetic oligonucleotide
gaggacccggaacaggaag

SEQ ID NO: 194944 - RNA, 19 nt, Artificial Sequence
  Description of Artificial Sequence: Synthetic oligonucleotide
uuucgugguaauuccugac

SEQ ID NO: 194945 - RNA, 19 nt, Artificial Sequence
  Description of Artificial Sequence: Synthetic oligonucleotide
ugugacacucgauggugug

SEQ ID NO: 194946 - RNA, 19 nt, Artificial Sequence
  Description of Artificial Sequence: Synthetic oligonucleotide
cugaacggaagucugguca

SEQ ID NO: 194947 - RNA, 19 nt, Artificial Sequence
  Description of Artificial Sequence: Synthetic oligonucleotide
uucuggcuauuacaaacaa

SEQ ID NO: 194948 - RNA, 19 nt, Artificial Sequence
  Description of Artificial Sequence: Synthetic oligonucleotide
augaucuuauuuauuacau

SEQ ID NO: 194949 - RNA, 19 nt, Artificial Sequence
  Description of Artificial Sequence: Synthetic oligonucleotide
caggaccucacacaaguug

SEQ ID NO: 194950 - RNA, 19 nt, Artificial Sequence
  Description of Artificial Sequence: Synthetic oligonucleotide
auuccuuuaugagugagua

SEQ ID NO: 194951 - RNA, 19 nt, Artificial Sequence
  Description of Artificial Sequence: Synthetic oligonucleotide
uguaccucuaaagcaacau

SEQ ID NO: 194952 - RNA, 19 nt, Artificial Sequence
  Description of Artificial Sequence: Synthetic oligonucleotide
uucugcccgauguaggacu

SEQ ID NO: 194953 - RNA, 19 nt, Artificial Sequence
  Description of Artificial Sequence: Synthetic oligonucleotide
agguugguagauuguacga

SEQ ID NO: 194954 - RNA, 19 nt, Artificial Sequence
  Description of Artificial Sequence: Synthetic oligonucleotide
gucucaccuagccaggccc

SEQ ID NO: 194955 - RNA, 19 nt, Artificial Sequence
  Description of Artificial Sequence: Synthetic oligonucleotide
ucuuguugcuucccaucca

SEQ ID NO: 194956 - RNA, 19 nt, Artificial Sequence
  Description of Artificial Sequence: Synthetic oligonucleotide
ucuccucacggaaucuaug

SEQ ID NO: 194957 - RNA, 19 nt, Artificial Sequence
  Description of Artificial Sequence: Synthetic oligonucleotide
augggguggaaugaucggg

SEQ ID NO: 194958 - RNA, 19 nt, Artificial Sequence
  Description of Artificial Sequence: Synthetic oligonucleotide
ugaagguucgcuggcugag

SEQ ID NO: 194959 - RNA, 19 nt, Artificial Sequence
  Description of Artificial Sequence: Synthetic oligonucleotide
uucgacaguccuucagggc

SEQ ID NO: 194960 - RNA, 19 nt, Artificial Sequence
  Description of Artificial Sequence: Synthetic oligonucleotide
uauuucuucgacaguccuu

SEQ ID NO: 194961 - RNA, 19 nt, Artificial Sequence
  Description of Artificial Sequence: Synthetic oligonucleotide
caugggguggaaugaucgg

SEQ ID NO: 194962 - RNA, 19 nt, Artificial Sequence
  Description of Artificial Sequence: Synthetic oligonucleotide
ucggucuuaucgcugcgcu

SEQ ID NO: 194963 - RNA, 19 nt, Artificial Sequence
  Description of Artificial Sequence: Synthetic oligonucleotide
ccucaaaacgagaauaguc

SEQ ID NO: 194964 - RNA, 19 nt, Artificial Sequence
  Description of Artificial Sequence: Synthetic oligonucleotide
ugagccgguucccaauuac

SEQ ID NO: 194965 - RNA, 19 nt, Artificial Sequence
  Description of Artificial Sequence: Synthetic oligonucleotide
uuuugaugugacacucgau

SEQ ID NO: 194966 - RNA, 19 nt, Artificial Sequence
  Description of Artificial Sequence: Synthetic oligonucleotide
uauuugcgugaguugucug

SEQ ID NO: 194967 - RNA, 19 nt, Artificial Sequence
  Description of Artificial Sequence: Synthetic oligonucleotide
ugguagauuguacgauacu

SEQ ID NO: 194968 - RNA, 19 nt, Artificial Sequence
  Description of Artificial Sequence: Synthetic oligonucleotide
auuagagccauuggcugug

SEQ ID NO: 194969 - RNA, 19 nt, Artificial Sequence
  Description of Artificial Sequence: Synthetic oligonucleotide
aggcuaacauuccuuuaug

SEQ ID NO: 194970 - RNA, 19 nt, Artificial Sequence
  Description of Artificial Sequence: Synthetic oligonucleotide
ugguguaucugagcauggg

SEQ ID NO: 194971 - RNA, 19 nt, Artificial Sequence
  Description of Artificial Sequence: Synthetic oligonucleotide
caucuagguugcuuccagg

SEQ ID NO: 194972 - RNA, 19 nt, Artificial Sequence
  Description of Artificial Sequence: Synthetic oligonucleotide
cauauagcccuuguagcug

SEQ ID NO: 194973 - RNA, 19 nt, Artificial Sequence
  Description of Artificial Sequence: Synthetic oligonucleotide
caugucuugcagugaggcc

SEQ ID NO: 194974 - RNA, 19 nt, Artificial Sequence
  Description of Artificial Sequence: Synthetic oligonucleotide
uccucacggaaucuaugcu

SEQ ID NO: 194975 - RNA, 19 nt, Artificial Sequence
  Description of Artificial Sequence: Synthetic oligonucleotide
acgagaauagucauccaga

SEQ ID NO: 194976 - RNA, 19 nt, Artificial Sequence
  Description of Artificial Sequence: Synthetic oligonucleotide
uggucuugaagcgucucug

SEQ ID NO: 194977 - RNA, 19 nt, Artificial Sequence
  Description of Artificial Sequence: Synthetic oligonucleotide
agcaugagaagcaaagcau

SEQ ID NO: 194978 - RNA, 19 nt, Artificial Sequence
  Description of Artificial Sequence: Synthetic oligonucleotide
uucugaacggaagucuggu

SEQ ID NO: 194979 - RNA, 19 nt, Artificial Sequence
  Description of Artificial Sequence: Synthetic oligonucleotide
gcuuucaaagacuguacac

SEQ ID NO: 194980 - RNA, 19 nt, Artificial Sequence
  Description of Artificial Sequence: Synthetic oligonucleotide
cacucgaccuugcaagagc

SEQ ID NO: 194981 - RNA, 19 nt, Artificial Sequence
  Description of Artificial Sequence: Synthetic oligonucleotide
gaaucaauugggauaauuu

SEQ ID NO: 194982 - RNA, 19 nt, Artificial Sequence
  Description of Artificial Sequence: Synthetic oligonucleotide
gaaguuugagccgguuccc

SEQ ID NO: 194983 - RNA, 19 nt, Artificial Sequence
  Description of Artificial Sequence: Synthetic oligonucleotide
cuggguuaccucacucagg

SEQ ID NO: 194984 - RNA, 19 nt, Artificial Sequence
  Description of Artificial Sequence: Synthetic oligonucleotide
acacaaguugaggacggag

SEQ ID NO: 194985 - RNA, 19 nt, Artificial Sequence
  Description of Artificial Sequence: Synthetic oligonucleotide
gagugacuacauuugccuc

SEQ ID NO: 194986 - RNA, 19 nt, Artificial Sequence
  Description of Artificial Sequence: Synthetic oligonucleotide
gaccauugguguaucugag

SEQ ID NO: 194987 - RNA, 19 nt, Artificial Sequence
  Description of Artificial Sequence: Synthetic oligonucleotide
ucaccaauuugcugcugcu

SEQ ID NO: 194988 - RNA, 19 nt, Artificial Sequence
  Description of Artificial Sequence: Synthetic oligonucleotide
uggcuuuagcaaacuguac

SEQ ID NO: 194989 - RNA, 19 nt, Artificial Sequence
  Description of Artificial Sequence: Synthetic oligonucleotide
uccucaaaacgagaauagu

SEQ ID NO: 194990 - RNA, 19 nt, Artificial Sequence
  Description of Artificial Sequence: Synthetic oligonucleotide
uuuugaagguucgcuggcu

SEQ ID NO: 194991 - RNA, 19 nt, Artificial Sequence
  Description of Artificial Sequence: Synthetic oligonucleotide
aacggaagucuggucacca

SEQ ID NO: 194992 - RNA, 19 nt, Artificial Sequence
  Description of Artificial Sequence: Synthetic oligonucleotide
aguaacuuggccagauccu

SEQ ID NO: 194993 - RNA, 19 nt, Artificial Sequence
  Description of Artificial Sequence: Synthetic oligonucleotide
ggagcaucuagguugcuuc

SEQ ID NO: 194994 - RNA, 19 nt, Artificial Sequence
  Description of Artificial Sequence: Synthetic oligonucleotide
acccggaacaggaaggcuc

SEQ ID NO: 194995 - RNA, 19 nt, Artificial Sequence
  Description of Artificial Sequence: Synthetic oligonucleotide
guugguagauuguacgaua

SEQ ID NO: 194996 - RNA, 19 nt, Artificial Sequence
  Description of Artificial Sequence: Synthetic oligonucleotide
ugucuugcagugaggccac

SEQ ID NO: 194997 - RNA, 19 nt, Artificial Sequence
  Description of Artificial Sequence: Synthetic oligonucleotide
uacauaccauguuugucuu

SEQ ID NO: 194998 - RNA, 19 nt, Artificial Sequence
  Description of Artificial Sequence: Synthetic oligonucleotide
cuuaucgcugcgcuugcuc

SEQ ID NO: 194999 - RNA, 19 nt, Artificial Sequence
  Description of Artificial Sequence: Synthetic oligonucleotide
agaaucaauugggauaauu

SEQ ID NO: 195000 - RNA, 19 nt, Artificial Sequence
  Description of Artificial Sequence: Synthetic oligonucleotide
gagaauagucauccagaaa

SEQ ID NO: 195001 - RNA, 19 nt, Artificial Sequence
  Description of Artificial Sequence: Synthetic oligonucleotide
ggcaacuguauagaguacc

SEQ ID NO: 195002 - RNA, 19 nt, Artificial Sequence
  Description of Artificial Sequence: Synthetic oligonucleotide
ugccauauacgcuccuaaa

SEQ ID NO: 195003 - RNA, 19 nt, Artificial Sequence
  Description of Artificial Sequence: Synthetic oligonucleotide
uuugagccgguucccaauu

SEQ ID NO: 195004 - RNA, 19 nt, Artificial Sequence
  Description of Artificial Sequence: Synthetic oligonucleotide
gacucacggauccugaggu

SEQ ID NO: 195005 - RNA, 19 nt, Artificial Sequence
  Description of Artificial Sequence: Synthetic oligonucleotide
caaaguuguuggagagggc

SEQ ID NO: 195006 - RNA, 19 nt, Artificial Sequence
  Description of Artificial Sequence: Synthetic oligonucleotide
aaucugagccuucggcauu

SEQ ID NO: 195007 - RNA, 19 nt, Artificial Sequence
  Description of Artificial Sequence: Synthetic oligonucleotide
gaguuggcgagacaugucu

SEQ ID NO: 195008 - RNA, 19 nt, Artificial Sequence
  Description of Artificial Sequence: Synthetic oligonucleotide
gacaugucuugcagugagg

SEQ ID NO: 195009 - RNA, 19 nt, Artificial Sequence
  Description of Artificial Sequence: Synthetic oligonucleotide
ggaggcgacaccuguacug

SEQ ID NO: 195010 - RNA, 19 nt, Artificial Sequence
  Description of Artificial Sequence: Synthetic oligonucleotide
ugcuugacacguccaguaa

SEQ ID NO: 195011 - RNA, 19 nt, Artificial Sequence
  Description of Artificial Sequence: Synthetic oligonucleotide
ugcgugaguugucugugau

SEQ ID NO: 195012 - RNA, 19 nt, Artificial Sequence
  Description of Artificial Sequence: Synthetic oligonucleotide
ggcauucacuaagaguugg

SEQ ID NO: 195013 - RNA, 19 nt, Artificial Sequence
  Description of Artificial Sequence: Synthetic oligonucleotide
aucgcugcgcuugcucucc

SEQ ID NO: 195014 - RNA, 19 nt, Artificial Sequence
  Description of Artificial Sequence: Synthetic oligonucleotide
ugccucguggcgauuucug

SEQ ID NO: 195015 - RNA, 19 nt, Artificial Sequence
  Description of Artificial Sequence: Synthetic oligonucleotide
agauuguacgauacugaca

SEQ ID NO: 195016 - RNA, 19 nt, Artificial Sequence
  Description of Artificial Sequence: Synthetic oligonucleotide
uggggaaugcagccguccu

SEQ ID NO: 195017 - RNA, 19 nt, Artificial Sequence
  Description of Artificial Sequence: Synthetic oligonucleotide
aggacucacggauccugag

SEQ ID NO: 195018 - RNA, 19 nt, Artificial Sequence
  Description of Artificial Sequence: Synthetic oligonucleotide
ucugaacggaagucugguc

SEQ ID NO: 195019 - RNA, 19 nt, Artificial Sequence
  Description of Artificial Sequence: Synthetic oligonucleotide
auagucauccagaaacuuu

SEQ ID NO: 195020 - RNA, 19 nt, Artificial Sequence
  Description of Artificial Sequence: Synthetic oligonucleotide
aggacccggaacaggaagg

SEQ ID NO: 195021 - RNA, 19 nt, Artificial Sequence
  Description of Artificial Sequence: Synthetic oligonucleotide
ggacucacggauccugagg

SEQ ID NO: 195022 - RNA, 19 nt, Artificial Sequence
  Description of Artificial Sequence: Synthetic oligonucleotide
cuucggcauucacuaagag

SEQ ID NO: 195023 - RNA, 19 nt, Artificial Sequence
  Description of Artificial Sequence: Synthetic oligonucleotide
ggcuauuacaaacaaugcu

SEQ ID NO: 195024 - RNA, 19 nt, Artificial Sequence
  Description of Artificial Sequence: Synthetic oligonucleotide
auuguacgauacugacaug

SEQ ID NO: 195025 - RNA, 19 nt, Artificial Sequence
  Description of Artificial Sequence: Synthetic oligonucleotide
gguuaacgaagccaggaaa

SEQ ID NO: 195026 - RNA, 19 nt, Artificial Sequence
  Description of Artificial Sequence: Synthetic oligonucleotide
ucacuaagaguuggcgaga

SEQ ID NO: 195027 - RNA, 19 nt, Artificial Sequence
  Description of Artificial Sequence: Synthetic oligonucleotide
ccauuagagccauuggcug

SEQ ID NO: 195028 - RNA, 19 nt, Artificial Sequence
  Description of Artificial Sequence: Synthetic oligonucleotide
caggugaguccaauaagga

SEQ ID NO: 195029 - RNA, 19 nt, Artificial Sequence
  Description of Artificial Sequence: Synthetic oligonucleotide
agucggucuuaucgcugcg

SEQ ID NO: 195030 - RNA, 19 nt, Artificial Sequence
  Description of Artificial Sequence: Synthetic oligonucleotide
gcgauuucugucuguuggg

SEQ ID NO: 195031 - RNA, 19 nt, Artificial Sequence
  Description of Artificial Sequence: Synthetic oligonucleotide
cuugacacguccaguaacu

SEQ ID NO: 195032 - RNA, 19 nt, Artificial Sequence
  Description of Artificial Sequence: Synthetic oligonucleotide
aguuugagccgguucccaa

SEQ ID NO: 195033 - RNA, 19 nt, Artificial Sequence
  Description of Artificial Sequence: Synthetic oligonucleotide
gaguacauaccauguuugu

SEQ ID NO: 195034 - RNA, 19 nt, Artificial Sequence
  Description of Artificial Sequence: Synthetic oligonucleotide
uuugcaguucaggucuauc

SEQ ID NO: 195035 - RNA, 19 nt, Artificial Sequence
  Description of Artificial Sequence: Synthetic oligonucleotide
uugaagcgucucuggguca

SEQ ID NO: 195036 - RNA, 19 nt, Artificial Sequence
  Description of Artificial Sequence: Synthetic oligonucleotide
ggcgucacagucauguagc

SEQ ID NO: 195037 - RNA, 19 nt, Artificial Sequence
  Description of Artificial Sequence: Synthetic oligonucleotide
ccaugaucuuauuuauuac

SEQ ID NO: 195038 - RNA, 19 nt, Artificial Sequence
  Description of Artificial Sequence: Synthetic oligonucleotide
aaaucugccgucagcuguu

SEQ ID NO: 195039 - RNA, 19 nt, Artificial Sequence
  Description of Artificial Sequence: Synthetic oligonucleotide
ggaaucuaugcugccacug

SEQ ID NO: 195040 - RNA, 19 nt, Artificial Sequence
  Description of Artificial Sequence: Synthetic oligonucleotide
uggcgagacaugucuugca

SEQ ID NO: 195041 - RNA, 19 nt, Artificial Sequence
  Description of Artificial Sequence: Synthetic oligonucleotide
caaugcugcuaugaacaug

SEQ ID NO: 195042 - RNA, 19 nt, Artificial Sequence
  Description of Artificial Sequence: Synthetic oligonucleotide
ccucacggaaucuaugcug

SEQ ID NO: 195043 - RNA, 19 nt, Artificial Sequence
  Description of Artificial Sequence: Synthetic oligonucleotide
cuuggcaacuguauagagu

SEQ ID NO: 195044 - RNA, 19 nt, Artificial Sequence
  Description of Artificial Sequence: Synthetic oligonucleotide
gcucauuucgugguaauuc

SEQ ID NO: 195045 - RNA, 19 nt, Artificial Sequence
  Description of Artificial Sequence: Synthetic oligonucleotide
uggcaacuguauagaguac

SEQ ID NO: 195046 - RNA, 19 nt, Artificial Sequence
  Description of Artificial Sequence: Synthetic oligonucleotide
uguaugcccuuaacuuaau

SEQ ID NO: 195047 - RNA, 19 nt, Artificial Sequence
  Description of Artificial Sequence: Synthetic oligonucleotide
ucacggauccugagguguc

SEQ ID NO: 195048 - RNA, 19 nt, Artificial Sequence
  Description of Artificial Sequence: Synthetic oligonucleotide
uuucuucgacaguccuuca

SEQ ID NO: 195049 - RNA, 19 nt, Artificial Sequence
  Description of Artificial Sequence: Synthetic oligonucleotide
acaucgcacagauguuccu

SEQ ID NO: 195050 - RNA, 19 nt, Artificial Sequence
  Description of Artificial Sequence: Synthetic oligonucleotide
ggaaugaucgggcaaaguu

SEQ ID NO: 195051 - RNA, 19 nt, Artificial Sequence
  Description of Artificial Sequence: Synthetic oligonucleotide
uugcgugaguugucuguga

SEQ ID NO: 195052 - RNA, 19 nt, Artificial Sequence
  Description of Artificial Sequence: Synthetic oligonucleotide
gaggagguucuaaugccuc

SEQ ID NO: 195053 - RNA, 19 nt, Artificial Sequence
  Description of Artificial Sequence: Synthetic oligonucleotide
aggguagaaucaauuggga

SEQ ID NO: 195054 - RNA, 19 nt, Artificial Sequence
  Description of Artificial Sequence: Synthetic oligonucleotide
cuccugauggcuuugcggu

SEQ ID NO: 195055 - RNA, 19 nt, Artificial Sequence
  Description of Artificial Sequence: Synthetic oligonucleotide
gauuuacagcuuguaccuc

SEQ ID NO: 195056 - RNA, 19 nt, Artificial Sequence
  Description of Artificial Sequence: Synthetic oligonucleotide
agccaguccucaaaacgag

SEQ ID NO: 195057 - RNA, 19 nt, Artificial Sequence
  Description of Artificial Sequence: Synthetic oligonucleotide
ugaagcgucucugggucaa

SEQ ID NO: 195058 - RNA, 19 nt, Artificial Sequence
  Description of Artificial Sequence: Synthetic oligonucleotide
ucgccaugucucuucaauu

SEQ ID NO: 195059 - RNA, 19 nt, Artificial Sequence
  Description of Artificial Sequence: Synthetic oligonucleotide
guacgauacugacauggua

SEQ ID NO: 195060 - RNA, 19 nt, Artificial Sequence
  Description of Artificial Sequence: Synthetic oligonucleotide
cuguauagaguaccccgga

SEQ ID NO: 195061 - RNA, 19 nt, Artificial Sequence
  Description of Artificial Sequence: Synthetic oligonucleotide
acuugugcggagggcaucu

SEQ ID NO: 195062 - RNA, 19 nt, Artificial Sequence
  Description of Artificial Sequence: Synthetic oligonucleotide
uuuugugacccugcucuuu

SEQ ID NO: 195063 - RNA, 19 nt, Artificial Sequence
  Description of Artificial Sequence: Synthetic oligonucleotide
ggacaaggcaggugagucc

SEQ ID NO: 195064 - RNA, 19 nt, Artificial Sequence
  Description of Artificial Sequence: Synthetic oligonucleotide
ccucacacaaguugaggac

SEQ ID NO: 195065 - RNA, 19 nt, Artificial Sequence
  Description of Artificial Sequence: Synthetic oligonucleotide
ggucccaucuccugauggc

SEQ ID NO: 195066 - RNA, 19 nt, Artificial Sequence
  Description of Artificial Sequence: Synthetic oligonucleotide
cgagacaugucuugcagug

SEQ ID NO: 195067 - RNA, 19 nt, Artificial Sequence
  Description of Artificial Sequence: Synthetic oligonucleotide
gaacggaagucuggucacc

SEQ ID NO: 195068 - RNA, 19 nt, Artificial Sequence
  Description of Artificial Sequence: Synthetic oligonucleotide
uggaaugaucgggcaaagu

SEQ ID NO: 195069 - RNA, 19 nt, Artificial Sequence
  Description of Artificial Sequence: Synthetic oligonucleotide
ugaggacggaggcgacacc

SEQ ID NO: 195070 - RNA, 19 nt, Artificial Sequence
  Description of Artificial Sequence: Synthetic oligonucleotide
gcgcuugcucuccacaucc

SEQ ID NO: 195071 - RNA, 19 nt, Artificial Sequence
  Description of Artificial Sequence: Synthetic oligonucleotide
ugccgucagcuguuugcag

SEQ ID NO: 195072 - RNA, 19 nt, Artificial Sequence
  Description of Artificial Sequence: Synthetic oligonucleotide
gccauauacgcuccuaaaa

SEQ ID NO: 195073 - RNA, 19 nt, Artificial Sequence
  Description of Artificial Sequence: Synthetic oligonucleotide
uauguccugccagcacuug

SEQ ID NO: 195074 - RNA, 19 nt, Artificial Sequence
  Description of Artificial Sequence: Synthetic oligonucleotide
cauaggaaagcugcccaga

SEQ ID NO: 195075 - RNA, 19 nt, Artificial Sequence
  Description of Artificial Sequence: Synthetic oligonucleotide
guacuguguuucucgaugu

SEQ ID NO: 195076 - RNA, 19 nt, Artificial Sequence
  Description of Artificial Sequence: Synthetic oligonucleotide
cauuagagccauuggcugu

SEQ ID NO: 195077 - RNA, 19 nt, Artificial Sequence
  Description of Artificial Sequence: Synthetic oligonucleotide
agguucgcuggcugagucu

SEQ ID NO: 195078 - RNA, 19 nt, Artificial Sequence
  Description of Artificial Sequence: Synthetic oligonucleotide
guaccccggaggaacuggg

SEQ ID NO: 195079 - RNA, 19 nt, Artificial Sequence
  Description of Artificial Sequence: Synthetic oligonucleotide
guggaaugaucgggcaaag

SEQ ID NO: 195080 - RNA, 19 nt, Artificial Sequence
  Description of Artificial Sequence: Synthetic oligonucleotide
agacuccaacaagccuucc

SEQ ID NO: 195081 - RNA, 19 nt, Artificial Sequence
  Description of Artificial Sequence: Synthetic oligonucleotide
uugagccgguucccaauua

SEQ ID NO: 195082 - RNA, 19 nt, Artificial Sequence
  Description of Artificial Sequence: Synthetic oligonucleotide
uugcaagagcugccaacuu

SEQ ID NO: 195083 - RNA, 19 nt, Artificial Sequence
  Description of Artificial Sequence: Synthetic oligonucleotide
uuagagccauuggcugugc

SEQ ID NO: 195084 - RNA, 19 nt, Artificial Sequence
  Description of Artificial Sequence: Synthetic oligonucleotide
cucgccaguccuccagcag

SEQ ID NO: 195085 - RNA, 19 nt, Artificial Sequence
  Description of Artificial Sequence: Synthetic oligonucleotide
ucacucaggaugguuucuu

SEQ ID NO: 195086 - RNA, 19 nt, Artificial Sequence
  Description of Artificial Sequence: Synthetic oligonucleotide
caaagucggucuuaucgcu

SEQ ID NO: 195087 - RNA, 19 nt, Artificial Sequence
  Description of Artificial Sequence: Synthetic oligonucleotide
ugcggagggcaucuugcuu

SEQ ID NO: 195088 - RNA, 19 nt, Artificial Sequence
  Description of Artificial Sequence: Synthetic oligonucleotide
gaagucuggucaccaauuu

SEQ ID NO: 195089 - RNA, 19 nt, Artificial Sequence
  Description of Artificial Sequence: Synthetic oligonucleotide
ucggucccaucuccugaug

SEQ ID NO: 195090 - RNA, 19 nt, Artificial Sequence
  Description of Artificial Sequence: Synthetic oligonucleotide
gagacaugucuugcaguga

SEQ ID NO: 195091 - RNA, 19 nt, Artificial Sequence
  Description of Artificial Sequence: Synthetic oligonucleotide
gcccagauguuauugaggu

SEQ ID NO: 195092 - RNA, 19 nt, Artificial Sequence
  Description of Artificial Sequence: Synthetic oligonucleotide
cuuuaguguuaaggcucag

SEQ ID NO: 195093 - RNA, 19 nt, Artificial Sequence
  Description of Artificial Sequence: Synthetic oligonucleotide
aaguugacuuucagauuua

SEQ ID NO: 195094 - RNA, 19 nt, Artificial Sequence
  Description of Artificial Sequence: Synthetic oligonucleotide
gauccugagguguccaguu

SEQ ID NO: 195095 - RNA, 19 nt, Artificial Sequence
  Description of Artificial Sequence: Synthetic oligonucleotide
ccugauggcuuugcggugg

SEQ ID NO: 195096 - RNA, 19 nt, Artificial Sequence
  Description of Artificial Sequence: Synthetic oligonucleotide
gguggaaugaucgggcaaa

SEQ ID NO: 195097 - RNA, 19 nt, Artificial Sequence
  Description of Artificial Sequence: Synthetic oligonucleotide
ugacuacauuugccucgug

SEQ ID NO: 195098 - RNA, 19 nt, Artificial Sequence
  Description of Artificial Sequence: Synthetic oligonucleotide
caggcuaacauuccuuuau

SEQ ID NO: 195099 - RNA, 19 nt, Artificial Sequence
  Description of Artificial Sequence: Synthetic oligonucleotide
gccgguucccaauuacaug

SEQ ID NO: 195100 - RNA, 19 nt, Artificial Sequence
  Description of Artificial Sequence: Synthetic oligonucleotide
gcccagauggcccauuaga

SEQ ID NO: 195101 - RNA, 19 nt, Artificial Sequence
  Description of Artificial Sequence: Synthetic oligonucleotide
aucuaugcugccacugcau

SEQ ID NO: 195102 - RNA, 19 nt, Artificial Sequence
  Description of Artificial Sequence: Synthetic oligonucleotide
cucguggcgauuucugucu

SEQ ID NO: 195103 - RNA, 19 nt, Artificial Sequence
  Description of Artificial Sequence: Synthetic oligonucleotide
agggugaauuuuggguuga

SEQ ID NO: 195104 - RNA, 19 nt, Artificial Sequence
  Description of Artificial Sequence: Synthetic oligonucleotide
gucggucuuaucgcugcgc

SEQ ID NO: 195105 - RNA, 19 nt, Artificial Sequence
  Description of Artificial Sequence: Synthetic oligonucleotide
cugccauauacgcuccuaa

SEQ ID NO: 195106 - RNA, 19 nt, Artificial Sequence
  Description of Artificial Sequence: Synthetic oligonucleotide
agccgguucccaauuacau

SEQ ID NO: 195107 - RNA, 19 nt, Artificial Sequence
  Description of Artificial Sequence: Synthetic oligonucleotide
cagggcauucugaacggaa

SEQ ID NO: 195108 - RNA, 19 nt, Artificial Sequence
  Description of Artificial Sequence: Synthetic oligonucleotide
caggccucgccaguccucc

SEQ ID NO: 195109 - RNA, 19 nt, Artificial Sequence
  Description of Artificial Sequence: Synthetic oligonucleotide
cuuuaugagugaguacaua

SEQ ID NO: 195110 - RNA, 19 nt, Artificial Sequence
  Description of Artificial Sequence: Synthetic oligonucleotide
auagaguaccccggaggaa

SEQ ID NO: 195111 - RNA, 19 nt, Artificial Sequence
  Description of Artificial Sequence: Synthetic oligonucleotide
cacggccuggccuggguuc

SEQ ID NO: 195112 - RNA, 19 nt, Artificial Sequence
  Description of Artificial Sequence: Synthetic oligonucleotide
ccagcacuugugcggaggg

SEQ ID NO: 195113 - RNA, 19 nt, Artificial Sequence
  Description of Artificial Sequence: Synthetic oligonucleotide
ggcuuugcggugguccacg

SEQ ID NO: 195114 - RNA, 19 nt, Artificial Sequence
  Description of Artificial Sequence: Synthetic oligonucleotide
cucggugcuguugagguua

SEQ ID NO: 195115 - RNA, 19 nt, Artificial Sequence
  Description of Artificial Sequence: Synthetic oligonucleotide
cacggauccugaggugucc

SEQ ID NO: 195116 - RNA, 19 nt, Artificial Sequence
  Description of Artificial Sequence: Synthetic oligonucleotide
ucauggguccagggaacuc

SEQ ID NO: 195117 - RNA, 19 nt, Artificial Sequence
  Description of Artificial Sequence: Synthetic oligonucleotide
gaggacggaggcgacaccu

SEQ ID NO: 195118 - RNA, 19 nt, Artificial Sequence
  Description of Artificial Sequence: Synthetic oligonucleotide
aggcgacaccuguacugug

SEQ ID NO: 195119 - RNA, 19 nt, Artificial Sequence
  Description of Artificial Sequence: Synthetic oligonucleotide
gucgccaugucucuucaau

SEQ ID NO: 195120 - RNA, 19 nt, Artificial Sequence
  Description of Artificial Sequence: Synthetic oligonucleotide
cuuguugcuucccauccau

SEQ ID NO: 195121 - RNA, 19 nt, Artificial Sequence
  Description of Artificial Sequence: Synthetic oligonucleotide
cacggaaucuaugcugcca

SEQ ID NO: 195122 - RNA, 19 nt, Artificial Sequence
  Description of Artificial Sequence: Synthetic oligonucleotide
uugccucguggcgauuucu

SEQ ID NO: 195123 - RNA, 19 nt, Artificial Sequence
  Description of Artificial Sequence: Synthetic oligonucleotide
agauggcccauuagagcca

SEQ ID NO: 195124 - RNA, 19 nt, Artificial Sequence
  Description of Artificial Sequence: Synthetic oligonucleotide
gaguaccccggaggaacug

SEQ ID NO: 195125 - RNA, 19 nt, Artificial Sequence
  Description of Artificial Sequence: Synthetic oligonucleotide
cauugcaucagugcacccu

SEQ ID NO: 195126 - RNA, 19 nt, Artificial Sequence
  Description of Artificial Sequence: Synthetic oligonucleotide
agaguaccccggaggaacu

SEQ ID NO: 195127 - RNA, 19 nt, Artificial Sequence
  Description of Artificial Sequence: Synthetic oligonucleotide
ccaguauccauuguguaaa

SEQ ID NO: 195128 - RNA, 19 nt, Artificial Sequence
  Description of Artificial Sequence: Synthetic oligonucleotide
gcgugaguugucugugaug

SEQ ID NO: 195129 - RNA, 19 nt, Artificial Sequence
  Description of Artificial Sequence: Synthetic oligonucleotide
ucccaauuacauggacuuu

SEQ ID NO: 195130 - RNA, 19 nt, Artificial Sequence
  Description of Artificial Sequence: Synthetic oligonucleotide
guucgcuggcugagucucg

SEQ ID NO: 195131 - RNA, 19 nt, Artificial Sequence
  Description of Artificial Sequence: Synthetic oligonucleotide
ccucguggcgauuucuguc

SEQ ID NO: 195132 - RNA, 19 nt, Artificial Sequence
  Description of Artificial Sequence: Synthetic oligonucleotide
gaggcgacaccuguacugu

SEQ ID NO: 195133 - RNA, 19 nt, Artificial Sequence
  Description of Artificial Sequence: Synthetic oligonucleotide
guuugagccgguucccaau

SEQ ID NO: 195134 - RNA, 19 nt, Artificial Sequence
  Description of Artificial Sequence: Synthetic oligonucleotide
gacccacacggccuggccu

SEQ ID NO: 195135 - RNA, 19 nt, Artificial Sequence
  Description of Artificial Sequence: Synthetic oligonucleotide
cccaguauccauuguguaa

SEQ ID NO: 195136 - RNA, 19 nt, Artificial Sequence
  Description of Artificial Sequence: Synthetic oligonucleotide
cucacggauccugaggugu

SEQ ID NO: 195137 - RNA, 19 nt, Artificial Sequence
  Description of Artificial Sequence: Synthetic oligonucleotide
ggucugaauugaacugcug

SEQ ID NO: 195138 - RNA, 19 nt, Artificial Sequence
  Description of Artificial Sequence: Synthetic oligonucleotide
guaacuuggccagauccuu

SEQ ID NO: 195139 - RNA, 19 nt, Artificial Sequence
  Description of Artificial Sequence: Synthetic oligonucleotide
cauugguguaucugagcau

SEQ ID NO: 195140 - RNA, 19 nt, Artificial Sequence
  Description of Artificial Sequence: Synthetic oligonucleotide
cgagaauagucauccagaa

SEQ ID NO: 195141 - RNA, 19 nt, Artificial Sequence
  Description of Artificial Sequence: Synthetic oligonucleotide
ccuucggcauucacuaaga

SEQ ID NO: 195142 - RNA, 19 nt, Artificial Sequence
  Description of Artificial Sequence: Synthetic oligonucleotide
agucgccaugucucuucaa

SEQ ID NO: 195143 - RNA, 19 nt, Artificial Sequence
  Description of Artificial Sequence: Synthetic oligonucleotide
acacggccuggccuggguu

SEQ ID NO: 195144 - RNA, 19 nt, Artificial Sequence
  Description of Artificial Sequence: Synthetic oligonucleotide
agccuucggcauucacuaa

SEQ ID NO: 195145 - RNA, 19 nt, Artificial Sequence
  Description of Artificial Sequence: Synthetic oligonucleotide
caccgccgguccagguucc

SEQ ID NO: 195146 - RNA, 19 nt, Artificial Sequence
  Description of Artificial Sequence: Synthetic oligonucleotide
gguugguagauuguacgau

SEQ ID NO: 195147 - RNA, 19 nt, Artificial Sequence
  Description of Artificial Sequence: Synthetic oligonucleotide
ggguggaaugaucgggcaa

SEQ ID NO: 195148 - RNA, 19 nt, Artificial Sequence
  Description of Artificial Sequence: Synthetic oligonucleotide
gcucgacccacacggccug

SEQ ID NO: 195149 - RNA, 19 nt, Artificial Sequence
  Description of Artificial Sequence: Synthetic oligonucleotide
cacuugugcggagggcauc

SEQ ID NO: 195150 - RNA, 19 nt, Artificial Sequence
  Description of Artificial Sequence: Synthetic oligonucleotide
gaagguucgcuggcugagu

SEQ ID NO: 195151 - RNA, 19 nt, Artificial Sequence
  Description of Artificial Sequence: Synthetic oligonucleotide
uccguguggccugcuggau

SEQ ID NO: 195152 - RNA, 19 nt, Artificial Sequence
  Description of Artificial Sequence: Synthetic oligonucleotide
cucgacccacacggccugg

SEQ ID NO: 195153 - RNA, 19 nt, Artificial Sequence
  Description of Artificial Sequence: Synthetic oligonucleotide
gcgucacagucauguagca

SEQ ID NO: 195154 - RNA, 19 nt, Artificial Sequence
  Description of Artificial Sequence: Synthetic oligonucleotide
cagguuccguguggccugc

SEQ ID NO: 195155 - RNA, 19 nt, Artificial Sequence
  Description of Artificial Sequence: Synthetic oligonucleotide
gcuccugcuuuauuugcgu

SEQ ID NO: 195156 - RNA, 19 nt, Artificial Sequence
  Description of Artificial Sequence: Synthetic oligonucleotide
ccaccgccgguccagguuc

SEQ ID NO: 195157 - RNA, 19 nt, Artificial Sequence
  Description of Artificial Sequence: Synthetic oligonucleotide
gacggaggcgacaccugua

SEQ ID NO: 195158 - RNA, 19 nt, Artificial Sequence
  Description of Artificial Sequence: Synthetic oligonucleotide
cacacaaguugaggacgga

SEQ ID NO: 195159 - RNA, 19 nt, Artificial Sequence
  Description of Artificial Sequence: Synthetic oligonucleotide
ccacucgaccuugcaagag

SEQ ID NO: 195160 - RNA, 19 nt, Artificial Sequence
  Description of Artificial Sequence: Synthetic oligonucleotide
gcacacucggucccaucuc

SEQ ID NO: 195161 - RNA, 19 nt, Artificial Sequence
  Description of Artificial Sequence: Synthetic oligonucleotide
ccgauguaggacucacgga

SEQ ID NO: 195162 - RNA, 19 nt, Artificial Sequence
  Description of Artificial Sequence: Synthetic oligonucleotide
cuguacuguguuucucgau

SEQ ID NO: 195163 - RNA, 19 nt, Artificial Sequence
  Description of Artificial Sequence: Synthetic oligonucleotide
gcgucucugggucaagggu

SEQ ID NO: 195164 - RNA, 19 nt, Artificial Sequence
  Description of Artificial Sequence: Synthetic oligonucleotide
gugcggagggcaucuugcu

SEQ ID NO: 195165 - RNA, 19 nt, Artificial Sequence
  Description of Artificial Sequence: Synthetic oligonucleotide
ccguguggccugcuggaug

SEQ ID NO: 195166 - RNA, 19 nt, Artificial Sequence
  Description of Artificial Sequence: Synthetic oligonucleotide
gcccgauguaggacucacg

SEQ ID NO: 195167 - RNA, 19 nt, Artificial Sequence
  Description of Artificial Sequence: Synthetic oligonucleotide
cucggucccaucuccugau

SEQ ID NO: 195168 - RNA, 19 nt, Artificial Sequence
  Description of Artificial Sequence: Synthetic oligonucleotide
cggcauucacuaagaguug

SEQ ID NO: 195169 - RNA, 19 nt, Artificial Sequence
  Description of Artificial Sequence: Synthetic oligonucleotide
gacccggaacaggaaggcu

SEQ ID NO: 195170 - RNA, 19 nt, Artificial Sequence
  Description of Artificial Sequence: Synthetic oligonucleotide
ggaggaccauugguguauc

SEQ ID NO: 195171 - RNA, 19 nt, Artificial Sequence
  Description of Artificial Sequence: Synthetic oligonucleotide
gucuccucacggaaucuau

SEQ ID NO: 195172 - RNA, 19 nt, Artificial Sequence
  Description of Artificial Sequence: Synthetic oligonucleotide
gccaguccucaaaacgaga

SEQ ID NO: 195173 - RNA, 19 nt, Artificial Sequence
  Description of Artificial Sequence: Synthetic oligonucleotide
augaucgggcaaaguuguu

SEQ ID NO: 195174 - RNA, 19 nt, Artificial Sequence
  Description of Artificial Sequence: Synthetic oligonucleotide
gaggaaucgcagccaccuu

SEQ ID NO: 195175 - RNA, 19 nt, Artificial Sequence
  Description of Artificial Sequence: Synthetic oligonucleotide
ggacggaggcgacaccugu

SEQ ID NO: 195176 - RNA, 19 nt, Artificial Sequence
  Description of Artificial Sequence: Synthetic oligonucleotide
aggccucgccaguccucca

SEQ ID NO: 195177 - RNA, 19 nt, Artificial Sequence
  Description of Artificial Sequence: Synthetic oligonucleotide
cccacucgaccuugcaaga

SEQ ID NO: 195178 - RNA, 19 nt, Artificial Sequence
  Description of Artificial Sequence: Synthetic oligonucleotide
cccaauuacauggacuuuu

SEQ ID NO: 195179 - RNA, 19 nt, Artificial Sequence
  Description of Artificial Sequence: Synthetic oligonucleotide
gccguccuuucugaaaucu

SEQ ID NO: 195180 - RNA, 19 nt, Artificial Sequence
  Description of Artificial Sequence: Synthetic oligonucleotide
gcugccauauacgcuccua

SEQ ID NO: 195181 - RNA, 19 nt, Artificial Sequence
  Description of Artificial Sequence: Synthetic oligonucleotide
cugcuuuauuugcgugagu

SEQ ID NO: 195182 - RNA, 19 nt, Artificial Sequence
  Description of Artificial Sequence: Synthetic oligonucleotide
cggaacaggaaggcucgac

SEQ ID NO: 195183 - RNA, 19 nt, Artificial Sequence
  Description of Artificial Sequence: Synthetic oligonucleotide
gccucguggcgauuucugu

SEQ ID NO: 195184 - RNA, 19 nt, Artificial Sequence
  Description of Artificial Sequence: Synthetic oligonucleotide
ggcucgacccacacggccu

SEQ ID NO: 195185 - RNA, 19 nt, Artificial Sequence
  Description of Artificial Sequence: Synthetic oligonucleotide
gcccuuaacuuaaucucuu

SEQ ID NO: 195186 - RNA, 19 nt, Artificial Sequence
  Description of Artificial Sequence: Synthetic oligonucleotide
agguuccguguggccugcu

SEQ ID NO: 195187 - RNA, 19 nt, Artificial Sequence
  Description of Artificial Sequence: Synthetic oligonucleotide
ggcucauuucgugguaauu

SEQ ID NO: 195188 - RNA, 19 nt, Artificial Sequence
  Description of Artificial Sequence: Synthetic oligonucleotide
cccuuaacuuaaucucuuu

SEQ ID NO: 195189 - RNA, 19 nt, Artificial Sequence
  Description of Artificial Sequence: Synthetic oligonucleotide
ccacagucgccaugucucu

SEQ ID NO: 195190 - RNA, 19 nt, Artificial Sequence
  Description of Artificial Sequence: Synthetic oligonucleotide
ggguuaccucacucaggau

SEQ ID NO: 195191 - RNA, 19 nt, Artificial Sequence
  Description of Artificial Sequence: Synthetic oligonucleotide
cacagucgccaugucucuu

SEQ ID NO: 195192 - RNA, 19 nt, Artificial Sequence
  Description of Artificial Sequence: Synthetic oligonucleotide
cgauacugacaugguaccu

SEQ ID NO: 195193 - RNA, 19 nt, Artificial Sequence
  Description of Artificial Sequence: Synthetic oligonucleotide
cggaaucuaugcugccacu

SEQ ID NO: 195194 - RNA, 19 nt, Artificial Sequence
  Description of Artificial Sequence: Synthetic oligonucleotide
cggaggcgacaccuguacu

SEQ ID NO: 195195 - RNA, 19 nt, Artificial Sequence
  Description of Artificial Sequence: Synthetic oligonucleotide
ugaagcacaagcaauaggg

SEQ ID NO: 195196 - RNA, 19 nt, Artificial Sequence
  Description of Artificial Sequence: Synthetic oligonucleotide
aguauguugacuuucaccu

SEQ ID NO: 195197 - RNA, 19 nt, Artificial Sequence
  Description of Artificial Sequence: Synthetic oligonucleotide
uuaggugcacgcaacagcg

SEQ ID NO: 195198 - RNA, 19 nt, Artificial Sequence
  Description of Artificial Sequence: Synthetic oligonucleotide
aaaaggugagcuucaggcg

SEQ ID NO: 195199 - RNA, 19 nt, Artificial Sequence
  Description of Artificial Sequence: Synthetic oligonucleotide
acugaugucccguacuugc

SEQ ID NO: 195200 - RNA, 19 nt, Artificial Sequence
  Description of Artificial Sequence: Synthetic oligonucleotide
acaauacucaguucggugg

SEQ ID NO: 195201 - RNA, 19 nt, Artificial Sequence
  Description of Artificial Sequence: Synthetic oligonucleotide
aauccaugacaucccacgc

SEQ ID NO: 195202 - RNA, 19 nt, Artificial Sequence
  Description of Artificial Sequence: Synthetic oligonucleotide
uuccauacgagucuccagg

SEQ ID NO: 195203 - RNA, 19 nt, Artificial Sequence
  Description of Artificial Sequence: Synthetic oligonucleotide
cagaaagaaguucugaccc

SEQ ID NO: 195204 - RNA, 19 nt, Artificial Sequence
  Description of Artificial Sequence: Synthetic oligonucleotide
agcguuugaugccacagcc

SEQ ID NO: 195205 - RNA, 19 nt, Artificial Sequence
  Description of Artificial Sequence: Synthetic oligonucleotide
uauggugugggaaagaguu

SEQ ID NO: 195206 - RNA, 19 nt, Artificial Sequence
  Description of Artificial Sequence: Synthetic oligonucleotide
aacaauacucaguucggug

SEQ ID NO: 195207 - RNA, 19 nt, Artificial Sequence
  Description of Artificial Sequence: Synthetic oligonucleotide
ugucccauggcauggauag

SEQ ID NO: 195208 - RNA, 19 nt, Artificial Sequence
  Description of Artificial Sequence: Synthetic oligonucleotide
gaacuugugggccucaugc

SEQ ID NO: 195209 - RNA, 19 nt, Artificial Sequence
  Description of Artificial Sequence: Synthetic oligonucleotide
auaggggcaaccaaugucc

SEQ ID NO: 195210 - RNA, 19 nt, Artificial Sequence
  Description of Artificial Sequence: Synthetic oligonucleotide
caagagguguuauaguggg

SEQ ID NO: 195211 - RNA, 19 nt, Artificial Sequence
  Description of Artificial Sequence: Synthetic oligonucleotide
uguuauaguggguaggccu

SEQ ID NO: 195212 - RNA, 19 nt, Artificial Sequence
  Description of Artificial Sequence: Synthetic oligonucleotide
acaagugaccaguaggguc

SEQ ID NO: 195213 - RNA, 19 nt, Artificial Sequence
  Description of Artificial Sequence: Synthetic oligonucleotide
ugccauaggccucauacag

SEQ ID NO: 195214 - RNA, 19 nt, Artificial Sequence
  Description of Artificial Sequence: Synthetic oligonucleotide
aaagauguguauagccagc

SEQ ID NO: 195215 - RNA, 19 nt, Artificial Sequence
  Description of Artificial Sequence: Synthetic oligonucleotide
aacuugugggccucaugcc

SEQ ID NO: 195216 - RNA, 19 nt, Artificial Sequence
  Description of Artificial Sequence: Synthetic oligonucleotide
cauacgagucuccaggugg

SEQ ID NO: 195217 - RNA, 19 nt, Artificial Sequence
  Description of Artificial Sequence: Synthetic oligonucleotide
ugaguagccaaauguaucu

SEQ ID NO: 195218 - RNA, 19 nt, Artificial Sequence
  Description of Artificial Sequence: Synthetic oligonucleotide
aguuccccaacccacguac

SEQ ID NO: 195219 - RNA, 19 nt, Artificial Sequence
  Description of Artificial Sequence: Synthetic oligonucleotide
uucauggcgccccauauca

SEQ ID NO: 195220 - RNA, 19 nt, Artificial Sequence
  Description of Artificial Sequence: Synthetic oligonucleotide
agugaauucauggcgcccc

SEQ ID NO: 195221 - RNA, 19 nt, Artificial Sequence
  Description of Artificial Sequence: Synthetic oligonucleotide
aagaagcuuauuucgggcu

SEQ ID NO: 195222 - RNA, 19 nt, Artificial Sequence
  Description of Artificial Sequence: Synthetic oligonucleotide
caaacaauacucaguucgg

SEQ ID NO: 195223 - RNA, 19 nt, Artificial Sequence
  Description of Artificial Sequence: Synthetic oligonucleotide
ucauaucgagcccaguccc

SEQ ID NO: 195224 - RNA, 19 nt, Artificial Sequence
  Description of Artificial Sequence: Synthetic oligonucleotide
ucuccgaagccgaagagga

SEQ ID NO: 195225 - RNA, 19 nt, Artificial Sequence
  Description of Artificial Sequence: Synthetic oligonucleotide
uuauuucgggcuagggagg

SEQ ID NO: 195226 - RNA, 19 nt, Artificial Sequence
  Description of Artificial Sequence: Synthetic oligonucleotide
guugauaacgaggaggccc

SEQ ID NO: 195227 - RNA, 19 nt, Artificial Sequence
  Description of Artificial Sequence: Synthetic oligonucleotide
agaucuauccagcgguggg

SEQ ID NO: 195228 - RNA, 19 nt, Artificial Sequence
  Description of Artificial Sequence: Synthetic oligonucleotide
agucucacccggaugaugc

SEQ ID NO: 195229 - RNA, 19 nt, Artificial Sequence
  Description of Artificial Sequence: Synthetic oligonucleotide
ggcguaagugaauucaugg

SEQ ID NO: 195230 - RNA, 19 nt, Artificial Sequence
  Description of Artificial Sequence: Synthetic oligonucleotide
agaaaaggugagcuucagg

SEQ ID NO: 195231 - RNA, 19 nt, Artificial Sequence
  Description of Artificial Sequence: Synthetic oligonucleotide
cuugaagggccaaagccag

SEQ ID NO: 195232 - RNA, 19 nt, Artificial Sequence
  Description of Artificial Sequence: Synthetic oligonucleotide
gaagaagguaugguguggg

SEQ ID NO: 195233 - RNA, 19 nt, Artificial Sequence
  Description of Artificial Sequence: Synthetic oligonucleotide
uggaagcggacauaggggc

SEQ ID NO: 195234 - RNA, 19 nt, Artificial Sequence
  Description of Artificial Sequence: Synthetic oligonucleotide
uagggacuucacuugaaag

SEQ ID NO: 195235 - RNA, 19 nt, Artificial Sequence
  Description of Artificial Sequence: Synthetic oligonucleotide
uccguauucgagcagggaa

SEQ ID NO: 195236 - RNA, 19 nt, Artificial Sequence
  Description of Artificial Sequence: Synthetic oligonucleotide
cuuguguggcaucaaggcg

SEQ ID NO: 195237 - RNA, 19 nt, Artificial Sequence
  Description of Artificial Sequence: Synthetic oligonucleotide
ucuccacaaacaauacuca

SEQ ID NO: 195238 - RNA, 19 nt, Artificial Sequence
  Description of Artificial Sequence: Synthetic oligonucleotide
uauucgagcagggaacucc

SEQ ID NO: 195239 - RNA, 19 nt, Artificial Sequence
  Description of Artificial Sequence: Synthetic oligonucleotide
cucauaucgagcccagucc

SEQ ID NO: 195240 - RNA, 19 nt, Artificial Sequence
  Description of Artificial Sequence: Synthetic oligonucleotide
agacagaucuauccagcgg

SEQ ID NO: 195241 - RNA, 19 nt, Artificial Sequence
  Description of Artificial Sequence: Synthetic oligonucleotide
uaagugaauucauggcgcc

SEQ ID NO: 195242 - RNA, 19 nt, Artificial Sequence
  Description of Artificial Sequence: Synthetic oligonucleotide
uugauaacgaggaggcccu

SEQ ID NO: 195243 - RNA, 19 nt, Artificial Sequence
  Description of Artificial Sequence: Synthetic oligonucleotide
aaagacgaagucaguguuc

SEQ ID NO: 195244 - RNA, 19 nt, Artificial Sequence
  Description of Artificial Sequence: Synthetic oligonucleotide
aauucauggcgccccauau

SEQ ID NO: 195245 - RNA, 19 nt, Artificial Sequence
  Description of Artificial Sequence: Synthetic oligonucleotide
agauacagaaaaggcacuc

SEQ ID NO: 195246 - RNA, 19 nt, Artificial Sequence
  Description of Artificial Sequence: Synthetic oligonucleotide
uccacggcaggcaaacucc

SEQ ID NO: 195247 - RNA, 19 nt, Artificial Sequence
  Description of Artificial Sequence: Synthetic oligonucleotide
caggcuguaucaauguggc

SEQ ID NO: 195248 - RNA, 19 nt, Artificial Sequence
  Description of Artificial Sequence: Synthetic oligonucleotide
ugcuaaucuaagcauuuau

SEQ ID NO: 195249 - RNA, 19 nt, Artificial Sequence
  Description of Artificial Sequence: Synthetic oligonucleotide
uccaugacaucccacgcgu

SEQ ID NO: 195250 - RNA, 19 nt, Artificial Sequence
  Description of Artificial Sequence: Synthetic oligonucleotide
auaacgaggaggcccuuag

SEQ ID NO: 195251 - RNA, 19 nt, Artificial Sequence
  Description of Artificial Sequence: Synthetic oligonucleotide
aagcaauagggacuucacu

SEQ ID NO: 195252 - RNA, 19 nt, Artificial Sequence
  Description of Artificial Sequence: Synthetic oligonucleotide
cacguacacagcuggaccg

SEQ ID NO: 195253 - RNA, 19 nt, Artificial Sequence
  Description of Artificial Sequence: Synthetic oligonucleotide
gauacagaaaaggcacucc

SEQ ID NO: 195254 - RNA, 19 nt, Artificial Sequence
  Description of Artificial Sequence: Synthetic oligonucleotide
agcacauuuccgaacaguc

SEQ ID NO: 195255 - RNA, 19 nt, Artificial Sequence
  Description of Artificial Sequence: Synthetic oligonucleotide
gacuucacuugaaagggag

SEQ ID NO: 195256 - RNA, 19 nt, Artificial Sequence
  Description of Artificial Sequence: Synthetic oligonucleotide
ggcaaagauguguauagcc

SEQ ID NO: 195257 - RNA, 19 nt, Artificial Sequence
  Description of Artificial Sequence: Synthetic oligonucleotide
guguugauaacgaggaggc

SEQ ID NO: 195258 - RNA, 19 nt, Artificial Sequence
  Description of Artificial Sequence: Synthetic oligonucleotide
cagcguguugauaacgagg

SEQ ID NO: 195259 - RNA, 19 nt, Artificial Sequence
  Description of Artificial Sequence: Synthetic oligonucleotide
gggcccauaccucauaucg

SEQ ID NO: 195260 - RNA, 19 nt, Artificial Sequence
  Description of Artificial Sequence: Synthetic oligonucleotide
aguguugcccaaccgcuuc

SEQ ID NO: 195261 - RNA, 19 nt, Artificial Sequence
  Description of Artificial Sequence: Synthetic oligonucleotide
gauuucguagguagccugg

SEQ ID NO: 195262 - RNA, 19 nt, Artificial Sequence
  Description of Artificial Sequence: Synthetic oligonucleotide
ucuaagcauuuauugcaca

SEQ ID NO: 195263 - RNA, 19 nt, Artificial Sequence
  Description of Artificial Sequence: Synthetic oligonucleotide
uacccauucgagcuguugu

SEQ ID NO: 195264 - RNA, 19 nt, Artificial Sequence
  Description of Artificial Sequence: Synthetic oligonucleotide
uuucgggcuagggaggugg

SEQ ID NO: 195265 - RNA, 19 nt, Artificial Sequence
  Description of Artificial Sequence: Synthetic oligonucleotide
cagccuuagaaccagugug

SEQ ID NO: 195266 - RNA, 19 nt, Artificial Sequence
  Description of Artificial Sequence: Synthetic oligonucleotide
uugcccaaccgcuucaggc

SEQ ID NO: 195267 - RNA, 19 nt, Artificial Sequence
  Description of Artificial Sequence: Synthetic oligonucleotide
cagacagaucuauccagcg

SEQ ID NO: 195268 - RNA, 19 nt, Artificial Sequence
  Description of Artificial Sequence: Synthetic oligonucleotide
agccuuagaaccagugugc

SEQ ID NO: 195269 - RNA, 19 nt, Artificial Sequence
  Description of Artificial Sequence: Synthetic oligonucleotide
ggcuguaucaauguggcag

SEQ ID NO: 195270 - RNA, 19 nt, Artificial Sequence
  Description of Artificial Sequence: Synthetic oligonucleotide
cacgucaugaaggauuugc

SEQ ID NO: 195271 - RNA, 19 nt, Artificial Sequence
  Description of Artificial Sequence: Synthetic oligonucleotide
aggacauugccucguacug

SEQ ID NO: 195272 - RNA, 19 nt, Artificial Sequence
  Description of Artificial Sequence: Synthetic oligonucleotide
uucccgauuccucuucuug

SEQ ID NO: 195273 - RNA, 19 nt, Artificial Sequence
  Description of Artificial Sequence: Synthetic oligonucleotide
aaacaauacucaguucggu

SEQ ID NO: 195274 - RNA, 19 nt, Artificial Sequence
  Description of Artificial Sequence: Synthetic oligonucleotide
cugaguagccaaauguauc

SEQ ID NO: 195275 - RNA, 19 nt, Artificial Sequence
  Description of Artificial Sequence: Synthetic oligonucleotide
gagguguuauaguggguag

SEQ ID NO: 195276 - RNA, 19 nt, Artificial Sequence
  Description of Artificial Sequence: Synthetic oligonucleotide
cacagaaccgucagucucc

SEQ ID NO: 195277 - RNA, 19 nt, Artificial Sequence
  Description of Artificial Sequence: Synthetic oligonucleotide
agcacaaccucuuggcuga

SEQ ID NO: 195278 - RNA, 19 nt, Artificial Sequence
  Description of Artificial Sequence: Synthetic oligonucleotide
agcguggauaacaccagcc

SEQ ID NO: 195279 - RNA, 19 nt, Artificial Sequence
  Description of Artificial Sequence: Synthetic oligonucleotide
cuggguauaggaagugggc

SEQ ID NO: 195280 - RNA, 19 nt, Artificial Sequence
  Description of Artificial Sequence: Synthetic oligonucleotide
gacuuucaccuccauguug

SEQ ID NO: 195281 - RNA, 19 nt, Artificial Sequence
  Description of Artificial Sequence: Synthetic oligonucleotide
uuagaaccagugugcgggg

SEQ ID NO: 195282 - RNA, 19 nt, Artificial Sequence
  Description of Artificial Sequence: Synthetic oligonucleotide
gauaguauguugacuuuca

SEQ ID NO: 195283 - RNA, 19 nt, Artificial Sequence
  Description of Artificial Sequence: Synthetic oligonucleotide
cagaugguaauccaugaca

SEQ ID NO: 195284 - RNA, 19 nt, Artificial Sequence
  Description of Artificial Sequence: Synthetic oligonucleotide
auucauggcgccccauauc

SEQ ID NO: 195285 - RNA, 19 nt, Artificial Sequence
  Description of Artificial Sequence: Synthetic oligonucleotide
ucccuauuguuggucaccg

SEQ ID NO: 195286 - RNA, 19 nt, Artificial Sequence
  Description of Artificial Sequence: Synthetic oligonucleotide
cuggauuucguagguagcc

SEQ ID NO: 195287 - RNA, 19 nt, Artificial Sequence
  Description of Artificial Sequence: Synthetic oligonucleotide
gacagaucuauccagcggu

SEQ ID NO: 195288 - RNA, 19 nt, Artificial Sequence
  Description of Artificial Sequence: Synthetic oligonucleotide
agaagaagguauggugugg

SEQ ID NO: 195289 - RNA, 19 nt, Artificial Sequence
  Description of Artificial Sequence: Synthetic oligonucleotide
aaccucuuggcugagccga

SEQ ID NO: 195290 - RNA, 19 nt, Artificial Sequence
  Description of Artificial Sequence: Synthetic oligonucleotide
cacgcgucccaauacaaug

SEQ ID NO: 195291 - RNA, 19 nt, Artificial Sequence
  Description of Artificial Sequence: Synthetic oligonucleotide
ggacaagugaccaguaggg

SEQ ID NO: 195292 - RNA, 19 nt, Artificial Sequence
  Description of Artificial Sequence: Synthetic oligonucleotide
uggguauaggaagugggca

SEQ ID NO: 195293 - RNA, 19 nt, Artificial Sequence
  Description of Artificial Sequence: Synthetic oligonucleotide
uccaacacuacugcuggug

SEQ ID NO: 195294 - RNA, 19 nt, Artificial Sequence
  Description of Artificial Sequence: Synthetic oligonucleotide
aggugcacgcaacagcgag

SEQ ID NO: 195295 - RNA, 19 nt, Artificial Sequence
  Description of Artificial Sequence: Synthetic oligonucleotide
auuccauacgagucuccag

SEQ ID NO: 195296 - RNA, 19 nt, Artificial Sequence
  Description of Artificial Sequence: Synthetic oligonucleotide
auagccaacacuaggcacu

SEQ ID NO: 195297 - RNA, 19 nt, Artificial Sequence
  Description of Artificial Sequence: Synthetic oligonucleotide
uacucaguucgguggaggc

SEQ ID NO: 195298 - RNA, 19 nt, Artificial Sequence
  Description of Artificial Sequence: Synthetic oligonucleotide
acuggauuucguagguagc

SEQ ID NO: 195299 - RNA, 19 nt, Artificial Sequence
  Description of Artificial Sequence: Synthetic oligonucleotide
acuugugggccucaugcca

SEQ ID NO: 195300 - RNA, 19 nt, Artificial Sequence
  Description of Artificial Sequence: Synthetic oligonucleotide
caacacuaggcacugucac

SEQ ID NO: 195301 - RNA, 19 nt, Artificial Sequence
  Description of Artificial Sequence: Synthetic oligonucleotide
aucuccgaagccgaagagg

SEQ ID NO: 195302 - RNA, 19 nt, Artificial Sequence
  Description of Artificial Sequence: Synthetic oligonucleotide
uguguauagccagcagucc

SEQ ID NO: 195303 - RNA, 19 nt, Artificial Sequence
  Description of Artificial Sequence: Synthetic oligonucleotide
cauaccucauaucgagccc

SEQ ID NO: 195304 - RNA, 19 nt, Artificial Sequence
  Description of Artificial Sequence: Synthetic oligonucleotide
cuugugggccucaugccag

SEQ ID NO: 195305 - RNA, 19 nt, Artificial Sequence
  Description of Artificial Sequence: Synthetic oligonucleotide
uaacgaggaggcccuuagg

SEQ ID NO: 195306 - RNA, 19 nt, Artificial Sequence
  Description of Artificial Sequence: Synthetic oligonucleotide
agcguguugauaacgagga

SEQ ID NO: 195307 - RNA, 19 nt, Artificial Sequence
  Description of Artificial Sequence: Synthetic oligonucleotide
cauggcgccccauaucagc

SEQ ID NO: 195308 - RNA, 19 nt, Artificial Sequence
  Description of Artificial Sequence: Synthetic oligonucleotide
ccauaccucauaucgagcc

SEQ ID NO: 195309 - RNA, 19 nt, Artificial Sequence
  Description of Artificial Sequence: Synthetic oligonucleotide
uugucccuauuguugguca

SEQ ID NO: 195310 - RNA, 19 nt, Artificial Sequence
  Description of Artificial Sequence: Synthetic oligonucleotide
uucgguggaggcugaagca

SEQ ID NO: 195311 - RNA, 19 nt, Artificial Sequence
  Description of Artificial Sequence: Synthetic oligonucleotide
gaugguaauccaugacauc

SEQ ID NO: 195312 - RNA, 19 nt, Artificial Sequence
  Description of Artificial Sequence: Synthetic oligonucleotide
uaggcagcguggauaacac

SEQ ID NO: 195313 - RNA, 19 nt, Artificial Sequence
  Description of Artificial Sequence: Synthetic oligonucleotide
auaggccucauacagccuu

SEQ ID NO: 195314 - RNA, 19 nt, Artificial Sequence
  Description of Artificial Sequence: Synthetic oligonucleotide
cagcacaaccucuuggcug

SEQ ID NO: 195315 - RNA, 19 nt, Artificial Sequence
  Description of Artificial Sequence: Synthetic oligonucleotide
agaugguaauccaugacau

SEQ ID NO: 195316 - RNA, 19 nt, Artificial Sequence
  Description of Artificial Sequence: Synthetic oligonucleotide
auguuggccaaagaacuug

SEQ ID NO: 195317 - RNA, 19 nt, Artificial Sequence
  Description of Artificial Sequence: Synthetic oligonucleotide
caaagaacuuggaggccag

SEQ ID NO: 195318 - RNA, 19 nt, Artificial Sequence
  Description of Artificial Sequence: Synthetic oligonucleotide
cauggguaguguaggugcc

SEQ ID NO: 195319 - RNA, 19 nt, Artificial Sequence
  Description of Artificial Sequence: Synthetic oligonucleotide
ccaagagguguuauagugg

SEQ ID NO: 195320 - RNA, 19 nt, Artificial Sequence
  Description of Artificial Sequence: Synthetic oligonucleotide
guaggucucaggcugggca

SEQ ID NO: 195321 - RNA, 19 nt, Artificial Sequence
  Description of Artificial Sequence: Synthetic oligonucleotide
agugccuacugccaggguu

SEQ ID NO: 195322 - RNA, 19 nt, Artificial Sequence
  Description of Artificial Sequence: Synthetic oligonucleotide
aggcgguuguccugaaggg

SEQ ID NO: 195323 - RNA, 19 nt, Artificial Sequence
  Description of Artificial Sequence: Synthetic oligonucleotide
gcugcaacugggcugcugg

SEQ ID NO: 195324 - RNA, 19 nt, Artificial Sequence
  Description of Artificial Sequence: Synthetic oligonucleotide
gaccaguagggucucgcug

SEQ ID NO: 195325 - RNA, 19 nt, Artificial Sequence
  Description of Artificial Sequence: Synthetic oligonucleotide
gaucuauccagcggugggc

SEQ ID NO: 195326 - RNA, 19 nt, Artificial Sequence
  Description of Artificial Sequence: Synthetic oligonucleotide
agguguuauaguggguagg

SEQ ID NO: 195327 - RNA, 19 nt, Artificial Sequence
  Description of Artificial Sequence: Synthetic oligonucleotide
agggacaagugaccaguag

SEQ ID NO: 195328 - RNA, 19 nt, Artificial Sequence
  Description of Artificial Sequence: Synthetic oligonucleotide
agagguguuauagugggua

SEQ ID NO: 195329 - RNA, 19 nt, Artificial Sequence
  Description of Artificial Sequence: Synthetic oligonucleotide
auuucguagguagccuggg

SEQ ID NO: 195330 - RNA, 19 nt, Artificial Sequence
  Description of Artificial Sequence: Synthetic oligonucleotide
uguaucaauguggcagugu

SEQ ID NO: 195331 - RNA, 19 nt, Artificial Sequence
  Description of Artificial Sequence: Synthetic oligonucleotide
guguauagccagcagucca

SEQ ID NO: 195332 - RNA, 19 nt, Artificial Sequence
  Description of Artificial Sequence: Synthetic oligonucleotide
uccauacgagucuccaggu

SEQ ID NO: 195333 - RNA, 19 nt, Artificial Sequence
  Description of Artificial Sequence: Synthetic oligonucleotide
auacucaguucgguggagg

SEQ ID NO: 195334 - RNA, 19 nt, Artificial Sequence
  Description of Artificial Sequence: Synthetic oligonucleotide
ugccucguacugauguccc

SEQ ID NO: 195335 - RNA, 19 nt, Artificial Sequence
  Description of Artificial Sequence: Synthetic oligonucleotide
aucccacgcgucccaauac

SEQ ID NO: 195336 - RNA, 19 nt, Artificial Sequence
  Description of Artificial Sequence: Synthetic oligonucleotide
aagcuuauuucgggcuagg

SEQ ID NO: 195337 - RNA, 19 nt, Artificial Sequence
  Description of Artificial Sequence: Synthetic oligonucleotide
uugccucguacugaugucc

SEQ ID NO: 195338 - RNA, 19 nt, Artificial Sequence
  Description of Artificial Sequence: Synthetic oligonucleotide
cucaguucgguggaggcug

SEQ ID NO: 195339 - RNA, 19 nt, Artificial Sequence
  Description of Artificial Sequence: Synthetic oligonucleotide
ugagcagcguauugccaug

SEQ ID NO: 195340 - RNA, 19 nt, Artificial Sequence
  Description of Artificial Sequence: Synthetic oligonucleotide
gcacgcaacagcgagaggc

SEQ ID NO: 195341 - RNA, 19 nt, Artificial Sequence
  Description of Artificial Sequence: Synthetic oligonucleotide
augagccucacaguuguug

SEQ ID NO: 195342 - RNA, 19 nt, Artificial Sequence
  Description of Artificial Sequence: Synthetic oligonucleotide
acccauucgagcuguugug

SEQ ID NO: 195343 - RNA, 19 nt, Artificial Sequence
  Description of Artificial Sequence: Synthetic oligonucleotide
aauguaucuggcagccaga

SEQ ID NO: 195344 - RNA, 19 nt, Artificial Sequence
  Description of Artificial Sequence: Synthetic oligonucleotide
ugccagugcaccucagugu

SEQ ID NO: 195345 - RNA, 19 nt, Artificial Sequence
  Description of Artificial Sequence: Synthetic oligonucleotide
agaagcuuauuucgggcua

SEQ ID NO: 195346 - RNA, 19 nt, Artificial Sequence
  Description of Artificial Sequence: Synthetic oligonucleotide
gcaaccaauguccagcaca

SEQ ID NO: 195347 - RNA, 19 nt, Artificial Sequence
  Description of Artificial Sequence: Synthetic oligonucleotide
auaccucauaucgagccca

SEQ ID NO: 195348 - RNA, 19 nt, Artificial Sequence
  Description of Artificial Sequence: Synthetic oligonucleotide
uuccccaacccacguacac

SEQ ID NO: 195349 - RNA, 19 nt, Artificial Sequence
  Description of Artificial Sequence: Synthetic oligonucleotide
caaggcguaagugaauuca

SEQ ID NO: 195350 - RNA, 19 nt, Artificial Sequence
  Description of Artificial Sequence: Synthetic oligonucleotide
uaccucauaucgagcccag

SEQ ID NO: 195351 - RNA, 19 nt, Artificial Sequence
  Description of Artificial Sequence: Synthetic oligonucleotide
auacgagucuccagguggg

SEQ ID NO: 195352 - RNA, 19 nt, Artificial Sequence
  Description of Artificial Sequence: Synthetic oligonucleotide
gcguaagugaauucauggc

SEQ ID NO: 195353 - RNA, 19 nt, Artificial Sequence
  Description of Artificial Sequence: Synthetic oligonucleotide
gagaaaaggugagcuucag

SEQ ID NO: 195354 - RNA, 19 nt, Artificial Sequence
  Description of Artificial Sequence: Synthetic oligonucleotide
agcguauugccaugggaau

SEQ ID NO: 195355 - RNA, 19 nt, Artificial Sequence
  Description of Artificial Sequence: Synthetic oligonucleotide
gcccauaccucauaucgag

SEQ ID NO: 195356 - RNA, 19 nt, Artificial Sequence
  Description of Artificial Sequence: Synthetic oligonucleotide
aggcagcguggauaacacc

SEQ ID NO: 195357 - RNA, 19 nt, Artificial Sequence
  Description of Artificial Sequence: Synthetic oligonucleotide
ccugcauuccauacgaguc

SEQ ID NO: 195358 - RNA, 19 nt, Artificial Sequence
  Description of Artificial Sequence: Synthetic oligonucleotide
aguggaccagcacucggga

SEQ ID NO: 195359 - RNA, 19 nt, Artificial Sequence
  Description of Artificial Sequence: Synthetic oligonucleotide
acagccgcucaugaucugg

SEQ ID NO: 195360 - RNA, 19 nt, Artificial Sequence
  Description of Artificial Sequence: Synthetic oligonucleotide
gaggacauugccucguacu

SEQ ID NO: 195361 - RNA, 19 nt, Artificial Sequence
  Description of Artificial Sequence: Synthetic oligonucleotide
cagcguauugccaugggaa

SEQ ID NO: 195362 - RNA, 19 nt, Artificial Sequence
  Description of Artificial Sequence: Synthetic oligonucleotide
uguugauaacgaggaggcc

SEQ ID NO: 195363 - RNA, 19 nt, Artificial Sequence
  Description of Artificial Sequence: Synthetic oligonucleotide
ucaaggcguaagugaauuc

SEQ ID NO: 195364 - RNA, 19 nt, Artificial Sequence
  Description of Artificial Sequence: Synthetic oligonucleotide
ucauggcgccccauaucag

SEQ ID NO: 195365 - RNA, 19 nt, Artificial Sequence
  Description of Artificial Sequence: Synthetic oligonucleotide
ucccacgcgucccaauaca

SEQ ID NO: 195366 - RNA, 19 nt, Artificial Sequence
  Description of Artificial Sequence: Synthetic oligonucleotide
uggauuucguagguagccu

SEQ ID NO: 195367 - RNA, 19 nt, Artificial Sequence
  Description of Artificial Sequence: Synthetic oligonucleotide
ggauuucguagguagccug

SEQ ID NO: 195368 - RNA, 19 nt, Artificial Sequence
  Description of Artificial Sequence: Synthetic oligonucleotide
aucgagcccagucccaaga

SEQ ID NO: 195369 - RNA, 19 nt, Artificial Sequence
  Description of Artificial Sequence: Synthetic oligonucleotide
caaccucuuggcugagccg

SEQ ID NO: 195370 - RNA, 19 nt, Artificial Sequence
  Description of Artificial Sequence: Synthetic oligonucleotide
gugcacgcaacagcgagag

SEQ ID NO: 195371 - RNA, 19 nt, Artificial Sequence
  Description of Artificial Sequence: Synthetic oligonucleotide
agcagcguauugccauggg

SEQ ID NO: 195372 - RNA, 19 nt, Artificial Sequence
  Description of Artificial Sequence: Synthetic oligonucleotide
ugagccgacugcuggggcu

SEQ ID NO: 195373 - RNA, 19 nt, Artificial Sequence
  Description of Artificial Sequence: Synthetic oligonucleotide
uauugccaugggaauggau

SEQ ID NO: 195374 - RNA, 19 nt, Artificial Sequence
  Description of Artificial Sequence: Synthetic oligonucleotide
caugggaauggaugucuuc

SEQ ID NO: 195375 - RNA, 19 nt, Artificial Sequence
  Description of Artificial Sequence: Synthetic oligonucleotide
uggauaguauguugacuuu

SEQ ID NO: 195376 - RNA, 19 nt, Artificial Sequence
  Description of Artificial Sequence: Synthetic oligonucleotide
cagaucuauccagcggugg

SEQ ID NO: 195377 - RNA, 19 nt, Artificial Sequence
  Description of Artificial Sequence: Synthetic oligonucleotide
acgcgucccaauacaaugg

SEQ ID NO: 195378 - RNA, 19 nt, Artificial Sequence
  Description of Artificial Sequence: Synthetic oligonucleotide
aauagggacuucacuugaa

SEQ ID NO: 195379 - RNA, 19 nt, Artificial Sequence
  Description of Artificial Sequence: Synthetic oligonucleotide
caaccaauguccagcacaa

SEQ ID NO: 195380 - RNA, 19 nt, Artificial Sequence
  Description of Artificial Sequence: Synthetic oligonucleotide
uuacccauucgagcuguug

SEQ ID NO: 195381 - RNA, 19 nt, Artificial Sequence
  Description of Artificial Sequence: Synthetic oligonucleotide
gaagggacaagugaccagu

SEQ ID NO: 195382 - RNA, 19 nt, Artificial Sequence
  Description of Artificial Sequence: Synthetic oligonucleotide
cugcccugcauuccauacg

SEQ ID NO: 195383 - RNA, 19 nt, Artificial Sequence
  Description of Artificial Sequence: Synthetic oligonucleotide
ccaaauguaucuggcagcc

SEQ ID NO: 195384 - RNA, 19 nt, Artificial Sequence
  Description of Artificial Sequence: Synthetic oligonucleotide
uaggggcaaccaaugucca

SEQ ID NO: 195385 - RNA, 19 nt, Artificial Sequence
  Description of Artificial Sequence: Synthetic oligonucleotide
uugguccgccccuuguccc

SEQ ID NO: 195386 - RNA, 19 nt, Artificial Sequence
  Description of Artificial Sequence: Synthetic oligonucleotide
aaggcguaagugaauucau

SEQ ID NO: 195387 - RNA, 19 nt, Artificial Sequence
  Description of Artificial Sequence: Synthetic oligonucleotide
ugaccaguagggucucgcu

SEQ ID NO: 195388 - RNA, 19 nt, Artificial Sequence
  Description of Artificial Sequence: Synthetic oligonucleotide
ucguacugaugucccguac

SEQ ID NO: 195389 - RNA, 19 nt, Artificial Sequence
  Description of Artificial Sequence: Synthetic oligonucleotide
uaucgagcccagucccaag

SEQ ID NO: 195390 - RNA, 19 nt, Artificial Sequence
  Description of Artificial Sequence: Synthetic oligonucleotide
ugcauuccauacgagucuc

SEQ ID NO: 195391 - RNA, 19 nt, Artificial Sequence
  Description of Artificial Sequence: Synthetic oligonucleotide
cauuguguaguuccaggaa

SEQ ID NO: 195392 - RNA, 19 nt, Artificial Sequence
  Description of Artificial Sequence: Synthetic oligonucleotide
ucuauccagcggugggccc

SEQ ID NO: 195393 - RNA, 19 nt, Artificial Sequence
  Description of Artificial Sequence: Synthetic oligonucleotide
ugugcggggcugauggcuc

SEQ ID NO: 195394 - RNA, 19 nt, Artificial Sequence
  Description of Artificial Sequence: Synthetic oligonucleotide
caauacucaguucggugga

SEQ ID NO: 195395 - RNA, 19 nt, Artificial Sequence
  Description of Artificial Sequence: Synthetic oligonucleotide
uuauaguggguaggccucu

SEQ ID NO: 195396 - RNA, 19 nt, Artificial Sequence
  Description of Artificial Sequence: Synthetic oligonucleotide
cguuugaugccacagccgc

SEQ ID NO: 195397 - RNA, 19 nt, Artificial Sequence
  Description of Artificial Sequence: Synthetic oligonucleotide
agccagaacucagagcaca

SEQ ID NO: 195398 - RNA, 19 nt, Artificial Sequence
  Description of Artificial Sequence: Synthetic oligonucleotide
gaauucauggcgccccaua

SEQ ID NO: 195399 - RNA, 19 nt, Artificial Sequence
  Description of Artificial Sequence: Synthetic oligonucleotide
uguguggggccaccacccc

SEQ ID NO: 195400 - RNA, 19 nt, Artificial Sequence
  Description of Artificial Sequence: Synthetic oligonucleotide
gaagccacugugguugguc

SEQ ID NO: 195401 - RNA, 19 nt, Artificial Sequence
  Description of Artificial Sequence: Synthetic oligonucleotide
gcauugagcagcguauugc

SEQ ID NO: 195402 - RNA, 19 nt, Artificial Sequence
  Description of Artificial Sequence: Synthetic oligonucleotide
ggaagaguuccccaaccca

SEQ ID NO: 195403 - RNA, 19 nt, Artificial Sequence
  Description of Artificial Sequence: Synthetic oligonucleotide
agcuuguggacaucacgau

SEQ ID NO: 195404 - RNA, 19 nt, Artificial Sequence
  Description of Artificial Sequence: Synthetic oligonucleotide
cauugccucguacugaugu

SEQ ID NO: 195405 - RNA, 19 nt, Artificial Sequence
  Description of Artificial Sequence: Synthetic oligonucleotide
guccacggcaggcaaacuc

SEQ ID NO: 195406 - RNA, 19 nt, Artificial Sequence
  Description of Artificial Sequence: Synthetic oligonucleotide
ucucacccggaugaugcca

SEQ ID NO: 195407 - RNA, 19 nt, Artificial Sequence
  Description of Artificial Sequence: Synthetic oligonucleotide
auaguggguaggccucuga

SEQ ID NO: 195408 - RNA, 19 nt, Artificial Sequence
  Description of Artificial Sequence: Synthetic oligonucleotide
agcuggaccgagucucucu

SEQ ID NO: 195409 - RNA, 19 nt, Artificial Sequence
  Description of Artificial Sequence: Synthetic oligonucleotide
aggugcccaaacuggauuu

SEQ ID NO: 195410 - RNA, 19 nt, Artificial Sequence
  Description of Artificial Sequence: Synthetic oligonucleotide
aagcggacauaggggcaac

SEQ ID NO: 195411 - RNA, 19 nt, Artificial Sequence
  Description of Artificial Sequence: Synthetic oligonucleotide
guguuauaguggguaggcc

SEQ ID NO: 195412 - RNA, 19 nt, Artificial Sequence
  Description of Artificial Sequence: Synthetic oligonucleotide
uaggugcacgcaacagcga

SEQ ID NO: 195413 - RNA, 19 nt, Artificial Sequence
  Description of Artificial Sequence: Synthetic oligonucleotide
aguucgguggaggcugaag

SEQ ID NO: 195414 - RNA, 19 nt, Artificial Sequence
  Description of Artificial Sequence: Synthetic oligonucleotide
ggcuccguauucgagcagg

SEQ ID NO: 195415 - RNA, 19 nt, Artificial Sequence
  Description of Artificial Sequence: Synthetic oligonucleotide
cagcguggauaacaccagc

SEQ ID NO: 195416 - RNA, 19 nt, Artificial Sequence
  Description of Artificial Sequence: Synthetic oligonucleotide
uauaguggguaggccucug

SEQ ID NO: 195417 - RNA, 19 nt, Artificial Sequence
  Description of Artificial Sequence: Synthetic oligonucleotide
ugcacgcaacagcgagagg

SEQ ID NO: 195418 - RNA, 19 nt, Artificial Sequence
  Description of Artificial Sequence: Synthetic oligonucleotide
agcggacauaggggcaacc

SEQ ID NO: 195419 - RNA, 19 nt, Artificial Sequence
  Description of Artificial Sequence: Synthetic oligonucleotide
ggauaguauguugacuuuc

SEQ ID NO: 195420 - RNA, 19 nt, Artificial Sequence
  Description of Artificial Sequence: Synthetic oligonucleotide
cauuccauacgagucucca

SEQ ID NO: 195421 - RNA, 19 nt, Artificial Sequence
  Description of Artificial Sequence: Synthetic oligonucleotide
gaaccagugugcggggcug

SEQ ID NO: 195422 - RNA, 19 nt, Artificial Sequence
  Description of Artificial Sequence: Synthetic oligonucleotide
ccucauaucgagcccaguc

SEQ ID NO: 195423 - RNA, 19 nt, Artificial Sequence
  Description of Artificial Sequence: Synthetic oligonucleotide
ccguauucgagcagggaac

SEQ ID NO: 195424 - RNA, 19 nt, Artificial Sequence
  Description of Artificial Sequence: Synthetic oligonucleotide
ugguugguccgccccuugu

SEQ ID NO: 195425 - RNA, 19 nt, Artificial Sequence
  Description of Artificial Sequence: Synthetic oligonucleotide
uggggccuuaggugcacgc

SEQ ID NO: 195426 - RNA, 19 nt, Artificial Sequence
  Description of Artificial Sequence: Synthetic oligonucleotide
gugaccaguagggucucgc

SEQ ID NO: 195427 - RNA, 19 nt, Artificial Sequence
  Description of Artificial Sequence: Synthetic oligonucleotide
gaagcggacauaggggcaa

SEQ ID NO: 195428 - RNA, 19 nt, Artificial Sequence
  Description of Artificial Sequence: Synthetic oligonucleotide
cuggaccgagucucucucc

SEQ ID NO: 195429 - RNA, 19 nt, Artificial Sequence
  Description of Artificial Sequence: Synthetic oligonucleotide
aagagguguuauagugggu

SEQ ID NO: 195430 - RNA, 19 nt, Artificial Sequence
  Description of Artificial Sequence: Synthetic oligonucleotide
ccuuagaaccagugugcgg

SEQ ID NO: 195431 - RNA, 19 nt, Artificial Sequence
  Description of Artificial Sequence: Synthetic oligonucleotide
uuucugugucaggaagcgu

SEQ ID NO: 195432 - RNA, 19 nt, Artificial Sequence
  Description of Artificial Sequence: Synthetic oligonucleotide
gcagcguguugauaacgag

SEQ ID NO: 195433 - RNA, 19 nt, Artificial Sequence
  Description of Artificial Sequence: Synthetic oligonucleotide
guggaccagcacucgggag

SEQ ID NO: 195434 - RNA, 19 nt, Artificial Sequence
  Description of Artificial Sequence: Synthetic oligonucleotide
ccauucgagcuguugugcc

SEQ ID NO: 195435 - RNA, 19 nt, Artificial Sequence
  Description of Artificial Sequence: Synthetic oligonucleotide
gccuuagaaccagugugcg

SEQ ID NO: 195436 - RNA, 19 nt, Artificial Sequence
  Description of Artificial Sequence: Synthetic oligonucleotide
aggcguaagugaauucaug

SEQ ID NO: 195437 - RNA, 19 nt, Artificial Sequence
  Description of Artificial Sequence: Synthetic oligonucleotide
auggcauggauaguauguu

SEQ ID NO: 195438 - RNA, 19 nt, Artificial Sequence
  Description of Artificial Sequence: Synthetic oligonucleotide
caccucaguguggaagcgg

SEQ ID NO: 195439 - RNA, 19 nt, Artificial Sequence
  Description of Artificial Sequence: Synthetic oligonucleotide
cauaucgagcccaguccca

SEQ ID NO: 195440 - RNA, 19 nt, Artificial Sequence
  Description of Artificial Sequence: Synthetic oligonucleotide
acucaguucgguggaggcu

SEQ ID NO: 195441 - RNA, 19 nt, Artificial Sequence
  Description of Artificial Sequence: Synthetic oligonucleotide
ggaaguggaccagcacucg

SEQ ID NO: 195442 - RNA, 19 nt, Artificial Sequence
  Description of Artificial Sequence: Synthetic oligonucleotide
cugacccuguaggaacugc

SEQ ID NO: 195443 - RNA, 19 nt, Artificial Sequence
  Description of Artificial Sequence: Synthetic oligonucleotide
auaucgagcccagucccaa

SEQ ID NO: 195444 - RNA, 19 nt, Artificial Sequence
  Description of Artificial Sequence: Synthetic oligonucleotide
ugcgcuuccagggcagcgu

SEQ ID NO: 195445 - RNA, 19 nt, Artificial Sequence
  Description of Artificial Sequence: Synthetic oligonucleotide
uucgggcuagggaggugga

SEQ ID NO: 195446 - RNA, 19 nt, Artificial Sequence
  Description of Artificial Sequence: Synthetic oligonucleotide
cacccucagugccuacugc

SEQ ID NO: 195447 - RNA, 19 nt, Artificial Sequence
  Description of Artificial Sequence: Synthetic oligonucleotide
gcuagggagguggaaauga

SEQ ID NO: 195448 - RNA, 19 nt, Artificial Sequence
  Description of Artificial Sequence: Synthetic oligonucleotide
uucgagcuguugugccuga

SEQ ID NO: 195449 - RNA, 19 nt, Artificial Sequence
  Description of Artificial Sequence: Synthetic oligonucleotide
ccagaugguaauccaugac

SEQ ID NO: 195450 - RNA, 19 nt, Artificial Sequence
  Description of Artificial Sequence: Synthetic oligonucleotide
cgauggaacacagccagcc

SEQ ID NO: 195451 - RNA, 19 nt, Artificial Sequence
  Description of Artificial Sequence: Synthetic oligonucleotide
cuguaucaauguggcagug

SEQ ID NO: 195452 - RNA, 19 nt, Artificial Sequence
  Description of Artificial Sequence: Synthetic oligonucleotide
cacuaggcacugucaccag

SEQ ID NO: 195453 - RNA, 19 nt, Artificial Sequence
  Description of Artificial Sequence: Synthetic oligonucleotide
aggaagcguuugaugccac

SEQ ID NO: 195454 - RNA, 19 nt, Artificial Sequence
  Description of Artificial Sequence: Synthetic oligonucleotide
ugagcccuuguguggcauc

SEQ ID NO: 195455 - RNA, 19 nt, Artificial Sequence
  Description of Artificial Sequence: Synthetic oligonucleotide
ugggcccauaccucauauc

SEQ ID NO: 195456 - RNA, 19 nt, Artificial Sequence
  Description of Artificial Sequence: Synthetic oligonucleotide
cacugggaagguucccauc

SEQ ID NO: 195457 - RNA, 19 nt, Artificial Sequence
  Description of Artificial Sequence: Synthetic oligonucleotide
acagaaccgucagucuccu

SEQ ID NO: 195458 - RNA, 19 nt, Artificial Sequence
  Description of Artificial Sequence: Synthetic oligonucleotide
ccagccucuuggaaugagc

SEQ ID NO: 195459 - RNA, 19 nt, Artificial Sequence
  Description of Artificial Sequence: Synthetic oligonucleotide
ccaauacaauggcacauca

SEQ ID NO: 195460 - RNA, 19 nt, Artificial Sequence
  Description of Artificial Sequence: Synthetic oligonucleotide
cucaugccagugcaccuca

SEQ ID NO: 195461 - RNA, 19 nt, Artificial Sequence
  Description of Artificial Sequence: Synthetic oligonucleotide
gugaauucauggcgcccca

SEQ ID NO: 195462 - RNA, 19 nt, Artificial Sequence
  Description of Artificial Sequence: Synthetic oligonucleotide
gggcugaguagccaaaugu

SEQ ID NO: 195463 - RNA, 19 nt, Artificial Sequence
  Description of Artificial Sequence: Synthetic oligonucleotide
ggagaaaaggugagcuuca

SEQ ID NO: 195464 - RNA, 19 nt, Artificial Sequence
  Description of Artificial Sequence: Synthetic oligonucleotide
gaccgagucucucuccagu

SEQ ID NO: 195465 - RNA, 19 nt, Artificial Sequence
  Description of Artificial Sequence: Synthetic oligonucleotide
gcguuugaugccacagccg

SEQ ID NO: 195466 - RNA, 19 nt, Artificial Sequence
  Description of Artificial Sequence: Synthetic oligonucleotide
aggcuguaucaauguggca

SEQ ID NO: 195467 - RNA, 19 nt, Artificial Sequence
  Description of Artificial Sequence: Synthetic oligonucleotide
auggcgccccauaucagca

SEQ ID NO: 195468 - RNA, 19 nt, Artificial Sequence
  Description of Artificial Sequence: Synthetic oligonucleotide
uccgugucuccagauggua

SEQ ID NO: 195469 - RNA, 19 nt, Artificial Sequence
  Description of Artificial Sequence: Synthetic oligonucleotide
gauaacgaggaggcccuua

SEQ ID NO: 195470 - RNA, 19 nt, Artificial Sequence
  Description of Artificial Sequence: Synthetic oligonucleotide
cugcauuccauacgagucu

SEQ ID NO: 195471 - RNA, 19 nt, Artificial Sequence
  Description of Artificial Sequence: Synthetic oligonucleotide
uuuacccauucgagcuguu

SEQ ID NO: 195472 - RNA, 19 nt, Artificial Sequence
  Description of Artificial Sequence: Synthetic oligonucleotide
ugaauucauggcgccccau

SEQ ID NO: 195473 - RNA, 19 nt, Artificial Sequence
  Description of Artificial Sequence: Synthetic oligonucleotide
ggccucaugccagugcacc

SEQ ID NO: 195474 - RNA, 19 nt, Artificial Sequence
  Description of Artificial Sequence: Synthetic oligonucleotide
gcgguuguccugaagggac

SEQ ID NO: 195475 - RNA, 19 nt, Artificial Sequence
  Description of Artificial Sequence: Synthetic oligonucleotide
caugcaggccaggguagug

SEQ ID NO: 195476 - RNA, 19 nt, Artificial Sequence
  Description of Artificial Sequence: Synthetic oligonucleotide
uacgagucuccagguggga

SEQ ID NO: 195477 - RNA, 19 nt, Artificial Sequence
  Description of Artificial Sequence: Synthetic oligonucleotide
cccauaccucauaucgagc

SEQ ID NO: 195478 - RNA, 19 nt, Artificial Sequence
  Description of Artificial Sequence: Synthetic oligonucleotide
acguacacagcuggaccga

SEQ ID NO: 195479 - RNA, 19 nt, Artificial Sequence
  Description of Artificial Sequence: Synthetic oligonucleotide
cacaggcuuccgugucucc

SEQ ID NO: 195480 - RNA, 19 nt, Artificial Sequence
  Description of Artificial Sequence: Synthetic oligonucleotide
ugccuacugccaggguucc

SEQ ID NO: 195481 - RNA, 19 nt, Artificial Sequence
  Description of Artificial Sequence: Synthetic oligonucleotide
gcagcguauugccauggga

SEQ ID NO: 195482 - RNA, 19 nt, Artificial Sequence
  Description of Artificial Sequence: Synthetic oligonucleotide
gggcagcguguugauaacg

SEQ ID NO: 195483 - RNA, 19 nt, Artificial Sequence
  Description of Artificial Sequence: Synthetic oligonucleotide
guaguguaggugccauugu

SEQ ID NO: 195484 - RNA, 19 nt, Artificial Sequence
  Description of Artificial Sequence: Synthetic oligonucleotide
ggguaggccucugaaggug

SEQ ID NO: 195485 - RNA, 19 nt, Artificial Sequence
  Description of Artificial Sequence: Synthetic oligonucleotide
gcagcguggauaacaccag

SEQ ID NO: 195486 - RNA, 19 nt, Artificial Sequence
  Description of Artificial Sequence: Synthetic oligonucleotide
ccuuaggugcacgcaacag

SEQ ID NO: 195487 - RNA, 19 nt, Artificial Sequence
  Description of Artificial Sequence: Synthetic oligonucleotide
cuauccagcggugggccca

SEQ ID NO: 195488 - RNA, 19 nt, Artificial Sequence
  Description of Artificial Sequence: Synthetic oligonucleotide
gugcgcuuccagggcagcg

SEQ ID NO: 195489 - RNA, 19 nt, Artificial Sequence
  Description of Artificial Sequence: Synthetic oligonucleotide
cagucucacccggaugaug

SEQ ID NO: 195490 - RNA, 19 nt, Artificial Sequence
  Description of Artificial Sequence: Synthetic oligonucleotide
cauucgagcuguugugccu

SEQ ID NO: 195491 - RNA, 19 nt, Artificial Sequence
  Description of Artificial Sequence: Synthetic oligonucleotide
accucuuggcugagccgac

SEQ ID NO: 195492 - RNA, 19 nt, Artificial Sequence
  Description of Artificial Sequence: Synthetic oligonucleotide
gccucguacugaugucccg

SEQ ID NO: 195493 - RNA, 19 nt, Artificial Sequence
  Description of Artificial Sequence: Synthetic oligonucleotide
cccauucgagcuguugugc

SEQ ID NO: 195494 - RNA, 19 nt, Artificial Sequence
  Description of Artificial Sequence: Synthetic oligonucleotide
gccauaggccucauacagc

SEQ ID NO: 195495 - RNA, 19 nt, Artificial Sequence
  Description of Artificial Sequence: Synthetic oligonucleotide
gguugguccgccccuuguc

SEQ ID NO: 195496 - RNA, 19 nt, Artificial Sequence
  Description of Artificial Sequence: Synthetic oligonucleotide
cuccgagcacauuuccgaa

SEQ ID NO: 195497 - RNA, 19 nt, Artificial Sequence
  Description of Artificial Sequence: Synthetic oligonucleotide
ccgagcacauuuccgaaca

SEQ ID NO: 195498 - RNA, 19 nt, Artificial Sequence
  Description of Artificial Sequence: Synthetic oligonucleotide
guagggucucgcugcucca

SEQ ID NO: 195499 - RNA, 19 nt, Artificial Sequence
  Description of Artificial Sequence: Synthetic oligonucleotide
ccaacacuacugcugguga

SEQ ID NO: 195500 - RNA, 19 nt, Artificial Sequence
  Description of Artificial Sequence: Synthetic oligonucleotide
gcguguugauaacgaggag

SEQ ID NO: 195501 - RNA, 19 nt, Artificial Sequence
  Description of Artificial Sequence: Synthetic oligonucleotide
ggcugaagcacaagcaaua

SEQ ID NO: 195502 - RNA, 19 nt, Artificial Sequence
  Description of Artificial Sequence: Synthetic oligonucleotide
ccauacgagucuccaggug

SEQ ID NO: 195503 - RNA, 19 nt, Artificial Sequence
  Description of Artificial Sequence: Synthetic oligonucleotide
cccaauacaauggcacauc

SEQ ID NO: 195504 - RNA, 19 nt, Artificial Sequence
  Description of Artificial Sequence: Synthetic oligonucleotide
ggacauugccucguacuga

SEQ ID NO: 195505 - RNA, 19 nt, Artificial Sequence
  Description of Artificial Sequence: Synthetic oligonucleotide
gaguuccccaacccacgua

SEQ ID NO: 195506 - RNA, 19 nt, Artificial Sequence
  Description of Artificial Sequence: Synthetic oligonucleotide
gccccauaucagcaguaac

SEQ ID NO: 195507 - RNA, 19 nt, Artificial Sequence
  Description of Artificial Sequence: Synthetic oligonucleotide
gcuccguauucgagcaggg

SEQ ID NO: 195508 - RNA, 19 nt, Artificial Sequence
  Description of Artificial Sequence: Synthetic oligonucleotide
ccaucuccgaagccgaaga

SEQ ID NO: 195509 - RNA, 19 nt, Artificial Sequence
  Description of Artificial Sequence: Synthetic oligonucleotide
guauggugugggaaagagu

SEQ ID NO: 195510 - RNA, 19 nt, Artificial Sequence
  Description of Artificial Sequence: Synthetic oligonucleotide
ugcgcuggucgugcucccc

SEQ ID NO: 195511 - RNA, 19 nt, Artificial Sequence
  Description of Artificial Sequence: Synthetic oligonucleotide
gccucuuggaaugagcccu

SEQ ID NO: 195512 - RNA, 19 nt, Artificial Sequence
  Description of Artificial Sequence: Synthetic oligonucleotide
uguccacggcaggcaaacu

SEQ ID NO: 195513 - RNA, 19 nt, Artificial Sequence
  Description of Artificial Sequence: Synthetic oligonucleotide
gggccuuaggugcacgcaa

SEQ ID NO: 195514 - RNA, 19 nt, Artificial Sequence
  Description of Artificial Sequence: Synthetic oligonucleotide
gcguggauaacaccagccu

SEQ ID NO: 195515 - RNA, 19 nt, Artificial Sequence
  Description of Artificial Sequence: Synthetic oligonucleotide
augagcccuuguguggcau

SEQ ID NO: 195516 - RNA, 19 nt, Artificial Sequence
  Description of Artificial Sequence: Synthetic oligonucleotide
cgcgucccaauacaauggc

SEQ ID NO: 195517 - RNA, 19 nt, Artificial Sequence
  Description of Artificial Sequence: Synthetic oligonucleotide
gccuuaggugcacgcaaca

SEQ ID NO: 195518 - RNA, 19 nt, Artificial Sequence
  Description of Artificial Sequence: Synthetic oligonucleotide
gcugaguagccaaauguau

SEQ ID NO: 195519 - RNA, 19 nt, Artificial Sequence
  Description of Artificial Sequence: Synthetic oligonucleotide
cugcgcuggucgugcuccc

SEQ ID NO: 195520 - RNA, 19 nt, Artificial Sequence
  Description of Artificial Sequence: Synthetic oligonucleotide
accucauaucgagcccagu

SEQ ID NO: 195521 - RNA, 19 nt, Artificial Sequence
  Description of Artificial Sequence: Synthetic oligonucleotide
agacagccgguugggucca

SEQ ID NO: 195522 - RNA, 19 nt, Artificial Sequence
  Description of Artificial Sequence: Synthetic oligonucleotide
caucaaggcguaagugaau

SEQ ID NO: 195523 - RNA, 19 nt, Artificial Sequence
  Description of Artificial Sequence: Synthetic oligonucleotide
gcauuccauacgagucucc

SEQ ID NO: 195524 - RNA, 19 nt, Artificial Sequence
  Description of Artificial Sequence: Synthetic oligonucleotide
ggcgguuguccugaaggga

SEQ ID NO: 195525 - RNA, 19 nt, Artificial Sequence
  Description of Artificial Sequence: Synthetic oligonucleotide
cuccguauucgagcaggga

SEQ ID NO: 195526 - RNA, 19 nt, Artificial Sequence
  Description of Artificial Sequence: Synthetic oligonucleotide
cagaaccgucagucuccug

SEQ ID NO: 195527 - RNA, 19 nt, Artificial Sequence
  Description of Artificial Sequence: Synthetic oligonucleotide
ggccuuaggugcacgcaac

SEQ ID NO: 195528 - RNA, 19 nt, Artificial Sequence
  Description of Artificial Sequence: Synthetic oligonucleotide
ggugcccaaacuggauuuc

SEQ ID NO: 195529 - RNA, 19 nt, Artificial Sequence
  Description of Artificial Sequence: Synthetic oligonucleotide
gcggacauaggggcaacca

SEQ ID NO: 195530 - RNA, 19 nt, Artificial Sequence
  Description of Artificial Sequence: Synthetic oligonucleotide
ugauaacgaggaggcccuu

SEQ ID NO: 195531 - RNA, 19 nt, Artificial Sequence
  Description of Artificial Sequence: Synthetic oligonucleotide
cuccgaagccgaagaggaa

SEQ ID NO: 195532 - RNA, 19 nt, Artificial Sequence
  Description of Artificial Sequence: Synthetic oligonucleotide
guuugaugccacagccgcu

SEQ ID NO: 195533 - RNA, 19 nt, Artificial Sequence
  Description of Artificial Sequence: Synthetic oligonucleotide
ggugcacgcaacagcgaga

SEQ ID NO: 195534 - RNA, 19 nt, Artificial Sequence
  Description of Artificial Sequence: Synthetic oligonucleotide
ggcccauaccucauaucga

SEQ ID NO: 195535 - RNA, 19 nt, Artificial Sequence
  Description of Artificial Sequence: Synthetic oligonucleotide
cguaggccacccucagugc

SEQ ID NO: 195536 - RNA, 19 nt, Artificial Sequence
  Description of Artificial Sequence: Synthetic oligonucleotide
guaagacagccgguugggu
